United States Patent Application Publication US 2025/0084491 A1 - sequence listing, part 35

SEQ ID NO: 667135 - DNA, 75 bp, synthetic construct
  source 1..75: mol_type = other DNA
tcgttcagcgcgtgatggttatggatttgaggctaactggtcagagttttacaccacgacccgcaaaccctctgc

SEQ ID NO: 667136 - DNA, 75 bp, synthetic construct
  source 1..75: mol_type = other DNA
acctgataacccatcagttcgcgggtggcaccattggtaacaccatgcacaattactccgtgctggcggatgacc

SEQ ID NO: 667137 - DNA, 75 bp, synthetic construct
  source 1..75: mol_type = other DNA
atgaaatttcccggtaaacgtaaatccaaacattacttccctgtaaacgcacgcgatccgctgttgcagcaaatc

SEQ ID NO: 667138 - DNA, 75 bp, synthetic construct
  source 1..75: mol_type = other DNA
atgaacaccaacggtgccggggatggcgcactggcagcgttgttgcatgacattactgctaatagttatcaccgt

SEQ ID NO: 667139 - DNA, 75 bp, synthetic construct
  source 1..75: mol_type = other DNA
gagacgctgcgtaaagtgacgctgggctatctccggatattttctgaaccaggtcgccagcgcacgctgatcgca

SEQ ID NO: 667140 - DNA, 75 bp, synthetic construct
  source 1..75: mol_type = other DNA
ggtagcggcgaaccattgatactggatgatgattctcatgtgccaccggaattacgtgcggggtatcgcttgctg

SEQ ID NO: 667141 - DNA, 75 bp, synthetic construct
  source 1..75: mol_type = other DNA
gatctgccatgatggctgaaaacgaaagaattaaaacactggagaaggagtaccagcgcaaaacagcagaactga

SEQ ID NO: 667142 - DNA, 75 bp, synthetic construct
  source 1..75: mol_type = other DNA
aacataacctgcaggttgttatcgggccacaagttcagtcagtaaaagatgaaatggccggtctgatgcatactg

SEQ ID NO: 667143 - DNA, 75 bp, synthetic construct
  source 1..75: mol_type = other DNA
tgtgcaggcactgaaggacaatcgggcaattggcgtagtacaacttaatcaacataacctgcaggttgttatcgg

SEQ ID NO: 667144 - DNA, 75 bp, synthetic construct
  source 1..75: mol_type = other DNA
aactgcattacccgtctgcgtttgtctgtgaaagatatgtcgcttgttaatgtgcaggcactgaaggacaatcgg

SEQ ID NO: 667145 - DNA, 75 bp, synthetic construct
  source 1..75: mol_type = other DNA
tgatcaactatttgaaacagttgggcattaccgcgctggagttgctgccggtggcacaatttgccagcgaaccac

SEQ ID NO: 667146 - DNA, 75 bp, synthetic construct
  source 1..75: mol_type = other DNA
tcagggctggccagcattctcacagtggcttgatgccgtgattcagcgagtcgaaatgtacaacgcatcgcttcc

SEQ ID NO: 667147 - DNA, 75 bp, synthetic construct
  source 1..75: mol_type = other DNA
gtggcgcgaggaagcctataccctcgatgaactggctgattatctcgatttgagcgcttcagcgcgccgtagcat

SEQ ID NO: 667148 - DNA, 75 bp, synthetic construct
  source 1..75: mol_type = other DNA
gcatctgctctacgcgctcactcttccggtgagaaccgcgccggatgcatcggcttcggcgctcaaatacgctgc

SEQ ID NO: 667149 - DNA, 75 bp, synthetic construct
  source 1..75: mol_type = other DNA
gttgggtcattgacgatattgtcagcaatcatggcagcgtcttacaagcagttaatagcgagaatgaaaaaacgc

SEQ ID NO: 667150 - DNA, 75 bp, synthetic construct
  source 1..75: mol_type = other DNA
acagggcaggattatgcattgtggctttcaatattaaaaaaaggatttaaggcttatcattatccagttgtttta

SEQ ID NO: 667151 - DNA, 75 bp, synthetic construct
  source 1..75: mol_type = other DNA
tggcttgatgccgtgattcagcgggtcgaaatgtacaacgcatcgcttcccgttccgctttcacctcctgaatgt

SEQ ID NO: 667152 - DNA, 75 bp, synthetic construct
  source 1..75: mol_type = other DNA
aagcctataccctcgatgaactggctgattatctcgatttgagcgcctcagcgcgtcgtagcatcgataaacatt

SEQ ID NO: 667153 - DNA, 75 bp, synthetic construct
  source 1..75: mol_type = other DNA
tggcaggtgatggagtggcgcgaggaagcctataccctcgatgaactggctgattatctcgatttgagcgcctca

SEQ ID NO: 667154 - DNA, 75 bp, synthetic construct
  source 1..75: mol_type = other DNA
cgttccgctttcactggctgaatgccgggctattggcaagagtgttgcgaaatacacgcacagaaaattctcacc

SEQ ID NO: 667155 - DNA, 75 bp, synthetic construct
  source 1..75: mol_type = other DNA
ttcgcattctaccgaaagatatcgccatccttgcccgtttcatccagcagaaccagccacatgcgcagcactggc

SEQ ID NO: 667156 - DNA, 75 bp, synthetic construct
  source 1..75: mol_type = other DNA
aggactatcgaaaaaatcccattttcttcttcagcttattattttgctcattatgccatacatgctatattcagg

SEQ ID NO: 667157 - DNA, 75 bp, synthetic construct
  source 1..75: mol_type = other DNA
cagcattctcacagtggcttgatgccgtgattcagcgtgtcgaaatgtacaacgcatcgcttcccgttccgcttt

SEQ ID NO: 667158 - DNA, 75 bp, synthetic construct
  source 1..75: mol_type = other DNA
cgcgcagcctccttcacagaccgtagaacaaacagtccggcagatttatcagaactataaatcagatgccagtac

SEQ ID NO: 667159 - DNA, 75 bp, synthetic construct
  source 1..75: mol_type = other DNA
ctgcaattgaacgtgcgctgtgtgagaaacttgacgcagatgtgaactacagcggactgatttgcaaaaatccgt

SEQ ID NO: 667160 - DNA, 75 bp, synthetic construct
  source 1..75: mol_type = other DNA
atcgacgttgttgccggaacggccattgccgcagaggcggcgatgggcgaagggcgcaacctgaaaacgccgctc

SEQ ID NO: 667161 - DNA, 75 bp, synthetic construct
  source 1..75: mol_type = other DNA
ttgcggcagaggcggcaatgggggaagggcgtaacctgaaaacgccgcttaccgtggtgtcgttttatctttcac

SEQ ID NO: 667162 - DNA, 75 bp, synthetic construct
  source 1..75: mol_type = other DNA
ctactggggttacaacccggtggcgatgtttgcgctgcatccggcgtatgcctgctcgccagaaacggcgctgga

SEQ ID NO: 667163 - DNA, 75 bp, synthetic construct
  source 1..75: mol_type = other DNA
gcgccgaaatgcgtcgtggtagtggaccactatgattgggaagatgatgccccgccgtgcacgtcgtggggcagc

SEQ ID NO: 667164 - DNA, 75 bp, synthetic construct
  source 1..75: mol_type = other DNA
tggcttgatgctgtgattcagcgtgtcgaaatgtacaacgcatcgcttcccgttccgctttctccgcctgaatgt

SEQ ID NO: 667165 - DNA, 75 bp, synthetic construct
  source 1..75: mol_type = other DNA
gaacgtgctgttgatgcccggacccgataacgccgggggcagtaaggagatggtcgagggttttcgcgcagccat

SEQ ID NO: 667166 - DNA, 75 bp, synthetic construct
  source 1..75: mol_type = other DNA
tttcccttttcatgttatcggcattttcggctgataacctgttgcgctggcatgatgcgcagcattacacggtgc

SEQ ID NO: 667167 - DNA, 75 bp, synthetic construct
  source 1..75: mol_type = other DNA
cgaagagcaagaactggttttacagcggcgcgaaggtaagtgggaaatcgctgattttatccgcccgaacagcgg

SEQ ID NO: 667168 - DNA, 75 bp, synthetic construct
  source 1..75: mol_type = other DNA
gatattgcgctcggtgacaacgatattgaaatccagcgtaacctgttgcaggagatgctggagcgccatccagaa

SEQ ID NO: 667169 - DNA, 75 bp, synthetic construct
  source 1..75: mol_type = other DNA
tgcaatgggcgcacggtaaaccactgaacgtgctgttgatgcccggccccgataacgccggggcagtaaggagat

SEQ ID NO: 667170 - DNA, 75 bp, synthetic construct
  source 1..75: mol_type = other DNA
gggaagagtgattatggctgccagcgatcaaatggtctggcagggggaactggcggttgagcaggctatcaggca

SEQ ID NO: 667171 - DNA, 75 bp, synthetic construct
  source 1..75: mol_type = other DNA
tgctgaaagtcgaaaatgtccagcaggcgtggcagcaatggatcaacaaactgccgcccgcacgtcgtgaggatg

SEQ ID NO: 667172 - DNA, 75 bp, synthetic construct
  source 1..75: mol_type = other DNA
ggatcaactgatcgacgccaatggtggcccggtctggacggaagaaggctttgctgcgctgcatgagaaagtccg

SEQ ID NO: 667173 - DNA, 75 bp, synthetic construct
  source 1..75: mol_type = other DNA
tccttacggcagtgttcaatatcaacaaacgcctgaaagggcgggtggatatgaccatggcgctggggctttctg

SEQ ID NO: 667174 - DNA, 75 bp, synthetic construct
  source 1..75: mol_type = other DNA
cgagagctacggcggatgactggcgtcaccgttgaccgcgaagactggcactgggatcaggtgcccgatcacctg

SEQ ID NO: 667175 - DNA, 75 bp, synthetic construct
  source 1..75: mol_type = other DNA
tgctgaaagtcgaaaacgtccagcaggcgtggcagcaatggatcaacaaactaccgcctgcacgtcgtgaggatg

SEQ ID NO: 667176 - DNA, 75 bp, synthetic construct
  source 1..75: mol_type = other DNA
cgttgccgaaaccggtacgccgtaattttgtacctgcgccaaactatgccgaagcgtttttaggccgcgtcacac

SEQ ID NO: 667177 - DNA, 75 bp, synthetic construct
  source 1..75: mol_type = other DNA
tcctctcacacctgttgtacaccatctatttcgccagccagatgacgctctctttcttctggcctctgccactgg

SEQ ID NO: 667178 - DNA, 75 bp, synthetic construct
  source 1..75: mol_type = other DNA
tccgtgcggataacgccattgcagcggcttgctattttgccggtcacttcctcatcgtccgctcactgtatctct

SEQ ID NO: 667179 - DNA, 75 bp, synthetic construct
  source 1..75: mol_type = other DNA
gaagagttccgttggcctgtctgtacttttgtaggtatgacgctggtaatggtgtggctggcaggtgagctgtgg

SEQ ID NO: 667180 - DNA, 75 bp, synthetic construct
  source 1..75: mol_type = other DNA
aaatccgtcttcatattgtttgcgatgtccctgatgaactttttgatttcacgtttgaatggaaaggtctgaaga

SEQ ID NO: 667181 - DNA, 75 bp, synthetic construct
  source 1..75: mol_type = other DNA
attgtggaagggtgcgatgtgatggtgatgcctcgcctggtaatgatgaatggggatttacaggcgcagacagac

SEQ ID NO: 667182 - DNA, 75 bp, synthetic construct
  source 1..75: mol_type = other DNA
gaagagttccgttggcctatctgtacttttgtcggcatgacgctggtgatggtgtggctggcaggcgagctatgg

SEQ ID NO: 667183 - DNA, 75 bp, synthetic construct
  source 1..75: mol_type = other DNA
caactgccagtcgatcctcgtctggcgcgaatggtgctggaagcgcagaaacatggctgcgtgcgtgaggcgatg

SEQ ID NO: 667184 - DNA, 75 bp, synthetic construct
  source 1..75: mol_type = other DNA
gggtatctccgccgcagaactcggctattctgtacgtccggtcagactggaggatgggcaatcggtattagccgt

SEQ ID NO: 667185 - DNA, 75 bp, synthetic construct
  source 1..75: mol_type = other DNA
atcgttcacaggaagactacgcagagggtctggcaaaagcacgcgactgggtcagcaatgatccgctgatcgcac

SEQ ID NO: 667186 - DNA, 75 bp, synthetic construct
  source 1..75: mol_type = other DNA
attcatgtcattagtgcgttctcaacaatgcacagtctggttatcggacagatcaggacggatgagaaatccaat

SEQ ID NO: 667187 - DNA, 75 bp, synthetic construct
  source 1..75: mol_type = other DNA
aaaagcagctgaaaaaatttctctctgaattatccggtatcccgcaggagcgcatcgatgttctggacggaagtc

SEQ ID NO: 667188 - DNA, 75 bp, synthetic construct
  source 1..75: mol_type = other DNA
gatgtctttgaaatggttctgcgcaaaccacaaaatggcgagtatctgccagataacacagaagaggggcggatt

SEQ ID NO: 667189 - DNA, 75 bp, synthetic construct
  source 1..75: mol_type = other DNA
actttttatgtaacgttattggcgaaaccgataaagaaaaaaccagcctcgatagccttaatgccagtcagttaa

SEQ ID NO: 667190 - DNA, 75 bp, synthetic construct
  source 1..75: mol_type = other DNA
gcagtctcctttcggtccataatagcagaacaaaagaaggagccagaaatgacggtcagatattatatcagttct

SEQ ID NO: 667191 - DNA, 75 bp, synthetic construct
  source 1..75: mol_type = other DNA
ttaaaaaaaatacgtgcacaagatccccgtgttaaagtttttcaaaacgaaaagaacttaggagctgcagtttcg

SEQ ID NO: 667192 - DNA, 75 bp, synthetic construct
  source 1..75: mol_type = other DNA
ttttaggtcgcgtcacgccgttggaactgccgttgctcgacagccttgagcgcgagctacggcggatgaccggcg

SEQ ID NO: 667193 - DNA, 75 bp, synthetic construct
  source 1..75: mol_type = other DNA
gggtttatcccttacggcggtactttcctgatgtttatggaatatgcgcgtaatgcattgcgcatggcggcgctg

SEQ ID NO: 667194 - DNA, 75 bp, synthetic construct
  source 1..75: mol_type = other DNA
acttgcacgaaaagctgccaaacaaagccaagctggggctgtactttaacccgtatggcaaagtgctggagctga

SEQ ID NO: 667195 - DNA, 75 bp, synthetic construct
  source 1..75: mol_type = other DNA
aatgaagacgactgcaaaataagaagaggaaatgcagcagaattattttcagggatacggcacatcgctattaat

SEQ ID NO: 667196 - DNA, 75 bp, synthetic construct
  source 1..75: mol_type = other DNA
tccgtgcggaccacgcgattgccgccgcttgttattttgccggtcacttcctcatcgtccgctcgctgtatctct

SEQ ID NO: 667197 - DNA, 75 bp, synthetic construct
  source 1..75: mol_type = other DNA
ttttacgtaagaccggcaatgcggagatcagacgcctgacgccgccgcaccacgaccggttagccggtttctaca

SEQ ID NO: 667198 - DNA, 75 bp, synthetic construct
  source 1..75: mol_type = other DNA
gggcgattccatcgctgttacggctgaacttgtggccggattcagtgaggttgtggaggcgtataactggcgctg

SEQ ID NO: 667199 - DNA, 75 bp, synthetic construct
  source 1..75: mol_type = other DNA
gtaacaaggcggtggcggcgaatgcaagtttctttaaacaatactatgcttctcgtgaaaacttccttgttaatt

SEQ ID NO: 667200 - DNA, 75 bp, synthetic construct
  source 1..75: mol_type = other DNA
gtcagcaacagcttcaccgatgaagacggaaataccatccagcccccctggaaggagtatgacctgcagatactg

SEQ ID NO: 667201 - DNA, 75 bp, synthetic construct
  source 1..75: mol_type = other DNA
tacttgaacaactggttacaaccataaaagcagctgacgcacgggaagcgagagcgatgtttgatgatgctgact

SEQ ID NO: 667202 - DNA, 75 bp, synthetic construct
  source 1..75: mol_type = other DNA
aacacgttttatccgcatacgcgcgcgggacgcacatggcttcgcgatgcgcagcagctgcgtcgctgtctggct

SEQ ID NO: 667203 - DNA, 75 bp, synthetic construct
  source 1..75: mol_type = other DNA
cgcccgaatgcgcaaacttacgggcagatattgccaacgctggacaggacggcgatgacgcaggagaaataccat

SEQ ID NO: 667204 - DNA, 75 bp, synthetic construct
  source 1..75: mol_type = other DNA
tgaaccagcattcaccacgcttaacacgcgggctgccggagcgtgaagacagtctggaagagtcttactgggatc

SEQ ID NO: 667205 - DNA, 75 bp, synthetic construct
  source 1..75: mol_type = other DNA
cattaccgccaatagctatcaccgcactaacgtgccaaattccagcaagcataaattcacctggctgacttattc

SEQ ID NO: 667206 - DNA, 75 bp, synthetic construct
  source 1..75: mol_type = other DNA
tgaaattgaacttaaacctgtcccaattaaagccggtgactttgaaaaagttgatgatcatgatgaaatagaatt

SEQ ID NO: 667207 - DNA, 75 bp, synthetic construct
  source 1..75: mol_type = other DNA
ttacacgcgcacactgtggacttgccgcccaaatgcacaaacttacggcagatgctgccgacgctggacaggacg

SEQ ID NO: 667208 - DNA, 75 bp, synthetic construct
  source 1..75: mol_type = other DNA
tcgggtgctggtgatgtatcagggaaataaggtggatgaaatgcacgctgctgcgctacctacagcaacgcatcc

SEQ ID NO: 667209 - DNA, 75 bp, synthetic construct
  source 1..75: mol_type = other DNA
gaccggcggcattggcctgccggtcagcttccggctgtctgaacatgccgtcacgttgatgctctgccggaaagc

SEQ ID NO: 667210 - DNA, 75 bp, synthetic construct
  source 1..75: mol_type = other DNA
aggacattctcgaagcgattcgtgaccaccaggtggtgatcgtcgccggggaaacgggttccggtaaaacgactc

SEQ ID NO: 667211 - DNA, 75 bp, synthetic construct
  source 1..75: mol_type = other DNA
ctccaacctataactcacaggattatattattgaaacatacaaatctatacgacgccaagattataaattatggg

SEQ ID NO: 667212 - DNA, 75 bp, synthetic construct
  source 1..75: mol_type = other DNA
ggttgggagcaagcttgtcgttatgctaacgcatgtggcgcattagttgtatcgcgccacggctgcgcccccgcg

SEQ ID NO: 667213 - DNA, 75 bp, synthetic construct
  source 1..75: mol_type = other DNA
acacagaatcaggaaagggaaatttcactgatacggagctcacgaaaatcacaattggacgagaaccagacgcaa

SEQ ID NO: 667214 - DNA, 75 bp, synthetic construct
  source 1..75: mol_type = other DNA
caccgatacggagctcacaaaaatcacaattggacgagaaccagaagaaggacaatcaccgaatgaaaaggcgtg

SEQ ID NO: 667215 - DNA, 75 bp, synthetic construct
  source 1..75: mol_type = other DNA
gtagcgatcaaactgtttgataacccgctggaacagaagcaggcaatgtggaacggtcttcgccgtttactgctg

SEQ ID NO: 667216 - DNA, 75 bp, synthetic construct
  source 1..75: mol_type = other DNA
cgagaaattcgcgataccgccgatgcgctgaacaagctgaacttacgccataccgaaatcttgccgctttatgcg

SEQ ID NO: 667217 - DNA, 75 bp, synthetic construct
  source 1..75: mol_type = other DNA
gctatcgcccgattgttgaagaagccgatgataccgagcgcgatcagttgcaggcgatttttgacgccgtagatg

SEQ ID NO: 667218 - DNA, 75 bp, synthetic construct
  source 1..75: mol_type = other DNA
ggtatcctgctggcagagatccagcaagaccgcctgctgatgcagtacgacaccatcattattgacgaagcgcac

SEQ ID NO: 667219 - DNA, 75 bp, synthetic construct
  source 1..75: mol_type = other DNA
gaaacatcgccgacgactggtctcaggtgcagatgcacagcggtgtacgtgtggacatcctaaatgtgctgggtg

SEQ ID NO: 667220 - DNA, 75 bp, synthetic construct
  source 1..75: mol_type = other DNA
agctgggagcaagcctgccgttatgcaaacgcctgcggcgcgttagtggtatcgcgccacggttgtgcccccgcc

SEQ ID NO: 667221 - DNA, 75 bp, synthetic construct
  source 1..75: mol_type = other DNA
gtggcagatccccggtctgcgtcgtgagctgatcatcgccctgattaaatcgctgccgaagccggtacgccgtaa

SEQ ID NO: 667222 - DNA, 75 bp, synthetic construct
  source 1..75: mol_type = other DNA
ccgagtgccttgctgaccgccagtggttggcagtcgacggggatgttccataacgcttcggggatgctggcgaaa

SEQ ID NO: 667223 - DNA, 75 bp, synthetic construct
  source 1..75: mol_type = other DNA
catcacgtcggcgttttctggcgcaactcggcggcttaactatcgccgggatgctggggccgtcactgttaacgc

SEQ ID NO: 667224 - DNA, 75 bp, synthetic construct
  source 1..75: mol_type = other DNA
gtattcgtaacggtgatgtggtacgcgtctttaacgctcgtggtcaggtgttggctggagcagtggtttctgacc

SEQ ID NO: 667225 - DNA, 75 bp, synthetic construct
  source 1..75: mol_type = other DNA
cggatatccacatcgagacgtttgaaaagagtctggtgatccgttttcgcgttgacggcacattacatgaaatgc

SEQ ID NO: 667226 - DNA, 75 bp, synthetic construct
  source 1..75: mol_type = other DNA
ttggcaggggcagtggtttctgaccgctatgcacccggcgtggcgcgaattcatgaaggggcatggtacgatcca

SEQ ID NO: 667227 - DNA, 75 bp, synthetic construct
  source 1..75: mol_type = other DNA
ataccacactggtggaaatcgaaaaatacacaagcacagtggatcaggtgacggcgtttagcggccccatcgaaa

SEQ ID NO: 667228 - DNA, 75 bp, synthetic construct
  source 1..75: mol_type = other DNA
tatacggtagcgggtaaagagccagtgttcattaacccgcaggatgccagcgcgcgcggtattcgtaacggtgat

SEQ ID NO: 667229 - DNA, 75 bp, synthetic construct
  source 1..75: mol_type = other DNA
ggcaaaggacgcggcgttcatctgccagcgtttgatgacttctggaataacaaagagtacgtcgagtttgaccat

SEQ ID NO: 667230 - DNA, 75 bp, synthetic construct
  source 1..75: mol_type = other DNA
ccgagcgccttgctgaccgccagcggttggcaatcgacgggaatgttccacaatgcttcggggatgctggcgaaa

SEQ ID NO: 667231 - DNA, 75 bp, synthetic construct
  source 1..75: mol_type = other DNA
caaaggctatagcagcactattccgattgcccgttttgtcgatgcgatcctcgaaccggggaaagtgatcaactg

SEQ ID NO: 667232 - DNA, 75 bp, synthetic construct
  source 1..75: mol_type = other DNA
catgagtatctggggcgcgagcatgtgaagcacattgcggttaacccgcaaactgacgtgccgctgcaactggcg

SEQ ID NO: 667233 - DNA, 75 bp, synthetic construct
  source 1..75: mol_type = other DNA
aaagccatggccctgcatggcaataaagtcagtactggtggtgactattccaccggtgcagcgcaggtgatcctg

SEQ ID NO: 667234 - DNA, 75 bp, synthetic construct
  source 1..75: mol_type = other DNA
acgctgcataccaacacggcggtgggggcgattacgcgtttgcaggatatgggcgtggagcctttcctgctctct

SEQ ID NO: 667235 - DNA, 75 bp, synthetic construct
  source 1..75: mol_type = other DNA
agcggcgcgaaggtaagtgggaaatcgctgattttatccgcccgaacagcggcagcctacttaagcagattgagg

SEQ ID NO: 667236 - DNA, 75 bp, synthetic construct
  source 1..75: mol_type = other DNA
ctgattttatccgcccgaacagcggcagcctacttaagcagattgaggcaaaaaccgccgccagattaaaacaat

SEQ ID NO: 667237 - DNA, 75 bp, synthetic construct
  source 1..75: mol_type = other DNA
accaccggggacgcgactgccatccgtacagcatggatatcacggttacccggaacagtccgactggtcaggcta

SEQ ID NO: 667238 - DNA, 75 bp, synthetic construct
  source 1..75: mol_type = other DNA
agcggattctgcagccagggggacggagcctgttttgaagggcgctggcactggcagccagcgacaccccggaaa

SEQ ID NO: 667239 - DNA, 75 bp, synthetic construct
  source 1..75: mol_type = other DNA
cccggcacggggaaaagcccgcgactggtaccgtcagcatcatgctgacagcaactggtatgaaaacgtgtatga

SEQ ID NO: 667240 - DNA, 75 bp, synthetic construct
  source 1..75: mol_type = other DNA
atgatctggcagcctgagttcacagataaaacactctccaggaaacccggggcggttcagtatgccgtgcttaaa

SEQ ID NO: 667241 - DNA, 75 bp, synthetic construct
  source 1..75: mol_type = other DNA
tgagcttaaacagaaaaaggcaggtaagcgggtacgtgaaacttcatctcgtattgtgtgggccagggagttctg

SEQ ID NO: 667242 - DNA, 75 bp, synthetic construct
  source 1..75: mol_type = other DNA
atacccaagggtgatggcaataagggtggatcttcatatgcccgtacgcaggccgctctgcgatatgctccttgc

SEQ ID NO: 667243 - DNA, 75 bp, synthetic construct
  source 1..75: mol_type = other DNA
ttgattgcggccagaaagtcagaggccttagcaaattattggtattacaacagcaatattaggggcgtggtatac

SEQ ID NO: 667244 - DNA, 75 bp, synthetic construct
  source 1..75: mol_type = other DNA
gtttctcaatggcgctttcattaatgctgggggaagcgggattcacgccaacatcgattgataccaccgccgatg

SEQ ID NO: 667245 - DNA, 75 bp, synthetic construct
  source 1..75: mol_type = other DNA
tcaccggggacgttactgccatccgtacagcatggatatcactgttacccggaacagtccgactggtcaggcaat

SEQ ID NO: 667246 - DNA, 75 bp, synthetic construct
  source 1..75: mol_type = other DNA
aggcggaggtccggggctgttcagcagaacagcgtctggcggcaagaaaagccagagcggccccccctgatgcag

SEQ ID NO: 667247 - DNA, 75 bp, synthetic construct
  source 1..75: mol_type = other DNA
ccctcgacatgttctatgaagaactggaacgcgtgcagaaaactcacgggccgagtgccttgctgaccgccagtg

SEQ ID NO: 667248 - DNA, 75 bp, synthetic construct
  source 1..75: mol_type = other DNA
agcgcaaggctacccagtgcctctgctttatggtaagcgtcgaatcggcggagcgattatttctgccggaattta

SEQ ID NO: 667249 - DNA, 75 bp, synthetic construct
  source 1..75: mol_type = other DNA
cggggtattacagacaattcttggcgccgtgctcgtcgttgttggggtagccattggctatttctcaggcggcac

SEQ ID NO: 667250 - DNA, 75 bp, synthetic construct
  source 1..75: mol_type = other DNA
ccacctgtaagacgtctctcgattttagctcatatattattgaagctatccgagaaaagcttgagagagatggtg

SEQ ID NO: 667251 - DNA, 75 bp, synthetic construct
  source 1..75: mol_type = other DNA
tgaatccctggggcttgatagtgaatccatccgcctggtggaggtgattcatcaacgttttgtccttgccggagc

SEQ ID NO: 667252 - DNA, 75 bp, synthetic construct
  source 1..75: mol_type = other DNA
aatctataacgtttgtaattatcagaaaccggcaacagatgaacccgcattgttgctgtgggacgatgttattac

SEQ ID NO: 667253 - DNA, 75 bp, synthetic construct
  source 1..75: mol_type = other DNA
cgcagagtactctgccgtatatggctccccattttgatcagattgaaaatcaacactatcgcccggcattcgatg

SEQ ID NO: 667254 - DNA, 75 bp, synthetic construct
  source 1..75: mol_type = other DNA
ctgtattcgtgaagccttttcccgtcacgggcttccgttgccggtcagtccgtccgggcgtgaactgcgcggcta

SEQ ID NO: 667255 - DNA, 75 bp, synthetic construct
  source 1..75: mol_type = other DNA
taatccatgtcgcccgtcgggagctacaactcgacgacgacacctaccgtgcctttctgatgcagaacacgggca

SEQ ID NO: 667256 - DNA, 75 bp, synthetic construct
  source 1..75: mol_type = other DNA
taattcatgtcgcccggcgtgatctacaactcgacgatgacacttaccgcgcctttctggtgcagtgcacaggca

SEQ ID NO: 667257 - DNA, 75 bp, synthetic construct
  source 1..75: mol_type = other DNA
agtaaaacatctctggattttagctcatatattattgaggctataagagagaagcttgaacgtgacggtgcaata

SEQ ID NO: 667258 - DNA, 75 bp, synthetic construct
  source 1..75: mol_type = other DNA
ttagatatctcagctttccctggaatgtctggatctcctgccatgatagtggccaaaggagggtatggtgataaa

SEQ ID NO: 667259 - DNA, 75 bp, synthetic construct
  source 1..75: mol_type = other DNA
cgtgaactgcgcggctatgatgccatgacggcggcttatgcccatgccagaaagacgcggaggatggcacaatga

SEQ ID NO: 667260 - DNA, 75 bp, synthetic construct
  source 1..75: mol_type = other DNA
aaaaccatgccagaagagttgcaacagaaaatgcgcaatgccagcctgttcaataaaggctatgagatgagcgag

SEQ ID NO: 667261 - DNA, 75 bp, synthetic construct
  source 1..75: mol_type = other DNA
catcaggcgacaatgatgaattcaaagatatgaaagcgtcactacgcgccagttatcagcataataccgagaacg

SEQ ID NO: 667262 - DNA, 75 bp, synthetic construct
  source 1..75: mol_type = other DNA
tcatgcttcagaactcattcgctctttgctgaaaagctcgcgcccatcagggctggcacaggcgatcatggaagt

SEQ ID NO: 667263 - DNA, 75 bp, synthetic construct
  source 1..75: mol_type = other DNA
ggctcccgccgttgccgccgtattgtggatcttcctgtttaaccctggtcgcgggctgatcactcattttctcgc

SEQ ID NO: 667264 - DNA, 75 bp, synthetic construct
  source 1..75: mol_type = other DNA
atgaacaataacgatctctttcaggcatcacgtcggcgttttctggcacaactcggcggcttaaccgtcgccggg

SEQ ID NO: 667265 - DNA, 75 bp, synthetic construct
  source 1..75: mol_type = other DNA
attacacgctcaaaaaggcccgctatttctcagctcagggccatcagcgttactgcaatgtggtggcgaagcgcg

SEQ ID NO: 667266 - DNA, 75 bp, synthetic construct
  source 1..75: mol_type = other DNA
ttactggcggcggcccggatcacgtcggaagacgatgaaagcatcacgccggtggcggaagatgcctcggtactg

SEQ ID NO: 667267 - DNA, 75 bp, synthetic construct
  source 1..75: mol_type = other DNA
agttttccaggcattgctcggaacggctttggtggctgcggccatatggatgccaggagttagtattgcagcaag

SEQ ID NO: 667268 - DNA, 75 bp, synthetic construct
  source 1..75: mol_type = other DNA
gaagccatgccggaaactctgcaacagaaaatgcgcaatgccagcctgttcaataaaggctatgagatgagcgaa

SEQ ID NO: 667269 - DNA, 75 bp, synthetic construct
  source 1..75: mol_type = other DNA
aatttataacgtttgcaattatcaaaaacccgccgctggtgagcctgccttgttgctgtgggatgacgttattac

SEQ ID NO: 667270 - DNA, 75 bp, synthetic construct
  source 1..75: mol_type = other DNA
ggtcgcgccgcagctcatcatcaccgttatcttttttatctggcctgcgggcgaagcgttgtggtactcgctaca

SEQ ID NO: 667271 - DNA, 75 bp, synthetic construct
  source 1..75: mol_type = other DNA
taggcggcatagtgcagatgctctcaccgcagacaaccggacttgccagcaagcaatcatcggacaacaaagcca

SEQ ID NO: 667272 - DNA, 75 bp, synthetic construct
  source 1..75: mol_type = other DNA
aaaaatggcatgaccttcgcggtgtttcgcggtaagcgcaacataggcgtgcaggacttccaggagctggcaggc

SEQ ID NO: 667273 - DNA, 75 bp, synthetic construct
  source 1..75: mol_type = other DNA
tgaagcctcgacgtggcgtaaagggctgacagattactgccaatgttcgcctgtcacgccagttcctgaaattaa

SEQ ID NO: 667274 - DNA, 75 bp, synthetic construct
  source 1..75: mol_type = other DNA
tgaagactcaacgtggcgtaaagggcttacggattattgccaatgttcgcctgtcactcccattcctgaaataaa

SEQ ID NO: 667275 - DNA, 75 bp, synthetic construct
  source 1..75: mol_type = other DNA
aggcctggcccttacataccccgtttgtgattgctcggggaagtcgcagtgaagcgcgcgtggtggtggttgaac

SEQ ID NO: 667276 - DNA, 75 bp, synthetic construct
  source 1..75: mol_type = other DNA
cacgcaattggtaagacccgcagtatcgagcgtatcaacaaagcgctggattttattgctgaacgcgaaaatcag

SEQ ID NO: 667277 - DNA, 75 bp, synthetic construct
  source 1..75: mol_type = other DNA
atctgcgtccggtagcgcgtcagccgctggaagtggttcgtgacaaactggccgcgattactgactggaccgctg

SEQ ID NO: 667278 - DNA, 75 bp, synthetic construct
  source 1..75: mol_type = other DNA
cagttcaagttgtttatccgtcatggtgatttgctcaaagaaccggttaaaggggaatttagtagttatggatta

SEQ ID NO: 667279 - DNA, 75 bp, synthetic construct
  source 1..75: mol_type = other DNA
ccgccctatattattcacccgcaacagttgcagcgtctgaccgcagcggttaatcgtgcggtgcaggatgaaaca

SEQ ID NO: 667280 - DNA, 75 bp, synthetic construct
  source 1..75: mol_type = other DNA
agtggcgatgaaaatggcgttgcagtactggcaagccaaaggcgaagcgcgccagcattttctgaccttccgcaa

SEQ ID NO: 667281 - DNA, 75 bp, synthetic construct
  source 1..75: mol_type = other DNA
atgtcaattataaaaaactgcttatcattaattaacaatgcattaaatatacaaaaaacatcatattctctgacc

SEQ ID NO: 667282 - DNA, 75 bp, synthetic construct
  source 1..75: mol_type = other DNA
gcggtgatcctcgactccacatttgcttcttactcaaccatcgccaaccaaatgatccccggcagcggctactta

SEQ ID NO: 667283 - DNA, 75 bp, synthetic construct
  source 1..75: mol_type = other DNA
gtgatgtaaacccacaacggctggtgctgttcgggcagagtattggcggggcgaatattcttgatgttattggtc

SEQ ID NO: 667284 - DNA, 75 bp, synthetic construct
  source 1..75: mol_type = other DNA
tggcaaactgatttacctgatgccgccctatattattctcccgcaacagttgcagcgtctgaccgcagcggttaa

SEQ ID NO: 667285 - DNA, 75 bp, synthetic construct
  source 1..75: mol_type = other DNA
tgataacgaacaatatgtcagctatgaaacgctggcccgattttttgttgcccatgttaacgacaacatcgcatt

SEQ ID NO: 667286 - DNA, 75 bp, synthetic construct
  source 1..75: mol_type = other DNA
tgtgcgacgtgttaacttacgttgagcggtttgagccggaagcggtgattgacgtggcgacgctgaccggtgctt

SEQ ID NO: 667287 - DNA, 75 bp, synthetic construct
  source 1..75: mol_type = other DNA
tccacctggaatggcaggtgatggagtggcgcgaggaagcctataccctcgatgaactggctgattatctcgatt

SEQ ID NO: 667288 - DNA, 75 bp, synthetic construct
  source 1..75: mol_type = other DNA
gatacgcacacaccagaaattcaggctgcacgcggtcgcaagggcggttctaagtctaagcgcagcacagtagct

SEQ ID NO: 667289 - DNA, 75 bp, synthetic construct
  source 1..75: mol_type = other DNA
tccggcggtatctcgatcaagccttccgaaggcatggatgagatgaagtacgatatgtgcggcgcggcggcagtt

SEQ ID NO: 667290 - DNA, 75 bp, synthetic construct
  source 1..75: mol_type = other DNA
tcgtcctggtggggcgattaccgcaggttgcttcctgtcgcgctttacccgtaagtataactgggcgcacctgga

SEQ ID NO: 667291 - DNA, 75 bp, synthetic construct
  source 1..75: mol_type = other DNA
tactggtctgatggcgaaccacaatccgctggcccatgagctgattgctgcatctgaacaatccggtgaccgcgc

SEQ ID NO: 667292 - DNA, 75 bp, synthetic construct
  source 1..75: mol_type = other DNA
atggcaatcgtggtctggcgctgttggacctgatcgaagagggcaacctggggctgatccgcgcggtagacgcgc

SEQ ID NO: 667293 - DNA, 75 bp, synthetic construct
  source 1..75: mol_type = other DNA
ctggtcgtgaagattgcccgccgttatggcaatcgtggtctggcgctgttggacctgatcgaagagggcaacctg

SEQ ID NO: 667294 - DNA, 75 bp, synthetic construct
  source 1..75: mol_type = other DNA
gtggcgttctgggaagcggataacgattgtgaatggatgttctcctacatgattggtaatgatggtttcctccac

SEQ ID NO: 667295 - DNA, 75 bp, synthetic construct
  source 1..75: mol_type = other DNA
cacagtatgtggctgatacgcacacgccagaaattcaggctgcacgcggtcgcaagggcggttctaagtctaagc

SEQ ID NO: 667296 - DNA, 75 bp, synthetic construct
  source 1..75: mol_type = other DNA
taaatttaaaaaagcattaaggcaatgggaaatttatagaaaatatgaaaatttgagctttttatatagctgcta

SEQ ID NO: 667297 - DNA, 75 bp, synthetic construct
  source 1..75: mol_type = other DNA
acagaccggcaagacgaacacctttacgttccaccacttcaccaatcagcgccgcgtctttccccagtggatggg

SEQ ID NO: 667298 - DNA, 75 bp, synthetic construct
  source 1..75: mol_type = other DNA
cggcggtggatcgtgagatttttggttcctcggataccgatgccgatccggtggcagtggtacgggccatgtatc

SEQ ID NO: 667299 - DNA, 75 bp, synthetic construct
  source 1..75: mol_type = other DNA
ctcgacttatgaagaactggccgagaagactggcattagcgtgagtacgctggtcaggatagcgtccggcaaaac

SEQ ID NO: 667300 - DNA, 75 bp, synthetic construct
  source 1..75: mol_type = other DNA
ctgtagtattttgtctgggggttgtcctcagtctgtttggttttgagtcaggcattcatcatcaaccagccagtg

SEQ ID NO: 667301 - DNA, 75 bp, synthetic construct
  source 1..75: mol_type = other DNA
gtgagctacatcgtatcgcggatgccctgcaggcggtccagaaacgtaacttctggcagttacaggctgaaatca

SEQ ID NO: 667302 - DNA, 75 bp, synthetic construct
  source 1..75: mol_type = other DNA
gataccggcattggtattcctgaacgcgatcaatcgcgcttattccaggccttccgacaggctgatgccagtatt

SEQ ID NO: 667303 - DNA, 75 bp, synthetic construct
  source 1..75: mol_type = other DNA
ccgcttgcggtttcaacggaatatggcatgagcctgcaaaatcgcgaatctattggtcaattgatcagcgttttg

SEQ ID NO: 667304 - DNA, 75 bp, synthetic construct
  source 1..75: mol_type = other DNA
acattatgagtatggcgacacttctctatttttacatatacttgacgctactcttaaagagcttaaatctgcaaa

SEQ ID NO: 667305 - DNA, 75 bp, synthetic construct
  source 1..75: mol_type = other DNA
tcagtcaccggggacgttactgccatccgtacagcatggatatcactgttacccggaacagtccgactggtcagg

SEQ ID NO: 667306 - DNA, 75 bp, synthetic construct
  source 1..75: mol_type = other DNA
tctgatgccgctgtggatgaggcccttctcatcaacgaatacaccttcaccgaagccggtctgcgcgccggctga

SEQ ID NO: 667307 - DNA, 75 bp, synthetic construct
  source 1..75: mol_type = other DNA
atgagcagaattatcaccaccaccgtgtatacactgaatgagctgtcatccaccgcacaggaaaaagcccgcgac

SEQ ID NO: 667308 - DNA, 75 bp, synthetic construct
  source 1..75: mol_type = other DNA
gtgacctccatcgtatcgcggatgccctgcaggcggtacagaaacgtaacttctggcagttacaggctgaaatca

SEQ ID NO: 667309 - DNA, 75 bp, synthetic construct
  source 1..75: mol_type = other DNA
gtgaactgcatcgtatcgcggatgccctgcaggcggtccagaaacgtaacttctggcagttacaggctgaaatca

SEQ ID NO: 667310 - DNA, 75 bp, synthetic construct
  source 1..75: mol_type = other DNA
tactttcatgaaattttcccatatttccttttagatcgtgcaacagcgaaaaggcgtaggaattggcttgattag

SEQ ID NO: 667311 - DNA, 75 bp, synthetic construct
  source 1..75: mol_type = other DNA
cgacgaatcgcccagtagtgatgccaaaaatagccagaatatgctgggatatattgcgcttgagctggatcttaa

SEQ ID NO: 667312 - DNA, 75 bp, synthetic construct
  source 1..75: mol_type = other DNA
tatccgcgtgtgtatcaactgaagcgtgactttccgcatctgacaatgtcgattaacggtggtatcaagtcgctg

SEQ ID NO: 667313 - DNA, 75 bp, synthetic construct
  source 1..75: mol_type = other DNA
tcgcgcgacgacggttggcaacgccaggtgagcgacgatcgtcgcaagcaatataacgatcgccgccgccagttt

SEQ ID NO: 667314 - DNA, 75 bp, synthetic construct
  source 1..75: mol_type = other DNA
gcaggcgattaacgacgcttataaccctgaccgtgggcgagactatgaagattcgcgcgacgacggctggcagcg

SEQ ID NO: 667315 - DNA, 75 bp, synthetic construct
  source 1..75: mol_type = other DNA
atttttggttcctcggataccgatgccgatccggtggcggtggtacgagccatgtatccgtacattgaacgcgag

SEQ ID NO: 667316 - DNA, 75 bp, synthetic construct
  source 1..75: mol_type = other DNA
tgtcgattaacggtggtattaagtcgctggaagaggctaaagcgcatttgcaacatatggatggtgtgatggttg

SEQ ID NO: 667317 - DNA, 75 bp, synthetic construct
  source 1..75: mol_type = other DNA
tgcttgactggacggacagacattgccgttatttcctgcgtctgctttcccgcaatacgttgttgtataccgaaa

SEQ ID NO: 667318 - DNA, 75 bp, synthetic construct
  source 1..75: mol_type = other DNA
aggcctggttgatttgattcataaactgcatggcagttgcggctatagcggtgtgccacgtatgaagaatctctg

SEQ ID NO: 667319 - DNA, 75 bp, synthetic construct
  source 1..75: mol_type = other DNA
gatgtaaccggcccgattcgcaacatggtgaataccgtcgaccgcattcgccgtgggcaactcgatagccgcgta

SEQ ID NO: 667320 - DNA, 75 bp, synthetic construct
  source 1..75: mol_type = other DNA
aaacgccggttatcgcggtaacggcgcatgcaatggccgggcaaaaagagaagctgcttggcgcagggatgagcg

SEQ ID NO: 667321 - DNA, 75 bp, synthetic construct
  source 1..75: mol_type = other DNA
ctcgaaatcgaatttaaagacgaaacggtcacaaagtggacgttctcagaaaataacagcaagatgaaaaccggt

SEQ ID NO: 667322 - DNA, 75 bp, synthetic construct
  source 1..75: mol_type = other DNA
tgaggaaaaacgccctctttggcaggtatatcaagattgtttagattattcagatacatcgaatcgagtactgaa

SEQ ID NO: 667323 - DNA, 75 bp, synthetic construct
  source 1..75: mol_type = other DNA
catcaggcagttgaacgggcgaaacagatgcccttcgatttgatcttaatggatattcagatgccggacatggac

SEQ ID NO: 667324 - DNA, 75 bp, synthetic construct
  source 1..75: mol_type = other DNA
ctgggctggcaccatccgccatttgagatccctaaagagatttatcacgcctgggatgcccgtgaaaaaggcgaa

SEQ ID NO: 667325 - DNA, 75 bp, synthetic construct
  source 1..75: mol_type = other DNA
aataaacagtaccgactgatttttaaatgggttaatggcaaggccgaagaattgtatttagatccacacgactac

SEQ ID NO: 667326 - DNA, 75 bp, synthetic construct
  source 1..75: mol_type = other DNA
agatggcagaaaaagcactgaaacaggataatgaaaacagcgcatccgaagttgatgctaatggtgaaaatgaag

SEQ ID NO: 667327 - DNA, 75 bp, synthetic construct
  source 1..75: mol_type = other DNA
tgtcaaatagtgtcgccatgcgccttcaggtacgggatgtggagcgttcgctgtctgcctcacgcccggcggatg

SEQ ID NO: 667328 - DNA, 75 bp, synthetic construct
  source 1..75: mol_type = other DNA
agggcaaagcggcgtggcgtcgatgtgaaagtggttctggactggaaagccaataccggcaagcaaaaccaggcg

SEQ ID NO: 667329 - DNA, 75 bp, synthetic construct
  source 1..75: mol_type = other DNA
gcgagcgggatgaacgaacattatttagtggtttgtcgtttacgctgaatgcaggagagtgggtacaaattaccg

SEQ ID NO: 667330 - DNA, 75 bp, synthetic construct
  source 1..75: mol_type = other DNA
gttgtgatggtaccttactacgagttctttcagactgaaccatacagcaatgcattaatgagtctggcagatgaa

SEQ ID NO: 667331 - DNA, 75 bp, synthetic construct
  source 1..75: mol_type = other DNA
ggaagatgcgagtagcgatactgttgataacggaacattgcattcccggctgacaacatatgccaaatatttagg

SEQ ID NO: 667332 - DNA, 75 bp, synthetic construct
  source 1..75: mol_type = other DNA
ggcaatgccttctcaacgacgctagctgctgctaacaacctagtcttgttgttacgctttctagagagtcgtgac

SEQ ID NO: 667333 - DNA, 75 bp, synthetic construct
  source 1..75: mol_type = other DNA
atggtagtggatcgtgcttctggccttcccatgtattacccaactttgtttttaacaacccaaatccgcaataaa

SEQ ID NO: 667334 - DNA, 75 bp, synthetic construct
  source 1..75: mol_type = other DNA
acaaacccggacaccatccatccacaactgcttacggctgaagataccaccgccgaagatgcggctgtagcacgc

SEQ ID NO: 667335 - DNA, 75 bp, synthetic construct
  source 1..75: mol_type = other DNA
cgccgaagatgctacagtagcacgcagtaacgcgctgtcggcgctgctggaccacgaaggagtaatggcggatat

SEQ ID NO: 667336 - DNA, 75 bp, synthetic construct
  source 1..75: mol_type = other DNA
tttcggctgaatgcccctgcggcccggatctggagtatgatccagagtacctgttgctgttcacccgcgccttag

SEQ ID NO: 667337 - DNA, 75 bp, synthetic construct
  source 1..75: mol_type = other DNA
caactacacccgtgctgcagaccgttcgaattcggagaatgtgcttgtggtatgggatgacacggtcgttgcgca

SEQ ID NO: 667338 - DNA, 75 bp, synthetic construct
  source 1..75: mol_type = other DNA
tggctatttccggcagatttttcagaaacatactggtttaacgccagcagcgtggaagcggcgttacagcaagga

SEQ ID NO: 667339 - DNA, 75 bp, synthetic construct
  source 1..75: mol_type = other DNA
gacgatgtctatcgtccagtagatcgaccgacagacccttatgcgcaagctggagagtcaataggcggttatctt

SEQ ID NO: 667340 - DNA, 75 bp, synthetic construct
  source 1..75: mol_type = other DNA
cgcgtgacatcaccgcgactggatgaagtgacgatcaaaaagataggcatacccgtgtactttatcagttatgtg

SEQ ID NO: 667341 - DNA, 75 bp, synthetic construct
  source 1..75: mol_type = other DNA
gtacgggcaatatttgtcgttctccaataggagaacggcttttacgaaaattgcttccctcaaaggtgattaatt

SEQ ID NO: 667342 - DNA, 75 bp, synthetic construct
  source 1..75: mol_type = other DNA
tcgccagttcttaagcgaacaggaaaagcatcaacgcactccggcgctggagtttattgtgctgctcattttgca

SEQ ID NO: 667343 - DNA, 75 bp, synthetic construct
  source 1..75: mol_type = other DNA
acaacatgttggggtggaggattttcccgccgatctcaaattttactggctgcattttgaggttaaagcgccgga

SEQ ID NO: 667344 - DNA, 75 bp, synthetic construct
  source 1..75: mol_type = other DNA
atccggcatggggaaagatgcgatcgctcccaaagaatatgtctttcagcacatgagggaatcacagtaaacgga

SEQ ID NO: 667345 - DNA, 75 bp, synthetic construct
  source 1..75: mol_type = other DNA
atccggcatggggaaagatgtgaccgttcccaaagagcatgtctgtcagaacatgaaggtatcacagtaaacgga

SEQ ID NO: 667346 - DNA, 75 bp, synthetic construct
  source 1..75: mol_type = other DNA
gtagctttaactacactcgctctgctgcatcgcggaatagcgagaatgtgctggttattaatgaggtgccggaag

SEQ ID NO: 667347 - DNA, 75 bp, synthetic construct
  source 1..75: mol_type = other DNA
atgccaaaaacgccacgtgtttacgtggcgttttgcttttatatctgtaatcttaatgccgcgctggcgatgtta

SEQ ID NO: 667348 - DNA, 75 bp, synthetic construct
  source 1..75: mol_type = other DNA
ttggggaactgaaaggtgatctgaatattgcgatggctgatgctaaatctgttgataatagtataaagatcgtta

SEQ ID NO: 667349 - DNA, 75 bp, synthetic construct
  source 1..75: mol_type = other DNA
aaccaggtcagaatattatactggatgtaaatgttgatcatggaccatttccactaggtcagctttcaaagggta

SEQ ID NO: 667350 - DNA, 75 bp, synthetic construct
  source 1..75: mol_type = other DNA
tgaccaaagacttcttcaagccacatgagctggatgatctgcgagattttgctcagtgcaaacaaagaaaggggc

SEQ ID NO: 667351 - DNA, 75 bp, synthetic construct
  source 1..75: mol_type = other DNA
ttgttgtatctgaacttcccctcggttagcatcaggctattcgcgtctgacgagagtaacaccttgaaacgctgg

SEQ ID NO: 667352 - DNA, 75 bp, synthetic construct
  source 1..75: mol_type = other DNA
ctgcaaaagctgatcgaacaactgcttgattacaaccgtaaacaggcggacggcgcggtggcactggagaacgtc

SEQ ID NO: 667353 - DNA, 75 bp, synthetic construct
  source 1..75: mol_type = other DNA
atgctggcattcttgcttattttgctccctctgctggtgctggcatggcaagcctggcaaagcctgaatgcactt

SEQ ID NO: 667354 - DNA, 75 bp, synthetic construct
  source 1..75: mol_type = other DNA
tcaggcggcgctggttaaccgcactacgcttattgatgcccggcgtagtgaagcgatgaccaacgcggcgctgga

SEQ ID NO: 667355 - DNA, 75 bp, synthetic construct
  source 1..75: mol_type = other DNA
cgataaactttaccaggcattgcgtcaggatttgaacaatctggctcaacttcagtgtaacaacagcggtcccga

SEQ ID NO: 667356 - DNA, 75 bp, synthetic construct
  source 1..75: mol_type = other DNA
ctggagatggagcgcagctaccgtcagtattgcgtgctggacgaccctacgcttgcgaaggtttatcaaagccag

SEQ ID NO: 667357 - DNA, 75 bp, synthetic construct
  source 1..75: mol_type = other DNA
atctcagaggctgttgccaaaatgatcgcggataacaaacgaggttttttattccctgatgctgattaccctcgc

SEQ ID NO: 667358 - DNA, 75 bp, synthetic construct
  source 1..75: mol_type = other DNA
gacgaacctgtaagccaaacttacaagttgccagttaatacaccttgccaagatgcgccagcccatatctggctg

SEQ ID NO: 667359 - DNA, 75 bp, synthetic construct
  source 1..75: mol_type = other DNA
attgcagaatgtcatgttaactgcctgattgaaacagatgctcaggcttatgcaaacgctgaattcatagcagag

SEQ ID NO: 667360 - DNA, 75 bp, synthetic construct
  source 1..75: mol_type = other DNA
gaacgatggtctaaaaccagccagcgtaaatcggcatctggcaataatgagcgggatgttcaccaagttaattga

SEQ ID NO: 667361 - DNA, 75 bp, synthetic construct
  source 1..75: mol_type = other DNA
aacccgacctaccaccgggtcaggctacgcacgcattgcggcacagcttcgccacgcactttatgataaacggag

SEQ ID NO: 667362 - DNA, 75 bp, synthetic construct
  source 1..75: mol_type = other DNA
aaccagtgacccttgtgcctttcagattactaagtcattgataagccaatacagcactgtgcggcgttctcaagg

SEQ ID NO: 667363 - DNA, 75 bp, synthetic construct
  source 1..75: mol_type = other DNA
aatacgctacccggtgcaatcccacttctggagcaattaccaattgggtgccgtcttggccctcgctgtccgtat

SEQ ID NO: 667364 - DNA, 75 bp, synthetic construct
  source 1..75: mol_type = other DNA
cagagctgaaacttatcgactcctttatacaagacagcctgaaactccttacgcctacatttgaatcgaaccttc

SEQ ID NO: 667365 - DNA, 75 bp, synthetic construct
  source 1..75: mol_type = other DNA
aactagggtccataacgagagaattgatgcctacatcggtcgtaatgaggaatctctgagaagtctggcgcagtt

SEQ ID NO: 667366 - DNA, 75 bp, synthetic construct
  source 1..75: mol_type = other DNA
tggctgatgaacattcggatatcgtaaaaaatatggtattcgaaactttaaaaaaactttatggaaaagaaaaga

SEQ ID NO: 667367 - DNA, 75 bp, synthetic construct
  source 1..75: mol_type = other DNA
catactcgtgtagatgagcgtaaagatgagctagggagcttatttaatattagtgatatcgccgctgaaattgaa

SEQ ID NO: 667368 - DNA, 75 bp, synthetic construct
  source 1..75: mol_type = other DNA
tatcattaaacgtggtgctacggtgatcaagctcgaagaagctcgttcattacaaggttgggcgggtgggcgtct

SEQ ID NO: 667369 - DNA, 75 bp, synthetic construct
  source 1..75: mol_type = other DNA
ttaacgatcttaagattatcgaaaaagaaaccctggcagcccaaaaagcacaaggtaaaatcgaaaagctccgca

SEQ ID NO: 667370 - DNA, 75 bp, synthetic construct
  source 1..75: mol_type = other DNA
attccctgatgctgattaccctcgcttcagacgaacaatgaaagcaataaaaccggatttgccaatggggcaagc

SEQ ID NO: 667371 - DNA, 75 bp, synthetic construct
  source 1..75: mol_type = other DNA
atctcagaggctgttgccaaaatgatcgcggataacaaacgaggtttttattccctgatgctgattaccctcgct

SEQ ID NO: 667372 - DNA, 75 bp, synthetic construct
  source 1..75: mol_type = other DNA
tacattctcctggttcaggacgcagagccaaacttcgatgtaaatggcaactctccgggaactccggatagttgg

SEQ ID NO: 667373 - DNA, 75 bp, synthetic construct
  source 1..75: mol_type = other DNA
tggctgatcagcaggcagagcagttcaagactgttgtgtttgagacacttaaaaagatttatggcaaggatgata

SEQ ID NO: 667374 - DNA, 75 bp, synthetic construct
  source 1..75: mol_type = other DNA
ggctatcgcgacgaagctgaacgcttggctgatcagcaggcagagcagttcaagactgttgtgtttgagacactt

SEQ ID NO: 667375 - DNA, 75 bp, synthetic construct
  source 1..75: mol_type = other DNA
tcaccgcgccgccatgcttcaggccgaacctgtaagtaatagtgatgagttaccgctggactatctgcaaggaca

SEQ ID NO: 667376 - DNA, 75 bp, synthetic construct
  source 1..75: mol_type = other DNA
tatgttattattgccacgcctaccgattatgacccgaaaacaaattattttaatacctcaagcgtggaagcggtc

SEQ ID NO: 667377 - DNA, 75 bp, synthetic construct
  source 1..75: mol_type = other DNA
agctgaggcgattaaactttttgccaacacctatctggcgatgcgtgtagcgtatttcaatgaacttgatagtta

SEQ ID NO: 667378 - DNA, 75 bp, synthetic construct
  source 1..75: mol_type = other DNA
gattcagggtattatgaagcgaatcaaggcgaaaggtgtgcctgtaatcgtttatgagccagctatgaaagagga

SEQ ID NO: 667379 - DNA, 75 bp, synthetic construct
  source 1..75: mol_type = other DNA
aatacttatctggcgatgcgtgtggcttattttaatgaactagatacttacgctgaaagtctgggtcttaactcc

SEQ ID NO: 667380 - DNA, 75 bp, synthetic construct
  source 1..75: mol_type = other DNA
tgattggcgagcaatccgatcgcgctcaacgttttgcagcgttattacaggaaggcgccattaagcaagatatac

SEQ ID NO: 667381 - DNA, 75 bp, synthetic construct
  source 1..75: mol_type = other DNA
atccgtgatgtgacagaaattaatcccgacgctgtaatgattataaaatcaactatccctgtcggttttacagag

SEQ ID NO: 667382 - DNA, 75 bp, synthetic construct
  source 1..75: mol_type = other DNA
tgctgaaagccaggggctgaacagcaagcagattatcgaaggggtatgtctggatccgcgtatcggcaaccacta

SEQ ID NO: 667383 - DNA, 75 bp, synthetic construct
  source 1..75: mol_type = other DNA
gaaggcgcgattaagcaggatatcccgaccctgtttaccgactccactgaagcggaagcgatcaaactgttcgcg

SEQ ID NO: 667384 - DNA, 75 bp, synthetic construct
  source 1..75: mol_type = other DNA
ggtatgttggtatatcaattgctacattactttcacaaaaacatgatattatcgctctcgatatagatcctaaga

SEQ ID NO: 667385 - DNA, 75 bp, synthetic construct
  source 1..75: mol_type = other DNA
ggttgaagatccatgagccaaaactggatgtgcgtgacgtgctacccctttcccgattagacgtgttgatcacac

SEQ ID NO: 667386 - DNA, 75 bp, synthetic construct
  source 1..75: mol_type = other DNA
tccgtcccgtatcgttattggtgaacgttccgaacgagccgggcgttttgccgcgttgctgcaggaaggtgcggt

SEQ ID NO: 667387 - DNA, 75 bp, synthetic construct
  source 1..75: mol_type = other DNA
tcattggtgagcgctctgcgcgtgccgaacgtttcgcagacctgctgaaggaaggcgcgattaagcaggatatcc

SEQ ID NO: 667388 - DNA, 75 bp, synthetic construct
  source 1..75: mol_type = other DNA
taataccaagtcagtggagtcggtcattcacgacgtgcagaaaatcaatcctgccgccactatcattgtgaaatc

SEQ ID NO: 667389 - DNA, 75 bp, synthetic construct
  source 1..75: mol_type = other DNA
aacagctgttagccaactatcaggaggtgccaaacaacctgatccgcgctatcgtcgatgcgaataccacccgta

SEQ ID NO: 667390 - DNA, 75 bp, synthetic construct
  source 1..75: mol_type = other DNA
ttaatctgcatcaccggtcgcccggagagcagcatggcgcgcgccgcagatgtgcatctgtgtgttaaagtagcg

SEQ ID NO: 667391 - DNA, 75 bp, synthetic construct
  source 1..75: mol_type = other DNA
cgccagattattgagggtgtatgccttgacccgcgtatcggtaatcactacaacaacccgtcattcggatatggt

SEQ ID NO: 667392 - DNA, 75 bp, synthetic construct
  source 1..75: mol_type = other DNA
gaaggcgctattaagcaagacataccaatattgtttactgactcaaccgaggctgaggcgattaaactttttgcc

SEQ ID NO: 667393 - DNA, 75 bp, synthetic construct
  source 1..75: mol_type = other DNA
gataaccttcatccgtcacgtattgtcatcggtgagcgttcagaacgcgcagaacgttttgctgcgttgttacag

SEQ ID NO: 667394 - DNA, 75 bp, synthetic construct
  source 1..75: mol_type = other DNA
caacacgaataccgtcgaagccgtgatccgcgatgtaatgagtattaatccgcatgccgttatggtcatcaagtc

SEQ ID NO: 667395 - DNA, 75 bp, synthetic construct
  source 1..75: mol_type = other DNA
cctgattgcgcaaaaccacgaagtggttgccctggatatcgtacaggccaaagtggatatgcttaaccagaagat

SEQ ID NO: 667396 - DNA, 75 bp, synthetic construct
  source 1..75: mol_type = other DNA
cgctcgtaagccgaaagtggtgggtgtatatcgcctgatcatgaagagtggttcggacaatttccgcgcctcttc

SEQ ID NO: 667397 - DNA, 75 bp, synthetic construct
  source 1..75: mol_type = other DNA
tctaaccgcatggcggaagagctggcggatgtggcggacaaggtctacacccgcgatctgtttggtaacgattaa

SEQ ID NO: 667398 - DNA, 75 bp, synthetic construct
  source 1..75: mol_type = other DNA
aaaatgtgatcttttcgccggagtttttacgcgaagggaaagcactttatgataacttacacccatcacgcattg

SEQ ID NO: 667399 - DNA, 75 bp, synthetic construct
  source 1..75: mol_type = other DNA
gaaggggcactaaagaaagatattccgaccctatttaccgactcgaccgaagccgaagctattaagctgttcgct

SEQ ID NO: 667400 - DNA, 75 bp, synthetic construct
  source 1..75: mol_type = other DNA
taatacctcaagtgtcgagtctgttattcgcgacgtggttgcaattaatccagatgcagtaatggtaattaagtc

SEQ ID NO: 667401 - DNA, 75 bp, synthetic construct
  source 1..75: mol_type = other DNA
aaattcgcgtaatttattctattatttatccttatgctaaatttctacttgatgttaatgtcagtaaagtcagcg

SEQ ID NO: 667402 - DNA, 75 bp, synthetic construct
  source 1..75: mol_type = other DNA
acgctgtttttcagtaatccgcgcggcacaccgttaacttcgctactggcgatcacactggcaatgctcaccacc

SEQ ID NO: 667403 - DNA, 75 bp, synthetic construct
  source 1..75: mol_type = other DNA
ggttgatcgcaaaagcacctttgatgaattgttcgcactttaccgttatgtcttaaccggcttgttgctggtggc

SEQ ID NO: 667404 - DNA, 75 bp, synthetic construct
  source 1..75: mol_type = other DNA
cacggtgttttacagcgattacgccagccaacaggcgaagcaggatatctcaaccctgggcgtggcaacgctgct

SEQ ID NO: 667405 - DNA, 75 bp, synthetic construct
  source 1..75: mol_type = other DNA
gctctgctaccggcacgccttatgagttgcgtaagctgatgcgctttgccgcccgcagcaaggttgcgccgacca

SEQ ID NO: 667406 - DNA, 75 bp, synthetic construct
  source 1..75: mol_type = other DNA
atacggtcggtgcggttctcacgccgctgtctgttccggcctttacgttaattgcgggcgatcgcagcgtctctg

SEQ ID NO: 667407 - DNA, 75 bp, synthetic construct
  source 1..75: mol_type = other DNA
ggctatgttacccaaacagacgatgggcgatattcctccggcgctgaatgacggctttatgcagcgtcttgaccg

SEQ ID NO: 667408 - DNA, 75 bp, synthetic construct
  source 1..75: mol_type = other DNA
caaaaaaatgatgtatgccgatccgcaggcgctgcacgctctactcgataaactggcgaaaagcgtcactttgta

SEQ ID NO: 667409 - DNA, 75 bp, synthetic construct
  source 1..75: mol_type = other DNA
gagttgttcgcactttaccgttatgtcttaaccggcttgttactggtggcgctggcggtgattacctgcggcgca

SEQ ID NO: 667410 - DNA, 75 bp, synthetic construct
  source 1..75: mol_type = other DNA
acctgatgacgctggtgatgagcatgagcgttatcggcatttccgctgactacacgctctattatctcaccgagc

SEQ ID NO: 667411 - DNA, 75 bp, synthetic construct
  source 1..75: mol_type = other DNA
aaaattgccgctcagcatggaatctctttggaggggcatagtggacagcagtttacttcctctttggggcgacaa

SEQ ID NO: 667412 - DNA, 75 bp, synthetic construct
  source 1..75: mol_type = other DNA
gatcctctcccagctttattctgcgttctccggggtaagcggcaaggagctgcaaaacgatccgctgatgttaat

SEQ ID NO: 667413 - DNA, 75 bp, synthetic construct
  source 1..75: mol_type = other DNA
atgtcgatgataaaaagctatgccgcaaaagaagcgggcggcgaactggaagtttatgagtacgatcccggtgaa

SEQ ID NO: 667414 - DNA, 75 bp, synthetic construct
  source 1..75: mol_type = other DNA
gtgaaaacttattacccatctctgaattgttacccatcttcctatccagaattatccgggaatctgttaactcta

SEQ ID NO: 667415 - DNA, 75 bp, synthetic construct
  source 1..75: mol_type = other DNA
catagcgcgaacgctaaccctcatcttgcgcccggttcgggtgttcagaataccatctggaaatgtgagccttaa

SEQ ID NO: 667416 - DNA, 75 bp, synthetic construct
  source 1..75: mol_type = other DNA
gaatagccgtccacagcagctttttatttatttttcgcgaactgatgctctttctaatagagtaaatttagcgat

SEQ ID NO: 667417 - DNA, 75 bp, synthetic construct
  source 1..75: mol_type = other DNA
cgatacactctcagtagaatcagtagcatgtgacgtactaaatataaatcctaatgcaactatcataatcaaatc

SEQ ID NO: 667418 - DNA, 75 bp, synthetic construct
  source 1..75: mol_type = other DNA
cgactaaaacgcgatctaaacacgaataatattatcttttccccagaatttttacgtgaaggtaaagctctttat

SEQ ID NO: 667419 - DNA, 75 bp, synthetic construct
  source 1..75: mol_type = other DNA
ttgcattgtccacgccgggttacaggacgatgactggaaagatgagttgcgtcgatatggtatatccgagggcgc

SEQ ID NO: 667420 - DNA, 75 bp, synthetic construct
  source 1..75: mol_type = other DNA
cttctcaggcaaaagatttggctggcgtaatgaaggcctcccaacgaggtgatggatttctccatgatggaggaa

SEQ ID NO: 667421 - DNA, 75 bp, synthetic construct
  source 1..75: mol_type = other DNA
gccgtgtcttcgatatgggcgtggatggtcgtcagttaggtattgccgaggtgtcttcgatatgggcgtggatgt

SEQ ID NO: 667422 - DNA, 75 bp, synthetic construct
  source 1..75: mol_type = other DNA
gggtgattccactgccggaaaatatcgacattgaatctgccgggccgctgttgtgcggcggtatcacggtcttta

SEQ ID NO: 667423 - DNA, 75 bp, synthetic construct
  source 1..75: mol_type = other DNA
tttattcaggttgctccccaatttacactcctgtatacccttaaacttgtcacgcttattaatcttggaatccag

SEQ ID NO: 667424 - DNA, 75 bp, synthetic construct
  source 1..75: mol_type = other DNA
gatttattcattaccagggggcggttaattgcctaccgttacttctttgcatggtgtgactacctgcttgagaag

SEQ ID NO: 667425 - DNA, 75 bp, synthetic construct
  source 1..75: mol_type = other DNA
gcttgggagcaggagcttgagaaagttgcctccggctccgggaacatgtctgtcttcatgaagcagatttccacc

SEQ ID NO: 667426 - DNA, 75 bp, synthetic construct
  source 1..75: mol_type = other DNA
tcatactcgtagcaatttgaaggcgctgaaagggcgctatgagatggttaatattaagctcgataaaaccggggg

SEQ ID NO: 667427 - DNA, 75 bp, synthetic construct
  source 1..75: mol_type = other DNA
accggtggtctgacggaagcgctggcgctggcgactgaagcgcgtgcacaaggttttcgtgatgctgggctgcat

SEQ ID NO: 667428 - DNA, 75 bp, synthetic construct
  source 1..75: mol_type = other DNA
ggtcagtttcgccgatcttgacggaccgacctggctggcggtagatgtggaaccggcgcttcagttcacgacggg

SEQ ID NO: 667429 - DNA, 75 bp, synthetic construct
  source 1..75: mol_type = other DNA
ctaaataaagcctttgaggaaaaatttccgctgaaagaattaaataatccagagcatgacagttacgcaatcagt

SEQ ID NO: 667430 - DNA, 75 bp, synthetic construct
  source 1..75: mol_type = other DNA
gagaagatacaaaaacagggagatgattatttattcgctgtaaaagaaaactatggacggctaaataaagtcgtt

SEQ ID NO: 667431 - DNA, 75 bp, synthetic construct
  source 1..75: mol_type = other DNA
gaagaggaaatgcagcagaattattttcagggatacggcacattgctattaatattttgacgaatgataaggtat

SEQ ID NO: 667432 - DNA, 75 bp, synthetic construct
  source 1..75: mol_type = other DNA
gtggttaccttcaccggtaacgtcatcgttacccagggcaccatcaaaattaatgccgataaagtggtcgtcacc

SEQ ID NO: 667433 - DNA, 75 bp, synthetic construct
  source 1..75: mol_type = other DNA
acgttttgagccggaagcagtgattgacgtggcgacgctgaccggtgcctgcgtgatcgcgctgggccatcacat

SEQ ID NO: 667434 - DNA, 75 bp, synthetic construct
  source 1..75: mol_type = other DNA
ggtgggtaaaggtttaaccttcgactccggcggtatctccatcaagccttcagaaggcatggatgagatgaagta

SEQ ID NO: 667435 - DNA, 75 bp, synthetic construct
  source 1..75: mol_type = other DNA
accgttctggtgccgtcgcagctgcaggacaaaaacaataaaggccagaccccggcacagaagaagggtaattaa

SEQ ID NO: 667436 - DNA, 75 bp, synthetic construct
  source 1..75: mol_type = other DNA
ttacctggtgaaagagcagaaaatgcaggctttcagcgacaaaggcaagcgcgtaaccaccgttctggtgccgtc

SEQ ID NO: 667437 - DNA, 75 bp, synthetic construct
  source 1..75: mol_type = other DNA
cctcccagatgcactacgaactggcaaaagattttgttgtacttactggcaatgcctttctgaagcagatcgaca

SEQ ID NO: 667438 - DNA, 75 bp, synthetic construct
  source 1..75: mol_type = other DNA
ctcgatttcttgaagcaatatggtgattttgaaaatggtattcctgttcacgatactattgccagagttgtatcc

SEQ ID NO: 667439 - DNA, 75 bp, synthetic construct
  source 1..75: mol_type = other DNA
gaaaaacgggcagacgttcagccagatcgccatcaactggcatagcgagcataaacgctggtctgagcattacgc

SEQ ID NO: 667440 - DNA, 75 bp, synthetic construct
  source 1..75: mol_type = other DNA
aaaaacttccgctgaaagaattaaataatccagagcatgacagttacgcaattagtgaaaagagtcacggcagag

SEQ ID NO: 667441 - DNA, 75 bp, synthetic construct
  source 1..75: mol_type = other DNA
tgcactggcgcctggacgtggtaatgaatgaagacgactgcagaataagaagaggaaatgcagcagaattatttt

SEQ ID NO: 667442 - DNA, 75 bp, synthetic construct
  source 1..75: mol_type = other DNA
tttgtgccgttatttcgggtgcagaaggttgggaagatatagaggattttggggaaacacatctcgattttttaa

SEQ ID NO: 667443 - DNA, 75 bp, synthetic construct
  source 1..75: mol_type = other DNA
gctgcactggcgtctggacgtggtaatgaatgaagacgactgcaaaataagaagaggaaacgcagcagaattatt

SEQ ID NO: 667444 - DNA, 75 bp, synthetic construct
  source 1..75: mol_type = other DNA
tcccaagcatgacagttgtagattcaattggtcaacgcaacagttatgtgaaaacatggggttgcggaggttttt

SEQ ID NO: 667445 - DNA, 75 bp, synthetic construct
  source 1..75: mol_type = other DNA
ggagaataagctgcactggcgtctggacgtggtaatgaatgaagacgactgcaaaataagaagaggaaatgcagc

SEQ ID NO: 667446 - DNA, 75 bp, synthetic construct
  source 1..75: mol_type = other DNA
gatcaagacggatgagaagtccaatgagattacagccattcctgaacttcttaacatgctggatattaaaggaaa

SEQ ID NO: 667447 - DNA, 75 bp, synthetic construct
  source 1..75: mol_type = other DNA
catgctggatattaaaggaaaaatcatcacaactgatgcgatgggttgccagaaagatattgcagagaagataca

SEQ ID NO: 667448 - DNA, 75 bp, synthetic construct
  source 1..75: mol_type = other DNA
aactgatgcgatgggttgccagaaagatattgcagagaagatacaaaaacagggaggtgattatttattcgcggt

SEQ ID NO: 667449 - DNA, 75 bp, synthetic construct
  source 1..75: mol_type = other DNA
aattatgcgtggcagtctcctttcggtctataatagcagaacaaaagaaagagccagaaattgacggtcagatat

SEQ ID NO: 667450 - DNA, 75 bp, synthetic construct
  source 1..75: mol_type = other DNA
tttacgccgttatttctggtgcagaaagttgggaagatatagaggatttcggggaaacacatctcgatttcttga

SEQ ID NO: 667451 - DNA, 75 bp, synthetic construct
  source 1..75: mol_type = other DNA
ccactggcccatgaactgattgccgcgtctgaacaatccggtgaccgcgcatggcgcttaccgctgggtgacgag

SEQ ID NO: 667452 - DNA, 75 bp, synthetic construct
  source 1..75: mol_type = other DNA
cggcactcttatgacaagagtcgccgcaggggagcgattcatgtcattagtgcgttctcaacaatgcacagtctg

SEQ ID NO: 667453 - DNA, 75 bp, synthetic construct
  source 1..75: mol_type = other DNA
attcaaggcagggttaagacgtaagatgcgaaaagcagccatggacagaaactatctcgcgtcagtccttggatt

SEQ ID NO: 667454 - DNA, 75 bp, synthetic construct
  source 1..75: mol_type = other DNA
aggccaccctgtacgaaaacgggctgtatacgcgccatatcagactcagtcgcccagtatctgacagcaaatacc

SEQ ID NO: 667455 - DNA, 75 bp, synthetic construct
  source 1..75: mol_type = other DNA
tacaaaaacagggcggtgattatttattcgctgtaaaaggaaatcagggtcggctaaataaagcctttgaggaaa

SEQ ID NO: 667456 - DNA, 75 bp, synthetic construct
  source 1..75: mol_type = other DNA
tgccagaaagatattgcagagaagatacaaaaacagagaggtgattatttattcgcggtaaaaggaaaccagggg

SEQ ID NO: 667457 - DNA, 75 bp, synthetic construct
  source 1..75: mol_type = other DNA
tgacaagagtcgccgtaagggagcgattcatatcattagtgcgttctcaacaatgcacagtctggtcatcggaca

SEQ ID NO: 667458 - DNA, 75 bp, synthetic construct
  source 1..75: mol_type = other DNA
tcccccgctggcaccatgcccgcccgacacattgcgaaaaaccagccggattggaacatctcaccctgacctttt

SEQ ID NO: 667459 - DNA, 75 bp, synthetic construct
  source 1..75: mol_type = other DNA
gctggggcaagttccggcgatgatcctgccgcgcgaatgggaaaccctcagtaactttgccagccatcccatcgg

SEQ ID NO: 667460 - DNA, 75 bp, synthetic construct
  source 1..75: mol_type = other DNA
aaccggaccgctggttaccgttactgctggggcaagttccggcgatgatcctgccgcgcgaatgggaaaccctca

SEQ ID NO: 667461 - DNA, 75 bp, synthetic construct
  source 1..75: mol_type = other DNA
tgctgaaattgtttcgccaacgccctggacgctggatatccatcttacgcagcccgatcgttggttgccgttact

SEQ ID NO: 667462 - DNA, 75 bp, synthetic construct
  source 1..75: mol_type = other DNA
ggctggctgacgtgggaggcggaggttggccgcggtaaacgctcgcgtttgaccttcctctacaccggacttgcg

SEQ ID NO: 667463 - DNA, 75 bp, synthetic construct
  source 1..75: mol_type = other DNA
ctcggtggccagtttttgttgaccacttcaggtcgtgaactggaaatggacgatgtgatcgcctctttaaaacga

SEQ ID NO: 667464 - DNA, 75 bp, synthetic construct
  source 1..75: mol_type = other DNA
actcttatgacaagagtcgccgtaagggagcgattcatgtcattagtgcgttctcaacaatgcacagtctggtca

SEQ ID NO: 667465 - DNA, 75 bp, synthetic construct
  source 1..75: mol_type = other DNA
atatttctattgtccccgattacagacaagcctggaaagtggaacataaattgtcggatattctactgttgacta

SEQ ID NO: 667466 - DNA, 75 bp, synthetic construct
  source 1..75: mol_type = other DNA
gggagcgattcatgtcattagcgcgttctcaacaatgcacagtctggtcatcggacagatcaagacggatgagaa

SEQ ID NO: 667467 - DNA, 75 bp, synthetic construct
  source 1..75: mol_type = other DNA
agggctgaagaaattatgcgtggcagtctcctttcggtcaataatagcagaacaaaagaaagagccagaaatgac

SEQ ID NO: 667468 - DNA, 75 bp, synthetic construct
  source 1..75: mol_type = other DNA
attatcacaactgatgcgatgggttgccagaaagatattgcagagaagatacaaaaacgggggaggtgattattt

SEQ ID NO: 667469 - DNA, 75 bp, synthetic construct
  source 1..75: mol_type = other DNA
aaatccgtcttcatattgtttgcgatgtccctgatgaacttattgatttcacgtttgaatggaaagggcagccat

SEQ ID NO: 667470 - DNA, 75 bp, synthetic construct
  source 1..75: mol_type = other DNA
aatttccgctgaaagaattaaataatccagagcatgacagttacgcaatgagtgaaaagagtcacggcagagaag

SEQ ID NO: 667471 - DNA, 75 bp, synthetic construct
  source 1..75: mol_type = other DNA
actatacggcgttaagtgagcgcgccagcgaatatttattggacgtgatccgtagcaaaccaaaggccgtgattt

SEQ ID NO: 667472 - DNA, 75 bp, synthetic construct
  source 1..75: mol_type = other DNA
aataagctgcactggcgtctggacgtggtaatgaatgaagacgactgcaaaataagaagaggaaatgcagcagaa

SEQ ID NO: 667473 - DNA, 75 bp, synthetic construct
  source 1..75: mol_type = other DNA
atggaacttaaaaaattgatggaacatatttctattattcccgattacagacaagcctggaaagtgggacataaa

SEQ ID NO: 667474 - DNA, 75 bp, synthetic construct
  source 1..75: mol_type = other DNA
cgaaccgggagaaagcctgcaaccggcctgccatatcagccaacttgacgcgaaaacccagcaacatgagatgtt

SEQ ID NO: 667475 - DNA, 75 bp, synthetic construct
  source 1..75: mol_type = other DNA
aaaatccaccagcagcacgttgatgtcagccaactgaccttcgtgaagctcgacgaatgggtgaatctgccatta

SEQ ID NO: 667476 - DNA, 75 bp, synthetic construct
  source 1..75: mol_type = other DNA
caggatgcgacagaacgttttctcacagctaaagtctccaccgctatccctgcttcgtttttatggctgcataac

SEQ ID NO: 667477 - DNA, 75 bp, synthetic construct
  source 1..75: mol_type = other DNA
aggtggattattgcgggatctgccattccgatctatcgatgatcgacaatgaatggggattttcacaatatccgc

SEQ ID NO: 667478 - DNA, 75 bp, synthetic construct
  source 1..75: mol_type = other DNA
gcctgtattagcggtaatcagatcaactgcgagcaaggtgcggtgccaacaattatgaatcgcggcggttttgcc

SEQ ID NO: 667479 - DNA, 75 bp, synthetic construct
  source 1..75: mol_type = other DNA
tgccaccagccgcgttggggtaattggtattggcgggctggggcatatcgctataaaacttctgcacgcaatggg

SEQ ID NO: 667480 - DNA, 75 bp, synthetic construct
  source 1..75: mol_type = other DNA
tttgcattacctgagcagttagcgagagaagagtcgccagctcagacgcaggccgggaataataaccatgaataa

SEQ ID NO: 667481 - DNA, 75 bp, synthetic construct
  source 1..75: mol_type = other DNA
accttactcactgttcactggtatctgcgaaatcatacgctctaccgtgctgttcgtacttctgtggatggcagg

SEQ ID NO: 667482 - DNA, 75 bp, synthetic construct
  source 1..75: mol_type = other DNA
atacggtcggtgcggtcctcacgccgctgtctgttccggcctttacgttaattgcgggcgaccgcagcgtctctg

SEQ ID NO: 667483 - DNA, 75 bp, synthetic construct
  source 1..75: mol_type = other DNA
atctttatgagcggcgagcgggaaattcgtgataccgccgatgcgctgaacaagctgaatctgcgtcataccgaa

SEQ ID NO: 667484 - DNA, 75 bp, synthetic construct
  source 1..75: mol_type = other DNA
ttcagataagcgtattctgcaagcgatggagcaaattagcggagcctgtttaagattctgtgtaaatgccttttc

SEQ ID NO: 667485 - DNA, 75 bp, synthetic construct
  source 1..75: mol_type = other DNA
gcgctgaaaggcaaagtgcaggaaacactgtctgcggtggcggatgacggtattgagcagagcggcttacatatc

SEQ ID NO: 667486 - DNA, 75 bp, synthetic construct
  source 1..75: mol_type = other DNA
atgagcggtaccgaagcggccgaactactgcgccgtgaagccatccgctttgagaatgaatcacaggagctgcac

SEQ ID NO: 667487 - DNA, 75 bp, synthetic construct
  source 1..75: mol_type = other DNA
ggggcgcgggattaaaggactgatcggccatacccagccgcgtcgcctggcggcaagaacggtggcgaaccgtat

SEQ ID NO: 667488 - DNA, 75 bp, synthetic construct
  source 1..75: mol_type = other DNA
ctgggatcaggtgcctgatcacctgaaaattaccttccgcgtggtggatgacaaaaacaagaagctaaaagaagg

SEQ ID NO: 667489 - DNA, 75 bp, synthetic construct
  source 1..75: mol_type = other DNA
tctaatgaaataagaacaaaccttaagcattcttttacaggatcttttggtcagcgatttgatgttgttatatca

SEQ ID NO: 667490 - DNA, 75 bp, synthetic construct
  source 1..75: mol_type = other DNA
ctacgatcggcaacaattgaaatctcgtatcgttcattttggatttggagccttccaccgtgcgcatcaggcgct

SEQ ID NO: 667491 - DNA, 75 bp, synthetic construct
  source 1..75: mol_type = other DNA
aacaaactggccgttactggcgttaggagtcgcaggctggatgcgctatgtgagcggcgttgatgatgccggaaa

SEQ ID NO: 667492 - DNA, 75 bp, synthetic construct
  source 1..75: mol_type = other DNA
tgcgtgaaaaggcagagaaagcaacgtgtggtgtgtggtggctcgaatatggagagagccgatttgattgtgatg

SEQ ID NO: 667493 - DNA, 75 bp, synthetic construct
  source 1..75: mol_type = other DNA
atgagcaagattgactatcaggcactgcgtgccaaggcagaaaaagcaacgtgtggtgtatggtcgctcgaatat

SEQ ID NO: 667494 - DNA, 75 bp, synthetic construct
  source 1..75: mol_type = other DNA
atgaatacaatcgcctccgttacgctcccgcatcatgtacacgctccacgatacgatcgacagcagttgcaatca

SEQ ID NO: 667495 - DNA, 75 bp, synthetic construct
  source 1..75: mol_type = other DNA
gccgccagaacattaatgctggatgagcaagcgccgacgctgcggatcaaagatgtcgatttaacacaatatgcg

SEQ ID NO: 667496 - DNA, 75 bp, synthetic construct
  source 1..75: mol_type = other DNA
acgaaagtgctgtcgcttatgtagaagagaagtgttcctcggaagctttagcagggagtaagaaagcgatagcaa

SEQ ID NO: 667497 - DNA, 75 bp, synthetic construct
  source 1..75: mol_type = other DNA
tacagatgctcctgaaatcatgacagaatatgctaaccgccccatagaagcacttatcctcgataaccgagctgc

SEQ ID NO: 667498 - DNA, 75 bp, synthetic construct
  source 1..75: mol_type = other DNA
ctaagtcactgttgcaggccctgctcgacaatgcattaacacaccatcccgatttactaacctttgttcgcttac

SEQ ID NO: 667499 - DNA, 75 bp, synthetic construct
  source 1..75: mol_type = other DNA
ggagtggcagccagtagaggacgactgcaatcctcgcgaagtaatcataacccactggatgccgcttccagcagc

SEQ ID NO: 667500 - DNA, 75 bp, synthetic construct
  source 1..75: mol_type = other DNA
atagaaatcgcgatgaaggctattggtgtaccggttaagtggactaatggcgatgcagaaaagcgcatgactggc

SEQ ID NO: 667501 - DNA, 75 bp, synthetic construct
  source 1..75: mol_type = other DNA
agatggatggaaaccatcccttaccttgatacgatttatcgtctgctgagacaacttaaaatcccaattcttaga

SEQ ID NO: 667502 - DNA, 75 bp, synthetic construct
  source 1..75: mol_type = other DNA
tgaaatggtttaaccctgaaaaaggttttggtttcatcacgccgaaagatggtagcaaagatgtgtttgtccatt

SEQ ID NO: 667503 - DNA, 75 bp, synthetic construct
  source 1..75: mol_type = other DNA
gctcaacaactcggtacaccttatccgatttcagataagcgtattttgcaggcgatggagcagattagcggttaa

SEQ ID NO: 667504 - DNA, 75 bp, synthetic construct
  source 1..75: mol_type = other DNA
ggtcggacctatccggtggaagtgcgctatcgcccgattgttgaagaagccgacgacactgagcgcgaccagttg

SEQ ID NO: 667505 - DNA, 75 bp, synthetic construct
  source 1..75: mol_type = other DNA
gtgaaaaaagcggaaataaaggtggagctgctgccgaaatatgccgcctgggcggagggcgtcttggctgccgga

SEQ ID NO: 667506 - DNA, 75 bp, synthetic construct
  source 1..75: mol_type = other DNA
gggcggctaaataaagcctttgaggaaaaatttccgctgaaagaattaaataatccagcgcatgacagttacgca

SEQ ID NO: 667507 - DNA, 75 bp, synthetic construct
  source 1..75: mol_type = other DNA
accaggttgaggagagtgggtttgagtggcagatccctggtctgcgccgcgaactggtgattgctctgattaaat

SEQ ID NO: 667508 - DNA, 75 bp, synthetic construct
  source 1..75: mol_type = other DNA
ggccatacccagccgcgtcgcctggcggcaagaacggtggcgaaccgtattgcggaagagctgaaaacggagccg

SEQ ID NO: 667509 - DNA, 75 bp, synthetic construct
  source 1..75: mol_type = other DNA
gtgcgtaaaggcgacccagtccgcaataacctgcgcggcttcctgagaccgatgggcgtaattctggtgttggca

SEQ ID NO: 667510 - DNA, 75 bp, synthetic construct
  source 1..75: mol_type = other DNA
tgcactggcgtctggacgtggtaatgaacgaagacgactgcaaaataagaagaggaaacgttcagggatacggca

SEQ ID NO: 667511 - DNA, 75 bp, synthetic construct
  source 1..75: mol_type = other DNA
tgacaagagtcgccgcaggggagcgattcatgtcattagtgcgttctcaacaatgcacattctggtcctggggca

SEQ ID NO: 667512 - DNA, 75 bp, synthetic construct
  source 1..75: mol_type = other DNA
ccgtcttcacattgtttgcgatgtccctgatgaacttattgatttcacatttgaatggaaagggctgaagaaatt

SEQ ID NO: 667513 - DNA, 75 bp, synthetic construct
  source 1..75: mol_type = other DNA
gatcaggacggatgagaaatctaatgagatcacagctatccctgaacttcttaacatgctggatattaaaggaaa

SEQ ID NO: 667514 - DNA, 75 bp, synthetic construct
  source 1..75: mol_type = other DNA
atatttctattatccccgattacagacaagcctggaaagtggaacataaattatccgatattctactgttgacta

SEQ ID NO: 667515 - DNA, 75 bp, synthetic construct
  source 1..75: mol_type = other DNA
ttcttcagacgataaagacgtcatcgcaattgatggaaaaacgctccggcactcttatgacaagagtcgccgcaa

SEQ ID NO: 667516 - DNA, 75 bp, synthetic construct
  source 1..75: mol_type = other DNA
agaaaatgtgcagatattactactccctgagttatcaattcctgtgtcgtggttaccttttatggcagcacattc

SEQ ID NO: 667517 - DNA, 75 bp, synthetic construct
  source 1..75: mol_type = other DNA
gcagaggaaatggcagatgcagcccagagcgcaatgcttgccgccacctgctttgatgccgacctgttgctgcag

SEQ ID NO: 667518 - DNA, 75 bp, synthetic construct
  source 1..75: mol_type = other DNA
tggagctgctgccgaagtacgccgcctgggcggagggtgtcctggctgccggaggcgctcaacaggatgacgtgc

SEQ ID NO: 667519 - DNA, 75 bp, synthetic construct
  source 1..75: mol_type = other DNA
gaatttatacagtaagatgcatggtattccacttgataatgataaattaaataaaacccctagatatattcatgc

SEQ ID NO: 667520 - DNA, 75 bp, synthetic construct
  source 1..75: mol_type = other DNA
ttggaaggtttgaaatctttaattaaacagtccgatggaatgtctgttctaattgaaagatttagaagcagtaat

SEQ ID NO: 667521 - DNA, 75 bp, synthetic construct
  source 1..75: mol_type = other DNA
acgaacgcgcatataatattttggttgaaatgctgccttatacttcaaactttaaacacaaatccagtatgttag

SEQ ID NO: 667522 - DNA, 75 bp, synthetic construct
  source 1..75: mol_type = other DNA
actgcagagaagttcgccacagcgatccgaaatcactggcacgtggagaataagctgcactggcgcctggacgtg

SEQ ID NO: 667523 - DNA, 75 bp, synthetic construct
  source 1..75: mol_type = other DNA
ttgcaatctgaggcttgcaacttactcacagaattcaatgaatagtaaaataaataccctcaacaaatcaggttg

SEQ ID NO: 667524 - DNA, 75 bp, synthetic construct
  source 1..75: mol_type = other DNA
gtgcagaaggttgggaagatatagaggatttcggggaaacacatcccgattttttgaagcaatatggtgattttg

SEQ ID NO: 667525 - DNA, 75 bp, synthetic construct
  source 1..75: mol_type = other DNA
ctgagtgaaagcaacccggcttccgcccttaatcatctcaaccatgcgttacagctcgatccccgcagtggcgtg

SEQ ID NO: 667526 - DNA, 75 bp, synthetic construct
  source 1..75: mol_type = other DNA
taaccgcaatgtgcagaccgtgctggcagaggaaatggctgacgcggcacagagcgcaatgcttgccgccaccgg

SEQ ID NO: 667527 - DNA, 75 bp, synthetic construct
  source 1..75: mol_type = other DNA
gaaacgcagcagaattattttcagggatacggcacattgctattattcttttgacgaatgagcaggtattccagg

SEQ ID NO: 667528 - DNA, 75 bp, synthetic construct
  source 1..75: mol_type = other DNA
acaaggagaacactggcggcaatcagcatcatgccagcgatagtgaaactggcgaggcgtcagatcccttaatta

SEQ ID NO: 667529 - DNA, 75 bp, synthetic construct
  source 1..75: mol_type = other DNA
acacaccggaaaagacatcatgcccggtaaaacgtataccgaagcagaatgcaaagccctcctgaataaagacct

SEQ ID NO: 667530 - DNA, 75 bp, synthetic construct
  source 1..75: mol_type = other DNA
tgaaaccatgggaaaaaatcctgatgccccgatcatctcaataggtgcaatatttttcgatccgcaaaccggaga

SEQ ID NO: 667531 - DNA, 75 bp, synthetic construct
  source 1..75: mol_type = other DNA
tgccgcaggtgcttctgcgcctgaaatcctcgaccagtttctggatgaaaaggaaggcaaccacaccacggcata

SEQ ID NO: 667532 - DNA, 75 bp, synthetic construct
  source 1..75: mol_type = other DNA
cgggttaatgccatcgaacgtgacaaggctctggcatgggtggagaaaaacatccgggtgccgctgaccgaaccc

SEQ ID NO: 667533 - DNA, 75 bp, synthetic construct
  source 1..75: mol_type = other DNA
cgtattcgctcaaataactgctacggtcaggtatcacggcgtgaccaggagagcgcgctggcgtgctggggaatt

SEQ ID NO: 667534 - DNA, 75 bp, synthetic construct
  source 1..75: mol_type = other DNA
gctacataccatacaaagatatcgttggcgtatggactgtatgtcacggacacaccggaaaagacatcatgctcg

SEQ ID NO: 667535 - DNA, 75 bp, synthetic construct
  source 1..75: mol_type = other DNA
cgatataccggaaacaacgcgcgcgctctttactcgttcgtttacaacgtgggcgctggcaatttcagaacatcg

SEQ ID NO: 667536 - DNA, 75 bp, synthetic construct
  source 1..75: mol_type = other DNA
tcgcccgacagattaacccatatatcaatgctccgatccccgaaacgatgagaggggcgctgtactcattcgcgt

SEQ ID NO: 667537 - DNA, 75 bp, synthetic construct
  source 1..75: mol_type = other DNA
ctggtaagtgttttccgtcgacgttttataagcggcttaatgccggtgatcgtaaaggcgcatgcgaggcgattc

SEQ ID NO: 667538 - DNA, 75 bp, synthetic construct
  source 1..75: mol_type = other DNA
cgatataccggaaacaacgcgcggcgctctttactcgttcgtctacaacgtgggtgctggggaaggtgcgaataa

SEQ ID NO: 667539 - DNA, 75 bp, synthetic construct
  source 1..75: mol_type = other DNA
caaagatattgttggtgtatggactgtatgtcacggacacaccggaaaagacatcatgctcggtaaaacgtatac

SEQ ID NO: 667540 - DNA, 75 bp, synthetic construct
  source 1..75: mol_type = other DNA
tcactgaatacctgactacaaagggcgtatttgaacatgaagaaacagaccagagccctgctgatgctctccacc

SEQ ID NO: 667541 - DNA, 75 bp, synthetic construct
  source 1..75: mol_type = other DNA
tcgcgtcattctgtccgtataacattggccccggtaagtgtttcccgtcgacgttttataaacgaattaatgcag

SEQ ID NO: 667542 - DNA, 75 bp, synthetic construct
  source 1..75: mol_type = other DNA
caggttaacgccattgaacgggataaggcgctggcatgggtggcgaaaaacatcagagtgccactgaccgaacct

SEQ ID NO: 667543 - DNA, 75 bp, synthetic construct
  source 1..75: mol_type = other DNA
gtgtttcccgtcgacgttttacagacgaattaatgctggtgatcgcaggggagcatgcgaggcgattcgctggtg

SEQ ID NO: 667544 - DNA, 75 bp, synthetic construct
  source 1..75: mol_type = other DNA
gattaaggacagggggcgcgattgccgcattcgttcaaataactgttatggtcaggttattcgtcgtgaccagga

SEQ ID NO: 667545 - DNA, 75 bp, synthetic construct
  source 1..75: mol_type = other DNA
tgtcggctgccgttctggcactgatttccgcaggggcttctgcgcctgaaatccttgaccagtttctggatgaaa

SEQ ID NO: 667546 - DNA, 75 bp, synthetic construct
  source 1..75: mol_type = other DNA
gaagctgtcgaaggaaaaatgcgaccaggttaacgccattgagcgtgataaagcgctgacgtgggtggagaaaaa

SEQ ID NO: 667547 - DNA, 75 bp, synthetic construct
  source 1..75: mol_type = other DNA
ggcatctggaccatctgtcggggtgccacgatggtggatggaaaacccgtttttcccggtatgaaactgtcgaag

SEQ ID NO: 667548 - DNA, 75 bp, synthetic construct
  source 1..75: mol_type = other DNA
caaagacatagttggtgtatggactgtatgttacgggcatacaggaaaagacatcattcccggtaaaacgtatac

SEQ ID NO: 667549 - DNA, 75 bp, synthetic construct
  source 1..75: mol_type = other DNA
gccgtatccgctcaaataattgctacggtcaggtatcccggcgagatcaggaaagtgcgctggcgtgctggggta

SEQ ID NO: 667550 - DNA, 75 bp, synthetic construct
  source 1..75: mol_type = other DNA
ggtggcagagactgccgtatccgctcaaataactgttatggtcaggtatcccgtcgcgaccaggagagtgcgctg

SEQ ID NO: 667551 - DNA, 75 bp, synthetic construct
  source 1..75: mol_type = other DNA
aaggaaaaatgcgaccgggttaacgccattgagcgtgataaggcgctggcatgggtggagaaaaacatcaaagtg

SEQ ID NO: 667552 - DNA, 75 bp, synthetic construct
  source 1..75: mol_type = other DNA
aaactgaacgccggagaccggaaaggtggatgtgctgaaatccgccgatggatatatgacggcggcagggactgt

SEQ ID NO: 667553 - DNA, 75 bp, synthetic construct
  source 1..75: mol_type = other DNA
atgagcaggaaactccgctatggtttatcggctgccgttctggcgctgatttgtgcaggggcgtctgcgcctgaa

SEQ ID NO: 667554 - DNA, 75 bp, synthetic construct
  source 1..75: mol_type = other DNA
gtccctataacattggcccaggtaagtgttttccgtcgacattttataagcggctgaatgctggtgatcgaaaag

SEQ ID NO: 667555 - DNA, 75 bp, synthetic construct
  source 1..75: mol_type = other DNA
gaaactgtcgaaggaaaaatgcgaccaggttaacgccattgaacgtgataaggcgctggcatgggtggagcgcaa

SEQ ID NO: 667556 - DNA, 75 bp, synthetic construct
  source 1..75: mol_type = other DNA
cgtattcgttcaaacaactgctacggtcaggtatcccgtcgtgaccaggagagcgcgctggcgtgctggggaatc

SEQ ID NO: 667557 - DNA, 75 bp, synthetic construct
  source 1..75: mol_type = other DNA
actttgcaaaccggtacggtaacggatatccagatcaaaaccggcaatattccggcgcaggccagcagcagcctg

SEQ ID NO: 667558 - DNA, 75 bp, synthetic construct
  source 1..75: mol_type = other DNA
agctcgtacaccgacagctacaccaccacggtgtatgactcattaggcaacgaacattcggtatgccagtacttc

SEQ ID NO: 667559 - DNA, 75 bp, synthetic construct
  source 1..75: mol_type = other DNA
ggaagctgacctcgccaaccacgccgcagaccattgaatttcaaaccgacgccgccgcgcccatcgacttaaccg

SEQ ID NO: 667560 - DNA, 75 bp, synthetic construct
  source 1..75: mol_type = other DNA
cgcctgaaatcctcgaccagtttctggatgaaaaggaaggtaaccacaccacggcataccgtgatggtgcgggta

SEQ ID NO: 667561 - DNA, 75 bp, synthetic construct
  source 1..75: mol_type = other DNA
tgccgtatccgctcaaataactgttatggtcaggtatcccgtcgtgaccaggagagcgcgctggcgtgctggggt

SEQ ID NO: 667562 - DNA, 75 bp, synthetic construct
  source 1..75: mol_type = other DNA
gaacgaccagaaagcggaacaaaacagcccaaatacgcaacaaaacgagccagaaacgaaacaacctgaaccact

SEQ ID NO: 667563 - DNA, 75 bp, synthetic construct
  source 1..75: mol_type = other DNA
gaactggtagaagtgactccgacctctatccgtattcgtaaacgtcacctgacggaaaacgatcgtcgtcgcgcc

SEQ ID NO: 667564 - DNA, 75 bp, synthetic construct
  source 1..75: mol_type = other DNA
gtcggtaaagtgctgggccacctcggtctggaacgtatcgaaaccgatctggcggaagctggcgatatcgttgcg

SEQ ID NO: 667565 - DNA, 75 bp, synthetic construct
  source 1..75: mol_type = other DNA
atggtaagcccgtcataccgggaatgaaactgtcgaaggaaaaatgcaatcaggttgatgccattgaacgtgata

SEQ ID NO: 667566 - DNA, 75 bp, synthetic construct
  source 1..75: mol_type = other DNA
tcgattactccacctgtacgcaatacggctctgaattttcggtcaccaccaacgccgccaacggctacgcctccg

SEQ ID NO: 667567 - DNA, 75 bp, synthetic construct
  source 1..75: mol_type = other DNA
tggcacggttggtgcgcatatggcgtgctctgatagaccatcgcctgaaacctctggagttaacgcaaactcact

SEQ ID NO: 667568 - DNA, 75 bp, synthetic construct
  source 1..75: mol_type = other DNA
gatccgaaatgggttaaggggattgaaacccgcgattctgtgaaccagaaccagcccgaatcggaacaaaacgac

SEQ ID NO: 667569 - DNA, 75 bp, synthetic construct
  source 1..75: mol_type = other DNA
gattaaggacagggggcgcgattgccgccttcgttcaaataactgttacggtcaggttattcgtcgtgatcagga

SEQ ID NO: 667570 - DNA, 75 bp, synthetic construct
  source 1..75: mol_type = other DNA
cagaaagcgggcatcgcgtcattctgtccgtacaacatcgggccttcgaaatgcttcacctcaacgttttaccgg

SEQ ID NO: 667571 - DNA, 75 bp, synthetic construct
  source 1..75: mol_type = other DNA
cagaaagcggggatcgcgtcattctgcccttacaacattggtcccggtaagtgtttcccgtcgacgttttacaga

SEQ ID NO: 667572 - DNA, 75 bp, synthetic construct
  source 1..75: mol_type = other DNA
gacaggcaagtagaatattttgctgaaaatgacgttggtcaacgcgggtgggtaacacgaaatcctgcgaactgg

SEQ ID NO: 667573 - DNA, 75 bp, synthetic construct
  source 1..75: mol_type = other DNA
cgacccgaatgatccgaaatgggtgaaagggatccagagtcgcgacgctgaggaccagaatcagcccaacgtgaa

SEQ ID NO: 667574 - DNA, 75 bp, synthetic construct
  source 1..75: mol_type = other DNA
aaaatcccgatgccccgattatctcaataggcgcaatatttttcgatccgcaaaccggagatatgggaccagaat

SEQ ID NO: 667575 - DNA, 75 bp, synthetic construct
  source 1..75: mol_type = other DNA
ttacctgcgacagcgcgggcaacatttcttatacccgcgccggatcgtttgaaaccgacaaaaacggctatatcg

SEQ ID NO: 667576 - DNA, 75 bp, synthetic construct
  source 1..75: mol_type = other DNA
atgagtaaagtctttatttgcgccgccattcctgacgaacaggcaattaaggaagaaggtgcagttgctgtagcc

SEQ ID NO: 667577 - DNA, 75 bp, synthetic construct
  source 1..75: mol_type = other DNA
atgtcgccatcattacgcaaggctgttgcagctgctattggtggtggggctgttgccatagcgtctgtgcttatc

SEQ ID NO: 667578 - DNA, 75 bp, synthetic construct
  source 1..75: mol_type = other DNA
atggtaaacctgtcgtcccgggcatgaagttgtcgaaggaaaaatgcgaccaggttaacgccattgagcgtgata

SEQ ID NO: 667579 - DNA, 75 bp, synthetic construct
  source 1..75: mol_type = other DNA
ggtggcgcagcacagcgttccgcgtccgtagacgctgggcgggctacaggttcgattaaaggttatgaaggcggc

SEQ ID NO: 667580 - DNA, 75 bp, synthetic construct
  source 1..75: mol_type = other DNA
aagtggctgttccgcatcaggtcacacagcctgcaccactggcaacgcctgccggtaatgagattcagcaacctg

SEQ ID NO: 667581 - DNA, 75 bp, synthetic construct
  source 1..75: mol_type = other DNA
tttcgtcatcgaactgcgaggactcatcttcagttacaaggtgaccacaatttttgcagatggctcccgcgaaac

SEQ ID NO: 667582 - DNA, 75 bp, synthetic construct
  source 1..75: mol_type = other DNA
gggatcgcgtcattctgtccgtacaacattggtcccggtaagtgtttcccgtcgacgttttataaacgaattaat

SEQ ID NO: 667583 - DNA, 75 bp, synthetic construct
  source 1..75: mol_type = other DNA
aatactgccttattccagcataaattaaatgactatcgtcaggaagcgacaaaagcggctgatgctatggctctt

SEQ ID NO: 667584 - DNA, 75 bp, synthetic construct
  source 1..75: mol_type = other DNA
aataaaacggttactgcattcaccagggaaagtacggcgaccagccaaaccaacgaacatgcgtctggtcagggt

SEQ ID NO: 667585 - DNA, 75 bp, synthetic construct
  source 1..75: mol_type = other DNA
gtatcgactggcaaaaacaatccactactcctggaactggatatttgccaaaaggttacgatcagcgtaacacgg

SEQ ID NO: 667586 - DNA, 75 bp, synthetic construct
  source 1..75: mol_type = other DNA
gagggttatcgctttatcgcttcctatggaactgctttcaaagcgccaaatctggggcagctatatggtatgtat

SEQ ID NO: 667587 - DNA, 75 bp, synthetic construct
  source 1..75: mol_type = other DNA
ttgaggctacagtaaactttgatacaggagcactgacgcatactgttagttacgattatacggatgccagaaatg

SEQ ID NO: 667588 - DNA, 75 bp, synthetic construct
  source 1..75: mol_type = other DNA
atgacggcagggttcaactttaataactatgcagcagttttttgttccgctaccccggcgttaagggaaacagag

SEQ ID NO: 667589 - DNA, 75 bp, synthetic construct
  source 1..75: mol_type = other DNA
tttggggcagttatatggcatgtatggtaatccgaatctggacccggaaaaaagtaaacagtgggaaggggcatt

SEQ ID NO: 667590 - DNA, 75 bp, synthetic construct
  source 1..75: mol_type = other DNA
ccgtttgcctggtgtggcaatagcgcaaaatggaggagaaggtcagctctcaactattttcctccgtggaacgaa

SEQ ID NO: 667591 - DNA, 75 bp, synthetic construct
  source 1..75: mol_type = other DNA
ggtggagaaaaacatcaaagtgccactgaccgaaccccagaaagcggggatcgcgtcattctgtccgtacaacat

SEQ ID NO: 667592 - DNA, 75 bp, synthetic construct
  source 1..75: mol_type = other DNA
aagcgcatccgattgatggcctgtctggtgaatatgcggagaaatcccttgaagaatgggcggaacaaattcgca

SEQ ID NO: 667593 - DNA, 75 bp, synthetic construct
  source 1..75: mol_type = other DNA
ggcaaccaaggtcggtgaacgcaagaagaggaaatgcgacagagtatcaccatggattgaaagagtttgtgatta

SEQ ID NO: 667594 - DNA, 75 bp, synthetic construct
  source 1..75: mol_type = other DNA
cacaggttaaacatgtcgttgtgattctgatttggctaaatgctttatttatgcctatttggtccgcttcatggg

SEQ ID NO: 667595 - DNA, 75 bp, synthetic construct
  source 1..75: mol_type = other DNA
atggcgttctggttattttggaggccatgaaggcaacaggaaatatgccagccaccgatgcttttctggctgaaa

SEQ ID NO: 667596 - DNA, 75 bp, synthetic construct
  source 1..75: mol_type = other DNA
accgcaagccgtcttgctgctgctttcaaccacggatttatcaataagtctttacgtgaagttttcgacgttacg

SEQ ID NO: 667597 - DNA, 75 bp, synthetic construct
  source 1..75: mol_type = other DNA
tgcgtgaggcggcagaaaaggcaacacaaggcgaatgggtcgcatttatttcgtcgggtactggtacatatgcgg

SEQ ID NO: 667598 - DNA, 75 bp, synthetic construct
  source 1..75: mol_type = other DNA
ttctgtaatgcatggcagtttttactgaaaaccggtttgtgtaatggcgtcgatgcggtgatcaaagcctaccgt

SEQ ID NO: 667599 - DNA, 75 bp, synthetic construct
  source 1..75: mol_type = other DNA
tctgaacagtgatcaagatgatgtcaaagtcaacatcaagtgtttgccgaccatcgaccccaccaagttgccgcg

SEQ ID NO: 667600 - DNA, 75 bp, synthetic construct
  source 1..75: mol_type = other DNA
gtggagatgtcaattcaaaaaacacgtttggtggatatacagggaagaaaccatattttgtttatttggaagttg

SEQ ID NO: 667601 - DNA, 75 bp, synthetic construct
  source 1..75: mol_type = other DNA
atgagtgaaaaaagcattgttcaggaagcgcgggatattcagctggcaatgctgggcgctcgtttgcagatgctg

SEQ ID NO: 667602 - DNA, 75 bp, synthetic construct
  source 1..75: mol_type = other DNA
tgaaaacagggttatgtaacggcgtcgatgcagtgatcaaagcctatcgtttatacctcgaacagtgtccgcaag

SEQ ID NO: 667603 - DNA, 75 bp, synthetic construct
  source 1..75: mol_type = other DNA
ggaattgatcaccttgggcgctcgtttgcagatgctggaaagcgaaacacagttaagtcgcggacgcctgataaa

SEQ ID NO: 667604 - DNA, 75 bp, synthetic construct
  source 1..75: mol_type = other DNA
gccagatatgacctacgttgaatcggctgctcgctccatcgcgccagtgctgaaaaaaaggcgcgttggtgatcc

SEQ ID NO: 667605 - DNA, 75 bp, synthetic construct
  source 1..75: mol_type = other DNA
ccgtgatggtgcgggtatctggaccatctgccgcggtgccatcctggtggatggtaaacctgtgatcccgggcat

SEQ ID NO: 667606 - DNA, 75 bp, synthetic construct
  source 1..75: mol_type = other DNA
gctcaaccagctgcctgcaacggttgaccgtgcttcaattgaactgaagttcgatgccgctaaaggcaagctgac

SEQ ID NO: 667607 - DNA, 75 bp, synthetic construct
  source 1..75: mol_type = other DNA
catcagcagcccggaaggtgttgaggaagtgactcgtgcgcgtcaggaaggtcaggatgttacctgtgaatcctg

SEQ ID NO: 667608 - DNA, 75 bp, synthetic construct
  source 1..75: mol_type = other DNA
ctggtggggcaataactactatgacgttaacgagctgggtcacatcagcgtgtgcccggacccggacgtcccgga

SEQ ID NO: 667609 - DNA, 75 bp, synthetic construct
  source 1..75: mol_type = other DNA
gttattcttctggcacttacaatctgcaagaacgtgcatgggcagaacagctctatttgagcatgtgtcatgaag

SEQ ID NO: 667610 - DNA, 75 bp, synthetic construct
  source 1..75: mol_type = other DNA
aataaagaccttgccactgtcgccagacaaattaacccgtacatcgaagtcgatataccggaaacaacgcgcggc

SEQ ID NO: 667611 - DNA, 75 bp, synthetic construct
  source 1..75: mol_type = other DNA
ccgtgatggtgcgggtatctggaccatctgtcgcggtgccattctggtggatggtaaacctgtcgtcccgggcat

SEQ ID NO: 667612 - DNA, 75 bp, synthetic construct
  source 1..75: mol_type = other DNA
tgtcagctgctgttctggcgctgattggagcaggagcatctgctcctcagatacttgaccagtttctggatgaaa

SEQ ID NO: 667613 - DNA, 75 bp, synthetic construct
  source 1..75: mol_type = other DNA
atctgccgcggtgccattctggtggatggtaaacctgtcttccccggcatgaagctgacgaaggaaaaatgcgcg

SEQ ID NO: 667614 - DNA, 75 bp, synthetic construct
  source 1..75: mol_type = other DNA
ctgggtgaactgggccagccggtgctggtgcactgcgaaaacgcgctgatctgtgacgcactgggcgaagaagcg

SEQ ID NO: 667615 - DNA, 75 bp, synthetic construct
  source 1..75: mol_type = other DNA
ggacgtgatgttcgatgaagcggtacagaaacgcggtatgtctctgccaatgttcggcaaattaatggcgactaa

SEQ ID NO: 667616 - DNA, 75 bp, synthetic construct
  source 1..75: mol_type = other DNA
tacttgtgaatcctgcccgcattactttgtactggataccgatcagttcgaagaaatcggtactctggcgaagtg

SEQ ID NO: 667617 - DNA, 75 bp, synthetic construct
  source 1..75: mol_type = other DNA
ccagtcgatgccggacgcatgggggatcgaccagttgttcccggttctgccgctggaagggctgaatcaagttcc

SEQ ID NO: 667618 - DNA, 75 bp, synthetic construct
  source 1..75: mol_type = other DNA
atgagcaggaaactccactatggtttatcggtagccgttctggcgatgattgccacaggtgcttctgcgcctgaa

SEQ ID NO: 667619 - DNA, 75 bp, synthetic construct
  source 1..75: mol_type = other DNA
ggaactgcgcaagcgtgatgagccaaaacttggcggcatctttgttgattttgttggcggagcgatggcgcaccg

SEQ ID NO: 667620 - DNA, 75 bp, synthetic construct
  source 1..75: mol_type = other DNA
gaacacgatgaagacaacctgatggcgctggtgttaacgccggagcatctggaactgcgcaagcgtgatgagccg

SEQ ID NO: 667621 - DNA, 75 bp, synthetic construct
  source 1..75: mol_type = other DNA
tctgtccgtacaacattggtcccggtaagtgtttcccgtcgacgttttacagacgaattaatgcaggtgatcgca

SEQ ID NO: 667622 - DNA, 75 bp, synthetic construct
  source 1..75: mol_type = other DNA
actggtccgagtggtgacgatggcctggaaggtgtcagctacataccatacgaagatatcgttggcgtatggact

SEQ ID NO: 667623 - DNA, 75 bp, synthetic construct
  source 1..75: mol_type = other DNA
tggtgcagggacgtctgcgcctgaaatcctcgaccagtttcttgacgaaaaagaaggtaaccacaccacggcata

SEQ ID NO: 667624 - DNA, 75 bp, synthetic construct
  source 1..75: mol_type = other DNA
cagaaagcggggatcgcgtcattctgcccttacaacattggccccggtaagtgtttcccgtcgacgttttataaa

SEQ ID NO: 667625 - DNA, 75 bp, synthetic construct
  source 1..75: mol_type = other DNA
atgagcaaactccgctatggtttatcggctgccgttctggcgctgattgctgcaggtgcttctgcgcctgaaatc

SEQ ID NO: 667626 - DNA, 75 bp, synthetic construct
  source 1..75: mol_type = other DNA
tgcccctataacattggccccggtaagtgtttcccgtcgacgttttataagcggcttaatgccggtgatcgtaaa

SEQ ID NO: 667627 - DNA, 75 bp, synthetic construct
  source 1..75: mol_type = other DNA
cataagcagaaaagcgcgctagtgaaaaaagagatgcgtgtctttcagtcgctggtgggaccggatcttgatgcc

SEQ ID NO: 667628 - DNA, 75 bp, synthetic construct
  source 1..75: mol_type = other DNA
gactgtcggctgacgaaaggccagaaagacggatgttatggtcaggttatccgccgggaccaggaaagcgcgctg

SEQ ID NO: 667629 - DNA, 75 bp, synthetic construct
  source 1..75: mol_type = other DNA
gcaagggagcatgtgaggctattcgctggtggattaaagacggtggacgtgactgtcggctgacgaaaggccaga

SEQ ID NO: 667630 - DNA, 75 bp, synthetic construct
  source 1..75: mol_type = other DNA
cgcccgaagctaagaataacgccgttaactgacaaacaaagcctagagcaatttattgataattttaataaaatc

SEQ ID NO: 667631 - DNA, 75 bp, synthetic construct
  source 1..75: mol_type = other DNA
attgatactgaatgcgtcatacttgacgaagaagcaacacccccagtactcggaattaaaggtcggattattaag

SEQ ID NO: 667632 - DNA, 75 bp, synthetic construct
  source 1..75: mol_type = other DNA
tacccggctaccgcgctgaaccactgctcatttctctggtttacccgcaacgccgggagctttcccgccgtgtaa

SEQ ID NO: 667633 - DNA, 75 bp, synthetic construct
  source 1..75: mol_type = other DNA
ccggatgaagagtatgtatgcggagcggatactgctgaggggctggagcacggagaccgctcatcgctggatatc

SEQ ID NO: 667634 - DNA, 75 bp, synthetic construct
  source 1..75: mol_type = other DNA
tctctgcgtgacgggaataaagccgaacagcaccggacgctgatgaattatctgctggtctgggagctaccggat

SEQ ID NO: 667635 - DNA, 75 bp, synthetic construct
  source 1..75: mol_type = other DNA
cgacgaattttgggagtcacttgaaagtgccggagacgaaatgggaagtatttctacatctattcgcttttcaaa

SEQ ID NO: 667636 - DNA, 75 bp, synthetic construct
  source 1..75: mol_type = other DNA
aaccgccgcgttatctgaatggaaaaaataccgggtcttgctgatgcgcgttgatacagcaaaacccgtatggcc

SEQ ID NO: 667637 - DNA, 75 bp, synthetic construct
  source 1..75: mol_type = other DNA
ggtgtcgtaccacagggtaaaatgctaggttccgataaaaatggcaaccctgcttgggtggatattccgcctctt

SEQ ID NO: 667638 - DNA, 75 bp, synthetic construct
  source 1..75: mol_type = other DNA
tgtcagaatggaagaaataccgggtgctgttaatgcgcgttgatacagcgaaacccgtctggcctacgcctccgg

SEQ ID NO: 667639 - DNA, 75 bp, synthetic construct
  source 1..75: mol_type = other DNA
agtagccatgaccgtccggtagatattcttcatgatggttttgattgcgtgatacgcactggcgcgttaccggaa

SEQ ID NO: 667640 - DNA, 75 bp, synthetic construct
  source 1..75: mol_type = other DNA
atggataaaattcacgcaatgcagttgttcatcaaagtcgcggagctggaaagtttttcccgcgcggcggatttc

SEQ ID NO: 667641 - DNA, 75 bp, synthetic construct
  source 1..75: mol_type = other DNA
ccgcgtcaccgtacgcgaagccctacgcgccagacagcttatcgaagtgttacccaactaccgcgccgaaccacg

SEQ ID NO: 667642 - DNA, 75 bp, synthetic construct
  source 1..75: mol_type = other DNA
ataacgctctgaacgatgcacgttaccaggcgaaatacgtttcagccatctggcaaaaactgctcccgagtcagg

SEQ ID NO: 667643 - DNA, 75 bp, synthetic construct
  source 1..75: mol_type = other DNA
gactggctgagagcctcattcaccatcgttgaacgtcgtagcggtgccagcggtggctatatcctgtttggtcac

SEQ ID NO: 667644 - DNA, 75 bp, synthetic construct
  source 1..75: mol_type = other DNA
aaacgaaaccgcctgggaaaacaagtcaaagcaggtattcaacaaccggttctggcgctcatttgccgaggcgga

SEQ ID NO: 667645 - DNA, 75 bp, synthetic construct
  source 1..75: mol_type = other DNA
cgacgcggcatacaaaatggcgcaaatcaatcaggcatgtctcgccacaggtgaacaagtattcgacggtgacga

SEQ ID NO: 667646 - DNA, 75 bp, synthetic construct
  source 1..75: mol_type = other DNA
atcgcgaaaacgctgaacgcggaaatcgtcttcgttatgtctcagggtactgacaccccggagcaactcaaagag

SEQ ID NO: 667647 - DNA, 75 bp, synthetic construct
  source 1..75: mol_type = other DNA
caccggcgttatcgttaacaaactgaacgcaccggttgatgaacagggtcgtactcgcccggatctgtccgagat

SEQ ID NO: 667648 - DNA, 75 bp, synthetic construct
  source 1..75: mol_type = other DNA
agcaaaaaacgccaaagcatctatcttccatatcgaaggtgacccggatcacccggtcaaccgcggtgcactttg

SEQ ID NO: 667649 - DNA, 75 bp, synthetic construct
  source 1..75: mol_type = other DNA
ttgaaggaactgaagacgagaaagcgaaaaaggaaacaccgtgggaaagagaaatcaagaagaaatttaacaaca

SEQ ID NO: 667650 - DNA, 75 bp, synthetic construct
  source 1..75: mol_type = other DNA
actgagcttggtgaatggggcgattatttccggatgcagagcttcagtgatgtgtggatggatgcgcagtttgcc

SEQ ID NO: 667651 - DNA, 75 bp, synthetic construct
  source 1..75: mol_type = other DNA
atgacattccggaagaatgaaccgcgatgtgatgagccgtcagaaatgaccgaggctgaacaacgtctgttcatt

SEQ ID NO: 667652 - DNA, 75 bp, synthetic construct
  source 1..75: mol_type = other DNA
catcaactgaagatctccgctatttcaataaccgatgcatgacccgccgccaggaaatcggaggcgagcttgaag

SEQ ID NO: 667653 - DNA, 75 bp, synthetic construct
  source 1..75: mol_type = other DNA
agtaagcccgctggtaactgccgtatctgacccgtccgcaacctatgatgtaaacctgcaaaccgccgccgctgg

SEQ ID NO: 667654 - DNA, 75 bp, synthetic construct
  source 1..75: mol_type = other DNA
acgtacgacgatctatacaaactgtacaggcgcggtggtatcgctcacggtgctgtagagaagattgttacaact

SEQ ID NO: 667655 - DNA, 75 bp, synthetic construct
  source 1..75: mol_type = other DNA
cgatcgcctgctcaactacaggcgcggtcggtaacgctgacgacggtacggcattaatcctggtcacgccggtga

SEQ ID NO: 667656 - DNA, 75 bp, synthetic construct
  source 1..75: mol_type = other DNA
gtggaagcaacaggtatcgtgtttttagtggtgctcttcgtcatcatcatgacagtagtagatatacaaaagaag

SEQ ID NO: 667657 - DNA, 75 bp, synthetic construct
  source 1..75: mol_type = other DNA
ctgtacgggcagatggcgatcaactgcgcgattcgcgagaaaaagccagcgctgatgtttagcctggaaatgccc

SEQ ID NO: 667658 - DNA, 75 bp, synthetic construct
  source 1..75: mol_type = other DNA
ggtgcgaaacatactccccgcactgggcaggaatgaaagaggcggtgagagcacttgatgaaatggcacttcttg

SEQ ID NO: 667659 - DNA, 75 bp, synthetic construct
  source 1..75: mol_type = other DNA
gtttatggctatatcgattatctggcgatgaatatgctgcctgacctgtgcgatgagtcatggctttatcggcat

SEQ ID NO: 667660 - DNA, 75 bp, synthetic construct
  source 1..75: mol_type = other DNA
tggtctgacattgttcgacgcgcttgaaggaaaagggctcgcggagcaggtaggtggctttgcttacctggcgga

SEQ ID NO: 667661 - DNA, 75 bp, synthetic construct
  source 1..75: mol_type = other DNA
tgggttaacactcttcgacgctctggaaagcaaaggccttacggagcagatcggcggtttcgcctacatcgcgca

SEQ ID NO: 667662 - DNA, 75 bp, synthetic construct
  source 1..75: mol_type = other DNA
accaatgtgcgccgggtgtttaacgaattgattggcgatgacgaaagcgaaacacaggaagagtcgctatcggaa

SEQ ID NO: 667663 - DNA, 75 bp, synthetic construct
  source 1..75: mol_type = other DNA
gttacaggaagtacgagaagatgacgacgacgcagagatgacccactcggtggcggtgaacatctacccggcaac

SEQ ID NO: 667664 - DNA, 75 bp, synthetic construct
  source 1..75: mol_type = other DNA
ggagagagcatgctgggcggtgcgcggatggaggtgatttttggtcgccagcattctgcgccgaaagatgaataa

SEQ ID NO: 667665 - DNA, 75 bp, synthetic construct
  source 1..75: mol_type = other DNA
atctcggcaataaacatcgcgatcgctttgatatcaaagccgatgaaggcggaattaccgatatcgaatttatta

SEQ ID NO: 667666 - DNA, 75 bp, synthetic construct
  source 1..75: mol_type = other DNA
agtgtacggcgatccgcagctcaccgcgcactttgacgcagtacgccgggagattatgacgctgccgcgcgaagg

SEQ ID NO: 667667 - DNA, 75 bp, synthetic construct
  source 1..75: mol_type = other DNA
aacgaacgcgaagggcgtggttttgcggtggtcggctacggcaagctgggtggctgggagttaggctacagttcc

SEQ ID NO: 667668 - DNA, 75 bp, synthetic construct
  source 1..75: mol_type = other DNA
tgacaccctgacaggcggatttgatactgaagagctggaaacgtggcgcgcccgcgtcattgagcggtattactg

SEQ ID NO: 667669 - DNA, 75 bp, synthetic construct
  source 1..75: mol_type = other DNA
aagggtgataagggagagcgcggtgacaccggccctgtcggggcaaccggcgaacggggaccggcaggtgatgct

SEQ ID NO: 667670 - DNA, 75 bp, synthetic construct
  source 1..75: mol_type = other DNA
gaagccggaccacagggaccgatgggagcacgaggtgagcgtggggagactggcccccgaggtgaacctggtcct

SEQ ID NO: 667671 - DNA, 75 bp, synthetic construct
  source 1..75: mol_type = other DNA
gatatggggccaaaaggcgagaaaggtgatccgggaggtcctgcaggcccgcaaggtcctaaaggcgaacgagga

SEQ ID NO: 667672 - DNA, 75 bp, synthetic construct
  source 1..75: mol_type = other DNA
tggcaggctctgatttgtatgtgttcaggccggtggcacatacggtggattttcatatccgcgtgacgccggata

SEQ ID NO: 667673 - DNA, 75 bp, synthetic construct
  source 1..75: mol_type = other DNA
ttattcagcgcgatgacctggtgcagtacacggcaactgccgatgcaaccagctccggtggtgtcctgcgcgtgc

SEQ ID NO: 667674 - DNA, 75 bp, synthetic construct
  source 1..75: mol_type = other DNA
tggctattttagtcagctttgtggcgggatgtgcgccattacatccttcaaattgccataaaactacagccttgg

SEQ ID NO: 667675 - DNA, 75 bp, synthetic construct
  source 1..75: mol_type = other DNA
agccagtgcgaagagtgcatctgacagtgcaaagacggcaaccagcagggcggctgaagccggacaaaaagcgac

SEQ ID NO: 667676 - DNA, 75 bp, synthetic construct
  source 1..75: mol_type = other DNA
gtacacggcaactgccgatgcaaccagcaccgatggtgtcctgcgcgtgccgatcgcctgctcaagtgcaggcgc

SEQ ID NO: 667677 - DNA, 75 bp, synthetic construct
  source 1..75: mol_type = other DNA
agccatcagttgcttgcaccggcagacaatatctccattgcgaaaaatgaactggcggttctggggacgatttca

SEQ ID NO: 667678 - DNA, 75 bp, synthetic construct
  source 1..75: mol_type = other DNA
attttcatcagggatatatgaaaacattcagggtagctccattgatctgatttcaatacagacaacacaaacagg

SEQ ID NO: 667679 - DNA, 75 bp, synthetic construct
  source 1..75: mol_type = other DNA
ggcggtgattggtggattgcttctggatgatgacagcagtgagcgcgtccagaaagttctggcgatgctgaagcc

SEQ ID NO: 667680 - DNA, 75 bp, synthetic construct
  source 1..75: mol_type = other DNA
aggaaagctcgacccgtgccggagagtctgaaaaagccgccggagctgatgcagaaaaagccagacagcatgctg

SEQ ID NO: 667681 - DNA, 75 bp, synthetic construct
  source 1..75: mol_type = other DNA
tgaaaccatgggaaaaaatcccgatgccccgattatctcaataggtgcaatatttttcgatccgcaaaccggaga

SEQ ID NO: 667682 - DNA, 75 bp, synthetic construct
  source 1..75: mol_type = other DNA
tcattgatcgggacaccattaaatggtggcttaaacaatcacgcgaagcgcaatctgccattatggccgatgaaa

SEQ ID NO: 667683 - DNA, 75 bp, synthetic construct
  source 1..75: mol_type = other DNA
tggaagaagttaaccgcgaactgtctgctaagcagaacagagagaaaatgatgaagaaaaccgcaaccatcttgc

SEQ ID NO: 667684 - DNA, 75 bp, synthetic construct
  source 1..75: mol_type = other DNA
gataacactgactttactgatgcccataaaggttttattgcccctatccctcaagacgtgattaagggcgaacaa

SEQ ID NO: 667685 - DNA, 75 bp, synthetic construct
  source 1..75: mol_type = other DNA
gattacaggcggcgatcgaaaaagcaaaacagttaccaacatccgcctatgtaatcagtaatcaatacggcaacc

SEQ ID NO: 667686 - DNA, 75 bp, synthetic construct
  source 1..75: mol_type = other DNA
tcggcatcaatgcgcaaacagcctgatgcccttcgctacgaccgccagactatttttggccttgtccgtgaacgt

SEQ ID NO: 667687 - DNA, 75 bp, synthetic construct
  source 1..75: mol_type = other DNA
cgcacacccttcataacacctattcgctgcgtggggctaaaattcgccaaccgctgccgtggtcaaaatatatta

SEQ ID NO: 667688 - DNA, 75 bp, synthetic construct
  source 1..75: mol_type = other DNA
ataaatgcggcagaacgcttgtggaaacgcttaagaacttgcgtcctgccgttatccgaacatccgtatttatac

SEQ ID NO: 667689 - DNA, 75 bp, synthetic construct
  source 1..75: mol_type = other DNA
gcgcagatagtgacttggatgatataactagctatattgcacgtttcgacataaatgcggcagaacgcttgtgga

SEQ ID NO: 667690 - DNA, 75 bp, synthetic construct
  source 1..75: mol_type = other DNA
atctacgcgccagccggatttttggaggaagccgtttccgaaaatattatggctggcaatgtgatgagccgacga

SEQ ID NO: 667691 - DNA, 75 bp, synthetic construct
  source 1..75: mol_type = other DNA
tgccgcaaactttaaactgccctcttcactggctaatacctgggcgaatcgcggctattacggttcggtaagtca

SEQ ID NO: 667692 - DNA, 75 bp, synthetic construct
  source 1..75: mol_type = other DNA
gcaatgcggaaaaactcaacgagctgttaggttatatggataattttgaattttggttcaatatagtgacaccat

SEQ ID NO: 667693 - DNA, 75 bp, synthetic construct
  source 1..75: mol_type = other DNA
cgtaatttttatctcactggcgcacaggaattacgcaatggtgtgcaaaaactgcctacgccaaatacagccagt

SEQ ID NO: 667694 - DNA, 75 bp, synthetic construct
  source 1..75: mol_type = other DNA
gttgcagtgaaatcattcatatgaacgcgggggaaaaacaattatgtccgcgctgtgcaaatccagaatggacga

SEQ ID NO: 667695 - DNA, 75 bp, synthetic construct
  source 1..75: mol_type = other DNA
atgaaggcgtttgatctccaccgtatggcatttgataaagtgccttttgatttccttggcgaagttgcactacgt

SEQ ID NO: 667696 - DNA, 75 bp, synthetic construct
  source 1..75: mol_type = other DNA
tgggttcagcggcgggagatgtggcgttttatgatgatgtgccgatggtcccggtacttatcgtctttattactc

SEQ ID NO: 667697 - DNA, 75 bp, synthetic construct
  source 1..75: mol_type = other DNA
tttctggatgaaaaggaaggtaaccacaccacggcataccgtgatggtgcgggtatctggaccatctgccgtgga

SEQ ID NO: 667698 - DNA, 75 bp, synthetic construct
  source 1..75: mol_type = other DNA
gaaccacagaaggtgggtattgcatccttctgcccgtataacatcggccccggtaaatgcttcccatcgaccttc

SEQ ID NO: 667699 - DNA, 75 bp, synthetic construct
  source 1..75: mol_type = other DNA
atggctatgtctctaaagctgaagaataaattgagcgcagcggtcgttggtttgattcttgccggggcttccgca

SEQ ID NO: 667700 - DNA, 75 bp, synthetic construct
  source 1..75: mol_type = other DNA
gatggcggcacctataaagtggagcttgaaaatggtgttctcaatcataccgctggtgtagaggcttcggatgct

SEQ ID NO: 667701 - DNA, 75 bp, synthetic construct
  source 1..75: mol_type = other DNA
aatgatcaaactctgcgcatggctaatcaagggatgacccgtgatgaaattgccgcaaactttaaactgccctct

SEQ ID NO: 667702 - DNA, 75 bp, synthetic construct
  source 1..75: mol_type = other DNA
gatggcggcacttataaagtagagcttgaaaatggtgtgctcaatcacactgcaggtacgcaagcatctgatgct

SEQ ID NO: 667703 - DNA, 75 bp, synthetic construct
  source 1..75: mol_type = other DNA
gaaatgcggaaaaactcaacgaactgttagggtatatggataactttgaattctggttcaatattgtaacgccat

SEQ ID NO: 667704 - DNA, 75 bp, synthetic construct
  source 1..75: mol_type = other DNA
ggctggcaatgtgatgagccgacgagccagttatatgtacggcaacttattgaaacctgacgctaaaggccaggt

SEQ ID NO: 667705 - DNA, 75 bp, synthetic construct
  source 1..75: mol_type = other DNA
taaagcacctgatacggttaacccaagtttatggcgtcaggcgcaactgataaatatcagtggtttatttgaagt

SEQ ID NO: 667706 - DNA, 75 bp, synthetic construct
  source 1..75: mol_type = other DNA
gcgcagataccgacctggatgatataactagttatattgctcgtttcgacatagatgcggcagaacgcttatggc

SEQ ID NO: 667707 - DNA, 75 bp, synthetic construct
  source 1..75: mol_type = other DNA
ggatcaaatcatggccccatcgactgcggctgccgccacctctgtcgccacggatgacgtacatcctgaagtgac

SEQ ID NO: 667708 - DNA, 75 bp, synthetic construct
  source 1..75: mol_type = other DNA
gccgaatgacaagctgaacagcaaccttaatctggtggcgcgtgaactggcgaaagttcgtgataaaggtttgcc

SEQ ID NO: 667709 - DNA, 75 bp, synthetic construct
  source 1..75: mol_type = other DNA
tcagaaactgcggcaggatttccttaatagtctgacggtagagatgttaaatcaggatctgcgccagcagttgtc

SEQ ID NO: 667710 - DNA, 75 bp, synthetic construct
  source 1..75: mol_type = other DNA
agaactggcgacactagggataacggaactggagtatgagttttaccgtcggctggtggaaaaacagttgctcac

SEQ ID NO: 667711 - DNA, 75 bp, synthetic construct
  source 1..75: mol_type = other DNA
ctatcgcctgcacggtgagtcgtggcgtgaaaaagtgatcgaacgcccggtggtacataaagattacgacgaaca

SEQ ID NO: 667712 - DNA, 75 bp, synthetic construct
  source 1..75: mol_type = other DNA
ggatcaaatcatggccccatctaccgccgctgcgaccacctctgtcgccacggatgacgtacatcctgaagtgac

SEQ ID NO: 667713 - DNA, 75 bp, synthetic construct
  source 1..75: mol_type = other DNA
aggcgctggtgctatttgccgttgcgccgctgctctccggtattacccgcgtggcgcgagcccgcttacataacc

SEQ ID NO: 667714 - DNA, 75 bp, synthetic construct
  source 1..75: mol_type = other DNA
aacagcatggcccgtctgcgtcttgatattactccgcgcatgacctgggctggttttggttttgcatttttagcg

SEQ ID NO: 667715 - DNA, 75 bp, synthetic construct
  source 1..75: mol_type = other DNA
gcaagccggttaacgacctgtcccgtggcgcactggttgatgatatcgtctacaccatcgcgctgactgcgattc

SEQ ID NO: 667716 - DNA, 75 bp, synthetic construct
  source 1..75: mol_type = other DNA
gcgcaaaagaaactggagttacagaaactgtttgctgcttatgcgcgagctgataccgatattctgatggggcag

SEQ ID NO: 667717 - DNA, 75 bp, synthetic construct
  source 1..75: mol_type = other DNA
tttgacgatgtgctgaatgatgatgtccgcgggctgtttaaccatgaccccaactttattctcggacggagcgct

SEQ ID NO: 667718 - DNA, 75 bp, synthetic construct
  source 1..75: mol_type = other DNA
gtatcgcgacattatcaaactgctgggccgccagagcgttggcccggatgcctccggctgggtgttccgcctgac

SEQ ID NO: 667719 - DNA, 75 bp, synthetic construct
  source 1..75: mol_type = other DNA
ctgccgccagaactggcgacactagggataacggaactggagtatgagttttaccgtcggctggtggatcgcctg

SEQ ID NO: 667720 - DNA, 75 bp, synthetic construct
  source 1..75: mol_type = other DNA
ttatatcgttttgtaccgagtagcagcttcaagcattgaaattgcaaatattgtgcatgcccgccgacaatttcc

SEQ ID NO: 667721 - DNA, 75 bp, synthetic construct
  source 1..75: mol_type = other DNA
gaaagctatggcagattcaccggtgaaccggatgagcttcagctggcacgatatttggggcactgttgcaaagtt

SEQ ID NO: 667722 - DNA, 75 bp, synthetic construct
  source 1..75: mol_type = other DNA
gatgttgaatcacgcattgaaaaactggagtgctatatcgctgaattgaaaaaaagtaccccaacaaaaaatgag

SEQ ID NO: 667723 - DNA, 75 bp, synthetic construct
  source 1..75: mol_type = other DNA
ctacataatcctgtacagagtagctgcttcaagcattgagattgtaagcgtgacacatgctcgccgacaatttcc

SEQ ID NO: 667724 - DNA, 75 bp, synthetic construct
  source 1..75: mol_type = other DNA
ttaagatctgcgctggcggtatggcaggcaccacggcagccgcactgggttttgcacccagcgtagcactcgcag

SEQ ID NO: 667725 - DNA, 75 bp, synthetic construct
  source 1..75: mol_type = other DNA
atgttacccattttatggctaccatctgctcgcgatgatttgcgtcagatcgtaacctatattgctaaggaaaac

SEQ ID NO: 667726 - DNA, 75 bp, synthetic construct
  source 1..75: mol_type = other DNA
tgaccgtactgaaggtgccacgctggaattttacgaagctgaggcgaaaaaacaggcgaagcagtttttcatgga

SEQ ID NO: 667727 - DNA, 75 bp, synthetic construct
  source 1..75: mol_type = other DNA
atggttgaaagagcatcttcagcagcctgaaaaaaacgccgcgatgagcagtttgctgcgttttacgattattgc

SEQ ID NO: 667728 - DNA, 75 bp, synthetic construct
  source 1..75: mol_type = other DNA
aaaaccggcgctgctatattatgctattttccaccgagatcgtccgttatgagctttcaggcccacaaggcatcg

SEQ ID NO: 667729 - DNA, 75 bp, synthetic construct
  source 1..75: mol_type = other DNA
tggataacctacaaaggaaatctaccgggaagaattactggttctctgaagactccaccggaatcacaaccttaa

SEQ ID NO: 667730 - DNA, 75 bp, synthetic construct
  source 1..75: mol_type = other DNA
gtgaaggggatggtccgttgccggaaaatcgccccgtaattttagaggctgaaccgccccgggaatcctggagac

SEQ ID NO: 667731 - DNA, 75 bp, synthetic construct
  source 1..75: mol_type = other DNA
atgaataaacaatacaaactggttgttaaagggataaataattacccggataagattactgttactgtggtactg

SEQ ID NO: 667732 - DNA, 75 bp, synthetic construct
  source 1..75: mol_type = other DNA
ctgaggctgcaattgacgactatagaggcgatgcttgcgatggatggagcgaagaggtcgaaagcatttgctggg

SEQ ID NO: 667733 - DNA, 75 bp, synthetic construct
  source 1..75: mol_type = other DNA
tttgaacacggtgtgacggactgttacaccctgttccgggatgcataccatctggcggggataacgctgccggat

SEQ ID NO: 667734 - DNA, 75 bp, synthetic construct
  source 1..75: mol_type = other DNA
cggccagaacctgtacctggacaacctggcggaaaacggcttttaccgggtgtctccgtcctgtgcacaggcagg

SEQ ID NO: 667735 - DNA, 75 bp, synthetic construct
  source 1..75: mol_type = other DNA
tgcagataaaaagtgcgctgccctggtggctggtctgccggggagacattcataaatttcgctgtgtgccgcacc

SEQ ID NO: 667736 - DNA, 75 bp, synthetic construct
  source 1..75: mol_type = other DNA
ccagaaagcggaacaaaacagcccaaatgcgttacaaaacgagccagaaacgaaacaacctgagccagtagcgca

SEQ ID NO: 667737 - DNA, 75 bp, synthetic construct
  source 1..75: mol_type = other DNA
tttcggcggtttcctttccattaataaactttcgcagtaaatcccgttttatgacacagactgaatcagcgattc

SEQ ID NO: 667738 - DNA, 75 bp, synthetic construct
  source 1..75: mol_type = other DNA
taaaattcgtttccagctcaatctcgagacgctcgctgagcaacggaaaaaatcacaaaacaaactgtctctcga

SEQ ID NO: 667739 - DNA, 75 bp, synthetic construct
  source 1..75: mol_type = other DNA
ccgctggaggttgcaaaaaaaggcaagggcgagggctcgcccatcgagctggcgctcgttcgaattaaaggtgca

SEQ ID NO: 667740 - DNA, 75 bp, synthetic construct
  source 1..75: mol_type = other DNA
ttgattttcgcggcgcgagtacgccggggaattttcgtcgactgacgaaacaggttgtcgaaggtgacgaggtcg

SEQ ID NO: 667741 - DNA, 75 bp, synthetic construct
  source 1..75: mol_type = other DNA
ttacaacgatttggccgccgcttcagcctgtatgtgaacacggcggcggaagccatccgcgccctgtcgcagcag

SEQ ID NO: 667742 - DNA, 75 bp, synthetic construct
  source 1..75: mol_type = other DNA
aacagcctgatgcccttcgctacgaccgccagactatttttggccttgtccgtgagcgtccgatcgacattcaca

SEQ ID NO: 667743 - DNA, 75 bp, synthetic construct
  source 1..75: mol_type = other DNA
gcgccgaaacacgcggcgatcgtgataaacgccatgtattcgctgaatctcgacggctggggcgagattgtcagc

SEQ ID NO: 667744 - DNA, 75 bp, synthetic construct
  source 1..75: mol_type = other DNA
aggaccacgccagcgataatgaaactggtgagacggcagatcccttaattgtggtgaccagccatcataaatata

SEQ ID NO: 667745 - DNA, 75 bp, synthetic construct
  source 1..75: mol_type = other DNA
ggactgttacacgctgttccgggatgcttaccatctggcggggattgagatgccggattttcatcgcggggatga

SEQ ID NO: 667746 - DNA, 75 bp, synthetic construct
  source 1..75: mol_type = other DNA
cgggatgcataccatctggcggggactgagatgccggattttcatcgcgaggatgactggtggcgtcacggtcag

SEQ ID NO: 667747 - DNA, 75 bp, synthetic construct
  source 1..75: mol_type = other DNA
cgcatctcaccgggcggctctttgagcacggggtgacggactgttacacgctgttccgggatgcttaccatctgg

SEQ ID NO: 667748 - DNA, 75 bp, synthetic construct
  source 1..75: mol_type = other DNA
cgggatgcataccatctggcggggactgaaatgccggattttcatcgcgaggatgactggtggcgcaacggccag

SEQ ID NO: 667749 - DNA, 75 bp, synthetic construct
  source 1..75: mol_type = other DNA
cagcaatattatgttttccatgggttctgcaatggcgctgggtggtgtggctcagatgctggccccgaaggcaaa

SEQ ID NO: 667750 - DNA, 75 bp, synthetic construct
  source 1..75: mol_type = other DNA
tggttcacgacggatatcccaggacatcagcacccgtgatgagggcggtgacgggaaagtggtggttatcggacg

SEQ ID NO: 667751 - DNA, 75 bp, synthetic construct
  source 1..75: mol_type = other DNA
attgcccagggtaacccgatgccggtgccttacggggaaatgctggttggctcccggcgaatctctcaggacatc

SEQ ID NO: 667752 - DNA, 75 bp, synthetic construct
  source 1..75: mol_type = other DNA
tttctgccaccacgatgctgttttcactgggggccagcatgatactgggcggtgtggcccagatgctggccccga

SEQ ID NO: 667753 - DNA, 75 bp, synthetic construct
  source 1..75: mol_type = other DNA
tttctgccaccacgatgctgttttcactgggtgccagtatgattctgggtggtgtggcccagatgctggcaccga

SEQ ID NO: 667754 - DNA, 75 bp, synthetic construct
  source 1..75: mol_type = other DNA
cctcactggataacatgattgcccaggggaacccgatgccggtgccttacggtgaaatgctggttggctcccggc

SEQ ID NO: 667755 - DNA, 75 bp, synthetic construct
  source 1..75: mol_type = other DNA
tctgatcccgaaactcattaacggtcgcgtcgtttatcgttgggacaaccagggccggcgaaatgaggcgctcga

SEQ ID NO: 667756 - DNA, 75 bp, synthetic construct
  source 1..75: mol_type = other DNA
gctaataaatcatccggtaccgctggtttcgtcactggcgcggcaggtggtgcgcttgcaggtgcgcagattggc

SEQ ID NO: 667757 - DNA, 75 bp, synthetic construct
  source 1..75: mol_type = other DNA
cgcccatttgcgcgtttccgctcattgtttgattcgccgtgatggtgaaattgtccagtatgttcctttcgataa

SEQ ID NO: 667758 - DNA, 75 bp, synthetic construct
  source 1..75: mol_type = other DNA
acaatattagcctgccgccaggcgagtttggcggtccgtggatcgacgcattattcaccggaactattgatccgc

SEQ ID NO: 667759 - DNA, 75 bp, synthetic construct
  source 1..75: mol_type = other DNA
agcacctcagcaaagctgtttactgcaaaggtggcagtgatggcggctctaaagcccaggcacgcgcaactgaaa

SEQ ID NO: 667760 - DNA, 75 bp, synthetic construct
  source 1..75: mol_type = other DNA
gaaaactgcgcggcgaggaaccttattgccctgaaaaaggcgggaaaggtggctccgataaaagtgcaaagtatg

SEQ ID NO: 667761 - DNA, 75 bp, synthetic construct
  source 1..75: mol_type = other DNA
gagtcagatttctcagcaaagtgcggctcttgcagcggcaaatgccaacagaccatcagcaatgcaatctgctat

SEQ ID NO: 667762 - DNA, 75 bp, synthetic construct
  source 1..75: mol_type = other DNA
aggtgcagctgcaggtactgcaatcatgcctggctggggtacagcaattggtgccggagtcggtcttcttggttc

SEQ ID NO: 667763 - DNA, 75 bp, synthetic construct
  source 1..75: mol_type = other DNA
aaatctttcctctcttcaggggcaaggtcaggcgcttaaccagtattacaactctcagcagtataaagaccttgc

SEQ ID NO: 667764 - DNA, 75 bp, synthetic construct
  source 1..75: mol_type = other DNA
atgttatatgcatttacgctgggcagaaaactgcgcggcgaggaaccttattaccctgaaaaaggcgggaaaggt

SEQ ID NO: 667765 - DNA, 75 bp, synthetic construct
  source 1..75: mol_type = other DNA
atgacggggcattgcgatattgcgccggatcggaaaaccgatcctggtcctgcatttgattgggcacggtttcgt

SEQ ID NO: 667766 - DNA, 75 bp, synthetic construct
  source 1..75: mol_type = other DNA
cagtatcaggggcgcgaacgctgcaatgatttttctattgggattgagcttgaaggcaccgatacgctggcgtat

SEQ ID NO: 667767 - DNA, 75 bp, synthetic construct
  source 1..75: mol_type = other DNA
aggcacatcctttctttgctgagatcgcccatttgcgcgtctccgctcactgtttgattcgccgtgatggtgaaa

SEQ ID NO: 667768 - DNA, 75 bp, synthetic construct
  source 1..75: mol_type = other DNA
tggcatgctgcctgtcgtatggcggaacaactgaccaccctgcgttaccggtttggtctgcaggctggtgaaagc

SEQ ID NO: 667769 - DNA, 75 bp, synthetic construct
  source 1..75: mol_type = other DNA
tttggcttgggatccagcagtggcgcgccgctggcgcaattgatcttaaatcgctggcctctactcaatcgcgtc

SEQ ID NO: 667770 - DNA, 75 bp, synthetic construct
  source 1..75: mol_type = other DNA
ccatcattttagaggcgcaggacgtgttgataacctacagaggaaagctaccgggaagaattactggttctctga

SEQ ID NO: 667771 - DNA, 75 bp, synthetic construct
  source 1..75: mol_type = other DNA
ctggtctgaataaggcgctggctgcaggggctactgaaatcacgaaagaagaatattttgcccgcaaaaacggta

SEQ ID NO: 667772 - DNA, 75 bp, synthetic construct
  source 1..75: mol_type = other DNA
acggatatcccaggacatcagcacccgtgatgaaggtagtgacgggacggtggtggttatcggtcggcaggggta

SEQ ID NO: 667773 - DNA, 75 bp, synthetic construct
  source 1..75: mol_type = other DNA
atgaagaaaaaatacgaactgggtgttaaagggataaataattacccggataagattactgtggcactggaaatt

SEQ ID NO: 667774 - DNA, 75 bp, synthetic construct
  source 1..75: mol_type = other DNA
gccacctgttccagcggtcagtgtttgtgaatcttactaatcccaaaagtattgtgtttctggcggcgctatttc

SEQ ID NO: 667775 - DNA, 75 bp, synthetic construct
  source 1..75: mol_type = other DNA
gcacggggtgacggactgttatacgctgttccgcgatgcctatcatcttgcaggtatcgatttgccggattttta

SEQ ID NO: 667776 - DNA, 75 bp, synthetic construct
  source 1..75: mol_type = other DNA
gttttttactacattatgtatggaatctatattttccccaataacactaaatatttttgcctttacaataattgt

SEQ ID NO: 667777 - DNA, 75 bp, synthetic construct
  source 1..75: mol_type = other DNA
atgaagaaaaaatacgaactgggtgttaaagggataaataattacccggataagattactgttactgttactgtt

SEQ ID NO: 667778 - DNA, 75 bp, synthetic construct
  source 1..75: mol_type = other DNA
ctcaacagacatttacccgcgcatttaaaaagcaatttgctcaaacacctgcgctgtaccgtcgttccccggaat

SEQ ID NO: 667779 - DNA, 75 bp, synthetic construct
  source 1..75: mol_type = other DNA
cgaaggcaaagacgccggagtacaaaagcacggataacggcagacagaacacgtatttttcgtcactggacaaca

SEQ ID NO: 667780 - DNA, 75 bp, synthetic construct
  source 1..75: mol_type = other DNA
ggtttttaccgtgtcccactgacagaggcgcagcctggcgacgtgctgctgtgctgttttggttcatcggtgccg

SEQ ID NO: 667781 - DNA, 75 bp, synthetic construct
  source 1..75: mol_type = other DNA
gtcctctgcacagccgggcgatatcctgctgtgctgcttcggcgcatcggtggctaatcatgccgccatttactg

SEQ ID NO: 667782 - DNA, 75 bp, synthetic construct
  source 1..75: mol_type = other DNA
atggtaccggaagactggctgcgggcacaaatacagggcgaggtggtggcgctggtccacagccatcccggtggt

SEQ ID NO: 667783 - DNA, 75 bp, synthetic construct
  source 1..75: mol_type = other DNA
aaccatgccgccatttactgcggcaacggtgagctgcttcaccatctgcctgaacaactgagtaaacgggagagg

SEQ ID NO: 667784 - DNA, 75 bp, synthetic construct
  source 1..75: mol_type = other DNA
gccaccacgatgctgttttcacttggagccagcatgatactgggtggtgtggctcagatgcttgccccgaaggca

SEQ ID NO: 667785 - DNA, 75 bp, synthetic construct
  source 1..75: mol_type = other DNA
acgtatttttcgtcactggacaacatgattgctcaggggaatccgatgccggtgccttacggtgaaatgctggtt

SEQ ID NO: 667786 - DNA, 75 bp, synthetic construct
  source 1..75: mol_type = other DNA
ctgctgtgctgttttggttcatcggtacccaatcatgctgccatttactgtggcaatggtgaactgcttcaccat

SEQ ID NO: 667787 - DNA, 75 bp, synthetic construct
  source 1..75: mol_type = other DNA
tgcagtagatgacactgattcgtcagttattgccgctgcgttgcgcgaagccgaagaagaggttgctatcccccc

SEQ ID NO: 667788 - DNA, 75 bp, synthetic construct
  source 1..75: mol_type = other DNA
ctgctgtgctgttttggttcatctgtgccgaatcatgccgccatttactgtggtgacggcgagctgctgcaccat

SEQ ID NO: 667789 - DNA, 75 bp, synthetic construct
  source 1..75: mol_type = other DNA
cgcacacactccctctggcgtcaccaggcatggcccgcatctgcctttacggggatttccaacgatttggccgcc

SEQ ID NO: 667790 - DNA, 75 bp, synthetic construct
  source 1..75: mol_type = other DNA
tggccaatcacgccgccatttactgcggtaacggtgaactgcttcaccatatacctgaacaactgagtaaacggg

SEQ ID NO: 667791 - DNA, 75 bp, synthetic construct
  source 1..75: mol_type = other DNA
ctgccaccacgatgctgttttcactgggggccagcatgatactgggtggtgtggctcagatgcttgccccgaagg

SEQ ID NO: 667792 - DNA, 75 bp, synthetic construct
  source 1..75: mol_type = other DNA
cagccatcgtggggtctttcttcactgccggggcatcaatggcgttatggggttcagccctggcagccggtggtt

SEQ ID NO: 667793 - DNA, 75 bp, synthetic construct
  source 1..75: mol_type = other DNA
cataaattccgctgtgtgccacatctgacaggacggcgctttgagcacggggtaacggactgttacacgctgttc

SEQ ID NO: 667794 - DNA, 75 bp, synthetic construct
  source 1..75: mol_type = other DNA
cgcacacactccctctggcgtcacccggcatggcacgcatctgcctttacggggatttccaacgatttggccgcc

SEQ ID NO: 667795 - DNA, 75 bp, synthetic construct
  source 1..75: mol_type = other DNA
cgcacacactccctctggcgtcacctggcatggctcgcatctgcctttacggggatttgcaacgatttggccgcc

SEQ ID NO: 667796 - DNA, 75 bp, synthetic construct
  source 1..75: mol_type = other DNA
ccggagggggagcggtatatcccttgtgtgaatatttccgcagagccggaggcgtattttcgtatcgcaccggaa

SEQ ID NO: 667797 - DNA, 75 bp, synthetic construct
  source 1..75: mol_type = other DNA
aacctgtacctggacaatatggaggccactggcttttgccgggtgtccctgtcctctgcacaggcaggcgatatc

SEQ ID NO: 667798 - DNA, 75 bp, synthetic construct
  source 1..75: mol_type = other DNA
ttttgttcaggtctggggaaatggagcaaacttcgacaacacgattttgcgccgttcatacgaacggcaggggat

SEQ ID NO: 667799 - DNA, 75 bp, synthetic construct
  source 1..75: mol_type = other DNA
ttcacgacggatatcccaggacatcagcacccgtgatgaaggcggagacgggaaggtggtggttatcgggcggca

SEQ ID NO: 667800 - DNA, 75 bp, synthetic construct
  source 1..75: mol_type = other DNA
atgaatacacaaacccaattccaactgaaaaaagaaactcttttctctgaaaatgaaaccacaaacagtaaacag

SEQ ID NO: 667801 - DNA, 75 bp, synthetic construct
  source 1..75: mol_type = other DNA
cgggaacagaaactcttttttctgaaactgaaactgcgaacagtaaacaacttgctgttttgaaaactaactttc

SEQ ID NO: 667802 - DNA, 75 bp, synthetic construct
  source 1..75: mol_type = other DNA
tatgacatctggctgaaaggtgatcactacaaatggcgtgctatgcgcactaatggcgtggctgagcgtctgtgt

SEQ ID NO: 667803 - DNA, 75 bp, synthetic construct
  source 1..75: mol_type = other DNA
gtgaaaatggtcggcaccactgatgatccgatcgattctctggagcatcatgcagagatcgccaaagacggctct

SEQ ID NO: 667804 - DNA, 75 bp, synthetic construct
  source 1..75: mol_type = other DNA
tctgatgattgaccttgaaacaatgggaaaaaatcctgatgcgccaataaacgctatagccggtaagttttttga

SEQ ID NO: 667805 - DNA, 75 bp, synthetic construct
  source 1..75: mol_type = other DNA
agaaaattaaaaatgaaaaccctgattacaggggagacctaggttttaaaatattcgaaacagtcaatgattttc

SEQ ID NO: 667806 - DNA, 75 bp, synthetic construct
  source 1..75: mol_type = other DNA
aaggatgtagggttattgtctgaaatatttaaggctttaaatattgaacatcgagatattgtgctcgatttcttt

SEQ ID NO: 667807 - DNA, 75 bp, synthetic construct
  source 1..75: mol_type = other DNA
ttatatccgtagagatatcggagcatttatactcgggcaaataaaaatttgcaaaaaatgcaaagataatgtgtt

SEQ ID NO: 667808 - DNA, 75 bp, synthetic construct
  source 1..75: mol_type = other DNA
gcccctgtcctctgcacaggcgggcgatattctgctgtgctgctttggtgcttcggtaccgaaccatgccgccat

SEQ ID NO: 667809 - DNA, 75 bp, synthetic construct
  source 1..75: mol_type = other DNA
aataatttactgcgtcgacttaacgccctcaaacgcgctgactttagtcaccatgcggatcgcatccgctgcccg

SEQ ID NO: 667810 - DNA, 75 bp, synthetic construct
  source 1..75: mol_type = other DNA
cgatcccgatacgtttaatgctctgttactcaacgggctaaccagcctgctacatcaccgtgaagctgctctgta

SEQ ID NO: 667811 - DNA, 75 bp, synthetic construct
  source 1..75: mol_type = other DNA
tggaggtgacgggtttttaccgtgtcgcactgacagaggcacagccgggcgatgtgctgctgtgctgttttggtt

SEQ ID NO: 667812 - DNA, 75 bp, synthetic construct
  source 1..75: mol_type = other DNA
gctcaggactgcgcttataaatttattgtctgcaaggataaacccggcataccccgccctgccctcgattcctgg

SEQ ID NO: 667813 - DNA, 75 bp, synthetic construct
  source 1..75: mol_type = other DNA
gacagaggcgcagcctggcgacgtgctgctgtgctgttttggttcatcggtgccgaatcatgccgccatttactg

SEQ ID NO: 667814 - DNA, 75 bp, synthetic construct
  source 1..75: mol_type = other DNA
gggaataatcccgacacgctggcggaagattacagtatggcgcagatggcagaggaactgcatctggcgttgatg

SEQ ID NO: 667815 - DNA, 75 bp, synthetic construct
  source 1..75: mol_type = other DNA
aacctgtacctggacaatatggaggcaacgggcttttaccgggtgcccctgtcctctgcacaggcgggcgatatc

SEQ ID NO: 667816 - DNA, 75 bp, synthetic construct
  source 1..75: mol_type = other DNA
atgtcgccggaggactggctgcgggcagagatgcagggtgagattgtggcactggtccacagtcaccccggtggt

SEQ ID NO: 667817 - DNA, 75 bp, synthetic construct
  source 1..75: mol_type = other DNA
cggggtgacattcacaaattccgctgtgtgccacatctgacgggacggcgctttgagcacggggtgacggactgt

SEQ ID NO: 667818 - DNA, 75 bp, synthetic construct
  source 1..75: mol_type = other DNA
gtatttttcctcactggacaacatgattgctcaggggaacccgatgccggtgccttacggggaaatgctggttgg

SEQ ID NO: 667819 - DNA, 75 bp, synthetic construct
  source 1..75: mol_type = other DNA
gtcagcggcgcagccgggcgatgtgctgctgtgctgctttggttcatcggtgccgaatcatgccgcgatttactg

SEQ ID NO: 667820 - DNA, 75 bp, synthetic construct
  source 1..75: mol_type = other DNA
ccggaagactggctgcgggcagagatgcagggggagattgtggcgctggtccacagtcatcccggtgggctgccc

SEQ ID NO: 667821 - DNA, 75 bp, synthetic construct
  source 1..75: mol_type = other DNA
gcccgtgggagccaattgagaaggaagagatgaacaagattttcgtcttcggaaaggtgatcggcagcatgccgc

SEQ ID NO: 667822 - DNA, 75 bp, synthetic construct
  source 1..75: mol_type = other DNA
agcatgtccggcacgattgagccgggtgatctgctgttcgtcgacatcagcgttaagagcttcgacggcgacggg

SEQ ID NO: 667823 - DNA, 75 bp, synthetic construct
  source 1..75: mol_type = other DNA
tcccgttagatgatgcactgttacaattgcgggaatttatcgacgaaaactccggtgaattttttgttcatgtct

SEQ ID NO: 667824 - DNA, 75 bp, synthetic construct
  source 1..75: mol_type = other DNA
ggaccgccgccgggctggaaatcccgacgatgttaattgccggttattttgccaaacgtctgggtaagcggttct

SEQ ID NO: 667825 - DNA, 75 bp, synthetic construct
  source 1..75: mol_type = other DNA
ggaagcctactgtcaaccattccaaatacttcaagattgacgttcttgatatagaagtgagtgccgggccgggag

SEQ ID NO: 667826 - DNA, 75 bp, synthetic construct
  source 1..75: mol_type = other DNA
ctcaccgtgggacccgatcgagaaagacgagatgaaccgggtgttcatcttcggtaaggttattgggagcatgcc

SEQ ID NO: 667827 - DNA, 75 bp, synthetic construct
  source 1..75: mol_type = other DNA
gcctgtcagcctgagcatgacggattcagaaaaatcacaggcgtcgaagctgaagagggggcagaagatcactgt

SEQ ID NO: 667828 - DNA, 75 bp, synthetic construct
  source 1..75: mol_type = other DNA
tacgcctaatgtaaattataaggcaacgctttatgttaattatgatgaaaaagaaaattattatctttttgaggt

SEQ ID NO: 667829 - DNA, 75 bp, synthetic construct
  source 1..75: mol_type = other DNA
gatgagtatgatgtttcatgtggtttgaagatcgatggtcaaatggatgagttcttatccaatctgaaatcttta

SEQ ID NO: 667830 - DNA, 75 bp, synthetic construct
  source 1..75: mol_type = other DNA
agaaagggcagaagatagttgttacttgtgaaaatatgcaattattcattggtgcgccatcaggtagtaactgta

SEQ ID NO: 667831 - DNA, 75 bp, synthetic construct
  source 1..75: mol_type = other DNA
aaggtcagaagatcaccgtgacttgcgcaaagatgcagtttttcatcggtgcaccgtctggcggtaactgcacct

SEQ ID NO: 667832 - DNA, 75 bp, synthetic construct
  source 1..75: mol_type = other DNA
cctagctgagctgtatgacgccaatgaagttgccgccgatgataaaattggtgggcgtaaagtagaaatcacagg

SEQ ID NO: 667833 - DNA, 75 bp, synthetic construct
  source 1..75: mol_type = other DNA
tcacggggtgacggactgttacacgctgttccgggacgcttatcatctggcaggaattgagataccggattttca

SEQ ID NO: 667834 - DNA, 75 bp, synthetic construct
  source 1..75: mol_type = other DNA
tcacgatagcgataatgaaactggcgagacggcagatctctcaattaaggtgaacggtcatcaagaaatcacatc

SEQ ID NO: 667835 - DNA, 75 bp, synthetic construct
  source 1..75: mol_type = other DNA
ccagattgacgacgcgctgaagttggcgaacgaaggtaaagtcaaagaagcacaggccgccgcagagcaactgaa

SEQ ID NO: 667836 - DNA, 75 bp, synthetic construct
  source 1..75: mol_type = other DNA
ccagttccctattgcgcttgtccagcgtgttgaatatatccgtgggccgcgctccgctgtttatggttccgatgc

SEQ ID NO: 667837 - DNA, 75 bp, synthetic construct
  source 1..75: mol_type = other DNA
ttatggttccgatgcaataggcggggtggtgaatatcatcacgacgcgcgatgaacccggaacggaaatttcagc

SEQ ID NO: 667838 - DNA, 75 bp, synthetic construct
  source 1..75: mol_type = other DNA
aattatgtggtctggcatccagtttgctacgtgatttacccgccacaacaccgatcgccttaatcggtagcgcaa

SEQ ID NO: 667839 - DNA, 75 bp, synthetic construct
  source 1..75: mol_type = other DNA
tggccatttaattatgcatagggcagtggaggatgactacctgaatgataaagaattattcgacctggtggagtt

SEQ ID NO: 667840 - DNA, 75 bp, synthetic construct
  source 1..75: mol_type = other DNA
cttcccttaaatgagttatctgcaattacacgatttaaagaatcagatatgattcattctgacaatgttatttca

SEQ ID NO: 667841 - DNA, 75 bp, synthetic construct
  source 1..75: mol_type = other DNA
acaaaaccggacgtgaggcggtgatgttcagctcttttttacgcgctcaggtttcactggcatgggtcattggcc

SEQ ID NO: 667842 - DNA, 75 bp, synthetic construct
  source 1..75: mol_type = other DNA
tatgtctgtatccttgtcttttttagttgatataaactcattgattgtttttatatttaataacctctcatttct

SEQ ID NO: 667843 - DNA, 75 bp, synthetic construct
  source 1..75: mol_type = other DNA
ttatctgcgaggataaacctggcataccccgccctgccctcgattcatgggatgctgaatatatgcaggaaaacc

SEQ ID NO: 667844 - DNA, 75 bp, synthetic construct
  source 1..75: mol_type = other DNA
tgtttttacgcaggaatgctgatggcgcattcacctgtcattctgttgggcttgcagctgctaaatgctattttt

SEQ ID NO: 667845 - DNA, 75 bp, synthetic construct
  source 1..75: mol_type = other DNA
ccgggttcagccagcgcagtcgcaccgcctacagtggacaacagatgctggaggagtatgtcaagttctatcaga

SEQ ID NO: 667846 - DNA, 75 bp, synthetic construct
  source 1..75: mol_type = other DNA
ggaagcgcttgtgcccggccagcgggaaattggcagtcaggccgcagcgaatatgtggggcaacgtctatccccg

SEQ ID NO: 667847 - DNA, 75 bp, synthetic construct
  source 1..75: mol_type = other DNA
cggaggcagtgacggagaataccggcacgaaaaaccaccaatggcagcgtctgtcaccggggctgaaaaacagct

SEQ ID NO: 667848 - DNA, 75 bp, synthetic construct
  source 1..75: mol_type = other DNA
cggacgcggtgacggagaataccgggacaaaaaaccataaatggcagcgcctgtcgccggggctgaaaaacagct

SEQ ID NO: 667849 - DNA, 75 bp, synthetic construct
  source 1..75: mol_type = other DNA
gctggtcagtcagacagccggagggctggagaatgccattacgaaaggcctggcggggctgagtgccggaggggg

SEQ ID NO: 667850 - DNA, 75 bp, synthetic construct
  source 1..75: mol_type = other DNA
aagcgccgttcagccattcgtttcaaatacgcagatgcgctgggtcatccggccacacagcttatcggcgggatg

SEQ ID NO: 667851 - DNA, 75 bp, synthetic construct
  source 1..75: mol_type = other DNA
gtcagcggagaacggtaatgccgccttttcactgtggcagccctatagctgctgtaaaaagcgcgggcagcgatt

SEQ ID NO: 667852 - DNA, 75 bp, synthetic construct
  source 1..75: mol_type = other DNA
aaatccggcggatatgaaagcacagggggagcggcgttcagccattcgcttcaaatacgcagatgcgctggggca

SEQ ID NO: 667853 - DNA, 75 bp, synthetic construct
  source 1..75: mol_type = other DNA
gtgccggcgcgctgttactgagtgtggcatcactgcctctggcgtctgcgtcactgaatactgccagcattatcg

SEQ ID NO: 667854 - DNA, 75 bp, synthetic construct
  source 1..75: mol_type = other DNA
gtggtttccacctacacggcaccggggggaaatccctggaaagagatgtcgctggtcagtcagacagccggaggg

SEQ ID NO: 667855 - DNA, 75 bp, synthetic construct
  source 1..75: mol_type = other DNA
aaccgccgggatggctattggccgccggacgcggtgacggagaataccgggacaaaaaaccataaatggcagcgc

SEQ ID NO: 667856 - DNA, 75 bp, synthetic construct
  source 1..75: mol_type = other DNA
tactggctgtactgtacaccctttggctgtaaggtccggacgtccgtgaaggtttcacattttattcctgaagcg

SEQ ID NO: 667857 - DNA, 75 bp, synthetic construct
  source 1..75: mol_type = other DNA
tccctgaatacggcacagatagtggccggtgccatttctcagagctgcatcagctggcgggtcagcggtatctgt

SEQ ID NO: 667858 - DNA, 75 bp, synthetic construct
  source 1..75: mol_type = other DNA
ttaaatatgccgacgcgctggggcatccggcaacgcgtcttattggcggaatggtgccgggattcagctgcgatt

SEQ ID NO: 667859 - DNA, 75 bp, synthetic construct
  source 1..75: mol_type = other DNA
gcgcagctggaagcggcgaagcagaatgctgacaccctgaagggagaagcggacagtgccgtgaaggcgttgccg

SEQ ID NO: 667860 - DNA, 75 bp, synthetic construct
  source 1..75: mol_type = other DNA
ccaggtaccggcggtgacggatcaggacggtaacggcaaggcggatgcagcagaagcgtccctggctgcagcgga

SEQ ID NO: 667861 - DNA, 75 bp, synthetic construct
  source 1..75: mol_type = other DNA
aaaattgatggacctccgacagtctctacgaaaccggtaaatgggaattctttcggacaggtaccggaagtgaac

SEQ ID NO: 667862 - DNA, 75 bp, synthetic construct
  source 1..75: mol_type = other DNA
ggttgaagtggtggcgatggcggaagaagaaggcagctgtagattcaatctgtcaatgcaacacccctttcaatt

SEQ ID NO: 667863 - DNA, 75 bp, synthetic construct
  source 1..75: mol_type = other DNA
caatgaaacccatccgcatagtgcgttaggttatctctcaccaagggaatatcgacgtcagcgggtaacgtcaac

SEQ ID NO: 667864 - DNA, 75 bp, synthetic construct
  source 1..75: mol_type = other DNA
tcgtcaccagcactgaaggcagaggatgacggttctgtttctgttgagctgccgggtgatgccaataaaggcgat

SEQ ID NO: 667865 - DNA, 75 bp, synthetic construct
  source 1..75: mol_type = other DNA
atgacacagagctccgtcagacgggtggctgcagccacctgcctgcttcttttgcctttattcgccaccccggcc

SEQ ID NO: 667866 - DNA, 75 bp, synthetic construct
  source 1..75: mol_type = other DNA
cagctggcgggtcagcggtatctgttactggctgcactgctcctggtcggggtgtcgggtcagaacgtccgtgaa

SEQ ID NO: 667867 - DNA, 75 bp, synthetic construct
  source 1..75: mol_type = other DNA
agccgggaagtggaagctcttccgaccaggtaccggaagtgaacgatcagaacggcaacggcaagccggatgcac

SEQ ID NO: 667868 - DNA, 75 bp, synthetic construct
  source 1..75: mol_type = other DNA
gaagcagacgatgctgccgcgcaggctgataaggacggtaacggcctgatcacgccggaagaggcgaaagccgtg

SEQ ID NO: 667869 - DNA, 75 bp, synthetic construct
  source 1..75: mol_type = other DNA
ggtaaaacatttgaagtaacgtcagatttacatagtgcttgtaatgttttcttgggcgtaattagtagtttacac

SEQ ID NO: 667870 - DNA, 75 bp, synthetic construct
  source 1..75: mol_type = other DNA
tggaggcgactggtttttaccgtgccgcactgacagaggcgcagccgggcgatgtgctgctgtgctgctttggtt

SEQ ID NO: 667871 - DNA, 75 bp, synthetic construct
  source 1..75: mol_type = other DNA
caacgatttggccgccgcctcagcctgtatgtgaacacggcagcggaagccatccgggcgctgtcgttacaggtg

SEQ ID NO: 667872 - DNA, 75 bp, synthetic construct
  source 1..75: mol_type = other DNA
cacaaggagaacactggcggcaatcagcatcacaatagcgataatgaaactggcgagacggcagatcactcaatt

SEQ ID NO: 667873 - DNA, 75 bp, synthetic construct
  source 1..75: mol_type = other DNA
ggcggctgcaggtgcagagcgatttgccttggtggctggtctgccggggtgagattcataaattccgctgtgtgc

SEQ ID NO: 667874 - DNA, 75 bp, synthetic construct
  source 1..75: mol_type = other DNA
cagttttatctgcgtctggcgcaacgcattatgcacctgttcagcacgcgaacctcttccggcattttgtacgaa

SEQ ID NO: 667875 - DNA, 75 bp, synthetic construct
  source 1..75: mol_type = other DNA
aaccgtgcgcggctggcgtgggcgatggatttcgctgactggttgcaactgaccggagcgctgatcggacatatg

SEQ ID NO: 667876 - DNA, 75 bp, synthetic construct
  source 1..75: mol_type = other DNA
ccaacgctcagcgccattgccgcgctgcatctgctttctgaaaacgatgctgaacaattgcgagtggcgtatctg

SEQ ID NO: 667877 - DNA, 75 bp, synthetic construct
  source 1..75: mol_type = other DNA
gctggcgcatcttagcgaggatgatcgcaaacaggtgctaacgctgattgccgatttccgcaaagagctggataa

SEQ ID NO: 667878 - DNA, 75 bp, synthetic construct
  source 1..75: mol_type = other DNA
cgcatctgctaagtgatgtctgtgcgcgtgaagacgctgctgtcacgctgtcgcgcattaccgccttgctggtgg

SEQ ID NO: 667879 - DNA, 75 bp, synthetic construct
  source 1..75: mol_type = other DNA
ccaactggcgcgttatccattattgctggatgaactgctcgatccgaacacgctctaccagccgacggcgactga

SEQ ID NO: 667880 - DNA, 75 bp, synthetic construct
  source 1..75: mol_type = other DNA
tggtcgccatgtcggtatttatattggcaacaaccagtttgttcatgcttccaccagcagtggcgttatcatttc

SEQ ID NO: 667881 - DNA, 75 bp, synthetic construct
  source 1..75: mol_type = other DNA
ctgggcagacatacgccaacaacatgagcagcattgcacagcaaagtgcagctcttgccgctgctaatgccaaca

SEQ ID NO: 667882 - DNA, 75 bp, synthetic construct
  source 1..75: mol_type = other DNA
ggcagacatacgccaacaacatgagcagcattgcacagcaaagcgcagctctcgccgctgctaatgccaataagc

SEQ ID NO: 667883 - DNA, 75 bp, synthetic construct
  source 1..75: mol_type = other DNA
cggggctgcctctggagcaattgctggagcacaacttggcagcattgttcctggtattggtactggtattggtgc

SEQ ID NO: 667884 - DNA, 75 bp, synthetic construct
  source 1..75: mol_type = other DNA
cagcagaagctcagaagtatgccgcagacctgcagaatcagcagtggcagacgatcatgaaaaaccttgctccgt

SEQ ID NO: 667885 - DNA, 75 bp, synthetic construct
  source 1..75: mol_type = other DNA
ggcgctcttcaggggcaggcaaacgccgggcaaacatatgccaacaacatgagtcagatttcacagcaaagcgcg

SEQ ID NO: 667886 - DNA, 75 bp, synthetic construct
  source 1..75: mol_type = other DNA
ggaagattaattctctttatcaggcatataaagaaggtgtgtcattaccttatgatttttcagattatcaactga

SEQ ID NO: 667887 - DNA, 75 bp, synthetic construct
  source 1..75: mol_type = other DNA
aatgggtatctttgttagctcacgaatcaagatttgttaaaggtattttacaaaaaatatgtgggcggacaataa

SEQ ID NO: 667888 - DNA, 75 bp, synthetic construct
  source 1..75: mol_type = other DNA
cagaaagctcattcttaaatacgcaagaacctgaacttgttgcaatcccggagttcaatgaaagcgaagtggaaa

SEQ ID NO: 667889 - DNA, 75 bp, synthetic construct
  source 1..75: mol_type = other DNA
tgctggcgcgcgttcgtgagttgtttggggcaaccctgcggcaggtggaaccccttaccggcacatggactaacg

SEQ ID NO: 667890 - DNA, 75 bp, synthetic construct
  source 1..75: mol_type = other DNA
atgattgccacgacagaagctgcgttgcttgaaaccgttcgcgggctgttcgggcgaacgttacgcgaaatcaaa

SEQ ID NO: 667891 - DNA, 75 bp, synthetic construct
  source 1..75: mol_type = other DNA
tggactttgctgactggccgcaactgactggggcgctgaccgcacatatgaccaatgtgcgccgggtgtttaatg

SEQ ID NO: 667892 - DNA, 75 bp, synthetic construct
  source 1..75: mol_type = other DNA
atacttcaagattgacgttcttgacatagaagtaagcgctggtcctggtgtcattaaccgcgaattcgtagaagt

SEQ ID NO: 667893 - DNA, 75 bp, synthetic construct
  source 1..75: mol_type = other DNA
acaagtgggcaggtatctggatcatcccggtctttaccgcccattgctcaggcattaaaagatcatttagctgcc

SEQ ID NO: 667894 - DNA, 75 bp, synthetic construct
  source 1..75: mol_type = other DNA
acaagtggtcgggcatctggttcatcccagtctttacccccacttgctcaggcattaaaagatcatttagccgcc

SEQ ID NO: 667895 - DNA, 75 bp, synthetic construct
  source 1..75: mol_type = other DNA
cattgcacaggcattaaaagatcatttagctgcctatgaactatcgaaagcgtctgagactgtaaactttaagcc

SEQ ID NO: 667896 - DNA, 75 bp, synthetic construct
  source 1..75: mol_type = other DNA
cgtctggcgtagctcaacccacaatctggagactgacaagcggcaacgcgcgcggctcaacaaaaattgttgaaa

SEQ ID NO: 667897 - DNA, 75 bp, synthetic construct
  source 1..75: mol_type = other DNA
gagaaagacgagatgaaccgggtgttcattttcgggaaggttattggcagtatgccgcagacgtataggaaacac

SEQ ID NO: 667898 - DNA, 75 bp, synthetic construct
  source 1..75: mol_type = other DNA
aaatccgaatctggacccggagaaaagcaaacagtgggaaggcgcgtttgaaggcttaaccgctggggtgaactg

SEQ ID NO: 667899 - DNA, 75 bp, synthetic construct
  source 1..75: mol_type = other DNA
tatgattatgtcgatgcgcgcaatgcgattaccgacacgccgttgttacgccgtgctaaacagcaggtgaaatac

SEQ ID NO: 667900 - DNA, 75 bp, synthetic construct
  source 1..75: mol_type = other DNA
ccagcctgacgccaatcagttgcttgctgtatcacgtggtgaatttgttgcagggattagcgatccgaatgatcc

SEQ ID NO: 667901 - DNA, 75 bp, synthetic construct
  source 1..75: mol_type = other DNA
gtcctctgcacaggcaggcgatatcctgctgtgctgctttggcgcatcggtgccgaatcatgccgccatttactg

SEQ ID NO: 667902 - DNA, 75 bp, synthetic construct
  source 1..75: mol_type = other DNA
catggcaacattcgacggacatatcgttgaagcgttgatgaaaatgccagaagttaacgccatgtatccggaact

SEQ ID NO: 667903 - DNA, 75 bp, synthetic construct
  source 1..75: mol_type = other DNA
attgcacaggcattaaaagatcatttagctgcctatgaactatcgaaagcgtctgagactgtaagctttaagcca

SEQ ID NO: 667904 - DNA, 75 bp, synthetic construct
  source 1..75: mol_type = other DNA
gagcgatcacttaacctggctggcggaggcaatgatagatgcggtggtccagcaagcgtgggttcaaatggttgc

SEQ ID NO: 667905 - DNA, 75 bp, synthetic construct
  source 1..75: mol_type = other DNA
acggcagcggaagccatccgtgccctgtcgatgcagatgccgggattccgccgtcagatgaacgaaggctggtac

SEQ ID NO: 667906 - DNA, 75 bp, synthetic construct
  source 1..75: mol_type = other DNA
accccgccctgccctcgattcctgggatgctgaatatatgcaggaaaaccgctgggatgaggagtctgcttcttt

SEQ ID NO: 667907 - DNA, 75 bp, synthetic construct
  source 1..75: mol_type = other DNA
gcattacgctgcatggttgcaggaggcgctcagtaatgtgagtgacgaagccgggttaatgcgcgagctgcggct

SEQ ID NO: 667908 - DNA, 75 bp, synthetic construct
  source 1..75: mol_type = other DNA
aaccgccgcaggccgacgaatggcagcattacgctgcatggttgcaggaggcgctcagtaatgtgagtgacgaag

SEQ ID NO: 667909 - DNA, 75 bp, synthetic construct
  source 1..75: mol_type = other DNA
gcgcttaaacatttgatttctctgtgtgccgcatcgccgatgattgccagccagctggcgcgttatccattattg

SEQ ID NO: 667910 - DNA, 75 bp, synthetic construct
  source 1..75: mol_type = other DNA
ctgctgtgctgctttggcgcatcggtggccaatcatgccgccatttactgtggtgacggcgagctgctgcaccat

SEQ ID NO: 667911 - DNA, 75 bp, synthetic construct
  source 1..75: mol_type = other DNA
acagtaaattcggggtatttacgatcaacaataaagtcgtcagctcaacgacgacagtgaaggattatgaaaaca

SEQ ID NO: 667912 - DNA, 75 bp, synthetic construct
  source 1..75: mol_type = other DNA
atgaaatactttcctcttatacttttactgggcgtattttgcgcgaatgcggcaaaactgccagctgaagatgtc

SEQ ID NO: 667913 - DNA, 75 bp, synthetic construct
  source 1..75: mol_type = other DNA
ggatttcatgtcagtccccatcgtttcagacatacactggcgacgacattaatgaaacatcctgaacgtaatatg

SEQ ID NO: 667914 - DNA, 75 bp, synthetic construct
  source 1..75: mol_type = other DNA
atgaaagataatcacagttctgatgaacatcagcagaaagtggatgtatgggagcaaatgctgagtaattacttt

SEQ ID NO: 667915 - DNA, 75 bp, synthetic construct
  source 1..75: mol_type = other DNA
cggtcaacgcggtattaggtggcgcgctgagctatctgatccttaacccgattttgaatcgcaaaacgacggctg

SEQ ID NO: 667916 - DNA, 75 bp, synthetic construct
  source 1..75: mol_type = other DNA
actgacaaagttttccctaatcctggtaattcagacctgggactgatgactgcttttttcgaagcatacctgggc

SEQ ID NO: 667917 - DNA, 75 bp, synthetic construct
  source 1..75: mol_type = other DNA
gaacgtggtgctttaccgatgattgaccgcggcagtattcgtcaggcaatcgaccgttgcagcaatatctgggcg

SEQ ID NO: 667918 - DNA, 75 bp, synthetic construct
  source 1..75: mol_type = other DNA
agttcgagcataaggctgacaacctgattgcaaaattcaaagagtctggcggaacggtcagagagattgaggtat

SEQ ID NO: 667919 - DNA, 75 bp, synthetic construct
  source 1..75: mol_type = other DNA
aaacttgtcatgctaaacccgcaacttaaatcaaccgcagctggacgttaccagcttctttcccgttggtgggat

SEQ ID NO: 667920 - DNA, 75 bp, synthetic construct
  source 1..75: mol_type = other DNA
gccccgcggacagcagaaagaggccttgcttgcgtcagcagcactgcccctgctgttccgtccccgtgaggtaca

SEQ ID NO: 667921 - DNA, 75 bp, synthetic construct
  source 1..75: mol_type = other DNA
gaataaaaagttgttttcttcatacaaactactatttataccaacagagccaaatacattttcgcttaaaaaagt

SEQ ID NO: 667922 - DNA, 75 bp, synthetic construct
  source 1..75: mol_type = other DNA
gctcatttagggcaattaaagaaagcagagctttttatacaaaaatttagtaggcgtagtaattttcttatcgtc

SEQ ID NO: 667923 - DNA, 75 bp, synthetic construct
  source 1..75: mol_type = other DNA
cgcgcaagacattaccgtgcgtcaggctgactacggcaatgaagccgcactgacatctgcgctacagggcgtgga

SEQ ID NO: 667924 - DNA, 75 bp, synthetic construct
  source 1..75: mol_type = other DNA
gcttaccgtaaacagcttggtttgaagacttctcccccaaaagccaggacgcagtggcattgcagcagattaaag

SEQ ID NO: 667925 - DNA, 75 bp, synthetic construct
  source 1..75: mol_type = other DNA
atgcaggaactaaatccccagcgtaaagctttcctggatatggtggcctggtcagaaggaacggataacgggcga

SEQ ID NO: 667926 - DNA, 75 bp, synthetic construct
  source 1..75: mol_type = other DNA
ttttcttcatacaaggtactattcattccaactttcccaaatgttttttcacttaaaaaggttatatggttttat

SEQ ID NO: 667927 - DNA, 75 bp, synthetic construct
  source 1..75: mol_type = other DNA
tgctggcggtgctggcggcaatcagcgtcgtgctgctggcctgggtactgtggcgtctgctgcgtattatcagcc

SEQ ID NO: 667928 - DNA, 75 bp, synthetic construct
  source 1..75: mol_type = other DNA
tcaaatcaacagcagccggtcgctatcagcttctttcccgttggtgggatgcttaccgtaaacagcttggactga

SEQ ID NO: 667929 - DNA, 75 bp, synthetic construct
  source 1..75: mol_type = other DNA
ccagcttctttcccgttggtgggatgcttaccgtaaacagcttggtttgaaagacttctcccccaaaagccagga

SEQ ID NO: 667930 - DNA, 75 bp, synthetic construct
  source 1..75: mol_type = other DNA
tactgattactccgatcatcctcgcaaacttgtcacgctaaacccgaaacttaaatcaacagctgccggacgtta

SEQ ID NO: 667931 - DNA, 75 bp, synthetic construct
  source 1..75: mol_type = other DNA
gagcgtggcgctttaccgatgattgatcgcggtgatatccgtcaggctatcgaccgttgcagcaatatctgggct

SEQ ID NO: 667932 - DNA, 75 bp, synthetic construct
  source 1..75: mol_type = other DNA
gcggtaattggcttccagtcgccatataacgaccagcgcagtgtggttgcgctgctggcagacagcccgcgtggt

SEQ ID NO: 667933 - DNA, 75 bp, synthetic construct
  source 1..75: mol_type = other DNA
ggctggagttcgttggtcattatcagaatgtttgtgaaaaccccgccagttctacgctctggcttgacgtcgggc

SEQ ID NO: 667934 - DNA, 75 bp, synthetic construct
  source 1..75: mol_type = other DNA
tgaccaaagaacagttgggtaaaaaaacgctggcgcaaatgcccattaacccactgtttattaccgacttcaacc

SEQ ID NO: 667935 - DNA, 75 bp, synthetic construct
  source 1..75: mol_type = other DNA
gcgtaagccatacgatgcgccgaactgggtgcgtaccgatcgtcctgtcacctttggcgaactaaaaacctatga

SEQ ID NO: 667936 - DNA, 75 bp, synthetic construct
  source 1..75: mol_type = other DNA
gcaaccactgatcaatgctgagccagccgtacctactcaggcggagcagagcccgcaggtggggcaggtgatgcc

SEQ ID NO: 667937 - DNA, 75 bp, synthetic construct
  source 1..75: mol_type = other DNA
accccgttccccggcattgtgccggacgagagcgatcgcgcggcagaaacccagtcaacgctgacctcttccggt

SEQ ID NO: 667938 - DNA, 75 bp, synthetic construct
  source 1..75: mol_type = other DNA
atgaccagcgccgctgttccggaaattccgtatcggaggtgctggataaattcagaaaaaactacgacctgataa

SEQ ID NO: 667939 - DNA, 75 bp, synthetic construct
  source 1..75: mol_type = other DNA
cgttccgggatgctgagtctgatggatgcgcaggcccgtgatacatggtaccggtcactggagtacaataatttt

SEQ ID NO: 667940 - DNA, 75 bp, synthetic construct
  source 1..75: mol_type = other DNA
cgttcattgctgccattcatcgcgaatacaagcagacatggaaaacactggatgacgaactggcctacgctctct

SEQ ID NO: 667941 - DNA, 75 bp, synthetic construct
  source 1..75: mol_type = other DNA
gcggctgtcgatagcgctccagggcagggtgcgttaccagctcaagaccccgtggcgcaatggcaccacgcatgt

SEQ ID NO: 667942 - DNA, 75 bp, synthetic construct
  source 1..75: mol_type = other DNA
atgcagacagaagctgaagtcttaaccgatcataacgaactaatttgctcgaccagtattgagcgtatcgtcaca

SEQ ID NO: 667943 - DNA, 75 bp, synthetic construct
  source 1..75: mol_type = other DNA
atcactttcaaacgcctggatctggtggagaagatgaatgatatcgtggcgaagcactttccgaggatgttgcct

SEQ ID NO: 667944 - DNA, 75 bp, synthetic construct
  source 1..75: mol_type = other DNA
ccggcatgatgtctccatccggtttatggattttgtgcgcgataatccgcatcagcagattttcgaagatgagtt

SEQ ID NO: 667945 - DNA, 75 bp, synthetic construct
  source 1..75: mol_type = other DNA
tgtcggtctgctgacctcaattatggcgtttatcgtctccttcctgccgccggataatatccagggtgactctac

SEQ ID NO: 667946 - DNA, 75 bp, synthetic construct
  source 1..75: mol_type = other DNA
gtgggcaccctggttgtatttgttgccttcattttgagttatatgggcgtagaagcatccgcaacccacgtcaat

SEQ ID NO: 667947 - DNA, 75 bp, synthetic construct
  source 1..75: mol_type = other DNA
cccgccagcttcgccaaaatgaacaaaaatggcgtgccggtaacgctggttatttcccaattggtgatcacttca

SEQ ID NO: 667948 - DNA, 75 bp, synthetic construct
  source 1..75: mol_type = other DNA
aagctaagcagctcacattactcggattctttgccataacggcatcgatggtaatggctgtttatgaatacccta

SEQ ID NO: 667949 - DNA, 75 bp, synthetic construct
  source 1..75: mol_type = other DNA
ttcatttggctatctacaaatcgccattggcttcattccaatgctctattttgtgttaggggcgctctcctatat

SEQ ID NO: 667950 - DNA, 75 bp, synthetic construct
  source 1..75: mol_type = other DNA
ttgttggtccttctcgcgggatgtatgtcacagcgcagaaaaacctgctgccagcggcattcgctaaaatgaaca

SEQ ID NO: 667951 - DNA, 75 bp, synthetic construct
  source 1..75: mol_type = other DNA
attggcggtgatgtggctggaacctggggaatgcgtaatggatatgcctttgactgctggttgatgcaaccaacc

SEQ ID NO: 667952 - DNA, 75 bp, synthetic construct
  source 1..75: mol_type = other DNA
agtggaacttgagcataatgcctttgccgatgtatcagactatgtggcaagcctcttaaaagacggcaagctgag

SEQ ID NO: 667953 - DNA, 75 bp, synthetic construct
  source 1..75: mol_type = other DNA
aaattgaagagcgtctaaaccaagtaagacgcaactccatcgcacaggtaaacagctggctgccgttattaaaac

SEQ ID NO: 667954 - DNA, 75 bp, synthetic construct
  source 1..75: mol_type = other DNA
caagaatggcttagtagcgccacggctgagtatcagttcgccgatgacattgcagagctaccaaaactggtaatg

SEQ ID NO: 667955 - DNA, 75 bp, synthetic construct
  source 1..75: mol_type = other DNA
tgtcgctaccgcaggaaacgaaagaggaaaaggaatttcgccactgtatatggcttgcagagaaagaagaacgcg

SEQ ID NO: 667956 - DNA, 75 bp, synthetic construct
  source 1..75: mol_type = other DNA
accattccgcaaagccacatataccaacttccctgaatatatcgacccgcgcctgcgtaattaccgctcacgcta

SEQ ID NO: 667957 - DNA, 75 bp, synthetic construct
  source 1..75: mol_type = other DNA
gaatttaactgccgacagctttaccgcgaaattcaaaaacaagctgcatgccctgacaacctttgccacggatgc

SEQ ID NO: 667958 - DNA, 75 bp, synthetic construct
  source 1..75: mol_type = other DNA
aacaagaaacggaacagaacggccagaaagcggaacaaaacagcccaaatgcgttacaaaacgagccagaaacga

SEQ ID NO: 667959 - DNA, 75 bp, synthetic construct
  source 1..75: mol_type = other DNA
gagccatgcatgaactgaacatccagactatctgtgcagaaaccagtcccgccaaagggcgtgtagaacgagctc

SEQ ID NO: 667960 - DNA, 75 bp, synthetic construct
  source 1..75: mol_type = other DNA
atcactttcaaacgcctggatctggtggagaagatgaatgatatcgtggcgaagcactttccggggatgttacct

SEQ ID NO: 667961 - DNA, 75 bp, synthetic construct
  source 1..75: mol_type = other DNA
cgacgaacaaggccaactgcacgataagcagctgtttaatcgcgacacgcaagacaaatacctggcgctctacat

SEQ ID NO: 667962 - DNA, 75 bp, synthetic construct
  source 1..75: mol_type = other DNA
ggtgaacctgccgattattcattactccgtggagtggtggaacaccctgcatcaagggatcaacgcggatgcagc

SEQ ID NO: 667963 - DNA, 75 bp, synthetic construct
  source 1..75: mol_type = other DNA
ggcaggagaagagggagtggtatagtgactttttggatagccacccgcttagtcttgaaggattcaagcgtttaa

SEQ ID NO: 667964 - DNA, 75 bp, synthetic construct
  source 1..75: mol_type = other DNA
ctgttcaaatggctcaggctctggctgatcaaagggcgtatatcacggcgtcttccggtaacgaactcttctggc

SEQ ID NO: 667965 - DNA, 75 bp, synthetic construct
  source 1..75: mol_type = other DNA
ggccagtctgccgcttgtccgaaccgcactgcataacgtcagcgtggtaacgttcacggacatcaacggctcccc

SEQ ID NO: 667966 - DNA, 75 bp, synthetic construct
  source 1..75: mol_type = other DNA
ttgataacgccgatatttatagcggttccgggttggcgtcattattcctggcttgcgcggtcattatttccacgg

SEQ ID NO: 667967 - DNA, 75 bp, synthetic construct
  source 1..75: mol_type = other DNA
atgcgaagctcggctaagcaagaagaattagttaaagcatttaaagcattacttaaagaagagaaatttagctcc

SEQ ID NO: 667968 - DNA, 75 bp, synthetic construct
  source 1..75: mol_type = other DNA
agactcaagatatttaatagagggaaagttgaggctaaaaatatagaaattcatttccctgataacgatggcaat

SEQ ID NO: 667969 - DNA, 75 bp, synthetic construct
  source 1..75: mol_type = other DNA
aagtatcatatagatatcaaatttgatccagttgctattaaaggtaggattcaggacaaggatataaaattaaaa

SEQ ID NO: 667970 - DNA, 75 bp, synthetic construct
  source 1..75: mol_type = other DNA
ggcagggaagctcggtgagctaatgcaaatcacgctgctgattaaaaccgaggggctgacgcaactgctccagcc

SEQ ID NO: 667971 - DNA, 75 bp, synthetic construct
  source 1..75: mol_type = other DNA
attgccctgtggcacgccttcgacgaccgccgtctggcgggccgtgcggcaggtattctggtgctgattggcgtg

SEQ ID NO: 667972 - DNA, 75 bp, synthetic construct
  source 1..75: mol_type = other DNA
atagtggacaggaaagaataattaatctgaataatcccactattgaagcactttcagataatgactttgcaaaag

SEQ ID NO: 667973 - DNA, 75 bp, synthetic construct
  source 1..75: mol_type = other DNA
ggcgcacgccgagaagctgctggctgccggtaagcgtatgctctccttcggtggtgaccactttgttacgctgcc

SEQ ID NO: 667974 - DNA, 75 bp, synthetic construct
  source 1..75: mol_type = other DNA
ctgggaacacaaccgcttcccgtggaatttcgacatgcgtgaacgtctgaatgtcgtcgactgtggtgatctggt

SEQ ID NO: 667975 - DNA, 75 bp, synthetic construct
  source 1..75: mol_type = other DNA
gctcactgacggtcagcctttcgccgggagccagcctgccggttctgcgactggctctcaataacgccagcacag

SEQ ID NO: 667976 - DNA, 75 bp, synthetic construct
  source 1..75: mol_type = other DNA
gcaatgccaaaatggaaatggtttactgcctgccagctgaactgggtgtaccaaccacctccagtccattgaaga

SEQ ID NO: 667977 - DNA, 75 bp, synthetic construct
  source 1..75: mol_type = other DNA
tcacgccgaagccgattgcgcttgatgacgcttcactgacaaaagaagagaaggcttacgctaacgtaaacacct

SEQ ID NO: 667978 - DNA, 75 bp, synthetic construct
  source 1..75: mol_type = other DNA
tcacatgagaaaacacatattcgtttacttagcgcattcctggtcggaataacctggccaatgagtttacctgtg

SEQ ID NO: 667979 - DNA, 75 bp, synthetic construct
  source 1..75: mol_type = other DNA
ggaatactcccgtgacgccactggtggatgccggatgcaatatggtgattgtgtcgcatctgagtgacggttctt

SEQ ID NO: 667980 - DNA, 75 bp, synthetic construct
  source 1..75: mol_type = other DNA
gcggtcgtgttaaagacctcccgggggttcgttaccacaccgtacgtggtgcgcttgactgctccggcgttaaag

SEQ ID NO: 667981 - DNA, 75 bp, synthetic construct
  source 1..75: mol_type = other DNA
tgaccttgagcatatcagccagagtatcggcgatatcctgcgcacaccggtcggctcacgggtgatgcgtcgtga

SEQ ID NO: 667982 - DNA, 75 bp, synthetic construct
  source 1..75: mol_type = other DNA
agatggcgaagaacgtgctgactgatgatgcgactttctcaatcacccgtgtgatcgatggtactcacatcgaaa

SEQ ID NO: 667983 - DNA, 75 bp, synthetic construct
  source 1..75: mol_type = other DNA
cacatatagatgattatgagatgcatattataaaagcaaatcgtgtttatgtggacaaaacacctaaagggcact

SEQ ID NO: 667984 - DNA, 75 bp, synthetic construct
  source 1..75: mol_type = other DNA
actcaacgttatatttctcagaaaataatgcactcaacttcgcgagtttgtcactgcctggggttatcagcagga

SEQ ID NO: 667985 - DNA, 75 bp, synthetic construct
  source 1..75: mol_type = other DNA
tcactgcctggggttatcagcaggaaaaaaggcatattgccgtggttgacgagtgctatatcaacctcctggagg

SEQ ID NO: 667986 - DNA, 75 bp, synthetic construct
  source 1..75: mol_type = other DNA
tggcaatgtcgcttccaacgttcggcaagggcaatggcaggcacatatgcgcggtctgggcgtattaagctgcca

SEQ ID NO: 667987 - DNA, 75 bp, synthetic construct
  source 1..75: mol_type = other DNA
cagacgtgggactcaacggcatttttgctacgcagggggatatttccaccctgtccggcctgtgccgtatcgcgc

SEQ ID NO: 667988 - DNA, 75 bp, synthetic construct
  source 1..75: mol_type = other DNA
tgtgatgaatttgttaatgatgcaaaaattgctgaggcaaatgaaaattttttcaaaaaggtagtattactacta

SEQ ID NO: 667989 - DNA, 75 bp, synthetic construct
  source 1..75: mol_type = other DNA
caaaaaatcactggcggaaagttgctcctgatagttttgaagttttaggaacgattgaaaacctgcactacgtag

SEQ ID NO: 667990 - DNA, 75 bp, synthetic construct
  source 1..75: mol_type = other DNA
atttacggcctgccatcaactttatttgaagcatggtttcgttgattgcgaaccgtttgctgattatcaacttga

SEQ ID NO: 667991 - DNA, 75 bp, synthetic construct
  source 1..75: mol_type = other DNA
aatctgcaaaatttgcaggcggtgctggcgcgacgtcaggcgggctttgagtgtgaaatcgtcgccttcccgtag

SEQ ID NO: 667992 - DNA, 75 bp, synthetic construct
  source 1..75: mol_type = other DNA
cctgcttacctatcatctgacccctcatctcactgccaccctaatcaggctgatgggtatggtcaaaagggacca

SEQ ID NO: 667993 - DNA, 75 bp, synthetic construct
  source 1..75: mol_type = other DNA
tggctgctatctatgttgatgtgatcagcccgcttggcccgcgcattcaggtcaccggttcccctgctgtactgc

SEQ ID NO: 667994 - DNA, 75 bp, synthetic construct
  source 1..75: mol_type = other DNA
aaccgtttgctgattatcaacttgatccacacagtcgatttttgtcattgacgctatgcgaaaagaatgaattgc

SEQ ID NO: 667995 - DNA, 75 bp, synthetic construct
  source 1..75: mol_type = other DNA
cagatgccttcatcgcctgagcttagaaacgggtacacaggctggatttacggcctgccatcaactttatttgaa

SEQ ID NO: 667996 - DNA, 75 bp, synthetic construct
  source 1..75: mol_type = other DNA
agcgttcaggaaatttaaaaccaggaaatttgccgtcattcaatagtatcgatagtgaatatcacgataaacttt

SEQ ID NO: 667997 - DNA, 75 bp, synthetic construct
  source 1..75: mol_type = other DNA
gccgactaatattacttccaaggaaactataaaatataactggaaaagggctgttgaggctaaaataataaagtc

SEQ ID NO: 667998 - DNA, 75 bp, synthetic construct
  source 1..75: mol_type = other DNA
cactgattactccgatcaccctcgtaaacttgtcactctaaatccaaaacttaaatcaacagccgctggacgcta

SEQ ID NO: 667999 - DNA, 75 bp, synthetic construct
  source 1..75: mol_type = other DNA
aagaagtcacccttgatgaaatttataaaaagcttcaggatttttacaagttaagcgatggtgttatcgaagaaa

SEQ ID NO: 668000 - DNA, 75 bp, synthetic construct
  source 1..75: mol_type = other DNA
ttactccgcgagttgcggatacaattctttcagaagatgttatcgcaactttaaaaggaaaatggccaaacctaa

SEQ ID NO: 668001 - DNA, 75 bp, synthetic construct
  source 1..75: mol_type = other DNA
gaaagaggcgaaagctattgttccttccagtgaaaatataaatagtactgtgaagtacagttgggtgcgaatttt

SEQ ID NO: 668002 - DNA, 75 bp, synthetic construct
  source 1..75: mol_type = other DNA
atgattcaggcccccgagccactcatggcaaggcatcaattcacctctttttgctcgggagtagaaacgatggat

SEQ ID NO: 668003 - DNA, 75 bp, synthetic construct
  source 1..75: mol_type = other DNA
acgttttggcagtgccaaagtgttgttaacgccttcctgtaccgcttctctggagatggcggcgttgttgctgga

SEQ ID NO: 668004 - DNA, 75 bp, synthetic construct
  source 1..75: mol_type = other DNA
caccaccaaagagagcgagcgcctgctgcgcctgccgctgttctacaatttgtcgcccgtcaatcaacgcacggt

SEQ ID NO: 668005 - DNA, 75 bp, synthetic construct
  source 1..75: mol_type = other DNA
cgacaaaacgcgcgttatcgtgccggtccattacgcgggtgtggcctgcgaaatggacaccattatggcgttggc

SEQ ID NO: 668006 - DNA, 75 bp, synthetic construct
  source 1..75: mol_type = other DNA
tttgtcggttatttcgcaagaaggtaatagtaaccgagccaggattgaccagaaaggagattataaccttgcgta

SEQ ID NO: 668007 - DNA, 75 bp, synthetic construct
  source 1..75: mol_type = other DNA
tttgtcggttgtttcgcaagatggtaatagcaatcgggcaagaattgaccagacaggagattataaccttgtgta

SEQ ID NO: 668008 - DNA, 75 bp, synthetic construct
  source 1..75: mol_type = other DNA
aaacgttgattgaagcggcgatcaccgacaaaacgcgcgttatcgtgccggtgcattacgcgggcgtggcctgcg

SEQ ID NO: 668009 - DNA, 75 bp, synthetic construct
  source 1..75: mol_type = other DNA
cagcagtcgcagcattattatcggcgccattgtggtcaccatcgtcctgagtctggtcgtacccagtgccaccgc

SEQ ID NO: 668010 - DNA, 75 bp, synthetic construct
  source 1..75: mol_type = other DNA
atatgaatcacccggacacgatccttggcaccgcgaaagcgctgaaaatgactctgtcgggtttttctaattctg

SEQ ID NO: 668011 - DNA, 75 bp, synthetic construct
  source 1..75: mol_type = other DNA
acgccgggcatattcttaccccattttgctgtggcgtggattctatggataactggctgaaacaacgggcgatga

SEQ ID NO: 668012 - DNA, 75 bp, synthetic construct
  source 1..75: mol_type = other DNA
aagacgcgcggagaactcatcgatggggcccgtgtgggagccctgagccttaacgcgagagggtgtaacaccgag

SEQ ID NO: 668013 - DNA, 75 bp, synthetic construct
  source 1..75: mol_type = other DNA
cgaccagcactatcctcgcgatgagctcctcgcatgcagcgttcacaggaagtggtagcaccggtacgacaaaac

SEQ ID NO: 668014 - DNA, 75 bp, synthetic construct
  source 1..75: mol_type = other DNA
ccggaccggagtcgtccgggaaccaatattaaagatgtttacagtgcccctgtatcaccaaatctaccggacctg

SEQ ID NO: 668015 - DNA, 75 bp, synthetic construct
  source 1..75: mol_type = other DNA
ggcctgcgttaatgcaggatatttcccgcgatttatgggatcagggtgataaacctgttccaccgctgcgccagt

SEQ ID NO: 668016 - DNA, 75 bp, synthetic construct
  source 1..75: mol_type = other DNA
ggtggcgaacggtgcaattcctgttatccctggtttgtggttagtgcctggactgatgttgactggtttgttagt

SEQ ID NO: 668017 - DNA, 75 bp, synthetic construct
  source 1..75: mol_type = other DNA
ttaatggcattgatggctatctctttaagtcgggtaaaaccacggcaggggcgattttctaccttattgccttta

SEQ ID NO: 668018 - DNA, 75 bp, synthetic construct
  source 1..75: mol_type = other DNA
gccacttcaccgcactgacgcacggcaatcaccgcaggcaagcgaacccggcaacaacgcaacccatgttcagta

SEQ ID NO: 668019 - DNA, 75 bp, synthetic construct
  source 1..75: mol_type = other DNA
gcgggttactctgcctgcctgaccagcttcacttcgtcaatacggttctcactgcacgcttacgcatcactcacg

SEQ ID NO: 668020 - DNA, 75 bp, synthetic construct
  source 1..75: mol_type = other DNA
cgctttaaaacgcatccggcagtgcgcccgcttatcaaaaacacggaatcactggagtatggtgcgcatctggtg

SEQ ID NO: 668021 - DNA, 75 bp, synthetic construct
  source 1..75: mol_type = other DNA
gatatcatcagtttgactaaaaaaatgctgacttttttacagtcaaggaatgtcaaactagttgctgttgcatgt

SEQ ID NO: 668022 - DNA, 75 bp, synthetic construct
  source 1..75: mol_type = other DNA
acgctagggcaaatgtataccgactcggaaattaccgctatctccgcggcggggggcagtccgggacgcttgtac

SEQ ID NO: 668023 - DNA, 75 bp, synthetic construct
  source 1..75: mol_type = other DNA
attccaggtttgtggttgataccaggggtcatgttgattggcttgctgctgctcattgcccgcgacttctctttg

SEQ ID NO: 668024 - DNA, 75 bp, synthetic construct
  source 1..75: mol_type = other DNA
cggtctggcgatggtcttttccatgctgctggcggcgattatatggaacctggggacgtggttcttcggttttct

SEQ ID NO: 668025 - DNA, 75 bp, synthetic construct
  source 1..75: mol_type = other DNA
ggatagctgaagaatcaccaactgatgatgaaatcgacaactacgatagtatcattagtcggggcgcagaaaggg

SEQ ID NO: 668026 - DNA, 75 bp, synthetic construct
  source 1..75: mol_type = other DNA
gagctttccgtttcctatcttatccatcattgaacctgcagtagaagatgtgattcgccagcagtataaaaatgt

SEQ ID NO: 668027 - DNA, 75 bp, synthetic construct
  source 1..75: mol_type = other DNA
cgcacctggaacgctggccccgattcaatagccaggctgtctccggtggtaatggctgcaaaatctgacacagcg

SEQ ID NO: 668028 - DNA, 75 bp, synthetic construct
  source 1..75: mol_type = other DNA
atgacgagatttatcaacgccagcgtgagatgaaggaggaactgaataacctggatgatttacgctcaatcagag

SEQ ID NO: 668029 - DNA, 75 bp, synthetic construct
  source 1..75: mol_type = other DNA
ggaactggaagaactggcagccgcgatggcgcaggcgcaggttgagcgcaatgacgagatttatcaacgccagcg

SEQ ID NO: 668030 - DNA, 75 bp, synthetic construct
  source 1..75: mol_type = other DNA
acgacgagatttatcaacgccagcgggagatgaaagagaggttgagcaacctgaatgatttacgctcaatccgag

SEQ ID NO: 668031 - DNA, 75 bp, synthetic construct
  source 1..75: mol_type = other DNA
ggttcatcattaatgccgcagaagaaaaacccggatgcgctggagctgattcgcggtaaatgcggtcgtgtgcag

SEQ ID NO: 668032 - DNA, 75 bp, synthetic construct
  source 1..75: mol_type = other DNA
atgccgggttacactcacctgcaacgcgcccagccggtgacgttcgcgcactggtgcctggcctatgttgagatg

SEQ ID NO: 668033 - DNA, 75 bp, synthetic construct
  source 1..75: mol_type = other DNA
ggcgagttgctgacggctaaccgtcagctgcaatccgctctggtcgagacggcgcagaataatcaggacgcggtt

SEQ ID NO: 668034 - DNA, 75 bp, synthetic construct
  source 1..75: mol_type = other DNA
gtgaaatcgccccgttcaccgtcacgccggaacttatcgcagcggcaaaagatgccaaaaagcgggaaatcgagg

SEQ ID NO: 668035 - DNA, 75 bp, synthetic construct
  source 1..75: mol_type = other DNA
aacgcaatgacgagatttatcgccgtcagcgagagaagaaagaagcgttagacactctggaggatttagatgcga

SEQ ID NO: 668036 - DNA, 75 bp, synthetic construct
  source 1..75: mol_type = other DNA
aatgccggaactggaagaactggcagcagcaatggcgcaggctgttgttgaacgcaatgacgagatttatcgccg

SEQ ID NO: 668037 - DNA, 75 bp, synthetic construct
  source 1..75: mol_type = other DNA
gcgggaacggcctatgaaatcgatcgtgaacagttagcaggctggctgggctttgcttcggcgacccgtaacagt

SEQ ID NO: 668038 - DNA, 75 bp, synthetic construct
  source 1..75: mol_type = other DNA
ggggcgttaaccggcatgatgatgacgctgaaaggtttgccgctggcttacaacaaagatatgcaggaagacaaa

SEQ ID NO: 668039 - DNA, 75 bp, synthetic construct
  source 1..75: mol_type = other DNA
atccttgaaagcgacgccgaagatatccatagctgggtggaaggcaaactgatcgacaaagtgggtcagttaggc

SEQ ID NO: 668040 - DNA, 75 bp, synthetic construct
  source 1..75: mol_type = other DNA
ggggcgtgacgacaacgaacagatctaccgtaatctgcaattaccgctggatcaaagccctaacgtcaaacgcaa

SEQ ID NO: 668041 - DNA, 75 bp, synthetic construct
  source 1..75: mol_type = other DNA
ccggaagatgcagaacatattgcttttattcgcgggcgtattggttttgaactgcctgactggtttatcccgaag

SEQ ID NO: 668042 - DNA, 75 bp, synthetic construct
  source 1..75: mol_type = other DNA
ttcgacaagacctggaagggaccggcaatcagctacatcgggcgctatgaacttgaggcatgtggtgaggccttt

SEQ ID NO: 668043 - DNA, 75 bp, synthetic construct
  source 1..75: mol_type = other DNA
attttctggggaattaacaccctgtttggcccgtttgttctggatctgttcactgacggtgataacgccaaatgt

SEQ ID NO: 668044 - DNA, 75 bp, synthetic construct
  source 1..75: mol_type = other DNA
ccggaagatgccgaccatattgcttttattcgcgggcgtattggttttgaactgcctgactggtttatcccgaag

SEQ ID NO: 668045 - DNA, 75 bp, synthetic construct
  source 1..75: mol_type = other DNA
ccggaagatgctgatcatattgcttttattcgcgggcgtattggttttgaactgcctgactggtttatcccgaag

SEQ ID NO: 668046 - DNA, 75 bp, synthetic construct
  source 1..75: mol_type = other DNA
ccggaagatgcagagcatattacttttattcgcgggcgtattggttttgaactgcctgactggtttatcccgaag

SEQ ID NO: 668047 - DNA, 75 bp, synthetic construct
  source 1..75: mol_type = other DNA
acgcctgacgatggtattccagcacttcaatctctggagccatatgacggtgctggaaaacgtcatggaagcgcc

SEQ ID NO: 668048 - DNA, 75 bp, synthetic construct
  source 1..75: mol_type = other DNA
tcgatttgcacaaacgctacggcgaacacgaagtgctgaaaggggtctcattgcaagcgaatgccggagatgtca

SEQ ID NO: 668049 - DNA, 75 bp, synthetic construct
  source 1..75: mol_type = other DNA
tctcctggcagaagaaaataacaccctgaaagcgcagctggctgagcatgaaaaaaccatcaccgcgctggggaa

SEQ ID NO: 668050 - DNA, 75 bp, synthetic construct
  source 1..75: mol_type = other DNA
atctggtgcatacaatatgttttctgagttctggaatgttgctgtctcagctgcgcctaaggtggatgatttatg

SEQ ID NO: 668051 - DNA, 75 bp, synthetic construct
  source 1..75: mol_type = other DNA
taaaatgtacgcggtcgatgctgttgccgctattgcagaggtgagaggctggaacgcctgtcgtgccgccatgct

SEQ ID NO: 668052 - DNA, 75 bp, synthetic construct
  source 1..75: mol_type = other DNA
atgaatgcgtcatatgcagttattgaaaatgggatggttgtgaatgtcattgtctgggatggcgaggctgaattc

SEQ ID NO: 668053 - DNA, 75 bp, synthetic construct
  source 1..75: mol_type = other DNA
ccggaagatgccgagcatattccttttattcgcgggcgtattggttttgaactgcctgactggtttatcccgaag

SEQ ID NO: 668054 - DNA, 75 bp, synthetic construct
  source 1..75: mol_type = other DNA
gttcaccctactgctgcgtaacgcaaaactcgacgaccatgccgccagcggaatgcgcggagaattaaaactgtt

SEQ ID NO: 668055 - DNA, 75 bp, synthetic construct
  source 1..75: mol_type = other DNA
actgagggtgttttcctcctgccaaaagtatccgcagatgcggttactgccggggcgcaggtgtatctgaaggac

SEQ ID NO: 668056 - DNA, 75 bp, synthetic construct
  source 1..75: mol_type = other DNA
ccaaatcaggtctgggtggcggacctgaaccgccccggttttcctggagagtgttttatctgtgaactcaggctg

SEQ ID NO: 668057 - DNA, 75 bp, synthetic construct
  source 1..75: mol_type = other DNA
gtcgatgtatggtcgtccgtgggcttatgcgcagatttatcaactggagcagcagtcgcagtcggagctggatgt

SEQ ID NO: 668058 - DNA, 75 bp, synthetic construct
  source 1..75: mol_type = other DNA
tagccactgaagtacagaacgctgtcatggttaagttcgacacatgtgaaaacatcactgttgatatggtgatta

SEQ ID NO: 668059 - DNA, 75 bp, synthetic construct
  source 1..75: mol_type = other DNA
gtgcggtggcagcgggagtagcctgggaaaatgctcctgcaaacagcgccactgtggcggtaaaaatcaatgtct

SEQ ID NO: 668060 - DNA, 75 bp, synthetic construct
  source 1..75: mol_type = other DNA
ggtgctattgctgttttcgacaagacctggaagggaccggcaatcagctacatcgggcgcgatgaacttgaggca

SEQ ID NO: 668061 - DNA, 75 bp, synthetic construct
  source 1..75: mol_type = other DNA
atgagtaataaatattgccaggagctggtggaactgcggaacaaaccagcccatgaactgaaggaagtgggtgat

SEQ ID NO: 668062 - DNA, 75 bp, synthetic construct
  source 1..75: mol_type = other DNA
ccggaagatgcggagcatattgcttttattcgcgggcgtattggttttgaactgcctgactggtttatcccgaag

SEQ ID NO: 668063 - DNA, 75 bp, synthetic construct
  source 1..75: mol_type = other DNA
agctttcacgtatttatcaggaaatatcttggatgacgtaactcactggatgccgctaccagagcctccactttg

SEQ ID NO: 668064 - DNA, 75 bp, synthetic construct
  source 1..75: mol_type = other DNA
cggaacaaaccagcccatgaactgaaggaagtgggcgatcagtggcgcacgccggacaacattttctggggaatt

SEQ ID NO: 668065 - DNA, 75 bp, synthetic construct
  source 1..75: mol_type = other DNA
aaggttacagaaggctgagggcataattgaagggatgttaatggcattagatatccggttagagatggatatcgt

SEQ ID NO: 668066 - DNA, 75 bp, synthetic construct
  source 1..75: mol_type = other DNA
gggccagcaaaagcgttatttgctgatccgcagcagccccgtacccgccagttccttgagaagtttctgttgcaa

SEQ ID NO: 668067 - DNA, 75 bp, synthetic construct
  source 1..75: mol_type = other DNA
gcagaacaggaccgcctccgggcagaacagcgcgcggcagaagtcgtcgaactgccgctggtcccggcatcaggt

SEQ ID NO: 668068 - DNA, 75 bp, synthetic construct
  source 1..75: mol_type = other DNA
ccctgcgcgctccgaacctgcagctggcagtggagctgacggacgccggccgggccgtggcacagcctctgctgc

SEQ ID NO: 668069 - DNA, 75 bp, synthetic construct
  source 1..75: mol_type = other DNA
caggttataagccggtttatcttaaccagcttcaactgttgtatgccgcacgcgatatgcaacccatgtgggaaa

SEQ ID NO: 668070 - DNA, 75 bp, synthetic construct
  source 1..75: mol_type = other DNA
tgccgcgatgcatgaatctttactgaccttgctcagtgataccaaaccgtggccacaactgaccggtaaagcaac

SEQ ID NO: 668071 - DNA, 75 bp, synthetic construct
  source 1..75: mol_type = other DNA
gactgttagcgaacagggcgatgtactgccgcaggcgcaagctacggcaataatggcggggatccagccgttacc

SEQ ID NO: 668072 - DNA, 75 bp, synthetic construct
  source 1..75: mol_type = other DNA
cagaagttgaaatcgaaaccgacgcgtcagagcagattcctgacgatgtcgaactggctgaagaagtcgaaacag

SEQ ID NO: 668073 - DNA, 75 bp, synthetic construct
  source 1..75: mol_type = other DNA
ggaagcaattcgtgccggagcgaaaggcagcaaagtctttagcgaacgcgtcaatcagtacttacgtgaacgtga

SEQ ID NO: 668074 - DNA, 75 bp, synthetic construct
  source 1..75: mol_type = other DNA
gctgggatgaggaatgcgcttcctttgttccggtcgaaccagaatccgatccgatgaacgtcaattttgacaagc

SEQ ID NO: 668075 - DNA, 75 bp, synthetic construct
  source 1..75: mol_type = other DNA
gtggagctgaacggcatgacgtatcaggcctgccgtggggattttgtggtacgtctcgacggcagcacctgtctg

SEQ ID NO: 668076 - DNA, 75 bp, synthetic construct
  source 1..75: mol_type = other DNA
cggtctacgggccaaacctgcgcgcctcctgccggcgcatggaagcatccagctggctgcgccccctgcgcgccc

SEQ ID NO: 668077 - DNA, 75 bp, synthetic construct
  source 1..75: mol_type = other DNA
gtcagagcagattcctgatgatgtcgaactggctgaagaagtcgaaacagaagatggcagtgagtcctccggcaa

SEQ ID NO: 668078 - DNA, 75 bp, synthetic construct
  source 1..75: mol_type = other DNA
gcaggatgcaggctggaatgacaagcgtatttccgacgccctgaagcagggagatacccgttacgtcaatatccg

SEQ ID NO: 668079 - DNA, 75 bp, synthetic construct
  source 1..75: mol_type = other DNA
tcccgcgattcatcaacacggataaagcgcccgcctatggtcgcgcgcttgctctgctcaaacgcgaaggccggt

SEQ ID NO: 668080 - DNA, 75 bp, synthetic construct
  source 1..75: mol_type = other DNA
tgcataccggtttctgggtaaaatcctcaacaacgtgaagaagtggcagatcccgcgattcatcaacacggataa

SEQ ID NO: 668081 - DNA, 75 bp, synthetic construct
  source 1..75: mol_type = other DNA
ctgctgcgtaaactcaatgtccgctcacgcgtggcggccaccattctgttcctgcaacaacgtggggcacaataa

SEQ ID NO: 668082 - DNA, 75 bp, synthetic construct
  source 1..75: mol_type = other DNA
gaaatgagcaacccagggcgcgactatccactggctatgttactgctgatggtggcggcaatctgcttaagctct

SEQ ID NO: 668083 - DNA, 75 bp, synthetic construct
  source 1..75: mol_type = other DNA
gtgacaacccgctacacaggaatgaatccggacgggacgggaaacctgaacgatacggagcacctgaaacagtca

SEQ ID NO: 668084 - DNA, 75 bp, synthetic construct
  source 1..75: mol_type = other DNA
gtgatgcgtgcactacgcaaaggccaggcctcagcattttattatggtgatcccctgggcgaaatgcgcctggta

SEQ ID NO: 668085 - DNA, 75 bp, synthetic construct
  source 1..75: mol_type = other DNA
aggagatgctggctgaacgcggagtgaatgtcgatcactccacgatttaccgctgggttcagcgttatgcgcctg

SEQ ID NO: 668086 - DNA, 75 bp, synthetic construct
  source 1..75: mol_type = other DNA
tccggtaaaaggtactcgctggctgtacagcagtaaaccttatgcgctctcaacaccgccgctctcggtcattaa

SEQ ID NO: 668087 - DNA, 75 bp, synthetic construct
  source 1..75: mol_type = other DNA
ctacctggcgatgacacgccaactgacgcggtagtcagcccatccgctgttactgttgaaacagcagaaactaag

SEQ ID NO: 668088 - DNA, 75 bp, synthetic construct
  source 1..75: mol_type = other DNA
ggcagcaaagtctttagcgaacgcgtcaatcagtacttacgtgaacgtgaaatgtttggcgcggaagaagatccc

SEQ ID NO: 668089 - DNA, 75 bp, synthetic construct
  source 1..75: mol_type = other DNA
gtttctgggtaaaatcctcaacaacgtgaagaagtggcagatccccgattcatcaacacggataaagcgcccgcc

SEQ ID NO: 668090 - DNA, 75 bp, synthetic construct
  source 1..75: mol_type = other DNA
gtggcagatcccgcgattcatcaacacggataaagggcactgttgcaaagttagcgatgaggcagccttttgtct

SEQ ID NO: 668091 - DNA, 75 bp, synthetic construct
  source 1..75: mol_type = other DNA
ccgtggcacagcctctgctgcccgcaggcggcacttctgccactgatctggcggtggagctgaacggcataacgt

SEQ ID NO: 668092 - DNA, 75 bp, synthetic construct
  source 1..75: mol_type = other DNA
ccgataatcaacaggtgaaactgtcaatgccggaactggaagaactggcgacagcaatggcgcaggcgcaggtcg

SEQ ID NO: 668093 - DNA, 75 bp, synthetic construct
  source 1..75: mol_type = other DNA
cgtgacagccaggagaacagcagttttgtttttgaattcagtggtcatcgctgggatgccggaaaggcgtcacag

SEQ ID NO: 668094 - DNA, 75 bp, synthetic construct
  source 1..75: mol_type = other DNA
tttgaaggtgaaacggagttcgccctgtatactgccatacaggatgatatggccccgacaggccagcacatctgg

SEQ ID NO: 668095 - DNA, 75 bp, synthetic construct
  source 1..75: mol_type = other DNA
atggtagtgtccgctattgccagtacacctcatgacgttttttttgacgacagggaccaggcagtcccctacaca

SEQ ID NO: 668096 - DNA, 75 bp, synthetic construct
  source 1..75: mol_type = other DNA
aacgatgagatttatcgccgtcagcgggagctgaaggaagagctgaatagtctgaaggatttgaattcggttagg

SEQ ID NO: 668097 - DNA, 75 bp, synthetic construct
  source 1..75: mol_type = other DNA
ccaccattctccacagccaggggcgcccgttgtcccctctggatgaaatccgcatcgttgatcaagacgagaacg

SEQ ID NO: 668098 - DNA, 75 bp, synthetic construct
  source 1..75: mol_type = other DNA
acgtgctggaactgctatctgccgccgctatcggtatggtgcatttgtcgcgttttgccgaagatctgattttct

SEQ ID NO: 668099 - DNA, 75 bp, synthetic construct
  source 1..75: mol_type = other DNA
ggagctttctgaccgtgtgacttccggttcatcattaatgccgcagaagaaaaacccggatgcgctggagctgat

SEQ ID NO: 668100 - DNA, 75 bp, synthetic construct
  source 1..75: mol_type = other DNA
cgtgcggcaaaaggcggtgtctcaccgcagcaggtggcgcaggcgattgcttttgcgcaggcgcggttggggtaa

SEQ ID NO: 668101 - DNA, 75 bp, synthetic construct
  source 1..75: mol_type = other DNA
atgaaaatcagagcggtgaaaggtatcagaaacgcacattatcttgaaaatggtgcggttgactgcgaggtgtta

SEQ ID NO: 668102 - DNA, 75 bp, synthetic construct
  source 1..75: mol_type = other DNA
aatgacgagatttatcaacgtcagcgggagatgaaggaagaactgaataacctggaggatttgggttcaatccga

SEQ ID NO: 668103 - DNA, 75 bp, synthetic construct
  source 1..75: mol_type = other DNA
ggcctggtgatgtggatgccggaaacattgacggcagcatccatcgctgggcaaaaaaagaagttatcgacaacg

SEQ ID NO: 668104 - DNA, 75 bp, synthetic construct
  source 1..75: mol_type = other DNA
atgacgagatttatcgccgtcagcgtgaaatgaaagaggatctgaacaatctggaggatttgggttcaatccgag

SEQ ID NO: 668105 - DNA, 75 bp, synthetic construct
  source 1..75: mol_type = other DNA
aacaggtgaaactgtcgatgccggaactggaagaactggcagcagcaatggcacaggcacaggtcgatcgcaatg

SEQ ID NO: 668106 - DNA, 75 bp, synthetic construct
  source 1..75: mol_type = other DNA
ctgataatcaacaggtgaaactgtcgatgcaggaacttgaagaactggcggcagcactggcgcaggcgcaggtca

SEQ ID NO: 668107 - DNA, 75 bp, synthetic construct
  source 1..75: mol_type = other DNA
aggtcagcaaatctggcaggaactgcaaagcggcaaatggggagaaatcgccccgttcaccgtcacgccggaact

SEQ ID NO: 668108 - DNA, 75 bp, synthetic construct
  source 1..75: mol_type = other DNA
cccagcaaattgtcgccttgtatgagtggttttcagcccgttgtcgctggaaggaaaaggcgttaacgcaacgag

SEQ ID NO: 668109 - DNA, 75 bp, synthetic construct
  source 1..75: mol_type = other DNA
gcctattggtgcagtcgggtgaacagagcgagcaaatttttacccgctggcgtgctggggcgtataacgcctggt

SEQ ID NO: 668110 - DNA, 75 bp, synthetic construct
  source 1..75: mol_type = other DNA
caatggcccgtctttatccggtagtaatggcggcgaaatctgacacggcgcgggacgttatggcgtggggtgacg

SEQ ID NO: 668111 - DNA, 75 bp, synthetic construct
  source 1..75: mol_type = other DNA
ctgtatgtcactggcgaagagtcgctgcaacaggtggcaatgcgcgctcatcgccttggcctgccgactgacaat

SEQ ID NO: 668112 - DNA, 75 bp, synthetic construct
  source 1..75: mol_type = other DNA
ggcggtaacccaggtgcggggaaatccacgctgctactgcaaacgctgtgcaaactggcccagcagatgaaaacg

SEQ ID NO: 668113 - DNA, 75 bp, synthetic construct
  source 1..75: mol_type = other DNA
cgatatcagccttgaagagctgccgcgtttttccaccggatttaaagagttcgaccgcgtactaggcggcggcgt

SEQ ID NO: 668114 - DNA, 75 bp, synthetic construct
  source 1..75: mol_type = other DNA
cgtggcgaacagaacaggaagcacagccgttcacgtttgaatggaatggtcgcacctggaacgctggccccgact

SEQ ID NO: 668115 - DNA, 75 bp, synthetic construct
  source 1..75: mol_type = other DNA
tggcaaaatctgtcacagcacaaacacatatggcgtggagcgatgccgataatcagcaggtgaaactgtcgatgc

SEQ ID NO: 668116 - DNA, 75 bp, synthetic construct
  source 1..75: mol_type = other DNA
cacatctggaacgctggccccgactcactggctcgcctttatccggtggtgatggcatcaaaatccgatacggcg

SEQ ID NO: 668117 - DNA, 75 bp, synthetic construct
  source 1..75: mol_type = other DNA
ttgagatgcagattaaggtcgcctgttacatggcagtgctgaaatgggaaccccgcgtcaccctgtcatccgtca

SEQ ID NO: 668118 - DNA, 75 bp, synthetic construct
  source 1..75: mol_type = other DNA
cattaataacgctggcggggtgcacagttactcgccaggctcatgtgggcgaagttgacgcggcaacaggtattg

SEQ ID NO: 668119 - DNA, 75 bp, synthetic construct
  source 1..75: mol_type = other DNA
gaagttgacgcggcaacaggtattgttcggttggtttatgatcaggcttttttgcagcatgcccataccgatcgt

SEQ ID NO: 668120 - DNA, 75 bp, synthetic construct
  source 1..75: mol_type = other DNA
accgatgagtccggtttcgcggtcgttaaccggctgggcggaatatctgtgaaaattggtaccggcgcaacgcag

SEQ ID NO: 668121 - DNA, 75 bp, synthetic construct
  source 1..75: mol_type = other DNA
ttatgcttgccgcaatccgccgtgctgacactcaaccccgcatctgtatgcttcgcaccgtggcctgcgatgagc

SEQ ID NO: 668122 - DNA, 75 bp, synthetic construct
  source 1..75: mol_type = other DNA
cccttttttctggcttgcttactgccgtcatttccaggtatagtttttccgctgtcgcaaaatcggcagccggaa

SEQ ID NO: 668123 - DNA, 75 bp, synthetic construct
  source 1..75: mol_type = other DNA
taaaccacgtatcagtatgctgcgtatcgtcgccagcaatgagcatcatgcacgtctttcactggtccatgagta

SEQ ID NO: 668124 - DNA, 75 bp, synthetic construct
  source 1..75: mol_type = other DNA
ggcggggcagcctccgggctggccggtttccttgaaggccggtattcctacccccgtccgggctaccacccatga

SEQ ID NO: 668125 - DNA, 75 bp, synthetic construct
  source 1..75: mol_type = other DNA
aggtgtaatctctgctattctttttatgcatttcatacgaatgtctagtggagatagtactacaataagttctgt

SEQ ID NO: 668126 - DNA, 75 bp, synthetic construct
  source 1..75: mol_type = other DNA
attagaacgacaaatcgaattattcaacaatgaatgtgttgatgtggtatgttctaattattatgtggtgaatat

SEQ ID NO: 668127 - DNA, 75 bp, synthetic construct
  source 1..75: mol_type = other DNA
tcccggtgcagagctggaagagaaaggcatggcgttcgcactacattaccgtcaggtaccgcagtatgaagatgc

SEQ ID NO: 668128 - DNA, 75 bp, synthetic construct
  source 1..75: mol_type = other DNA
cggagcgccgtgacatcaatggtaaaacgcatatcgttcacctgccggaagcgattgctcgtgatattagtgtgc

SEQ ID NO: 668129 - DNA, 75 bp, synthetic construct
  source 1..75: mol_type = other DNA
catcgccagcaatgagcatcatgtacgtctttcactggtccatgagtatgtgctttgtcttgctgctcgcctgcc

SEQ ID NO: 668130 - DNA, 75 bp, synthetic construct
  source 1..75: mol_type = other DNA
cagaacctgttatctctcctggcatgaagctgccgggcgcgataaaggccatcagtggatggaagagcaattagt

SEQ ID NO: 668131 - DNA, 75 bp, synthetic construct
  source 1..75: mol_type = other DNA
gaggattatgatgcgatccctcgtcgtgccatggaatacggcgcggagaacgcacgtctgatcgactgccgcaaa

SEQ ID NO: 668132 - DNA, 75 bp, synthetic construct
  source 1..75: mol_type = other DNA
accgccttgccgggcgcgccagcacaatgggccgcgatatttgcccgttttggcgcgaaactggaaaatgtcagc

SEQ ID NO: 668133 - DNA, 75 bp, synthetic construct
  source 1..75: mol_type = other DNA
aaaaaccataaaaattcgctcgggatctatgagttatcctggcatcaggctatgcagcgactgccgcgtaaccgc

SEQ ID NO: 668134 - DNA, 75 bp, synthetic construct
  source 1..75: mol_type = other DNA
aagttaccctggagctgcgccgtgggaacgattattcaatcctgaataccgtctcagagaacctgacctacaagc

SEQ ID NO: 668135 - DNA, 75 bp, synthetic construct
  source 1..75: mol_type = other DNA
gccgcactgctgtggatgcgacaaaagggagctgttccttatgcatatactgcaaacttgggtcagccagacgaa

SEQ ID NO: 668136 - DNA, 75 bp, synthetic construct
  source 1..75: mol_type = other DNA
ggtaaaacctttagcaacgacgtagaaatgatgctggaagctaaccgcatcggcggtcgtcatggtctgggaatg

SEQ ID NO: 668137 - DNA, 75 bp, synthetic construct
  source 1..75: mol_type = other DNA
gcttgcccatatggaagaaatgacgggagaaagcggggtagacgcatttgtggcatatgcggagaagatctcttc

SEQ ID NO: 668138 - DNA, 75 bp, synthetic construct
  source 1..75: mol_type = other DNA
tgacagaagaaatggacaccgactcgctagttatcgatcttggcgaagaaactaaacgacagaaggatgaacaca

SEQ ID NO: 668139 - DNA, 75 bp, synthetic construct
  source 1..75: mol_type = other DNA
atgtaccaggggccatgatttcagtaacaacttctttgagcccgacaatgcaggcaaaacgagaaacttctcttg

SEQ ID NO: 668140 - DNA, 75 bp, synthetic construct
  source 1..75: mol_type = other DNA
ggtggttaacggcttacccattattaccggtattggcgaagagaaagtactggcgcaaattgtttcgatccttaa

SEQ ID NO: 668141 - DNA, 75 bp, synthetic construct
  source 1..75: mol_type = other DNA
atttgacgcacagacccgatctggtgcaattgatagctatgggagaccaacaggtacctcttcccagcagaatgc

SEQ ID NO: 668142 - DNA, 75 bp, synthetic construct
  source 1..75: mol_type = other DNA
aaatcctcggcggcgaacatcgctggcgtgctgctattgagcaaggaatttcaacggttccggtgctttctgtgg

SEQ ID NO: 668143 - DNA, 75 bp, synthetic construct
  source 1..75: mol_type = other DNA
gatctggcggcagcggatcagaacggcgatggcgacggttatatcgacgccagcgagctggtgagcgcgattaac

SEQ ID NO: 668144 - DNA, 75 bp, synthetic construct
  source 1..75: mol_type = other DNA
tggaaagggctgtgcgctggagcttgctcgtggcggatttaacctgctgattaacgatcgtcccgatgccgacag

SEQ ID NO: 668145 - DNA, 75 bp, synthetic construct
  source 1..75: mol_type = other DNA
tgattaccggagccgctcgtggtattggaaagggctgtgcgctggagcttgctcgtggcggatttaacctgctga

SEQ ID NO: 668146 - DNA, 75 bp, synthetic construct
  source 1..75: mol_type = other DNA
tggcgaagtgttcaccgccgatccgcgatctggaaaaccagaaaggcatgtgggaaaaactgtttaacggtgaaa

SEQ ID NO: 668147 - DNA, 75 bp, synthetic construct
  source 1..75: mol_type = other DNA
caaaggtctgggccgtggggacgttggggttatccggctgatattgcttccactgtccgcgcgatggcggaaggt

SEQ ID NO: 668148 - DNA, 75 bp, synthetic construct
  source 1..75: mol_type = other DNA
ccactgtccgcgcgatggcggaaggtaaactgatttacacctgtggtcaggcggttgccattgacggtggcttaa

SEQ ID NO: 668149 - DNA, 75 bp, synthetic construct
  source 1..75: mol_type = other DNA
gtgaaaaaacgcggtgacctcctcgacctcgaaccagacagcttcgatcaaaacattgccattaacacccgcgcg

SEQ ID NO: 668150 - DNA, 75 bp, synthetic construct
  source 1..75: mol_type = other DNA
acagcactgtacaccaaggctgtgtatgcacgcgcaaaggccgatcttttgccggaatctgccagcgtggggcgg

SEQ ID NO: 668151 - DNA, 75 bp, synthetic construct
  source 1..75: mol_type = other DNA
aagcgagttatgtcgttgtaaacgccaatgcaacgtctggacatgcaaatgccatggtcaatttctccgtggagt

SEQ ID NO: 668152 - DNA, 75 bp, synthetic construct
  source 1..75: mol_type = other DNA
atgagcaataataacttttctaattcatattctacagaggcaaggaaagaagcttttcggaaagctgaagccagt

SEQ ID NO: 668153 - DNA, 75 bp, synthetic construct
  source 1..75: mol_type = other DNA
gtaagtaactgtagtgtgtttgcggggtcgttatgtctgaatacggaatttacactgtcgtatcagtgccaaatt

SEQ ID NO: 668154 - DNA, 75 bp, synthetic construct
  source 1..75: mol_type = other DNA
agtggcatagcctggtgctataacactgagattgtactcgctgcttgtgaggcgattgaagccgaactacaacgg

SEQ ID NO: 668155 - DNA, 75 bp, synthetic construct
  source 1..75: mol_type = other DNA
agcctttagcgataatattaaccgcagtggcatagcctggtgctataacactgagattgtactcgctgcttgtga

SEQ ID NO: 668156 - DNA, 75 bp, synthetic construct
  source 1..75: mol_type = other DNA
gctttttcgccggtgcggcgcgctgcctgaacggtctggcggcaggcgaatatcttgaaggtcatacctcgatga

SEQ ID NO: 668157 - DNA, 75 bp, synthetic construct
  source 1..75: mol_type = other DNA
aagcaaacggagctggatgccgaaagcagcggcctggatacgctcagctcggcgttgagcgactttcaaagtgcc

SEQ ID NO: 668158 - DNA, 75 bp, synthetic construct
  source 1..75: mol_type = other DNA
ctcaggacgcgattattcatcttggcagcgccacggggcctgagatcaccaacagcagcaatacgtttgatgatg

SEQ ID NO: 668159 - DNA, 75 bp, synthetic construct
  source 1..75: mol_type = other DNA
gtcgatgcgctgaacagcgataccgacggcccggtgacttttgccgccaccagcaataatgactcggcgaccgtt

SEQ ID NO: 668160 - DNA, 75 bp, synthetic construct
  source 1..75: mol_type = other DNA
atgattaacccaagaactattgcccaggaaattgcgtatgcggatgtcgccactcaggcggcaaatttgcaggaa

SEQ ID NO: 668161 - DNA, 75 bp, synthetic construct
  source 1..75: mol_type = other DNA
cagctacaacggcgtgtcgattgttgactatggcatcaccctcgattctcacggccacttacagatcgactccga

SEQ ID NO: 668162 - DNA, 75 bp, synthetic construct
  source 1..75: mol_type = other DNA
atgatcaacccaagaaccattgcgcaagaaatcgcgtatgcggatgtcgctactcaggcgacgaatttgcaggag

SEQ ID NO: 668163 - DNA, 75 bp, synthetic construct
  source 1..75: mol_type = other DNA
aaactggctccggcgctggcggcagggaactgcgtagtgcttaaaccatcagaaattaccccgctgaccgcgttg

SEQ ID NO: 668164 - DNA, 75 bp, synthetic construct
  source 1..75: mol_type = other DNA
cacccacatggaacttggcggcaaagcgccagtgattgtttttgatgatgccgatattgaagctgtggttgaagg

SEQ ID NO: 668165 - DNA, 75 bp, synthetic construct
  source 1..75: mol_type = other DNA
atccgctgaccggtcatcccaaagtgcggatggtgtcgctgacgggctctatcgccaccggcgagcacatcatca

SEQ ID NO: 668166 - DNA, 75 bp, synthetic construct
  source 1..75: mol_type = other DNA
aacgtaccggagcaatgggcggtcatgtcgctggcaccgcaggattctgcgttgctgtgccagccttttattcat

SEQ ID NO: 668167 - DNA, 75 bp, synthetic construct
  source 1..75: mol_type = other DNA
cccggcaggcgtgattaacgtactgtttggcagaggcaaaacggtgggcgatccgctgaccggacatcctaaagt

SEQ ID NO: 668168 - DNA, 75 bp, synthetic construct
  source 1..75: mol_type = other DNA
gccgcacggcgggcagaaactttcaggttatggcaaagatatgtcactttatgggctggaagattacaccgtagt

SEQ ID NO: 668169 - DNA, 75 bp, synthetic construct
  source 1..75: mol_type = other DNA
ccgattttggtgaaaagaaaggcacatccggcatgtattttctggcaaaagaatgcatcgattccatcaaagcca

SEQ ID NO: 668170 - DNA, 75 bp, synthetic construct
  source 1..75: mol_type = other DNA
agtatcggtaatactggcgggagtgaaacccgtccacgaaatattgcctttaactacattgtcagggcgacctaa

SEQ ID NO: 668171 - DNA, 75 bp, synthetic construct
  source 1..75: mol_type = other DNA
cttggtttggggaaggctctgcactgcctgttggtgtgcctgttccatggcccaccgccacaccgccagcaggct

SEQ ID NO: 668172 - DNA, 75 bp, synthetic construct
  source 1..75: mol_type = other DNA
cacctgggtgccaccggaggaagccacgttaatcagaaacggggaagagcgcgggaatattgccgacgccctttt

SEQ ID NO: 668173 - DNA, 75 bp, synthetic construct
  source 1..75: mol_type = other DNA
gaccgtctggatagccagaaaaacctttgccctgaaccgggtggagttctacgaagccctgggcggcatgatacg

SEQ ID NO: 668174 - DNA, 75 bp, synthetic construct
  source 1..75: mol_type = other DNA
aggaggttttgtcttcttttttattcttaacatgatatctgccatctacagtatcagcgacatgctgaaacaata

SEQ ID NO: 668175 - DNA, 75 bp, synthetic construct
  source 1..75: mol_type = other DNA
aacggggctgctttttcggctgaagaatacccggaactggcaaaggcttacccgacaaataaattgcctgattta

SEQ ID NO: 668176 - DNA, 75 bp, synthetic construct
  source 1..75: mol_type = other DNA
gttggaaaaacaccgccatattgttgtagctaacgatggatatgacacaaaagatgaatgggagttggctacgat

SEQ ID NO: 668177 - DNA, 75 bp, synthetic construct
  source 1..75: mol_type = other DNA
gttccatggccctcagccacaccaccaacgggctggctgaaatgtaacggtgcagcattttcttctgaaatgtac

SEQ ID NO: 668178 - DNA, 75 bp, synthetic construct
  source 1..75: mol_type = other DNA
tgtaaaacggtttggtgaaattagtggaaatgtaggtacagaaactcgccctcgcaacgttgcatttaattacat

SEQ ID NO: 668179 - DNA, 75 bp, synthetic construct
  source 1..75: mol_type = other DNA
gtattcaaaggacagcggaggataattttaccggggcatggatatcaatgcgcccccgcaatgttgcgtttaatt

SEQ ID NO: 668180 - DNA, 75 bp, synthetic construct
  source 1..75: mol_type = other DNA
tgacgggcgaggtgcagacggtggtcgcaaattattaagctggcaggcagctacaaacttttctcagtttgccgg

SEQ ID NO: 668181 - DNA, 75 bp, synthetic construct
  source 1..75: mol_type = other DNA
ggagagaattcaggcaataagaaaaaatgtattatccggtcagagtctggccaccgccatgcgcaattctgacta

SEQ ID NO: 668182 - DNA, 75 bp, synthetic construct
  source 1..75: mol_type = other DNA
gccgcgaattgcaccctgtcgccccactgctcgacaatctcacgtcagcgctaaacaaagtttatcagcgcaaag

SEQ ID NO: 668183 - DNA, 75 bp, synthetic construct
  source 1..75: mol_type = other DNA
gtggagatcattcgatacagcaacagttgcaggaagtgcgggaagatgatgacgacgcggagatgacccactcgg

SEQ ID NO: 668184 - DNA, 75 bp, synthetic construct
  source 1..75: mol_type = other DNA
aacgaagccgagccggtaatgctggagcaaattagccgcatctcgcaacaaatcggctactacctgcatcgagcc

SEQ ID NO: 668185 - DNA, 75 bp, synthetic construct
  source 1..75: mol_type = other DNA
acgcacagtctgaaaacaccgctggcggtgctgcaaagtacgctacgttccatgcgtagtgagaagatgagcgtc

SEQ ID NO: 668186 - DNA, 75 bp, synthetic construct
  source 1..75: mol_type = other DNA
gagctggtttgtctatgtgctctcagccaacctgctgttagtgatccctctgttatgggtcgccgcctggtggag

SEQ ID NO: 668187 - DNA, 75 bp, synthetic construct
  source 1..75: mol_type = other DNA
cacaacgcgagaactgaccagtctggtacgaaacctgaaccgattgttaaaaagtgaacgcgaacgttacacaaa

SEQ ID NO: 668188 - DNA, 75 bp, synthetic construct
  source 1..75: mol_type = other DNA
aataagtgctatcagaaaaaatgtcttatccggtcagtcactggcactggccatgaaaaacagtggttatgactt

SEQ ID NO: 668189 - DNA, 75 bp, synthetic construct
  source 1..75: mol_type = other DNA
ctggagtttatctgtaatgtcgaaactgactttggcacccgaaaaggaacatccggcatgtactttctggccaga

SEQ ID NO: 668190 - DNA, 75 bp, synthetic construct
  source 1..75: mol_type = other DNA
aataaacttctcttaaattctgaaagggaagacagcgtatctgcaatgaatacctatgccggacagtggctggaa

SEQ ID NO: 668191 - DNA, 75 bp, synthetic construct
  source 1..75: mol_type = other DNA
caacctttacttatcggacaaagataaaataggtcgaggcgaattcaatgacctagctgatttccttgtgatttt

SEQ ID NO: 668192 - DNA, 75 bp, synthetic construct
  source 1..75: mol_type = other DNA
cgctccctggaagcacaggccagatatatccttagttgctccgtagataatgaaaaacaattaactggtggtgaa

SEQ ID NO: 668193 - DNA, 75 bp, synthetic construct
  source 1..75: mol_type = other DNA
ctgtcactgttgccattcgccgcgaatacaaacagacatggaaaacactcgacaatgaactggcctgcgccctct

SEQ ID NO: 668194 - DNA, 75 bp, synthetic construct
  source 1..75: mol_type = other DNA
gaaaagcagggttgtgggcgattggcgatgttgtgcgggggccgatgctggcgcataaagcgatggccgaaggtg

SEQ ID NO: 668195 - DNA, 75 bp, synthetic construct
  source 1..75: mol_type = other DNA
gttctgctaccactcatatcaccaaaaaagcagataaaaagaaaagcacggcaaccaccaaaaagacccagaaag

SEQ ID NO: 668196 - DNA, 75 bp, synthetic construct
  source 1..75: mol_type = other DNA
cattaacaaaacctggtctggcgttccgggggtaggttctcaggacgctggtgaatcagttttttatattgcagt

SEQ ID NO: 668197 - DNA, 75 bp, synthetic construct
  source 1..75: mol_type = other DNA
cttgggttaggaaccgttgcaacaaaaaacgtgggaaatagtgctgggcaaatacctgatatgtcttactggtct

SEQ ID NO: 668198 - DNA, 75 bp, synthetic construct
  source 1..75: mol_type = other DNA
gtgggccgacctaccattgggtacgcgaaagtattctggctggcgaacaggtgttagccggtgcgggtgatgacg

SEQ ID NO: 668199 - DNA, 75 bp, synthetic construct
  source 1..75: mol_type = other DNA
aaaaatgccgcgtcaggaacccttgccgacgcgcacaaagcgaaggtgcaaaaagccacgaaagtggcaatgaat

SEQ ID NO: 668200 - DNA, 75 bp, synthetic construct
  source 1..75: mol_type = other DNA
ctggtttattatgcgtataaagatctggtgaagatccgtattccacgcacggctaacgaaatgtatcacctgcgt

SEQ ID NO: 668201 - DNA, 75 bp, synthetic construct
  source 1..75: mol_type = other DNA
acaatatcaccctgaaaatcgaccctgctgtagtgctagcaacccgcaagtatgtggatgacaaggcactggagc

SEQ ID NO: 668202 - DNA, 75 bp, synthetic construct
  source 1..75: mol_type = other DNA
gaaacttttcggttatgccaaaactggcctgctctcctcctctgccgcttcaggggtgccgcaggtggagaatct

SEQ ID NO: 668203 - DNA, 75 bp, synthetic construct
  source 1..75: mol_type = other DNA
gaacgattattcaatcctgaataccgtctcagagaacctgacctacaagccagagcgtctgacgatggaaaaagg

SEQ ID NO: 668204 - DNA, 75 bp, synthetic construct
  source 1..75: mol_type = other DNA
tggcagagcttgctacatcagcagataaactcccatattttacaggggcagatcgtgccgcgttaaccgcgttga

SEQ ID NO: 668205 - DNA, 75 bp, synthetic construct
  source 1..75: mol_type = other DNA
atgatgcactgttacaattgcgggaatttatcgacgaaaactccggtgaattttttgttcaggtttggggaaatg

SEQ ID NO: 668206 - DNA, 75 bp, synthetic construct
  source 1..75: mol_type = other DNA
atggagccaacttcgacaacacgattttgcgccgttcatacgaacggcaggggagcccctgcccgtggcgttact

SEQ ID NO: 668207 - DNA, 75 bp, synthetic construct
  source 1..75: mol_type = other DNA
tgcgatcaccacattatttctgcaacgccatcctggggtatgcgacgccattgcgctaactgcgccaatgtttgg

SEQ ID NO: 668208 - DNA, 75 bp, synthetic construct
  source 1..75: mol_type = other DNA
cttttgtgaaatcagcaattgcgacaatggtgggttctgcacctgcggcactggatacactgaacgaactggcgg

SEQ ID NO: 668209 - DNA, 75 bp, synthetic construct
  source 1..75: mol_type = other DNA
tagctgcaactccaaaagcggttaaagctgcatacgatctagcagccggaaaggcaccatccaatcatatacatc

SEQ ID NO: 668210 - DNA, 75 bp, synthetic construct
  source 1..75: mol_type = other DNA
cgcgcagcgctggcaacccttacagctattggtcgcgctattatcgctaagggcagtataaaagatgtcctcaat

SEQ ID NO: 668211 - DNA, 75 bp, synthetic construct
  source 1..75: mol_type = other DNA
gccgtcgataacttatgccgtaccgggaaagccgggctgtgggcaattggtgatgtcgtgcgagggccgatgctg

SEQ ID NO: 668212 - DNA, 75 bp, synthetic construct
  source 1..75: mol_type = other DNA
gatgacggtgtgcatgtgcgctggcggcagggtgagaagcgagaagaaagccgcttcgataaattaattcttgcc

SEQ ID NO: 668213 - DNA, 75 bp, synthetic construct
  source 1..75: mol_type = other DNA
gcattgtcattgataatcagcagatcctcgataaccgtggggcgctggcgttaaccgaagttccgccgcgtctcg

SEQ ID NO: 668214 - DNA, 75 bp, synthetic construct
  source 1..75: mol_type = other DNA
ctggtcaacggcaacctgcatgtggtgggtgaaaaacagattgccattaatcagggtaccgaatttattcgcttc

SEQ ID NO: 668215 - DNA, 75 bp, synthetic construct
  source 1..75: mol_type = other DNA
agatcgccgcccacgtaatattggcgatacgctgaccattgtgttgcaggaaaacgtcagtgccagcaagagttc

SEQ ID NO: 668216 - DNA, 75 bp, synthetic construct
  source 1..75: mol_type = other DNA
tccgacgcccgtcgccaacggttctattttccagtctgctcagccgattaactatggctatcaaccgctgtttga

SEQ ID NO: 668217 - DNA, 75 bp, synthetic construct
  source 1..75: mol_type = other DNA
caccgaaagcggtcaaggctgcatacgatctggcaaacggaaaacaaccggcagatgccacgctcactgctctgg

SEQ ID NO: 668218 - DNA, 75 bp, synthetic construct
  source 1..75: mol_type = other DNA
ggcgctaacttatgccaatgccgatcgtctgctggatatgcgtgacgaagagatggcactgcgcgatgaagaagt

SEQ ID NO: 668219 - DNA, 75 bp, synthetic construct
  source 1..75: mol_type = other DNA
aaatgacttctccatctcgttgccggtagaccgtctctcttttctgctggctgtggccacgctgaatggagagcg

SEQ ID NO: 668220 - DNA, 75 bp, synthetic construct
  source 1..75: mol_type = other DNA
ttgaatgtacgactgcgctggtcgaagccgcgaaatctattggcgcaaccactcacgttggcgtaaccgcctctt

SEQ ID NO: 668221 - DNA, 75 bp, synthetic construct
  source 1..75: mol_type = other DNA
gatgcgacgactcaagtgaccgcccttctaaaagggcggttatggcaggctgccaaatgggcgacggcatttagg

SEQ ID NO: 668222 - DNA, 75 bp, synthetic construct
  source 1..75: mol_type = other DNA
gccctctccgcccggcagaatacccactcagcccataagtcggcacgccgcctggcgggaatcaatgccagccat

SEQ ID NO: 668223 - DNA, 75 bp, synthetic construct
  source 1..75: mol_type = other DNA
atggatttcagcggtaaaaatgtctgggtaaccggcgcggggaaaggtatcggctacgccacggcgctggcgttt

SEQ ID NO: 668224 - DNA, 75 bp, synthetic construct
  source 1..75: mol_type = other DNA
ctggtcaatgcggcgggaattttgcgcatgggcgcgaccgatcagctcagtaaagaggactggcagcagactttt

SEQ ID NO: 668225 - DNA, 75 bp, synthetic construct
  source 1..75: mol_type = other DNA
ctggaattcccggctgtcgctgatttcgaatgtacgactgcgctggggttgaagctgcgaaatctattggcgcga

SEQ ID NO: 668226 - DNA, 75 bp, synthetic construct
  source 1..75: mol_type = other DNA
acatcagtccacgtattgctgacagggttacggatggtggccgtaacctgttgtcctttaactggcccagctacc

SEQ ID NO: 668227 - DNA, 75 bp, synthetic construct
  source 1..75: mol_type = other DNA
aatcttgctgcctgccgccgctatgcggagagctgggaggatgttctggctaacggtaccagtcttgttctgaca

SEQ ID NO: 668228 - DNA, 75 bp, synthetic construct
  source 1..75: mol_type = other DNA
atgaatcaaccgttactttcggtcaataacctgacccacctctacgcaccgggcaaaggcttcagcgacgtttct

SEQ ID NO: 668229 - DNA, 75 bp, synthetic construct
  source 1..75: mol_type = other DNA
aatccaccgtgccgccgcagaaagctggatggcccagggatttcccagcgaagcgattcatcatgcgctggcggc

SEQ ID NO: 668230 - DNA, 75 bp, synthetic construct
  source 1..75: mol_type = other DNA
gcgccattttctgttgaaaagcgccattttgcgctcaatgaacgatgcactcatcacccgtgtgaccggcgaaga

SEQ ID NO: 668231 - DNA, 75 bp, synthetic construct
  source 1..75: mol_type = other DNA
gaggtcattttcgaccgtggtcaacgggttgatactttacgccctgggcaaggtgtggggctggccgtagcccgc

SEQ ID NO: 668232 - DNA, 75 bp, synthetic construct
  source 1..75: mol_type = other DNA
tggcgcaagtgtgtcagcggctgttagcggaaacggaacgactggacgtgctggtcaatgcagcgggaattttac

SEQ ID NO: 668233 - DNA, 75 bp, synthetic construct
  source 1..75: mol_type = other DNA
ccgcacagaccaatgctgaaggctttaatgccgcaatgcagtcactgaataacgaatggcaacgttttgctgaag

SEQ ID NO: 668234 - DNA, 75 bp, synthetic construct
  source 1..75: mol_type = other DNA
tcattcaggatcaggggccggaagccattgcccagatgggggcatttgctcaggtgttcgccaaaaacaaaggca

SEQ ID NO: 668235 - DNA, 75 bp, synthetic construct
  source 1..75: mol_type = other DNA
aataccggcggtctgccggacacgccggattcatcgcgcaatccccgtaacccccgcaatcctcggggtccgggt

SEQ ID NO: 668236 - DNA, 75 bp, synthetic construct
  source 1..75: mol_type = other DNA
atgaagcagcctctggcgctgctggagtggggatggggattaagcgtagagataccgcagattcggctttcttca

SEQ ID NO: 668237 - DNA, 75 bp, synthetic construct
  source 1..75: mol_type = other DNA
gatttttaccacacttacaggaacaacgacttccggtaagttgattgtcaacgaagcaagctctggcgctacggg

SEQ ID NO: 668238 - DNA, 75 bp, synthetic construct
  source 1..75: mol_type = other DNA
gtgcaggcatcattgctgctggtctggaattttacgattttctgaccacgcaacacgccctgccgggcgaggttg

SEQ ID NO: 668239 - DNA, 75 bp, synthetic construct
  source 1..75: mol_type = other DNA
caacggggttggctctggcggtggcctgtatggcgatctcaactataccgcggatacctgccgtcaatgcaaaga

SEQ ID NO: 668240 - DNA, 75 bp, synthetic construct
  source 1..75: mol_type = other DNA
ttatgcggtgaatgcgcaaacgcctgcccaacaggggcgttaaaaattatcgagtggaaagatattactgtgtga

SEQ ID NO: 668241 - DNA, 75 bp, synthetic construct
  source 1..75: mol_type = other DNA
ccgaacggggaagtggtacgcgttggaatgggcttcaaacctcttgatttctcgattaatgacattaccgcctag

SEQ ID NO: 668242 - DNA, 75 bp, synthetic construct
  source 1..75: mol_type = other DNA
aacgaacgcgcgttgcttgccgcgcttcagcaggttatcaaagaaaccgaggtattttccgtccgctttcgctta

SEQ ID NO: 668243 - DNA, 75 bp, synthetic construct
  source 1..75: mol_type = other DNA
tctgtggggagaccactcagcccgtttgctgattttctcgcagaagagcaacattatttacgcagcaaaaagtat

SEQ ID NO: 668244 - DNA, 75 bp, synthetic construct
  source 1..75: mol_type = other DNA
tatttagaggatttggactttgttcttggttggcatttcattctatctgaaaaccaagagaacacggataaaata

SEQ ID NO: 668245 - DNA, 75 bp, synthetic construct
  source 1..75: mol_type = other DNA
gccataatgcacttgatgacgcccgttaccaggcaaaatacgtttcagctatctggcaaaaactgatcccgagtc

SEQ ID NO: 668246 - DNA, 75 bp, synthetic construct
  source 1..75: mol_type = other DNA
tgccgtcgcgcggcgtaacgtcgtactgtcgcggatgctggatgaagggtatatcacccaacaacagttcgatca

SEQ ID NO: 668247 - DNA, 75 bp, synthetic construct
  source 1..75: mol_type = other DNA
tattcgtggcgtcttcctgcgttctaacctcttccagggctcatggaacttcgaacgtatgcaggcactgggttt

SEQ ID NO: 668248 - DNA, 75 bp, synthetic construct
  source 1..75: mol_type = other DNA
gctctcttgcagatggtccggaaattctcgccggagacaaaggcactcttattcgccttgatacccccataacca

SEQ ID NO: 668249 - DNA, 75 bp, synthetic construct
  source 1..75: mol_type = other DNA
tcaacccgctctattcaatggatcgagccgtcgcgcggcgtaacgtcgtgctgtcgcgaatgctggacgaagggt

SEQ ID NO: 668250 - DNA, 75 bp, synthetic construct
  source 1..75: mol_type = other DNA
ccgcaaagtgcagcaggccgcacagcaagctgtacgtaataacgttctggactacgacatgcgtcatggctatcg

SEQ ID NO: 668251 - DNA, 75 bp, synthetic construct
  source 1..75: mol_type = other DNA
aatactccgctggcgttcctgattaagagcgcattgaacagcaatatctttggcgaaccgggttggcagggaact

SEQ ID NO: 668252 - DNA, 75 bp, synthetic construct
  source 1..75: mol_type = other DNA
cgaatgacggtcacgttgaccggccagcacaacgacaccggccagccactttcgttaaccatccctgtgagttga

SEQ ID NO: 668253 - DNA, 75 bp, synthetic construct
  source 1..75: mol_type = other DNA
cgaatgacagttacgctaaccggccagcacaacgacaccggccagccactttcgttaaccatccctgtgagttga

SEQ ID NO: 668254 - DNA, 75 bp, synthetic construct
  source 1..75: mol_type = other DNA
attgaccagccgcagaccccggcgcttgagttgcagattaaagtcgcctgttacatggcagtgctgaaatgggaa

SEQ ID NO: 668255 - DNA, 75 bp, synthetic construct
  source 1..75: mol_type = other DNA
gcttgcaacggtattgccgggatcggcgctctggtcgacggggctgagattttggcgggcaagaaaggcacattg

SEQ ID NO: 668256 - DNA, 75 bp, synthetic construct
  source 1..75: mol_type = other DNA
aaatgttagtaatacattattatttatgaacatgtttgcaaaattttacggtgtagtggcgtttggggtattttc

SEQ ID NO: 668257 - DNA, 75 bp, synthetic construct
  source 1..75: mol_type = other DNA
ttgagttgcagattaaggttgcctgttacatggcggtgctgaaatgggaaccccgcgtcaccctgtcatccgtca

SEQ ID NO: 668258 - DNA, 75 bp, synthetic construct
  source 1..75: mol_type = other DNA
attgctcaatacggtgagaaacgtcgtattccggttacgttggatcaaatcccgccggagatggtgaaagccttt

SEQ ID NO: 668259 - DNA, 75 bp, synthetic construct
  source 1..75: mol_type = other DNA
gataaggcgcgccagttttttgacgctgcttctcaggcctgccaactgattgatggcatccggcagtgtatgcag

SEQ ID NO: 668260 - DNA, 75 bp, synthetic construct
  source 1..75: mol_type = other DNA
gataaggcgcgccagattttcgatacagtttctctggtctgtgaaattgtcgacagtgtccgacagtgtatgcag

SEQ ID NO: 668261 - DNA, 75 bp, synthetic construct
  source 1..75: mol_type = other DNA
atgccgcgaacggcggcgaaatgggcactggtagcgatactggtgccttttttattggcgggatgcgtcagcctg

SEQ ID NO: 668262 - DNA, 75 bp, synthetic construct
  source 1..75: mol_type = other DNA
cacaggaaatactggatacggacaccggacgtattgttcagggtatgattaattctggcgcaggtggttggtcat

SEQ ID NO: 668263 - DNA, 75 bp, synthetic construct
  source 1..75: mol_type = other DNA
ccggaagatgtagtgattgaaattaaagccgcggcaatctgcggcgcagacatgaagcactacaatgtcgatagc

SEQ ID NO: 668264 - DNA, 75 bp, synthetic construct
  source 1..75: mol_type = other DNA
ggtaatggcttcaaaactctggctgaaggtcagaacgttgagttcgaaattcaggacggtcagaaaggtccggca

SEQ ID NO: 668265 - DNA, 75 bp, synthetic construct
  source 1..75: mol_type = other DNA
aaaaaactttggtaaaatcatatgcggtaaaacaccaactaaaagtaacaaaaattattatggcgaagattttct

SEQ ID NO: 668266 - DNA, 75 bp, synthetic construct
  source 1..75: mol_type = other DNA
gagcgatgggcgtggactatgccgcagagtatttgcaacgcttcggcttcccggcacaaaacattgtccacactg

SEQ ID NO: 668267 - DNA, 75 bp, synthetic construct
  source 1..75: mol_type = other DNA
cttaccgttcggatactcagcagggaccgacgccgcgtaaagtgaccgatgttctgcaaacgggacagcaaatct

SEQ ID NO: 668268 - DNA, 75 bp, synthetic construct
  source 1..75: mol_type = other DNA
atttatcgacgaaaactccggtgaattttttgttcaggtctggggaaatggagccaacttcgacaacacgatttt

SEQ ID NO: 668269 - DNA, 75 bp, synthetic construct
  source 1..75: mol_type = other DNA
cagcttctcaggtctgtgaaattgtcgacagtgttcggcaatgcctgcagaacttatcgcctgtaagagcagaat

SEQ ID NO: 668270 - DNA, 75 bp, synthetic construct
  source 1..75: mol_type = other DNA
aactcaggaatgattatcattcgagctgataataaattatggaaccctaaatttctatatttcatattaaaatca

SEQ ID NO: 668271 - DNA, 75 bp, synthetic construct
  source 1..75: mol_type = other DNA
cagtgaacacctcttacgtaccattcaacggtcagcaaattatcaccgccatggctgccggagttgcatacgttg

SEQ ID NO: 668272 - DNA, 75 bp, synthetic construct
  source 1..75: mol_type = other DNA
gatcaccatgtggtcgtcactgaaatcccattttggatgttcatacaaagaaatcagtgaggagcagtttaccga

SEQ ID NO: 668273 - DNA, 75 bp, synthetic construct
  source 1..75: mol_type = other DNA
gcattattccgcgaactgtatccggcattaaaacaaattcaatctaactattccggcagatgctacgactacggt

SEQ ID NO: 668274 - DNA, 75 bp, synthetic construct
  source 1..75: mol_type = other DNA
agccagacggaccaacgaatctttccgcatgggtaaggcttaagaacaaagaattacctccttcactacatcact

SEQ ID NO: 668275 - DNA, 75 bp, synthetic construct
  source 1..75: mol_type = other DNA
agaagagcaccaacgagctttctgcaaaagaagcaaacagccttgtatggttgtgggattatgctaaccgatcac

SEQ ID NO: 668276 - DNA, 75 bp, synthetic construct
  source 1..75: mol_type = other DNA
atgcagcttcctggtgatgaacagtgccgtgagattatttgtttggcacttcgtaaacttgctggctggctgcaa

SEQ ID NO: 668277 - DNA, 75 bp, synthetic construct
  source 1..75: mol_type = other DNA
gagtacatccacagggtagtgcttgaaggtgaattcattggcaaacaagagaagagcaccaacgagctttccgca

SEQ ID NO: 668278 - DNA, 75 bp, synthetic construct
  source 1..75: mol_type = other DNA
atgggattatgccaaccgctcacaggcattgttccgtgagttgtatcccgcattaaaactgattcagtctggcta

SEQ ID NO: 668279 - DNA, 75 bp, synthetic construct
  source 1..75: mol_type = other DNA
agttctcgtatatcatcgggagggcgaggggcgttttaattaatcacacgcgggatatagatatttatgagcctg

SEQ ID NO: 668280 - DNA, 75 bp, synthetic construct
  source 1..75: mol_type = other DNA
gaattgtatccggcattaaaacaaattcaatcgaactattccggcagatgtcatgactgcggttatgagttctcc

SEQ ID NO: 668281 - DNA, 75 bp, synthetic construct
  source 1..75: mol_type = other DNA
tgactactggactaaaggtcatgtatttaacccacgcaaagctaaaaaggcgttgccgggtaaaatcaccactga

SEQ ID NO: 668282 - DNA, 75 bp, synthetic construct
  source 1..75: mol_type = other DNA
agttcaactgtattcatatgaatatggttgctgctgatggaaagcttcgtaagctactctgccttcctttgaaga

SEQ ID NO: 668283 - DNA, 75 bp, synthetic construct
  source 1..75: mol_type = other DNA
gattatgccaaccgttcacaggcattattccgcgaattgtatccggcgctaaaacaaattcaatcgaactattca

SEQ ID NO: 668284 - DNA, 75 bp, synthetic construct
  source 1..75: mol_type = other DNA
catctggcagagctgagtgtgctgagtggctgcaaaaacgaatttatttatcgtgcctgtctgcattttcgctcc

SEQ ID NO: 668285 - DNA, 75 bp, synthetic construct
  source 1..75: mol_type = other DNA
ccgaagcatatgcgatccttgaaaaatgccatcaggccagagcctggactttattaggcaggatgaaccactatg

SEQ ID NO: 668286 - DNA, 75 bp, synthetic construct
  source 1..75: mol_type = other DNA
taccctatgctattgagggtaaactagttacctttggtattgaacctacaaaaccagaaactggatatggatata

SEQ ID NO: 668287 - DNA, 75 bp, synthetic construct
  source 1..75: mol_type = other DNA
ccctgaagatttatgctcactgtgtggcggaaatcatggcaaagccgccatgatcgaatgtaaagacaaaatcca

SEQ ID NO: 668288 - DNA, 75 bp, synthetic construct
  source 1..75: mol_type = other DNA
cggcgagtatgacctttttgatttaatggcgaaggttactgaagagaacctgcacgccccggtggattccgggcc

SEQ ID NO: 668289 - DNA, 75 bp, synthetic construct
  source 1..75: mol_type = other DNA
ccggtgccaatgagccgtctggaacactatgccggtcaggatgaaattggtctgcgttacaacagccaccgcaca

SEQ ID NO: 668290 - DNA, 75 bp, synthetic construct
  source 1..75: mol_type = other DNA
atgcataaagatcaatgtactgaggccccctcccaagagcaggttcgtgtaaaaactatgcttaatagcaccatt

SEQ ID NO: 668291 - DNA, 75 bp, synthetic construct
  source 1..75: mol_type = other DNA
taccgtgcatttgcgcgaagatcgtcgccacattaccgaccgcgatgtgcgaatcctgcgtcagacgctggatac

SEQ ID NO: 668292 - DNA, 75 bp, synthetic construct
  source 1..75: mol_type = other DNA
gccgggattcaggtttctctctttatcgacgccgatgaagagcagatcaaagctgcggcagaggttggcgcaccg

SEQ ID NO: 668293 - DNA, 75 bp, synthetic construct
  source 1..75: mol_type = other DNA
aagtgatttgcttccctgccgatgtcggcgatctctccttgcatgaagagatgctcgacgcggcgcaaaaccagt

SEQ ID NO: 668294 - DNA, 75 bp, synthetic construct
  source 1..75: mol_type = other DNA
atgaaaatcttagcctgcagtgccgcacttctgctcaccctggcctcatccacagtgctcgccgcgtcggattca

SEQ ID NO: 668295 - DNA, 75 bp, synthetic construct
  source 1..75: mol_type = other DNA
ctctacacccgcaccaccagcggtaacgtctctgctcccgcgcagtctaaccaggatggcgtgcctgccgaaccg

SEQ ID NO: 668296 - DNA, 75 bp, synthetic construct
  source 1..75: mol_type = other DNA
caactcgtcatgagtcgcggtcagtctctgccaaaagaaaaacaggcgaaggcgatgatcaccatgtggtcgtca

SEQ ID NO: 668297 - DNA, 75 bp, synthetic construct
  source 1..75: mol_type = other DNA
tacacacaggactggacgaatcttgatgccaatatgggcagcgaagccgatctacggacgctggttgatagcgcg

SEQ ID NO: 668298 - DNA, 75 bp, synthetic construct
  source 1..75: mol_type = other DNA
atgaaacttgccgcctgttttctgacactccttcccggctttgccattgccgccagctggacttcgccggggttc

SEQ ID NO: 668299 - DNA, 75 bp, synthetic construct
  source 1..75: mol_type = other DNA
agcaaatggcggagaaattgcagggtttcaacgtgttgagctacctctcgtcgcatgatacccgtctgttccgtg

SEQ ID NO: 668300 - DNA, 75 bp, synthetic construct
  source 1..75: mol_type = other DNA
tggtcgaagtggctgatggcgaatatgacgtgatcgtgctgcctggtggcattaaaggcgcagagtgttttcgcg

SEQ ID NO: 668301 - DNA, 75 bp, synthetic construct
  source 1..75: mol_type = other DNA
atagcaccctgctggttgaaaccattaaacagttccaccgttccgggcgtatcgtcgcggctatttgcgccgcac

SEQ ID NO: 668302 - DNA, 75 bp, synthetic construct
  source 1..75: mol_type = other DNA
atgagcgcatcggcactggtttgcctcgcccctggtagtgaagagactgaagccgtcaccactatcgacctcctg

SEQ ID NO: 668303 - DNA, 75 bp, synthetic construct
  source 1..75: mol_type = other DNA
ctcgcgattacttaacccactggttaagtcagtgggtccgcgactatgggattgatggttttcgggtcgataccg

SEQ ID NO: 668304 - DNA, 75 bp, synthetic construct
  source 1..75: mol_type = other DNA
atgaaactcgccgcctgttttctgacactccttcctggcttcgccgttgccgccagctggacttctccgggattc

SEQ ID NO: 668305 - DNA, 75 bp, synthetic construct
  source 1..75: mol_type = other DNA
aaaactaatggaatgaagttaaccgttgccctgcgcgaaactacagcagggacaggaaatatcggtaatttccgt

SEQ ID NO: 668306 - DNA, 75 bp, synthetic construct
  source 1..75: mol_type = other DNA
gcacacgctcggatatgaactggcaggatgttagcggtaaatctgccgccagcgttgcgcactggcaacgcctcg

SEQ ID NO: 668307 - DNA, 75 bp, synthetic construct
  source 1..75: mol_type = other DNA
cctgttccgcgaaggaggcgacaaagcagcagagttattgctattagcgccaggtgcggtgcaaatcttttatgg

SEQ ID NO: 668308 - DNA, 75 bp, synthetic construct
  source 1..75: mol_type = other DNA
gaacatttgtcagccacgcgcagttgcccaaaggtacgcgtccactaacgctaaattttgaccaacagtgctggc

SEQ ID NO: 668309 - DNA, 75 bp, synthetic construct
  source 1..75: mol_type = other DNA
agcaggttgacaaaggtgttgcggctgccatgcaattatcccgctatctgggacttcgtaatgaggaggcagtgc

SEQ ID NO: 668310 - DNA, 75 bp, synthetic construct
  source 1..75: mol_type = other DNA
taaaggttcagtcccgcacaaattccgcaaatgggtaacagctgaagttttgccatccattcgtaaaacggggtc

SEQ ID NO: 668311 - DNA, 75 bp, synthetic construct
  source 1..75: mol_type = other DNA
cacacacgagatgttgatattaatgagccagacggaccaacgaatctttccgcatggatgagacttaagaataaa

SEQ ID NO: 668312 - DNA, 75 bp, synthetic construct
  source 1..75: mol_type = other DNA
atgaaaagtatagcaacagcagtatctactatcaacgtgccattccacggcgaagagctttatgtcgtcaatcac

SEQ ID NO: 668313 - DNA, 75 bp, synthetic construct
  source 1..75: mol_type = other DNA
tgatatggcggatggtctttacccggttctttcctggctgacctggccgatgtctgtgggtaaatggacgcttga

SEQ ID NO: 668314 - DNA, 75 bp, synthetic construct
  source 1..75: mol_type = other DNA
tgcagggatggcgaacccgaaactgcaacggactgaacctcaccgcttcggtagtacgcttggtcattatggcgt

SEQ ID NO: 668315 - DNA, 75 bp, synthetic construct
  source 1..75: mol_type = other DNA
gatattaatgagccagacggaccaacgaatctttccgcatggatgagacttaagaataaagaattgcctccttca

SEQ ID NO: 668316 - DNA, 75 bp, synthetic construct
  source 1..75: mol_type = other DNA
agaatctttatgttcaattacaaagccaagaacaagcccaacaaatagcacaaagccaagcattccagcaggctt

SEQ ID NO: 668317 - DNA, 75 bp, synthetic construct
  source 1..75: mol_type = other DNA
ggggacgggaaagaatgacaacggttgttgaccgggataacgttcttgatgctgttaattatgcactcaaatatg

SEQ ID NO: 668318 - DNA, 75 bp, synthetic construct
  source 1..75: mol_type = other DNA
taaactgtcacgttacctcggtctgagaaatgaagaagctatccagtcggccaaatcattacgaacctggaaaaa

SEQ ID NO: 668319 - DNA, 75 bp, synthetic construct
  source 1..75: mol_type = other DNA
agtccgccctgaaatccgcgacaatgtaatccagtatcaggaagagtgtgacgatgtgctctacgagtactggac

SEQ ID NO: 668320 - DNA, 75 bp, synthetic construct
  source 1..75: mol_type = other DNA
ttgtgaaaatcacaatgcagcttcctggtgatgaacagtgccgtgagattatttgtttggcacttcgcaaacttg

SEQ ID NO: 668321 - DNA, 75 bp, synthetic construct
  source 1..75: mol_type = other DNA
cgctaaaacaaattcaatcgaactattccggcagatgctacgactacggtcatgagttctcgtatgttatcggaa

SEQ ID NO: 668322 - DNA, 75 bp, synthetic construct
  source 1..75: mol_type = other DNA
gttggttcacgacggatatcccaggacatcagcacccgtgatgagggcggagacgggaaagtggtggttatcggg

SEQ ID NO: 668323 - DNA, 75 bp, synthetic construct
  source 1..75: mol_type = other DNA
aatgaagatgctgtcggtgatgccgttcgtgaagctatttcggaaggattctgtactcgtgaggagttatttatt

SEQ ID NO: 668324 - DNA, 75 bp, synthetic construct
  source 1..75: mol_type = other DNA
acaggtgtatgggtgttctccctggggctctggtttcatatcgttgcccgtctggtttacagaaaaccctggatg

SEQ ID NO: 668325 - DNA, 75 bp, synthetic construct
  source 1..75: mol_type = other DNA
gatccggaggaaatggaaggcgctgaacatccacacaaggagaacactggcggcaatcagcatcacgatagcgat

SEQ ID NO: 668326 - DNA, 75 bp, synthetic construct
  source 1..75: mol_type = other DNA
ttatttcagtgcgtggcgtgcactcgaagatgcctatgaagagggcaaattaaaagcaattggggtttccaattt

SEQ ID NO: 668327 - DNA, 75 bp, synthetic construct
  source 1..75: mol_type = other DNA
tgttgaatcaggatacggcagcagcaggtattgaagcatcattaaaaaaatcgggactagaatacttcgacctct

SEQ ID NO: 668328 - DNA, 75 bp, synthetic construct
  source 1..75: mol_type = other DNA
ttcgtgaagctatttcggaaggattctgtactcgtgaggagttatttattacttcaaaactgtgggtgcaggata

SEQ ID NO: 668329 - DNA, 75 bp, synthetic construct
  source 1..75: mol_type = other DNA
ttgcaatatgatacatggcacactgagagaaaatttaatatctggtatttttatgataaaactcgagggccacga

SEQ ID NO: 668330 - DNA, 75 bp, synthetic construct
  source 1..75: mol_type = other DNA
agaaagcatggtttttttgaagaaataaaatggcaaaaagcccattcaaaaagatactctgaattttatcttgag

SEQ ID NO: 668331 - DNA, 75 bp, synthetic construct
  source 1..75: mol_type = other DNA
tggcgctcgatttgttcggctcgccgggctggagcgccgataaagaaatacagcgactgcatgcgctcagtaatc

SEQ ID NO: 668332 - DNA, 75 bp, synthetic construct
  source 1..75: mol_type = other DNA
atgaaggctttcaataagctgttttcccttgttgttgcatctgttctggttttctctcttgctggctgcggtgac

SEQ ID NO: 668333 - DNA, 75 bp, synthetic construct
  source 1..75: mol_type = other DNA
tcttattaacctgcgcgctgttctccgggcaactaatggcaggacacaaaggacatgagtttttatgggtgaaaa

SEQ ID NO: 668334 - DNA, 75 bp, synthetic construct
  source 1..75: mol_type = other DNA
gcgatgtgctggtggtctggaagctcgatcgcctcggacgatcgcttgcccatctggtcaacacggtgaaggagc

SEQ ID NO: 668335 - DNA, 75 bp, synthetic construct
  source 1..75: mol_type = other DNA
tcgggacttgaatattttgacctctatttattgcaccaggcgatgcgcgattatttcagtgcgtggcgagccctg

SEQ ID NO: 668336 - DNA, 75 bp, synthetic construct
  source 1..75: mol_type = other DNA
atgctggaaaaatctctggcaacacttttcgcgttgttaattttagcaacgctgataaaccattttctgctatgg

SEQ ID NO: 668337 - DNA, 75 bp, synthetic construct
  source 1..75: mol_type = other DNA
tggtggggggcgtaatcaccaccatgatagcgtcgatgataattggacccttattgacccccttaaacgcctggc

SEQ ID NO: 668338 - DNA, 75 bp, synthetic construct
  source 1..75: mol_type = other DNA
tgtacgcttatatccgtacattttccgcgttggttatattgggttattcctcttaactatttgcttatcggtttt

SEQ ID NO: 668339 - DNA, 75 bp, synthetic construct
  source 1..75: mol_type = other DNA
ttggagtcattaccagaagatgctgccagggcacttgagccgttaagcgccaaatacaaaaacatcgcgggtgtt

SEQ ID NO: 668340 - DNA, 75 bp, synthetic construct
  source 1..75: mol_type = other DNA
tggttggaggagtaatcaccaccatgattgcgtcactgattatagactggccccctgaatctccagacaaccaat

SEQ ID NO: 668341 - DNA, 75 bp, synthetic construct
  source 1..75: mol_type = other DNA
tcaaagcgatgcaggtcgtctggcagtgttacgatattgcaaagatgattggttgcccgtacatgattgaaaacc

SEQ ID NO: 668342 - DNA, 75 bp, synthetic construct
  source 1..75: mol_type = other DNA
atgtgcaaatataaattctctttaccccgacttgatattacggggatgtgggtattttccctgggtgtctggttc

SEQ ID NO: 668343 - DNA, 75 bp, synthetic construct
  source 1..75: mol_type = other DNA
cgaggcgtagttgttataccgaaatcgactcatcaacaccgtattgaggaaaatttcgccatctgggatttttcc

SEQ ID NO: 668344 - DNA, 75 bp, synthetic construct
  source 1..75: mol_type = other DNA
agtatttatggggaaaatcctgcggcagaagaaaagtggtccccaaagtcagcccgggaaaaacgctggaaggtc

SEQ ID NO: 668345 - DNA, 75 bp, synthetic construct
  source 1..75: mol_type = other DNA
agtttagactgcatgcgcatctttttttggtgaccgggctggtcggtgacggtccggtccgtatttctgcagacg

SEQ ID NO: 668346 - DNA, 75 bp, synthetic construct
  source 1..75: mol_type = other DNA
atgccaactccgcgaatcgacgagtcgttaggtgatccagacaaccgaatacacaaggcaccgccaggacctgaa

SEQ ID NO: 668347 - DNA, 75 bp, synthetic construct
  source 1..75: mol_type = other DNA
tgaagagcaactggcaaacatcgcgcgcggtggttatgtgctgaaagactgcgccggtcagccggaactgatttt

SEQ ID NO: 668348 - DNA, 75 bp, synthetic construct
  source 1..75: mol_type = other DNA
aatatggtcagcctgctgtatccgctggccgtcagtaacctggtaatagccgccatgaatctggccgctgaaatc

SEQ ID NO: 668349 - DNA, 75 bp, synthetic construct
  source 1..75: mol_type = other DNA
ttgaagttcaggaaaatgatccggaggaaatggaaggcgctgaacatccacacaaggagaacactggcggcaatc

SEQ ID NO: 668350 - DNA, 75 bp, synthetic construct
  source 1..75: mol_type = other DNA
aagtccgtacagggcttggtcagaattttgaccctgttgaaaacaacacacaagttaatccaggcgctactggct

SEQ ID NO: 668351 - DNA, 75 bp, synthetic construct
  source 1..75: mol_type = other DNA
cggagtttatggttgagtggtttgggctgaccaacaccaactggctgtatggttttaccgggatctggctggcgc

SEQ ID NO: 668352 - DNA, 75 bp, synthetic construct
  source 1..75: mol_type = other DNA
cacattttactgccgctgctgcgtccggccattctctcggccctgatctacagctttgtgcgggccatcacgacg

SEQ ID NO: 668353 - DNA, 75 bp, synthetic construct
  source 1..75: mol_type = other DNA
gttgagactgaatccgatccgatgaacgtcacttttgacaagctggcccctgaagtacagaacgctgtcatggtt

SEQ ID NO: 668354 - DNA, 75 bp, synthetic construct
  source 1..75: mol_type = other DNA
tatttcggagccgtgctgcacattccgcccgtctggccggttcagccgctgggcatcatcacagactggcgaaac

SEQ ID NO: 668355 - DNA, 75 bp, synthetic construct
  source 1..75: mol_type = other DNA
ttataaccgtcatgcgacatgcagcggtgaagccactgctaagtttgtccgctctccggagaacggtcaccttac

SEQ ID NO: 668356 - DNA, 75 bp, synthetic construct
  source 1..75: mol_type = other DNA
tggtttctggttttttattgagtgcctccgccagtgctacagcggttaaattaccccggacagtaattgatgtga

SEQ ID NO: 668357 - DNA, 75 bp, synthetic construct
  source 1..75: mol_type = other DNA
ttttatgatcctcgatggggccattaaaaccattcatccctcgctggaagaagcctcctacaccctacgcgccag

SEQ ID NO: 668358 - DNA, 75 bp, synthetic construct
  source 1..75: mol_type = other DNA
tggtgcgtcaacaattcaaaggcaaaaagaccatcgagttcaccaccatgctgtgctttgccgtaccgggtacgg

SEQ ID NO: 668359 - DNA, 75 bp, synthetic construct
  source 1..75: mol_type = other DNA
tggcaaccccttcccctgctgccgctcatttccccttcagcctcctatcatgattcgtctcctgcattatccgtg

SEQ ID NO: 668360 - DNA, 75 bp, synthetic construct
  source 1..75: mol_type = other DNA
gaacgacagggtatcccctgcccgtggcgctactgcaacgatcgcgatgtacgcacaatcgttgagctggggaaa

SEQ ID NO: 668361 - DNA, 75 bp, synthetic construct
  source 1..75: mol_type = other DNA
aggcggggttcagccacgttctggtgattgaggaagcccacagtctgcccattccgacactgaaacacctcaaac

SEQ ID NO: 668362 - DNA, 75 bp, synthetic construct
  source 1..75: mol_type = other DNA
tatcaaccgcgagaatgcgccggtcattgttatcgagccatacatcatcgctatggaagacaacgatgtgaaagg

SEQ ID NO: 668363 - DNA, 75 bp, synthetic construct
  source 1..75: mol_type = other DNA
gtgaggcgctgtaccagacagcccgtcatggggggtttatggccgtcatcggtgagtccggtgcgggtaaatcca

SEQ ID NO: 668364 - DNA, 75 bp, synthetic construct
  source 1..75: mol_type = other DNA
gaaaggcgaaatgccgtctgacttcgacgcgaaagcaaaagagttcattgctaaactgcaggctaacccggcgaa

SEQ ID NO: 668365 - DNA, 75 bp, synthetic construct
  source 1..75: mol_type = other DNA
caaaaaattttgcaactacgtccgaccagtacgcacacgatggcgggggataccataaaactgttctctacatga

SEQ ID NO: 668366 - DNA, 75 bp, synthetic construct
  source 1..75: mol_type = other DNA
atgcagggttctgatgatgtgttcaccactccggacattcgctacgtgcgtgaggcgctgtaccagacagcccgt

SEQ ID NO: 668367 - DNA, 75 bp, synthetic construct
  source 1..75: mol_type = other DNA
ctcattgccaccggcgtctgctttctgccgattgttctctactccggcgcgttggcgctcaacagcctgtttcat

SEQ ID NO: 668368 - DNA, 75 bp, synthetic construct
  source 1..75: mol_type = other DNA
ctcattgccaccggtgtctgctttctgccgattgttctctactccggcgcgttggcgctcaacagcctgtttcac

SEQ ID NO: 668369 - DNA, 75 bp, synthetic construct
  source 1..75: mol_type = other DNA
ggcctacaaaagcggcatgtcggtgatgggctgggaagtcacttctgcggtgacgctgatcttcctcgcgctaat

SEQ ID NO: 668370 - DNA, 75 bp, synthetic construct
  source 1..75: mol_type = other DNA
accaccccggacattcgctacgtgcgtgaggcgctgtaccagacagcccgtcatggtgggtttatggccgtcatc

SEQ ID NO: 668371 - DNA, 75 bp, synthetic construct
  source 1..75: mol_type = other DNA
gtgaagctctttaccagacagcccgccacggtggttttatggcggttatcggtgagtccggtgcggggaaatcca

SEQ ID NO: 668372 - DNA, 75 bp, synthetic construct
  source 1..75: mol_type = other DNA
tgtacagggcgcggccactccccgtacagcgggtaccacagataaaacgagcctcagtgaggaagagaatatgtt

SEQ ID NO: 668373 - DNA, 75 bp, synthetic construct
  source 1..75: mol_type = other DNA
tttttctataaaacccgttttgttactgtaaccaatggtggtacggccaatattgatgttggcgcagattttatt

SEQ ID NO: 668374 - DNA, 75 bp, synthetic construct
  source 1..75: mol_type = other DNA
ttaataactcgggaaatctcgttctcaaggggggagataatgctaaccgtacaacgggtataaaagcatctggta

SEQ ID NO: 668375 - DNA, 75 bp, synthetic construct
  source 1..75: mol_type = other DNA
tccgggatgaaaaactccgggattatcaatgttaatggtctgaacagcaccgggctacaggtaatcaatgcagga

SEQ ID NO: 668376 - DNA, 75 bp, synthetic construct
  source 1..75: mol_type = other DNA
ttatttgttgaaggcgcacagtctcagattaccagcacgggaggggatatcgtcgctgtggacggtgaggctgcc

SEQ ID NO: 668377 - DNA, 75 bp, synthetic construct
  source 1..75: mol_type = other DNA
ttaacgggcaaaggcacgctgtccgctcagcttgatgccgacacctctgcttttgaattcagccataacgtcggg

SEQ ID NO: 668378 - DNA, 75 bp, synthetic construct
  source 1..75: mol_type = other DNA
gccgtgttgatatatccggcgaaattagccttactggtgacggtgcagtgggggtttttgccaaagatggcggag

SEQ ID NO: 668379 - DNA, 75 bp, synthetic construct
  source 1..75: mol_type = other DNA
acgcaccaacggcgaagcgttactaatagtgtttccagaatatgataatggagacgataatgacgataaaaatac

SEQ ID NO: 668380 - DNA, 75 bp, synthetic construct
  source 1..75: mol_type = other DNA
agttattagtgaatgggaaagtcctggaaagggttgcgacacatatcgtaactggcgctcatgggtatgaaacgc

SEQ ID NO: 668381 - DNA, 75 bp, synthetic construct
  source 1..75: mol_type = other DNA
cggaagtggtcaacgggcatacggaagttatctgctcaaccagtatccaccacattctggctgtacgaaaaagta

SEQ ID NO: 668382 - DNA, 75 bp, synthetic construct
  source 1..75: mol_type = other DNA
attggtactgaaatgattgcctatcaagacagtaccattgttaacgatggtacactttatgtttgggataataat

SEQ ID NO: 668383 - DNA, 75 bp, synthetic construct
  source 1..75: mol_type = other DNA
taggaattgctttatcagcaatggttctggggggcgctattgcaattaattgcaataacgcaatggcagatgtca

SEQ ID NO: 668384 - DNA, 75 bp, synthetic construct
  source 1..75: mol_type = other DNA
gggggcgagcctgaaagctcaagtggataatgtgctggaactggaaagtggcaatgcttacattctgaacggtga

SEQ ID NO: 668385 - DNA, 75 bp, synthetic construct
  source 1..75: mol_type = other DNA
agcgtctcaggcggctgacggcaatgttgatatcaacaacaactattcgcaaatccaactaggcggcgacattct

SEQ ID NO: 668386 - DNA, 75 bp, synthetic construct
  source 1..75: mol_type = other DNA
atgatgaaaatgcaatcgcgtaaaatctggtactaccgtgccaccatcatcatcctgttgttcgctgtgctgctg

SEQ ID NO: 668387 - DNA, 75 bp, synthetic construct
  source 1..75: mol_type = other DNA
ccgctgcctgcatttttgatcacctttgccaatgcctcgctgtttggcgcgttctggggtggcttgctgtcgtgg

SEQ ID NO: 668388 - DNA, 75 bp, synthetic construct
  source 1..75: mol_type = other DNA
attctttttgatgattttacaggccatcgccgcgccgctaccggcattcttaattacctttgccaatgcctcgct

SEQ ID NO: 668389 - DNA, 75 bp, synthetic construct
  source 1..75: mol_type = other DNA
gcgtgggataacgacaggcagagtctgaaagtcggcgtgatggccagttacatcaacgcagacaccgacagcgag

SEQ ID NO: 668390 - DNA, 75 bp, synthetic construct
  source 1..75: mol_type = other DNA
atgtgtgaggacattccgtgcgccaaagtgtgcccgagcggtgcgctggatcgtgagattgaatcgatcgacgac

SEQ ID NO: 668391 - DNA, 75 bp, synthetic construct
  source 1..75: mol_type = other DNA
acagtacgcggcatccgaaacatgatatgcagcatctgctcaaagaagtggacaaaatgttgcaactgaacgtcg

SEQ ID NO: 668392 - DNA, 75 bp, synthetic construct
  source 1..75: mol_type = other DNA
cattgatccgcatggcaacctcgcaatgcgggaagaatttgcccagcgctggctgacccgtgcgggagaaaaaac

SEQ ID NO: 668393 - DNA, 75 bp, synthetic construct
  source 1..75: mol_type = other DNA
gcccggcgttgggctttgccgattgcagcgtggtgccacagccgacggcggcgcagctggcggatatcgcgcttg

SEQ ID NO: 668394 - DNA, 75 bp, synthetic construct
  source 1..75: mol_type = other DNA
caccggagaagaaccgcgcgtggcgatgctgtcgttttccagcaacggtagtgcccgtcacccctgcgttgccaa

SEQ ID NO: 668395 - DNA, 75 bp, synthetic construct
  source 1..75: mol_type = other DNA
ttcctgggcgggcagcatgttaacgggcggcacattctggtttgtcaccggactgtttattctgtttgccctgac

SEQ ID NO: 668396 - DNA, 75 bp, synthetic construct
  source 1..75: mol_type = other DNA
gccccgcgttgggctttgccgattgtagtgtggtgccacagccgacggcagcgcaactggcggatatcgcccttg

SEQ ID NO: 668397 - DNA, 75 bp, synthetic construct
  source 1..75: mol_type = other DNA
tggcgttgcgagctcccgctcgagtggtgtttccagacgcattagatcagcgagtgctaaaagccgcgcaatatt

SEQ ID NO: 668398 - DNA, 75 bp, synthetic construct
  source 1..75: mol_type = other DNA
ccggcgactggctgaaatatcagcaatgacagaaagtattggcggtaaaactgctctggactgggccatgaaaca

SEQ ID NO: 668399 - DNA, 75 bp, synthetic construct
  source 1..75: mol_type = other DNA
ataacgcaccctatctggcagccctgacacgtccactggtcatgcctgccccggaaaaggttccggatgtcagcg

SEQ ID NO: 668400 - DNA, 75 bp, synthetic construct
  source 1..75: mol_type = other DNA
gaggccagcgtcagcacgttcaaggacatttccacgacagaaggcgaggatcgcttattcatgctctttaacccg

SEQ ID NO: 668401 - DNA, 75 bp, synthetic construct
  source 1..75: mol_type = other DNA
ccgcattccggtctgctgttgttgttgagcccagcggtcgcaggacactacgaaccgttgattttgtgcgggaac

SEQ ID NO: 668402 - DNA, 75 bp, synthetic construct
  source 1..75: mol_type = other DNA
ggctagagtctcagggagcctttaatcatccctactggatgtgcaagtgttcctggtcatacggtaataacaaaa

SEQ ID NO: 668403 - DNA, 75 bp, synthetic construct
  source 1..75: mol_type = other DNA
gcaacctaccaggagacattcaacgaagaaagccaggatgaagcccgggaaaaagatccagaggaaatagaaaat

SEQ ID NO: 668404 - DNA, 75 bp, synthetic construct
  source 1..75: mol_type = other DNA
agtgtagctagcggtactgacagcctcgcatttggcagacaatcacttgccagcgcagcgaaacgctattgcgat

SEQ ID NO: 668405 - DNA, 75 bp, synthetic construct
  source 1..75: mol_type = other DNA
aacgcctgtaaaaacaaccaaactcttggtgtgcaacgtcaggggggggatggcgcaacaactgacgatgcctgc

SEQ ID NO: 668406 - DNA, 75 bp, synthetic construct
  source 1..75: mol_type = other DNA
aaaaaatgcgataaaagtaggaatggcgggaagcgaagacactgacaaagagattttgcgcgttattgagaagta

SEQ ID NO: 668407 - DNA, 75 bp, synthetic construct
  source 1..75: mol_type = other DNA
tcggattattggccgaagcacaataaaccgctttggtgaaaggctcaaagtggccatgaaagggatgagtaatgc

SEQ ID NO: 668408 - DNA, 75 bp, synthetic construct
  source 1..75: mol_type = other DNA
catggaagaggctaatcaatggatagccagatacaccacctgcttcaaagacatcactcccgatcacggggagaa

SEQ ID NO: 668409 - DNA, 75 bp, synthetic construct
  source 1..75: mol_type = other DNA
gagcactatgtgacgacattccgggatgtctcaacgcaggaaggagatgaaagaacgttccagttatacaacccg

SEQ ID NO: 668410 - DNA, 75 bp, synthetic construct
  source 1..75: mol_type = other DNA
atgttattgtgccaggaggggcagggtaaggtgctgtatcgatatgcttcggcaattgcgtgtgccgcagatgga

SEQ ID NO: 668411 - DNA, 75 bp, synthetic construct
  source 1..75: mol_type = other DNA
gccaccacggcgcgaaaagggcttgtccagctcagtagcgccaccaacagcgattcagaaacgctggccgcaaca

SEQ ID NO: 668412 - DNA, 75 bp, synthetic construct
  source 1..75: mol_type = other DNA
agtaaaccagcctactcgatcaaccgtcgctgtgggtggttcagaaacccgtccgcgcaacattgcattcaacta

SEQ ID NO: 668413 - DNA, 75 bp, synthetic construct
  source 1..75: mol_type = other DNA
ggttgcttctgacaatgcagcgaatattggcactgaaacccgcccgcgcaacattgcatttaactacatcgtgag

SEQ ID NO: 668414 - DNA, 75 bp, synthetic construct
  source 1..75: mol_type = other DNA
cgttgccgaagggtccggacgcgcacaaacatttcgcaccattctgaccgtatccagcactgccaccgtggcgct

SEQ ID NO: 668415 - DNA, 75 bp, synthetic construct
  source 1..75: mol_type = other DNA
cggaagtggtcaacgggcatacggacgttatctgctcaaccagcatccgccgcattctggctgtacgaaagagtt

SEQ ID NO: 668416 - DNA, 75 bp, synthetic construct
  source 1..75: mol_type = other DNA
taatatgaatgcggggagttgccctgctgtacagttccgcgtgaattataaaaacggcggtatcttttatcgttc

SEQ ID NO: 668417 - DNA, 75 bp, synthetic construct
  source 1..75: mol_type = other DNA
ccatccgtgtaacaacaccaagcacttccaccggaggcggcaccactaacgctcaattcacttatattaatcatg

SEQ ID NO: 668418 - DNA, 75 bp, synthetic construct
  source 1..75: mol_type = other DNA
ctggcgacgagactacaacacgaaaaatcaacaacctgcatttgctttagggcaaacaggaagcactgtcggaaa

SEQ ID NO: 668419 - DNA, 75 bp, synthetic construct
  source 1..75: mol_type = other DNA
ccagaacggcgcagatattccggggaaagataccttcaccaaaaatattggggcctgccgcgcatatagctcatg

SEQ ID NO: 668420 - DNA, 75 bp, synthetic construct
  source 1..75: mol_type = other DNA
caccacaacggtgatggcaacgcaggattacgttgatgacaaaattgcagagcatgaacagtcacgacgtcaccc

SEQ ID NO: 668421 - DNA, 75 bp, synthetic construct
  source 1..75: mol_type = other DNA
tgaagttgatggtgatgacccagcagtattcagaccaatacaaaaatacatcaatggcacatggtataacgttgc

SEQ ID NO: 668422 - DNA, 75 bp, synthetic construct
  source 1..75: mol_type = other DNA
gtgataatgacacgggatttaaacaaaatggcgacgggtatctggatgtttatgctaataacgtccatgttatgc

SEQ ID NO: 668423 - DNA, 75 bp, synthetic construct
  source 1..75: mol_type = other DNA
gtaaatcaggcttctggcgcattacagaaaaaacagaacggcgcagatattcccgataaaaaactattcctgcgt

SEQ ID NO: 668424 - DNA, 75 bp, synthetic construct
  source 1..75: mol_type = other DNA
cgccgctgaagaacgtgatgtcgtattactgacaggtgacaaacctggctccgaacctgaaacccaggcgctgtg

SEQ ID NO: 668425 - DNA, 75 bp, synthetic construct
  source 1..75: mol_type = other DNA
ttaccagcagcaggtgctgtttgtgctgaaccaggccgacaaaatcgaaccctgtcacgaatgggatacccgcac

SEQ ID NO: 668426 - DNA, 75 bp, synthetic construct
  source 1..75: mol_type = other DNA
agttctggcatggggtgatgcaaccttaccagcaccaggtgctgtttgtgctgaaccaggccgacaaaatcgaac

SEQ ID NO: 668427 - DNA, 75 bp, synthetic construct
  source 1..75: mol_type = other DNA
acctgaaaatgcatctacgcaacaatatcccacagaatacgtgcaggcattgcgtaataatcaacttgctgccgc

SEQ ID NO: 668428 - DNA, 75 bp, synthetic construct
  source 1..75: mol_type = other DNA
atgatacctggttacaggggcattcgtttctctcaaccgtagcaaaatatagtaatgatcttcctcaggctgaaa

SEQ ID NO: 668429 - DNA, 75 bp, synthetic construct
  source 1..75: mol_type = other DNA
aacggggcgcttttccgccaggaaccgaacattacggacgttcattattaggtgcgccgttgatctggtttccgg

SEQ ID NO: 668430 - DNA, 75 bp, synthetic construct
  source 1..75: mol_type = other DNA
gcctgagcgagccaccagcccactgacgacacagttgcatggcaggctctgcacagagccagtaaaaaagcaggc

SEQ ID NO: 668431 - DNA, 75 bp, synthetic construct
  source 1..75: mol_type = other DNA
aagggctgtgattcgaaccgtgcgggaagccgtggtgaccgttgcccgtgccgtctgggactggattttcttctg

SEQ ID NO: 668432 - DNA, 75 bp, synthetic construct
  source 1..75: mol_type = other DNA
catcgtcgttcctgcccgcgccgctgaaaacggcgattcgtactgtacgggatgcggtggtgtcggttgcccgtg

SEQ ID NO: 668433 - DNA, 75 bp, synthetic construct
  source 1..75: mol_type = other DNA
tgtccgtacggccctgcgcgctgttcgtgacacggtggtctctgttgcccgtgcggtatggaactggattttctt

SEQ ID NO: 668434 - DNA, 75 bp, synthetic construct
  source 1..75: mol_type = other DNA
acggtcacagcatggttatcactgacctgcccggggtgggcgagagccgggacagggatgctgagtatgaagccc

SEQ ID NO: 668435 - DNA, 75 bp, synthetic construct
  source 1..75: mol_type = other DNA
catcatcttttctgcccgcgcctgtaagggccgtggttcgaaccgtgcgggaagccgtggtgaccgttgcccgtg

SEQ ID NO: 668436 - DNA, 75 bp, synthetic construct
  source 1..75: mol_type = other DNA
atgtcgtcacccaactcggctacgggcaacgcattagctggaatgacgtgattgatgctggtgagtataattatg

SEQ ID NO: 668437 - DNA, 75 bp, synthetic construct
  source 1..75: mol_type = other DNA
ctggtattgcgagagcgaaagctgccggaaagcggtttggccgtccttcaacactgaatgaagaacagaaacttt

SEQ ID NO: 668438 - DNA, 75 bp, synthetic construct
  source 1..75: mol_type = other DNA
acacagtttatcgatgagatatcctcagaaatcactggtcatcaatttttaatacctaacgtaaggtctgcaaaa

SEQ ID NO: 668439 - DNA, 75 bp, synthetic construct
  source 1..75: mol_type = other DNA
cgttccacgtgaagtgcccatgggtgaaacgttaagcaggtatttaagagaatttactgcagtaattaagtctgt

SEQ ID NO: 668440 - DNA, 75 bp, synthetic construct
  source 1..75: mol_type = other DNA
gcaggcgttcagcgggcaagcggcaaaccgacgctggcgattgtgggcgatctctccgcactttacgatctcaac

SEQ ID NO: 668441 - DNA, 75 bp, synthetic construct
  source 1..75: mol_type = other DNA
gtggcaggacgacaaaccgtggctgcgtgaagcgcctcgtctggaaagtgaaaaacagcgcgactggttcttctg

SEQ ID NO: 668442 - DNA, 75 bp, synthetic construct
  source 1..75: mol_type = other DNA
aaagcggaacaaaacagcccaaatgcgttacaagacgagccagaaacgaaacaatccgaaccagtagcgcaacag

SEQ ID NO: 668443 - DNA, 75 bp, synthetic construct
  source 1..75: mol_type = other DNA
gataacccagtgcactatgcggatgccattcgttataatgctcgaacgcctctgcaaggttctttgctgccgtta

SEQ ID NO: 668444 - DNA, 75 bp, synthetic construct
  source 1..75: mol_type = other DNA
aaaaatcagcactcagtaataaccaaattgctgactggttacagattgccttatgggccgggcaagataaacagg

SEQ ID NO: 668445 - DNA, 75 bp, synthetic construct
  source 1..75: mol_type = other DNA
tacgcgcagtgaaagtgaacgttatgccattgccgatcgcgccctcgcccaatacgctgcattagaaattctgtg

SEQ ID NO: 668446 - DNA, 75 bp, synthetic construct
  source 1..75: mol_type = other DNA
gagttgtgcttaattaaggcttatataaatgagctggatggcaccagtcaagatatagccctagttgcgctttct

SEQ ID NO: 668447 - DNA, 75 bp, synthetic construct
  source 1..75: mol_type = other DNA
atggtgtaagttttctcttcaacatggcctccatgttaagtattgatattcccgttgcaaaagcactggaaaggc

SEQ ID NO: 668448 - DNA, 75 bp, synthetic construct
  source 1..75: mol_type = other DNA
aggcggacctttgtgagaaactccacgatgatgcggagcatcttttccgtacactgtcctcgagattggatgcat

SEQ ID NO: 668449 - DNA, 75 bp, synthetic construct
  source 1..75: mol_type = other DNA
cgctgttatgaaaaaatgctcgccgccagtgaaaacaacaaagaaatttcgctgatcgaacacgcgcagctggat

SEQ ID NO: 668450 - DNA, 75 bp, synthetic construct
  source 1..75: mol_type = other DNA
gggatccagactcgcgattctgtgaaccagaaccagcatgaatcggaacggaactaccaaaaagcggaacaaaac

SEQ ID NO: 668451 - DNA, 75 bp, synthetic construct
  source 1..75: mol_type = other DNA
cctttgaacaaccgctcgcgtcgcttccgcgcacgcttcgccagcttattcttgaacgtatccagaacctgaccc

SEQ ID NO: 668452 - DNA, 75 bp, synthetic construct
  source 1..75: mol_type = other DNA
ggcgcatgctgccggaactggacctggttctgtgggtcatcaaagctgatgaccgggcgttgtcggtggacgaac

SEQ ID NO: 668453 - DNA, 75 bp, synthetic construct
  source 1..75: mol_type = other DNA
caccgcaaacgcgttgccaacggtgagcgcagcgtgctggtgggtttacagtcatttgccgaagggcttgatttg

SEQ ID NO: 668454 - DNA, 75 bp, synthetic construct
  source 1..75: mol_type = other DNA
ggccagtagcccggtagcggtacagcttagtgctcctcttcgtaccgatgccgttaataaaaaagcccgtgacga

SEQ ID NO: 668455 - DNA, 75 bp, synthetic construct
  source 1..75: mol_type = other DNA
agtcgcaaaatctgcttgctgcatgagttgttccaaccagtaaatccgatctgtgcggtgtcggttcgtctgcaa

SEQ ID NO: 668456 - DNA, 75 bp, synthetic construct
  source 1..75: mol_type = other DNA
gtgtggatcactattgcaccgttcgtgacactaatgcagcattattatgacatcgttgataacctgaacctcaga

SEQ ID NO: 668457 - DNA, 75 bp, synthetic construct
  source 1..75: mol_type = other DNA
ttggtatctggtcaatcgcgcgcgacctgccgggcggcactaacctgtctccggaattccacggcctgactaaag

SEQ ID NO: 668458 - DNA, 75 bp, synthetic construct
  source 1..75: mol_type = other DNA
atgtatgaggagtgtgtgacatttttcatgagagtaaaacaggtgataacctcctttcgtaagggggattcacag

SEQ ID NO: 668459 - DNA, 75 bp, synthetic construct
  source 1..75: mol_type = other DNA
ctgaatcaggccgacaaaatcgaacctagccacgaatgggatactcgtaccggcacaccttcaccacagcaacgg

SEQ ID NO: 668460 - DNA, 75 bp, synthetic construct
  source 1..75: mol_type = other DNA
ggcgtatattgccggaactggacctggtgctgtgggtcatcaaggctgatgaccgggcgctgtctgtggatgaac

SEQ ID NO: 668461 - DNA, 75 bp, synthetic construct
  source 1..75: mol_type = other DNA
gaccgggcgctgtcggtggacgagcagttctggcgcggtgtgatgcagccttaccagcagcaggtgctgttcgtg

SEQ ID NO: 668462 - DNA, 75 bp, synthetic construct
  source 1..75: mol_type = other DNA
catcacctgccggatgtggcgcgggatgcgctggagatgagcgccgaaatcactgcgccctggtaccggctccaa

SEQ ID NO: 668463 - DNA, 75 bp, synthetic construct
  source 1..75: mol_type = other DNA
aaaggtgatcttctcacccaggtgcatatccacaaaatcgcttttccgcctatcgacagcccggtggtgatcacc

SEQ ID NO: 668464 - DNA, 75 bp, synthetic construct
  source 1..75: mol_type = other DNA
ccaacgtggcgttgcaggatcaggtctacagcaaagatttgccgctgctgaaaaagatcattcccgatcttaaat

SEQ ID NO: 668465 - DNA, 75 bp, synthetic construct
  source 1..75: mol_type = other DNA
ggaaaacgctctcctatttgatccccggcatcgccattgcccgcgaagagcaaaaaacgctggtggtgagtaccg

SEQ ID NO: 668466 - DNA, 75 bp, synthetic construct
  source 1..75: mol_type = other DNA
atcgaccacagcaaaaaaagcagatcgatcgccagcatgcgcggatctacaacgcggtgttgcagcggctgccgc

SEQ ID NO: 668467 - DNA, 75 bp, synthetic construct
  source 1..75: mol_type = other DNA
gataacccgctgttatgaaaaaatgctcgccgccagtgagaacaacaaagagatttcgctgatcgaacatgcgca

SEQ ID NO: 668468 - DNA, 75 bp, synthetic construct
  source 1..75: mol_type = other DNA
atgaaagatgagcgtcgccctatttgcgaagtggttgcggagagtatcgaacggttaattattgacggcgtgctg

SEQ ID NO: 668469 - DNA, 75 bp, synthetic construct
  source 1..75: mol_type = other DNA
ctctggtttcactgcgtgggtattcgtgtcagcgatcagctggaaaggctgctgtggcgcagtattccgcacatt

SEQ ID NO: 668470 - DNA, 75 bp, synthetic construct
  source 1..75: mol_type = other DNA
atggaaagcgaagccgtattgcctgacccgaaaaatttactgctggtgctggacgaaggtcatcacctgccggat

SEQ ID NO: 668471 - DNA, 75 bp, synthetic construct
  source 1..75: mol_type = other DNA
agtattccgcacattattgtcacttccgcgaccttgcgttcgctgaacagtttttcgcgtttgcaggagatgagc

SEQ ID NO: 668472 - DNA, 75 bp, synthetic construct
  source 1..75: mol_type = other DNA
ggcgatgcagcgctttctcgactatgtgacggatttacgcctgatgttgctggtgcagggcgatcagccgcgtta

SEQ ID NO: 668473 - DNA, 75 bp, synthetic construct
  source 1..75: mol_type = other DNA
gggcaaaattgttattccccggatgcgcgttgagccttccatcgacaacgaagagcagcatattgccgaaatggc

SEQ ID NO: 668474 - DNA, 75 bp, synthetic construct
  source 1..75: mol_type = other DNA
aacaggatctgctggcgtttcttgacgacgaactgacgccgaataatcaggaagagcaaaaacgttgtgcgaagc

SEQ ID NO: 668475 - DNA, 75 bp, synthetic construct
  source 1..75: mol_type = other DNA
aactttcggagcatttccagaggaagatcaagaacaaatgttaaaagatatgaaagacaaaaaagagtcaatgga

SEQ ID NO: 668476 - DNA, 75 bp, synthetic construct
  source 1..75: mol_type = other DNA
atgaacagggaccagccaggggtatttttctcttacttcagccggtgctgcatgctggtggtgccatctacaaag

SEQ ID NO: 668477 - DNA, 75 bp, synthetic construct
  source 1..75: mol_type = other DNA
tctctggctgccttctgccactcgcggcgctgttcaagtttttgttcgattgttttcatatggcaaaaaaaaggc

SEQ ID NO: 668478 - DNA, 75 bp, synthetic construct
  source 1..75: mol_type = other DNA
aatcggcgctcactatccgggctttgaaaccgatattcacggtgcataccgtcaggctgatggccgctataccgt

SEQ ID NO: 668479 - DNA, 75 bp, synthetic construct
  source 1..75: mol_type = other DNA
ctcaaaagcacaatgaactgccaacaaatccttgatcaaactttttccattgctaacagtgctggtgttgacgca

SEQ ID NO: 668480 - DNA, 75 bp, synthetic construct
  source 1..75: mol_type = other DNA
caccggcgacagtccttttgcagcgaatgcgttgggtaaactggcggcgcaggaaatgctggcagcttacgcgag

SEQ ID NO: 668481 - DNA, 75 bp, synthetic construct
  source 1..75: mol_type = other DNA
atgattcgtggggttagcgataaaaatatgccagtctgggttatgtgccctgaacctacacaagatgagttaatt

SEQ ID NO: 668482 - DNA, 75 bp, synthetic construct
  source 1..75: mol_type = other DNA
tttcggtcatcattatctggctcagccaacagtggtccttcacaaatcctctacactgttcgatattaagatggc

SEQ ID NO: 668483 - DNA, 75 bp, synthetic construct
  source 1..75: mol_type = other DNA
acgcttgatctggtgctgggtgagcacgatctggctgcgccagtggactatcgcgaacaggcggagtccatgttt

SEQ ID NO: 668484 - DNA, 75 bp, synthetic construct
  source 1..75: mol_type = other DNA
ttgatgaagtcaaaggatgatatcctatatactttatctgtaacatttgttggaggtaagattcctctagtttat

SEQ ID NO: 668485 - DNA, 75 bp, synthetic construct
  source 1..75: mol_type = other DNA
atttatgaaggaagcaccagaaggaaaatacagaggtgtcatcgacggaatgcctgcatggattgatattccacc

SEQ ID NO: 668486 - DNA, 75 bp, synthetic construct
  source 1..75: mol_type = other DNA
gcagccgaactgaaaaagcagcaattgattaatcaggtcaacgaatacataaacagtaagcaattgaaccgcccc

SEQ ID NO: 668487 - DNA, 75 bp, synthetic construct
  source 1..75: mol_type = other DNA
tatctgaactgggttctctgctggatcacagtggtccacacaaagaagcagaacagtatatcgctcgcgtcttta

SEQ ID NO: 668488 - DNA, 75 bp, synthetic construct
  source 1..75: mol_type = other DNA
aagcagaactaaagcaatcagaaaaaggagccaaatttattgagttttctggcgaatccgacgacggacgtaaaa

SEQ ID NO: 668489 - DNA, 75 bp, synthetic construct
  source 1..75: mol_type = other DNA
ctgctgccacaatccagcgacgtttcagtctcataagggaagtggaactatcaaaaaactggtatcaaattctac

SEQ ID NO: 668490 - DNA, 75 bp, synthetic construct
  source 1..75: mol_type = other DNA
ggcgaatccgacgacggacgtaaaatccagtatcttagcgtttgtgttcagaaaaatgacggaacggaaaacaag

SEQ ID NO: 668491 - DNA, 75 bp, synthetic construct
  source 1..75: mol_type = other DNA
gcctcgatctggtgacaaacagatactgggaaacagaggaactacatgaggcgggagtaattcgtgacctgatgg

SEQ ID NO: 668492 - DNA, 75 bp, synthetic construct
  source 1..75: mol_type = other DNA
ctgcgtgaagcgggagtaattcgtgacctgatggagagttccgttccccgccgctatcgtgcgggaaacgaaatc

SEQ ID NO: 668493 - DNA, 75 bp, synthetic construct
  source 1..75: mol_type = other DNA
tcattgccagccttgacctggtgacaaacagatactgggagacagaggaactgcgtgaggcgggagcaattcgtg

SEQ ID NO: 668494 - DNA, 75 bp, synthetic construct
  source 1..75: mol_type = other DNA
aatcacgagcaggaaaaacaattaagcaaaaaatagcatcagcacagatgcgtctgaatcgtctaaagagtaagg

SEQ ID NO: 668495 - DNA, 75 bp, synthetic construct
  source 1..75: mol_type = other DNA
ccattgcgctggaacaactggtcggtagagtatcggcaaatatgatcctgccttatccacctggcgtaccgctgc

SEQ ID NO: 668496 - DNA, 75 bp, synthetic construct
  source 1..75: mol_type = other DNA
cagcagacaagaaagcgatggatgaactggcttcctatgtccgcacggccatcatgatggaatgtttacccggtg

SEQ ID NO: 668497 - DNA, 75 bp, synthetic construct
  source 1..75: mol_type = other DNA
tgtatttgcgacatctcaatgccggatatttcggggctggagttgctaagtctgctaccaaaagggatggcgaca

SEQ ID NO: 668498 - DNA, 75 bp, synthetic construct
  source 1..75: mol_type = other DNA
tcgctcgccgcggtgtatggcgatattggaaaacaggccgaaagtctggtcgggaaagctggcgatctgctgtcg

SEQ ID NO: 668499 - DNA, 75 bp, synthetic construct
  source 1..75: mol_type = other DNA
ctgggcgctggcttacagtgcgattctggcgacggcgctggcctggagtttatggctgtttgttttgaaaaactt

SEQ ID NO: 668500 - DNA, 75 bp, synthetic construct
  source 1..75: mol_type = other DNA
ggaaatggaaggcactgaacatctgcacaaggagaacactgtcagcgatcggtatcacgccagcgataataaaac

SEQ ID NO: 668501 - DNA, 75 bp, synthetic construct
  source 1..75: mol_type = other DNA
gtgttaaatgatgaacaaatacagagggtactagagcaaattaagtcaggtataaatataagtgacattgcccaa

SEQ ID NO: 668502 - DNA, 75 bp, synthetic construct
  source 1..75: mol_type = other DNA
ggtggtacgtctgatcgatgcgctctcgcaacttccggcgggttacccggtgtatagcaaccgtggggccagcgg

SEQ ID NO: 668503 - DNA, 75 bp, synthetic construct
  source 1..75: mol_type = other DNA
atccggcagaaaaacgccagccctggtgcgttgaaatcccgcgcctggcggaacaggcaatgcaggcggttattg

SEQ ID NO: 668504 - DNA, 75 bp, synthetic construct
  source 1..75: mol_type = other DNA
gggtctcaactctggagcaaacaacagagaaccagcgcagagaaatcgaaactgccggttttgctgtcagacccc

SEQ ID NO: 668505 - DNA, 75 bp, synthetic construct
  source 1..75: mol_type = other DNA
ctgttgagcaactggctgcgtcagatattcgtgttcactgcctggcgctcggaggtgttgatttgaccagcgctg

SEQ ID NO: 668506 - DNA, 75 bp, synthetic construct
  source 1..75: mol_type = other DNA
attatgctctccgttcacgacagtccggcgctggttgagcaggcgcttaacgcgggggcgcgcggctttctctcc

SEQ ID NO: 668507 - DNA, 75 bp, synthetic construct
  source 1..75: mol_type = other DNA
accatcgatcacgctttaggtacgctgcatacggggggagtccatatcaactgcccgtttgccgaaccgctgtat

SEQ ID NO: 668508 - DNA, 75 bp, synthetic construct
  source 1..75: mol_type = other DNA
tttcactaccacgcccgacccaggatattcctgcgcgttggctggtttccaccatcgatcacgctttaggtacgc

SEQ ID NO: 668509 - DNA, 75 bp, synthetic construct
  source 1..75: mol_type = other DNA
tggaactgcatccggcagaaaaacgccagccctggtgcgttgaaatcccgcgcctggcggaacaggcaatgcagg

SEQ ID NO: 668510 - DNA, 75 bp, synthetic construct
  source 1..75: mol_type = other DNA
atagtgacttccggcacggcggtggcaaatctctatccggcactgattgaagcggggttaactggagagaaactg

SEQ ID NO: 668511 - DNA, 75 bp, synthetic construct
  source 1..75: mol_type = other DNA
gctggcaacagcgtctgggcgactggtggcaggacgacaaaccgtggctgcgtgaagcgcctcgtctggaaagtg

SEQ ID NO: 668512 - DNA, 75 bp, synthetic construct
  source 1..75: mol_type = other DNA
tattgacggactgctctctaccgccgcaggtgttcagcgggcgagcggtaaacccacgctggcgattgttggcga

SEQ ID NO: 668513 - DNA, 75 bp, synthetic construct
  source 1..75: mol_type = other DNA
cggtggaacaactgaccaaagcaggtatcaaagtgcattgcttagggaaggtgcgaataagcggggaaatacttc

SEQ ID NO: 668514 - DNA, 75 bp, synthetic construct
  source 1..75: mol_type = other DNA
acgatctggctgcgccggtggactatcgcgagcaggcggagtcgatgttcaacgaagaggccaaagccattcgcc

SEQ ID NO: 668515 - DNA, 75 bp, synthetic construct
  source 1..75: mol_type = other DNA
aaacagtcgtggacatttgattattcttccctggatggggcagatgatttgggatgcgcaatttgatggacacgg

SEQ ID NO: 668516 - DNA, 75 bp, synthetic construct
  source 1..75: mol_type = other DNA
tgatccagaaattgtcttctttgcagacaaactggacgcttacacagatcagccagagtttcgcatgatcgctcc

SEQ ID NO: 668517 - DNA, 75 bp, synthetic construct
  source 1..75: mol_type = other DNA
ccgtgaacttatcgctgcccgtctggctcaggatgaaaaggtctaccgtaccgggcacgtcaaaaaactgacagc

SEQ ID NO: 668518 - DNA, 75 bp, synthetic construct
  source 1..75: mol_type = other DNA
aagcgcatcaccctcgacattctgaaagaccttttccaggtggacgaagtggtaatcggcgagccggtctccatg

SEQ ID NO: 668519 - DNA, 75 bp, synthetic construct
  source 1..75: mol_type = other DNA
aagcgtatcaccatcgaaattctgaaagaccttttccagttggaagatgtggtgatcggcgagccggtctctatg

SEQ ID NO: 668520 - DNA, 75 bp, synthetic construct
  source 1..75: mol_type = other DNA
gcttaacgcctctattattgctcagacgcgtctgacctctactgaagagttcggcaaaatcctgctgaaagtgaa

SEQ ID NO: 668521 - DNA, 75 bp, synthetic construct
  source 1..75: mol_type = other DNA
caggaggatatctctgactacgtggcagcgaatatgaaagatgccatcagccgtacgtcgggcgtgggtgacgtt

SEQ ID NO: 668522 - DNA, 75 bp, synthetic construct
  source 1..75: mol_type = other DNA
atgcctaatttctttatcgatcgcccgatttttgcgtgggtgatcgccattctcatcatgttggcaggggggctg

SEQ ID NO: 668523 - DNA, 75 bp, synthetic construct
  source 1..75: mol_type = other DNA
gacttgatggataaagaaggcaaaggtctgatcgaagctactctggacgctgtgcgaatgcgtttacgtccaatc

SEQ ID NO: 668524 - DNA, 75 bp, synthetic construct
  source 1..75: mol_type = other DNA
ttattgctcagacgcgtctgacctctacggaagagttcggcaaaattctgctgaaagtgaatcaggatggttccc

SEQ ID NO: 668525 - DNA, 75 bp, synthetic construct
  source 1..75: mol_type = other DNA
tgattgaccaggccggcctcggtcacgaaaaactgacccaggcacgtaaccagttgctgggcgaagcagcgaaac

SEQ ID NO: 668526 - DNA, 75 bp, synthetic construct
  source 1..75: mol_type = other DNA
aggactgccagtggagtattactggccaggttgttggtgagacaggaagccataactataacgatcttaatggca

SEQ ID NO: 668527 - DNA, 75 bp, synthetic construct
  source 1..75: mol_type = other DNA
tgtcgatctctccaccggacaacctcggcggcgctatagcttcaaattgctgtggcacgatcgccagcgatggtt

SEQ ID NO: 668528 - DNA, 75 bp, synthetic construct
  source 1..75: mol_type = other DNA
atgttgaatacatggcacctgccggtgcccccatttgttaagcaaagcaaagatcaactgcttattacactgtgg

SEQ ID NO: 668529 - DNA, 75 bp, synthetic construct
  source 1..75: mol_type = other DNA
tacagaacacgataacgaagaaatgtcagtaccgatgcataagcagcgcagtcagccgcagcctggcgtcaccgc

SEQ ID NO: 668530 - DNA, 75 bp, synthetic construct
  source 1..75: mol_type = other DNA
ggcgtgccttgtatttattacggtgatgaagtggggttggatggtaacaatgatccgttttgccgtaagccattt

SEQ ID NO: 668531 - DNA, 75 bp, synthetic construct
  source 1..75: mol_type = other DNA
aaccacagtggcgattcccatgcctggtttgaccgacataatcgggggacaggtggcgcttgtcacaaccccgaa

SEQ ID NO: 668532 - DNA, 75 bp, synthetic construct
  source 1..75: mol_type = other DNA
tgtggcacgatcgccagcgatggttttcgccgcaaggtcttagccaaataccgccagcgcggctggaacagtttg

SEQ ID NO: 668533 - DNA, 75 bp, synthetic construct
  source 1..75: mol_type = other DNA
gtgatatcgatttaaaagatccgttttttaacagcctaagagctgattatgaaggatttgatgtttggtttctct

SEQ ID NO: 668534 - DNA, 75 bp, synthetic construct
  source 1..75: mol_type = other DNA
aagtgatgctcgcgctggcgatttttgcgctggctgccacggcggtgttacagattgccagcggcgcgctgagta

SEQ ID NO: 668535 - DNA, 75 bp, synthetic construct
  source 1..75: mol_type = other DNA
tcaggcggtggatattgaagtcagccgtcgcgaagatttttcgtcggtgattcagtcacgacgcgcgtggttcag

SEQ ID NO: 668536 - DNA, 75 bp, synthetic construct
  source 1..75: mol_type = other DNA
taagtattcatttattcgtattttgccacgtctacttcctgtttttatattaagacacttgtatgcaatgttaag

SEQ ID NO: 668537 - DNA, 75 bp, synthetic construct
  source 1..75: mol_type = other DNA
agatgataaatgtgatcggttgagatttgaaaaacagttggatatgttaaaaattcatcctgatattgttcttat

SEQ ID NO: 668538 - DNA, 75 bp, synthetic construct
  source 1..75: mol_type = other DNA
agcgccgcagtcaggcgattccccgtggcgttgggcaaattcacccgattttcgctgaccgcgcggaaaactgcc

SEQ ID NO: 668539 - DNA, 75 bp, synthetic construct
  source 1..75: mol_type = other DNA
gtcgcgcaatggcaacgcaaggaggggcatgggcaactgacggacgggattctggctttgtctgccatttcggct

SEQ ID NO: 668540 - DNA, 75 bp, synthetic construct
  source 1..75: mol_type = other DNA
cgatagcgcgctgttgttgggaaccagtgtgctggtggtggcgctggccggcatgatgtttgtgactcgtaatat

SEQ ID NO: 668541 - DNA, 75 bp, synthetic construct
  source 1..75: mol_type = other DNA
ttcttctaccggggccgggaagcgatcgatggccagctggtccaggtgattaaaaattttcgcgaaacctatggc

SEQ ID NO: 668542 - DNA, 75 bp, synthetic construct
  source 1..75: mol_type = other DNA
tggcgggatgcctttgctgcgccctgatgccggctttcgccaaagacgcgggctggcagtggtacaacgagaaac

SEQ ID NO: 668543 - DNA, 75 bp, synthetic construct
  source 1..75: mol_type = other DNA
tcttccaggagattattcacgtactgccgaatatcttctcgatggcggaatcagatttgatcctcgtgttgctgt

SEQ ID NO: 668544 - DNA, 75 bp, synthetic construct
  source 1..75: mol_type = other DNA
aaatactcagtatcgatttaccggctattcaatgactgaaggctatgtcgaatatggcgatagctcacttccaat

SEQ ID NO: 668545 - DNA, 75 bp, synthetic construct
  source 1..75: mol_type = other DNA
gccagccgatcaataccaattaactgaccgggcgactaagtacgctattctgctgattgcgctgacttttatggc

SEQ ID NO: 668546 - DNA, 75 bp, synthetic construct
  source 1..75: mol_type = other DNA
atcagttgctggagatatattaattgcaagtgctggacaaggtcatacacggggacaaacgtcactaaacactat

SEQ ID NO: 668547 - DNA, 75 bp, synthetic construct
  source 1..75: mol_type = other DNA
tcgcgctcgctttaagggcaacaaagcgatggaagagcgcattaatagtatgcgtgctacgccgcgttatctggt

SEQ ID NO: 668548 - DNA, 75 bp, synthetic construct
  source 1..75: mol_type = other DNA
agcatcagaatgaggaaggcaaagatgtaaccaccgcctatatctgcgaacaacacacccacggccacgcttgcc

SEQ ID NO: 668549 - DNA, 75 bp, synthetic construct
  source 1..75: mol_type = other DNA
tggttgatgaagaagtcctgcgagcaatggaatctgaatttaaatcagaaacaagttctgctgccacatcagcca

SEQ ID NO: 668550 - DNA, 75 bp, synthetic construct
  source 1..75: mol_type = other DNA
ttaacaaaactcgtgaagacattgccgccaaacgtggtaacaacgttgatctgactcgcttaaaagacggcgtca

SEQ ID NO: 668551 - DNA, 75 bp, synthetic construct
  source 1..75: mol_type = other DNA
gcaatggaagaacgcatcggtcaaatgcgtgccactcctcgctacctggtcaacggcattctttctgctcgtgag

SEQ ID NO: 668552 - DNA, 75 bp, synthetic construct
  source 1..75: mol_type = other DNA
cagattgccagcggtgcgctgagtaatcagcacgttcttgaggagaaaacggtagcgggctgggtagctgaaaac

SEQ ID NO: 668553 - DNA, 75 bp, synthetic construct
  source 1..75: mol_type = other DNA
cgacagagtgaagtcgaagcctggctacaggcccgcattgatgcatcccggggagagaattccgccatggcaatg

SEQ ID NO: 668554 - DNA, 75 bp, synthetic construct
  source 1..75: mol_type = other DNA
ctggtggaccagaacaggcacacgggcttattactgggggaagtgaaacaggaggctagcgtatcgcagtacggc

SEQ ID NO: 668555 - DNA, 75 bp, synthetic construct
  source 1..75: mol_type = other DNA
gatgctgaacgatttaggtgtcgatccgcatatcgtggagcacatcacagcgcatcagatgcctggtcagcaaaa

SEQ ID NO: 668556 - DNA, 75 bp, synthetic construct
  source 1..75: mol_type = other DNA
ttctcactttggcggggattggcgcattaattgcattgggtaaggtgttgaataccgctgaaccgatcacactgc

SEQ ID NO: 668557 - DNA, 75 bp, synthetic construct
  source 1..75: mol_type = other DNA
aattgtgtgaacacctgacacaaatcgcctcacaaacctgtgttatctggcagcaaccaacaacaactgaggagg

SEQ ID NO: 668558 - DNA, 75 bp, synthetic construct
  source 1..75: mol_type = other DNA
gaacacctgacgcaaatcgcaaagcaaacctgcgttgtctggaaacaactggcaacggcagaggaggatttctga

SEQ ID NO: 668559 - DNA, 75 bp, synthetic construct
  source 1..75: mol_type = other DNA
tccggaactggtaggcagatatcacctgaacgtctgaggctgggaaattatccagatttgagcctgaaagcagcc

SEQ ID NO: 668560 - DNA, 75 bp, synthetic construct
  source 1..75: mol_type = other DNA
ctgaacgcgttaagctgggaaattatcccgatctgagcctgaaagcagccagggaaaaagccgcacagtgtcgcg

SEQ ID NO: 668561 - DNA, 75 bp, synthetic construct
  source 1..75: mol_type = other DNA
ggaaatgcacgtaaaggaaaaccgtgtcgattacgtctccctgaaaagccgcctgaataatcacgtcatacagca

SEQ ID NO: 668562 - DNA, 75 bp, synthetic construct
  source 1..75: mol_type = other DNA
gccgctggataaatgcgagctacggcactggctggactgttttgaccaggtggcaaagcgaacgcctgttactgc

SEQ ID NO: 668563 - DNA, 75 bp, synthetic construct
  source 1..75: mol_type = other DNA
aaaccggagagatggggccagaattcagcaaaactatcgatctggaaactgctggcggagtcattgatcgggaca

SEQ ID NO: 668564 - DNA, 75 bp, synthetic construct
  source 1..75: mol_type = other DNA
gggggcagcgctgggtattgcaggttatcaggctgttgaaatgtggctgcgcagacgtgcagcgggaaagaagaa

SEQ ID NO: 668565 - DNA, 75 bp, synthetic construct
  source 1..75: mol_type = other DNA
gaagcctgtattcgcatcatcgacaaaaaagggccgctcaataacccggcagaccgcgaccactgcattcagtac

SEQ ID NO: 668566 - DNA, 75 bp, synthetic construct
  source 1..75: mol_type = other DNA
ttctggaggtttctctcgacagaactcgcctggaacagatgccggtcaatgagtatctcgacctgtacgtcattt

SEQ ID NO: 668567 - DNA, 75 bp, synthetic construct
  source 1..75: mol_type = other DNA
ccgaaatgcttggcctgacccgtgatgaaatcctcaacgccgtttcgctggcatgggtagacggacagtcgctgc

SEQ ID NO: 668568 - DNA, 75 bp, synthetic construct
  source 1..75: mol_type = other DNA
caccgttgtacctaacggtgtgcgcgtccccggaacccagttccagctcgatcccgtccaggcggcatttaacat

SEQ ID NO: 668569 - DNA, 75 bp, synthetic construct
  source 1..75: mol_type = other DNA
caccgtcgtacccaacggcgtgcgcgtccccggaactcagtttcagctcgaccccgtccaggcggcatttaacat

SEQ ID NO: 668570 - DNA, 75 bp, synthetic construct
  source 1..75: mol_type = other DNA
ggcgatgccacttcccgcgcggtacgtctggcactgatggcgaaaaccggcgaaatgggttatccgtcagccctg

SEQ ID NO: 668571 - DNA, 75 bp, synthetic construct
  source 1..75: mol_type = other DNA
aactgacggagcgtgtgctggtcagcactgacggtagtgtgtcgagcgttgaagctatagcggaacctgatgaac

SEQ ID NO: 668572 - DNA, 75 bp, synthetic construct
  source 1..75: mol_type = other DNA
ggactggtaaacgcagtgcgtttctatgaacaggtaaagcgtgagaatccgccagtcgaaaccgtagcatggaaa

SEQ ID NO: 668573 - DNA, 75 bp, synthetic construct
  source 1..75: mol_type = other DNA
tgtccgcaataacccggacaaactgcatttgtttgtggataacggttcgctggttgctacgggggccagctccat

SEQ ID NO: 668574 - DNA, 75 bp, synthetic construct
  source 1..75: mol_type = other DNA
ggcgcttaacggcggcagattacgaggacaacgttgcgcaagataaacgcatcgacgccctgcgcgagaagatca

SEQ ID NO: 668575 - DNA, 75 bp, synthetic construct
  source 1..75: mol_type = other DNA
ttctggcggtttctctcgacagaactcgcctcgagcagatgccggtcaatgagtatctcgacctgtacgtgattt

SEQ ID NO: 668576 - DNA, 75 bp, synthetic construct
  source 1..75: mol_type = other DNA
aacgcggtgattgaggatttcagtggcgaccagaatctgctgatagctccggttttgctgtggctgagggataac

SEQ ID NO: 668577 - DNA, 75 bp, synthetic construct
  source 1..75: mol_type = other DNA
ctggctactggagagcccttctcgggtatcgattgtcgaagataaacatgtttattatttccatttattgaaaga

SEQ ID NO: 668578 - DNA, 75 bp, synthetic construct
  source 1..75: mol_type = other DNA
atgaaattcgctattgtcttattgtatttttttgcctattatctcgcagcaaggaaaagatggtggaggctttct

SEQ ID NO: 668579 - DNA, 75 bp, synthetic construct
  source 1..75: mol_type = other DNA
cgccgattttgataccttcggtaaagggcctggacctttgaattgcgcgttaacgccgtggcggcgctggaagcc

SEQ ID NO: 668580 - DNA, 75 bp, synthetic construct
  source 1..75: mol_type = other DNA
tactcttaccgatagtgataaaataaaagaactatcattaaaaaacagcgggctgctggaacaacacgatcctac

SEQ ID NO: 668581 - DNA, 75 bp, synthetic construct
  source 1..75: mol_type = other DNA
tgttttattgataacgaacagagggataatacattattaatgattggtaaagtgatagattataaggaggatgtt

SEQ ID NO: 668582 - DNA, 75 bp, synthetic construct
  source 1..75: mol_type = other DNA
attttttgcatcattacctgatgcttgttttattgataacgagcagagggataatacattattaatgattggtaa

SEQ ID NO: 668583 - DNA, 75 bp, synthetic construct
  source 1..75: mol_type = other DNA
catcgccttaagcggcaaaaccagcgaactgtctaccgacgacattattcaggccatcaccccagcggtacggga

SEQ ID NO: 668584 - DNA, 75 bp, synthetic construct
  source 1..75: mol_type = other DNA
accgaacgcttgtttagtcgcttgcaagagctgcttgctactggcgtgggtattgtttttatctcgcataagctg

SEQ ID NO: 668585 - DNA, 75 bp, synthetic construct
  source 1..75: mol_type = other DNA
actgagcgtttattcatccgtatgcgtgaattactgagcacaggcgtagggatcatatttatctcccacaagctg

SEQ ID NO: 668586 - DNA, 75 bp, synthetic construct
  source 1..75: mol_type = other DNA
atagtgatggttatgtacgactgttttttgcaatggcaatcattatctgtggttacggctatgtaattatgggtg

SEQ ID NO: 668587 - DNA, 75 bp, synthetic construct
  source 1..75: mol_type = other DNA
acggtcgatattgatactgttgatgatttccagttagctgcagaaatttactctattagaaagaaatatgagaaa

SEQ ID NO: 668588 - DNA, 75 bp, synthetic construct
  source 1..75: mol_type = other DNA
ggtcaaaatgacaagttttctccccctggatgaaaagttctgcacggagactttagctctcatctcccgcatgga

SEQ ID NO: 668589 - DNA, 75 bp, synthetic construct
  source 1..75: mol_type = other DNA
tttattatttccatttattgaaagaattttttgcatcattaccagatgcttgttttattgataacgagcagaggg

SEQ ID NO: 668590 - DNA, 75 bp, synthetic construct
  source 1..75: mol_type = other DNA
aattgtcgatcacttcacctatgtgtttatgggcgacggctgcctgatggaaggtatttcccacgaagtctgttc

SEQ ID NO: 668591 - DNA, 75 bp, synthetic construct
  source 1..75: mol_type = other DNA
ggtgattggctttggttcgccgaataaagcaggtaaggaagaggcgcacggcgcaccactgggggaagaagaagt

SEQ ID NO: 668592 - DNA, 75 bp, synthetic construct
  source 1..75: mol_type = other DNA
attattttgattgccaccggttcagagatggaaatcaccctgcaagcggcagagaaattagcgggagaaggtcgc

SEQ ID NO: 668593 - DNA, 75 bp, synthetic construct
  source 1..75: mol_type = other DNA
ggcggttcagcggatctggctcccagtaatttaaccatctggaaaggttctgtgtcactgaaggaagatccggca

SEQ ID NO: 668594 - DNA, 75 bp, synthetic construct
  source 1..75: mol_type = other DNA
atattgccgaagtgctgtggaacgattttcttaaacataaccccaccgacccaacctggtatgatcgcgaccgct

SEQ ID NO: 668595 - DNA, 75 bp, synthetic construct
  source 1..75: mol_type = other DNA
cgaaggctggtttaccgacgatacggcaaaacgttttgaagcctatcactggcatgtgatccacgagatcgacgg

SEQ ID NO: 668596 - DNA, 75 bp, synthetic construct
  source 1..75: mol_type = other DNA
tcttcctttgttatacaatagttattttttacacatacgcttttcttaaaaattatggctttatcggagtttttt

SEQ ID NO: 668597 - DNA, 75 bp, synthetic construct
  source 1..75: mol_type = other DNA
atggctaatggtattgaatttaatcataatcccgcatctgtttttaattctaattcattagattttgaattagaa

SEQ ID NO: 668598 - DNA, 75 bp, synthetic construct
  source 1..75: mol_type = other DNA
cgggtaatcattttttatcgcttgataactatacagatattattgcaatctctattaataaagataaagatgtca

SEQ ID NO: 668599 - DNA, 75 bp, synthetic construct
  source 1..75: mol_type = other DNA
tcttttgataaagaaaaaagtattgagaaggcgcgccatttggtggacctgtatcagcaacaaggcgttgagaaa

SEQ ID NO: 668600 - DNA, 75 bp, synthetic construct
  source 1..75: mol_type = other DNA
ctggttacctgatttggtttggtgaaattggcattcacgaattcgcgtacctggtcaaggactacgtaaacaaaa

SEQ ID NO: 668601 - DNA, 75 bp, synthetic construct
  source 1..75: mol_type = other DNA
ctgatgaacaggccgaagaggaagctcaacgcatttttgttgttgtcgggggggggggggggaagagtaaaggca

SEQ ID NO: 668602 - DNA, 75 bp, synthetic construct
  source 1..75: mol_type = other DNA
gcaagagccgctgctcttccccagcctgacggtaaaggagaatattctctttggtctgcccaaacaccagagctc

SEQ ID NO: 668603 - DNA, 75 bp, synthetic construct
  source 1..75: mol_type = other DNA
atggtggcgggcagtggtgaattacgtctgaacggtgcaatgccggaacgctggcgggtgtcactgccggtaagt

SEQ ID NO: 668604 - DNA, 75 bp, synthetic construct
  source 1..75: mol_type = other DNA
aaaccaccctgaccacaccggcaggacgtgagggactttctccccgggtcagttacggaaaaggcactgagggtt

SEQ ID NO: 668605 - DNA, 75 bp, synthetic construct
  source 1..75: mol_type = other DNA
ttacgccgcctcctttcagcatcgctggctggggcctgcgggcagcaccgaagacaccaccgtgctctatctcat

SEQ ID NO: 668606 - DNA, 75 bp, synthetic construct
  source 1..75: mol_type = other DNA
cgcgaagcctccactaataaagacgctacgctgaatctcattgaaaaatttaagcatgaaatcagcatcgtccag

SEQ ID NO: 668607 - DNA, 75 bp, synthetic construct
  source 1..75: mol_type = other DNA
taacccgtgggtatggaaagtcggacagggaaatgaaggtctggaggttaaacagagccgcggtgttcgtgacgg

SEQ ID NO: 668608 - DNA, 75 bp, synthetic construct
  source 1..75: mol_type = other DNA
gtggggcggaatcgatgagcaccaatttagctgggacgacgcgtttgaagtgtgttgtcaggtcttctcctacac

SEQ ID NO: 668609 - DNA, 75 bp, synthetic construct
  source 1..75: mol_type = other DNA
tccggttatgagaatttcgtctcgcagttggatatctccgagaacaaagagaagctgaactggctggggaaaatg

SEQ ID NO: 668610 - DNA, 75 bp, synthetic construct
  source 1..75: mol_type = other DNA
aaccagttgcgcggtcgttctggtcgtcagggggatgctggttcttcccgtttctacctgtcgatggaagatgcg

SEQ ID NO: 668611 - DNA, 75 bp, synthetic construct
  source 1..75: mol_type = other DNA
accgtcgctacgccgaaatcggtggcattgtgcatacccactcacgccacgccaccatctggtcgcaggccgggc

SEQ ID NO: 668612 - DNA, 75 bp, synthetic construct
  source 1..75: mol_type = other DNA
aagacaccaccgtgctctatctcatcacccgccatcagcgtcctgaacaggcaatcctgccggaacctgagccgg

SEQ ID NO: 668613 - DNA, 75 bp, synthetic construct
  source 1..75: mol_type = other DNA
actgaccggcgtgcctggtttgcaggtacaaaaccggcagaactatgcgcaagatttacagctgtcgattcgcgg

SEQ ID NO: 668614 - DNA, 75 bp, synthetic construct
  source 1..75: mol_type = other DNA
ccgttttgcccgcactgcttgtcctttcccccgttgtttttgccgctgatgaacagactatgattgtcagtgccg

SEQ ID NO: 668615 - DNA, 75 bp, synthetic construct
  source 1..75: mol_type = other DNA
ggagctggaagacgggactgtcgccaccatggatcagcagttagagtatttgcagtattgcattactggcctgca

SEQ ID NO: 668616 - DNA, 75 bp, synthetic construct
  source 1..75: mol_type = other DNA
gggctggattgacaaaaaagccttcgccagcgttaaaggaatgaatgaacctgctgatggtgccatgaatcttgt

SEQ ID NO: 668617 - DNA, 75 bp, synthetic construct
  source 1..75: mol_type = other DNA
gcgttaaaatgacgcaagtgacctatacgtggaaactggatggcgtgccgggctgggttgataaaaatgccttct

SEQ ID NO: 668618 - DNA, 75 bp, synthetic construct
  source 1..75: mol_type = other DNA
agatgttctggaagtaacagacaaaggccaagaggttgagttttgggatcgtaaagatggtgcctgtgttggtca

SEQ ID NO: 668619 - DNA, 75 bp, synthetic construct
  source 1..75: mol_type = other DNA
gcgctgggtcatcgcggaagcttgccgtcagttagcagaatggcgtagccagaatattcatatcccggcgttatc

SEQ ID NO: 668620 - DNA, 75 bp, synthetic construct
  source 1..75: mol_type = other DNA
gcagaaacgggtgaactctacggcatcgaagcccttgctcgctggcacgatccccagcatggtcatgtgccccct

SEQ ID NO: 668621 - DNA, 75 bp, synthetic construct
  source 1..75: mol_type = other DNA
gggctggattgacaaaaaggcattcgccagcgttaaaggaatgaatgaacctgctgatagtgcaatgaatcttgt

SEQ ID NO: 668622 - DNA, 75 bp, synthetic construct
  source 1..75: mol_type = other DNA
atttttcttgccaaacggcaatgccctgcaggaagaagctatgtctctgtatatcaatatggggcttaatcgccg

SEQ ID NO: 668623 - DNA, 75 bp, synthetic construct
  source 1..75: mol_type = other DNA
gctgttgttgatgatggcgtgattgtatgtaagaacggttcttttatggcgtcattcttttttaaaggtgcagac

SEQ ID NO: 668624 - DNA, 75 bp, synthetic construct
  source 1..75: mol_type = other DNA
atatctcttccgtcgcattgaagaatcgctggatggccgtccgacgctgatcatcctcgatgaggcatggctgat

SEQ ID NO: 668625 - DNA, 75 bp, synthetic construct
  source 1..75: mol_type = other DNA
gcgtcaagggaatgaatgaacctgaagagagcattattaatcttgttaaaaccagcaatggctggaaagcgattt

SEQ ID NO: 668626 - DNA, 75 bp, synthetic construct
  source 1..75: mol_type = other DNA
atgcgtcaatttttagccattgctggccttgctgtgttgctatcaggctgcggtgaaaaaggcgattttgagaaa

SEQ ID NO: 668627 - DNA, 75 bp, synthetic construct
  source 1..75: mol_type = other DNA
ttccctgttcgtatcaatcgtggatatcgctctgacggatacaatgaaaatgatgaaattttaaaaggtatggct

SEQ ID NO: 668628 - DNA, 75 bp, synthetic construct
  source 1..75: mol_type = other DNA
aacaactggtcggcctttccgggcaggcctacaaaagcggcatgtcggtgatgggctgggaagtcacctctgcag

SEQ ID NO: 668629 - DNA, 75 bp, synthetic construct
  source 1..75: mol_type = other DNA
atgaaaaacgaaattaaagatctgcaaatagatattcagcgcgacgagcatgatttggaaactgtacgacaaata

SEQ ID NO: 668630 - DNA, 75 bp, synthetic construct
  source 1..75: mol_type = other DNA
aagcggcagaagcatggcgacgggctgccggggaaaggtgtaacgaaaaaagcagccttcattactccaggagtc

SEQ ID NO: 668631 - DNA, 75 bp, synthetic construct
  source 1..75: mol_type = other DNA
gcgcgtctcatggcagcgtaaaaacctacatgacaggctttatcctgtcgatcattctgacggtgattccgttct

SEQ ID NO: 668632 - DNA, 75 bp, synthetic construct
  source 1..75: mol_type = other DNA
tggaatatgacggcatttgtcttcaccgtgctaatcatcgccatcctggttgtgggctccatttggattatgtgg

SEQ ID NO: 668633 - DNA, 75 bp, synthetic construct
  source 1..75: mol_type = other DNA
tggcggcaaaagtggcgatggggattggcataatcagctacatcaccatcaactatctggtgaagttcgacttcc

SEQ ID NO: 668634 - DNA, 75 bp, synthetic construct
  source 1..75: mol_type = other DNA
gggacgctcaggtctggcgttaccagcgcaccggaaaccgggccgtcggtctggagctcaggggattctggaagg

SEQ ID NO: 668635 - DNA, 75 bp, synthetic construct
  source 1..75: mol_type = other DNA
aaagggaatatcactattgacggtcatgacagtgatgcacctgcactgaatgttggcatgctggcaaataatagc

SEQ ID NO: 668636 - DNA, 75 bp, synthetic construct
  source 1..75: mol_type = other DNA
ccacaaccgcagccgcagccacaaccgcagccgcagccacaaccgcagccgcagccacaaccgcagccgcagcca

SEQ ID NO: 668637 - DNA, 75 bp, synthetic construct
  source 1..75: mol_type = other DNA
ggagtgacgacatgctgcaggcttgccacttatctcgtgaccagatgcccgcattatacgaaggcagcgaaatta

SEQ ID NO: 668638 - DNA, 75 bp, synthetic construct
  source 1..75: mol_type = other DNA
acaagacccggaacagtggtggcaggcaactgatcgcgcaatgaaagctctgggcgatcagcattctctgcagga

SEQ ID NO: 668639 - DNA, 75 bp, synthetic construct
  source 1..75: mol_type = other DNA
ggaacggtcaggtctggcgttaccagcgtgccggaggccgggccgttattctggaggtcagtggacgttggatgg

SEQ ID NO: 668640 - DNA, 75 bp, synthetic construct
  source 1..75: mol_type = other DNA
cccgcctgtacgctggcaatggaggatgcctggcaggaaattgatatgggaaccacgccactccgggatttgcag

SEQ ID NO: 668641 - DNA, 75 bp, synthetic construct
  source 1..75: mol_type = other DNA
aaacaatatgcctcgtttgaatcacagttgcgggatatcagtgtcacaggagacctggatgcaaaacaggaacgt

SEQ ID NO: 668642 - DNA, 75 bp, synthetic construct
  source 1..75: mol_type = other DNA
gtattaaagcggtaacgttgcttaacacgaaatggctgcttctgaaaacagccttttcgtctggcggcaaactgg

SEQ ID NO: 668643 - DNA, 75 bp, synthetic construct
  source 1..75: mol_type = other DNA
acgcgcggcgataccgtcaagaaatatgaaaaggcgggcgtaaattatgaagcgtcgatgaaagattatgtcgcc

SEQ ID NO: 668644 - DNA, 75 bp, synthetic construct
  source 1..75: mol_type = other DNA
ggttctctggtatctgggcgcaaatcaaaaccgcgttcagcggcgggattggcggcgtggcaaagctgattacca

SEQ ID NO: 668645 - DNA, 75 bp, synthetic construct
  source 1..75: mol_type = other DNA
acagaacgctatggtcagttgggttcttcccggatgcagcgcctcaacagcgacctgctgcgggtaagccgcaca

SEQ ID NO: 668646 - DNA, 75 bp, synthetic construct
  source 1..75: mol_type = other DNA
gaacttgaacaggcgtttggcattgcggcaacaggagccaaacttgggtcatttgagctgaaggatatggcaaaa

SEQ ID NO: 668647 - DNA, 75 bp, synthetic construct
  source 1..75: mol_type = other DNA
taacatttctctggagtgcaacaactcaggctgcgccatcgccctcctttcctctgccggagtactggggagaag

SEQ ID NO: 668648 - DNA, 75 bp, synthetic construct
  source 1..75: mol_type = other DNA
gttcgtgatttacaggacagttttgccggtcctgaaaagaaattccgtctgcggttgcgtaactgtgagctggcg

SEQ ID NO: 668649 - DNA, 75 bp, synthetic construct
  source 1..75: mol_type = other DNA
ttataccctgcgtgttgtccgtaatagtcagccgttaaaggcgggagattattatgcctcattacgttttaagct

SEQ ID NO: 668650 - DNA, 75 bp, synthetic construct
  source 1..75: mol_type = other DNA
caactggttgcagacggtatgaatcctgaaaaagcagctggcatggtggaattactcggtaaaacggccaccgcc

SEQ ID NO: 668651 - DNA, 75 bp, synthetic construct
  source 1..75: mol_type = other DNA
aaaccgacactcaagcagactcggcaggctggtatgctcctggcgggcatttttgtactgatattttccgggctg

SEQ ID NO: 668652 - DNA, 75 bp, synthetic construct
  source 1..75: mol_type = other DNA
gacgagttttaaggggcaggtcatcgctccggcctgcacgctggccatggaagacacctggcaggtaattgatat

SEQ ID NO: 668653 - DNA, 75 bp, synthetic construct
  source 1..75: mol_type = other DNA
ggtactggcgggcaactgcaactggtggatgaaaacgggcaggctatttctcacagtcagacgtttgatgtcact

SEQ ID NO: 668654 - DNA, 75 bp, synthetic construct
  source 1..75: mol_type = other DNA
atttgccgctgattagcatcagcctggtggccattcttttcatcgcagccacattaagcctttttccacaacagt

SEQ ID NO: 668655 - DNA, 75 bp, synthetic construct
  source 1..75: mol_type = other DNA
ttacccgcaactggaccgttttctactggctgtggtggatctccatacacccctggcgtagcaatgtttgtcacc

SEQ ID NO: 668656 - DNA, 75 bp, synthetic construct
  source 1..75: mol_type = other DNA
ccgtgctcttcgcctgttctggtgcgtggttatcaccctgattccactgtctatcttatttactggcgcgtcgct

SEQ ID NO: 668657 - DNA, 75 bp, synthetic construct
  source 1..75: mol_type = other DNA
tgcacgtagcatcctggaacgtggtgtgcgtatcaacagcaacgaagagctggcgttgccgaaagagaaattaca

SEQ ID NO: 668658 - DNA, 75 bp, synthetic construct
  source 1..75: mol_type = other DNA
aggttgaacttacagaccacaagaaactagaacttagccacaattactgtaaagaacatcgccccaaacttgcca

SEQ ID NO: 668659 - DNA, 75 bp, synthetic construct
  source 1..75: mol_type = other DNA
caaactttaaccccagcagatctagataaacttaggaatatcgccagacgaatggttgactccaaattcactgat

SEQ ID NO: 668660 - DNA, 75 bp, synthetic construct
  source 1..75: mol_type = other DNA
gcacccgtttcgcatcatcaagcggccgttcggcttcgtgaaagccagatacagggggctgctgaaaaacgataa

SEQ ID NO: 668661 - DNA, 75 bp, synthetic construct
  source 1..75: mol_type = other DNA
atcaacgtcccacaggtgctggaaacactgggcggcgaaacagctgtacagcaagttctgatgtcgttgccagcc

SEQ ID NO: 668662 - DNA, 75 bp, synthetic construct
  source 1..75: mol_type = other DNA
gctggggtgcgttcctgctgccattgttggttctgattattggcccaacagaatttattaccaacagcatcatca

SEQ ID NO: 668663 - DNA, 75 bp, synthetic construct
  source 1..75: mol_type = other DNA
atgggactggtgatttatttagccaccagtaaatacggcaatattcgtcttggcgaaggaaaaccggaatacagc

SEQ ID NO: 668664 - DNA, 75 bp, synthetic construct
  source 1..75: mol_type = other DNA
tagtgtgctggatatggtgttgatgggcctggcccccaccataggcgctttttccgttcccggtaagcaagaacg

SEQ ID NO: 668665 - DNA, 75 bp, synthetic construct
  source 1..75: mol_type = other DNA
gtgaaaacgataaaaaaattaatccggcagacggggccgcgtcgcggtcccgttatcagtccaggtatcgttcgt

SEQ ID NO: 668666 - DNA, 75 bp, synthetic construct
  source 1..75: mol_type = other DNA
atatttcgctgacgcagaacattcagcaatctggcttgttaagccgcagaactgcaacaaaatgggcaagtgcag

SEQ ID NO: 668667 - DNA, 75 bp, synthetic construct
  source 1..75: mol_type = other DNA
accgctgagcaatccaccattgagcgcgcgttggccatgaactggctggcgaaatatatggcgacaatgcctcca

SEQ ID NO: 668668 - DNA, 75 bp, synthetic construct
  source 1..75: mol_type = other DNA
accggaaccgtcagtgcaaaagagggtaacaatacatttttatttgatgatggcagcacactgacaggagaagtg

SEQ ID NO: 668669 - DNA, 75 bp, synthetic construct
  source 1..75: mol_type = other DNA
attgcactggcgttccagaaagctgacggaagtgaaaccgataataacctggatatgtctgactccgctggatta

SEQ ID NO: 668670 - DNA, 75 bp, synthetic construct
  source 1..75: mol_type = other DNA
tagccggtattgcggatggcaatggctatgatatttccggcaaactcattaatccgaaggacaagaccacactat

SEQ ID NO: 668671 - DNA, 75 bp, synthetic construct
  source 1..75: mol_type = other DNA
cggaggttatgagttacgtcttgcttaccgcaaacaggtctatagcagcagttttcgcgtggcaaactacatcaa

SEQ ID NO: 668672 - DNA, 75 bp, synthetic construct
  source 1..75: mol_type = other DNA
attacagctcggcaatgccattattaaaccttcccgttatgtacagaacagccagttttcaccgctgaaaaaata

SEQ ID NO: 668673 - DNA, 75 bp, synthetic construct
  source 1..75: mol_type = other DNA
gagccagatggacgagtaacacaaggcttaccgaccgaacagttaacaacgaaaaaactggctgccctgtaccgg

SEQ ID NO: 668674 - DNA, 75 bp, synthetic construct
  source 1..75: mol_type = other DNA
tttcacgttcctgatgcctgattcgttaacccgctggcgcatcaccgcgcgtgggatgaacggcgacgggctggt

SEQ ID NO: 668675 - DNA, 75 bp, synthetic construct
  source 1..75: mol_type = other DNA
agattgacagcgatgcgctgtatctcgatgaaattacgcttaccagcgagcaggatgccgttctgcgctacggtc

SEQ ID NO: 668676 - DNA, 75 bp, synthetic construct
  source 1..75: mol_type = other DNA
accttacagcctgtcaccagcaatgagattgacagcgatgcgctgtatctcgatgaaatcacgcttaccagcgag

SEQ ID NO: 668677 - DNA, 75 bp, synthetic construct
  source 1..75: mol_type = other DNA
atgaataacaccaaaaaatcactaaaagtactctttattggggaatcctggcatattcatatgattcattcaaaa

SEQ ID NO: 668678 - DNA, 75 bp, synthetic construct
  source 1..75: mol_type = other DNA
tctctacgtaataatctgcaagcagataactatagcgacataaaacaaggagtttataaagcatataagaaaatg

SEQ ID NO: 668679 - DNA, 75 bp, synthetic construct
  source 1..75: mol_type = other DNA
agatgtggcacagttagaacaatatgatgccatcgttattagtgatattggtagtaatactttcctgctacaaaa

SEQ ID NO: 668680 - DNA, 75 bp, synthetic construct
  source 1..75: mol_type = other DNA
atgacgagcagtatcaccgtttactctccgctgccgggttatcgaaaagctggacgcggacgatgcaaaagcgcc

SEQ ID NO: 668681 - DNA, 75 bp, synthetic construct
  source 1..75: mol_type = other DNA
atccaggttgatggtgagttgatgctgacggagctggggctggaaggtgacgagcaggcggagaaaaaggttcac

SEQ ID NO: 668682 - DNA, 75 bp, synthetic construct
  source 1..75: mol_type = other DNA
tagacgagctgcagatcgctgggcagagataatggtgcttttatctagtgacgctgagagaaaattggcagctca

SEQ ID NO: 668683 - DNA, 75 bp, synthetic construct
  source 1..75: mol_type = other DNA
atggaaataagagataaaaaggcgaagtacttggaagaaaaagggttttatagacgagctgcagatcgctgggca

SEQ ID NO: 668684 - DNA, 75 bp, synthetic construct
  source 1..75: mol_type = other DNA
gtcagcttgggaagaaatgacctgcttattcgcaccttccttagaacaatatgatgccatcgttattagtgatat

SEQ ID NO: 668685 - DNA, 75 bp, synthetic construct
  source 1..75: mol_type = other DNA
aaaacgaaggtcgccatattcaggccaataccggaaagcattttaccgttcgtcacacagctggtggagcagaac

SEQ ID NO: 668686 - DNA, 75 bp, synthetic construct
  source 1..75: mol_type = other DNA
ttatattaaattataatagtattacggatactattaattgtcttgtaagtttatctcagcaaacgttaaagccta

SEQ ID NO: 668687 - DNA, 75 bp, synthetic construct
  source 1..75: mol_type = other DNA
ccggtgattaagcaccgacagtatgtgataacaacagagcaggggcgacctgttttcttcatgagccaggcctgg

SEQ ID NO: 668688 - DNA, 75 bp, synthetic construct
  source 1..75: mol_type = other DNA
aaataagtgagcgtgtactgacaaacaaagagcttggggaactactccgcgcactggatgaaaaaatcttcccgc

SEQ ID NO: 668689 - DNA, 75 bp, synthetic construct
  source 1..75: mol_type = other DNA
ttttttaatgacggtggcaatcttagcgtaagacattccaccagcggcctgttaacctggtatttcacttacagg

SEQ ID NO: 668690 - DNA, 75 bp, synthetic construct
  source 1..75: mol_type = other DNA
atgagcagggcaattcatagacttagcgacactcttttacgaaaattaagcggatcaccaaccacaaaaaacacc

SEQ ID NO: 668691 - DNA, 75 bp, synthetic construct
  source 1..75: mol_type = other DNA
tatgagtcgtcttgtccggcaggatatttttccccgtctgtgctggcgttcgctgtaccaccgtgggcagcagac

SEQ ID NO: 668692 - DNA, 75 bp, synthetic construct
  source 1..75: mol_type = other DNA
ttccattaaagacaaacaacgcagcgccggtaatgactccaacttattgatagtgttttatgttcagataatgcc

SEQ ID NO: 668693 - DNA, 75 bp, synthetic construct
  source 1..75: mol_type = other DNA
ggtcaatgaggcggaagtcctgggggcggccgtctggctgtggatgcactcccccctgcatcgtgatgcgccatt

SEQ ID NO: 668694 - DNA, 75 bp, synthetic construct
  source 1..75: mol_type = other DNA
ttgccccttttggacacactccggatatgagtcgtcttgtccggcaggatatttttccccgtctgtgctggcgtt

SEQ ID NO: 668695 - DNA, 75 bp, synthetic construct
  source 1..75: mol_type = other DNA
ttgcaagtggattgtgaccaacatcattgttcctgtcatcatcggagcttcaagttctgtgttggcatcagtgat

SEQ ID NO: 668696 - DNA, 75 bp, synthetic construct
  source 1..75: mol_type = other DNA
gaaactgaagcagagttggcggacgacctggaaaaaggactgccccagcgcctgtttgaatcgctctgcatagat

SEQ ID NO: 668697 - DNA, 75 bp, synthetic construct
  source 1..75: mol_type = other DNA
agctatcagaggatatcagattcaaaaatgttgtagatatgaagggagggcatactttaactaataatggtaaac

SEQ ID NO: 668698 - DNA, 75 bp, synthetic construct
  source 1..75: mol_type = other DNA
attcaaaagtattgctagtttagtagccgagttcggttgtgttgctgcggactttcgttctggtggaagtaaaag

SEQ ID NO: 668699 - DNA, 75 bp, synthetic construct
  source 1..75: mol_type = other DNA
ttaatcaagcaaggccagggccaaaatcttcagatgctgttttttctgaagaatgggctaattgtacagaattac

SEQ ID NO: 668700 - DNA, 75 bp, synthetic construct
  source 1..75: mol_type = other DNA
cgcgtgctggaaaaaatcgccgatgaactggaagcacaaagcgaaatcatcctcaacgctaacgcccaggatgtt

SEQ ID NO: 668701 - DNA, 75 bp, synthetic construct
  source 1..75: mol_type = other DNA
ccacacaaggagaacactggcggcaatcagcatcacgatagcgataatgaaactggcgagacggcagatcactca

SEQ ID NO: 668702 - DNA, 75 bp, synthetic construct
  source 1..75: mol_type = other DNA
tgctggtgaataaaaacatcgccgatagcttcctgcccgcattaagcaaacaaatggcggaaagcggcgtgacat

SEQ ID NO: 668703 - DNA, 75 bp, synthetic construct
  source 1..75: mol_type = other DNA
agcagaaagcgccaccgccacagcagaataacaacgggaataatcctccgatggactttgacgacgacatcccgt

SEQ ID NO: 668704 - DNA, 75 bp, synthetic construct
  source 1..75: mol_type = other DNA
tggcatggtggcaaggtcacttcgatccgctggtcgccctgctggcactgattaccgccgggctattacagatcc

SEQ ID NO: 668705 - DNA, 75 bp, synthetic construct
  source 1..75: mol_type = other DNA
cacctcggcgctgaaactgagcctgcacgaactggagaagatgatggagcggattatggcgcgtcgtgaacgccg

SEQ ID NO: 668706 - DNA, 75 bp, synthetic construct
  source 1..75: mol_type = other DNA
cttgccggacatacgctcaatgagccgtggttttttctattgagcatgtcggcgtggcttggcttttgtacctag

SEQ ID NO: 668707 - DNA, 75 bp, synthetic construct
  source 1..75: mol_type = other DNA
aaaacatgcacgcccgattactggaacatgccagtttactctgtggcggcctgaaacaaccgatgccattcgtgc

SEQ ID NO: 668708 - DNA, 75 bp, synthetic construct
  source 1..75: mol_type = other DNA
gcgcgcgtttgcgaggtgatagtcggtattttgtgcggcggcatgatgatgatgatcctgcctagcagttccgat

SEQ ID NO: 668709 - DNA, 75 bp, synthetic construct
  source 1..75: mol_type = other DNA
atcgccgacgatgtgcgtcaggtgtgtaatctcgccgatccggtggggcaggtaatcgatggcggcgtactggac

SEQ ID NO: 668710 - DNA, 75 bp, synthetic construct
  source 1..75: mol_type = other DNA
tttacgcaagggtagcccccatgttcatttcctctggttagatggcgactatgaaactattctcgcgcgaatgca

SEQ ID NO: 668711 - DNA, 75 bp, synthetic construct
  source 1..75: mol_type = other DNA
ggttgaaagttgccacggtttcggctctcctcattgcctcatttgttgcagggagtgtgtggacggaacgagcat

SEQ ID NO: 668712 - DNA, 75 bp, synthetic construct
  source 1..75: mol_type = other DNA
ttgcggtaagcacacaaaaactccacgcgcgcggcccaatggggctggaagctctgaccacttacaagtggatcg

SEQ ID NO: 668713 - DNA, 75 bp, synthetic construct
  source 1..75: mol_type = other DNA
tgctggtaaataaaaacattgcggatagcttcctgcctgcattaagcaagcaaatggctgaaagtggtgtgacgc

SEQ ID NO: 668714 - DNA, 75 bp, synthetic construct
  source 1..75: mol_type = other DNA
gatcactggtggtattggtgtctgccatatttacgttgatgagagtgcagaggtttctaatgcactgaaagtgag

SEQ ID NO: 668715 - DNA, 75 bp, synthetic construct
  source 1..75: mol_type = other DNA
tgaacaggatattgtgcgcattgatatcaaccatgatattgccaatgtcaccgaacaatgtcggcaggctgtgct

SEQ ID NO: 668716 - DNA, 75 bp, synthetic construct
  source 1..75: mol_type = other DNA
ctaaacgttatgctgcaattgctgacgaacgctaccgctcgggaatgacgtgtgagcgcatttacgactcggtga

SEQ ID NO: 668717 - DNA, 75 bp, synthetic construct
  source 1..75: mol_type = other DNA
attgataatcctgaccgtgcgttggtcagtgaaatgctgcgtatggataaatacatcgacatgctgatcccgcgc

SEQ ID NO: 668718 - DNA, 75 bp, synthetic construct
  source 1..75: mol_type = other DNA
gccgcgaacagtcgacgatcccggtgatcacaggtggtataggcgtatgccatatttacgttgatgaaagtgtag

SEQ ID NO: 668719 - DNA, 75 bp, synthetic construct
  source 1..75: mol_type = other DNA
tgctggtgaataaaaacatcgccgatagcttcctgcccgcattaagcaagcaaatggcggaaagcagcgtgacat

SEQ ID NO: 668720 - DNA, 75 bp, synthetic construct
  source 1..75: mol_type = other DNA
attcatcgctggtgatgtatggagtagccgcggttgggaaaaaaagtgggcggaacgtgatagcgcggaatcatc

SEQ ID NO: 668721 - DNA, 75 bp, synthetic construct
  source 1..75: mol_type = other DNA
gctgacgaacgctacaccgccgggatgacgtgtgaacgtatttacgactcgttgagagagtcaaataacgctatc

SEQ ID NO: 668722 - DNA, 75 bp, synthetic construct
  source 1..75: mol_type = other DNA
atattgctactgctcttgctcgtaagggatacaaagttgtcgttgtggataccgatcctcagggaagtgttagta

SEQ ID NO: 668723 - DNA, 75 bp, synthetic construct
  source 1..75: mol_type = other DNA
tggttctatagcatcagacttcagcactatgaaatgtatagatttcattcatggaaatgaattggatgagttgat

SEQ ID NO: 668724 - DNA, 75 bp, synthetic construct
  source 1..75: mol_type = other DNA
tcgcccgagctatcatgccgcatctgcagaagatggctggcagcgtatgctggaatggtttaagcagtatggtgg

SEQ ID NO: 668725 - DNA, 75 bp, synthetic construct
  source 1..75: mol_type = other DNA
tgcttaacgccccacaaggaacgattgataaaaattgcctgttagggagcgactggcagcttcctcatgccgccg

SEQ ID NO: 668726 - DNA, 75 bp, synthetic construct
  source 1..75: mol_type = other DNA
atgagcgtaataaaaactcatacaggaattgttatcactcgagacggtgaaaagcggatgaaattacattcgact

SEQ ID NO: 668727 - DNA, 75 bp, synthetic construct
  source 1..75: mol_type = other DNA
gttgataatccagtcaatgatgacaccgtgtttatacactatgtgggacctacaaaaccctggcatgagtgggct

SEQ ID NO: 668728 - DNA, 75 bp, synthetic construct
  source 1..75: mol_type = other DNA
acggcggcgatgttcatcgcttaatgatcaccggattttgctggggtgggcgcatcacctggctgtatgctgcgc

SEQ ID NO: 668729 - DNA, 75 bp, synthetic construct
  source 1..75: mol_type = other DNA
atggcaacaacacaacaatctggatttgcacctgctgcatcgcctctcgcttcgaccatcgttcagaccccggac

SEQ ID NO: 668730 - DNA, 75 bp, synthetic construct
  source 1..75: mol_type = other DNA
ggtggtcaggataacagcattccgcaggagagcgttgaaaacatgcgccaggcgctgcgggctgctaatgcgaaa

SEQ ID NO: 668731 - DNA, 75 bp, synthetic construct
  source 1..75: mol_type = other DNA
gcagagattatcgtgtacccggatgccgggcatgcattcaacgctgattatcgcccgagctatcatgccgaatct

SEQ ID NO: 668732 - DNA, 75 bp, synthetic construct
  source 1..75: mol_type = other DNA
gaacgtgtcgctggcgctgatgctggcactgtccctgatttacccgcagagcgtggccgtcaattttgtcgctgc

SEQ ID NO: 668733 - DNA, 75 bp, synthetic construct
  source 1..75: mol_type = other DNA
ggtggtcatcccgcaaccggcaggcgacgagccggtgattaaaaacacgttcttttttcccgatatcgacccgaa

SEQ ID NO: 668734 - DNA, 75 bp, synthetic construct
  source 1..75: mol_type = other DNA
tgcgctaacacaaggtgcggcgaaactggaaataccgacggggcagacctttacgttacgctcagggagtgtggt

SEQ ID NO: 668735 - DNA, 75 bp, synthetic construct
  source 1..75: mol_type = other DNA
tttaatcggtgaaaatactattatctcacagagatgttacatatgcacaggtagtcatgattatgatagtttaga

SEQ ID NO: 668736 - DNA, 75 bp, synthetic construct
  source 1..75: mol_type = other DNA
gaggttgctgattttgacaagagcgaatttaacccttcggattctgataggaaaatatggactgggataagaaag

SEQ ID NO: 668737 - DNA, 75 bp, synthetic construct
  source 1..75: mol_type = other DNA
tgccctgccggatttcagtccgttgtcacaggacagacttgccattcagttgatccgcgaacgcggtgcactgga

SEQ ID NO: 668738 - DNA, 75 bp, synthetic construct
  source 1..75: mol_type = other DNA
ttcccggctggttaattccaggcgtaagcgccgctacgcttgtggtggcggttgcactggcggcgtttctcgccc

SEQ ID NO: 668739 - DNA, 75 bp, synthetic construct
  source 1..75: mol_type = other DNA
actgctcaacaacaccattggcctgccacaatctgctgacggcattgtgattttcaccaatgcgttaatggcgat

SEQ ID NO: 668740 - DNA, 75 bp, synthetic construct
  source 1..75: mol_type = other DNA
cacggttggcgcgacccggacgatcgtctgcacagccgcatttgcgatacggtgctgatcgtgctggcgctgctg

SEQ ID NO: 668741 - DNA, 75 bp, synthetic construct
  source 1..75: mol_type = other DNA
tcattgcaggggatctacctggacagtctgccaacggcacaggaacttgcagagttcagaatttactggatggct

SEQ ID NO: 668742 - DNA, 75 bp, synthetic construct
  source 1..75: mol_type = other DNA
tatgggcgtcgctaccgggtgcaggttacggccagcgtgagcacagcctcgacaaactggtcactgtgtggcgca

SEQ ID NO: 668743 - DNA, 75 bp, synthetic construct
  source 1..75: mol_type = other DNA
ggatgcggtggccgtgcagatgataaaggagcagggggcatatgcggatgtggtggcggggcgtactgagattgc

SEQ ID NO: 668744 - DNA, 75 bp, synthetic construct
  source 1..75: mol_type = other DNA
catccgctgacgaaaaaccggggctatgacgtgatagtcaccggactggacggaaagccggaaattttcaccgac

SEQ ID NO: 668745 - DNA, 75 bp, synthetic construct
  source 1..75: mol_type = other DNA
acatgctggccgtgtccgaagggacggcgaatcatccgctgacgaaaaaccggggctatgacgtgatagtcaccg

SEQ ID NO: 668746 - DNA, 75 bp, synthetic construct
  source 1..75: mol_type = other DNA
cagaagcaatcaacattacctgataacaacgttccgcactggaacagccctgaagcatgggaggatttcttgtga

SEQ ID NO: 668747 - DNA, 75 bp, synthetic construct
  source 1..75: mol_type = other DNA
tgctgtcgctgaaatcaaatacggttatgatagtcatcatgaagaaagcgtggggaaacgttatgtatcttgata

SEQ ID NO: 668748 - DNA, 75 bp, synthetic construct
  source 1..75: mol_type = other DNA
tttatgttgcttgttgatatgattaatttatttctttttctaagaaaaggaatgatggtaagtagtttttctcaa

SEQ ID NO: 668749 - DNA, 75 bp, synthetic construct
  source 1..75: mol_type = other DNA
aaactgattccagaattgaagaacaagttaaaatctgtgcagaatttctttaccaccctgtcaaacacggttaaa

SEQ ID NO: 668750 - DNA, 75 bp, synthetic construct
  source 1..75: mol_type = other DNA
atgatttttcagaaaaaaaacagctatttccagtcacaggtagataaaatcaggaaggaagcgtatgccggtgtc

SEQ ID NO: 668751 - DNA, 75 bp, synthetic construct
  source 1..75: mol_type = other DNA
gacttcgcataaaggcgatcacgggcggctggtgattatcggtggcgatcacggcacggcaggggctattcgtat

SEQ ID NO: 668752 - DNA, 75 bp, synthetic construct
  source 1..75: mol_type = other DNA
cgaatccattagccaattaatcgaccatgctaattcctgtcctgcgccgattgtggcgattgatatcccttccgg

SEQ ID NO: 668753 - DNA, 75 bp, synthetic construct
  source 1..75: mol_type = other DNA
catgctaattcccatccggcgccgattgtggcggttgatatcccttccggcctgctggcagaaaccggcgccacg

SEQ ID NO: 668754 - DNA, 75 bp, synthetic construct
  source 1..75: mol_type = other DNA
tctatcgagcaagaatatccccagatactcaacagagcgcgagcaatcctcgtccgagaaacggcacatgtaaaa

SEQ ID NO: 668755 - DNA, 75 bp, synthetic construct
  source 1..75: mol_type = other DNA
acaattcactgataacgaactttgcacactcgcctggttatggcgagcagggaatgtgatgttaattgcctacca

SEQ ID NO: 668756 - DNA, 75 bp, synthetic construct
  source 1..75: mol_type = other DNA
aaattaagtcaaacatttattggagacctttctaatgcggattctactaatactattatcatgtttggattagca

SEQ ID NO: 668757 - DNA, 75 bp, synthetic construct
  source 1..75: mol_type = other DNA
acaagcaaattgaaatgtggcgcagagctaccggttccgaaggtggactcgacgaataccgcaactgggttctgg

SEQ ID NO: 668758 - DNA, 75 bp, synthetic construct
  source 1..75: mol_type = other DNA
accgttcgaaggcagtgcatgggggagctacgtcagataactttttagttgagcatataattgaggtacgagtgc

SEQ ID NO: 668759 - DNA, 75 bp, synthetic construct
  source 1..75: mol_type = other DNA
cagttcaacaatccccaatcacaaaacaattcactgataacgaactttgcacactcgcctggttatggcgagcag

SEQ ID NO: 668760 - DNA, 75 bp, synthetic construct
  source 1..75: mol_type = other DNA
cgcccaacgtctggtacaacgttatggcggcgtagcggtgctgaaaggtgccggaaccgtggtcgcagcaaaccc

SEQ ID NO: 668761 - DNA, 75 bp, synthetic construct
  source 1..75: mol_type = other DNA
gcaaggtgactttgagcctgaatcaggttatcgcgccatgcagcaaatcctgtcgcaaccacacagacctaccgc

SEQ ID NO: 668762 - DNA, 75 bp, synthetic construct
  source 1..75: mol_type = other DNA
aagggcaagctgactggtgggaaaaacgcgcccattcgttaggtgttgtgggaattgctaaaggttactttaact

SEQ ID NO: 668763 - DNA, 75 bp, synthetic construct
  source 1..75: mol_type = other DNA
aaaccaggattaaggtatatttaattaatggcgatcggctccgttcattgccaagtaccaagaactggactcatg

SEQ ID NO: 668764 - DNA, 75 bp, synthetic construct
  source 1..75: mol_type = other DNA
aagccagacgtaaggtcatcaaagagacgctccttagctggcttttggttgacccttcatctaccgcgcacgaat

SEQ ID NO: 668765 - DNA, 75 bp, synthetic construct
  source 1..75: mol_type = other DNA
ggttatcgcgccatgcagcaaatcctgtcgcaatcacaccgccctactgccgtcttctgtggtggcgatattatg

SEQ ID NO: 668766 - DNA, 75 bp, synthetic construct
  source 1..75: mol_type = other DNA
attacactactcccctagcgcggtggcgcgtagcctgaaggttaaccacactaagtctatcggtttgctggcgac

SEQ ID NO: 668767 - DNA, 75 bp, synthetic construct
  source 1..75: mol_type = other DNA
gctggcgctgcataccgtgagcggacatgaagttcgttatccgcatgatcgggaaatcagtgaagtcttgctaca

SEQ ID NO: 668768 - DNA, 75 bp, synthetic construct
  source 1..75: mol_type = other DNA
atgaagtatgacggagacgggcgggcaaccgcccgtttcttttccgacaaaggatgtcgccgtgctcctcttttt

SEQ ID NO: 668769 - DNA, 75 bp, synthetic construct
  source 1..75: mol_type = other DNA
caagagttgctcggtgaacgcaaaataaaatacattctaatttctcattttgaatcagacgaatgtggcggactt

SEQ ID NO: 668770 - DNA, 75 bp, synthetic construct
  source 1..75: mol_type = other DNA
acgcgcccattcgttaggtgttgcgggaattgctaaaggttactttaactccggttttttattgattaatactgc

SEQ ID NO: 668771 - DNA, 75 bp, synthetic construct
  source 1..75: mol_type = other DNA
ttgaaaccggttaatagtaatcaattaagatacagtgctaaacatatgttgaaaaaaagcaatatatcaaaggat

SEQ ID NO: 668772 - DNA, 75 bp, synthetic construct
  source 1..75: mol_type = other DNA
ctcccgctggagaagagttagtgagccgtctgcgtacactggggcaggtggcctggcattttccactgatagagt

SEQ ID NO: 668773 - DNA, 75 bp, synthetic construct
  source 1..75: mol_type = other DNA
acgaagtttagatcaaatgttagctgatgcatggcaatggcaattgaaaaaccccaatggttataatgatagata

SEQ ID NO: 668774 - DNA, 75 bp, synthetic construct
  source 1..75: mol_type = other DNA
aaagttatatcgtatgagttaaatataaatgatgaagacagtatttctgaaataataaaaaaacataagattgaa

SEQ ID NO: 668775 - DNA, 75 bp, synthetic construct
  source 1..75: mol_type = other DNA
atggtaaaaaatcacaaacgatctaacaataacataggtgatattttcaatatggaaattaagcaagttatcgtt

SEQ ID NO: 668776 - DNA, 75 bp, synthetic construct
  source 1..75: mol_type = other DNA
gcacctgtattctatgaaggagatgttcgagataaggagcttttaaagaaaatatttaccgaacacgatattgat

SEQ ID NO: 668777 - DNA, 75 bp, synthetic construct
  source 1..75: mol_type = other DNA
caggttatataggttctcatactgtactagaactattaagtcgtggtgatgacgttgttgtaatcgataatcttg

SEQ ID NO: 668778 - DNA, 75 bp, synthetic construct
  source 1..75: mol_type = other DNA
atgcattcaatttagggacgggtaaagggtattctgttttagaactaatttcttgctttgaaaaggtatcaggca

SEQ ID NO: 668779 - DNA, 75 bp, synthetic construct
  source 1..75: mol_type = other DNA
cggtgtacggactcacccttgaagagggcgtcagcggcctggcgcggctctatctcgccacgctacaggccattg

SEQ ID NO: 668780 - DNA, 75 bp, synthetic construct
  source 1..75: mol_type = other DNA
gtttatctggttggtacgattttaacgacaactggcgactcggtacagaactggaacgcatctctcaccgcgtcc

SEQ ID NO: 668781 - DNA, 75 bp, synthetic construct
  source 1..75: mol_type = other DNA
atttagcgaaggtaaagggattgttcgtgactggttaactggcctcgaattgcgttcgcgcgatatctggctgga

SEQ ID NO: 668782 - DNA, 75 bp, synthetic construct
  source 1..75: mol_type = other DNA
tggactggaaagccgaagaaactctagaacagatgttattggactcgtggcgttggaaaaaaaattatccagacg

SEQ ID NO: 668783 - DNA, 75 bp, synthetic construct
  source 1..75: mol_type = other DNA
agggggatgttgcggagtcatgggcgtctgctgatttggcacataaaaagctttcctggaaagcggaaaaaaatt

SEQ ID NO: 668784 - DNA, 75 bp, synthetic construct
  source 1..75: mol_type = other DNA
caggatatattggatcccataccatacttgagttacttaataatggtcatgatgtcgtttcgatagataattttg

SEQ ID NO: 668785 - DNA, 75 bp, synthetic construct
  source 1..75: mol_type = other DNA
cgttacttcaacccagtcggggcgcatccgtcaggacgtattggtgaagatcccaatgggatcccgaacaatctg

SEQ ID NO: 668786 - DNA, 75 bp, synthetic construct
  source 1..75: mol_type = other DNA
tttagaggatatgctacgagattcttggaattggcaaataaaaaacccgaaaggctacgatcaaaataaagggag

SEQ ID NO: 668787 - DNA, 75 bp, synthetic construct
  source 1..75: mol_type = other DNA
actgtatatggagagccagataatataccgctaaacgaatcttcgcgagtcggtaatacaacaaatccttatgga

SEQ ID NO: 668788 - DNA, 75 bp, synthetic construct
  source 1..75: mol_type = other DNA
ggactggtgccgctgttgcgtgatgacgaaagtgatttaattctttgggaatcaaacgcgattgtccgttacctt

SEQ ID NO: 668789 - DNA, 75 bp, synthetic construct
  source 1..75: mol_type = other DNA
ctggatatataggttctcacacaactttattattgttagaaaatggttatgatgtaataacattagataacctta

SEQ ID NO: 668790 - DNA, 75 bp, synthetic construct
  source 1..75: mol_type = other DNA
cagggtatataggctcacatactgtcgctactctcttaaaaaaaggtgaatctattgttgtaattgataatttaa

SEQ ID NO: 668791 - DNA, 75 bp, synthetic construct
  source 1..75: mol_type = other DNA
agatattttaatcctgtaggtgctcatgagactggattaattggagaagatcctttaggaactcctaataacctg

SEQ ID NO: 668792 - DNA, 75 bp, synthetic construct
  source 1..75: mol_type = other DNA
tccctgttacagaaaattgtcaaactggtggaactactaatccctatggttactctaaattaatgatagagcaga

SEQ ID NO: 668793 - DNA, 75 bp, synthetic construct
  source 1..75: mol_type = other DNA
tcatctcccaatttggctaatgcagtattaaaatggaaagccaaatactctctggaagatatgcttaaagatgct

SEQ ID NO: 668794 - DNA, 75 bp, synthetic construct
  source 1..75: mol_type = other DNA
accagttgaatattacaatataaatgttacaggcacgctaaaattagttaatgcaatgcttcttgctggtgtgca

SEQ ID NO: 668795 - DNA, 75 bp, synthetic construct
  source 1..75: mol_type = other DNA
attcaaccaacgtaaaaaaagtattgctgacgctcgaagaactggaactaccttatgagcaaattctcgcgggcc

SEQ ID NO: 668796 - DNA, 75 bp, synthetic construct
  source 1..75: mol_type = other DNA
tccattggaatattatgatcacaatgttaacggaactattgttttacttgaagaaatgatgcgcgctggcgttat

SEQ ID NO: 668797 - DNA, 75 bp, synthetic construct
  source 1..75: mol_type = other DNA
tcaatcttggaacaggaaaaggttattcagttttagaactaatttcttgttttgagaaagtaaatggtgtaaaag

SEQ ID NO: 668798 - DNA, 75 bp, synthetic construct
  source 1..75: mol_type = other DNA
actgcactagtaaaacttaagcagaataataccggtacgccagacaaagtcagtttactcgcagaagcctatatc

SEQ ID NO: 668799 - DNA, 75 bp, synthetic construct
  source 1..75: mol_type = other DNA
taaagataaagctctggcggaagcaactgctcttttgatgttaagggaaaagttcaatgccctctgggacaacag

SEQ ID NO: 668800 - DNA, 75 bp, synthetic construct
  source 1..75: mol_type = other DNA
tcctgtacagggaaatcactaccccgtttctggtacggggattttttcccgacgttctatgcctgtcatcttact

SEQ ID NO: 668801 - DNA, 75 bp, synthetic construct
  source 1..75: mol_type = other DNA
gcgggcatttttattacgtttattcggcgcaaaaataggaaaaaacgtagttattcggccgtcagtaaaaattac

SEQ ID NO: 668802 - DNA, 75 bp, synthetic construct
  source 1..75: mol_type = other DNA
tcggtgaatttactcgcgatatgggtaacgtcgaaaaaatcgagctcctcccctaccatgagttaggcaaacata

SEQ ID NO: 668803 - DNA, 75 bp, synthetic construct
  source 1..75: mol_type = other DNA
aaatagatttggtagattggaaaagtattattatatacaactaagaggcgcttttttatcggctattcatcacca

SEQ ID NO: 668804 - DNA, 75 bp, synthetic construct
  source 1..75: mol_type = other DNA
tccaggcactggaaaacatccccggcgaacagcgtcaacttgccgcccagcttgggatgcgtagctggcattttt

SEQ ID NO: 668805 - DNA, 75 bp, synthetic construct
  source 1..75: mol_type = other DNA
tcaccgcgttaattctgctgctactctgttttctgctgtttaccgtgattgaaaaactaccggggcgaaatgtta

SEQ ID NO: 668806 - DNA, 75 bp, synthetic construct
  source 1..75: mol_type = other DNA
cgtattgtgcgtggtgctgaccatgatgctgctgtggagcagtcgcgaactgcgggcgcggcaaaaaatgctggc

SEQ ID NO: 668807 - DNA, 75 bp, synthetic construct
  source 1..75: mol_type = other DNA
ttaggatataaaggaagtatgcagaatttgatagccggtcctttctctgcaacagcaacgctggttgcatcatat

SEQ ID NO: 668808 - DNA, 75 bp, synthetic construct
  source 1..75: mol_type = other DNA
cgatcgcttagtcattcgtgggccagaccagaactattccgaagcgtatacggcgctgacccaggctttttatct

SEQ ID NO: 668809 - DNA, 75 bp, synthetic construct
  source 1..75: mol_type = other DNA
tatcagcagggcgtcgagtgcgcgacgccgcagcgggagcaggcacgctataccactacgctggatcaccagtcg

SEQ ID NO: 668810 - DNA, 75 bp, synthetic construct
  source 1..75: mol_type = other DNA
ttatgagagaaaagttatggatatatataattctttgagtgatatagaagttgattgtatttgccgggaagtgat

SEQ ID NO: 668811 - DNA, 75 bp, synthetic construct
  source 1..75: mol_type = other DNA
ggcaccgagtttgaattaagtacgccggacgattacaccattcttggcgtggttatttcggaagatgtgatctcc

SEQ ID NO: 668812 - DNA, 75 bp, synthetic construct
  source 1..75: mol_type = other DNA
tgtcagccgccgcacgctacaaaacgcgtttcacgctattttaggcattggcccaaacgcgtggctgaaacgcat

SEQ ID NO: 668813 - DNA, 75 bp, synthetic construct
  source 1..75: mol_type = other DNA
cggaaagggtgctgcatatgttgcgtaatcagtcggcgctggaagtgaaggagcagcataaagccgcactgtggg

SEQ ID NO: 668814 - DNA, 75 bp, synthetic construct
  source 1..75: mol_type = other DNA
agtttggtaaggctgctcggacaggtaactggcgtcctttttttgttaaaacagaaaccatcatagcaggtaatg

SEQ ID NO: 668815 - DNA, 75 bp, synthetic construct
  source 1..75: mol_type = other DNA
catcagcctgcagtgcgaaaagtgctgggggataatttgctaatggcgatggggcgatgctggaagaagcgcagc

SEQ ID NO: 668816 - DNA, 75 bp, synthetic construct
  source 1..75: mol_type = other DNA
ccaatggtgacggcggaaagtatcagccaccagagttaccgtcgcttgttgacccgcgcgcgtgaatatgtgctg

SEQ ID NO: 668817 - DNA, 75 bp, synthetic construct
  source 1..75: mol_type = other DNA
aacaggtagattgaaaggagatgtggtaagtgattttattgggtttaatggtagcaaacagataggttatgtttt

SEQ ID NO: 668818 - DNA, 75 bp, synthetic construct
  source 1..75: mol_type = other DNA
tgccatgattttattgattcaaaacatgtaaactcctggctggttgaaccacatgagtgggtggttattaatcgt

SEQ ID NO: 668819 - DNA, 75 bp, synthetic construct
  source 1..75: mol_type = other DNA
acatgagtgggtggttataaatcgttctctcaatgggattgttacagtgccagtatcatcaataaagattcttta

SEQ ID NO: 668820 - DNA, 75 bp, synthetic construct
  source 1..75: mol_type = other DNA
gtgattatccagagttcagctggcacaggaaaggctacggagtacaacaaaaaaatactcaaggaaaataccttg

SEQ ID NO: 668821 - DNA, 75 bp, synthetic construct
  source 1..75: mol_type = other DNA
ttttaaaaagacggttggcgactatcttgcgtgggaggtgtcaaaacttcttcaggggcgtgatgcgtcagaaaa

SEQ ID NO: 668822 - DNA, 75 bp, synthetic construct
  source 1..75: mol_type = other DNA
ccagcgaccagcgaccagcgaccagcgaccagcgaccagcgaccagcgaccagcgaccagcagtaaatcaagaaa

SEQ ID NO: 668823 - DNA, 75 bp, synthetic construct
  source 1..75: mol_type = other DNA
ttcctcgctggataacatgattgcccaggggaacccgatgccggtgccttacggtgaaatgctggttggctcacg

SEQ ID NO: 668824 - DNA, 75 bp, synthetic construct
  source 1..75: mol_type = other DNA
tggccggggccggaaagggtggactgcagattgtgctgggggcggcggccatcgtggggtcgttcttcacggccg

SEQ ID NO: 668825 - DNA, 75 bp, synthetic construct
  source 1..75: mol_type = other DNA
tccatattgtgccgcgactggccggagccggaaagggtggactgcagattgtgctgggggcggcagccatcgtgg

SEQ ID NO: 668826 - DNA, 75 bp, synthetic construct
  source 1..75: mol_type = other DNA
attgcccaggggaacccgatgccggtgccttacggggaaatgctggttggctcccgccgtatatccctggacatc

SEQ ID NO: 668827 - DNA, 75 bp, synthetic construct
  source 1..75: mol_type = other DNA
cagcaatattatgttttccatgggggctgccatgtcgctgggtggtgtggcccagatgctggccccgaaggcaaa

SEQ ID NO: 668828 - DNA, 75 bp, synthetic construct
  source 1..75: mol_type = other DNA
gacagactgttatacgctgttccgcgatgcctatcatcttgcaggtatcgatttgccggatttttaccgacatga

SEQ ID NO: 668829 - DNA, 75 bp, synthetic construct
  source 1..75: mol_type = other DNA
gcttttaccgggtgcccctgtcctctgcacaggcgggcgatattctgctgtgctgttttggttcatcggtgccga

SEQ ID NO: 668830 - DNA, 75 bp, synthetic construct
  source 1..75: mol_type = other DNA
ggtgacggactgttacacgctgttccgggatgcctaccatctggcgggaattgatatgccggattttgagcgtga

SEQ ID NO: 668831 - DNA, 75 bp, synthetic construct
  source 1..75: mol_type = other DNA
tttcgccgtcagatgaacgaaggctggtaccagatacgtattgccggtgaggataccgcgccggaggcggtgtat

SEQ ID NO: 668832 - DNA, 75 bp, synthetic construct
  source 1..75: mol_type = other DNA
cacggataacggcagacagaacacgtacttttcctcgctggataacatgattgcacaggggaacccgatgccggt

SEQ ID NO: 668833 - DNA, 75 bp, synthetic construct
  source 1..75: mol_type = other DNA
acggcagcggaagccatccgggcgctgtcgttacaggtgcccggattccgccgtcagatgaacgaaggctggtac

SEQ ID NO: 668834 - DNA, 75 bp, synthetic construct
  source 1..75: mol_type = other DNA
acggcgggcaataaaattgaactgaccgattttggcgtgctttccggtcagtggctgattgataaatcgactcac

SEQ ID NO: 668835 - DNA, 75 bp, synthetic construct
  source 1..75: mol_type = other DNA
gcgcgataccatcaaccggatttaccggtctgcaaaagtcaaacatcagaacagtaaagataaaaaattaattgt

SEQ ID NO: 668836 - DNA, 75 bp, synthetic construct
  source 1..75: mol_type = other DNA
cgaactggaggtggccagaggcccggtaacccgaacccgccgccaacggggcaaaccggcaaaaacacagacgct

SEQ ID NO: 668837 - DNA, 75 bp, synthetic construct
  source 1..75: mol_type = other DNA
gggcggcggatcaggggacggcacaggtgaaagccgaggcggcgctggatgatcataacgagtatcagcagaccg

SEQ ID NO: 668838 - DNA, 75 bp, synthetic construct
  source 1..75: mol_type = other DNA
cggacaaaatccagtcgtggtttcgagagcaccacgctggcggctatagccggacggattgccaaaaagcatcag

SEQ ID NO: 668839 - DNA, 75 bp, synthetic construct
  source 1..75: mol_type = other DNA
atggctgagataaacagcactgcgcaagccacatcagcgttaaccggcgtcagcgatgtgctgacgccggtattc

SEQ ID NO: 668840 - DNA, 75 bp, synthetic construct
  source 1..75: mol_type = other DNA
atgtcgataaactttatgtccgcagcgccaacggcgaaatggtgccattctcggcctttaccacttcacattggg

SEQ ID NO: 668841 - DNA, 75 bp, synthetic construct
  source 1..75: mol_type = other DNA
ggaatcgttagtgaagcagctgccaaacggctttggtctggagtggacggcgatgtcgtatcaggagcggctttc

SEQ ID NO: 668842 - DNA, 75 bp, synthetic construct
  source 1..75: mol_type = other DNA
aacggtatatggatgtgtcgttcacatgccgcactcattgattctgacaaatatgcctattccgttgagcaatta

SEQ ID NO: 668843 - DNA, 75 bp, synthetic construct
  source 1..75: mol_type = other DNA
tcggacaccattgacgtggagctggaggattcggacggtcgctggatggataaatggtatccgggtaaaggtgac

SEQ ID NO: 668844 - DNA, 75 bp, synthetic construct
  source 1..75: mol_type = other DNA
tcagaaccatgagccatgacgcggcatgggaacaggcagatcacaatggtgagatgtctttggaatcgatagttg

SEQ ID NO: 668845 - DNA, 75 bp, synthetic construct
  source 1..75: mol_type = other DNA
atcgggaaaccaggctcccgctctggtagcaatttcctttgtggttgttttcctgtgccttgctgcactctatga

SEQ ID NO: 668846 - DNA, 75 bp, synthetic construct
  source 1..75: mol_type = other DNA
gggaaatgctggttggctcccgccgtatatcccaggacatcagcacccgtgatgaaggcgggggcggaaaggtcg

SEQ ID NO: 668847 - DNA, 75 bp, synthetic construct
  source 1..75: mol_type = other DNA
gcttatcatctggcggggactgaaatgccggattttcatcgcgaggatgactggtggcgcaacggccagaacctg

SEQ ID NO: 668848 - DNA, 75 bp, synthetic construct
  source 1..75: mol_type = other DNA
aaaacgtataccgaagcagaatgcaaagccctcctgaataaagaccttgccacggtcgccagacaaataaacccg

SEQ ID NO: 668849 - DNA, 75 bp, synthetic construct
  source 1..75: mol_type = other DNA
tggcacacacccggcggtgtgtgcctgcggagtcgtgcggcttcgtggtgagaacgccggagggggagcggtatt

SEQ ID NO: 668850 - DNA, 75 bp, synthetic construct
  source 1..75: mol_type = other DNA
aggcaaaaacaccggagtacagggcgacggataacggtaaacagaacacgtatttttcctcactggacaacatga

SEQ ID NO: 668851 - DNA, 75 bp, synthetic construct
  source 1..75: mol_type = other DNA
tgcccgtcttaatgagccgctggcaaatggtgcagtgatccacatcgtgccgcgtctggcgggtgccaaaagtgg

SEQ ID NO: 668852 - DNA, 75 bp, synthetic construct
  source 1..75: mol_type = other DNA
ggtgacggactgttacacgctgttccgggatgcataccatctggcgggaattgatatgccggattttcatcgcga

SEQ ID NO: 668853 - DNA, 75 bp, synthetic construct
  source 1..75: mol_type = other DNA
gttttcacttggagccagcatgattctgggcggtgtggcccagatgctggccccgaaggcaaaaacaccggatta

SEQ ID NO: 668854 - DNA, 75 bp, synthetic construct
  source 1..75: mol_type = other DNA
tggtgtggcacagatgctggccccgaagccaaaaacaccggaatacagggcaacggataacggtaaacagaacac

SEQ ID NO: 668855 - DNA, 75 bp, synthetic construct
  source 1..75: mol_type = other DNA
gatgctggccccgaaggctaaagtaccggagtacaaaagcacggataacggcagacagaacacgtacttttcctc

SEQ ID NO: 668856 - DNA, 75 bp, synthetic construct
  source 1..75: mol_type = other DNA
cataaattccgctgtgtaccacatctgacaggacggcgctttgagcacggggtgacggactgttacacgctgttc

SEQ ID NO: 668857 - DNA, 75 bp, synthetic construct
  source 1..75: mol_type = other DNA
attgcccaggggaacccgatgccggtgccttacggtgaaatgctggttggctcccggcgaatctctcaggacatc

SEQ ID NO: 668858 - DNA, 75 bp, synthetic construct
  source 1..75: mol_type = other DNA
acgtatttttcgtcactggacaacatgattgcccagggtaacccgatgccggtgccttacggggaaatgctggtt

SEQ ID NO: 668859 - DNA, 75 bp, synthetic construct
  source 1..75: mol_type = other DNA
gtgccctgtcgctgcagatgccgggattccgccgtcagatgaacgaaggctggtaccagatacgtattgccggtg

SEQ ID NO: 668860 - DNA, 75 bp, synthetic construct
  source 1..75: mol_type = other DNA
accagatacgtattgccggttatgacacggcaccggaggcggtgtatgcccgccttcacgaacaactgggtgagg

SEQ ID NO: 668861 - DNA, 75 bp, synthetic construct
  source 1..75: mol_type = other DNA
agggaacggtcatccacattgtgccgcgactggccggtgccggaaagggaggactgcagattgtgctgggggcag

SEQ ID NO: 668862 - DNA, 75 bp, synthetic construct
  source 1..75: mol_type = other DNA
agggaacggtcatccacattgtgccgcgactggccggagccggaaagggtggactgcagattgtgctgggggcag

SEQ ID NO: 668863 - DNA, 75 bp, synthetic construct
  source 1..75: mol_type = other DNA
agggaacggtcatccacattgtgccgcgactggccggagccggaaagggaggactgcagattgtgctgggggctg

SEQ ID NO: 668864 - DNA, 75 bp, synthetic construct
  source 1..75: mol_type = other DNA
gccggaggcgtattttcgtatcgccccggaagactggctgcgggcagagatgcagggggagattgtggctctggt

SEQ ID NO: 668865 - DNA, 75 bp, synthetic construct
  source 1..75: mol_type = other DNA
gccggaggtgtattttcgtatcgcaccggaagactggctgcgggcagagatgcagggggagattgtggccctggt

SEQ ID NO: 668866 - DNA, 75 bp, synthetic construct
  source 1..75: mol_type = other DNA
gccggaggagtattttcgtatcgctccggaagactggctgcgggcagagatgcagggggagattgtggccctggt

SEQ ID NO: 668867 - DNA, 75 bp, synthetic construct
  source 1..75: mol_type = other DNA
ctcccggcgaatctcccaggacatcagtacccgtgatgaaggcggggacgggaagatggtggttatcgggcggca

SEQ ID NO: 668868 - DNA, 75 bp, synthetic construct
  source 1..75: mol_type = other DNA
cgtcctgtgcacaggcgggcgatatcctgctgtgctgctttggttcatcggtgccgaatcatgccgccatttact

SEQ ID NO: 668869 - DNA, 75 bp, synthetic construct
  source 1..75: mol_type = other DNA
agtcattaatcttttattcactgcagcgatgaccggacaccaggtgtggacttcattgcatgcaaataatgcgat

SEQ ID NO: 668870 - DNA, 75 bp, synthetic construct
  source 1..75: mol_type = other DNA
gtgccaatttcgcaggcagtttgtgaggcgatcaaaaccagagaaacaggcggcttgtttgaggtgaagtaccgg

SEQ ID NO: 668871 - DNA, 75 bp, synthetic construct
  source 1..75: mol_type = other DNA
atgtttagcgttgtttatcacccggaagctagggaagaagccacagcattacccttaaaaatcagggtgaagttt

SEQ ID NO: 668872 - DNA, 75 bp, synthetic construct
  source 1..75: mol_type = other DNA
tgtgaaagtggatcgcgaagcacgccgcctggcgggttatcgttacggtcgccagattgccgatgatttcctgac

SEQ ID NO: 668873 - DNA, 75 bp, synthetic construct
  source 1..75: mol_type = other DNA
atggcgatatggtgcagccgctgcgtgtgaaagtggatcgcgaagcacgccgcctggcgggttatcgttacggtc

SEQ ID NO: 668874 - DNA, 75 bp, synthetic construct
  source 1..75: mol_type = other DNA
acttatcgcggaaggtaaacgtcaggaggctatttcatactggcttaacgatctgaaaggtttatccatgaaaga

SEQ ID NO: 668875 - DNA, 75 bp, synthetic construct
  source 1..75: mol_type = other DNA
tccggctttactggctggctatatcactgaacgcataacccggttatcccatagtcgctggcaggcgtatttctg

SEQ ID NO: 668876 - DNA, 75 bp, synthetic construct
  source 1..75: mol_type = other DNA
gggccaggcgctggagatgagcggcatgttgatcctcgctatgccggggattgtgctggcaacgggcttcttttt

SEQ ID NO: 668877 - DNA, 75 bp, synthetic construct
  source 1..75: mol_type = other DNA
ctgccgatggcgagccgtttattactccaggcactggaaaacattcccggcgaacaacgtcagcttgccgcccaa

SEQ ID NO: 668878 - DNA, 75 bp, synthetic construct
  source 1..75: mol_type = other DNA
atatcagagcggtgagcgcatttttttgctgaggattttcattaaaaaatcccccaaaactccaccggcagagat

SEQ ID NO: 668879 - DNA, 75 bp, synthetic construct
  source 1..75: mol_type = other DNA
actctgaccggcgacgatcgacgtgtagcactgctatgcctcagcactggcgcacgctggggtgaaggcagcacg

SEQ ID NO: 668880 - DNA, 75 bp, synthetic construct
  source 1..75: mol_type = other DNA
cccggccttactggctggctatatcaccgaacgcataacccggttgttccatattcgctggctggcaggcgtatt

SEQ ID NO: 668881 - DNA, 75 bp, synthetic construct
  source 1..75: mol_type = other DNA
aaatcgtcccggtggatgtctacattccggggtgcccgccaacgcctgccgccacgctgtacggctttgcaatgg

SEQ ID NO: 668882 - DNA, 75 bp, synthetic construct
  source 1..75: mol_type = other DNA
tccagaagtcgcttctctattcccgataaagtacagtccatacgtctgcagtataatccgttgggtaatggtgga

SEQ ID NO: 668883 - DNA, 75 bp, synthetic construct
  source 1..75: mol_type = other DNA
agtgttcgttttatgcgagaggttgcatcaagaagaggaataggaacattacgagaatatcatgttaatttaaaa

SEQ ID NO: 668884 - DNA, 75 bp, synthetic construct
  source 1..75: mol_type = other DNA
taaagaagctgttgaccactgggtgaatagcttgggggggataacaatggcagagcatgcatggttaaaagttat

SEQ ID NO: 668885 - DNA, 75 bp, synthetic construct
  source 1..75: mol_type = other DNA
atattatttaataaaccagtacacactggggatggtttatcacattagcatggtttcacctgaggctttggaagc

SEQ ID NO: 668886 - DNA, 75 bp, synthetic construct
  source 1..75: mol_type = other DNA
ctggaccaaagtcatggagcgtaaaaagcgcccgcagacacgctatcaactgtacggcgaactggcgctggcaca

SEQ ID NO: 668887 - DNA, 75 bp, synthetic construct
  source 1..75: mol_type = other DNA
acaaccgtaaagcaaagattctgttagttcgcagaaacgatccaggcgtatggcagtgggtgagactcagcaacc

SEQ ID NO: 668888 - DNA, 75 bp, synthetic construct
  source 1..75: mol_type = other DNA
atggcgatatggtgcagccgctgcgcgtgaaagtggatcgcgaagcacgccgcctggcgggttaccgttacggtc

SEQ ID NO: 668889 - DNA, 75 bp, synthetic construct
  source 1..75: mol_type = other DNA
tactgcgtgtggggcggtacggataaaattgtccctgtggatgtttatatccctggctgcccgccaacgcctgcc

SEQ ID NO: 668890 - DNA, 75 bp, synthetic construct
  source 1..75: mol_type = other DNA
tgcgaaatcgaaattttcgccactttatcgccgctgtttgatgcagaacgcttcggcattaaagtcgttccttca

SEQ ID NO: 668891 - DNA, 75 bp, synthetic construct
  source 1..75: mol_type = other DNA
aatagtggcacgatctcgttattacaaaatggtaaagatccggcaccgtctcccattgttttactggctactaac

SEQ ID NO: 668892 - DNA, 75 bp, synthetic construct
  source 1..75: mol_type = other DNA
agggttagtcgctcaatcgaatagcacaattatcaatactgaaccgccccgggtttcctggagagtgttttatct

SEQ ID NO: 668893 - DNA, 75 bp, synthetic construct
  source 1..75: mol_type = other DNA
ccactcccaccgacaccccctgatgatgaatcagacgacactccagttcccccaactcctggcggagatgagata

SEQ ID NO: 668894 - DNA, 75 bp, synthetic construct
  source 1..75: mol_type = other DNA
caacgatttaagcgagaaaaccggcagccacgacattgtgcgcctgcatcggttaattttgcagatgaaccgtgc

SEQ ID NO: 668895 - DNA, 75 bp, synthetic construct
  source 1..75: mol_type = other DNA
aaaatctattgggcaaccaagtgataacgaagaaactgagttcgaggaagttgaggaagggctaagtaacgagat

SEQ ID NO: 668896 - DNA, 75 bp, synthetic construct
  source 1..75: mol_type = other DNA
ccccctatctgcttcgcgggtatcaggatattttacctgatgcccccgaacgcatcttccagctgacggagaagg

SEQ ID NO: 668897 - DNA, 75 bp, synthetic construct
  source 1..75: mol_type = other DNA
cagggcaacaccatcaccggtgcaatgggcggtatggtcaaaaatcctgagctgaccgccaaaaagaacaggagt

SEQ ID NO: 668898 - DNA, 75 bp, synthetic construct
  source 1..75: mol_type = other DNA
caggaattacgaattcattgtgttagtgttcgtcttaacaatgctgaattggacaagcttaatacattgagggag

SEQ ID NO: 668899 - DNA, 75 bp, synthetic construct
  source 1..75: mol_type = other DNA
aaccaatacataaatgaaaaattcaataatgaagtctttgttgataactttctttcagtattagataatatagaa

SEQ ID NO: 668900 - DNA, 75 bp, synthetic construct
  source 1..75: mol_type = other DNA
aagcaatggaaaaaatacgggtctattttgacaggaatttgtgtcgattcctccccccaaaagagagtattttct

SEQ ID NO: 668901 - DNA, 75 bp, synthetic construct
  source 1..75: mol_type = other DNA
agctcaaaggtggtaaggttaccagcgcagactcactgaaagttaacagccgtgtcagcgacccggacagtgccc

SEQ ID NO: 668902 - DNA, 75 bp, synthetic construct
  source 1..75: mol_type = other DNA
cggctacaccacagagctggaagtggcacgggggccgatcacacagggcaaggcgaagaaaggtaaaaaaatcgg

SEQ ID NO: 668903 - DNA, 75 bp, synthetic construct
  source 1..75: mol_type = other DNA
tttgggcagttatccgggccatggctcataaccactgcccgccatgcgtttgaccgtaacagcggctacaccaca

SEQ ID NO: 668904 - DNA, 75 bp, synthetic construct
  source 1..75: mol_type = other DNA
agccgccagcgtctgattggcctggcggggcagaagaaaaccactaacccgtttctgaaaatcatcgaatcatga

SEQ ID NO: 668905 - DNA, 75 bp, synthetic construct
  source 1..75: mol_type = other DNA
gaacgaccaaaaagcggaacaaaacagcccaaatgcgttacaaaacgagccagaaacgaaacagcctgagccagt

SEQ ID NO: 668906 - DNA, 75 bp, synthetic construct
  source 1..75: mol_type = other DNA
gccaatatcagcctgcctgacgccagtcagttgctcgctgcatcacgtggtgaatttgttgcagggattagcgac

SEQ ID NO: 668907 - DNA, 75 bp, synthetic construct
  source 1..75: mol_type = other DNA
gaagcgacgcaggctattgctcgccagttacggttgcgtaacctgggcgggatcatcattattgatttcatcgac

SEQ ID NO: 668908 - DNA, 75 bp, synthetic construct
  source 1..75: mol_type = other DNA
aggttgcacgctggctggaagcggaaaacgatccgcgtctgaacgagattgtcagccatctgaatcatgttgttg

SEQ ID NO: 668909 - DNA, 75 bp, synthetic construct
  source 1..75: mol_type = other DNA
accagtacagaagcgttattacccgttctggaccaggtgcgcgagcaggggtatggcgaagataacgaagagcag

SEQ ID NO: 668910 - DNA, 75 bp, synthetic construct
  source 1..75: mol_type = other DNA
ctgggcgaagagcgtgaaatagggataaccgagctgtcacagcgcgtcatgatgtcaaaaagcaccgtttatcgc

SEQ ID NO: 668911 - DNA, 75 bp, synthetic construct
  source 1..75: mol_type = other DNA
aaaaagatcattcccgatcttaaattcactgccgctttcgggcgtgggcgctacgtttgcccgcgaaacctgacg

SEQ ID NO: 668912 - DNA, 75 bp, synthetic construct
  source 1..75: mol_type = other DNA
cgtttcttgacgacgaactgacgccaaataatcaggaagagcaaaaacgttgtgcgaagctgaagggcgatctcg

SEQ ID NO: 668913 - DNA, 75 bp, synthetic construct
  source 1..75: mol_type = other DNA
attaataccaaagcctggaaagctttaactgatatatcgcaaaagctaaatcgaattgcgacccatatagattgt

SEQ ID NO: 668914 - DNA, 75 bp, synthetic construct
  source 1..75: mol_type = other DNA
cagcggaggtgagcttaccaaaacagaaatcttcgctataaagcgtcagatatcagagcttcgctcatgcctcac

SEQ ID NO: 668915 - DNA, 75 bp, synthetic construct
  source 1..75: mol_type = other DNA
ccgatgccgcttatctgaaacgcgtctggaccaaagttatggagcgtaaaaagcgcccgcagacccgttatcagc

SEQ ID NO: 668916 - DNA, 75 bp, synthetic construct
  source 1..75: mol_type = other DNA
gccgagctggaccgcattcgcgttgactcgcgcctgacttacgaagcattgctggagtttacttcggagtacatt

SEQ ID NO: 668917 - DNA, 75 bp, synthetic construct
  source 1..75: mol_type = other DNA
agatcgttgtaagtaagcattcccgtaatgaaagcgttaacgaagcgaagctctcacaaagccagcttcgttctc

SEQ ID NO: 668918 - DNA, 75 bp, synthetic construct
  source 1..75: mol_type = other DNA
ctcactaacacagacagaaatctttgctgtgaagcgccagatttctgagcttcgcatgaatcttgtcagtgcaaa

SEQ ID NO: 668919 - DNA, 75 bp, synthetic construct
  source 1..75: mol_type = other DNA
ccagggtagctctctgacgcaaacagaactattcgcagtgaagcgccagatctctgagcttcgcataaatcttgt

SEQ ID NO: 668920 - DNA, 75 bp, synthetic construct
  source 1..75: mol_type = other DNA
tgtataatttaggaacaggcaaaggttactcagtactggagctagtaaaaacttttgaaaagatttctaaccgta

SEQ ID NO: 668921 - DNA, 75 bp, synthetic construct
  source 1..75: mol_type = other DNA
atgccatggccggtatgcagactcgcttgcatctgatcgccaacgaacccggtacttatgacggtatttccgcca

SEQ ID NO: 668922 - DNA, 75 bp, synthetic construct
  source 1..75: mol_type = other DNA
tcttgatggctgttggtttcgcctggaagtatcgtgcgagcaataaagatgctaagtacagcccgaactggtcac

SEQ ID NO: 668923 - DNA, 75 bp, synthetic construct
  source 1..75: mol_type = other DNA
acgacgcatgatcgtagaaacccacagcgccgcgtcagtctgcgcaatggtacgggcgggggtaggtgtttcggt

SEQ ID NO: 668924 - DNA, 75 bp, synthetic construct
  source 1..75: mol_type = other DNA
atgcaaggccgccgacaattcgttatcatgcccgctaaatttaacgacaaggccgtggacattatcatgctgtgg

SEQ ID NO: 668925 - DNA, 75 bp, synthetic construct
  source 1..75: mol_type = other DNA
gctaagtacagcccgaactggtcacactccaataaagtggaagctgtggtctggacggtgcctatcttaatcatc

SEQ ID NO: 668926 - DNA, 75 bp, synthetic construct
  source 1..75: mol_type = other DNA
atgccatggccggtatgcagactcgcctgcatctgatcgccaacgaacccggtacttatgacggtatctccgcca

SEQ ID NO: 668927 - DNA, 75 bp, synthetic construct
  source 1..75: mol_type = other DNA
cttgcggaggcgcggttgcgacctctacgatggcggcggaagaaattaaagagttgtgtcagagtcataatattc

SEQ ID NO: 668928 - DNA, 75 bp, synthetic construct
  source 1..75: mol_type = other DNA
ggatgtagataattatgataaatgccatatattcttgcttgcaacagaaagcaatattctaacaatttttcaact

SEQ ID NO: 668929 - DNA, 75 bp, synthetic construct
  source 1..75: mol_type = other DNA
aaagaattagttttttcgacaacaacggataccatatttgaaaatagcaattttataaacactgtaacatcatta

SEQ ID NO: 668930 - DNA, 75 bp, synthetic construct
  source 1..75: mol_type = other DNA
ccagggcgaactgtctattgcctgcctgccggtcttttcgcagtcttttttaccgccgctgctgcaatcctttct

SEQ ID NO: 668931 - DNA, 75 bp, synthetic construct
  source 1..75: mol_type = other DNA
gcgtcatgatttaggactcactgaaacgctccatacgcctgcgggaacagaacgtaccgaattactctctttaga

SEQ ID NO: 668932 - DNA, 75 bp, synthetic construct
  source 1..75: mol_type = other DNA
gaggggatctctcagggcgcggttgcgacctctacgatggcggcggaagaaattaaagagttgtgtcagaatcat

SEQ ID NO: 668933 - DNA, 75 bp, synthetic construct
  source 1..75: mol_type = other DNA
gtgaacggttttctggacccggtggatttccgtggacaactggttacggtagttgggccaatcactggtgcggtt

SEQ ID NO: 668934 - DNA, 75 bp, synthetic construct
  source 1..75: mol_type = other DNA
ggcttacagtgatgagttgtcaaacagcgatgtagcaaatccggaacatttcctcactgcgtatcaaaatcaaca

SEQ ID NO: 668935 - DNA, 75 bp, synthetic construct
  source 1..75: mol_type = other DNA
tggtcagatatttcgctgtaaagtgaaagcattacaggaaggtgagaaatcctataccgccgtaattaagggcaa

SEQ ID NO: 668936 - DNA, 75 bp, synthetic construct
  source 1..75: mol_type = other DNA
ggcgcgcaaggatggctggcgaataagcaaagacaaaacgcgtgcttttgcgcccgggcataaagttttgagggt

SEQ ID NO: 668937 - DNA, 75 bp, synthetic construct
  source 1..75: mol_type = other DNA
cgtcatgggctggctgtgcaaaagaggcgcgcaaggatggctggcgaataagcaaagacaaaacgcgtgcttttt

SEQ ID NO: 668938 - DNA, 75 bp, synthetic construct
  source 1..75: mol_type = other DNA
tgcatctctattgttactgccgcaagtgtacggaaggtgtatatccagtgccagacttcggagagtatatcggta

SEQ ID NO: 668939 - DNA, 75 bp, synthetic construct
  source 1..75: mol_type = other DNA
aaaacgaagatatcgaccgagaagatttcgcccagcgttttgatgccgatttcatcctgatgaccggtgaactgg

SEQ ID NO: 668940 - DNA, 75 bp, synthetic construct
  source 1..75: mol_type = other DNA
gggctgaccgtgctgcgcgggcgcgggattattgaaacggcgcagggtcgcgattctcgtgtcgcacggcttaat

SEQ ID NO: 668941 - DNA, 75 bp, synthetic construct
  source 1..75: mol_type = other DNA
cgcatcattgcagcggttgagctggacgaccgctctcatcaggcaccgaaacgtcagcggcgtgacctgctgctg

SEQ ID NO: 668942 - DNA, 75 bp, synthetic construct
  source 1..75: mol_type = other DNA
ccattcttctgggcgggtttgtgctcctgcttcgtcaggccggtcgggccaggcatccacttctgcagtcgttgc

SEQ ID NO: 668943 - DNA, 75 bp, synthetic construct
  source 1..75: mol_type = other DNA
agcgcaacaattttatgaaatactctggagcgatttgttaataaccacaccagacaaagattttaaagggatttt

SEQ ID NO: 668944 - DNA, 75 bp, synthetic construct
  source 1..75: mol_type = other DNA
gcaacgtctggggctgaaacgcacgactctgctgtcacggatgaagcgactgggaattgataaatcggcattgat

SEQ ID NO: 668945 - DNA, 75 bp, synthetic construct
  source 1..75: mol_type = other DNA
gcgataacttccgcatcctggtcgccatcaccaacgcggtgctttcccgcctggatatggacgaactggtcagcg

SEQ ID NO: 668946 - DNA, 75 bp, synthetic construct
  source 1..75: mol_type = other DNA
ttccgctgttggcgaaagccttcaccttcaaaatagcccgccgtctggggcgcaatattgacagtattccagccg

SEQ ID NO: 668947 - DNA, 75 bp, synthetic construct
  source 1..75: mol_type = other DNA
ccgttgcgcgagcgcccggaagatattccattgctggcgaaagcatttaccttcaagattgcccgccgcctggga

SEQ ID NO: 668948 - DNA, 75 bp, synthetic construct
  source 1..75: mol_type = other DNA
ttgtctctgtcgtcaccgaacaaattcagaatcgcgtcgtcaacaatgtcgactacgagttgttatgccgggaac

SEQ ID NO: 668949 - DNA, 75 bp, synthetic construct
  source 1..75: mol_type = other DNA
tctcgataaacagcatcccactcacgaacagagtgaagttgatgaggccggaaccctcaccgagcgcgtatttaa

SEQ ID NO: 668950 - DNA, 75 bp, synthetic construct
  source 1..75: mol_type = other DNA
gaacgtattcccgattcacctgccgccactacgcgagcgtccggaagatattccgctgctggcgaaagcctttac

SEQ ID NO: 668951 - DNA, 75 bp, synthetic construct
  source 1..75: mol_type = other DNA
ctgcccaccagcctcgttatcgcattctttgagctgcgtcatttatatcaactcatcacgcgtagcaattctcta

SEQ ID NO: 668952 - DNA, 75 bp, synthetic construct
  source 1..75: mol_type = other DNA
ataacgcccacgttcaggtcacctttctggtggagaaactctcccccgcatggcaacgacgagtcggtgatgctg

SEQ ID NO: 668953 - DNA, 75 bp, synthetic construct
  source 1..75: mol_type = other DNA
agtgagcgaaacggtcgtcgaatggtgaaaatgaactgcgccgccatgcctgccggattgctggaaagcgatctg

SEQ ID NO: 668954 - DNA, 75 bp, synthetic construct
  source 1..75: mol_type = other DNA
tcgtttctgtcgtcaccgaacaaatccagagccgcgtcgtcaataatgtcgactatgagttgttatgccgggagc

SEQ ID NO: 668955 - DNA, 75 bp, synthetic construct
  source 1..75: mol_type = other DNA
gttcgacacctggggcaaccagattcaaaccttgtgcctgttaccgctgatgtctggcgacaccatgctgggcgt

SEQ ID NO: 668956 - DNA, 75 bp, synthetic construct
  source 1..75: mol_type = other DNA
tgaaaatgaactgcgcggcgatgcctgccggattactggaaagcgatctgtttggtcatgaacgtggtgccttta

SEQ ID NO: 668957 - DNA, 75 bp, synthetic construct
  source 1..75: mol_type = other DNA
agcgctggcctggctgaaagatgtcatgaacggcaatgtgccggtaggtgtggatacgaacggtgcggcccctga

SEQ ID NO: 668958 - DNA, 75 bp, synthetic construct
  source 1..75: mol_type = other DNA
gactggacgtgacattcccaccggaaagcgagtggcgtttaggatttagttcaaatgacgataaaaaatgggcga

SEQ ID NO: 668959 - DNA, 75 bp, synthetic construct
  source 1..75: mol_type = other DNA
ggcattaagcaaccgactcttgcaaaaatggagcaggcagataacgatcctcggttgtctacgctaaaacgctat

SEQ ID NO: 668960 - DNA, 75 bp, synthetic construct
  source 1..75: mol_type = other DNA
tctcaagtttgcaaaaacacttttaataaattaacgcaattttttgattcaaacattctttacatccaagactgt

SEQ ID NO: 668961 - DNA, 75 bp, synthetic construct
  source 1..75: mol_type = other DNA
taccagaacaactaaccccagtgctcttgcgaggcgataagtgggactctgtttggtcagaactgacagataacg

SEQ ID NO: 668962 - DNA, 75 bp, synthetic construct
  source 1..75: mol_type = other DNA
tgcgggcgcgttaccgcgaggattttctcaggtcattactgaccgtgccccgttcggatgaaccggacacaagca

SEQ ID NO: 668963 - DNA, 75 bp, synthetic construct
  source 1..75: mol_type = other DNA
tcaattcgtggcattcggtctcgcctggttagtattttcattgaccggtagcactcctgtctcagtcattacatt

SEQ ID NO: 668964 - DNA, 75 bp, synthetic construct
  source 1..75: mol_type = other DNA
aaatcattcagacggacgtacgtttaattgccgcgactaaccgcgatctgaaaaaaaatggtcgccgaccgagag

SEQ ID NO: 668965 - DNA, 75 bp, synthetic construct
  source 1..75: mol_type = other DNA
tgccggattgttggaaagcgatctgtttggccatgagcgtggtgcgtttaccggagccagcgcccagcgtatcgg

SEQ ID NO: 668966 - DNA, 75 bp, synthetic construct
  source 1..75: mol_type = other DNA
ttctcgcggtcgcatttatgccgatgtgaatggttttcttgatccggtcgatttccgtgggcagctggtgacagt

SEQ ID NO: 668967 - DNA, 75 bp, synthetic construct
  source 1..75: mol_type = other DNA
gcacttctgtttcagtcattacgttttttgccagcatcattattcttatctgtataattaaaaagacatatgcaa

SEQ ID NO: 668968 - DNA, 75 bp, synthetic construct
  source 1..75: mol_type = other DNA
cggcgtaaaaatatgcaccggatgccatgcaaaagtggcctatggtgaaagtccgctcagtgtggccttcctgtt

SEQ ID NO: 668969 - DNA, 75 bp, synthetic construct
  source 1..75: mol_type = other DNA
tgctgctggtggatcactccaggataccctgtctgtgatcggcaagaacgtcacatgcagtgacctgaacgcgcc

SEQ ID NO: 668970 - DNA, 75 bp, synthetic construct
  source 1..75: mol_type = other DNA
cgtattatcaacgtattcagacacagtcagcaggtgctcatacccactcgctgtctggtactgcagcaagttctg

SEQ ID NO: 668971 - DNA, 75 bp, synthetic construct
  source 1..75: mol_type = other DNA
tgttccggttgagactgaatcagatccgatgaacgtcacttttgacaagctggcccctgaagtacagaacgctgt

SEQ ID NO: 668972 - DNA, 75 bp, synthetic construct
  source 1..75: mol_type = other DNA
gacaaaaaacagttttacatttttctgttcctattatactgtttatataaacagtgggtgtatatacagtttttg

SEQ ID NO: 668973 - DNA, 75 bp, synthetic construct
  source 1..75: mol_type = other DNA
atggcgtcaatggtactaaggctgctgtttaacattttgtgctttattgaccgacatcagtacatccaattaact

SEQ ID NO: 668974 - DNA, 75 bp, synthetic construct
  source 1..75: mol_type = other DNA
ggaacaaatcagagcgcaactgatactctctcgtcgccagtaccagaaactgatgcagtggaaacggcaattccg

SEQ ID NO: 668975 - DNA, 75 bp, synthetic construct
  source 1..75: mol_type = other DNA
acgaacgcgaaagcctcggaaaccagcgcagaatcctcaaaaacggctgccgcatcgtccgccagttcggcggcg

SEQ ID NO: 668976 - DNA, 75 bp, synthetic construct
  source 1..75: mol_type = other DNA
gcagcggcagcacagagcaaaagtacggcagaatccgcagcaacgcgcgctgagacagcggcaaaacgtgcagag

SEQ ID NO: 668977 - DNA, 75 bp, synthetic construct
  source 1..75: mol_type = other DNA
ctgtcggtattggtgctcatacgcactccgttgcgattggttcacatggacataccatcaccgttaacgctgctg

SEQ ID NO: 668978 - DNA, 75 bp, synthetic construct
  source 1..75: mol_type = other DNA
ttccagtggtgctccgggaagtggatcacctgattactctaaatacagtgttaacacttcttctgcaggcgctca

SEQ ID NO: 668979 - DNA, 75 bp, synthetic construct
  source 1..75: mol_type = other DNA
ccggagtcggaagttgccggaccctgcagatgaaggcgcattacagaaatggtggtctgttctaccgttcttcaa

SEQ ID NO: 668980 - DNA, 75 bp, synthetic construct
  source 1..75: mol_type = other DNA
tgttcctattatactgtttatataaacagtgggtgtatatacagtttttgtgtatccgtgtaatgataggaggga

SEQ ID NO: 668981 - DNA, 75 bp, synthetic construct
  source 1..75: mol_type = other DNA
aaagcagattggggtaaagcggaattactttgaatctgatctgggagaaggtaaagcgggtaatgactccaactt

SEQ ID NO: 668982 - DNA, 75 bp, synthetic construct
  source 1..75: mol_type = other DNA
taacggtggcgcatgctctaaattcggcagtgcggaagaggctgcggccatgaccgtgaaggtgttgggcgacaa

SEQ ID NO: 668983 - DNA, 75 bp, synthetic construct
  source 1..75: mol_type = other DNA
agctggggctgaataccggctggagcagtgacctgatgtgcggcaattttgacctgaaaaccaccgtcggcaacc

SEQ ID NO: 668984 - DNA, 75 bp, synthetic construct
  source 1..75: mol_type = other DNA
atgtatgaggagtgtgtgacatttttcatgacagtaaaacaggtgataacctcctttcgtaaggggcattcacag

SEQ ID NO: 668985 - DNA, 75 bp, synthetic construct
  source 1..75: mol_type = other DNA
atgtatgaggagtgtgtgacatttttcatgatagtaaaacaggtgataacctcctttcgtaaggggtattcacag

SEQ ID NO: 668986 - DNA, 75 bp, synthetic construct
  source 1..75: mol_type = other DNA
atgtatgaggagtgtgtgacatttttcatgaaagtaaaacaggtgataacctcctttcgtaaggggaattcacag

SEQ ID NO: 668987 - DNA, 75 bp, synthetic construct
  source 1..75: mol_type = other DNA
tgtagtgatgaagagaaggggctagctttgcagtgggtttctgaactaacagatgaactcatggcaaaaatcaga

SEQ ID NO: 668988 - DNA, 75 bp, synthetic construct
  source 1..75: mol_type = other DNA
agtaggaaaccagctcaacgggatcactgacggttttaaaaacctgatgggggatgtgattcagggggcgagcgg

SEQ ID NO: 668989 - DNA, 75 bp, synthetic construct
  source 1..75: mol_type = other DNA
ctatccagtgggtgtctgaattgaccgacgagctgatggcgaaaatccgcagccatgaatactgccggtcaatgg

SEQ ID NO: 668990 - DNA, 75 bp, synthetic construct
  source 1..75: mol_type = other DNA
gccatccggggagatgatgccggtcgtaaggctaccgggaaagaaggccggaaatggattggtggccaggatcgt

SEQ ID NO: 668991 - DNA, 75 bp, synthetic construct
  source 1..75: mol_type = other DNA
ctccggtcaggcagtctgacagtaacggccggagtgattaaggcgctgcaacgggatccggataatgctgcactg

SEQ ID NO: 668992 - DNA, 75 bp, synthetic construct
  source 1..75: mol_type = other DNA
gatgcgcagaatgatcgtgacgggaatgtctgaaccgaatgcgttgttacaggatgatgcgttggcagaggggga

SEQ ID NO: 668993 - DNA, 75 bp, synthetic construct
  source 1..75: mol_type = other DNA
tgagattggcaattatgcgacgagtgtaaatatccattgggattgtactgcaaatgcgtcagtttctgtttatac

SEQ ID NO: 668994 - DNA, 75 bp, synthetic construct
  source 1..75: mol_type = other DNA
agccctttgtaggccagataagacgcgtcagcgtcgcatctggcataaacaaagcgcactttgctggtctgttcc

SEQ ID NO: 668995 - DNA, 75 bp, synthetic construct
  source 1..75: mol_type = other DNA
aacctgcacgttagccctttgtaggccagataagacgcgtcagcgtcgcatctggcataaacaaagcgcactttg

SEQ ID NO: 668996 - DNA, 75 bp, synthetic construct
  source 1..75: mol_type = other DNA
accggttatctgactgttccgctggaagatattctcgaaagtatgggcgatgaagaaatcgacatcgatgaagtt

SEQ ID NO: 668997 - DNA, 75 bp, synthetic construct
  source 1..75: mol_type = other DNA
ttggcagcaaaaacctctgaaacaaatgcaaagacttcagaagacaatgccgcttcctctaaggcggcagctgct

SEQ ID NO: 668998 - DNA, 75 bp, synthetic construct
  source 1..75: mol_type = other DNA
tataacatttttctcggcaataattttttcgccaacttcgattgcgtgatgcttgatgtctgccctattcgcatc

SEQ ID NO: 668999 - DNA, 75 bp, synthetic construct
  source 1..75: mol_type = other DNA
ataacgtctggattggggggcgtgccatcattaacccgggcgttaccattggcgataacgtcgtagtggcatcag

SEQ ID NO: 669000 - DNA, 75 bp, synthetic construct
  source 1..75: mol_type = other DNA
atgtgtacccgcaagccggtgtggtggattttcgcgggacactgaaaacgtggataggtaagcgggaagctctgc

SEQ ID NO: 669001 - DNA, 75 bp, synthetic construct
  source 1..75: mol_type = other DNA
tcacgccagaatcggtaaaagcccagcatcaggccctgctgcgttatttcgatacaacaacccgccctcagatga

SEQ ID NO: 669002 - DNA, 75 bp, synthetic construct
  source 1..75: mol_type = other DNA
ggcgcgcaaggatggctggcgaataagcaaagacaaaacacgtgcttttgcgcccgggcataaagttttgaggat

SEQ ID NO: 669003 - DNA, 75 bp, synthetic construct
  source 1..75: mol_type = other DNA
aaagccgtaacgatacgctactgcgcgtgagtcgctgtatcgttgaacagcagcaagccttctttgagcaaggcg

SEQ ID NO: 669004 - DNA, 75 bp, synthetic construct
  source 1..75: mol_type = other DNA
tgcgtaagcataacggtcactggacggtagaactcaacagtgacagcattccgcgtctgcaaatcaaccagcact

SEQ ID NO: 669005 - DNA, 75 bp, synthetic construct
  source 1..75: mol_type = other DNA
aaattaatcgcggcggaaaacccagcgaaaccgttgagcgacagcaagttaacctctttgctgtcggaacaaggt

SEQ ID NO: 669006 - DNA, 75 bp, synthetic construct
  source 1..75: mol_type = other DNA
ttctctgtcaccagcaaatattggttgcccggcatctccaactggctggttaggcacagggagtaatggtgcatc

SEQ ID NO: 669007 - DNA, 75 bp, synthetic construct
  source 1..75: mol_type = other DNA
ttaccgaaagcctggaatgggccgatgtggtggtgattggtcccggtctgggccagcaagagtgggggaaaaaag

SEQ ID NO: 669008 - DNA, 75 bp, synthetic construct
  source 1..75: mol_type = other DNA
caggcttatttgcgaccggaaaccgtggaacatctggctacaatgccgcgatgaatgtgcgtattgccagcagaa

SEQ ID NO: 669009 - DNA, 75 bp, synthetic construct
  source 1..75: mol_type = other DNA
gttccgtttgacggcacgaaggatattacgcttacgcctaaagatctggatgcctacagcaaaagcgaagtacag

SEQ ID NO: 669010 - DNA, 75 bp, synthetic construct
  source 1..75: mol_type = other DNA
caatgacaatgcgaatagcagggtgccatctaaccgaaaagttaacggaaaagcactgactgcggatataacatt

SEQ ID NO: 669011 - DNA, 75 bp, synthetic construct
  source 1..75: mol_type = other DNA
aacgccgataccgcgacgaaacttgcggcagacccaaaaattaacggtgttaagtttgatggctcggcggatatt

SEQ ID NO: 669012 - DNA, 75 bp, synthetic construct
  source 1..75: mol_type = other DNA
tgaccgcttacattgcgcccaacgtctggtacaacgttatggcggcgtagcggtgctgaaaggtgccggaaccgt

SEQ ID NO: 669013 - DNA, 75 bp, synthetic construct
  source 1..75: mol_type = other DNA
acggcaggggatcccctgcccgtggcgttactacaacgatcgcgatgtacgcacaatcgttgagctgggaaaagc

SEQ ID NO: 669014 - DNA, 75 bp, synthetic construct
  source 1..75: mol_type = other DNA
attaacgaatttcgcctggatcaacacatccggcgatacatatgatatttacgttgagattggcaattatgcgac

SEQ ID NO: 669015 - DNA, 75 bp, synthetic construct
  source 1..75: mol_type = other DNA
agaagtcggagagatagcaccgcaatatgttcactggcgtcctcttacagacgaggatgatccaggtatagcatc

SEQ ID NO: 669016 - DNA, 75 bp, synthetic construct
  source 1..75: mol_type = other DNA
gggctttgtggaagcgtacagccgtcggattaacgaatttcgcctggatcaacacatccggcgatacatatgata

SEQ ID NO: 669017 - DNA, 75 bp, synthetic construct
  source 1..75: mol_type = other DNA
ggcgagttccatcgtttacatcgcattgattggtggcgctggttacaacgtcggttccccacatcaggcaggcat

SEQ ID NO: 669018 - DNA, 75 bp, synthetic construct
  source 1..75: mol_type = other DNA
agcagttttatccgcctggcgcaccaatcccgtggccatcagataccgttccgtctggctatgccctgatgcagg

SEQ ID NO: 669019 - DNA, 75 bp, synthetic construct
  source 1..75: mol_type = other DNA
cgtatccagtaaggaggccgaaagggctgagctccagaggcgactggcctttttgagaaactcccaatctactct

SEQ ID NO: 669020 - DNA, 75 bp, synthetic construct
  source 1..75: mol_type = other DNA
cagcgaccttgccagtgggaaaggtgacatttcgaaagcaatgatgcgctggaacactaacaggagaactggtta

SEQ ID NO: 669021 - DNA, 75 bp, synthetic construct
  source 1..75: mol_type = other DNA
atggcggcgcaatggctggtatatcaggcagtgcaattgctggtaggtaaatccactcaggcaagcgcagcggca

SEQ ID NO: 669022 - DNA, 75 bp, synthetic construct
  source 1..75: mol_type = other DNA
tattgttgttttcattttctagcatcgcagaactatatatgactgttaatatcggagatgaaaataaaacaacag

SEQ ID NO: 669023 - DNA, 75 bp, synthetic construct
  source 1..75: mol_type = other DNA
atgctgaaattcatgctggataccaatatctgtattttcactattaagaataaaccagtacatgtcagagagcgg

SEQ ID NO: 669024 - DNA, 75 bp, synthetic construct
  source 1..75: mol_type = other DNA
ggaatacccagactcaggctagcggtggatatgagcaattcgggcgggaggtaggtagttttgttgatcggcgat

SEQ ID NO: 669025 - DNA, 75 bp, synthetic construct
  source 1..75: mol_type = other DNA
ttgataaactcaataaaaaaggtattacaccttcgggtatgtcatccagtcaagtaacatcattagggaagaata

SEQ ID NO: 669026 - DNA, 75 bp, synthetic construct
  source 1..75: mol_type = other DNA
agcctttattggtaatcaactagaccaacagttaggactagatactacctcctatgatatggaagcaatgaataa

SEQ ID NO: 669027 - DNA, 75 bp, synthetic construct
  source 1..75: mol_type = other DNA
gataaattcccccagtggcagcaaaaattatttattggcgcgctgaaagataaagatgtcattgtgatgagcgtc

SEQ ID NO: 669028 - DNA, 75 bp, synthetic construct
  source 1..75: mol_type = other DNA
taatcaaactgtatcagtcactgaagatatggcagaagaataccataagtttgaccagaatctacagaacgcaaa

SEQ ID NO: 669029 - DNA, 75 bp, synthetic construct
  source 1..75: mol_type = other DNA
gtatttggtcaactatcaacgggtattgcgggtgttgctgccttatccgttggtgctggtgctgtcgtagcaggt

SEQ ID NO: 669030 - DNA, 75 bp, synthetic construct
  source 1..75: mol_type = other DNA
tatgactatcatgaagattcaagaggcgttagctagtgcactatcattaggtttcccacaaaacattccagctta

SEQ ID NO: 669031 - DNA, 75 bp, synthetic construct
  source 1..75: mol_type = other DNA
gaactattacatacataattcaagaaaagccaagtttaactttaccacaacaatatcgaatagtatatcaactag

SEQ ID NO: 669032 - DNA, 75 bp, synthetic construct
  source 1..75: mol_type = other DNA
acgggaatggatgaaggggcaggctgataaatcgaagaatggctggctgtttattacctctgatgaacagaacca

SEQ ID NO: 669033 - DNA, 75 bp, synthetic construct
  source 1..75: mol_type = other DNA
tcgaatacgccccctccttctgccgacctggtggcggctgttcttgcggaagcgaacacgtctcctgagacgcgc

SEQ ID NO: 669034 - DNA, 75 bp, synthetic construct
  source 1..75: mol_type = other DNA
gtttgtggaaaaagatctgggggaaacccggcgtaaaaagttcaatgaacagaccagcttcggccatgagcaggt

SEQ ID NO: 669035 - DNA, 75 bp, synthetic construct
  source 1..75: mol_type = other DNA
tacgagcaaaaagcctgcctcaaaacagccttacaatacgatgtgccttctgtatcaaagctgtgccagtcattg

SEQ ID NO: 669036 - DNA, 75 bp, synthetic construct
  source 1..75: mol_type = other DNA
tttgtgctgggttttcagaacgaagctcagatggaagaaatctacggcccgaaagcggctgcagggctgtttgac

SEQ ID NO: 669037 - DNA, 75 bp, synthetic construct
  source 1..75: mol_type = other DNA
agatgcttgaagatgaaattacccgtcgcactgaagaagagaggcataagtttgccggcctgttcgaaggggcgt

SEQ ID NO: 669038 - DNA, 75 bp, synthetic construct
  source 1..75: mol_type = other DNA
ctatccgaagcatctggcagcgttcgtggaaatccttgaacccttcggcaaggagatggagcaacactatggctg

SEQ ID NO: 669039 - DNA, 75 bp, synthetic construct
  source 1..75: mol_type = other DNA
ctatccgaagcacctggcggcattcgttgagatccttgaaccattcggcaaggaaatggaacaacactatggctg

SEQ ID NO: 669040 - DNA, 75 bp, synthetic construct
  source 1..75: mol_type = other DNA
aagtgtgacgccgtggagctgcacgccgggttagcccgtcacctgcaggcgcatttcccggaggtccggatctgg

SEQ ID NO: 669041 - DNA, 75 bp, synthetic construct
  source 1..75: mol_type = other DNA
catcgttcagcgatatgctgtccggcttcaaagataaggtgacagcatccattaacaacgcagccagttcagtta

SEQ ID NO: 669042 - DNA, 75 bp, synthetic construct
  source 1..75: mol_type = other DNA
gcgatatctaatcagtccgtcagccaatttatgttgaacagcgcttcgcagcgggctgcggaagtgattgaacag

SEQ ID NO: 669043 - DNA, 75 bp, synthetic construct
  source 1..75: mol_type = other DNA
gatgcgtaatgaccccaaccgcagctacagcaaactggtggacacactgctttccatcaaaattgaaaaactgcg

SEQ ID NO: 669044 - DNA, 75 bp, synthetic construct
  source 1..75: mol_type = other DNA
atgcatcgacaatcctttttccttgtgccccttatttgtctttcttccgctctctgggcggctcctgcaacggta

SEQ ID NO: 669045 - DNA, 75 bp, synthetic construct
  source 1..75: mol_type = other DNA
gctctggatgacgctcttcaccaggcaaaatacgtaacagccactatacaaaaactgatcccgaatcaggctgat

SEQ ID NO: 669046 - DNA, 75 bp, synthetic construct
  source 1..75: mol_type = other DNA
aaagatgctctcaaacacacatatctcggttatgaaaccaaagacctggttgatgtcgtaaccggtgatatcacc

SEQ ID NO: 669047 - DNA, 75 bp, synthetic construct
  source 1..75: mol_type = other DNA
catacctccgatcttgataccggagagatgtatgtcttcctgtgtaaggttgaagcctgggcgatgaatattggc

SEQ ID NO: 669048 - DNA, 75 bp, synthetic construct
  source 1..75: mol_type = other DNA
tattgaccatgcggtgcagttgagtcgtgatgaaccgagtctggccatagggatgcactttgtccttactatggg

SEQ ID NO: 669049 - DNA, 75 bp, synthetic construct
  source 1..75: mol_type = other DNA
gtgaacctcccacaagacggcatcaaactgcatcgcggtaacttcaccgctatcggtcagcagctccagcctaat

SEQ ID NO: 669050 - DNA, 75 bp, synthetic construct
  source 1..75: mol_type = other DNA
tcggttatgaaaccaaagaactggttgatgtcgtaaccggtgaaatcaccaccattcagtcattacgtcatacct

SEQ ID NO: 669051 - DNA, 75 bp, synthetic construct
  source 1..75: mol_type = other DNA
atttggagatgattatccaaccgaggatggtactggagtaagagattatatacatgttatggatttagcatctgg

SEQ ID NO: 669052 - DNA, 75 bp, synthetic construct
  source 1..75: mol_type = other DNA
gcaatattttgctgaccgatgaagccatcggtgtgcggattgtcgaagcgttagagcaacgatatattctgccag

SEQ ID NO: 669053 - DNA, 75 bp, synthetic construct
  source 1..75: mol_type = other DNA
gcagcggcaatgcagggtaataatgttgctgccggtgcagcaggcgccgcaacaggagaattggcagccagagca

SEQ ID NO: 669054 - DNA, 75 bp, synthetic construct
  source 1..75: mol_type = other DNA
aattacatcgcggcaacttcaccgctatcggccagcagatccagccttatctggaggacggaaaatgctttcgca

SEQ ID NO: 669055 - DNA, 75 bp, synthetic construct
  source 1..75: mol_type = other DNA
atgaagctaatactgccttttccgcccagcgtgaacacgtactggcgacaccccaacaaaggggcgcttgcaggt

SEQ ID NO: 669056 - DNA, 75 bp, synthetic construct
  source 1..75: mol_type = other DNA
aaggagaacactggcggcaatcagcatcacgatagcgataatgaaactggcgagacggcagatcactcaattaag

SEQ ID NO: 669057 - DNA, 75 bp, synthetic construct
  source 1..75: mol_type = other DNA
ctggaggtgatgtgtcatccggcgtttatcgataatactatccgtcagagtgcttactgtttcccacgcttaacg

SEQ ID NO: 669058 - DNA, 75 bp, synthetic construct
  source 1..75: mol_type = other DNA
ccagcgtgaatacgtactggcgacaccctaacaaaggggcgtttgctggtaaaagcctgataagcacggcggggc

SEQ ID NO: 669059 - DNA, 75 bp, synthetic construct
  source 1..75: mol_type = other DNA
atgaagctgatcgtgcctttccctcccagcgtgaacacgtactggcgacaccccaacaaaggggagtttgctggt

SEQ ID NO: 669060 - DNA, 75 bp, synthetic construct
  source 1..75: mol_type = other DNA
atgaagctgatcttgcctttccctcccagcgtgaacacgtactggcgacaccccaacaaaggggtgtttgctggt

SEQ ID NO: 669061 - DNA, 75 bp, synthetic construct
  source 1..75: mol_type = other DNA
gtattcggtactctaagtaaaggtatcttaggtgtggcgggtgttgccgtaacagcaggaaccgcagtagcagca

SEQ ID NO: 669062 - DNA, 75 bp, synthetic construct
  source 1..75: mol_type = other DNA
tttaacctgaaccaggggagaatgtgtatcagttcggtcaccctgatggagctgatatatggtgcagaaaaaagc

SEQ ID NO: 669063 - DNA, 75 bp, synthetic construct
  source 1..75: mol_type = other DNA
gggcgaaaattccagagcgcggcgtgcgcagcaatagttgagcagttacgtcgtctgccgaaaccaacgtcggca

SEQ ID NO: 669064 - DNA, 75 bp, synthetic construct
  source 1..75: mol_type = other DNA
tccggataacaggatccgcgatctggataactataacaaggcgctgtttgacgccctgacccacgcaggtgtgtg

SEQ ID NO: 669065 - DNA, 75 bp, synthetic construct
  source 1..75: mol_type = other DNA
cgtcacctcattagcgctgaaggccgtaaataccagagcgctgcctgcgtggcgatcattgagcaattacgacgt

SEQ ID NO: 669066 - DNA, 75 bp, synthetic construct
  source 1..75: mol_type = other DNA
ttttatggcgaagagatcagtgagtcactgttcctgcaagtacttgatgattccagtcagcgagatgagacttcg

SEQ ID NO: 669067 - DNA, 75 bp, synthetic construct
  source 1..75: mol_type = other DNA
atgaagctgatcatgcctttccctcccagcgtgaacacgtactggcgacaccccaacaaaggggggtttgctggt

SEQ ID NO: 669068 - DNA, 75 bp, synthetic construct
  source 1..75: mol_type = other DNA
atgctggttgagtggggaccggtcatgggtgtatctcaatcaattataagcaacataaaaactggcaagaggtgg

SEQ ID NO: 669069 - DNA, 75 bp, synthetic construct
  source 1..75: mol_type = other DNA
atgaagcttattctgccttttccgcccagcgtgaacacgtactggcgacaccccaacaaaggggcgtttgctggt

SEQ ID NO: 669070 - DNA, 75 bp, synthetic construct
  source 1..75: mol_type = other DNA
attatgtctgcgattgaatcggtctggtcaccggatggcgttctggtactcatggatatgggcagtgcgctgctt

SEQ ID NO: 669071 - DNA, 75 bp, synthetic construct
  source 1..75: mol_type = other DNA
aataataggcttgatttcttcgaccaggaactgctgatgatgaatcgctgccgaaatactatagataaaattggt

SEQ ID NO: 669072 - DNA, 75 bp, synthetic construct
  source 1..75: mol_type = other DNA
atgaaaaaagttcaattcaggattgaagaaagccaacatgatgatctacttgattgtcttaaaacactttatcca

SEQ ID NO: 669073 - DNA, 75 bp, synthetic construct
  source 1..75: mol_type = other DNA
gctcaccatggggattgataagctcagtgccagtccatcccggcttccggccttgaaagcagcaatcagaatctc

SEQ ID NO: 669074 - DNA, 75 bp, synthetic construct
  source 1..75: mol_type = other DNA
gagcaacattttatcactaccgcgccctgcattttattggccaacgatctgttaccctcgcagatcaccagcctg

SEQ ID NO: 669075 - DNA, 75 bp, synthetic construct
  source 1..75: mol_type = other DNA
gcgctgtgcgctaaacagcagcagctcatgccatccccgcctgcaggcgaggttattccagcaatatcaccagtc

SEQ ID NO: 669076 - DNA, 75 bp, synthetic construct
  source 1..75: mol_type = other DNA
acaaaaaaactaggcaggtcttgcttgctttttcattcatatatttaattattatctcattactgttttttatga

SEQ ID NO: 669077 - DNA, 75 bp, synthetic construct
  source 1..75: mol_type = other DNA
ggtggcctttctggtgaactatccggcaatgcttctacagctgcaaaattaaaaactgccaggaaaataagcaat

SEQ ID NO: 669078 - DNA, 75 bp, synthetic construct
  source 1..75: mol_type = other DNA
ggtcagttcctgaccctgcccgtggagaccttttgccttcagacgggcgaaatgtggaagaaagcagctactggc

SEQ ID NO: 669079 - DNA, 75 bp, synthetic construct
  source 1..75: mol_type = other DNA
atgaaaaaagttcaattcagaattgatgaaaatcagcatgatgatttgctggattgccttaaaactctttatccg

SEQ ID NO: 669080 - DNA, 75 bp, synthetic construct
  source 1..75: mol_type = other DNA
atgatcgatgaatttcatgtgatgtatatgtataaaagaatccaagcggaagccgcaactactgacatcaaaaca

SEQ ID NO: 669081 - DNA, 75 bp, synthetic construct
  source 1..75: mol_type = other DNA
ttaatgcatgaacctaaactactgattctcgacgaaccgaccgcaggcgtggatattgaacttcgccgctcaatg

SEQ ID NO: 669082 - DNA, 75 bp, synthetic construct
  source 1..75: mol_type = other DNA
ccgcgccggatattattgcggcgcgaaaatccgccacaacaacgcctgcgcaggtatcgcgggtcatcagtgaca

SEQ ID NO: 669083 - DNA, 75 bp, synthetic construct
  source 1..75: mol_type = other DNA
cggaaaaagtctgcaccgcctgcggtcaaagcggtggcggcaactgccctgattgtggcgcggtgatgggtgacg

SEQ ID NO: 669084 - DNA, 75 bp, synthetic construct
  source 1..75: mol_type = other DNA
attaagatatgatgataagcagtttcatacaacggttatcaaagatgttctattatggattgaacataatttaga

SEQ ID NO: 669085 - DNA, 75 bp, synthetic construct
  source 1..75: mol_type = other DNA
agcatacaacagacgatggtttatgctcaccttgcacctgattacctgcaacacgcagtaacgttaaaccctctc

SEQ ID NO: 669086 - DNA, 75 bp, synthetic construct
  source 1..75: mol_type = other DNA
aagacatatgaagcaaatgatgaggttttacctgcttatcttctggatatgaaacgtgctggtgacaatgtggtt

SEQ ID NO: 669087 - DNA, 75 bp, synthetic construct
  source 1..75: mol_type = other DNA
gtccgcattgcaggcccccatcaaccgtttcgtgccccatgagttaagccatgaagagatcctgcaactgatcga

SEQ ID NO: 669088 - DNA, 75 bp, synthetic construct
  source 1..75: mol_type = other DNA
agaggataatgtcgatgacgctttaactcaaatacagctagcacataatttagaccccacatctattgaagtatc

SEQ ID NO: 669089 - DNA, 75 bp, synthetic construct
  source 1..75: mol_type = other DNA
cgttgagcgaacggatagaacaacaggagacgatgttgcagcagctggtggcgatgaacacccgactgaagagcg

SEQ ID NO: 669090 - DNA, 75 bp, synthetic construct
  source 1..75: mol_type = other DNA
ccgcgccggatattattgcggcgcgaaaatccggcacgacaacgccagcacaggtatcgcgggtcatcagcgaca

SEQ ID NO: 669091 - DNA, 75 bp, synthetic construct
  source 1..75: mol_type = other DNA
tgtttagcgccggatattacgtcctcatctggcagccgttgagcgaacggattgagcaacaggagacgatgttgc

SEQ ID NO: 669092 - DNA, 75 bp, synthetic construct
  source 1..75: mol_type = other DNA
ggcacctgaataaaacaatcagggcgctgggtgatccagccgttaaccgactgaacaaacgaatgattgcacagc

SEQ ID NO: 669093 - DNA, 75 bp, synthetic construct
  source 1..75: mol_type = other DNA
atgaagcaagttaatttcagactggaagaacaacagcatgatgaacttcttgattgtcttaaaattctttatcca

SEQ ID NO: 669094 - DNA, 75 bp, synthetic construct
  source 1..75: mol_type = other DNA
gcgctgcgggtgacacaaattgatgtcagcgcaggtgagaagcctgggatggtgaatgtgcagcgactggagttt

SEQ ID NO: 669095 - DNA, 75 bp, synthetic construct
  source 1..75: mol_type = other DNA
aaatcgtttcttgggcagcgattaaagtggatatcaaaacccattgcccgcgcatttggacaccgtggatttacc

SEQ ID NO: 669096 - DNA, 75 bp, synthetic construct
  source 1..75: mol_type = other DNA
atgattgaccgtcacgacttcgtaaaatgggtgcgcacacaggacacccgtctggccccaaaacttcaggcaatg

SEQ ID NO: 669097 - DNA, 75 bp, synthetic construct
  source 1..75: mol_type = other DNA
acagtagacgactgctaccgcgtggacttaacaccacacgggctggcgttgcgctgcctgacaccgcatggcgaa

SEQ ID NO: 669098 - DNA, 75 bp, synthetic construct
  source 1..75: mol_type = other DNA
aaaaatgaaagatgcccttttgcgttttcgggaattcgtcaatgaacactctgatgaaaaattcgttcaggtgtg

SEQ ID NO: 669099 - DNA, 75 bp, synthetic construct
  source 1..75: mol_type = other DNA
atgattgaccatcatgacttcgtaaaatgggtgcgcccacaggacacccgtctggctcccgttctccagggatta

SEQ ID NO: 669100 - DNA, 75 bp, synthetic construct
  source 1..75: mol_type = other DNA
tacaccgctgaatttaaccgcctttccgccctcttctcgcaggagtggcagcgcgtgacgggataccagccatga

SEQ ID NO: 669101 - DNA, 75 bp, synthetic construct
  source 1..75: mol_type = other DNA
gcctcgctgagtgaatacaccgctgaatttaaccgcctttctgccctcttctcgcaggagtggcagcgcgtgacg

SEQ ID NO: 669102 - DNA, 75 bp, synthetic construct
  source 1..75: mol_type = other DNA
gaatcttggggcgtgaagtttcatcagaataatttacccatttgcagtcttgtatcagaccagtacccgctcgtt

SEQ ID NO: 669103 - DNA, 75 bp, synthetic construct
  source 1..75: mol_type = other DNA
aaattatcttcaacaacctagtaagatggaaccggtggggatttcatcttatcaccggacaacaggctgatcgac

SEQ ID NO: 669104 - DNA, 75 bp, synthetic construct
  source 1..75: mol_type = other DNA
atatcagaacgcgtctttatccagctgctgtatctttagcatttcctaattcgccactaacaattgaacattttt

SEQ ID NO: 669105 - DNA, 75 bp, synthetic construct
  source 1..75: mol_type = other DNA
agttgtcaccgtatgacaccgaagagatgcttgaggctatgcgtatttttctggaagaacagggaggtgagcaaa

SEQ ID NO: 669106 - DNA, 75 bp, synthetic construct
  source 1..75: mol_type = other DNA
atgctttcctggctgaaattgaacgcaaagcaatccgcaagttcattaacagcattgaacacatcctgcgtgaca

SEQ ID NO: 669107 - DNA, 75 bp, synthetic construct
  source 1..75: mol_type = other DNA
caaggttatcaaccgtggagggcaggcatattgcgtaaaagatggagtgcaagttaatcccatgtatgcaagagg

SEQ ID NO: 669108 - DNA, 75 bp, synthetic construct
  source 1..75: mol_type = other DNA
aacaatatattatttattcggttatgaatgatttaattactggtgggcgagaatcttcagttttaaacgttcctg

SEQ ID NO: 669109 - DNA, 75 bp, synthetic construct
  source 1..75: mol_type = other DNA
tgaaagatgccattgaccagaaatatgtaaaactcccttttatttattcttatgcaacaacggtgattcaaaaat

SEQ ID NO: 669110 - DNA, 75 bp, synthetic construct
  source 1..75: mol_type = other DNA
gcgcatacgataccattgaatacaatacgatcccgtatgcagcaatgcggaattacgttccggggcaggcatcgt

SEQ ID NO: 669111 - DNA, 75 bp, synthetic construct
  source 1..75: mol_type = other DNA
gagattccatatcaacccgtatgcgaaattattagcgaagctgaaaaagcacgtcaggttaatggcgataaaccc

SEQ ID NO: 669112 - DNA, 75 bp, synthetic construct
  source 1..75: mol_type = other DNA
gatggccgttggcttgactttagttactgtgattctgtctggcgtgatgttagcctcaagttggattatctccgg

SEQ ID NO: 669113 - DNA, 75 bp, synthetic construct
  source 1..75: mol_type = other DNA
acctgtaaagccaataccctcggcagttgtggttacgtttatctggctgtttatccaacatccgaaacgaaaaag

SEQ ID NO: 669114 - DNA, 75 bp, synthetic construct
  source 1..75: mol_type = other DNA
cagatattcgaagatattatctgaactttctgatatcaaaagtgcaatgggtatatctgaacttattaaggagaa

SEQ ID NO: 669115 - DNA, 75 bp, synthetic construct
  source 1..75: mol_type = other DNA
cgcagatttcttcctgttgaccagtgaaatttcgtgcctggttgatgctctggtaaatgcccttggtggagaggc

SEQ ID NO: 669116 - DNA, 75 bp, synthetic construct
  source 1..75: mol_type = other DNA
gcgcgcggcaggcagaggatatgctcgcgcttatgcgtaagtctctgggttctcttcctgttgttcccctgagtg

SEQ ID NO: 669117 - DNA, 75 bp, synthetic construct
  source 1..75: mol_type = other DNA
ctagttagcgccttaagaaaggaggatgtttttgcaggcggagacattgctctggctacagcggccggtgcatgg

SEQ ID NO: 669118 - DNA, 75 bp, synthetic construct
  source 1..75: mol_type = other DNA
aaccgccatcgctggactgccgaagagtgcaagaccatcaaggcggagtatcaacagaaacttaaaaaactgcga

SEQ ID NO: 669119 - DNA, 75 bp, synthetic construct
  source 1..75: mol_type = other DNA
ctggactgtcgaagagtgcagggccatcaaggcgaagtatcagcagaaacttaaagacctgcgaaacagcagaag

SEQ ID NO: 669120 - DNA, 75 bp, synthetic construct
  source 1..75: mol_type = other DNA
gtgatgtcaaagcacaaaacagatacccgcgttcagtttattgatgccagcgaactgttcaaaaaagagactaac

SEQ ID NO: 669121 - DNA, 75 bp, synthetic construct
  source 1..75: mol_type = other DNA
ggtgatgcctatgagttcctgatttctaactatgcggcaaatgccggtaagtcaggcggtgagttctttacaccg

SEQ ID NO: 669122 - DNA, 75 bp, synthetic construct
  source 1..75: mol_type = other DNA
atattcccaataagccgctgtttatccaaaacctcggtttgcaggaaacggtaaatcaggcttctggcgcattac

SEQ ID NO: 669123 - DNA, 75 bp, synthetic construct
  source 1..75: mol_type = other DNA
aaactacctgtcagctaaagggcgcgctgcgattgtctgctttccgggcattttctaccgtggtggcgtagagca

SEQ ID NO: 669124 - DNA, 75 bp, synthetic construct
  source 1..75: mol_type = other DNA
cgtcaacaaaatctatgaccctgccgctggctctggttcactgctgcttcaggcgaagaagcactttgataacca

SEQ ID NO: 669125 - DNA, 75 bp, synthetic construct
  source 1..75: mol_type = other DNA
gaactatctttctgccaaaggtcgtgctgcgattgtttgcttcccgggtattttttaccgtggcggcgcggagca

SEQ ID NO: 669126 - DNA, 75 bp, synthetic construct
  source 1..75: mol_type = other DNA
aacttcatcgccagatctggcaaattgctaacgatgtcaggggttcagtcgatggatgggattttaagcagtacg

SEQ ID NO: 669127 - DNA, 75 bp, synthetic construct
  source 1..75: mol_type = other DNA
caccaccatcgcggtgaacattctggtgctggcgaaaaacaagaaagacacgactactcagttcatcgacgccag

SEQ ID NO: 669128 - DNA, 75 bp, synthetic construct
  source 1..75: mol_type = other DNA
ggatttccacctgatgttattgaggctgcacttgctcatgtggataagaatgaggtgatcttacccagcaatagt

SEQ ID NO: 669129 - DNA, 75 bp, synthetic construct
  source 1..75: mol_type = other DNA
cagcaaggaagatgttgctcatctggcgaaatctgttgcgtttgagactgttgtcgcgaatgactataacctgtc

SEQ ID NO: 669130 - DNA, 75 bp, synthetic construct
  source 1..75: mol_type = other DNA
ttgtcgctaatgactataacctgtcggtgagcagctatgtggaagcgaaagataaccgcgaaattatcgatattg

SEQ ID NO: 669131 - DNA, 75 bp, synthetic construct
  source 1..75: mol_type = other DNA
acctggcgcgtatgaacatgtttttgcacaatatcaactacgacaagtttgatatcaagctgggcaatacgctga

SEQ ID NO: 669132 - DNA, 75 bp, synthetic construct
  source 1..75: mol_type = other DNA
gcaaaatctgtcgcgtttgagaccgttgtcgctaatgactataacctgtcggtgagctgctatgtagaagcgaaa

SEQ ID NO: 669133 - DNA, 75 bp, synthetic construct
  source 1..75: mol_type = other DNA
gtgttcctggctctgggtattaaccttgatggtcagaaagagttgctgggtatgtggctggccgaaaatgaaggt

SEQ ID NO: 669134 - DNA, 75 bp, synthetic construct
  source 1..75: mol_type = other DNA
actgactgaccatctcggtcatgagaaaaatgctcctaaatcaggctctaatacccgtaatggctactcgtcaaa

SEQ ID NO: 669135 - DNA, 75 bp, synthetic construct
  source 1..75: mol_type = other DNA
gaagccaaaaccaacactttccaactcgtagctgaacgttggtggaatgtgaagaaagccagtgtgacagaggac

SEQ ID NO: 669136 - DNA, 75 bp, synthetic construct
  source 1..75: mol_type = other DNA
cgagttcggtgactgttgtggtcaactaaaactggccaccgcgttagagtttttccagtatcggttttctgattc

SEQ ID NO: 669137 - DNA, 75 bp, synthetic construct
  source 1..75: mol_type = other DNA
tgccatcgagtcgctaaacagcgtgatccgccatgcgatcaaaaagcgtaaagtgttcccgacagacgactcggt

SEQ ID NO: 669138 - DNA, 75 bp, synthetic construct
  source 1..75: mol_type = other DNA
acagacgactcggtgaaaaaaatggtgtggctggcaatccagtctgcgtcccggaaatggacgatgccgttgaag

SEQ ID NO: 669139 - DNA, 75 bp, synthetic construct
  source 1..75: mol_type = other DNA
ggccgagtctttgacccctgctgtggttctggtggtatgttcgttcagtcagaaaaatttgtggcagcacaccag

SEQ ID NO: 669140 - DNA, 75 bp, synthetic construct
  source 1..75: mol_type = other DNA
gttttacggctcttaaagcggagtttgaagcacaactggaagaagaagcgcatctgaataagtctatcgctgaga

SEQ ID NO: 669141 - DNA, 75 bp, synthetic construct
  source 1..75: mol_type = other DNA
aaaactattgctgacacctaccataactggcgtaacaaaggtggcgactacgaagatgtggctggtttctgtgca

SEQ ID NO: 669142 - DNA, 75 bp, synthetic construct
  source 1..75: mol_type = other DNA
gctgactgatcacctcgggcatgagaaaaatgcgcccaaaacaggctcaaatacccgcaatggctactcgtcaaa

SEQ ID NO: 669143 - DNA, 75 bp, synthetic construct
  source 1..75: mol_type = other DNA
tgccgtgatggagcaggttgtagaatggcaaaaccgaccactggatgctgtttaccccattgtttatcttgactg

SEQ ID NO: 669144 - DNA, 75 bp, synthetic construct
  source 1..75: mol_type = other DNA
tggaaagctaccagagcccgtggcagtacggctctatatcgccgcaagaaggggatgattctctgctcattgaag

SEQ ID NO: 669145 - DNA, 75 bp, synthetic construct
  source 1..75: mol_type = other DNA
cgatgaacgttttgccccggctggcgtcctggcccccaaatcaaaagctgacttcgcctttttgtactacatgcg

SEQ ID NO: 669146 - DNA, 75 bp, synthetic construct
  source 1..75: mol_type = other DNA
ttgttgcaccggtaacggttggtaaaggcgcgaccattgctgcgggtactaccgtaacgcgcaatgttggtgaaa

SEQ ID NO: 669147 - DNA, 75 bp, synthetic construct
  source 1..75: mol_type = other DNA
tggactgaaggtgatgagccatattatccggttaatgatgaaaagaatatgcagttattcaagaagtatagagaa

SEQ ID NO: 669148 - DNA, 75 bp, synthetic construct
  source 1..75: mol_type = other DNA
acttccgtaccgcccaccaccgccaaagcgttgattcaggggctgaaacacgatctgctggcggatgacaccgcg

SEQ ID NO: 669149 - DNA, 75 bp, synthetic construct
  source 1..75: mol_type = other DNA
cgttgtacgccaaaggcctgacaacccgcgaaatagcggctgcgtttaaagagctgtatgacgctgatgtcgtaa

SEQ ID NO: 669150 - DNA, 75 bp, synthetic construct
  source 1..75: mol_type = other DNA
taaatttaagaccattatcggcgacgatgtgtttgtcggttccgacactcagctggtggccccggtaacagtagg

SEQ ID NO: 669151 - DNA, 75 bp, synthetic construct
  source 1..75: mol_type = other DNA
gcagaatggtgtaaaggtgatgagccttattatccagttaatgatgttaaaaatatgagtttattcaaaaaatac

SEQ ID NO: 669152 - DNA, 75 bp, synthetic construct
  source 1..75: mol_type = other DNA
tgatttttggtgggcgtttggctgaatataaatattatgacatgcaccaagttattcggtctgccttaaactgtg

SEQ ID NO: 669153 - DNA, 75 bp, synthetic construct
  source 1..75: mol_type = other DNA
tcagaatggaggaagggtgatgagccatattatcctgtaaatgataacaaaaacatggaattgttaaaaaaatac

SEQ ID NO: 669154 - DNA, 75 bp, synthetic construct
  source 1..75: mol_type = other DNA
ttggtatgaaagcgccaggacttgggcgactttgttttactctcgaagataaaggcgactatcgcactattgatg

SEQ ID NO: 669155 - DNA, 75 bp, synthetic construct
  source 1..75: mol_type = other DNA
cttccgccagccttcaggctttatggcaggtggtgaatcaaatcggcggtaaagagcgttatttctttggcaata

SEQ ID NO: 669156 - DNA, 75 bp, synthetic construct
  source 1..75: mol_type = other DNA
ttggtgctggattgtatggttctgtttgtgcacatgaacttgcaaaaaaaggaaagaagatattaattattgata

SEQ ID NO: 669157 - DNA, 75 bp, synthetic construct
  source 1..75: mol_type = other DNA
ccgggatggataaccagatcctgtcgttgtacgccaaaggcctgacaaccgtaagcgtacagcctgaaccgtctg

SEQ ID NO: 669158 - DNA, 75 bp, synthetic construct
  source 1..75: mol_type = other DNA
gcgaaatctgtcgcgtttgaagccgttgtagcgaatgactataacctgtcggtgagcagttatgtggaagtgaaa

SEQ ID NO: 669159 - DNA, 75 bp, synthetic construct
  source 1..75: mol_type = other DNA
cagcaaggaagatgttgctcatctggcgaaatctgtcgcgtttgaagccgttgtagcgaatgactataacctgtc

SEQ ID NO: 669160 - DNA, 75 bp, synthetic construct
  source 1..75: mol_type = other DNA
cgatggttcagcatgtcattgatgctgcgaatgaattaggcgcagcgcacgttcacctggtgtacggtcacggcg

SEQ ID NO: 669161 - DNA, 75 bp, synthetic construct
  source 1..75: mol_type = other DNA
ggcattgttgagcacaaagatgccaccgacgagcagcgtcagattcaggagatcaacaccggcattctgatcgct

SEQ ID NO: 669162 - DNA, 75 bp, synthetic construct
  source 1..75: mol_type = other DNA
gttaacattggcgcgggtaccattacctgcaactacgacggcgcgaacaaatttaagaccattatcggcgacgat

SEQ ID NO: 669163 - DNA, 75 bp, synthetic construct
  source 1..75: mol_type = other DNA
tttacgggcttggatacaattttacgggaaatggttactggtttaagccattcttcgcgaaacgttacaccgatc

SEQ ID NO: 669164 - DNA, 75 bp, synthetic construct
  source 1..75: mol_type = other DNA
cacggcccgctaacgcggagatacgccccgacttcgggtaaaccctcgtcgggaccactccgaccgcgcacagaa

SEQ ID NO: 669165 - DNA, 75 bp, synthetic construct
  source 1..75: mol_type = other DNA
ctggatatcgataccaccggtctggtgctgatgactgatgatggtcagtggtcgcaccgcattacttctccgcgc

SEQ ID NO: 669166 - DNA, 75 bp, synthetic construct
  source 1..75: mol_type = other DNA
gtggcgattcaaatcaaccatacgacctataacctggcacgtatgaacatgtttttgcacaacatcaactacgac

SEQ ID NO: 669167 - DNA, 75 bp, synthetic construct
  source 1..75: mol_type = other DNA
tcccctggcctttatcctcagcagtctgatcttgctgttcagcgcctccgcatttccattcgagacgcgatgacg

SEQ ID NO: 669168 - DNA, 75 bp, synthetic construct
  source 1..75: mol_type = other DNA
tccacgcgtggcgataacaccacatgtcgccgcgattacccgtcccgctgaagctgtggagtacatttctcgcac

SEQ ID NO: 669169 - DNA, 75 bp, synthetic construct
  source 1..75: mol_type = other DNA
acatttctcgcaccattgcccagctcgaaaaaggggagagggtctgcgggcaagtcgaccgcgcacgcggctact

SEQ ID NO: 669170 - DNA, 75 bp, synthetic construct
  source 1..75: mol_type = other DNA
actgggcagtaaagttgctcagagtctgcaaacctggcgctttccgctgcgttgctggagtcgaacccgtaaatc

SEQ ID NO: 669171 - DNA, 75 bp, synthetic construct
  source 1..75: mol_type = other DNA
tgtttaacgtaggtaaagccaaaaaaagtggcattgatagcctgcatgcgcaaactgctgaccattctgaatgcg

SEQ ID NO: 669172 - DNA, 75 bp, synthetic construct
  source 1..75: mol_type = other DNA
tttgtcaattaatttcatgtttatcgaacatagctcatttccacgataccaaaagtgatagaaacaccagtttct

SEQ ID NO: 669173 - DNA, 75 bp, synthetic construct
  source 1..75: mol_type = other DNA
aaacacagttattgagtatgttaataaaaatggaaattcctttgtcgagttaattaacaagtgggatttcatatg

SEQ ID NO: 669174 - DNA, 75 bp, synthetic construct
  source 1..75: mol_type = other DNA
aaccgtgacaagaactgctcttacgattacctgctgcacccggcaatttctatttctaaaatcattggtggctgc

SEQ ID NO: 669175 - DNA, 75 bp, synthetic construct
  source 1..75: mol_type = other DNA
aactgcatgtactggtcatattgaaaaccgtgataagaactgctcttacgactacctgctgcacccggcaatttc

SEQ ID NO: 669176 - DNA, 75 bp, synthetic construct
  source 1..75: mol_type = other DNA
tttagtctggcatcctcctgttgaaatgctggcagggcgcgatcttaaagcggtgtttgcactcggggccggtgt

SEQ ID NO: 669177 - DNA, 75 bp, synthetic construct
  source 1..75: mol_type = other DNA
acgagattgatcgccgcacccgtctggtcgatgcggaatttgcaaaggagtgcgcgctggaaggcatggctcgca

SEQ ID NO: 669178 - DNA, 75 bp, synthetic construct
  source 1..75: mol_type = other DNA
ggctggctggattgtgcggcaccggtaccaaaccgccagacctgattgccaccattgcatgttctgcctgccacg

SEQ ID NO: 669179 - DNA, 75 bp, synthetic construct
  source 1..75: mol_type = other DNA
gaaaaattgcgcctgatgcatgctgaaggggtttttcgcacacaagaaatctggagaaagaaaggtcatttatga

SEQ ID NO: 669180 - DNA, 75 bp, synthetic construct
  source 1..75: mol_type = other DNA
gccgtaatgctggagtacatgaaagagaaggatgtcgccagcatgtcaggccgtctgctcaatcgctgggggaga

SEQ ID NO: 669181 - DNA, 75 bp, synthetic construct
  source 1..75: mol_type = other DNA
gttgatgttctccagtcatcagaaacacaaactgatgcagtggaaactgcaatttctgatatcccaaaaaatgaa

SEQ ID NO: 669182 - DNA, 75 bp, synthetic construct
  source 1..75: mol_type = other DNA
ggtcgatgcggaatatgcaaaggagtgcgcgctggaaggcatggctcgcacgcaggtcatctggctgagagaggg

SEQ ID NO: 669183 - DNA, 75 bp, synthetic construct
  source 1..75: mol_type = other DNA
cggtttaaccatcaacgcccattttaatggcatggtgatggcagtacgtcacgatgcggatcgcgtttgtggatt

SEQ ID NO: 669184 - DNA, 75 bp, synthetic construct
  source 1..75: mol_type = other DNA
gcatgggcttgtagcgcgtgtcacgatgaaatcgaccgacgcacccataacctcgacaacaaagacgccagactt

SEQ ID NO: 669185 - DNA, 75 bp, synthetic construct
  source 1..75: mol_type = other DNA
atggctgatttgagaaaagccgcgcgtggtcgggaatgccaggtaagaatctctggcatatgtaatggcaactct

SEQ ID NO: 669186 - DNA, 75 bp, synthetic construct
  source 1..75: mol_type = other DNA
caaccgattctggaaaaactgtatcaggcgcagacccttagccagcaggaaagccaccagctattttcagcggtg

SEQ ID NO: 669187 - DNA, 75 bp, synthetic construct
  source 1..75: mol_type = other DNA
agctgcacgatggcgaaattaagagctatcagctcaccgcagaagactttggcctgacaccctaccaccaggagc

SEQ ID NO: 669188 - DNA, 75 bp, synthetic construct
  source 1..75: mol_type = other DNA
atattccggcgcaaaccttaattgaacgcctggcgaccatgagcaatccggtgctgatgctttctcctggccccg

SEQ ID NO: 669189 - DNA, 75 bp, synthetic construct
  source 1..75: mol_type = other DNA
atctgtatagattatcaagctatcctcattttgacggggctaagttttctgcgcgtatagcttataatgcagacg

SEQ ID NO: 669190 - DNA, 75 bp, synthetic construct
  source 1..75: mol_type = other DNA
ggcggttttgcagatatcggcgtgcattatctggactggaccagccggactaccgaaaaatcgtcgaccaaatca

SEQ ID NO: 669191 - DNA, 75 bp, synthetic construct
  source 1..75: mol_type = other DNA
ccgcctttgagtgcgctgacaccgctcgccgcagtcgaacgaccgagcgtagcgagtcagtgagcgaggaagcgg

SEQ ID NO: 669192 - DNA, 75 bp, synthetic construct
  source 1..75: mol_type = other DNA
aaggtgtcgttacggggaagtcatcttcacagagattttcagtcagttagcattaccgacattcattcaccaact

SEQ ID NO: 669193 - DNA, 75 bp, synthetic construct
  source 1..75: mol_type = other DNA
atgaaaaaacatctttttactctgacactctcttctgtattggcgataccagcagtatcccatgcagaatttaaa

SEQ ID NO: 669194 - DNA, 75 bp, synthetic construct
  source 1..75: mol_type = other DNA
aatttccatgacgatatgtggatttgcccctatatttccagacacctgttatcacttaacccattactggcttgc

SEQ ID NO: 669195 - DNA, 75 bp, synthetic construct
  source 1..75: mol_type = other DNA
cgtatttacctgggtgacaccggatttaatctctacttgcatgcgtatggcacctacggttctgcgaatcgtgtg

SEQ ID NO: 669196 - DNA, 75 bp, synthetic construct
  source 1..75: mol_type = other DNA
gatgtggctggcaatccagtctgcgtcccagaaatggacgatgccgttgaaggactggcgaatggcaatgagccg

SEQ ID NO: 669197 - DNA, 75 bp, synthetic construct
  source 1..75: mol_type = other DNA
tcttgccacgttcttcgcttatccaacggacatccgcaaagtgaaccgccccgggtttcctggagagtattttat

SEQ ID NO: 669198 - DNA, 75 bp, synthetic construct
  source 1..75: mol_type = other DNA
tgggatgacaagtacccacagatcagcaaaagctggcgtacacactgggagaatctaaataccttctttgcttat

SEQ ID NO: 669199 - DNA, 75 bp, synthetic construct
  source 1..75: mol_type = other DNA
atgccatcgaatcgctgaacagcgtcattcggcaggcgataaagaagcgcaaggtgttcccaacggacgactcgg

SEQ ID NO: 669200 - DNA, 75 bp, synthetic construct
  source 1..75: mol_type = other DNA
atgaccacgcgcgaaatcgtcgccacgttcaaagaaatgtacgacgcggatgtatcgcccacgctgatatctaaa

SEQ ID NO: 669201 - DNA, 75 bp, synthetic construct
  source 1..75: mol_type = other DNA
aaaaaccagcctaaaccgggtgccaactcccgcaatggctattccacaaagaccgttatcaccggtgatagcccc

SEQ ID NO: 669202 - DNA, 75 bp, synthetic construct
  source 1..75: mol_type = other DNA
tcaccctaaaagatggtaaaaaaataggggggctgtacgcaggtaatgcctttgcctcaagcagcccagaacctg

SEQ ID NO: 669203 - DNA, 75 bp, synthetic construct
  source 1..75: mol_type = other DNA
atatttggtcacgccttaattaatcaacattctatgatcgtcgccgcacaaggcttaacgcccgaccatcaactc

SEQ ID NO: 669204 - DNA, 75 bp, synthetic construct
  source 1..75: mol_type = other DNA
tattgcgtatttcatgcgacaagcactggtctggctggaagggcattcatgcagcaacgacagacagggtaaagc

SEQ ID NO: 669205 - DNA, 75 bp, synthetic construct
  source 1..75: mol_type = other DNA
ggctgccgaatccaatcgcggtaatgagtggaccggcaatcctgatattgataacgccatcatcatgctcgaccg

SEQ ID NO: 669206 - DNA, 75 bp, synthetic construct
  source 1..75: mol_type = other DNA
aacaacgaacctttagttatcagaaagatggctgcaaaaagagtgtgttattgcgacaaattattgctgttactg

SEQ ID NO: 669207 - DNA, 75 bp, synthetic construct
  source 1..75: mol_type = other DNA
cagtattgaaggtaatgaagagaacaacgtctggctatgcgattgcgctaaagtctacggtcacgcgcaggtgaa

SEQ ID NO: 669208 - DNA, 75 bp, synthetic construct
  source 1..75: mol_type = other DNA
tggtacgtggtggaccgattctgctcgacgagcacgttgtcatacaaggtgagagccgtattacaggtgcggtga

SEQ ID NO: 669209 - DNA, 75 bp, synthetic construct
  source 1..75: mol_type = other DNA
ctgtcactgcagtcattcgtcgcgaatacaagcagacatggaaaacactggatgatgaactggcctacgctctct

SEQ ID NO: 669210 - DNA, 75 bp, synthetic construct
  source 1..75: mol_type = other DNA
aaaaggcgctggctgccggggctactgaaatcacgaaagaagaatattttgcccgtaaaaacggcacatactcag

SEQ ID NO: 669211 - DNA, 75 bp, synthetic construct
  source 1..75: mol_type = other DNA
ccacaattgtaaggtctactcctcttatttctatagatttgattgtggaaaacgagtttggcgaaattttgctag

SEQ ID NO: 669212 - DNA, 75 bp, synthetic construct
  source 1..75: mol_type = other DNA
cacaaggagaacactggcggcaatcagcatcacgatagcgatagtgaaactggcgaggcgtcagatcccttaatt

SEQ ID NO: 669213 - DNA, 75 bp, synthetic construct
  source 1..75: mol_type = other DNA
ttggactgcaaattaccggataaggcgatggactatctgaagcgaaatggactgataagtgtggaggatgtttta

SEQ ID NO: 669214 - DNA, 75 bp, synthetic construct
  source 1..75: mol_type = other DNA
gtggagtatcaacgttcggtctacgagttaaccatgctggtaaagcagttagccaggcatctgaagaaagcgaag

SEQ ID NO: 669215 - DNA, 75 bp, synthetic construct
  source 1..75: mol_type = other DNA
gccagagcgtggggaatcaatatcaacacattaaacagctatttcaagggaggacaaacacaaccagcccccaga

SEQ ID NO: 669216 - DNA, 75 bp, synthetic construct
  source 1..75: mol_type = other DNA
aaagtgacgccagggaaggtgcatgatgaaacagaaaaatcgaaaaaagataaccctaagaaaagaatattctct

SEQ ID NO: 669217 - DNA, 75 bp, synthetic construct
  source 1..75: mol_type = other DNA
atctcttttgtttattcatggtgtaactagattgattgctaggggtaaacgtaaatcatatttgcttgattatac

SEQ ID NO: 669218 - DNA, 75 bp, synthetic construct
  source 1..75: mol_type = other DNA
aaaccgggctgcaaattgccggataaagcgatggactatctggagcgaaacggactgataagcgtggaggatgtt

SEQ ID NO: 669219 - DNA, 75 bp, synthetic construct
  source 1..75: mol_type = other DNA
acaagtcattacatgctttactctcaccgctttctgcgaatatattgatgggtaaagaaactatcagtataaaat

SEQ ID NO: 669220 - DNA, 75 bp, synthetic construct
  source 1..75: mol_type = other DNA
caattaaactcacttaacgagatatccaatagctgcgcattattattcttacaggcttcaggtaaaaaaacatta

SEQ ID NO: 669221 - DNA, 75 bp, synthetic construct
  source 1..75: mol_type = other DNA
tcaccctggtacagccaaaatcagaggaggaaggactcctcaacgttgtgataaccgacagaaaaagcggcgagc

SEQ ID NO: 669222 - DNA, 75 bp, synthetic construct
  source 1..75: mol_type = other DNA
aggacaaacacaaccagcccccagagaaagtatccttatacgaatttctgaaagtgaaggcgttagtcttgagtg

SEQ ID NO: 669223 - DNA, 75 bp, synthetic construct
  source 1..75: mol_type = other DNA
tagctatgtttttttttattacttcttgttctcctaaattctctgagcaggatataactcaggctgttaataatg

SEQ ID NO: 669224 - DNA, 75 bp, synthetic construct
  source 1..75: mol_type = other DNA
ctccatttggtgcaggcttgattacttttcagatatcacccgatacacaattaaactcacttaacgatatatcca

SEQ ID NO: 669225 - DNA, 75 bp, synthetic construct
  source 1..75: mol_type = other DNA
agagacattgtgggcttgagcagcgtccgcgttggtatttgagggggtttgtaaataatggcttaaaacagccaa

SEQ ID NO: 669226 - DNA, 75 bp, synthetic construct
  source 1..75: mol_type = other DNA
ctgctcaactgaagaaaacgaaggctgaacaggctgcccgggcaaaagcagcagcggaagcacaggctaaagcaa

SEQ ID NO: 669227 - DNA, 75 bp, synthetic construct
  source 1..75: mol_type = other DNA
atggaaacagctgtagcgtactataaagatggtgttccttatgatgataaggggcaggtaatcattactcttttg

SEQ ID NO: 669228 - DNA, 75 bp, synthetic construct
  source 1..75: mol_type = other DNA
ttttgaaaaatacaaggatattttaaataagaaattcagcaaagccgatcgtgatgctatttttaatgcgctggc

SEQ ID NO: 669229 - DNA, 75 bp, synthetic construct
  source 1..75: mol_type = other DNA
aatatctgaaaactcatgaacaattctccccacatgaattagcactgatcaccggaataccaaataacagaatcg

SEQ ID NO: 669230 - DNA, 75 bp, synthetic construct
  source 1..75: mol_type = other DNA
aagagtttccagctatcactctttacgacacaacagaagccctgcattccggtcaacctaccctcccccaaaact

SEQ ID NO: 669231 - DNA, 75 bp, synthetic construct
  source 1..75: mol_type = other DNA
aaagcgcaagaagccacccctgatcaaactgatgatgaaagactcatatcaatccgtgcatttatgtgtgttatt

SEQ ID NO: 669232 - DNA, 75 bp, synthetic construct
  source 1..75: mol_type = other DNA
gattaacgcgctgtggaaacgtttcgagctgggttatatctatgcacataataagattgatgaatttagtggcgt

SEQ ID NO: 669233 - DNA, 75 bp, synthetic construct
  source 1..75: mol_type = other DNA
gctgtatatcctctaatgatggctatgttcgcaattgtttgtctaacaaaaacttccaaattaaataaatactcc

SEQ ID NO: 669234 - DNA, 75 bp, synthetic construct
  source 1..75: mol_type = other DNA
ttttacgagtttaatgaaagaagcttttactctttgttgatttggtttacagttatttttatattttatttcata

SEQ ID NO: 669235 - DNA, 75 bp, synthetic construct
  source 1..75: mol_type = other DNA
ctggaaaacgaaatgaactggctcaggcatccgctaaatataaagaactggatgagctggtcaaaaaactgtcac

SEQ ID NO: 669236 - DNA, 75 bp, synthetic construct
  source 1..75: mol_type = other DNA
aggcaaacagggatgcgctgactctgcgcctgaaggatatcgtgaatgaggctcttcgtcacaatgcctcacgta

SEQ ID NO: 669237 - DNA, 75 bp, synthetic construct
  source 1..75: mol_type = other DNA
agtcgcagttaaacggtatttccggcctgtttaaagtcaccgacagaatgtaccaggttcgcggtcaggatatct

SEQ ID NO: 669238 - DNA, 75 bp, synthetic construct
  source 1..75: mol_type = other DNA
gcaggttcgagatctgatgaccaaatatcctcgtcaattagagaagattcagtctggtatgaagtgggcagacga

SEQ ID NO: 669239 - DNA, 75 bp, synthetic construct
  source 1..75: mol_type = other DNA
tttgccagccgcattccggtcgtcagcgccgtcgggcatgagacggatgtgaccattgccgattttgttgccgat

SEQ ID NO: 669240 - DNA, 75 bp, synthetic construct
  source 1..75: mol_type = other DNA
ggcttccggtcactggtactttacactcaaagacgacaccgcccaggtacgctgcgcgatgttccgcaacagcaa

SEQ ID NO: 669241 - DNA, 75 bp, synthetic construct
  source 1..75: mol_type = other DNA
acgaatctctggtatacggcgtgtttcccaaccaggacggcacattcaccgcgatgacgtataccaaaagcaaaa

SEQ ID NO: 669242 - DNA, 75 bp, synthetic construct
  source 1..75: mol_type = other DNA
catcgattacagcagcagcacccacagctacggctggcgcgtcagcaaaccactctcgaacgtctacaaaagcgg

SEQ ID NO: 669243 - DNA, 75 bp, synthetic construct
  source 1..75: mol_type = other DNA
aattacggctggcacgccagcagactgcgcttgaacgcctgcaaaaacgaatgagcttcgcactggaaaatcagc

SEQ ID NO: 669244 - DNA, 75 bp, synthetic construct
  source 1..75: mol_type = other DNA
agctccggctggcacgccagcaaaccatgcttgagcgcctgcaaaagcggatgagctttgcgctggaaaatcaac

SEQ ID NO: 669245 - DNA, 75 bp, synthetic construct
  source 1..75: mol_type = other DNA
gctgattataaaaaagcgcaacaatatgttattgatagtctgagtgatgctgatttaaaaagcaaaaatgtgaat

SEQ ID NO: 669246 - DNA, 75 bp, synthetic construct
  source 1..75: mol_type = other DNA
acgcaagattccaaaatggtgtattgaccgtatcccttctgatgctcaaatcataggtgaaacggaactacatta

SEQ ID NO: 669247 - DNA, 75 bp, synthetic construct
  source 1..75: mol_type = other DNA
atgattgatttaacagaacgctatgaaactattaagtctgtttgtgaaagcttaaagttacaaaataagccaacc

SEQ ID NO: 669248 - DNA, 75 bp, synthetic construct
  source 1..75: mol_type = other DNA
atggatactatcgatcttggcaacagcgaatctctgatgtgcggcgtgttccccaaccaggacggtacgttcacc

SEQ ID NO: 669249 - DNA, 75 bp, synthetic construct
  source 1..75: mol_type = other DNA
gcattactgtaaaaagcaactgttctttacaaagaaatttaatcagcccttcttatcctgctttgggagggaatg

SEQ ID NO: 669250 - DNA, 75 bp, synthetic construct
  source 1..75: mol_type = other DNA
tctttttattagtcaatccactaaggctgattatgaaaaaaaagcacaacaatatgttattgatagcctgagtga

SEQ ID NO: 669251 - DNA, 75 bp, synthetic construct
  source 1..75: mol_type = other DNA
gcgattaacacagcgactaacccagcaaaatccgcagtcacgtattcatcgcgcgcaaacgcggattcagcaact

SEQ ID NO: 669252 - DNA, 75 bp, synthetic construct
  source 1..75: mol_type = other DNA
gccatgacgtataccaaaagcaaaacgtttaaaaccgaatctggcgcgcgttgctggttagccagaaacactgac

SEQ ID NO: 669253 - DNA, 75 bp, synthetic construct
  source 1..75: mol_type = other DNA
atgcaaaaaatcgacctcggcaacaacgaatccctggtgtgcggcgtgttccccaaccaggatggaacgttcact

SEQ ID NO: 669254 - DNA, 75 bp, synthetic construct
  source 1..75: mol_type = other DNA
gcgatgacgtataccaaaagcaaaacgtttaaaaccgaatctggagcgcgtcgctggctggaaagaaattcaggt

SEQ ID NO: 669255 - DNA, 75 bp, synthetic construct
  source 1..75: mol_type = other DNA
tcgacgcgatcgcaaatgcagacgcttctgctctcgatttcatgacaggaatgaccggcggcgcaggtaacccgg

SEQ ID NO: 669256 - DNA, 75 bp, synthetic construct
  source 1..75: mol_type = other DNA
tggtgctggtgctaacgcgttctacgaaggtatagacaatgaggggaacatagttcgcgttccagctggctctat

SEQ ID NO: 669257 - DNA, 75 bp, synthetic construct
  source 1..75: mol_type = other DNA
atgcttatgcgtccggcgacagggagcagatgcgtaatcttattacagcattcccagaagagtttgaggaagtcc

SEQ ID NO: 669258 - DNA, 75 bp, synthetic construct
  source 1..75: mol_type = other DNA
acgaatctctggtgtacggcgtgtttcccaaccaggacggcacgttcaccgcgatgacgtataccaaaagcaaaa

SEQ ID NO: 669259 - DNA, 75 bp, synthetic construct
  source 1..75: mol_type = other DNA
cctggaagcagttagcccgctttcgacgctggcgcgtggttatagcgtcaccagcgccgcagatggcgcagtgtt

SEQ ID NO: 669260 - DNA, 75 bp, synthetic construct
  source 1..75: mol_type = other DNA
gtgatggcgtggtgattagtgaagtcagtgctgtaacaaaagcgcgtaagccgcgtaagaaagcggctaatccgt

SEQ ID NO: 669261 - DNA, 75 bp, synthetic construct
  source 1..75: mol_type = other DNA
acgaatatctggtttgcggcgtgttccccaaccaggacggcacgttcaccgcaatgacgtataccagaagcaaaa

SEQ ID NO: 669262 - DNA, 75 bp, synthetic construct
  source 1..75: mol_type = other DNA
acgttcaccgcaatgacgtataccaaaagcaaaacgtttaaaaccgaaaatggtgcccgtcgctggcttgccaaa

SEQ ID NO: 669263 - DNA, 75 bp, synthetic construct
  source 1..75: mol_type = other DNA
ttcaccgcaatgacgtataccaaaagtaaaacgtttaaaaccgcagctggcgcgcatcgctggttagcaagaaac

SEQ ID NO: 669264 - DNA, 75 bp, synthetic construct
  source 1..75: mol_type = other DNA
tctgcgtaatctgacgctgggtaaagcattgggtgacagccaacgggcgcagctggtgacatggatgaaaggcaa

SEQ ID NO: 669265 - DNA, 75 bp, synthetic construct
  source 1..75: mol_type = other DNA
tgtatcgacgtcgggcattgttattcgccacattgtgccgaatgtactcggtgtggtggtggtctacgcatcact

SEQ ID NO: 669266 - DNA, 75 bp, synthetic construct
  source 1..75: mol_type = other DNA
gatgtggctcgtgcaggttggtgtgccgactacaacgaaccgacctccttcctgaacaccatgctgtcgaacagc

SEQ ID NO: 669267 - DNA, 75 bp, synthetic construct
  source 1..75: mol_type = other DNA
ccggttgtagctcttgaatcaactattatttcgcatggtatgccatttccgcaaaatgcccagaccgcaattgaa

SEQ ID NO: 669268 - DNA, 75 bp, synthetic construct
  source 1..75: mol_type = other DNA
ttaagcaaagaagaaattgaattgctgggtcgtgaaggacataacgtaacgaaagttagccgtcgcgatttacct

SEQ ID NO: 669269 - DNA, 75 bp, synthetic construct
  source 1..75: mol_type = other DNA
tgggggataaaaccggcagcggtgactatggcaccaccaacgatatcgcggtgatctggccaaaagatcgtgcgc

SEQ ID NO: 669270 - DNA, 75 bp, synthetic construct
  source 1..75: mol_type = other DNA
atttttggttacatagactcacggggtaatgctcatttgtctgcaaaaaatatcccgccagcctggctgccggat

SEQ ID NO: 669271 - DNA, 75 bp, synthetic construct
  source 1..75: mol_type = other DNA
attttcggctatacggattcacagggaaacgcttatttatctgccaaaaatgttccgccctcctggctgccggat

SEQ ID NO: 669272 - DNA, 75 bp, synthetic construct
  source 1..75: mol_type = other DNA
tggacgcatttgatgaaatgactccggagcaacgacgctcatttcttgaggttgggcgcttctatactcagccaa

SEQ ID NO: 669273 - DNA, 75 bp, synthetic construct
  source 1..75: mol_type = other DNA
attgactcagccggaatggtttggctggagccaggaaaaacgtaacgaagaagcgaaaaaactgctggctgaagc

SEQ ID NO: 669274 - DNA, 75 bp, synthetic construct
  source 1..75: mol_type = other DNA
tctcgacggccatccggctccgggcgttgctgaatcctgggataataaagacgctaaagtctggacattccatct

SEQ ID NO: 669275 - DNA, 75 bp, synthetic construct
  source 1..75: mol_type = other DNA
cgaaaaatggactcaacctggcaatatcgtcaccaacggcgcctatacattaaaagattgggttgttaacgaacg

SEQ ID NO: 669276 - DNA, 75 bp, synthetic construct
  source 1..75: mol_type = other DNA
agaatatgctttgttatggtgtagcacctcacggcgttgcagcggccaatccacttatccagcatcctgaaatac

SEQ ID NO: 669277 - DNA, 75 bp, synthetic construct
  source 1..75: mol_type = other DNA
aacaaacgctggcctgggcgcagcagaaactaaagccaaccaacacgctgcaaccgattctggaaaaactgtatc

SEQ ID NO: 669278 - DNA, 75 bp, synthetic construct
  source 1..75: mol_type = other DNA
agctatgagcgcattctggcgtttgcacagagcttcattggtcgcgtattcctgttcctgatgatcgtcctgccg

SEQ ID NO: 669279 - DNA, 75 bp, synthetic construct
  source 1..75: mol_type = other DNA
acgacgccgaaactgctggctaatgaaaccgacgcgcgtttcattggctacggcgcaatgctgatggagtccttc

SEQ ID NO: 669280 - DNA, 75 bp, synthetic construct
  source 1..75: mol_type = other DNA
gttcaggtttatttggtgcggtttgcgcttatgaattaaataaaagaaataaacgtgtgttggtcattgagaaaa

SEQ ID NO: 669281 - DNA, 75 bp, synthetic construct
  source 1..75: mol_type = other DNA
ttgcatgggatagaagtaaaaactgaaactgattactttgagaataaacaatattttgatagtttagcggaaaaa

SEQ ID NO: 669282 - DNA, 75 bp, synthetic construct
  source 1..75: mol_type = other DNA
cagaggaggcgattgcaaagattgaatcacaaaagcttaagttagaacgtgaaccattaaatctggaagagcagg

SEQ ID NO: 669283 - DNA, 75 bp, synthetic construct
  source 1..75: mol_type = other DNA
tgctgttcccagcgttaatatcggtaaagccttcgagaagcctcagaaaaagaacatgcccagcattcgaccgga

SEQ ID NO: 669284 - DNA, 75 bp, synthetic construct
  source 1..75: mol_type = other DNA
tgtcatcctgctcaatattaatgccgggcagattattggcgtttatcccgccagctacgtgaatcatcttcgttt

SEQ ID NO: 669285 - DNA, 75 bp, synthetic construct
  source 1..75: mol_type = other DNA
atatcgttccctcacgctgcccaacgccaaatacaaactcaccgcacaaacattgcaatggctggcagaggagac

SEQ ID NO: 669286 - DNA, 75 bp, synthetic construct
  source 1..75: mol_type = other DNA
acccggactatctgactgagatactcgacggggtaaggcggatcgacgatcagctgctgcacatctttctgacgc

SEQ ID NO: 669287 - DNA, 75 bp, synthetic construct
  source 1..75: mol_type = other DNA
acccggactatctgactgagatactcgacggggtaaggcggatggcactgttgcaaatagtcggtggtgataaac

SEQ ID NO: 669288 - DNA, 75 bp, synthetic construct
  source 1..75: mol_type = other DNA
atcatcatcccaatgacgctcgtgcacccggactatctgactgagatactcgacggggggcactgttgcaaatag

SEQ ID NO: 669289 - DNA, 75 bp, synthetic construct
  source 1..75: mol_type = other DNA
atggtggtgaacagcatcaattgtggaatgaatgttgccgaagcgaccaatgcgcctcgtttccaccatcagtgg

SEQ ID NO: 669290 - DNA, 75 bp, synthetic construct
  source 1..75: mol_type = other DNA
caatgaccggatacaaagatcacaacagaacggcgtttttcacagaggcgatgaggctcgcggcagacgggcacg

SEQ ID NO: 669291 - DNA, 75 bp, synthetic construct
  source 1..75: mol_type = other DNA
accgcctgtcagggaagacggtaaaagcatcacgcagccgggagtcgatcagacgccgcacaaccagcagattaa

SEQ ID NO: 669292 - DNA, 75 bp, synthetic construct
  source 1..75: mol_type = other DNA
cggatctatccttaaagctatggcagataataaaaggccacagatcgacaaaagaaatcatctatatttgccagt

SEQ ID NO: 669293 - DNA, 75 bp, synthetic construct
  source 1..75: mol_type = other DNA
taattaaaagcttgaattatttggcagagaaatccagttgcttaaatgatgcacaatatattttgacgttaaata

SEQ ID NO: 669294 - DNA, 75 bp, synthetic construct
  source 1..75: mol_type = other DNA
ttcaaatctattattgattgttacgatacaaaagcaagaatacctcctgattttgcaccacatctttaccttttc

SEQ ID NO: 669295 - DNA, 75 bp, synthetic construct
  source 1..75: mol_type = other DNA
cagcagtacatgagtatttgtattccgatgctcatgtgtgccgatgtcatttacttgctggaaggctgggaggat

SEQ ID NO: 669296 - DNA, 75 bp, synthetic construct
  source 1..75: mol_type = other DNA
acgcatttgggggctaaattcttttgatccgtcacaaggtaacttacttctgccacgtctggaatggcggcgctg

SEQ ID NO: 669297 - DNA, 75 bp, synthetic construct
  source 1..75: mol_type = other DNA
ccaccacgaaagaacaacactggccggacaaaactggctggacgcgattaatcgaactggcaacgaaaaccatcg

SEQ ID NO: 669298 - DNA, 75 bp, synthetic construct
  source 1..75: mol_type = other DNA
tttccctgcgctcggcgaaaatcagcggcaatgtcgtgcggctgtatgccggagcaggcattgtccgaggctcag

SEQ ID NO: 669299 - DNA, 75 bp, synthetic construct
  source 1..75: mol_type = other DNA
cgttcaggatgccgatgacacatcgattcctgccgatgttgaagaaaaactgctgcgctttgccccgcgccggtt

SEQ ID NO: 669300 - DNA, 75 bp, synthetic construct
  source 1..75: mol_type = other DNA
caatctgaactgctatcatttctttatggcttttgatggtgaaagcgcatttctgggttcctcgccagagcgact

SEQ ID NO: 669301 - DNA, 75 bp, synthetic construct
  source 1..75: mol_type = other DNA
ctggttggccagtcagcaaacgtatccgcaattctactggcaacaacgtaatggtgatgaagaggccgcggtgct

SEQ ID NO: 669302 - DNA, 75 bp, synthetic construct
  source 1..75: mol_type = other DNA
tatggaagtttactgttaagtcggaagacaatgaaagagtttgtgagagatggattagcatatttgatgagcaga

SEQ ID NO: 669303 - DNA, 75 bp, synthetic construct
  source 1..75: mol_type = other DNA
accaccagttccagcactaatgccatgatgctgatggaaaatggtgaaaatgaaatcagtctggagattggggcg

SEQ ID NO: 669304 - DNA, 75 bp, synthetic construct
  source 1..75: mol_type = other DNA
cattggggatccctaaaagcacggcctatttgctgcttaatgaactcaggcgtcagcgttttcttagcgaaaaac

SEQ ID NO: 669305 - DNA, 75 bp, synthetic construct
  source 1..75: mol_type = other DNA
atggaaaccagactcaacctgctttgcgatgcaggcgttattgataaggacatttgcaaaggcatgatgcaggtc

SEQ ID NO: 669306 - DNA, 75 bp, synthetic construct
  source 1..75: mol_type = other DNA
atgaagctgaattttcgccgtaaaggcaaacaacggtttccggtgcgtaatccctcgccactggctacgccagaa

SEQ ID NO: 669307 - DNA, 75 bp, synthetic construct
  source 1..75: mol_type = other DNA
cctgaatgaagcgcgggaaatcacagagcactggctgatggaatacaacagcgatcgacctcatgaatccctgaa

SEQ ID NO: 669308 - DNA, 75 bp, synthetic construct
  source 1..75: mol_type = other DNA
aaaatccacaaaaaatccgcagtaagtttaatattgaggaatcatattgtgccatcaaaaccaacggtgtcctcg

SEQ ID NO: 669309 - DNA, 75 bp, synthetic construct
  source 1..75: mol_type = other DNA
caatgtggatgtgcgcactgaactggatgtatctgcccaggtgtttgactcatcctccgcgctggctgttcagtc

SEQ ID NO: 669310 - DNA, 75 bp, synthetic construct
  source 1..75: mol_type = other DNA
atgcgaagggaaattcagcagcggctacagtgggtaaaactctatgaaacgtccggtgatgcggggttcgtatgc

SEQ ID NO: 669311 - DNA, 75 bp, synthetic construct
  source 1..75: mol_type = other DNA
cattgcgtaaatggtggcgcagatatctggctcagggcatcgctggtctggaaagccacagccgtcgccccaagc

SEQ ID NO: 669312 - DNA, 75 bp, synthetic construct
  source 1..75: mol_type = other DNA
acgacttcatgcaatctcactggcagtggcaacgatccacaaagttctttgccagaataaggttaaatctgtcgt

SEQ ID NO: 669313 - DNA, 75 bp, synthetic construct
  source 1..75: mol_type = other DNA
cccaatgaagagcatatacaggaacagaattacaagcttgaacttgaactgagaaaattgaaacgatgtctatga

SEQ ID NO: 669314 - DNA, 75 bp, synthetic construct
  source 1..75: mol_type = other DNA
tcaggattcccgtccagaggaagtgatcgatgaattaaaaaatcagagtgtaatgctgatggaaatcaatgatgc

SEQ ID NO: 669315 - DNA, 75 bp, synthetic construct
  source 1..75: mol_type = other DNA
gccttggatggactgtggaatctaaaaggctggcaatggctctttttgctggaaggtctgccatcggtcattctt

SEQ ID NO: 669316 - DNA, 75 bp, synthetic construct
  source 1..75: mol_type = other DNA
actgaagtattgttccgtcatttgccgcgtctggcgattgttgatgcgctgaagaagcagcaccgtttcttccat

SEQ ID NO: 669317 - DNA, 75 bp, synthetic construct
  source 1..75: mol_type = other DNA
ctggcgatgaatacgccgcgcgaagagaagcagattttccacttcctgctgccggatagcggcatggccaactac

SEQ ID NO: 669318 - DNA, 75 bp, synthetic construct
  source 1..75: mol_type = other DNA
cacaacaaaaccggaatattcttttacaggcaaaagttcagggtgcacagttacagaaacaactcgaagaatcag

SEQ ID NO: 669319 - DNA, 75 bp, synthetic construct
  source 1..75: mol_type = other DNA
aaaaagcacaggaaaccctcgtttcagggaaaatttggcaagatatttacctattgttgaaaaatataaaaccaa

SEQ ID NO: 669320 - DNA, 75 bp, synthetic construct
  source 1..75: mol_type = other DNA
tgagattagcaaataccacgaagacgagaaggtctacgagaaagacggcagtctgcgcattcaccgcaaaggcag

SEQ ID NO: 669321 - DNA, 75 bp, synthetic construct
  source 1..75: mol_type = other DNA
gatgctcggaaacccgccgtggctgaaggtggaatggcaggaagctggcgtgctgggcgactacgagccggagtt

SEQ ID NO: 669322 - DNA, 75 bp, synthetic construct
  source 1..75: mol_type = other DNA
gtgaaccaaatcggcggtaaagagcgttatttctttggcaatattttgtggcagacacgggcgttgatggaccgc

SEQ ID NO: 669323 - DNA, 75 bp, synthetic construct
  source 1..75: mol_type = other DNA
ccccccccccccaccccccccacccccccccccccccccccccccccccccccccccccccccccccccccccca

SEQ ID NO: 669324 - DNA, 75 bp, synthetic construct
  source 1..75: mol_type = other DNA
ctggcgaacggtgccaggtgattgttcctccggcctgtgagcgcgatacggtatctatcaccatccgtaagccat

SEQ ID NO: 669325 - DNA, 75 bp, synthetic construct
  source 1..75: mol_type = other DNA
cactcaaatgtgaaagcagtgattatttcaaaacaacaattaaaactactcaactttcgggagagctactgaaga

SEQ ID NO: 669326 - DNA, 75 bp, synthetic construct
  source 1..75: mol_type = other DNA
gaagaaaagtggccattcggcggacaacattcgcctgaaaacaagaatcaagcgaatgatgagaagctgaaacac

SEQ ID NO: 669327 - DNA, 75 bp, synthetic construct
  source 1..75: mol_type = other DNA
atggaatttaaagatttaccaatgccattccaggaaatggcagcgaatatagttcgctcccaactggcgactctt

SEQ ID NO: 669328 - DNA, 75 bp, synthetic construct
  source 1..75: mol_type = other DNA
ggtgaagatgaaccgagaaaggtgacggattattatcgttttgtgaatcgtgaaatgatagggccatcttcggag

SEQ ID NO: 669329 - DNA, 75 bp, synthetic construct
  source 1..75: mol_type = other DNA
cccgttacacatatacggaaattgccgaaagatttggcgtagaaattagtaccgcttcgcgtatctggtctggaa

SEQ ID NO: 669330 - DNA, 75 bp, synthetic construct
  source 1..75: mol_type = other DNA
tcgtccgacgattttatggaacgacacccgcagtgcgcaggagtgtgcggagctggaagagatcgcaccagagtt

SEQ ID NO: 669331 - DNA, 75 bp, synthetic construct
  source 1..75: mol_type = other DNA
ctaactacattccagcatgtgatgcacaggagtatgcaaagcgcaccccacgcgttacttggactgaacctggtg

SEQ ID NO: 669332 - DNA, 75 bp, synthetic construct
  source 1..75: mol_type = other DNA
gcgatgctgaacgccatcaggctttgatgcaacgttatcaacagtttaactcgctatacaacaacgatcttaact

SEQ ID NO: 669333 - DNA, 75 bp, synthetic construct
  source 1..75: mol_type = other DNA
accggtggtgcgcttggcgcggcgcgtctggcttgtctcgccgcaggtaaaccgctgacggcggtctgcgaaaaa

SEQ ID NO: 669334 - DNA, 75 bp, synthetic construct
  source 1..75: mol_type = other DNA
accaactaccagaagatgatgaagatactaacgagggcggcgaagtcgatactacctccgaagaagcaactacca

SEQ ID NO: 669335 - DNA, 75 bp, synthetic construct
  source 1..75: mol_type = other DNA
attttgaaatcaactggaaaatcagatctgtacggtgcacaacttggtgggttcgtatataccgaaagttttggt

SEQ ID NO: 669336 - DNA, 75 bp, synthetic construct
  source 1..75: mol_type = other DNA
atctggaccacatttctttgtggggaatgcttattacaaaacgccacggactttatgtaaattaaatagtgacta

SEQ ID NO: 669337 - DNA, 75 bp, synthetic construct
  source 1..75: mol_type = other DNA
ggtgaagttggcggcattaaagatgacgaaacaggttcctggaatgaagcggggcatcaaagccgtattttgacc

SEQ ID NO: 669338 - DNA, 75 bp, synthetic construct
  source 1..75: mol_type = other DNA
catgcaagacaactgatcgctgttttagagaaatttgcggcccaacctacacgtttgggggatttgcaaaaagag

SEQ ID NO: 669339 - DNA, 75 bp, synthetic construct
  source 1..75: mol_type = other DNA
ttataaaattaggactatttgctcgtctctatgattctgacgacacgccggccctacaagctcgtcttcctgcat

SEQ ID NO: 669340 - DNA, 75 bp, synthetic construct
  source 1..75: mol_type = other DNA
ggcgtttgggggcggaaagaggtgtgacaggactcctgcacccggaagggatttatgatgatcctactggtgggc

SEQ ID NO: 669341 - DNA, 75 bp, synthetic construct
  source 1..75: mol_type = other DNA
atggagaaatgcgttgagtacggtaaaacactcgcggtcgccggggaaaccagtaccgggaaaaccacctatatg

SEQ ID NO: 669342 - DNA, 75 bp, synthetic construct
  source 1..75: mol_type = other DNA
cacgtatatcactacaacgcagtaggcgatgttggcggaatcgccatgtccgggattgcgcagttacctttcaga

SEQ ID NO: 669343 - DNA, 75 bp, synthetic construct
  source 1..75: mol_type = other DNA
cattaagcaactttgaagagtgtgctgcgatggctgaacgtatcgaggagttggagcaggccaacacaggacagg

SEQ ID NO: 669344 - DNA, 75 bp, synthetic construct
  source 1..75: mol_type = other DNA
acgtaaccctgtctggccgacgcgtgtcgtttcgtcccgcaaccggaaatccttccgccccgtcattctgggggt

SEQ ID NO: 669345 - DNA, 75 bp, synthetic construct
  source 1..75: mol_type = other DNA
atctcaatactatctttaagctaaagcccaaaggaataagtatcagagactatattcaacgtaatggggatttgt

SEQ ID NO: 669346 - DNA, 75 bp, synthetic construct
  source 1..75: mol_type = other DNA
aattcgtactcacagaccgaaattatctatcacaatactggtgctaatttaggtggagctggggggttctatcaa

SEQ ID NO: 669347 - DNA, 75 bp, synthetic construct
  source 1..75: mol_type = other DNA
tgagatcaacgcattagaggaaacgcgtatcaacgatgtttgccgtattgcggaactaacaaaacaactggagtc

SEQ ID NO: 669348 - DNA, 75 bp, synthetic construct
  source 1..75: mol_type = other DNA
atgacaatgcgccgcaaactgcgaaagagccggattatctggatatcccagcattcctgcgtaagcaagctgatt

SEQ ID NO: 669349 - DNA, 75 bp, synthetic construct
  source 1..75: mol_type = other DNA
acgacaatacgccgcaaaccgcgaaagaacctgattatctggatatccctgcattcttgcgtaagcaagctgact

SEQ ID NO: 669350 - DNA, 75 bp, synthetic construct
  source 1..75: mol_type = other DNA
ttgaaggtgttgaattcttcgcggtaaataccgatgcacaagcgctgcgtaaaacagcggttggacagacgattc

SEQ ID NO: 669351 - DNA, 75 bp, synthetic construct
  source 1..75: mol_type = other DNA
tgtactgtcccgtgagaccagtgcccagacggggaaattccgctcctatccctatcaggacggcataatggatgc

SEQ ID NO: 669352 - DNA, 75 bp, synthetic construct
  source 1..75: mol_type = other DNA
ggcagaacttccccctcttaacgtactgattcaaatcaacattagcgatgaaaacagtaagtcaggcattcaact

SEQ ID NO: 669353 - DNA, 75 bp, synthetic construct
  source 1..75: mol_type = other DNA
ggctgcaacgcgttgcggccgttctccagaagaaattacgctgcttgcagtcagtaaaacaaaacctgcgagcgc

SEQ ID NO: 669354 - DNA, 75 bp, synthetic construct
  source 1..75: mol_type = other DNA
ttattcgcatctctggcttatggatgacgatttgttaccggaagataattgtcttgaaattctactcaaatgtaa

SEQ ID NO: 669355 - DNA, 75 bp, synthetic construct
  source 1..75: mol_type = other DNA
ggttaatttgaaagagaaacaggaaaatcgcatctctctggtattgaaaaatgatggatggtctgctgaacgata

SEQ ID NO: 669356 - DNA, 75 bp, synthetic construct
  source 1..75: mol_type = other DNA
ggcagggtgtgactcatcgaaggatgccaataaagcaaactttgaaaaagcgattaatacgaaacttgagaagga

SEQ ID NO: 669357 - DNA, 75 bp, synthetic construct
  source 1..75: mol_type = other DNA
atgaaaacgataaaacccgaatcgatagctcttttttgcctcttatctggagatgtggatctggcgaaacatctg

SEQ ID NO: 669358 - DNA, 75 bp, synthetic construct
  source 1..75: mol_type = other DNA
tatttttaactggtcgcccgccgaaatcttcatgatgacgcccggcgaagtggttagctggcgtgagcgggcggc

SEQ ID NO: 669359 - DNA, 75 bp, synthetic construct
  source 1..75: mol_type = other DNA
tgagtctgatttgaaagagaaacaaacaaaacatattacactggttttgaaaaatgatggatggtctgctgaacg

SEQ ID NO: 669360 - DNA, 75 bp, synthetic construct
  source 1..75: mol_type = other DNA
gcaaaaaaagaagttatcgacaacgaccgcgaagactggaagcgtatctcggcatcaatgcgcaaacagcctgat

SEQ ID NO: 669361 - DNA, 75 bp, synthetic construct
  source 1..75: mol_type = other DNA
cttttcttagggagactgcagctgctgctgaaagatagcgagctaaaggatatggctgtagaatttcataaactt

SEQ ID NO: 669362 - DNA, 75 bp, synthetic construct
  source 1..75: mol_type = other DNA
atgaaaacgataaaacccgaatcgatagcccttttttgcctctcctctggcgatattaatctggcgaaatatctg

SEQ ID NO: 669363 - DNA, 75 bp, synthetic construct
  source 1..75: mol_type = other DNA
cagagaaaccgctgtcaatgacgcattttgtcggacgttaacacgaggaagtctggctattccgcaatgccatct

SEQ ID NO: 669364 - DNA, 75 bp, synthetic construct
  source 1..75: mol_type = other DNA
ttccagagaaaccgctgtcaatgacgcattttgtcagacgttaacacgaggaagtctggctattccacatagcca

SEQ ID NO: 669365 - DNA, 75 bp, synthetic construct
  source 1..75: mol_type = other DNA
acacaatgcccgtttgctgactggtccggctggtggggctgtagcattaatccattatctgaatgaaatctgtca

SEQ ID NO: 669366 - DNA, 75 bp, synthetic construct
  source 1..75: mol_type = other DNA
ttgctagtacgaatgcgagtacttcgacatcgctgacctatgatttagggagcatgtcgaaagatcaggttgttg

SEQ ID NO: 669367 - DNA, 75 bp, synthetic construct
  source 1..75: mol_type = other DNA
gagcagttctaacaaggatgcgaaagccaaacttcctcaagaagtgatcgactatataaaagatcctcgtaatgg

SEQ ID NO: 669368 - DNA, 75 bp, synthetic construct
  source 1..75: mol_type = other DNA
aaacctattaacgagtgcacgttctgatattcagtcactgcaatacagaactatttcagcaatatcccttggtaa

SEQ ID NO: 669369 - DNA, 75 bp, synthetic construct
  source 1..75: mol_type = other DNA
cgctatttattcgaatgagttaaatctgttttctgatgttgtcgacctaattgtcaaacgtgctatttatcgcaa

SEQ ID NO: 669370 - DNA, 75 bp, synthetic construct
  source 1..75: mol_type = other DNA
acgaaagattaatatcgcagcaatctgaactggagaggaaagtgaaacatctgacagaaatggtgaggcagcaca

SEQ ID NO: 669371 - DNA, 75 bp, synthetic construct
  source 1..75: mol_type = other DNA
ggttggcatggacgccatgaaagaggtggtcagaagcaaaatcgccgtctgcggctcggcaaatcgattacggct

SEQ ID NO: 669372 - DNA, 75 bp, synthetic construct
  source 1..75: mol_type = other DNA
cagggggtcaagtaacattatttgatgaagaagacgacgaggtgggtaaatggcatcttgaacaatatgttgagg

SEQ ID NO: 669373 - DNA, 75 bp, synthetic construct
  source 1..75: mol_type = other DNA
attccggtgctgctgacccgttatgccgcccagagcctttatgcgccggcccgaacggtcgaggcggtgcctggt

SEQ ID NO: 669374 - DNA, 75 bp, synthetic construct
  source 1..75: mol_type = other DNA
cgctggcctgtcttgctgcattaccggcgcaggcggttgaactggtgaaatgggagcgtattccgctgccggtgg

SEQ ID NO: 669375 - DNA, 75 bp, synthetic construct
  source 1..75: mol_type = other DNA
gagtagttctgacaagaataagaaagccaaacttcctcaagaagtgattgactatataaatgatcctcgcaatga

SEQ ID NO: 669376 - DNA, 75 bp, synthetic construct
  source 1..75: mol_type = other DNA
tttctagtgcgagtacttcgacatcgatgacctatgatttagggaacatgtcgaaagatgaagttgttgagctgt

SEQ ID NO: 669377 - DNA, 75 bp, synthetic construct
  source 1..75: mol_type = other DNA
cgatatcaaccaggccgaaagctggagccgtagcttagcaacgcttgcagaagaagcgctggcgaaacgtccagg

SEQ ID NO: 669378 - DNA, 75 bp, synthetic construct
  source 1..75: mol_type = other DNA
gtatgatcattgtgttttttttgctggcgctctggtccctgccccgctggaccggccggatacggcagtttttcg

SEQ ID NO: 669379 - DNA, 75 bp, synthetic construct
  source 1..75: mol_type = other DNA
gcttcagcgcagcgtaaagcgaaagatcgcattgacttagagcgtcattacggtattaaaaatgagattaaagat

SEQ ID NO: 669380 - DNA, 75 bp, synthetic construct
  source 1..75: mol_type = other DNA
ttatcgtacaacggatggttggaatataccattagcaacaatcttattagcctttgtacaaaactacgaattctc

SEQ ID NO: 669381 - DNA, 75 bp, synthetic construct
  source 1..75: mol_type = other DNA
tgaggccattatgaagattgtaaactggtttaatcgtaatgatgataagacagatgctattcagaaaaatatggg

SEQ ID NO: 669382 - DNA, 75 bp, synthetic construct
  source 1..75: mol_type = other DNA
ttgtattcctggcactaactctttttcagtacgtcatattcctactggatatgtaatggcacaaactttaacttt

SEQ ID NO: 669383 - DNA, 75 bp, synthetic construct
  source 1..75: mol_type = other DNA
tccgcgccagcctgatttgcgatggacattcgattccattgctgagttggatagttccttcggaaaaacagcaaa

SEQ ID NO: 669384 - DNA, 75 bp, synthetic construct
  source 1..75: mol_type = other DNA
atgaggttaaagatctcggttattatcttttagtttatcgtaaaaaaatacgtaatcttatgcggcgtttgaaag

SEQ ID NO: 669385 - DNA, 75 bp, synthetic construct
  source 1..75: mol_type = other DNA
acagctttgcgaatgctgaaacgctgggagaattgtatagccgtgcgaagctgggcggtgtagacgttaaccaga

SEQ ID NO: 669386 - DNA, 75 bp, synthetic construct
  source 1..75: mol_type = other DNA
gactgagcgattatatcgacttcaaatcccgtgcctctgctggcgaattcagcaagctgttaaccctgggcgtta

SEQ ID NO: 669387 - DNA, 75 bp, synthetic construct
  source 1..75: mol_type = other DNA
atgcaagctccagcttacacatttgcgcctgttctcaattttgcacctgaattactggtaaatgcacaagtgccg

SEQ ID NO: 669388 - DNA, 75 bp, synthetic construct
  source 1..75: mol_type = other DNA
gtaaactggtttaatcgtaatgatgataagacagatgctattcagaaaaatatgggtgatgcaccgccattaagc

SEQ ID NO: 669389 - DNA, 75 bp, synthetic construct
  source 1..75: mol_type = other DNA
tctgaatttatggctaacagcttcgctaacgctgaaacgctgggtgaattgtatagccgtgcgaagctgggcggt

SEQ ID NO: 669390 - DNA, 75 bp, synthetic construct
  source 1..75: mol_type = other DNA
cacaggcaaggcaacaggcacaaatagcagcacgcagtgagaaggcagccttaaaactgttagacgttggatcaa

SEQ ID NO: 669391 - DNA, 75 bp, synthetic construct
  source 1..75: mol_type = other DNA
cggacagggcgtttatcgcagagcctgcccgccgtaacgccaccgcagtacgtaaggccgggggccgtccccgtg

SEQ ID NO: 669392 - DNA, 75 bp, synthetic construct
  source 1..75: mol_type = other DNA
tcgtccgcactgggaacgcatcgcagaacacagcgcggcgctggcgcatactcgccagcagattgaagaagtaaa

SEQ ID NO: 669393 - DNA, 75 bp, synthetic construct
  source 1..75: mol_type = other DNA
gtttggtggggaccatattgctgctggcagcgtggctgcctttgtccggcaccagttacggcattgccgggctac

SEQ ID NO: 669394 - DNA, 75 bp, synthetic construct
  source 1..75: mol_type = other DNA
attgggtaagtaaaatcacccaccttgatcaagatgtactgaatgtattattggatggtaaagtgaagtttattt

SEQ ID NO: 669395 - DNA, 75 bp, synthetic construct
  source 1..75: mol_type = other DNA
agaggcgtatcaggcactggaaccgggtgttaatcaggcccgcttactgacgcttgaaaacgaagtgaaaaagct

SEQ ID NO: 669396 - DNA, 75 bp, synthetic construct
  source 1..75: mol_type = other DNA
tggcttaccgcccaggaagagcatgaaaagcaactgcaattactcaatcagcgtcaagaattgcaggcgcaaatt

SEQ ID NO: 669397 - DNA, 75 bp, synthetic construct
  source 1..75: mol_type = other DNA
agacgttacagcaacaggatgttctggcggcgcaaagtctgcaaaaagcccaggcgcagtttgacaccgcgctac

SEQ ID NO: 669398 - DNA, 75 bp, synthetic construct
  source 1..75: mol_type = other DNA
gtgtggggaggatatacttttgatgttttgcaccaaagggataaggcagaagctgatcttatagagttaagaaat

SEQ ID NO: 669399 - DNA, 75 bp, synthetic construct
  source 1..75: mol_type = other DNA
cggattttaccattattcactataccagagtggaggatgagcttattaaacaacaaggtgcagtaataacaactg

SEQ ID NO: 669400 - DNA, 75 bp, synthetic construct
  source 1..75: mol_type = other DNA
cgtaattctcgattatatgctggataaaatggggaacaaatatgacgcgattgtttttatcgatgacgggcaagc

SEQ ID NO: 669401 - DNA, 75 bp, synthetic construct
  source 1..75: mol_type = other DNA
ttttggctttaccctgggggcagtaaaaataaaacccagtgaaagtagtctgcttaaattaggtcgcttcgggac

SEQ ID NO: 669402 - DNA, 75 bp, synthetic construct
  source 1..75: mol_type = other DNA
cgcttcgggacggattatagttatggtagcttacctctgagagatcccctcataatttccccaaaacgtaaccat

SEQ ID NO: 669403 - DNA, 75 bp, synthetic construct
  source 1..75: mol_type = other DNA
tgacccatgatgaacaggaactgtttgaagtcattaataaaaaattactggcgcatcttgatgatgtcagctcat

SEQ ID NO: 669404 - DNA, 75 bp, synthetic construct
  source 1..75: mol_type = other DNA
gaagcgcaaagcctccgacaagatgagcaagcacttactcaacaatggcaagccgtcacggccagcctcaatatc

SEQ ID NO: 669405 - DNA, 75 bp, synthetic construct
  source 1..75: mol_type = other DNA
attattaaaagactcgaaaaaaagtatggttctgaatttataaaatctgaatacatgaaaattttaaatttggtg

SEQ ID NO: 669406 - DNA, 75 bp, synthetic construct
  source 1..75: mol_type = other DNA
atgcgcacttgtacacaggcagtgtgtttcagtaatatggaaaataatgaaatgaataacacagacacattagaa

SEQ ID NO: 669407 - DNA, 75 bp, synthetic construct
  source 1..75: mol_type = other DNA
gcgaaagaggtaaaacaactgtcaaaaggtaatatggtgatccgcatttatcccagcagtcagatgggtaatgcg

SEQ ID NO: 669408 - DNA, 75 bp, synthetic construct
  source 1..75: mol_type = other DNA
agcatcagtggctggatgtgaagggcacaccggaggataccaccacggtatatctggtgatgaaaggcaaaccgg

SEQ ID NO: 669409 - DNA, 75 bp, synthetic construct
  source 1..75: mol_type = other DNA
ttcaacattgtacgttatcttggtgcgttttatttgctctatctggggagtaaaattctctacgcgaccctgaag

SEQ ID NO: 669410 - DNA, 75 bp, synthetic construct
  source 1..75: mol_type = other DNA
tgggaatgtgaccgactggatatgttttttagcaaagtcttacgcgcaggtctcgagaaccaactcccccatcat

SEQ ID NO: 669411 - DNA, 75 bp, synthetic construct
  source 1..75: mol_type = other DNA
aggttcatgaacaatgtctcgcattacacagccagcagcagacgttacagcaacaggatgttctggcggcgcaaa

SEQ ID NO: 669412 - DNA, 75 bp, synthetic construct
  source 1..75: mol_type = other DNA
agctggcaacagcgccagaatgaattaagcgagctgcaaaaccgtattcagcaactgacgccgattctggacaca

SEQ ID NO: 669413 - DNA, 75 bp, synthetic construct
  source 1..75: mol_type = other DNA
acaccgtcaacaaacgctgaatgcgtggttacaggaaaatgaccgctttcgcctgtggaacaacgaattgaccgg

SEQ ID NO: 669414 - DNA, 75 bp, synthetic construct
  source 1..75: mol_type = other DNA
atctgaaggtatgttttttattcagaggctcactcttgcacaaagcatgtatctgaaagaaatctggggttatct

SEQ ID NO: 669415 - DNA, 75 bp, synthetic construct
  source 1..75: mol_type = other DNA
gctggcgcgctgtgcagacggcaaaattctcgccgacaaagtgaaagataagctggaactgacggcgacgttaac

SEQ ID NO: 669416 - DNA, 75 bp, synthetic construct
  source 1..75: mol_type = other DNA
ggatctggtcagccataaaacgcgtattgactcgctatttctcgatgaaggcttcggcacgctggatagcgaaac

SEQ ID NO: 669417 - DNA, 75 bp, synthetic construct
  source 1..75: mol_type = other DNA
cagtacgacgaaaagccgcaggtacaacaggtagcgcagatcatcaatggtgtgttcagccggttactggcaact

SEQ ID NO: 669418 - DNA, 75 bp, synthetic construct
  source 1..75: mol_type = other DNA
atacacccacgtactggatgcgggttgtggaccaggctggatgagccgccgctggcgagagcgtcacgcgcaggt

SEQ ID NO: 669419 - DNA, 75 bp, synthetic construct
  source 1..75: mol_type = other DNA
caggcgtggcaggcggtggacgagcgcccgcatgctaatcgctttttaccgccagatgaaatcgaacagtcgctg

SEQ ID NO: 669420 - DNA, 75 bp, synthetic construct
  source 1..75: mol_type = other DNA
atacacccacgtactggacgcgggttgtggacctggctggatgagccgccactggcgggaacgtcacgcgcaggt

SEQ ID NO: 669421 - DNA, 75 bp, synthetic construct
  source 1..75: mol_type = other DNA
atggaaaacactggatgacgaactggcctacgctctctggcctggtgatgtggatgccggaaacattgacggcag

SEQ ID NO: 669422 - DNA, 75 bp, synthetic construct
  source 1..75: mol_type = other DNA
gcgtggtcgcgtttaccacgctggtgcagggatcgttacccgaactgcatcaggcgtggcaggcggtggacgagc

SEQ ID NO: 669423 - DNA, 75 bp, synthetic construct
  source 1..75: mol_type = other DNA
ggatatcgaatccttaccgttgtcttctgcgactttcgatctcgcgtggagcaatctcgccgtgcagtggtgcgc

SEQ ID NO: 669424 - DNA, 75 bp, synthetic construct
  source 1..75: mol_type = other DNA
ctggcctggccgcaacaacaggggcgatatcctctgacgtatcatctttttttgggagtaattgctcgtgagtaa

SEQ ID NO: 669425 - DNA, 75 bp, synthetic construct
  source 1..75: mol_type = other DNA
gtgtcgcccgtcggcagaatcgaccattcctgccatcacccgggcagtttgttgcctggtgccgggaagaagcat

SEQ ID NO: 669426 - DNA, 75 bp, synthetic construct
  source 1..75: mol_type = other DNA
gtatccagcagggtatccagcagggagttcagcagggggcgcttcaaaaagcacgggaaatcgcccgggagctcc

SEQ ID NO: 669427 - DNA, 75 bp, synthetic construct
  source 1..75: mol_type = other DNA
cctctggagcgtgaaaaccaccgggggtgaagatggttatgtttatacgctcatcgagcaccagagcaccgaaaa

SEQ ID NO: 669428 - DNA, 75 bp, synthetic construct
  source 1..75: mol_type = other DNA
ccggaatttatgcgggcgctggctgagcgtctgccgcagcatgaggataaactgatgacaatcgcagaacgtctt

SEQ ID NO: 669429 - DNA, 75 bp, synthetic construct
  source 1..75: mol_type = other DNA
aataacggtgagttttccacgcaagaaattcgcgcctatttgccgctgacgctcggcaaccactcggtgacgccg

SEQ ID NO: 669430 - DNA, 75 bp, synthetic construct
  source 1..75: mol_type = other DNA
tacttgcggctaaaatatacacaaagccgtttccgctggttgatatcactgtcgttgatgacaatgaaatcatga

SEQ ID NO: 669431 - DNA, 75 bp, synthetic construct
  source 1..75: mol_type = other DNA
gtctgtaagggcgatatcattaacgaacattctgtggtgagtgacattaccggtaattatgtggagatcaggagt

SEQ ID NO: 669432 - DNA, 75 bp, synthetic construct
  source 1..75: mol_type = other DNA
aaagttgcattctctggggttccgggaagttattacgcaggtatcttaacgatgtaccgactcgatgcacgagaa

SEQ ID NO: 669433 - DNA, 75 bp, synthetic construct
  source 1..75: mol_type = other DNA
tttttacataccgttcgctaaagctggagacacatctgcagaaggggtatctgcaacgatcccaggctcactttg

SEQ ID NO: 669434 - DNA, 75 bp, synthetic construct
  source 1..75: mol_type = other DNA
ctgactgacgcggaattacggcgcaaggctgccgatgaactgacctgtatgacagcgcgaattaaccgtggtgag

SEQ ID NO: 669435 - DNA, 75 bp, synthetic construct
  source 1..75: mol_type = other DNA
cgctggatggcgtaatggcattaaaaggctggcagtggctgtttttgctggaaggcttcccgtcggtattactcg

SEQ ID NO: 669436 - DNA, 75 bp, synthetic construct
  source 1..75: mol_type = other DNA
atgacagccgaggtgttgcatgtcggaataacaccgggcgggatctactacattgaaacactggacggataccgg

SEQ ID NO: 669437 - DNA, 75 bp, synthetic construct
  source 1..75: mol_type = other DNA
gacgacaaaagcgcctgggttaagctcattaattctgaatgcgctttgcttaattctccgcgtctctatcccgtt

SEQ ID NO: 669438 - DNA, 75 bp, synthetic construct
  source 1..75: mol_type = other DNA
cgcaaggctgccgatgaactgacctgtatgacagcgcgaattaaccgtggtgaggctatacctgaaccagtaaaa

SEQ ID NO: 669439 - DNA, 75 bp, synthetic construct
  source 1..75: mol_type = other DNA
tatcggcgtaataaattatgggaattgggtaatgactccaacttactgatagtgttttatgttcagataatgccc

SEQ ID NO: 669440 - DNA, 75 bp, synthetic construct
  source 1..75: mol_type = other DNA
cagcagggcaaaatccgcatgggtagcgatccgggcacacaaatcccattggataacaacggacaactggttctg

SEQ ID NO: 669441 - DNA, 75 bp, synthetic construct
  source 1..75: mol_type = other DNA
gggtgaacgccataatgccctgcacgatgcgcgttaccaggcaaaatacgtttcagctatctggcaaaaactgtt

SEQ ID NO: 669442 - DNA, 75 bp, synthetic construct
  source 1..75: mol_type = other DNA
atgagtgaattaattgagactcctgattttgactttcgccagttagttaccgcagcagagggtgagccggtaact

SEQ ID NO: 669443 - DNA, 75 bp, synthetic construct
  source 1..75: mol_type = other DNA
ccgtcgagaaaatcaatgacttaggtatttttgacaagaaacagatttactaccgcatggactttagtggcttcg

SEQ ID NO: 669444 - DNA, 75 bp, synthetic construct
  source 1..75: mol_type = other DNA
tttcctgtgcggcaaaggttcatttcgaagtagcaggtaacgccatgaatgaattaattgtgaatcatgactttg

SEQ ID NO: 669445 - DNA, 75 bp, synthetic construct
  source 1..75: mol_type = other DNA
cagcagggcaaaatccgcatggaccgcgatccgggtacacaaatccaattagataacaacgggcaactgattctg

SEQ ID NO: 669446 - DNA, 75 bp, synthetic construct
  source 1..75: mol_type = other DNA
tgaaaatcgcattaccgggtcggtgctcggcgctgttgctggcggcgtgatagggcatcagtttggtggtggtcg

SEQ ID NO: 669447 - DNA, 75 bp, synthetic construct
  source 1..75: mol_type = other DNA
aaatggtgatgtccagccaatgtttaacatgacgaaagacggttacatgctggtcgttatggggtttactggtaa

SEQ ID NO: 669448 - DNA, 75 bp, synthetic construct
  source 1..75: mol_type = other DNA
ttttctggtgctgcaactgctgagtgcaggcgcggagtatcagcgcgcagcattaatcagcgccttacaaacgct

SEQ ID NO: 669449 - DNA, 75 bp, synthetic construct
  source 1..75: mol_type = other DNA
gcattactatcgatcgctttggtcattttttggtgctgcaactgctaagcgctggtgcggagtatcaacgtgcgg

SEQ ID NO: 669450 - DNA, 75 bp, synthetic construct
  source 1..75: mol_type = other DNA
gccctgctgccgattgaagaacacggcatgaaactgctggtggacattcaacacggacacaaaacgggctactac

SEQ ID NO: 669451 - DNA, 75 bp, synthetic construct
  source 1..75: mol_type = other DNA
tcaggcagccgatcatccggtgatcgctacctacccggaagggctatatctgaaagggtttgcctgtcgcgtcat

SEQ ID NO: 669452 - DNA, 75 bp, synthetic construct
  source 1..75: mol_type = other DNA
cagcgttgatacctcccaggaagcgctggatattgcacggcagaacgttgagctgaacaaactggatctgagcaa

SEQ ID NO: 669453 - DNA, 75 bp, synthetic construct
  source 1..75: mol_type = other DNA
aacgcgcactactggctggttaccaacctgtgtcaacgacggatgaaaagtgatccacttatatctccaccaacg

SEQ ID NO: 669454 - DNA, 75 bp, synthetic construct
  source 1..75: mol_type = other DNA
gtgttagccaaagggcgcgaaaaatcattacttcgtcgccatccgtgggtcttttccggtgccgtcgcacgtatg

SEQ ID NO: 669455 - DNA, 75 bp, synthetic construct
  source 1..75: mol_type = other DNA
ttttctggtactgcaactcctgagtgctggtgcagagtatcagcgcgcagcgttaattagcgccctgcaaacgct

SEQ ID NO: 669456 - DNA, 75 bp, synthetic construct
  source 1..75: mol_type = other DNA
atgccggtcgtgatatacaatttatagagcagttccgtcaggcagccgatcatccggtgatcgctacctacccgg

SEQ ID NO: 669457 - DNA, 75 bp, synthetic construct
  source 1..75: mol_type = other DNA
ggcgcgtggtttatcgctcagtcacgcgtccacttgccgaacaaacgcaggcgctgcaacggctgctggacggtg

SEQ ID NO: 669458 - DNA, 75 bp, synthetic construct
  source 1..75: mol_type = other DNA
gagctggcctactatctctggcctggtgatgcggatgccggaaacattgacggcagcatccttcgctgggctaaa

SEQ ID NO: 669459 - DNA, 75 bp, synthetic construct
  source 1..75: mol_type = other DNA
gccggacagtgaatgcgtttttgccgtggtgctgacccgtggggatgtgcgtcacatagcccgggactggagtct

SEQ ID NO: 669460 - DNA, 75 bp, synthetic construct
  source 1..75: mol_type = other DNA
atcagcctggctacggcaattgccgacgatgtgccgacagcgttaatgggcgatccgcggcgtattcgccaggtt

SEQ ID NO: 669461 - DNA, 75 bp, synthetic construct
  source 1..75: mol_type = other DNA
gggaactggtggggcagcgtttgcaactgcgccagcaacaacagcgactcagtcagcagatagtcgccgccgccg

SEQ ID NO: 669462 - DNA, 75 bp, synthetic construct
  source 1..75: mol_type = other DNA
atctcccgttcgttacgtcaacaaggggagctggtggggcagcgtttgcaactgcgccagcaacaacagcaactc

SEQ ID NO: 669463 - DNA, 75 bp, synthetic construct
  source 1..75: mol_type = other DNA
ttttcggccttgttcgtgagcgcccgatcgacattcacaaagatcccgttgcactgaacaaatacatcagcgaat

SEQ ID NO: 669464 - DNA, 75 bp, synthetic construct
  source 1..75: mol_type = other DNA
ccttccatcaggacttcaggagccacgaagaagtcaatgttgaaataagtatcgtcagtcatggcttcaatgttg

SEQ ID NO: 669465 - DNA, 75 bp, synthetic construct
  source 1..75: mol_type = other DNA
ccggaaaatgcgctgaccggacatgaaaatgaggtggtatcagcgcagccggataccgtgattgatacggctgct

SEQ ID NO: 669466 - DNA, 75 bp, synthetic construct
  source 1..75: mol_type = other DNA
aacgtctgagagaactggcagcatcgctgggacgtgagccggatatctcgggaagcgcagcagatattgcgcagc

SEQ ID NO: 669467 - DNA, 75 bp, synthetic construct
  source 1..75: mol_type = other DNA
agatgctgaacaccagtggggcgcaggtcgttgcggtaggaaatgccgcgcacgcgatagagacgttgcaaaata

SEQ ID NO: 669468 - DNA, 75 bp, synthetic construct
  source 1..75: mol_type = other DNA
tgaagctgagacatggcaggacgcagtgaaaatcggcgttgacctgctggtggcggcggatgttgtcgagccgcg

SEQ ID NO: 669469 - DNA, 75 bp, synthetic construct
  source 1..75: mol_type = other DNA
gaagatgaagaaaatttcgaccgtttacgtgcctgccgtaccgagcaggaagtactggatctcattgaccgcacc

SEQ ID NO: 669470 - DNA, 75 bp, synthetic construct
  source 1..75: mol_type = other DNA
gtcaggtgacagtcccggcggtgatgctggaaaaagtgatggcgctggcaggcagtgaaatgaagcgcctgtatg

SEQ ID NO: 669471 - DNA, 75 bp, synthetic construct
  source 1..75: mol_type = other DNA
tccgcgatgtactggatacagacgtgccggacagtgaatgtgtttttgccgtggtgctgacccgtggggatgtgc

SEQ ID NO: 669472 - DNA, 75 bp, synthetic construct
  source 1..75: mol_type = other DNA
ttgtttttgtggataaccctgtttattcagcaagttatccacgttaaattggtgctgacccgtggggatgtgcgt

SEQ ID NO: 669473 - DNA, 75 bp, synthetic construct
  source 1..75: mol_type = other DNA
gttgaacagcacggcccgtactttgtgctcgcgccaggcctggcaatgccacacggacgcccggaagagggggtt

SEQ ID NO: 669474 - DNA, 75 bp, synthetic construct
  source 1..75: mol_type = other DNA
aactgcaagtcaataacgatcaaccactggatgtatcgcaactcaatgaagatgctcatttaatggggcggagaa

SEQ ID NO: 669475 - DNA, 75 bp, synthetic construct
  source 1..75: mol_type = other DNA
atggtacaacctgcgctttatcagccaggtggaaaaagacaatactcaggcattgattcctaccatgaatatggc

SEQ ID NO: 669476 - DNA, 75 bp, synthetic construct
  source 1..75: mol_type = other DNA
gcgggaaccattagccgctctcctgccgcgcgaagaaattacacgcagtatcgcggctctggaagagtggttgaa

SEQ ID NO: 669477 - DNA, 75 bp, synthetic construct
  source 1..75: mol_type = other DNA
gctgtttttgtttacgcttgccgttacgtgttgccactgcacccgtgccaaaaacagtcaatcaggcggtgcgtc

SEQ ID NO: 669478 - DNA, 75 bp, synthetic construct
  source 1..75: mol_type = other DNA
acctgaccagtgccgataacgaaaagatgtggcaggcgcaggggcgaatgctcaccgcacaaagcctgaagatta

SEQ ID NO: 669479 - DNA, 75 bp, synthetic construct
  source 1..75: mol_type = other DNA
atgcattccgctttgcgactcaacctttttcacctaaagtgcaccgaccgtgaatttaaccctgacccgaagact

SEQ ID NO: 669480 - DNA, 75 bp, synthetic construct
  source 1..75: mol_type = other DNA
ggtatcagcgcagccggataccgtgattcaggatacggctgctctggtcacggtcgtggcactggtgacgctgca

SEQ ID NO: 669481 - DNA, 75 bp, synthetic construct
  source 1..75: mol_type = other DNA
tctggagttcctcggtcacaaagtgattcgcgcaaaccacgtcggcgactggggcactcagttcggtatgctgat

SEQ ID NO: 669482 - DNA, 75 bp, synthetic construct
  source 1..75: mol_type = other DNA
actttgatcaactggcggaagaaaaagttcgcgacgggctaaaaccgccatctatgtataaagtgatattagtca

SEQ ID NO: 669483 - DNA, 75 bp, synthetic construct
  source 1..75: mol_type = other DNA
gccaaccagatgtatatcgatactggcgcagtgttctgcggaaacctcacattgattcaggtacagggagaaggc

SEQ ID NO: 669484 - DNA, 75 bp, synthetic construct
  source 1..75: mol_type = other DNA
aaagcgagcagtgggttaattgtcgatacccttgccgcccagttttatgatcgactgctggatgtcgatccctat

SEQ ID NO: 669485 - DNA, 75 bp, synthetic construct
  source 1..75: mol_type = other DNA
ctggcggtacggtgaaactggccgatctgctggatgaagccctggagcgtgcacgtcgtctggtggcagaaaaga

SEQ ID NO: 669486 - DNA, 75 bp, synthetic construct
  source 1..75: mol_type = other DNA
gcggctatctctataccaccactgatatcgcctgtgcgaaatatcgttacgaaacactgcatgctgaccgcgtgc

SEQ ID NO: 669487 - DNA, 75 bp, synthetic construct
  source 1..75: mol_type = other DNA
actagtgtatgcaaaccagatgtacatcgacaccggcgcagtgttctgcggaaatctgacgcttaccaaagtcca

SEQ ID NO: 669488 - DNA, 75 bp, synthetic construct
  source 1..75: mol_type = other DNA
ttccgtaattatggttatcactacgttgatgaaccgggtaaagacacggcgaatatgcagcgctggaaaatcgcg

SEQ ID NO: 669489 - DNA, 75 bp, synthetic construct
  source 1..75: mol_type = other DNA
tcgaaactcctgaccggggagtgcgacgttctggcctggcctgctgccagtcagctatccattttgcgtgacgac

SEQ ID NO: 669490 - DNA, 75 bp, synthetic construct
  source 1..75: mol_type = other DNA
taacctgctggcaacggcgctgtgcgtgctggcgtggggctacttcctgcatcagggtgtggtcgatccgctggg

SEQ ID NO: 669491 - DNA, 75 bp, synthetic construct
  source 1..75: mol_type = other DNA
attatggcgctggtttccgcctgtatcatcgatccaggtgtgtacttcgctatgaacagcccgatggcggtgctg

SEQ ID NO: 669492 - DNA, 75 bp, synthetic construct
  source 1..75: mol_type = other DNA
gcgaaagaaacgccgtatgagccaatgccggaaaatgtcgaggagatcgtggcgcaggcaaaaggcgcacactaa

SEQ ID NO: 669493 - DNA, 75 bp, synthetic construct
  source 1..75: mol_type = other DNA
ccaacggcgaaagaaacgccgtatgagccgatgccggaaaatgttgaggagatcgtagcgcaggcgaaaggcgcg

SEQ ID NO: 669494 - DNA, 75 bp, synthetic construct
  source 1..75: mol_type = other DNA
ttcccgttcctgtttatcaccatcgcctgtggcgcggtgtctggcttccatgcgctgatctcttccggtaccacg

SEQ ID NO: 669495 - DNA, 75 bp, synthetic construct
  source 1..75: mol_type = other DNA
gttgaacagcacggcccgtactttgtgctcgcacccggcctggcaatgccacacggtcgcccggaagagggcgtg

SEQ ID NO: 669496 - DNA, 75 bp, synthetic construct
  source 1..75: mol_type = other DNA
gctgatgctatcctgtcgtcagcagcacaaactgatccagtggagacggcggaatccaattctcaaaaaaatgaa

SEQ ID NO: 669497 - DNA, 75 bp, synthetic construct
  source 1..75: mol_type = other DNA
caggcaagtgcgcttaccgggcaggaaaataacgaggtgtcagcgcagccggataccgtgactgatacggctgat

SEQ ID NO: 669498 - DNA, 75 bp, synthetic construct
  source 1..75: mol_type = other DNA
catcatgcagatcgtcaatctgtttgaagatgaagagaattttgaccgtttgcgcgcctgccgcaccgagcagga

SEQ ID NO: 669499 - DNA, 75 bp, synthetic construct
  source 1..75: mol_type = other DNA
aagaaaactggttttgcgctggtgacgctgaaaaagccgctggagtttaaccacgaagataacgatccggtggat

SEQ ID NO: 669500 - DNA, 75 bp, synthetic construct
  source 1..75: mol_type = other DNA
ggatgttgggacttgaaccgaagagcacggcggtgcggagtccggagagtaacggaatagcagagagcttcgtga

SEQ ID NO: 669501 - DNA, 75 bp, synthetic construct
  source 1..75: mol_type = other DNA
ggatgttgggacttgaaccgaagaacacggcggtgcggagtccggagagtaacgggatagcagagagcttcgtga

SEQ ID NO: 669502 - DNA, 75 bp, synthetic construct
  source 1..75: mol_type = other DNA
aagcgcccgcccgtgaaggttgaggaatttggcgacctgcataaagctgttaccgaaacgcaacaccgcatgggg

SEQ ID NO: 669503 - DNA, 75 bp, synthetic construct
  source 1..75: mol_type = other DNA
ggatgttgggccttgaaccgaagagcacggcggtgcggagtccggagagtaacggcatagcagagagcttcgtga

SEQ ID NO: 669504 - DNA, 75 bp, synthetic construct
  source 1..75: mol_type = other DNA
ggatgttgggccttgaaccgaagaccacggcggtgcggagtccggagagtaacgggatagcagagagcttcgtga

SEQ ID NO: 669505 - DNA, 75 bp, synthetic construct
  source 1..75: mol_type = other DNA
ggatgttgggtcttgaaccgaagagcacggcggtgcggagtccggagagtaacggtatagcagagagcttcgtga

SEQ ID NO: 669506 - DNA, 75 bp, synthetic construct
  source 1..75: mol_type = other DNA
gcgtattaaaggaatgcgcaaacgcgctgagggaaaaattcgtgatgctgaagatgaaggtattcaggttattga

SEQ ID NO: 669507 - DNA, 75 bp, synthetic construct
  source 1..75: mol_type = other DNA
gcatcttggcagattgatggatcggatggcggagcaacatggcgtttcactggtgtatggcgatgaactgattac

SEQ ID NO: 669508 - DNA, 75 bp, synthetic construct
  source 1..75: mol_type = other DNA
cgaagcgcggtggcagcaggaactggaactggttcaccgattacaggaacagcgtgccgcagagcccggcgagcg

SEQ ID NO: 669509 - DNA, 75 bp, synthetic construct
  source 1..75: mol_type = other DNA
gcgacgaaataaaaccggaagaaatcagctggctgcctgaatttctggcgcagtatcgccaggtgaacggcagac

SEQ ID NO: 669510 - DNA, 75 bp, synthetic construct
  source 1..75: mol_type = other DNA
atcgattgcctgccagaggtaactcaaagggcactgcgtgaacgctatgtggaacagctggtggctacagagaac

SEQ ID NO: 669511 - DNA, 75 bp, synthetic construct
  source 1..75: mol_type = other DNA
tgaggaaaaaatacgtgatgctgaggatgaaggtattcaggttattgaacaaaaaacgatagaaccctggctgga

SEQ ID NO: 669512 - DNA, 75 bp, synthetic construct
  source 1..75: mol_type = other DNA
ggatgttggggcttgaaccgaagagcacggcggtgcggagtccggagagtaacgggatagcagagagcttcgtga

SEQ ID NO: 669513 - DNA, 75 bp, synthetic construct
  source 1..75: mol_type = other DNA
atcagaatcgccttttttatacgttgaaaacaggtgaaactgttgccgatctttctaaatcgcaagatattaatt

SEQ ID NO: 669514 - DNA, 75 bp, synthetic construct
  source 1..75: mol_type = other DNA
gtatcgtctgggatgatagtgcattacgcagtcagggcggtcagattcagcatagcggaagccaaagcgcacaag

SEQ ID NO: 669515 - DNA, 75 bp, synthetic construct
  source 1..75: mol_type = other DNA
atggcgcaaaattccagactacacaattctgataattctgccgtctttgccagcaggcgcggacggtgttttcac

SEQ ID NO: 669516 - DNA, 75 bp, synthetic construct
  source 1..75: mol_type = other DNA
gcattactgagattaaggctgataaaacaacggcagtagcaaatggtcaggatgctattacatacactgttaaag

SEQ ID NO: 669517 - DNA, 75 bp, synthetic construct
  source 1..75: mol_type = other DNA
ttcagcacttaatgccaatgcggttatatttgttgatcaaactaaggctagcattactgaaattaaagctgataa

SEQ ID NO: 669518 - DNA, 75 bp, synthetic construct
  source 1..75: mol_type = other DNA
atatttgttgatcaaaccaaggccagcattactgagattaaggctgataaaacaacagcgaaggcaaatggttct

SEQ ID NO: 669519 - DNA, 75 bp, synthetic construct
  source 1..75: mol_type = other DNA
catgcgtaaacgcgcagaggaaaaaatccgtgatgccgaggatgaggtggtcaacgtgctggagcacaagccgca

SEQ ID NO: 669520 - DNA, 75 bp, synthetic construct
  source 1..75: mol_type = other DNA
aacggctgaacgcccggcagcagtcagcgatgcgtgatttaccgtcctggtctgaactgattgatgccattcgtg

SEQ ID NO: 669521 - DNA, 75 bp, synthetic construct
  source 1..75: mol_type = other DNA
aatctgactggtaccagcatcccccatgcactgaagaacaggccgaatggctcattcagtgttaccgcaggcgcg

SEQ ID NO: 669522 - DNA, 75 bp, synthetic construct
  source 1..75: mol_type = other DNA
gataatctcagtcagattgccttactccgaacgcccaccgcgtccgtcccgtacattccagcaacgcctctggag

SEQ ID NO: 669523 - DNA, 75 bp, synthetic construct
  source 1..75: mol_type = other DNA
ggctatccggttcctcgttaacagcctggcacgatcacaactggacgagcgcattgtggcaatggttgagacggc

SEQ ID NO: 669524 - DNA, 75 bp, synthetic construct
  source 1..75: mol_type = other DNA
tcaccggctccggtggtgacaaaggccagacgctcacctgccgtggttgatgcggtggaggcatatcgcggatca

SEQ ID NO: 669525 - DNA, 75 bp, synthetic construct
  source 1..75: mol_type = other DNA
gagaatgacattcacaatgtgcttcgacactatcaaataacatctgctgatgtagagaatgcgttaattcgacaa

SEQ ID NO: 669526 - DNA, 75 bp, synthetic construct
  source 1..75: mol_type = other DNA
tgacaccctgttgcagggtctgcgcgagaaagggtttgacacgatagccattgaacggcaagcgtatgagattga

SEQ ID NO: 669527 - DNA, 75 bp, synthetic construct
  source 1..75: mol_type = other DNA
tacaacgacccgaacaatggcggtgccggagaggcgtttattcaacgtattgttaccagtcggagcggagatttt

SEQ ID NO: 669528 - DNA, 75 bp, synthetic construct
  source 1..75: mol_type = other DNA
gacggataatggttcatgctaccgggcgaatgaaacacgacagttggccgggatgttgggccttgaaccgaagag

SEQ ID NO: 669529 - DNA, 75 bp, synthetic construct
  source 1..75: mol_type = other DNA
attccgcataaaaacatattgcgcgaagtgattgccggtatcgaagaagaaggtgttaaagcccgtgtgattcgc

SEQ ID NO: 669530 - DNA, 75 bp, synthetic construct
  source 1..75: mol_type = other DNA
cctggaactgttttctcaggctccgctgctgacgctggaaacctatcgtcagattggtaaaaacgccgcacgcta

SEQ ID NO: 669531 - DNA, 75 bp, synthetic construct
  source 1..75: mol_type = other DNA
ctaaaggcaccacagttatccaccagcaagggttacctcccttgtcaaacctggagctttttcctcaggctccac

SEQ ID NO: 669532 - DNA, 75 bp, synthetic construct
  source 1..75: mol_type = other DNA
gacggataatggttcatgctaccgggcaaatgaaacacgacagttggccgggatgttgggccttgaaccgaagaa

SEQ ID NO: 669533 - DNA, 75 bp, synthetic construct
  source 1..75: mol_type = other DNA
gacggataatggttcatgctaccgggcaaatgaaacacgacagttggccaggatgttgggccttgaaccgaagag

SEQ ID NO: 669534 - DNA, 75 bp, synthetic construct
  source 1..75: mol_type = other DNA
tttcctatgctgttggttgtgctttatggcgttggtatttatctcactacctggtttaatgaattcatcaccacc

SEQ ID NO: 669535 - DNA, 75 bp, synthetic construct
  source 1..75: mol_type = other DNA
gacggataatggttcatgctaccgggccaatgaaacacgacagttggccgggatgttgggccttgaaccgaagac

SEQ ID NO: 669536 - DNA, 75 bp, synthetic construct
  source 1..75: mol_type = other DNA
gacggataatggttcatgctaccgggccaatgaaacacgacagttggcccggatgttgggccttgaaccgaagag

SEQ ID NO: 669537 - DNA, 75 bp, synthetic construct
  source 1..75: mol_type = other DNA
gacggataatggttcatgctaccgggctaatgaaacacgacagttggccgggatgttgggccttgaaccgaagat

SEQ ID NO: 669538 - DNA, 75 bp, synthetic construct
  source 1..75: mol_type = other DNA
gaaataccaggccaaatctgccattttgcatattaaagagacgaagtacgtggtcactggcaaaaaaccgcaaga

SEQ ID NO: 669539 - DNA, 75 bp, synthetic construct
  source 1..75: mol_type = other DNA
ccgccgcgactggacagctatgccggtgaattatgtctggattggtgacggtcacggtatgaagctgaaatgtgc

SEQ ID NO: 669540 - DNA, 75 bp, synthetic construct
  source 1..75: mol_type = other DNA
ctgccaccgattacacagcaggccttgcgtgagcgccatgtggctcaactgatggcgactgatccgcaagagata

SEQ ID NO: 669541 - DNA, 75 bp, synthetic construct
  source 1..75: mol_type = other DNA
agaagcgacggaaatcgaatggttgtccgaccttgaactgcgtgaaatgtttatgccccagattgaacgtacagt

SEQ ID NO: 669542 - DNA, 75 bp, synthetic construct
  source 1..75: mol_type = other DNA
gaaggcgctgctggaagaggctgcgtgctcgccgcagccagtgattctgtttgtcgatgaggttcacaccctggt

SEQ ID NO: 669543 - DNA, 75 bp, synthetic construct
  source 1..75: mol_type = other DNA
tggttcggatttgaattctgcggttccgggagaaagcagtcaggcattttccagtaaatcagcagggagtaaatc

SEQ ID NO: 669544 - DNA, 75 bp, synthetic construct
  source 1..75: mol_type = other DNA
acatctgtgcgccattggctgggttaccggtaaatgaactattggatattcttccgtctttaatctcatcatccc

SEQ ID NO: 669545 - DNA, 75 bp, synthetic construct
  source 1..75: mol_type = other DNA
gccgcacgtgttgcgtcacgcctttgccacccatttgttaaatcatggtgcggatttacgtgtggtgcagatgtt

SEQ ID NO: 669546 - DNA, 75 bp, synthetic construct
  source 1..75: mol_type = other DNA
gtatgctaccggattgcgtgtctctgaacttgtagggttgacgatgagcgatatcagcttgcgtcagggcgtggt

SEQ ID NO: 669547 - DNA, 75 bp, synthetic construct
  source 1..75: mol_type = other DNA
cttttcccacaagcgcctttgttgacgctggatacttatcgtcagattggcaaaaacgccgcgcgttatgcaaag

SEQ ID NO: 669548 - DNA, 75 bp, synthetic construct
  source 1..75: mol_type = other DNA
ccgtgagtttgtgaaacaggctcaaaacggtgagttaccggcacacctggtggaaaccgttgcaactgcgaacgc

SEQ ID NO: 669549 - DNA, 75 bp, synthetic construct
  source 1..75: mol_type = other DNA
ggtatcgacagcgaaaagctgtcaccgcatgtgttgcgtcacgcttttgccactcatttattaaatcatggtgcg

SEQ ID NO: 669550 - DNA, 75 bp, synthetic construct
  source 1..75: mol_type = other DNA
gcgataaagccatgcttgaagtgttgtatgctaccgggctgcgtgtctctgaactggtcgggctgacaatgagtg

SEQ ID NO: 669551 - DNA, 75 bp, synthetic construct
  source 1..75: mol_type = other DNA
agtggagtggctgacggataatggttcatgctaccgggctaatgaaacacgtcagtttgcccggatggtggggct

SEQ ID NO: 669552 - DNA, 75 bp, synthetic construct
  source 1..75: mol_type = other DNA
acatcccatgctgaaaaaaaggggattctcgctggctggatcacgggaacaaatctggattcagcctggcgaaaa

SEQ ID NO: 669553 - DNA, 75 bp, synthetic construct
  source 1..75: mol_type = other DNA
ccaccctgcgcagcacggatgtgaccacaccgcccgtcacgattattccggcgctgacccgtgtgccggcttata

SEQ ID NO: 669554 - DNA, 75 bp, synthetic construct
  source 1..75: mol_type = other DNA
agtggagtggctgacggataatggttcatgctaccgggctaatgaaacacggcagtttgcccggatgttggggct

SEQ ID NO: 669555 - DNA, 75 bp, synthetic construct
  source 1..75: mol_type = other DNA
agtggagtggctgacggataatggttcatgctaccgggctaatgaaacacgccagtttgcccggatgctgggtct

SEQ ID NO: 669556 - DNA, 75 bp, synthetic construct
  source 1..75: mol_type = other DNA
caggtactttctcagcgcttgaaaccgtcattcaacaaattaacgcgaacggtaaacgtattcttgaagcaacga

SEQ ID NO: 669557 - DNA, 75 bp, synthetic construct
  source 1..75: mol_type = other DNA
tcaaaagcgtggtcaaacccgaacgagttaaccgctttcataatccgcattatgctgatttgcgttatggtcgat

SEQ ID NO: 669558 - DNA, 75 bp, synthetic construct
  source 1..75: mol_type = other DNA
cttgaatggattgccttccatagagtattaggcgtcgatgggtttattattacagacaatggtagtcgtgatggt

SEQ ID NO: 669559 - DNA, 75 bp, synthetic construct
  source 1..75: mol_type = other DNA
ggtcagtatgcgttacggatagaacatttgattaacccgattttgaattctctgaacgaggaacagcccaaatga

SEQ ID NO: 669560 - DNA, 75 bp, synthetic construct
  source 1..75: mol_type = other DNA
ttcgcatcgttaattgctcctggtggcgcaggcggcggaaagtcaggagtcacaaacacaaacggtggtaacgga

SEQ ID NO: 669561 - DNA, 75 bp, synthetic construct
  source 1..75: mol_type = other DNA
cagaaatacaggatatctgccattaccgcgcggctgatgctgcagattatgtcagggagactgaccggtcactga

SEQ ID NO: 669562 - DNA, 75 bp, synthetic construct
  source 1..75: mol_type = other DNA
gtgcgctgggttatcgctcgccacgggaatatctgcggcagtgggccagtgatgggttaagtgataacaggtgtc

SEQ ID NO: 669563 - DNA, 75 bp, synthetic construct
  source 1..75: mol_type = other DNA
gccggaatcattatctcactgattggtggaccattttttttgctactgctctggcagcgcaggaacagtttttaa

SEQ ID NO: 669564 - DNA, 75 bp, synthetic construct
  source 1..75: mol_type = other DNA
tacgcccactacgtgttggtaagttttcgacactggtacgccctaaaaatctgctgttgcttggtgggctgttcc

SEQ ID NO: 669565 - DNA, 75 bp, synthetic construct
  source 1..75: mol_type = other DNA
tcgctctgcttggtcatcaggtggcaaccgggttaggcgtgaatagttctcgcctggcgttgttacgtgtcgccg

SEQ ID NO: 669566 - DNA, 75 bp, synthetic construct
  source 1..75: mol_type = other DNA
caagcagactaaccctatcaacgttggtattatttcccgcagacatgacccttttagcactcggtatcaaccata

SEQ ID NO: 669567 - DNA, 75 bp, synthetic construct
  source 1..75: mol_type = other DNA
cgtggctgcgtgcacaaagcgccagcgaaactattcgcgagtatcgcagccaggcagagcaagttcgcgatgagt

SEQ ID NO: 669568 - DNA, 75 bp, synthetic construct
  source 1..75: mol_type = other DNA
gcttcgtgaaaacgataaagcgtgactacatcagtgtcatgcccaaaccagacgggttaacggcagcaaagaacc

SEQ ID NO: 669569 - DNA, 75 bp, synthetic construct
  source 1..75: mol_type = other DNA
ggcttcaacagtgaaacagtacaggacgtcatgctgggagcggtggaacgccgcttcggcaacgagcttccggcg

SEQ ID NO: 669570 - DNA, 75 bp, synthetic construct
  source 1..75: mol_type = other DNA
gttaagtgataacaggtgtctggaaatatgtaagcgtaaactgaccgccgtatgtagccatcagacgagaattgg

SEQ ID NO: 669571 - DNA, 75 bp, synthetic construct
  source 1..75: mol_type = other DNA
taacgaatggcatccgcatagtgcgttgggttatcgctcgccacgggaatatctgcggcagcgggcttgtaatgg

SEQ ID NO: 669572 - DNA, 75 bp, synthetic construct
  source 1..75: mol_type = other DNA
atctgcggcagcgggcttgtaatgggttaagtgataacagatgtctggaaatactcagtttccactgcatcagtt

SEQ ID NO: 669573 - DNA, 75 bp, synthetic construct
  source 1..75: mol_type = other DNA
cagtgaaacagtacaggacgtcatgctgggagcagtggaacgccgctttggcagcgagcttccggcgtctccagt

SEQ ID NO: 669574 - DNA, 75 bp, synthetic construct
  source 1..75: mol_type = other DNA
ggtcaaatcactggaagagtttttactgggtaaacatctgcgcggcagcgccgcctcggccaaccgcgtaaaaca

SEQ ID NO: 669575 - DNA, 75 bp, synthetic construct
  source 1..75: mol_type = other DNA
tacaggcaacgggaggtaatgggaaatatacatggaaatccagtgatactaaaattgcttctgttgatagttcgg

SEQ ID NO: 669576 - DNA, 75 bp, synthetic construct
  source 1..75: mol_type = other DNA
agtttaaattgactgctaaaggtggaaatgggaaatatacatggtattctgaaaatccaaatattgcatccgtgg

SEQ ID NO: 669577 - DNA, 75 bp, synthetic construct
  source 1..75: mol_type = other DNA
acttttggtaagttcaatggtaaacagagctcagaaaccgtaacaacagggaacgacggacgcgctatagtgaca

SEQ ID NO: 669578 - DNA, 75 bp, synthetic construct
  source 1..75: mol_type = other DNA
atcataataattcgaccgttcttgcctgcacgcacgagcggtatcctcacacattcaaatctgactggtatcagc

SEQ ID NO: 669579 - DNA, 75 bp, synthetic construct
  source 1..75: mol_type = other DNA
agacgtggttacgagtttcagaaagacctcagttctgacttccgacactggataatttccgtcagactcccttat

SEQ ID NO: 669580 - DNA, 75 bp, synthetic construct
  source 1..75: mol_type = other DNA
aaatatgacgaggctagtggtatatgttcaaataatgctgcatatttatctgtctcagtagacagtttgaaaaaa

SEQ ID NO: 669581 - DNA, 75 bp, synthetic construct
  source 1..75: mol_type = other DNA
ggtgtaaactacactccggttcctctggtgacgatgggggttgattaccgtcatgggacaggtaatgaaaatgat

SEQ ID NO: 669582 - DNA, 75 bp, synthetic construct
  source 1..75: mol_type = other DNA
caggtgtatcaagcacatatgatttggttacgaagaaccagttgatcaatgttggagtaaacaaaaagaatgctt

SEQ ID NO: 669583 - DNA, 75 bp, synthetic construct
  source 1..75: mol_type = other DNA
ctggtcaagtcacattaaaagataagggggaaacaacaattaccgttgtatctggggataaacaaacggccatct

SEQ ID NO: 669584 - DNA, 75 bp, synthetic construct
  source 1..75: mol_type = other DNA
ctacttatgacttaataacacaaaaccctcataagggtgttaagctaaacactcaaaatgtctatgcagtttgtg

SEQ ID NO: 669585 - DNA, 75 bp, synthetic construct
  source 1..75: mol_type = other DNA
cctaatatttggttgcaatatggtcagtttaagctgacagccaaaggcggtgatggaaaatataaatggcattct

SEQ ID NO: 669586 - DNA, 75 bp, synthetic construct
  source 1..75: mol_type = other DNA
ggtgataatcagagtgcgacatacacaattaatgcaccgggtagtattgtaattgctgtggataaaaatactcga

SEQ ID NO: 669587 - DNA, 75 bp, synthetic construct
  source 1..75: mol_type = other DNA
cgtcactggataatctccgtcaggcttccttacaccgagcgcccaccgcgtccgtcccgcacattccagcaacgc

SEQ ID NO: 669588 - DNA, 75 bp, synthetic construct
  source 1..75: mol_type = other DNA
atcaagaggcgttgatgcttgtcaggtcactcttaagttgaaagacggaagaaaaatacttgttttcttcgattg

SEQ ID NO: 669589 - DNA, 75 bp, synthetic construct
  source 1..75: mol_type = other DNA
cgagttcaaaggtaggctaacaatacatccagactatgttgacaatcagccatcacgccgtgacttttttgcgat

SEQ ID NO: 669590 - DNA, 75 bp, synthetic construct
  source 1..75: mol_type = other DNA
gggacaatgccttcccgcaataagctagatttatgcccgcttccatatgataaagaaaatcgtataagactccca

SEQ ID NO: 669591 - DNA, 75 bp, synthetic construct
  source 1..75: mol_type = other DNA
atcgaaaggcaggggagtcccttgtctttgacattaatcccggagagtaaaccgggtaatggtaaagcgattggt

SEQ ID NO: 669592 - DNA, 75 bp, synthetic construct
  source 1..75: mol_type = other DNA
gcgtttgagcctgataaagaagatccggtatcttcgctggggattcgtcctcgtgggccgcaaattgaacctgta

SEQ ID NO: 669593 - DNA, 75 bp, synthetic construct
  source 1..75: mol_type = other DNA
ctaaaagccgtagatggtatcgaaacgcctgattgggatgccgtgcgtttgcagttggtcgataaaattggcgat

SEQ ID NO: 669594 - DNA, 75 bp, synthetic construct
  source 1..75: mol_type = other DNA
agtgcactgggttatcgctcgccacgggaatatctacggcagcaagctagtaatgggttaagtgataacaggtgt

SEQ ID NO: 669595 - DNA, 75 bp, synthetic construct
  source 1..75: mol_type = other DNA
ccttgccatccggcacgggcggcgttcacacatatttaaaaccgactggtaccaacaccctccatgcactgaaga

SEQ ID NO: 669596 - DNA, 75 bp, synthetic construct
  source 1..75: mol_type = other DNA
accgactggttccagcatcccccatgcactgaagaacaggccgaatggctgattcagtgctaccgcagacgtggt

SEQ ID NO: 669597 - DNA, 75 bp, synthetic construct
  source 1..75: mol_type = other DNA
tggcggacggtcgtgaaatagaaggggtgtcaagaggcgttgacgcttgtcaggtcacactcaacatgggggacg

SEQ ID NO: 669598 - DNA, 75 bp, synthetic construct
  source 1..75: mol_type = other DNA
caggtcacactcaacatgggggacggtaggaagacagtcgccatgttcgattgggtcgaacggattttaccgttt

SEQ ID NO: 669599 - DNA, 75 bp, synthetic construct
  source 1..75: mol_type = other DNA
ggaatatatcgtcattaacgatgagcttcgcgacaatctttccggaatgccacatgcagagtgggggcatcacat

SEQ ID NO: 669600 - DNA, 75 bp, synthetic construct
  source 1..75: mol_type = other DNA
ggaaggcaagatcgacgatcgcgaatctccgctgcatattcacctcggtcaggtgatgtcgcgtggtgaaaaaat

SEQ ID NO: 669601 - DNA, 75 bp, synthetic construct
  source 1..75: mol_type = other DNA
tttatcatctcatggctaataaatgtagccttaaatctatttccatacctgatcttgattttataattgatagtg

SEQ ID NO: 669602 - DNA, 75 bp, synthetic construct
  source 1..75: mol_type = other DNA
cagaacttgcgcccgacgttaagcgcccttacgcctgaggtgcttgagtggttaacggttgaagagatgctggat

SEQ ID NO: 669603 - DNA, 75 bp, synthetic construct
  source 1..75: mol_type = other DNA
atggaacaatatgatcaaattggcgcaagactggaccgcttgcctttggcccggtttcattatcgtatatttggt

SEQ ID NO: 669604 - DNA, 75 bp, synthetic construct
  source 1..75: mol_type = other DNA
atttgacggtagcaatcaggtctttgacgctgaaattaccagcgccagcaaaaagagcgtggaagtaaaagtact

SEQ ID NO: 669605 - DNA, 75 bp, synthetic construct
  source 1..75: mol_type = other DNA
ttgacgccgaaattaccagcgccagcaaaaaaagcgtggaagtgaaggtgctggaaggccagatcgacgatcgcg

SEQ ID NO: 669606 - DNA, 75 bp, synthetic construct
  source 1..75: mol_type = other DNA
gtgaatcgttttgtaattgctgactccacgctctgtatcggctgccacacttgtgaggccgcctgttcagagacg

SEQ ID NO: 669607 - DNA, 75 bp, synthetic construct
  source 1..75: mol_type = other DNA
ggcattatatgtaggcgggcgcattaatgagctttgccagctttatctgacggatattcgtgaggataaaaatgg

SEQ ID NO: 669608 - DNA, 75 bp, synthetic construct
  source 1..75: mol_type = other DNA
ctcttcaccgatgatgaattagtgcaaattttctcggctgactggtttaagaaaggctcgggaacgcccaatcaa

SEQ ID NO: 669609 - DNA, 75 bp, synthetic construct
  source 1..75: mol_type = other DNA
caaccaactcggcgccctgcacaaggacctaagcaaagaactaaaagatgcttggaatacatggctggaagagtt

SEQ ID NO: 669610 - DNA, 75 bp, synthetic construct
  source 1..75: mol_type = other DNA
tgccgcgcctgagagtgatgctaaatgaaaaagaatctgcgccgcagctctgccaccactgtgaagatgcaccct

SEQ ID NO: 669611 - DNA, 75 bp, synthetic construct
  source 1..75: mol_type = other DNA
gctgcaaactgtgcggcatcgcctgcccgtttggcgcaattgaattttccggtagccgtccgctggatattccgg

SEQ ID NO: 669612 - DNA, 75 bp, synthetic construct
  source 1..75: mol_type = other DNA
tatagtgcttggcgtgatgttagtactctgtgcgctggttctctccatttttggcatcgaaacgcggaaggtgtc

SEQ ID NO: 669613 - DNA, 75 bp, synthetic construct
  source 1..75: mol_type = other DNA
cgacacaggcctggctggaagcgcgtctgaaaggcgaagaactgccgaagccagaaggtctgctgacgcaaaacg

SEQ ID NO: 669614 - DNA, 75 bp, synthetic construct
  source 1..75: mol_type = other DNA
tgcgccgcctgcgtcagttgatcgctcagtcctggcataccgatgaaatccgtaaacagcgcccaagcccggtag

SEQ ID NO: 669615 - DNA, 75 bp, synthetic construct
  source 1..75: mol_type = other DNA
ccgctacgccggaacaggaactgggcaaactgccgttgggttcacgtccggccaaacgtcgcccgaccggtggcg

SEQ ID NO: 669616 - DNA, 75 bp, synthetic construct
  source 1..75: mol_type = other DNA
agactgagcaatcttaaagtcggggaggcggtcacactgaccccttccggttcagtaaggacaacgaaaggaaga

SEQ ID NO: 669617 - DNA, 75 bp, synthetic construct
  source 1..75: mol_type = other DNA
ttcgatataccgaaacatagagggtataattctactgataaaggtctgtttgagtatgcaggccaacgtaaaagc

SEQ ID NO: 669618 - DNA, 75 bp, synthetic construct
  source 1..75: mol_type = other DNA
caacggcgtaatacgcgctctgagggcgacaagacttatcaccttgtcgtttcattccgtccaggagaaaacccg

SEQ ID NO: 669619 - DNA, 75 bp, synthetic construct
  source 1..75: mol_type = other DNA
aatttcagcatgaaactgttcagcttgtgcctgtcagtgatgtcaggcggtccttttctgtcgtggtgaaagcga

SEQ ID NO: 669620 - DNA, 75 bp, synthetic construct
  source 1..75: mol_type = other DNA
atggatcgtgaattaaaaaatctgcatctgaatatttcccaactggctgcattatccggtgctcatcgacagact

SEQ ID NO: 669621 - DNA, 75 bp, synthetic construct
  source 1..75: mol_type = other DNA
ttgggacgatgttcgcgtggctcctttccggtaaatacttcattgaatcgcccaggtggttagcgggaaaaggcc

SEQ ID NO: 669622 - DNA, 75 bp, synthetic construct
  source 1..75: mol_type = other DNA
gaactgtgggaaccgctctacgcttgctaccagtcacttcaggcgtgtggcatgggtattatcgccaacggcgat

SEQ ID NO: 669623 - DNA, 75 bp, synthetic construct
  source 1..75: mol_type = other DNA
cccgtcaggcggaaaaagaaggccacgaaccagatcctcgcgttgaacaagcgttaatggtcactattgccggga

SEQ ID NO: 669624 - DNA, 75 bp, synthetic construct
  source 1..75: mol_type = other DNA
cgtgctggcgattgccaatgactcccatctgatggcggatctaccgtggattgccgagtccattcagctacgaaa

SEQ ID NO: 669625 - DNA, 75 bp, synthetic construct
  source 1..75: mol_type = other DNA
tcaacgaacgcacgattgcgcagcttgttggacatgttcggggcaacaccaccgcgatgacaacctatcgtaagg

SEQ ID NO: 669626 - DNA, 75 bp, synthetic construct
  source 1..75: mol_type = other DNA
ccactgattttgcagtttgcccctgactggctgaaaaacctgctctcctccgggatcgccgctggcggtatcact

SEQ ID NO: 669627 - DNA, 75 bp, synthetic construct
  source 1..75: mol_type = other DNA
tttaacaccttcccgaactcctgcttcgggcagaacaacggtgtgatccagttgaccggtgttgccagccgttat

SEQ ID NO: 669628 - DNA, 75 bp, synthetic construct
  source 1..75: mol_type = other DNA
cgagatgattatctcccgcgttctgcacctggcgcgccgcattattacaccgctggtttctggcgttgttgtgat

SEQ ID NO: 669629 - DNA, 75 bp, synthetic construct
  source 1..75: mol_type = other DNA
aaggtaactgttacgacaacgctccgatggaaagcttctggggaacgctgaaaaatgagagcctgagccactatc

SEQ ID NO: 669630 - DNA, 75 bp, synthetic construct
  source 1..75: mol_type = other DNA
atggatgataaaatcatcgcctattttgtcgtcctgcctgatgaggctatttctgttattgatacggaaggcaat

SEQ ID NO: 669631 - DNA, 75 bp, synthetic construct
  source 1..75: mol_type = other DNA
atgtgtcaggtatttggtgtatccaggagcggttattacaactgggtacagcatgaccggcggctccagacggag

SEQ ID NO: 669632 - DNA, 75 bp, synthetic construct
  source 1..75: mol_type = other DNA
ttaaaagttattatgttccatcggacgttaaaagggactggatgtttcgacacccaaagctcgtaccgtcggttc

SEQ ID NO: 669633 - DNA, 75 bp, synthetic construct
  source 1..75: mol_type = other DNA
cgtgaaacctttgaaggtgcgctgaaaaccgggcgtctggcgctggaaagtttaggtctggggccgtatgaagcg

SEQ ID NO: 669634 - DNA, 75 bp, synthetic construct
  source 1..75: mol_type = other DNA
gatcggcatgacgctggcgctctcatcaacggcgattgccatgcaggcgatgaatgaacgcaacctgatggtgac

SEQ ID NO: 669635 - DNA, 75 bp, synthetic construct
  source 1..75: mol_type = other DNA
gttgactggtgttgccagccgctatgtcggttttgtcgtcgcgctgatgttgatcgtgctgggtctgttcccggc

SEQ ID NO: 669636 - DNA, 75 bp, synthetic construct
  source 1..75: mol_type = other DNA
gcacactgatgctggcaagctgcaccgaaatggttatctcccgcgttctgcatctggcgcgccgcattattacgc

SEQ ID NO: 669637 - DNA, 75 bp, synthetic construct
  source 1..75: mol_type = other DNA
tgatggtgtggagctcctgattcatgtcggtatcgacaccgtaaaactggacggcaaattcttttccgctcacgt

SEQ ID NO: 669638 - DNA, 75 bp, synthetic construct
  source 1..75: mol_type = other DNA
atgcagcagtatcactatccactggaagacggatttaccgaaaggattcacacgccgggaggcgtcaggtcactg

SEQ ID NO: 669639 - DNA, 75 bp, synthetic construct
  source 1..75: mol_type = other DNA
atgcagcgggcgcattgttgagcgttgctgacatgatgaaagctgcatattttcttatcaataccagtggctaca

SEQ ID NO: 669640 - DNA, 75 bp, synthetic construct
  source 1..75: mol_type = other DNA
tgatgtactgaatatcgccgccgattatgctgatttcgtgacagaggttattttaagaaaaacgacggacgggga

SEQ ID NO: 669641 - DNA, 75 bp, synthetic construct
  source 1..75: mol_type = other DNA
tgcgctttcgtcaatgccagagcttattagagcggcttttttcttactttccacgagagaatataaatcaacggg

SEQ ID NO: 669642 - DNA, 75 bp, synthetic construct
  source 1..75: mol_type = other DNA
tgccgccgcctcaaaatggtttaacgaaaactactttggcaaagtcctcggttttacccgtgacggtaagaaaac

SEQ ID NO: 669643 - DNA, 75 bp, synthetic construct
  source 1..75: mol_type = other DNA
tctgagcctgatttgcctccggctcctgctgtcatgccaactccaccacctcctcctgtcatcgtcgctaacccg

SEQ ID NO: 669644 - DNA, 75 bp, synthetic construct
  source 1..75: mol_type = other DNA
tagccagcggggcttcctgattgatgattttagtgccattgatcgtgaccctgatacgcatggctttgttttaaa

SEQ ID NO: 669645 - DNA, 75 bp, synthetic construct
  source 1..75: mol_type = other DNA
aggcatgcggaaagccgggaagaaaaacgcagcttcggcattcagaacacagttcagggaatggcgtaaaactac

SEQ ID NO: 669646 - DNA, 75 bp, synthetic construct
  source 1..75: mol_type = other DNA
gaccgtcacgaagaaaccgacaaggcattcgaggaaatattctggtgtgcaggcatgcggaaagccgggaagaaa

SEQ ID NO: 669647 - DNA, 75 bp, synthetic construct
  source 1..75: mol_type = other DNA
gaagcgatgtgtcaggtatttggtgtatccaggagcggttattacaactgggtacagcatgaaccctcagacaga

SEQ ID NO: 669648 - DNA, 75 bp, synthetic construct
  source 1..75: mol_type = other DNA
ttaaccgcgttcagtttcgtgagaaattcaccgggcagctactggtcaatgtggagaatggacgcgtggtgtgta

SEQ ID NO: 669649 - DNA, 75 bp, synthetic construct
  source 1..75: mol_type = other DNA
ttgcctcaggcaccattaacgtcatcactacttctggtggcaaagatagtctcgctcaatggctaagagccattg

SEQ ID NO: 669650 - DNA, 75 bp, synthetic construct
  source 1..75: mol_type = other DNA
gtattcatgtccgtaaatctgaactggcagaaatttttcgccggtggccggaggaaataaagcgggttgctgaat

SEQ ID NO: 669651 - DNA, 75 bp, synthetic construct
  source 1..75: mol_type = other DNA
tgccggcgattgccgacagtctggtcaacgtgaaagtggtttacgtatgcagtccgaacaacccaaccggacaga

SEQ ID NO: 669652 - DNA, 75 bp, synthetic construct
  source 1..75: mol_type = other DNA
cgctacccggaatgccaacccaaagcggtgattgaaaactacgccgcctatgcgggcgtcaagccggagcaggtg

SEQ ID NO: 669653 - DNA, 75 bp, synthetic construct
  source 1..75: mol_type = other DNA
agcagtttggtctgaaaacatcaatgtcgcgtataggtaaccgttacgacaacgctccgatggaaagcttctggg

SEQ ID NO: 669654 - DNA, 75 bp, synthetic construct
  source 1..75: mol_type = other DNA
acatccgcgccaccgtaaagttgccgatgattgttatgaagcgcacgctacagcagctcctgggcggcgcaccgt

SEQ ID NO: 669655 - DNA, 75 bp, synthetic construct
  source 1..75: mol_type = other DNA
aatctgctgcgcaacccttatttttgtcgggtaatttgcgttaacgacggttccacagataataccgaagcggta

SEQ ID NO: 669656 - DNA, 75 bp, synthetic construct
  source 1..75: mol_type = other DNA
atgaaaacctggatctttatatttatggccgtagcaatattgctatggtttttgagtacgttaaggcgtaagccc

SEQ ID NO: 669657 - DNA, 75 bp, synthetic construct
  source 1..75: mol_type = other DNA
aaatgggcacaggcggcagcacttcagcgtcagcggctggcgctcgatcccggcagtgtgtggattacttaccgg

SEQ ID NO: 669658 - DNA, 75 bp, synthetic construct
  source 1..75: mol_type = other DNA
gcgaatatttaccgccagcagtcgccagaaaaagccgaagcgtttatcgcctcgctctctgccagtcagcggcgc

SEQ ID NO: 669659 - DNA, 75 bp, synthetic construct
  source 1..75: mol_type = other DNA
ctctaaaatctggtacgggcagattaaagacatgcccgtcagtgatgccagtgtgtcggcgctgaaaaaatatct

SEQ ID NO: 669660 - DNA, 75 bp, synthetic construct
  source 1..75: mol_type = other DNA
attaccgggtcatacaggagcagtttggtctgaaaacatcaatgtcgcgtaaaggtaactgttacgacaacgctc

SEQ ID NO: 669661 - DNA, 75 bp, synthetic construct
  source 1..75: mol_type = other DNA
ctttgtggtctgctggcgtcactggccgggatcattgaagtggcgcgcctttcctctgcgcaaccgacggcggga

SEQ ID NO: 669662 - DNA, 75 bp, synthetic construct
  source 1..75: mol_type = other DNA
cggtggctgaactggaatctgaaattctgcaactgcgtaaggcgttaaatgaaggctccgccttgagcgagatat

SEQ ID NO: 669663 - DNA, 75 bp, synthetic construct
  source 1..75: mol_type = other DNA
atggcgctgcgttatgtggttatcacctccgttgaccgtgatgacctgcgcgatggcggtgcccagcactttgcg

SEQ ID NO: 669664 - DNA, 75 bp, synthetic construct
  source 1..75: mol_type = other DNA
acgagtggcgcaaattattacagaacgtgaatacctgattaccacactgaaagagatcccctgcgtggagcagtt

SEQ ID NO: 669665 - DNA, 75 bp, synthetic construct
  source 1..75: mol_type = other DNA
acgggttcgagttccgctgtgataacggagaaaaactgcgggtcacgttcgcgctggactgctgtgaccgtgagg

SEQ ID NO: 669666 - DNA, 75 bp, synthetic construct
  source 1..75: mol_type = other DNA
gacgtcatgctgggagcggtggaacgccgcttcggcagcgatcttccgtcgtctccagtggagtggctgacggat

SEQ ID NO: 669667 - DNA, 75 bp, synthetic construct
  source 1..75: mol_type = other DNA
attacggccacgaataataatcagatctttaatgcgtccggtgacatacagataaccgtccagcagataaccgag

SEQ ID NO: 669668 - DNA, 75 bp, synthetic construct
  source 1..75: mol_type = other DNA
atccggatgcgattaacgcggcgcgggaagtcattcgccacaaaatgaaactgttcggttcgctcggtaaagcgt

SEQ ID NO: 669669 - DNA, 75 bp, synthetic construct
  source 1..75: mol_type = other DNA
cgtggagtttcagcttactcagcaaacgctcaaccgctacccggaatgtcagccgaaagcggtgattgaaaatta

SEQ ID NO: 669670 - DNA, 75 bp, synthetic construct
  source 1..75: mol_type = other DNA
ccgctgcgataaagcagattaatcaggttcagcgtttactgggcaagaatctatggtccccaccatttttgcaac

SEQ ID NO: 669671 - DNA, 75 bp, synthetic construct
  source 1..75: mol_type = other DNA
cccgttgtcagtcagctcaggtttaccgccatggtcagaaccctaaaggccgtgacagatttcgctaccgtgact

SEQ ID NO: 669672 - DNA, 75 bp, synthetic construct
  source 1..75: mol_type = other DNA
ccgtactgatgtattgcgtaagttcggtttctcggatcgtactaaagtcgaagaccttgatctcacctggacatt

SEQ ID NO: 669673 - DNA, 75 bp, synthetic construct
  source 1..75: mol_type = other DNA
ggtaaataatgcagggattattcagcgtaaacctatgctagaaactacagcagctgattatcgcaaaataataga

SEQ ID NO: 669674 - DNA, 75 bp, synthetic construct
  source 1..75: mol_type = other DNA
ggcctggcagcatataaagagaacaacatcaacgcacatggttatttatttgatattacggatgaacagtctgtg

SEQ ID NO: 669675 - DNA, 75 bp, synthetic construct
  source 1..75: mol_type = other DNA
cggcaggcgaatcgctgcatcgtatacccacaggaatgcaacagtccgcgtgaggagtggcgtcgctggcggcgt

SEQ ID NO: 669676 - DNA, 75 bp, synthetic construct
  source 1..75: mol_type = other DNA
gtacctcgctggcatcaaagatgtttatacgtgcgaaattgtcggctacgccatgggagagcgcatgacaaaaga

SEQ ID NO: 669677 - DNA, 75 bp, synthetic construct
  source 1..75: mol_type = other DNA
aacgctgaaaaatgagagcctgagccactatcgttttaataaccgggatgaagccatctcagtaatacgggaata

SEQ ID NO: 669678 - DNA, 75 bp, synthetic construct
  source 1..75: mol_type = other DNA
tagccagacggcaaacgcggctttaaagcgtattggttatggtggtaagttggttgcacatggtttacgttccat

SEQ ID NO: 669679 - DNA, 75 bp, synthetic construct
  source 1..75: mol_type = other DNA
gtggcacggacaacacgccccctgaccaacaccgaagttctgcgcgctaaagcgttagagaaggatctaacgctg

SEQ ID NO: 669680 - DNA, 75 bp, synthetic construct
  source 1..75: mol_type = other DNA
atgaaagtaacattaacgtttaacgcgcagcgtcgtgcagcctatcggcagcaagggttatggggtgatgcttcg

SEQ ID NO: 669681 - DNA, 75 bp, synthetic construct
  source 1..75: mol_type = other DNA
accatctatcagaccagcggcaacccgtatggccacattattatgcgtggtggcaaaaaaccgaattatcatgcc

SEQ ID NO: 669682 - DNA, 75 bp, synthetic construct
  source 1..75: mol_type = other DNA
gaatgtactagagaaacaacccgcggacctgtcagcgctgcgtttctttctttgcggcggaaccacaatccccaa

SEQ ID NO: 669683 - DNA, 75 bp, synthetic construct
  source 1..75: mol_type = other DNA
cccgcgcagcgcttgaaaagaagttaggctcgtttgaatcctccattcccgatacaaaaccttccagaccgtccc

SEQ ID NO: 669684 - DNA, 75 bp, synthetic construct
  source 1..75: mol_type = other DNA
ggtaaacgctatgaaggtaagccgctggatactcagggagccaacacaacgttgctatatgggcgttatcagagt

SEQ ID NO: 669685 - DNA, 75 bp, synthetic construct
  source 1..75: mol_type = other DNA
tcgctgagtcttgcgcgtatttagaaaagaaatttgggttggaagtagataatcatatgcctacccgttccgctt

SEQ ID NO: 669686 - DNA, 75 bp, synthetic construct
  source 1..75: mol_type = other DNA
accagacccgggttgtatccagtgccaaccaggttaatctgaagtttgaagaagctaaacctcatctggaagacc

SEQ ID NO: 669687 - DNA, 75 bp, synthetic construct
  source 1..75: mol_type = other DNA
aaagagctgacaggtaaagccctgtttatggcgctcaggagccagcgctcaggagccagcgcccacctgccgggc

SEQ ID NO: 669688 - DNA, 75 bp, synthetic construct
  source 1..75: mol_type = other DNA
ttatatggtctggcaagtaaggcgcttggggaagaacttgaacgggcaaatgccatttataaaaaagaccggcag

SEQ ID NO: 669689 - DNA, 75 bp, synthetic construct
  source 1..75: mol_type = other DNA
ccatttttaattggtgctcgcagcgtgttgttagatattttcactcctgatgcgtgtctcgcgctgcttgagcag

SEQ ID NO: 669690 - DNA, 75 bp, synthetic construct
  source 1..75: mol_type = other DNA
ccgcgcccaggttgccgaactggcacgtgccggtatggctgtaggtttggctggtctgtttattgaagcgcatcc

SEQ ID NO: 669691 - DNA, 75 bp, synthetic construct
  source 1..75: mol_type = other DNA
aactggaaccattcctcaagcagatgaaagcaattgatgagctggttaaaggtttcgaagaactcgataccagca

SEQ ID NO: 669692 - DNA, 75 bp, synthetic construct
  source 1..75: mol_type = other DNA
aacctggttgtcgatatgctgggcttcagcataatgaagaaagtgtctggtaactcgccggtgattttcgacgtg

SEQ ID NO: 669693 - DNA, 75 bp, synthetic construct
  source 1..75: mol_type = other DNA
cataaaagtggtgatgtgttgtatccagtaaaaataaccagaaaatcatcaggaaaaactgccttccaccttgtt

SEQ ID NO: 669694 - DNA, 75 bp, synthetic construct
  source 1..75: mol_type = other DNA
tcatcagatggctgtgcttaaaaaaagaacaaatggtagtgtccgctattgccagtacacctcagttagctcatg

SEQ ID NO: 669695 - DNA, 75 bp, synthetic construct
  source 1..75: mol_type = other DNA
cagtacagcatgaaccctcagacagaaaacaaagtgatgagcggctaaaactggagattaaggtggcacatatcc

SEQ ID NO: 669696 - DNA, 75 bp, synthetic construct
  source 1..75: mol_type = other DNA
aaatatcctgaacatatcgtggtaatcgaaaaactaccgcgcactgcctcaggtaaaatacaaaagtttttgtta

SEQ ID NO: 669697 - DNA, 75 bp, synthetic construct
  source 1..75: mol_type = other DNA
agacatagtggctttttttagccgtaaacgggtagcaaaatataaatatcctgaacatattgtggtaatcgaaaa

SEQ ID NO: 669698 - DNA, 75 bp, synthetic construct
  source 1..75: mol_type = other DNA
ctcattaagtcagattctcgccgacaatacccctctgaccacggcgataacgacccacggcgatgaattagccgc

SEQ ID NO: 669699 - DNA, 75 bp, synthetic construct
  source 1..75: mol_type = other DNA
tcgtgctcaggtggctgagctggcacgagccggtatggcggtaggtctggcggggctgtttattgaagcgcatcc

SEQ ID NO: 669700 - DNA, 75 bp, synthetic construct
  source 1..75: mol_type = other DNA
tcagcattatgaagaaagtgtctggtaactcgccggtgattttcgacgtgacccacgcactgcaatgccgcgatc

SEQ ID NO: 669701 - DNA, 75 bp, synthetic construct
  source 1..75: mol_type = other DNA
attgtcggctacgccatgggagagcgcatgacaaaagagctgacaggtaaagccctgtttatggcgctcaggagc

SEQ ID NO: 669702 - DNA, 75 bp, synthetic construct
  source 1..75: mol_type = other DNA
accataaaacggctcctgtatcgctgcgagaacgtgtatcgttttcgccggataagctcgatcaggcgcttgaca

SEQ ID NO: 669703 - DNA, 75 bp, synthetic construct
  source 1..75: mol_type = other DNA
aaaatcgttccaaccgtactgaaagaagaaggttgccacggctatgcgccaatggtggattgcgctgctggcgtg

SEQ ID NO: 669704 - DNA, 75 bp, synthetic construct
  source 1..75: mol_type = other DNA
gtactcgtcctggtcaacatcaccgtcaggcagtattggatcagtttgctaaaatcgttccaaccgtactgaaag

SEQ ID NO: 669705 - DNA, 75 bp, synthetic construct
  source 1..75: mol_type = other DNA
ccctgtacaccacagaaaacattgccggtcgcatcaatgcccgcctggaggatgagggctttaccgtaaaaatca

SEQ ID NO: 669706 - DNA, 75 bp, synthetic construct
  source 1..75: mol_type = other DNA
tggtttgttggctctattcatgacactgaagatggtccggtttgtatctggctgcgggagaaggttgccgcatga

SEQ ID NO: 669707 - DNA, 75 bp, synthetic construct
  source 1..75: mol_type = other DNA
ccattcatgatacggaagatggcccggttgtgtctggttgcgaaataaggctgaagcataaaggcgataaaccaa

SEQ ID NO: 669708 - DNA, 75 bp, synthetic construct
  source 1..75: mol_type = other DNA
tagaacgtgatgaatatggctgctggacacatccagaatatgaaaagttctgtgacggtcgggaatatatttcaa

SEQ ID NO: 669709 - DNA, 75 bp, synthetic construct
  source 1..75: mol_type = other DNA
attcagccatctggtggggatggatgcctgccagggaacactcacactgctggatacccccggccctaatgaagc

SEQ ID NO: 669710 - DNA, 75 bp, synthetic construct
  source 1..75: mol_type = other DNA
agaaactgccggtgatcgacgtggaattcagccatctggtggggatggatgcctgccagggaacactcacactgc

SEQ ID NO: 669711 - DNA, 75 bp, synthetic construct
  source 1..75: mol_type = other DNA
gaggagctgaacgactatttcagaagcggtaaacgcaaagaacagcaaatgctggaggaagaaaattcagcgcag

SEQ ID NO: 669712 - DNA, 75 bp, synthetic construct
  source 1..75: mol_type = other DNA
atgcgggatcaactgcagaaagcctctgcggtgctggcggtgatggattacacccagatgaactcgaaagccgat

SEQ ID NO: 669713 - DNA, 75 bp, synthetic construct
  source 1..75: mol_type = other DNA
gtaaaaatcagttttccggcagtcagccagttacagacccggctcgcggtaaaaataaatctgagtgcgcttatg

SEQ ID NO: 669714 - DNA, 75 bp, synthetic construct
  source 1..75: mol_type = other DNA
ggcagcctgagttcacagataaaacactctccaggaaacccggggcggttcagaaagcctctgcggttctggctg

SEQ ID NO: 669715 - DNA, 75 bp, synthetic construct
  source 1..75: mol_type = other DNA
gaaggtgaaggctggttcattggttcaattcatgacactgaagatggtccggtttgtgtatggctgagaaataag

SEQ ID NO: 669716 - DNA, 75 bp, synthetic construct
  source 1..75: mol_type = other DNA
tgctctgaactggcctgagtctgtaaaagaactgtcggcaaaggttgccgcgtttgttggctcaggtatttctgt

SEQ ID NO: 669717 - DNA, 75 bp, synthetic construct
  source 1..75: mol_type = other DNA
actggcccgagagcgtcgatactgacgcgaaaaaatgcgctgcctttgcgggttctggcgtatccgttcagccgc

SEQ ID NO: 669718 - DNA, 75 bp, synthetic construct
  source 1..75: mol_type = other DNA
agaaactaccggtgatcgacgtggcgttcagccacctggtgggaatggatgcatgtcagggaacactcacactgc

SEQ ID NO: 669719 - DNA, 75 bp, synthetic construct
  source 1..75: mol_type = other DNA
gcaggagttattgcggcagattcagtcagttcagcagcgcctcggtatggcgatggattatttcctcgctaaccg

SEQ ID NO: 669720 - DNA, 75 bp, synthetic construct
  source 1..75: mol_type = other DNA
gtgacgcatgtcgtcattgctatcagtcctggcgatagccgctttgcacaactcccgctggcgaatcatccacaa

SEQ ID NO: 669721 - DNA, 75 bp, synthetic construct
  source 1..75: mol_type = other DNA
aagcattgcccatcttgaagcgcatctgcaaaccccgcacatgaaagcatatagtgaagccgtaaaaggcgatgt

SEQ ID NO: 669722 - DNA, 75 bp, synthetic construct
  source 1..75: mol_type = other DNA
cacccagatgaactcaaaagccgatgatgaggtccgtaaagagcttaatgccattgctgacgtatcagccggccg

SEQ ID NO: 669723 - DNA, 75 bp, synthetic construct
  source 1..75: mol_type = other DNA
cacccagatgaactcaaaagccgatgaagatgtccgtaaagagcttaatgccattgctgacgtatcagccggccg

SEQ ID NO: 669724 - DNA, 75 bp, synthetic construct
  source 1..75: mol_type = other DNA
ggagcgtttggcaccagtgactggggctgggaaacctataaagaggatgtgagccgcagtgttatcaatatcaac

SEQ ID NO: 669725 - DNA, 75 bp, synthetic construct
  source 1..75: mol_type = other DNA
gtgatcgcagggaagcccttgaactgatgacgcaaatcgaatcgaccgtgaccagcctgcaccgtgaggctgaag

SEQ ID NO: 669726 - DNA, 75 bp, synthetic construct
  source 1..75: mol_type = other DNA
tcgatattttcggaaccggaaatcagcatgacaggatgcgggactttgatcccgacagccccgaaataaaattca

SEQ ID NO: 669727 - DNA, 75 bp, synthetic construct
  source 1..75: mol_type = other DNA
cacccagatgaactctaaagccgatgaagaggtccgtaaagagcttaatgccattgctgacgtatcagccggccg

SEQ ID NO: 669728 - DNA, 75 bp, synthetic construct
  source 1..75: mol_type = other DNA
tcagcccagccccgggagagaaacgcattcgctttctttcacgatattttcggaaccggaaatcagcatgacagg

SEQ ID NO: 669729 - DNA, 75 bp, synthetic construct
  source 1..75: mol_type = other DNA
gaacggctgcacccgccaggctcatcgtcttaccctgcagctcggtgaacgcagaatgacgctggtcgatctgcc

SEQ ID NO: 669730 - DNA, 75 bp, synthetic construct
  source 1..75: mol_type = other DNA
agcctttccattgttaggtggccaccttaacacaagagcacttaaaaaagcaaagccccgcaagtgtcattacca

SEQ ID NO: 669731 - DNA, 75 bp, synthetic construct
  source 1..75: mol_type = other DNA
aaagcgccccgttgctagataacaggcaaaacaaaggcgaccgggataggtcgccagtgggaacaaaggaaatca

SEQ ID NO: 669732 - DNA, 75 bp, synthetic construct
  source 1..75: mol_type = other DNA
atgtcattcagccattcttccctctcctcccaagttaaatcacatctgacgtttcttcctgaagaaattcgccag

SEQ ID NO: 669733 - DNA, 75 bp, synthetic construct
  source 1..75: mol_type = other DNA
atgtcattcagccattcttccctctcctctcaagtaaaatcagatctgacgtttcttcctgaagaaattcgccag

SEQ ID NO: 669734 - DNA, 75 bp, synthetic construct
  source 1..75: mol_type = other DNA
atgtcattcagccattcttccctctcctcacaagtcaaatcatatctgacgtttcttcctgaagaaattcgccag

SEQ ID NO: 669735 - DNA, 75 bp, synthetic construct
  source 1..75: mol_type = other DNA
gcagtacaatcaatacaacccattattgaggctcagcaagttcaaattcagcaacaacaagatcaaataggaacg

SEQ ID NO: 669736 - DNA, 75 bp, synthetic construct
  source 1..75: mol_type = other DNA
aacagataaccagaacaaagaatcactgcacaaatctctggccaggttactggatactgatgcgatttttcctga

SEQ ID NO: 669737 - DNA, 75 bp, synthetic construct
  source 1..75: mol_type = other DNA
aagcagaacaacagctggataaggattcggccattgttcctgtttattactacgtgaatgcgcgtctggtgaaac

SEQ ID NO: 669738 - DNA, 75 bp, synthetic construct
  source 1..75: mol_type = other DNA
caacatttgcaggaaatcagcgaatccgtgcgccagatccgccaggaaaacagcgactggtttagcgaagagtaa

SEQ ID NO: 669739 - DNA, 75 bp, synthetic construct
  source 1..75: mol_type = other DNA
attagcctttctattgttaggtggtcaccttaacacaagagcacttaaaaaagcaaagccccgcaagtgtcatta

SEQ ID NO: 669740 - DNA, 75 bp, synthetic construct
  source 1..75: mol_type = other DNA
ttgctcaagggcaaaagcacatggtgcgaatctttctgattcatgctctatctttctgcgccgtcttttccgtgc

SEQ ID NO: 669741 - DNA, 75 bp, synthetic construct
  source 1..75: mol_type = other DNA
tgccaccacaggcaaccagcgcagtttattcacatatcaggggggaaaaccgctctgaacaggcccggaaacacg

SEQ ID NO: 669742 - DNA, 75 bp, synthetic construct
  source 1..75: mol_type = other DNA
tgcccgactggaggatgagggcttcactgtaaaaatcagttttccggcagtcagccagttacagacccggctcgc

SEQ ID NO: 669743 - DNA, 75 bp, synthetic construct
  source 1..75: mol_type = other DNA
cggccagccacagatggaagtgatgatgcgggatcaactgcagaaagcttccgcggtgctggcagtgatggatta

SEQ ID NO: 669744 - DNA, 75 bp, synthetic construct
  source 1..75: mol_type = other DNA
ccttttgacgaatacgcagaagtgcagaaactgccggtgatcgacgtggagttcagccacctggtgggaatggat

SEQ ID NO: 669745 - DNA, 75 bp, synthetic construct
  source 1..75: mol_type = other DNA
aatacctgttgttacgccatcaggggctacagcaaagcattcagtcactgcagtcgcatatcaccagcctgcttg

SEQ ID NO: 669746 - DNA, 75 bp, synthetic construct
  source 1..75: mol_type = other DNA
atcgtcaggggtattgaaacaggttttcgtggtacggccctgtacgccacagaaaatattgccggacgcatcaat

SEQ ID NO: 669747 - DNA, 75 bp, synthetic construct
  source 1..75: mol_type = other DNA
ttcagtgatcgcagggcagcccttgaactgatgacgcaaatcgaatcgaccgtgaccagcctgcaccgtgaggct

SEQ ID NO: 669748 - DNA, 75 bp, synthetic construct
  source 1..75: mol_type = other DNA
gtgaacgcagaatgacgctggtcgatctgcccggcattggtgaaacaccgcagcatgatcaggaataccgagcgc

SEQ ID NO: 669749 - DNA, 75 bp, synthetic construct
  source 1..75: mol_type = other DNA
tccgctgaacggctgcacccgtcaggctcatcgtcttacctttcagcccggtgaacgaagaatgacgctggtcga

SEQ ID NO: 669750 - DNA, 75 bp, synthetic construct
  source 1..75: mol_type = other DNA
ctgcacaagtgaaatcatatctgacgtttcttcctgaagaaattcgccagaaaatccttgaacatctccacggtg

SEQ ID NO: 669751 - DNA, 75 bp, synthetic construct
  source 1..75: mol_type = other DNA
gttcccgtcatcatttccggtactccccgttgctgtgcctgtcggctggaatcttccggcgtttgtgtcgctgat

SEQ ID NO: 669752 - DNA, 75 bp, synthetic construct
  source 1..75: mol_type = other DNA
gtatcaagcccaaccagcctatgaacagtcagactgttaacgcctcactaaaacgcgcaggttttggtggtgtgc

SEQ ID NO: 669753 - DNA, 75 bp, synthetic construct
  source 1..75: mol_type = other DNA
cgtcagcaggaactctcactggcgacagtaacagcccgggtggccaccctgttcccgtcatcatttccggtactc

SEQ ID NO: 669754 - DNA, 75 bp, synthetic construct
  source 1..75: mol_type = other DNA
gcatgacaggatgcgggactttgatccggacagccccgaaataaaattcagtgatcgcagggaagcccttgaact

SEQ ID NO: 669755 - DNA, 75 bp, synthetic construct
  source 1..75: mol_type = other DNA
tgggctgggaaaactatgacgaggatgtgagtcgcagcgtgatcaatatcaacaaggtcagagaggaagttatgt

SEQ ID NO: 669756 - DNA, 75 bp, synthetic construct
  source 1..75: mol_type = other DNA
agaagaaggcgcagaacaacgcatatcgcagcaggggattattggaaaaattcgtgagcagtttagtgtcagtgt

SEQ ID NO: 669757 - DNA, 75 bp, synthetic construct
  source 1..75: mol_type = other DNA
caaatcgaatcgaccgtgaccagcctgcaccgtgaggctgaagcacagttccggcctgagctggagaaaatcgtc

SEQ ID NO: 669758 - DNA, 75 bp, synthetic construct
  source 1..75: mol_type = other DNA
taaccgtgcgcttcatgagttacaaaaaaacggcacacttcctgatgatgaagcctgggtcgatgattttgtcag

SEQ ID NO: 669759 - DNA, 75 bp, synthetic construct
  source 1..75: mol_type = other DNA
atggaggaaagaacggagaccgtcacccgtcgccgtcggcagagtggtttatggggaaagatttgtggagcgttt

SEQ ID NO: 669760 - DNA, 75 bp, synthetic construct
  source 1..75: mol_type = other DNA
gaccgtctaaatcagatccacactctcaagccaaaccgccttgaagcggaaaccctgagtgggattgcgctgtca

SEQ ID NO: 669761 - DNA, 75 bp, synthetic construct
  source 1..75: mol_type = other DNA
tcgtaaacagggcgcagtaccagccactatcgccattattggcggtgtgatgaaagtgggcttaagtaaagaaga

SEQ ID NO: 669762 - DNA, 75 bp, synthetic construct
  source 1..75: mol_type = other DNA
gggcaaaggtcattgtcgcagactgtaatatcagtgaagaggcactggcatggattctggataatgccgccaacg

SEQ ID NO: 669763 - DNA, 75 bp, synthetic construct
  source 1..75: mol_type = other DNA
aacgcaaagaacagcaaatgctggaagaagaaggcgcagaacaacgcatatcgcagcaggggattattggaaaaa

SEQ ID NO: 669764 - DNA, 75 bp, synthetic construct
  source 1..75: mol_type = other DNA
acagtctgaaatcaaatattcagctggtgttcaacaacgcagttctggcctgtgagatagcaaaagaatatcaac

SEQ ID NO: 669765 - DNA, 75 bp, synthetic construct
  source 1..75: mol_type = other DNA
ctcgatttaggattaacaacagaatatttagaaaccttcggtgtaccgttaattggttatcagacaaaagcgctg

SEQ ID NO: 669766 - DNA, 75 bp, synthetic construct
  source 1..75: mol_type = other DNA
atggaggaaagaacggagacagtcacccgtcaccgtcggcagagtggcgtctggggaaccttttgtcgatggttt

SEQ ID NO: 669767 - DNA, 75 bp, synthetic construct
  source 1..75: mol_type = other DNA
ctaatcccgccaacacatgataaaaataactataacactgtacgtagcgttattggtggattgcctcctattgat

SEQ ID NO: 669768 - DNA, 75 bp, synthetic construct
  source 1..75: mol_type = other DNA
ttcttcgactcacaaaatgcccgagggcgggatctggatccacacgatctgcttaaagccttccatctacgtgaa

SEQ ID NO: 669769 - DNA, 75 bp, synthetic construct
  source 1..75: mol_type = other DNA
gcgatgacgtataccaaaagcaaaacgtttaaaaccgaagtggtgcccgtcgctggctggaaagaaactctgact

SEQ ID NO: 669770 - DNA, 75 bp, synthetic construct
  source 1..75: mol_type = other DNA
tagaaggattccttcatggtgtattgaccgtgttcctgctgatgctcaattaattggtgagtctggttcttacac

SEQ ID NO: 669771 - DNA, 75 bp, synthetic construct
  source 1..75: mol_type = other DNA
atggcaagacaaaccaaacctctctccgttaaggaaatcgaatcagccaaacccaaagaagtggactacgttctc

SEQ ID NO: 669772 - DNA, 75 bp, synthetic construct
  source 1..75: mol_type = other DNA
ataaaccaagtcctacaattactacgctatgttatggttttggaaatggcagatttggtcatccagagcaaaatc

SEQ ID NO: 669773 - DNA, 75 bp, synthetic construct
  source 1..75: mol_type = other DNA
acgaatctctggtgtgcggcgtgttcccaaaccaggacggtacgttcaccgcaatgacgtataccaaaagcaaaa

SEQ ID NO: 669774 - DNA, 75 bp, synthetic construct
  source 1..75: mol_type = other DNA
gtcaccaagaagcgggcgaagaagagcatcggcccctatccgtcagtcacacttgccgatgctcgaagctaccgg

SEQ ID NO: 669775 - DNA, 75 bp, synthetic construct
  source 1..75: mol_type = other DNA
accgcgatgacgtataccagaagcaaaacgtttaaaacggaagctggcgcgcgtcgctggttaaccagaaacact

SEQ ID NO: 669776 - DNA, 75 bp, synthetic construct
  source 1..75: mol_type = other DNA
acgaatctctggtatacggcgtgtttcccaaccaggacggaacgttcaccgccatggcgtataccaaaagcaaga

SEQ ID NO: 669777 - DNA, 75 bp, synthetic construct
  source 1..75: mol_type = other DNA
tcccaaccaggacggtacgttcaccgcgatgacgtatacaaaaagcaaaacatttaaaaccgaaactggtgcgcg

SEQ ID NO: 669778 - DNA, 75 bp, synthetic construct
  source 1..75: mol_type = other DNA
gcaatgacgtataccaaaagcaaaacgcttaaaaccgaatctggcgcgcgtcgctggttagccagaaacactgac

SEQ ID NO: 669779 - DNA, 75 bp, synthetic construct
  source 1..75: mol_type = other DNA
gcaacagcgaatctctggtatgtggcgtgttccccaaccaggacggcacgttcaccgcaatgacgtataccaaaa

SEQ ID NO: 669780 - DNA, 75 bp, synthetic construct
  source 1..75: mol_type = other DNA
caggttcagtgggagcagaaatttgcccgccacgtgcagcacgtcagggcacaggtaaaaccagtcagcaagggg

SEQ ID NO: 669781 - DNA, 75 bp, synthetic construct
  source 1..75: mol_type = other DNA
cgcgagagtgctccgaccagtgagcaggaagttttgtcgttacaggcagcccccctgtattcctgtatggcctga

SEQ ID NO: 669782 - DNA, 75 bp, synthetic construct
  source 1..75: mol_type = other DNA
gacttatcggtgtagaagaaagtgttgccgagcctgaatacacccaaaaacgggagtctttaaaggtgggtaaaa

SEQ ID NO: 669783 - DNA, 75 bp, synthetic construct
  source 1..75: mol_type = other DNA
agtaaacgcttttttgagcagcattacctgccgttgttgccttattgctttgtcgcttcgcaggtataccggacc

SEQ ID NO: 669784 - DNA, 75 bp, synthetic construct
  source 1..75: mol_type = other DNA
tcgcaggagtatttgacgcgtgcgactcagcgatattatggcaaaacgccgatgcagattattaatgaaatccgc

SEQ ID NO: 669785 - DNA, 75 bp, synthetic construct
  source 1..75: mol_type = other DNA
taccgaggatgaatacacccaaaaacgggagtctttaaaggtaggtaaaattggtactgttaataaaaacagaac

SEQ ID NO: 669786 - DNA, 75 bp, synthetic construct
  source 1..75: mol_type = other DNA
ctgtcataccaattatatatttattctcaagtagtttttcttccagtttatttttaagtttgagtaatctaaata

SEQ ID NO: 669787 - DNA, 75 bp, synthetic construct
  source 1..75: mol_type = other DNA
atgcgctactggctggaaacgccgactatctccgcaccgcccatcgaactggttgaaattgagcggctgcgttac

SEQ ID NO: 669788 - DNA, 75 bp, synthetic construct
  source 1..75: mol_type = other DNA
caaaacccgcaaccgaagattcatcgcgcacaaacgcgggttcagcaactggaatatcgcctcgctgaaacactt

SEQ ID NO: 669789 - DNA, 75 bp, synthetic construct
  source 1..75: mol_type = other DNA
ccttccgggactactgggcagcggaggggaaagtgtttacgcagattcagtgggagcagaaattcgcccgtcacg

SEQ ID NO: 669790 - DNA, 75 bp, synthetic construct
  source 1..75: mol_type = other DNA
attaatatttttccagtcagtgcctctgtatatatttttagtgctttttcattatttgtttttctgggaggtatt

SEQ ID NO: 669791 - DNA, 75 bp, synthetic construct
  source 1..75: mol_type = other DNA
tatatttttgtttttagtgttgtcaattaatattttttcagtcagtgcctctctatacgtttttagtgctttttc

SEQ ID NO: 669792 - DNA, 75 bp, synthetic construct
  source 1..75: mol_type = other DNA
gatgcagattattaatgaaatccgcattaactttgccaaaaaacagctggaaatgacgaactattccgtcaccga

SEQ ID NO: 669793 - DNA, 75 bp, synthetic construct
  source 1..75: mol_type = other DNA
atgagcactcatcatgttgtgagtttttcaggcggtcggacatcggcgtacctcgtccaccttatggagcaacgc

SEQ ID NO: 669794 - DNA, 75 bp, synthetic construct
  source 1..75: mol_type = other DNA
aaaaagtacggtacgccatacatcggcggcgcgttctgtactgacaggctaaaactcacccctttcacgaaatat

SEQ ID NO: 669795 - DNA, 75 bp, synthetic construct
  source 1..75: mol_type = other DNA
gcaagaattgctacgtcaggtgcaatcgacccgtcaacggctggaaatggcgatggactattatctcgccaatcg

SEQ ID NO: 669796 - DNA, 75 bp, synthetic construct
  source 1..75: mol_type = other DNA
tctgtgaaatgctcgccaagcggcagcctgacctgaccgtctgcatggaacaggttcacaaaccccataacgttt

SEQ ID NO: 669797 - DNA, 75 bp, synthetic construct
  source 1..75: mol_type = other DNA
tggacggcactttattgatgcctgatcaccatttaggtgagaaaaccctctcgactctggcgcgtctgcgtgaac

SEQ ID NO: 669798 - DNA, 75 bp, synthetic construct
  source 1..75: mol_type = other DNA
gtgctggccaagcggtttgatactggttcgtgttccgaatcatgtgaaatctggggtgaccaattggagttgaaa

SEQ ID NO: 669799 - DNA, 75 bp, synthetic construct
  source 1..75: mol_type = other DNA
ggcgatacgttgaccactcgacttggtgatggtgtggtgattagtgaagttagcgccgtaacaaaaacgcgtaaa

SEQ ID NO: 669800 - DNA, 75 bp, synthetic construct
  source 1..75: mol_type = other DNA
gctgcgctacatgatattttgcatgtgttaaaacgtcgcgatccgtctttgccggtgatcatctaccccaccgcc

SEQ ID NO: 669801 - DNA, 75 bp, synthetic construct
  source 1..75: mol_type = other DNA
atggtaagcgcgctgtatgccgttttaggtgcgttgttattaatgaagttctcttttgatgttgttcgcctgcga

SEQ ID NO: 669802 - DNA, 75 bp, synthetic construct
  source 1..75: mol_type = other DNA
tcgacccgtcaacggctggagatggcgatggactattatctcgccaatcgcacgcggcgctttacgcagatccat

SEQ ID NO: 669803 - DNA, 75 bp, synthetic construct
  source 1..75: mol_type = other DNA
agctccggctggcacgccagcaaaccatgcttgagcgcctgcaaaaacggatgagctttgcgctggaaaatcagc

SEQ ID NO: 669804 - DNA, 75 bp, synthetic construct
  source 1..75: mol_type = other DNA
tgttaaacagtagcgaacaggcgcttgccgatcagcaaaatcagcagttaacgcaatcattttgcgatgtggtgg

SEQ ID NO: 669805 - DNA, 75 bp, synthetic construct
  source 1..75: mol_type = other DNA
actgccagcatggcggtgatcaatgccaaacgcgtataccgcatcatgcgtcagaatgcgctgttgcttgagcgc

SEQ ID NO: 669806 - DNA, 75 bp, synthetic construct
  source 1..75: mol_type = other DNA
cagcaacctttacttactcacttcaaactgcatcctcgtagactgttccactacaataatcgaaaaggcgtggat

SEQ ID NO: 669807 - DNA, 75 bp, synthetic construct
  source 1..75: mol_type = other DNA
tgggacagtcactctccggtggtgaacgtcgccgtgtagaaattgcccgcgcactggcagcgaatccgaaattta

SEQ ID NO: 669808 - DNA, 75 bp, synthetic construct
  source 1..75: mol_type = other DNA
tgtctgctgaacaacgtgaagaccgcgcgaacgagctgatggaagagtttcacattgagcacctgcgtgacagca

SEQ ID NO: 669809 - DNA, 75 bp, synthetic construct
  source 1..75: mol_type = other DNA
tatcaataatcaggcggagatcgacaaagtgattgcccacaccttacgtccggtggaatccattcattacctgcc

SEQ ID NO: 669810 - DNA, 75 bp, synthetic construct
  source 1..75: mol_type = other DNA
cagtattgtgctggcaacacgggattatgttgattcgcaactggatgaacatgaacgttcgactaatcaccctga

SEQ ID NO: 669811 - DNA, 75 bp, synthetic construct
  source 1..75: mol_type = other DNA
taaccgccgctggccgcgcgaaaatcgcggcggcgttggcggaacaaaagcagatagtgctgcaaacaatggtcg

SEQ ID NO: 669812 - DNA, 75 bp, synthetic construct
  source 1..75: mol_type = other DNA
tgcatcatcatttaaccatggaaataaaacaacaagttcatctggctcaggctcggcaactgcaacagtaagaac

SEQ ID NO: 669813 - DNA, 75 bp, synthetic construct
  source 1..75: mol_type = other DNA
gtgcttctccggatacaccatgttatcgaagagctgcccacgtatggttatcgtcgggtatgggagctgctttgc

SEQ ID NO: 669814 - DNA, 75 bp, synthetic construct
  source 1..75: mol_type = other DNA
cagccgttgtctccgggggtcgcgtgcgcagttgcacgtcattctcagacgaaccgatgactggatggatggccg

SEQ ID NO: 669815 - DNA, 75 bp, synthetic construct
  source 1..75: mol_type = other DNA
ctgggatgcaatggttgataaccctgctgcagcggcgaaattattacaggaactacaaccgccggttcagcaggt

SEQ ID NO: 669816 - DNA, 75 bp, synthetic construct
  source 1..75: mol_type = other DNA
cctcagaaaacaggtatttggtacaggtgcattacgtgcggcggtggcgtcttatgtacagtccccacgctatta

SEQ ID NO: 669817 - DNA, 75 bp, synthetic construct
  source 1..75: mol_type = other DNA
gccgggactgaagcgggcactgaagaaactaaaacccggtgacacactgatggtctggaaactggacaggctggg

SEQ ID NO: 669818 - DNA, 75 bp, synthetic construct
  source 1..75: mol_type = other DNA
gcagaagggcgggacgctcattccagtgcagacaacgcaaggggtcagcaacaattgcaaaattaccgggcggtg

SEQ ID NO: 669819 - DNA, 75 bp, synthetic construct
  source 1..75: mol_type = other DNA
acaattgcaaattgccgggtggtgaaacgattgatgaatgggcgttatggcggcgggagcatccggctggtgaaa

SEQ ID NO: 669820 - DNA, 75 bp, synthetic construct
  source 1..75: mol_type = other DNA
tcgacgaacgtctgcgcgaagccgatatcatcatcagttccaccgccagcccgttaccgattatcgggaaaggca

SEQ ID NO: 669821 - DNA, 75 bp, synthetic construct
  source 1..75: mol_type = other DNA
caagatctggcatggaaactgactaaccgcctgatccatgcgccaacgaaatcacttcaacaggccgcccgtgac

SEQ ID NO: 669822 - DNA, 75 bp, synthetic construct
  source 1..75: mol_type = other DNA
atatggatatttttactgctctacaaaaacatgatggtgatgcggtagaaaaagcaatgactctgcatttgcagg

SEQ ID NO: 669823 - DNA, 75 bp, synthetic construct
  source 1..75: mol_type = other DNA
gacgccattctctactgcccgccaacgtacggcatgtacagcgtcagcgctgaaaccattggcgtcgagtgccgc

SEQ ID NO: 669824 - DNA, 75 bp, synthetic construct
  source 1..75: mol_type = other DNA
tcactgatttagcccgtaagaatgttcgcgagttaacaccctatcagtctgcccgccgtctcggcggtaacggcg

SEQ ID NO: 669825 - DNA, 75 bp, synthetic construct
  source 1..75: mol_type = other DNA
agtggcggaagaagcagaagcaattctgaccgcacagggccacaaagcaacggtatttgaagatcctgaattaag

SEQ ID NO: 669826 - DNA, 75 bp, synthetic construct
  source 1..75: mol_type = other DNA
accatctttatccttgccccgttgaatgaggaaacgctgttccgggggattatgctgaacgtcttccgttcacgg

SEQ ID NO: 669827 - DNA, 75 bp, synthetic construct
  source 1..75: mol_type = other DNA
gcggctgcctgcgaattactgtcggaacccgtgaagagagccagcgcgtcactgacgccttacgtgcggagcaag

SEQ ID NO: 669828 - DNA, 75 bp, synthetic construct
  source 1..75: mol_type = other DNA
atgaagcctatatcgagttttgcccacaggcatcgctggctggctggctggcggaatatccgcacctggctattt

SEQ ID NO: 669829 - DNA, 75 bp, synthetic construct
  source 1..75: mol_type = other DNA
tgacgatcctaaaggtactccaccaaatgcaataccgtcatctgcagaattttatcctggaaagaatggtgaaaa

SEQ ID NO: 669830 - DNA, 75 bp, synthetic construct
  source 1..75: mol_type = other DNA
ttatgacaaagcaacggtgcaggatgtcatgttaggagcaatagaaaaacgctttggcgataaaggagcggaacg

SEQ ID NO: 669831 - DNA, 75 bp, synthetic construct
  source 1..75: mol_type = other DNA
gcgatcgagcattacaatgaaaaccatccgcacagtgcgttgggttatcgctctccgcgagaatatcgacgtcag

SEQ ID NO: 669832 - DNA, 75 bp, synthetic construct
  source 1..75: mol_type = other DNA
aacagtcgtagaatcagcgataagccggaaggagacattgctgtcgagtactggagtacggtggcgaaaattccg

SEQ ID NO: 669833 - DNA, 75 bp, synthetic construct
  source 1..75: mol_type = other DNA
tgactacataagtatcatgcccaaaccagacgggttaacggcagcaaagaaccttgcagaggcgttcgagcatta

SEQ ID NO: 669834 - DNA, 75 bp, synthetic construct
  source 1..75: mol_type = other DNA
ttacaatgaaaaccatccgcatagtgcgttaggttatctctcaccaagggaatatcgacgtcagcgggtaacatc

SEQ ID NO: 669835 - DNA, 75 bp, synthetic construct
  source 1..75: mol_type = other DNA
tgactaaccgcctgatccatgcgccaacgaaatcactccaacaggccgcccgtgacggggataacgaacgcctga

SEQ ID NO: 669836 - DNA, 75 bp, synthetic construct
  source 1..75: mol_type = other DNA
tgcttatctttatagcgtggacgatctgcaaagcatcatttcgcacaacctggcgcagcgtaaagccgcagcggt

SEQ ID NO: 669837 - DNA, 75 bp, synthetic construct
  source 1..75: mol_type = other DNA
gccgattcgcaaaaaggccatatgaaggcgagcgaactggagcgcatgttccagaaatctttttctgtagcgaaa

SEQ ID NO: 669838 - DNA, 75 bp, synthetic construct
  source 1..75: mol_type = other DNA
aatgcgcaatctggcgcagcagaagccgaacgacccggagcaggtttacgcttacgggctgtacctctctggtca

SEQ ID NO: 669839 - DNA, 75 bp, synthetic construct
  source 1..75: mol_type = other DNA
aatgccgatggcaaatgggatgacaactggggcacctgtacattacaggactgtagcggcaaccgcagccagtcg

SEQ ID NO: 669840 - DNA, 75 bp, synthetic construct
  source 1..75: mol_type = other DNA
agactacatcgcgttcatgccgaaaccgaatgtaagaacggcattgcataaccttgcagtggcgatcgagcatta

SEQ ID NO: 669841 - DNA, 75 bp, synthetic construct
  source 1..75: mol_type = other DNA
cgtcatgctgggagcggtggaacgccgcttcggcaacgatcttccgtcgtctccagtggagtggctgacggataa

SEQ ID NO: 669842 - DNA, 75 bp, synthetic construct
  source 1..75: mol_type = other DNA
ggtgctccgttgacgcttacggacgtcatgctgggagcggtggaacgccgcttcggcaacgatcttccgtcgtct

SEQ ID NO: 669843 - DNA, 75 bp, synthetic construct
  source 1..75: mol_type = other DNA
atgctgggagcggtggagcgtcgcttcggcagcggccttccggcgtcgccggtggagtggctgacggataacggt

SEQ ID NO: 669844 - DNA, 75 bp, synthetic construct
  source 1..75: mol_type = other DNA
ggcagtttgcccggatgttggggcttcgagtaggcagcctgacggctgcggcttgtcatggtctgaaattaccgt

SEQ ID NO: 669845 - DNA, 75 bp, synthetic construct
  source 1..75: mol_type = other DNA
cgtttttgataccgatggtgaactcattgctatcggtaaattcccggagtcgtataaaccactattacccggcgg

SEQ ID NO: 669846 - DNA, 75 bp, synthetic construct
  source 1..75: mol_type = other DNA
atcaaattactggtatcccagacggtacgctgacgcaaaaagggattgtgaagcttaataacacaacaaacagca

SEQ ID NO: 669847 - DNA, 75 bp, synthetic construct
  source 1..75: mol_type = other DNA
accaaaagtcttagtgaagatgcgtgttggtggaattagcaatcgttcagtatcttcaatggtcaagaagtcaat

SEQ ID NO: 669848 - DNA, 75 bp, synthetic construct
  source 1..75: mol_type = other DNA
gccgcgtgtccactattgctgggtaagctcagagagctgcccacgtatggttatcgtcgggtatgggcgctgctt

SEQ ID NO: 669849 - DNA, 75 bp, synthetic construct
  source 1..75: mol_type = other DNA
ttgcagaggcgttcgagcattataacgaatggcatccgcatagtgcactgggttatcgctcgccacgggaatatc

SEQ ID NO: 669850 - DNA, 75 bp, synthetic construct
  source 1..75: mol_type = other DNA
gtgaggcactgcactgggcggtcactaccggcggcttcaacagtgaaacagtacaggacgtcatgctgggagcgg

SEQ ID NO: 669851 - DNA, 75 bp, synthetic construct
  source 1..75: mol_type = other DNA
gaaaccttgcagtagcgttcacgcattacaatgaaaaccacccgcacagcgcgctgggatatcactccccgaggg

SEQ ID NO: 669852 - DNA, 75 bp, synthetic construct
  source 1..75: mol_type = other DNA
agtccggagagtaacggcatagcagagagcttcgtgaaaacgataaagcgtgactacatcagtatcatgcctaaa

SEQ ID NO: 669853 - DNA, 75 bp, synthetic construct
  source 1..75: mol_type = other DNA
ggctacgccatgggagagcgcatgacaaaagagctgactgacgggttcgagttccgctgtgataacggagaaaaa

SEQ ID NO: 669854 - DNA, 75 bp, synthetic construct
  source 1..75: mol_type = other DNA
agcctcaaaaaccttcaggtcagccgcatcaaccctcacgatgaaaccgaacgctatcgccagcatgttcttgag

SEQ ID NO: 669855 - DNA, 75 bp, synthetic construct
  source 1..75: mol_type = other DNA
gcgtatctgcattgaagggactgctggacacccgctctgagagattacctctcccggcaatgaacgttccgtgct

SEQ ID NO: 669856 - DNA, 75 bp, synthetic construct
  source 1..75: mol_type = other DNA
gtgtgtccgcattgaagggactgctggatacccgttctgatacgttaccgctaccggtaacgaatgtcctgtaca

SEQ ID NO: 669857 - DNA, 75 bp, synthetic construct
  source 1..75: mol_type = other DNA
aatcgacgctacaggaagtcgcccgcacccatgaagaactggctgcgattggcctgaaaaaccagtacctggtga

SEQ ID NO: 669858 - DNA, 75 bp, synthetic construct
  source 1..75: mol_type = other DNA
cttacctattttttaccggtaagggaggtgtaggaaaaacttctatttcctgtgcgacggctatccgccttgccg

SEQ ID NO: 669859 - DNA, 75 bp, synthetic construct
  source 1..75: mol_type = other DNA
ctggttctggttgcaagactgcaaaaatctacgctgcaggaagtcgcccgcacccatgaagaactggctgcaatt

SEQ ID NO: 669860 - DNA, 75 bp, synthetic construct
  source 1..75: mol_type = other DNA
ggccaggtctttggccaggttattggcaatactattcagccaatagccactgttcctggattgtcggcacttgag

SEQ ID NO: 669861 - DNA, 75 bp, synthetic construct
  source 1..75: mol_type = other DNA
tccagatggaagagaagacgggtattgattatcaggaggcaaaaaaacgcctcgcggtgacttatgccttgatgg

SEQ ID NO: 669862 - DNA, 75 bp, synthetic construct
  source 1..75: mol_type = other DNA
gtgatgatcatcttcatcctgttatatctggcattccgccgggctgatgaggccttacttattctgatgagcctg

SEQ ID NO: 669863 - DNA, 75 bp, synthetic construct
  source 1..75: mol_type = other DNA
gcgtgctcatcaggaactgcctcagattgaggctgttaataatcaacacgctgaccgtatagcgcttgttccggt

SEQ ID NO: 669864 - DNA, 75 bp, synthetic construct
  source 1..75: mol_type = other DNA
cccgcttcgatcacatcatttttgatacagcgccaacgggccacacgattcgccttctccagcttcctggtgcct

SEQ ID NO: 669865 - DNA, 75 bp, synthetic construct
  source 1..75: mol_type = other DNA
tattaaaggtgtcctgcctgatgacgtcgttagcagcatcaacgaacaactgtctggtgcatgcacaacagagat

SEQ ID NO: 669866 - DNA, 75 bp, synthetic construct
  source 1..75: mol_type = other DNA
atggctgggctggaaaaacagcgtgagcagtacgctgatgcggtagaagcattatccgatcctgagcgtacccgc

SEQ ID NO: 669867 - DNA, 75 bp, synthetic construct
  source 1..75: mol_type = other DNA
accagctatcccggccaggctccgcagattgttgaaaaccaggtaacctatccgctcaccaccaccatgctgtcg

SEQ ID NO: 669868 - DNA, 75 bp, synthetic construct
  source 1..75: mol_type = other DNA
gatcgcagccagttaatcgatcgggccattgataacctcagctacaaactcctggaagagtttatcgtggtggcc

SEQ ID NO: 669869 - DNA, 75 bp, synthetic construct
  source 1..75: mol_type = other DNA
gaagcagcagatcacgctgggcgatgtcgcggatattaacgtcgtttctggaccaaccatgctgaaaaccgaaaa

SEQ ID NO: 669870 - DNA, 75 bp, synthetic construct
  source 1..75: mol_type = other DNA
aacattggtgtaaacgtcaaactggttaaccaggagtggaaaacgttcctcgacacccgtcaccagggtactttt

SEQ ID NO: 669871 - DNA, 75 bp, synthetic construct
  source 1..75: mol_type = other DNA
atctggccactgagtcaggtgggcggggagtttctgccgaagatcaacgagggagatctgctctacatgccgtca

SEQ ID NO: 669872 - DNA, 75 bp, synthetic construct
  source 1..75: mol_type = other DNA
attacggcggtgagggataaactggacacgctgaaggcaagcctgcctgaaggagtggagatcgtaacgacatac

SEQ ID NO: 669873 - DNA, 75 bp, synthetic construct
  source 1..75: mol_type = other DNA
agtctctaccggaccgtcgatgctgaaaaccgagaatgcgcgcccgacgagctggatttatatcgatgcccgcga

SEQ ID NO: 669874 - DNA, 75 bp, synthetic construct
  source 1..75: mol_type = other DNA
taacgcttatttgaatcaattgagccagcgatgcgatgcctggcaatgccaaatatggggaaccggtggtcgact

SEQ ID NO: 669875 - DNA, 75 bp, synthetic construct
  source 1..75: mol_type = other DNA
ggatcgatcctcacgaggaaacggaacgctaccgtcagcatgttcttgacactaagggaggcgaactggacgaag

SEQ ID NO: 669876 - DNA, 75 bp, synthetic construct
  source 1..75: mol_type = other DNA
cgggtgtgggctggatttttgaatatgcccttgtcgatcgcaacggaaaacacgacctttcagaactgcgctctc

SEQ ID NO: 669877 - DNA, 75 bp, synthetic construct
  source 1..75: mol_type = other DNA
gagcggccgcgctggccatcattgtcattccgatcttgatgggattctggatccggggaaaaattcctgccgaga

SEQ ID NO: 669878 - DNA, 75 bp, synthetic construct
  source 1..75: mol_type = other DNA
ccgcacctttgctgtcgctgtttattatcccggcggcgtataagctgatgtggctgcaccgacatcgggtacgga

SEQ ID NO: 669879 - DNA, 75 bp, synthetic construct
  source 1..75: mol_type = other DNA
tgtgcagctgttcatctcatcagccatcggcggcgcgacggtaggggaaacggttgaaggcgtggcccggtaccc

SEQ ID NO: 669880 - DNA, 75 bp, synthetic construct
  source 1..75: mol_type = other DNA
atgaagctacaggccaatatcctgctacgggttctgacgccgctcatcctgctggcgggcagtgtcctgctgttt

SEQ ID NO: 669881 - DNA, 75 bp, synthetic construct
  source 1..75: mol_type = other DNA
gatccctacccatttaaattgctgattggcgaggacaacctcaccgccaacggcatcgaactgccggacgtggcg

SEQ ID NO: 669882 - DNA, 75 bp, synthetic construct
  source 1..75: mol_type = other DNA
gatctgggtatcgatggcgacacgcctgccgataccgtcgccacgctggtcggccagatgaagcagtaccgccgg

SEQ ID NO: 669883 - DNA, 75 bp, synthetic construct
  source 1..75: mol_type = other DNA
cactgacggcacttacttctgcgccacgaatgtggcgcgggtgaaccttatccgacaggtacaggagtcacgcag

SEQ ID NO: 669884 - DNA, 75 bp, synthetic construct
  source 1..75: mol_type = other DNA
gcttgccgatgctagaaactatcgcgcagagtctcgttctcttctggcgaaacaaatcgaccctcaggaacatca

SEQ ID NO: 669885 - DNA, 75 bp, synthetic construct
  source 1..75: mol_type = other DNA
cgccggcgcgggtactgatatcgactcgaacccgctgagttcgtttattcagagttacgtgacgtactacaacgg

SEQ ID NO: 669886 - DNA, 75 bp, synthetic construct
  source 1..75: mol_type = other DNA
ccggcatgccgatggattttgacgacgacatcccctttatcgggtgtggctatggcgttaatcgcgtgaccatac

SEQ ID NO: 669887 - DNA, 75 bp, synthetic construct
  source 1..75: mol_type = other DNA
gtcgaagttgatggactggagggggcagacttctttgccaaagacattacctaccacgattacagcatcgaatat

SEQ ID NO: 669888 - DNA, 75 bp, synthetic construct
  source 1..75: mol_type = other DNA
atatccttcaaccaacggagcgttcgccagggcagataacaatgatggtcagggataccgttgatggcctcgttt

SEQ ID NO: 669889 - DNA, 75 bp, synthetic construct
  source 1..75: mol_type = other DNA
atggcgtcacgcggtattaataaggtgatactggttggtcatcttggacaggacccggaactccgttacttcccc

SEQ ID NO: 669890 - DNA, 75 bp, synthetic construct
  source 1..75: mol_type = other DNA
agcaaccttccggaccgactcacagtggccaggcttccggcagcagtgccggtgcgccaccgatggacttcgatg

SEQ ID NO: 669891 - DNA, 75 bp, synthetic construct
  source 1..75: mol_type = other DNA
ggatccggaggtcaggtactttcctaacggtggtggtgcagtggtgaatttgtcactggcgaccagtgatacctg

SEQ ID NO: 669892 - DNA, 75 bp, synthetic construct
  source 1..75: mol_type = other DNA
atggcaattaagcatttttccgtcgttcgctttacctccagagggcgcgaatacgaggtcgacgaacgcctgatt

SEQ ID NO: 669893 - DNA, 75 bp, synthetic construct
  source 1..75: mol_type = other DNA
gcttgaggagtgggaccatcagcatcccggggaacagattgataatgccacccgctggaaggttatcactgacgc

SEQ ID NO: 669894 - DNA, 75 bp, synthetic construct
  source 1..75: mol_type = other DNA
tttcaaaaatatcgtcctgaaaacgggggaaaatggagtacctgtttacctgcgtgatgttgcccgcatacaaat

SEQ ID NO: 669895 - DNA, 75 bp, synthetic construct
  source 1..75: mol_type = other DNA
tacgtactggtagtcacctccaccaccgggcagggcgaccttcctgacagcattgtgccgctctttctgggaata

SEQ ID NO: 669896 - DNA, 75 bp, synthetic construct
  source 1..75: mol_type = other DNA
gcgctacatcgatatcgatatcaaccgggagaaagcttcccggtacgggatgactgtgggcgacgtccagctgtt

SEQ ID NO: 669897 - DNA, 75 bp, synthetic construct
  source 1..75: mol_type = other DNA
gatcgcagccagctcatcgaccgggcgattgataacctcagttccaaacttctggaagagtttatcgtggtggcc

SEQ ID NO: 669898 - DNA, 75 bp, synthetic construct
  source 1..75: mol_type = other DNA
agattcaggtcaatccggtaaaactgtcccagtacggtatcagcctgcccgaagtgaaacaggcacttgaatcgt

SEQ ID NO: 669899 - DNA, 75 bp, synthetic construct
  source 1..75: mol_type = other DNA
ctttacctggactactgacggtgcctatttaagcgcccgtaacgtatccaacttgctccgtcagaccgcgattac

SEQ ID NO: 669900 - DNA, 75 bp, synthetic construct
  source 1..75: mol_type = other DNA
ggttctgggactgcttctcggtgcctggaacggatggtgggtagcgtaccgcaaagtcccttcatttattgtcac

SEQ ID NO: 669901 - DNA, 75 bp, synthetic construct
  source 1..75: mol_type = other DNA
atgtcgaaaagcaatccgtctgaagtgaaattggccgtaccgacatccggtggcttttccgggctgaagtcactg

SEQ ID NO: 669902 - DNA, 75 bp, synthetic construct
  source 1..75: mol_type = other DNA
aaggcgcgactattaccgacgaagcctcggcgctggaatattgcggattccatcctcagttggtcgaaggccgtg

SEQ ID NO: 669903 - DNA, 75 bp, synthetic construct
  source 1..75: mol_type = other DNA
ttatcgcagtggctttagtcgtcgttttatccatttttaaaagactctcagcaatatgggagggaagaaagcaat

SEQ ID NO: 669904 - DNA, 75 bp, synthetic construct
  source 1..75: mol_type = other DNA
ccggaattgaaattatcgatagtgttaaaacggtcgcttttgtttttactgaaaccttactgtttatggtctggt

SEQ ID NO: 669905 - DNA, 75 bp, synthetic construct
  source 1..75: mol_type = other DNA
ctgtattcccggtaatgacgcatttacagtacgttatacacctactggctatatatctgcccgtactgttatttt

SEQ ID NO: 669906 - DNA, 75 bp, synthetic construct
  source 1..75: mol_type = other DNA
ggcatgcaatgtttttgcattttctaattctggtggtggtagtgagacgagctataaagagccagaaaaaacgtc

SEQ ID NO: 669907 - DNA, 75 bp, synthetic construct
  source 1..75: mol_type = other DNA
accattaaatctcacagaagacattacgccccctttttcgacaaaggcgaattatcttattcatcctgtgcgata

SEQ ID NO: 669908 - DNA, 75 bp, synthetic construct
  source 1..75: mol_type = other DNA
atgtcccatcagaaaattattcaggatcttattgcatggattgacgaacatatcgaccagccgctgaacattgac

SEQ ID NO: 669909 - DNA, 75 bp, synthetic construct
  source 1..75: mol_type = other DNA
ttctgtacggtgaaatgcgcgtgggatcacgtgtggtatctcaggagatcagcacagcagatgaaggtgatggtg

SEQ ID NO: 669910 - DNA, 75 bp, synthetic construct
  source 1..75: mol_type = other DNA
aaaagtggcggtgtgtttcaggctgtgctgggggcggctgttatggcggttgctatatggatgccgggggtagga

SEQ ID NO: 669911 - DNA, 75 bp, synthetic construct
  source 1..75: mol_type = other DNA
gggataagcgtattgaggggtcggtgtggccaaaatccattcgcggctcgacgcctaaaatcaaaggcacctgcc

SEQ ID NO: 669912 - DNA, 75 bp, synthetic construct
  source 1..75: mol_type = other DNA
accaaagcgtggacgcggttatcgacaaagatctctctaccgctctactggctcgcgaaattcacgccgacattc

SEQ ID NO: 669913 - DNA, 75 bp, synthetic construct
  source 1..75: mol_type = other DNA
tatttactactggttttacccacacagaatgcacatatccgctcaaagtgtagcatttatgaacgaaggacatgt

SEQ ID NO: 669914 - DNA, 75 bp, synthetic construct
  source 1..75: mol_type = other DNA
caaagtggtacttacagcggatgttccgcacggtgacgcatcaaacgcttggcgattacattcgtcaacgccgcc

SEQ ID NO: 669915 - DNA, 75 bp, synthetic construct
  source 1..75: mol_type = other DNA
gacgaactggcctacgctctctggcctggtgatgtggatgccggaaacattgacggcagcatccatcgctgggca

SEQ ID NO: 669916 - DNA, 75 bp, synthetic construct
  source 1..75: mol_type = other DNA
atctggatgcactggcccgcgccagaagagatgaacaggacgacgatgaaatgactattgaagaaatcgcagctg

SEQ ID NO: 669917 - DNA, 75 bp, synthetic construct
  source 1..75: mol_type = other DNA
gataatgaccgccattgcgctggtatttggctggcatttagtcgcctccatcggtggtgcagatatgccggtggt

SEQ ID NO: 669918 - DNA, 75 bp, synthetic construct
  source 1..75: mol_type = other DNA
atctacgatctaaccgaggcccaacaactaactgctgaagagcaggtggaaaaatgggtagacggaaagaaaaag

SEQ ID NO: 669919 - DNA, 75 bp, synthetic construct
  source 1..75: mol_type = other DNA
tcaaaattattatctgcctaaagaatcttcatatggtgagggcgaatggaaaacgctgccattccagatcgccat

SEQ ID NO: 669920 - DNA, 75 bp, synthetic construct
  source 1..75: mol_type = other DNA
taaagccacgtcgtatgccatccgttttcctgatgatccggagattttttcgcagacagaggcgcagcaactggt

SEQ ID NO: 669921 - DNA, 75 bp, synthetic construct
  source 1..75: mol_type = other DNA
taaattatgagtatacgacatttccatttgtaaatcttaagggaaaccaaatgtatgcgataagcaacggtcata

SEQ ID NO: 669922 - DNA, 75 bp, synthetic construct
  source 1..75: mol_type = other DNA
ttacgctttcgcttatggcgcagatgctgtttatgcgggccagccacgttactccctgcgtgtgcgcaacaacga

SEQ ID NO: 669923 - DNA, 75 bp, synthetic construct
  source 1..75: mol_type = other DNA
atcagcttctgcaaaaaggcattgccacgtcttgaactcgtcgcaaaaaaatatgagtgctcgggcatcaacagc

SEQ ID NO: 669924 - DNA, 75 bp, synthetic construct
  source 1..75: mol_type = other DNA
gaccaacagcatcgccgcgaccgtatgttcgcggctttgctgcatgcgagaaaagtgctttctctccagcccgag

SEQ ID NO: 669925 - DNA, 75 bp, synthetic construct
  source 1..75: mol_type = other DNA
ccggtgccgcaggatcttgagctaaattacgcgctgctgatgcgtaatttctccggggaaaccacgcgtaacccc

SEQ ID NO: 669926 - DNA, 75 bp, synthetic construct
  source 1..75: mol_type = other DNA
cgaactgtcactggaagagattgaagagatccgcaatcaggtgccggatatggaaatcgaaatcttcgttcacgg

SEQ ID NO: 669927 - DNA, 75 bp, synthetic construct
  source 1..75: mol_type = other DNA
ccggtcccgcaggatcttgagctaaattacgcgctcctgatgcgtaatttctccggggaaaccacgcgtaacccc

SEQ ID NO: 669928 - DNA, 75 bp, synthetic construct
  source 1..75: mol_type = other DNA
ctgtacgggaagcgaaagcgatccaccgatattggatttaacaaaatcactgagtcggtcagaaagacgagagct

SEQ ID NO: 669929 - DNA, 75 bp, synthetic construct
  source 1..75: mol_type = other DNA
cgtgttgccgagcctcatcacgacgggacgccgcactggcacatgcttatgttcatgttgccggaagacgtcgag

SEQ ID NO: 669930 - DNA, 75 bp, synthetic construct
  source 1..75: mol_type = other DNA
tatcacacttgcggatcgcatgatgcaaaaaatcacccatgaagagacgcattcacgcaatcttattattcccgc

SEQ ID NO: 669931 - DNA, 75 bp, synthetic construct
  source 1..75: mol_type = other DNA
cacatccgtcagtttcagtttatcggtggtgcgccggtgacggtttaccgtgagttgcgtcgcctcgctgatacc

SEQ ID NO: 669932 - DNA, 75 bp, synthetic construct
  source 1..75: mol_type = other DNA
aactcaaaagcgataaagccaaaaaagcacgtttccacgcagaagccattgatccggagaaaggcagcgcaaccg

SEQ ID NO: 669933 - DNA, 75 bp, synthetic construct
  source 1..75: mol_type = other DNA
gcatgtttaacgaggtgtggtggcgtggtcgtctgcgtcgcattgcggctgcatggcgcgaacatctgcaaattg

SEQ ID NO: 669934 - DNA, 72 bp, synthetic construct
  source 1..72: mol_type = other DNA
tgcgacgcggctttcagctcactgtcgcgaggtggcgtatattacgctttcctctttcagagtcaaccctga

SEQ ID NO: 669935 - DNA, 75 bp, synthetic construct
  source 1..75: mol_type = other DNA
tttgcggtgcgcaagttattcccggcaactatggcaattttgattccagatatgtgaaagatgttcgacttggtt

SEQ ID NO: 669936 - DNA, 75 bp, synthetic construct
  source 1..75: mol_type = other DNA
cacgggttaccgggctgctgctggcgatgttaatgcgcctgttactgctggcgtcaatctcctggctggtcaccc

SEQ ID NO: 669937 - DNA, 75 bp, synthetic construct
  source 1..75: mol_type = other DNA
tgccgatccgtctatctgggccgggttaatcacgctgattgtgatcgaactggtcctcggcattgataacctggt

SEQ ID NO: 669938 - DNA, 75 bp, synthetic construct
  source 1..75: mol_type = other DNA
aagcctacctttcccggttcaagggtaagcaagggattgataaggtcctgggtgacagcgagacaacgcgagtaa

SEQ ID NO: 669939 - DNA, 75 bp, synthetic construct
  source 1..75: mol_type = other DNA
tccagtggcttctgtttctatcactgccgttatctggtggtcaactgaatggtgcactgggtatcggaacatcca

SEQ ID NO: 669940 - DNA, 75 bp, synthetic construct
  source 1..75: mol_type = other DNA
tggcgataccttgtccggtgggcttacttttgaaaacgactcaatccttgcctggattagaaatactgactgggc

SEQ ID NO: 669941 - DNA, 75 bp, synthetic construct
  source 1..75: mol_type = other DNA
agaatgcctgcatatcatccctacacgagagaatgagggagaaaatggtgatatagggccattacgcccctttac

SEQ ID NO: 669942 - DNA, 75 bp, synthetic construct
  source 1..75: mol_type = other DNA
ttggtgccatttttcgccgttctgaagaatgcctgcatatcatccctacacgagagaatgagggagaaaatggtg

SEQ ID NO: 669943 - DNA, 75 bp, synthetic construct
  source 1..75: mol_type = other DNA
acggggttcagaacccgggtaacaccccggatgagggatattctgcgcgcccatctgtttcctgaagtgaccgtg

SEQ ID NO: 669944 - DNA, 75 bp, synthetic construct
  source 1..75: mol_type = other DNA
gccctggtgcgtacaacgccacctgacctgcccgagtgtttccaccatcggcagaatgatcgccaccgcacacga

SEQ ID NO: 669945 - DNA, 75 bp, synthetic construct
  source 1..75: mol_type = other DNA
atttatgattggtgggctgggaaataagcaatttggcatctacatgattaataactcaaggacagccaatggcac

SEQ ID NO: 669946 - DNA, 75 bp, synthetic construct
  source 1..75: mol_type = other DNA
attattggtgaagttgatggcgatgatgaagctatcttcaggccgatacaaaaatacatcaatggcatatggtat

SEQ ID NO: 669947 - DNA, 75 bp, synthetic construct
  source 1..75: mol_type = other DNA
tgtggtcgccggatacctgcccggtgcatctgctgccttatctcgcctgggcattttccgttgaccgctgggatc

SEQ ID NO: 669948 - DNA, 75 bp, synthetic construct
  source 1..75: mol_type = other DNA
atgagtaattcactgttaccgccatcagccagcagtttcatgcgttgtgccgaagccgtcgggacacgcattaca

SEQ ID NO: 669949 - DNA, 75 bp, synthetic construct
  source 1..75: mol_type = other DNA
aaacacaaggcactctatttttcgatgttgcacggattattaaagcaaagcgcccggcgatatttgtactggaaa

SEQ ID NO: 669950 - DNA, 75 bp, synthetic construct
  source 1..75: mol_type = other DNA
cagggaagtaaaaatacaaggctacttaagcctatggaatttgaaatgcttctgcttatcgcaggaacgcatcca

SEQ ID NO: 669951 - DNA, 75 bp, synthetic construct
  source 1..75: mol_type = other DNA
atgattgaaaagtcgaagcttttacaaacctatcctacggcggctgaggtaaaggctgcacgtgagagtaccggc

SEQ ID NO: 669952 - DNA, 75 bp, synthetic construct
  source 1..75: mol_type = other DNA
tcgccaccttatcggcctgaacattatccaggacattcctggctatctgtatacaggcggtgtggtctgtgatgg

SEQ ID NO: 669953 - DNA, 75 bp, synthetic construct
  source 1..75: mol_type = other DNA
tcgaccccggcgatgcgacaccggggcagattatcaaagcctactattgcgcaaaaccttactcacgacagcttg

SEQ ID NO: 669954 - DNA, 75 bp, synthetic construct
  source 1..75: mol_type = other DNA
caccagcatcggactaaatgtcaaagtggcctgtctgggcgaagaaggtctcgaccccggcgacgcgacgccaga

SEQ ID NO: 669955 - DNA, 75 bp, synthetic construct
  source 1..75: mol_type = other DNA
aaagatgtggtgatcgacgccaaaatgacgttggtcgcgtatgagcgctacttcaacgcggaagatgactatacc

SEQ ID NO: 669956 - DNA, 75 bp, synthetic construct
  source 1..75: mol_type = other DNA
tccgtacacagaccaggtcaaaggacaggtattcgatatgcgaatactgataccggtttacgatctggatggcgt

SEQ ID NO: 669957 - DNA, 75 bp, synthetic construct
  source 1..75: mol_type = other DNA
gatgaagaccttccaggggcgtgacattaccggtgcagcagaacgccgttatctcttccctatgcagctgccggc

SEQ ID NO: 669958 - DNA, 75 bp, synthetic construct
  source 1..75: mol_type = other DNA
cgatatggaagggatcatctaccgtcgtggtggagtcagtactcgcggacgagaggtcaacattaaagagtgtcc

SEQ ID NO: 669959 - DNA, 75 bp, synthetic construct
  source 1..75: mol_type = other DNA
gattcgctgacaggaaagaaaggttctttccctcaatcaattcatgagtatagcgcgtggtgggataggttagag

SEQ ID NO: 669960 - DNA, 75 bp, synthetic construct
  source 1..75: mol_type = other DNA
ggttggatagtggtgaagctcagccgtgggaaaaggatgcgtttttacggaaggtgaaagcagggataaagaaat

SEQ ID NO: 669961 - DNA, 75 bp, synthetic construct
  source 1..75: mol_type = other DNA
aaagcaagcagagtctcgcctgcaagcgttacgtgacatgctcgcagaagggttgagtagtggtgaagctcagcc

SEQ ID NO: 669962 - DNA, 75 bp, synthetic construct
  source 1..75: mol_type = other DNA
gtatcagcagcggcgaggcgaaaccatggaacaaggatgcattcctgaataatgtcagggccagggtggcaaatg

SEQ ID NO: 669963 - DNA, 75 bp, synthetic construct
  source 1..75: mol_type = other DNA
tcctcggcccgttggtcgggctggtacttggcgatctgcataccggtattttaaccggcggtacgctggaactgg

SEQ ID NO: 669964 - DNA, 75 bp, synthetic construct
  source 1..75: mol_type = other DNA
ggcactgctggcgctcggcaccttctattttctttgtgctttcctgccgatttacttcggcgcggaacatgccaa

SEQ ID NO: 669965 - DNA, 75 bp, synthetic construct
  source 1..75: mol_type = other DNA
ctggctcaagttaccggtgctggctattgctgccgccgcgctggcgatggcgctgatcgacctgctgcgtaaatc

SEQ ID NO: 669966 - DNA, 75 bp, synthetic construct
  source 1..75: mol_type = other DNA
gaactgcgcgatctgctggccgaaggtatcagcagcggcgaggcgaaaccatggaacaaggatgcattcctgaat

SEQ ID NO: 669967 - DNA, 75 bp, synthetic construct
  source 1..75: mol_type = other DNA
taaagaatatgcactctctgggcgagaattaacttcatcaatgatctctaacagggagatacagctcgctattcc

SEQ ID NO: 669968 - DNA, 75 bp, synthetic construct
  source 1..75: mol_type = other DNA
tgaaatggcaatcgactgactatgttggcatcagtagcgcaactcttgcctcaatcgcatgtggactgaaaaaga

SEQ ID NO: 669969 - DNA, 75 bp, synthetic construct
  source 1..75: mol_type = other DNA
tcgcgtcggtgcgtaaccatatccgcttgctggggcgtaaagattatcaacagctaccagggctaagaacgctgg

SEQ ID NO: 669970 - DNA, 75 bp, synthetic construct
  source 1..75: mol_type = other DNA
ctgatgcatatctcaccgcctttaatttacgcccaggggcaaacaccctttactggattgaaaatggtatattcc

SEQ ID NO: 669971 - DNA, 75 bp, synthetic construct
  source 1..75: mol_type = other DNA
ttgcttaaggccacggcggagacacagtcagcgctggccgctatccggcgcgaagatcaggagcgtgcagccaga

SEQ ID NO: 669972 - DNA, 75 bp, synthetic construct
  source 1..75: mol_type = other DNA
gatgacctgaaagtctcccttgaaggtaaggggctgaaagtgctggcttactgggaaaacggctggcgcgatgtc

SEQ ID NO: 669973 - DNA, 75 bp, synthetic construct
  source 1..75: mol_type = other DNA
gatccgaagagtccgattgctggtatgcctgtgctggaagtgtggaaagcgcagaacgtgattgtctttaaacgt

SEQ ID NO: 669974 - DNA, 75 bp, synthetic construct
  source 1..75: mol_type = other DNA
cggtatccacccggttgcggggcgtttgcctggacatatgaacgtattgctggctgaagcaaaagtaccgtatga

SEQ ID NO: 669975 - DNA, 75 bp, synthetic construct
  source 1..75: mol_type = other DNA
tggggcaattggtatccgtctggcgaagaaagttgaaatgaccgaaatgccagaactggtggcgatcctgcatag

SEQ ID NO: 669976 - DNA, 75 bp, synthetic construct
  source 1..75: mol_type = other DNA
atcaacctgctcgatgtcccgttcctgttccgcgataccgctcacgcgcataaaacgctcgacggcaaagtcggt

SEQ ID NO: 669977 - DNA, 75 bp, synthetic construct
  source 1..75: mol_type = other DNA
atcagcggcgtgcgtggcggcactattgatatggagatgtcaggctctaacaactttacgggactctcgcccgtc

SEQ ID NO: 669978 - DNA, 75 bp, synthetic construct
  source 1..75: mol_type = other DNA
acccgatcaacgtcgtctggtcagcaaaattttatgaagtgcagaagtacctttctctgacgcaccacgcctatt

SEQ ID NO: 669979 - DNA, 75 bp, synthetic construct
  source 1..75: mol_type = other DNA
cggtattgaccccaccattgtctacaatcgctcaaaaaagcatggtttgtttcgcgtgatcccgattaaaggggc

SEQ ID NO: 669980 - DNA, 75 bp, synthetic construct
  source 1..75: mol_type = other DNA
ccccgtatctgtatgcttcgcaccgttgccggtgacgagcacgccgcacgtctttccctcgttcgcgattacgtc

SEQ ID NO: 669981 - DNA, 75 bp, synthetic construct
  source 1..75: mol_type = other DNA
ctgcccatgcgatcgcctgctaaccgaaattatcattaaagatccgtatcgcacctgtgcgactcgcaaaattag

SEQ ID NO: 669982 - DNA, 75 bp, synthetic construct
  source 1..75: mol_type = other DNA
accctgaatttgtctttgtgtttgcggctgtccgtcgcgcaggccgtcatccccgtatctgtatgcttcgcaccg

SEQ ID NO: 669983 - DNA, 75 bp, synthetic construct
  source 1..75: mol_type = other DNA
cgattgcggtcggttccggagcagccgaatggtgaagcttatcaacgtgatgatgaatataatcagcaatcgcgt

SEQ ID NO: 669984 - DNA, 75 bp, synthetic construct
  source 1..75: mol_type = other DNA
ccttgccaaccgtatttttgaacacagtaatcgtcgggttgatgagcaaaatcgccagagtctgaacagtctttt

SEQ ID NO: 669985 - DNA, 75 bp, synthetic construct
  source 1..75: mol_type = other DNA
aacacctcgctggaggccgatctgcgtgaagtgaccacgcggatggaagccgcacagcaacatgctgacgataaa

SEQ ID NO: 669986 - DNA, 75 bp, synthetic construct
  source 1..75: mol_type = other DNA
gcgcctggcttctgatgttgagcgggctgggtaccattttactcctgatgggatcaaccttttatgtcgtgattg

SEQ ID NO: 669987 - DNA, 75 bp, synthetic construct
  source 1..75: mol_type = other DNA
tttctgaactgaaaggaaatcatgccaggtttgattctttatttgagaaacacaataagctggaaataagacgtc

SEQ ID NO: 669988 - DNA, 75 bp, synthetic construct
  source 1..75: mol_type = other DNA
ggtgcgtaaccacatccgcttgctgggacgtaaagattatcaacagctgccggggctacgaaccctggattacgt

SEQ ID NO: 669989 - DNA, 75 bp, synthetic construct
  source 1..75: mol_type = other DNA
ctccgcatctgtatgcttcgtaccgttgccggtgatgaacacgccgcacgtctttccctcgttcgcgattacgtc

SEQ ID NO: 669990 - DNA, 75 bp, synthetic construct
  source 1..75: mol_type = other DNA
ttactaccggtagcctgcctccgggaaaccatactctttactcccctcagtatgtggttaccgccaaacatgtca

SEQ ID NO: 669991 - DNA, 75 bp, synthetic construct
  source 1..75: mol_type = other DNA
tatcggcgcgctgggcgacttcgccttcttctcggtggccgggccacgcaacacctactcgctggcgcggctgat

SEQ ID NO: 669992 - DNA, 75 bp, synthetic construct
  source 1..75: mol_type = other DNA
atgcagatcggatagcagaagagatcgaaacggcagaacacattaagaagttacgtgacatgcgcaggaaacaga

SEQ ID NO: 669993 - DNA, 75 bp, synthetic construct
  source 1..75: mol_type = other DNA
gccctgattgtggtgcggtgataagtgacgcaacataccaggaaatattcgatgaagagaatcagcctgaagttc

SEQ ID NO: 669994 - DNA, 75 bp, synthetic construct
  source 1..75: mol_type = other DNA
aatgccctgcacgatgcgcgttaccaggcaaaatacgtttcagctatctggcaaaaactgttcccgaatcaggct

SEQ ID NO: 669995 - DNA, 75 bp, synthetic construct
  source 1..75: mol_type = other DNA
ccagacttccggggccgtgaatgcagctgaaaatgtcacccttaccaccacgggtgataccacactgaaaggccg

SEQ ID NO: 669996 - DNA, 75 bp, synthetic construct
  source 1..75: mol_type = other DNA
tgaaaacctactggctgccgaaatgctaaaaaccgacgcccgtcaggatctacgcctgtgggtactggaagatga

SEQ ID NO: 669997 - DNA, 75 bp, synthetic construct
  source 1..75: mol_type = other DNA
aaccacaacttagccaggcgagttttgaaaacctgctggctgccgaaatgctaaaaaccgacgcccgtcaggatt

SEQ ID NO: 669998 - DNA, 75 bp, synthetic construct
  source 1..75: mol_type = other DNA
caggacttaaccgttcgcggcaccaaaattctgctgattaacccgaccgactccgacgcagtaggtaatgctgtg

SEQ ID NO: 669999 - DNA, 75 bp, synthetic construct
  source 1..75: mol_type = other DNA
tttatcttgaaaacattcatgaacaagaatcatatccagcgaatgagagagataattatctgttggagttattaa

SEQ ID NO: 670000 - DNA, 75 bp, synthetic construct
  source 1..75: mol_type = other DNA
gaagcaagaccagaacgatatggaaaaggagaggtgccaatattgaataccaaagaacatccgtatttaaataat

SEQ ID NO: 670001 - DNA, 75 bp, synthetic construct
  source 1..75: mol_type = other DNA
gatgcggcaaaagctggatagccaatgcgttgggcgaacaggcatgtagacagaaacacagcgtccggtactgta

SEQ ID NO: 670002 - DNA, 75 bp, synthetic construct
  source 1..75: mol_type = other DNA
aacctgctgataaccggtccgacaggatgtggcaagagctggatagccaatgcgctgggcgaacaggcatgtcga

SEQ ID NO: 670003 - DNA, 75 bp, synthetic construct
  source 1..75: mol_type = other DNA
tggtttctgctgttgcgttaagcgccaccgtcagtgcgaatgcaatggcaaaagataccattgcgctggtggttt

SEQ ID NO: 670004 - DNA, 75 bp, synthetic construct
  source 1..75: mol_type = other DNA
ttcatgcgaaggatttaactgtaactgcaggagctaaccgagtaactgcagatggtcgtgtcagtgccctgaagg

SEQ ID NO: 670005 - DNA, 75 bp, synthetic construct
  source 1..75: mol_type = other DNA
aatactgggggagctttgctggcttcgcctcaggctggaactactgggtattgtacgtattagttgccatggcgg

SEQ ID NO: 670006 - DNA, 75 bp, synthetic construct
  source 1..75: mol_type = other DNA
aatactggggcagttttgccggtttcgcctctggctggaactactgggtactgtacgttttagttgccatggcag

SEQ ID NO: 670007 - DNA, 75 bp, synthetic construct
  source 1..75: mol_type = other DNA
atgtcccttacaaatacccccaaacgctatagtgttatatcaatgacctttcattggctgagtgcaatcattatc

SEQ ID NO: 670008 - DNA, 75 bp, synthetic construct
  source 1..75: mol_type = other DNA
ttgtctggagattcagggggccagtctaagaacttcttcccgcatggtcgtgatagctatcgtgatgctgacggt

SEQ ID NO: 670009 - DNA, 75 bp, synthetic construct
  source 1..75: mol_type = other DNA
ttttttgctgctgctgaaggcttgttcacggacctggagtcacgtcttgaaggcaaacggattgtgattctgaag

SEQ ID NO: 670010 - DNA, 75 bp, synthetic construct
  source 1..75: mol_type = other DNA
gcgatttcggtttacctgatcccggtatggctggtggtgttaggcatcggctatctgtttaaagagaaaaccgca

SEQ ID NO: 670011 - DNA, 75 bp, synthetic construct
  source 1..75: mol_type = other DNA
ctatcggtcaggataaagatcttgctgtggttaaagatcagagtggtagtgctttatcaaaacaaacaatttctt

SEQ ID NO: 670012 - DNA, 75 bp, synthetic construct
  source 1..75: mol_type = other DNA
cgctcacggtgaatcagacgctgcacaatcacgcgagcggaaaactgctcagtgcaggtgtgctgacgctgaagg

SEQ ID NO: 670013 - DNA, 75 bp, synthetic construct
  source 1..75: mol_type = other DNA
gatgtgcagaacgcacagcttgacggaacacaggctgccagagacatcctcaccctgaacgccagtgaaaagctc

SEQ ID NO: 670014 - DNA, 75 bp, synthetic construct
  source 1..75: mol_type = other DNA
ttcgccatcggcatcagcggctatctgatctcaactgccgatggtaaaccgatcagcgtttttggctggtttgac

SEQ ID NO: 670015 - DNA, 75 bp, synthetic construct
  source 1..75: mol_type = other DNA
ggtggtaagcacaccgtgacgctggagaaaggggataacggctggacatccagtgacccgacgctgatcccggac

SEQ ID NO: 670016 - DNA, 75 bp, synthetic construct
  source 1..75: mol_type = other DNA
cggacggcacgacggacacggtggagcacacgctgaccgcagatgaagtgactgcaggtaaagctgtcgatactc

SEQ ID NO: 670017 - DNA, 75 bp, synthetic construct
  source 1..75: mol_type = other DNA
gatgatgaactacctgctgccgctgaaaggcattgcctccatgcactgctccgccaacgttggcgagaaaggcga

SEQ ID NO: 670018 - DNA, 75 bp, synthetic construct
  source 1..75: mol_type = other DNA
aaagacaactggctgtactacattttcggtggggaagactttctaaacccatggagcataggggataacaacaga

SEQ ID NO: 670019 - DNA, 75 bp, synthetic construct
  source 1..75: mol_type = other DNA
ggcttacttttaaagtatcaactcttccggatgtcagccgatttaaaaatgctcgttttttatttgagagaatac

SEQ ID NO: 670020 - DNA, 75 bp, synthetic construct
  source 1..75: mol_type = other DNA
aaagattttggagctgttggtgatggtataaatgacgattccactgcaataagcgcgtgccttgaagcctcatct

SEQ ID NO: 670021 - DNA, 75 bp, synthetic construct
  source 1..75: mol_type = other DNA
atgaaaacaattggtttgctgggaggaatgagctgggaatccaccattccttactatcgtctgataaatgaaggc

SEQ ID NO: 670022 - DNA, 75 bp, synthetic construct
  source 1..75: mol_type = other DNA
tttacagcggcgtgaccttcctcgacccgaaactgaaagatacggcgaatgcctcaaccagcaataaacaggttg

SEQ ID NO: 670023 - DNA, 75 bp, synthetic construct
  source 1..75: mol_type = other DNA
gcgcagcaacttcgtgatgttcttatttctcacggactcatggaagaagaaagcacaacatgccgctatgccttt

SEQ ID NO: 670024 - DNA, 75 bp, synthetic construct
  source 1..75: mol_type = other DNA
atgagaaaagtaaaaacagacaacagtgatttaatcgaatacgtaaatacaatcaaagagctaaaaaatcatatt

SEQ ID NO: 670025 - DNA, 75 bp, synthetic construct
  source 1..75: mol_type = other DNA
tatccgctgggtaactggatctgcctgctgtttatggcggcggtactggtgattatgctgatgaccccaggaatg

SEQ ID NO: 670026 - DNA, 75 bp, synthetic construct
  source 1..75: mol_type = other DNA
cacgagttaggcgatacctttgtggcgaatgcgctgaacatcgtggtactgactgcggcgctctccgtgtacaac

SEQ ID NO: 670027 - DNA, 75 bp, synthetic construct
  source 1..75: mol_type = other DNA
gaagtgcatgaagatgcctttgactacctgacgatgctgatccagcaatgttttgggtggttcagacgtgcattg

SEQ ID NO: 670028 - DNA, 75 bp, synthetic construct
  source 1..75: mol_type = other DNA
ggctggaaaaaaagagagaatctcttattgaatactttattgacgagttaaatcccatcagcagttcaaaagcta

SEQ ID NO: 670029 - DNA, 75 bp, synthetic construct
  source 1..75: mol_type = other DNA
aaatctgcacataccgaacttcgcaggctggataaaaagagagaatcgcttattgaatactttattgatgagcta

SEQ ID NO: 670030 - DNA, 75 bp, synthetic construct
  source 1..75: mol_type = other DNA
ggtttactggtgccagaagagcgcagtgttttgcctgtgtttgatactgcggcgatccatgccgaggatgctgtc

SEQ ID NO: 670031 - DNA, 75 bp, synthetic construct
  source 1..75: mol_type = other DNA
ccgtccgtttcatcaccgaagtggcctggcaggcgcatttcgtcaaaaacatgtttattcgcccgagcgatgaag

SEQ ID NO: 670032 - DNA, 75 bp, synthetic construct
  source 1..75: mol_type = other DNA
acagagacgggaaaaactggatgccataacatatcgccctgtagcggatgtatatatcttgatgccgacatgatt

SEQ ID NO: 670033 - DNA, 75 bp, synthetic construct
  source 1..75: mol_type = other DNA
atgatggtctaggaaagggtatcaagcggcattttaactattcatcgttacacgattataatgctttttgtgatt

SEQ ID NO: 670034 - DNA, 75 bp, synthetic construct
  source 1..75: mol_type = other DNA
tcctgaccgcagatgctttcggcgtattgccgccggtttctcgtctgactgccgatcaaacccagtaccacttcc

SEQ ID NO: 670035 - DNA, 75 bp, synthetic construct
  source 1..75: mol_type = other DNA
tttcttatccgatctatcacatcgataacatcgttaagccggtttccaaagcgggccacgcgactaaggttatct

SEQ ID NO: 670036 - DNA, 75 bp, synthetic construct
  source 1..75: mol_type = other DNA
gtcgaaagaagcggagcctgaaatttacaacgctatccgccgcgatgcgctgctggaaaacgtcaccgtacgcga

SEQ ID NO: 670037 - DNA, 75 bp, synthetic construct
  source 1..75: mol_type = other DNA
tcgctatcagcttgagaaaaaagcggaaaaagttgtctttcgcggtgagtgggcggaagtggtggaatgggttaa

SEQ ID NO: 670038 - DNA, 75 bp, synthetic construct
  source 1..75: mol_type = other DNA
ttgaagaatattacgacccgatgtatcgctatcagcttgagaaaaaagcggaaaaagttgtctttcgcggtgagt

SEQ ID NO: 670039 - DNA, 75 bp, synthetic construct
  source 1..75: mol_type = other DNA
ttatccgctggtggaaggcggttataaggcactgcgccagaccgcgattcaggcgaccattgaactggcacaaaa

SEQ ID NO: 670040 - DNA, 75 bp, synthetic construct
  source 1..75: mol_type = other DNA
cactcagctatgagcagctgacccggatagcggaagaacgtatccgtgaatgcgagctggacagtcagggcgcta

SEQ ID NO: 670041 - DNA, 75 bp, synthetic construct
  source 1..75: mol_type = other DNA
tgcggaaaaacgcatccgggaatgcaatctggacagccagggcgtaacttatctctgcgagtcagccaaagccgg

SEQ ID NO: 670042 - DNA, 75 bp, synthetic construct
  source 1..75: mol_type = other DNA
tgaatgccataaagagacaggagctcattgacgctgactttcagcgcctcagaaacctcatctggccggatggtg

SEQ ID NO: 670043 - DNA, 75 bp, synthetic construct
  source 1..75: mol_type = other DNA
ttccagagtggtgtatttaacgtagcgttgaataacggttctgaatgggatactacaggtgattcgcttgttgat

SEQ ID NO: 670044 - DNA, 75 bp, synthetic construct
  source 1..75: mol_type = other DNA
gttgcaactaacagtttgacccctggtggcacagctgaagctaatggttggaatcgcatcatcgacaataaagta

SEQ ID NO: 670045 - DNA, 75 bp, synthetic construct
  source 1..75: mol_type = other DNA
agatgacaaacatgatctcatatcagggacttgttcgcaccttccttaacattgctaacactaccattgatgatg

SEQ ID NO: 670046 - DNA, 75 bp, synthetic construct
  source 1..75: mol_type = other DNA
acaccaacgcgaccttctctgctgctaacaaagctgacctgggtgcatacacctatcaggctgaacagcgcggta

SEQ ID NO: 670047 - DNA, 75 bp, synthetic construct
  source 1..75: mol_type = other DNA
catgattatgcagacagtactgctaatcagcttgatatcagtaattcagtgattcacggttcgattacttctatg

SEQ ID NO: 670048 - DNA, 75 bp, synthetic construct
  source 1..75: mol_type = other DNA
aagttgctactgaccacctgacagttgatagctatagtactgttaatttaaccgaatctactggttggaataact

SEQ ID NO: 670049 - DNA, 75 bp, synthetic construct
  source 1..75: mol_type = other DNA
aattttgatccgaatggtcatgattccaacggtgacggggtgaaagataccaacgggggttggactgatgatagc

SEQ ID NO: 670050 - DNA, 75 bp, synthetic construct
  source 1..75: mol_type = other DNA
accggtccgggagatgttgcaatgtccttcactgattcaggttccgactatgcaatgaagaacaacgtatacttc

SEQ ID NO: 670051 - DNA, 75 bp, synthetic construct
  source 1..75: mol_type = other DNA
atcggcggtcggcttaaccgtgaagggcatcctgtaaaagtgatgcatattgctgaagtcctgatgcacagatga

SEQ ID NO: 670052 - DNA, 75 bp, synthetic construct
  source 1..75: mol_type = other DNA
ccgaactcgataataaagcggctcattgccatacgccagtcccgcagtggcatcgtccatttctgtgaagccgcc

SEQ ID NO: 670053 - DNA, 75 bp, synthetic construct
  source 1..75: mol_type = other DNA
aatcccatacttgggataacaatattaatgtctctaactcaaccgtaaccaccggttcaaataccgtgttggaaa

SEQ ID NO: 670054 - DNA, 75 bp, synthetic construct
  source 1..75: mol_type = other DNA
ttcagatactatcgatttaactaacggttcttcgctgaacattggtgaagatggttacgttgataccgatcatct

SEQ ID NO: 670055 - DNA, 75 bp, synthetic construct
  source 1..75: mol_type = other DNA
ttgtctggagattcagggggccagtctaatgtctatcagttctctgaatacggtactgatcgtgtaattgatgat

SEQ ID NO: 670056 - DNA, 75 bp, synthetic construct
  source 1..75: mol_type = other DNA
atgcgcttgcagctggttttcttgctgcggcttctctgtcgccgttgtgcgaaataatatttgggggtgtccgga

SEQ ID NO: 670057 - DNA, 75 bp, synthetic construct
  source 1..75: mol_type = other DNA
gagtgtcgagcataatggtgaatttatccttatccataccgtcgccggatatggtcgggcagtagcacgaatcct

SEQ ID NO: 670058 - DNA, 75 bp, synthetic construct
  source 1..75: mol_type = other DNA
tcgtttgggtcgcaccacgtgtggtaaagcgcacagccctggtgcacaagcaaattaattacttattaaaattga

SEQ ID NO: 670059 - DNA, 75 bp, synthetic construct
  source 1..75: mol_type = other DNA
agatagtttacagaggtgaagtgctggatcatcttatccctagtcaatgggtattcttccagcgcctgaaatctt

SEQ ID NO: 670060 - DNA, 75 bp, synthetic construct
  source 1..75: mol_type = other DNA
gatatggggtactgtggtgtgttttctggggcgtgtggtttgtatgtcacaaagagggattaggctacggtgatt

SEQ ID NO: 670061 - DNA, 75 bp, synthetic construct
  source 1..75: mol_type = other DNA
ttgtgttcgttgctgccggaacttttttatgggtgattatgcatagtatttttgatgcctgtattgattcgtgga

SEQ ID NO: 670062 - DNA, 75 bp, synthetic construct
  source 1..75: mol_type = other DNA
ccgagtggcaacagttcccaggtgcgtttccttgctgatatccagaatatgcaggttaatgtcaccccgcaggac

SEQ ID NO: 670063 - DNA, 75 bp, synthetic construct
  source 1..75: mol_type = other DNA
tgaatggcgtggagaactttatgagttagctgaactggctgattatgttgatttgtacgagccaacagcggctaa

SEQ ID NO: 670064 - DNA, 75 bp, synthetic construct
  source 1..75: mol_type = other DNA
ctaatgttgatgaactgaatatcactctggataatggttctaagtgggtaggctcagctactacatcagcaaatg

SEQ ID NO: 670065 - DNA, 75 bp, synthetic construct
  source 1..75: mol_type = other DNA
gttccagcgccagcctcaataacgtggtgcgcgcgctcaatgcgctgggcgctacgccgatggatctgatgtcta

SEQ ID NO: 670066 - DNA, 75 bp, synthetic construct
  source 1..75: mol_type = other DNA
aattgaatggcggacggatcaccaatggtgcaattattgagcgcgaattgcccagccagtttggtgctggcaata

SEQ ID NO: 670067 - DNA, 75 bp, synthetic construct
  source 1..75: mol_type = other DNA
gtgattaaatttctctctgcattcattcttctgctggttgcggtcgtggcgcaggccgaccgtattcgcgatctc

SEQ ID NO: 670068 - DNA, 75 bp, synthetic construct
  source 1..75: mol_type = other DNA
gccgcgttaaatggtgccgggttcgactggatttggtttgaccgggatgcggaacaggtgccagaactgaccgtt

SEQ ID NO: 670069 - DNA, 75 bp, synthetic construct
  source 1..75: mol_type = other DNA
acctatcaggctgagcagcgcggtaacaccgttgttctgcagcaaatggaactgaccgactacgctaacatggcg

SEQ ID NO: 670070 - DNA, 75 bp, synthetic construct
  source 1..75: mol_type = other DNA
ctggagcaatgactggaatgctgatgatgtagcattagcgattattgcacatccaaatgctgacaacgcgatgca

SEQ ID NO: 670071 - DNA, 75 bp, synthetic construct
  source 1..75: mol_type = other DNA
gcaactgcaactctgatcgacatcgcagctaacagcctgtggccttcatcaactgttggtgtagaaaacagcgac

SEQ ID NO: 670072 - DNA, 75 bp, synthetic construct
  source 1..75: mol_type = other DNA
actgttaaagattctaccgtgacctctggttcatggactgatgaaggtactactggttggttcggtaatacaggt

SEQ ID NO: 670073 - DNA, 75 bp, synthetic construct
  source 1..75: mol_type = other DNA
gaccgtggtactgacgcaaacaacgacggcgtatttgagtatacagtcgacttagacggtgacggtatccttgat

SEQ ID NO: 670074 - DNA, 75 bp, synthetic construct
  source 1..75: mol_type = other DNA
ggcaccgaggcaactgcaactctgattgatattgaggataatagcctgtggccgttatcaaccgttggtgttgaa

SEQ ID NO: 670075 - DNA, 75 bp, synthetic construct
  source 1..75: mol_type = other DNA
tgagtgcatgactactgattgtgctgatgaccgtgctactggttatgtttatgatcgtctgacactgagcgttga

SEQ ID NO: 670076 - DNA, 75 bp, synthetic construct
  source 1..75: mol_type = other DNA
attactgttaaagattccaccgtgacctctggctcatggacagacgaaggtactacaggttggtttggtcatact

SEQ ID NO: 670077 - DNA, 75 bp, synthetic construct
  source 1..75: mol_type = other DNA
ataatgccgctgatactcatgttgtagacgtttataacattggtactgctattactctggatcaggaagttgatc

SEQ ID NO: 670078 - DNA, 75 bp, synthetic construct
  source 1..75: mol_type = other DNA
gacttcaaactgggtgatgctggttacgtgactccttacggcagcgtttctggtctgttccagtctggtgatgac

SEQ ID NO: 670079 - DNA, 75 bp, synthetic construct
  source 1..75: mol_type = other DNA
tatgagtgggaagatattgacgacaacacggtcagcactggcgtaaacagcagtgaagtgtttaataacactatt

SEQ ID NO: 670080 - DNA, 75 bp, synthetic construct
  source 1..75: mol_type = other DNA
agaagatgctgcactgtacgcaaataccatcaccgtaactaacgacggtctgttggatattaacgttgatcagtt

SEQ ID NO: 670081 - DNA, 75 bp, synthetic construct
  source 1..75: mol_type = other DNA
tatactggtgaatacttacaactggaaagaactgccgttgctggcgcatcatgttcgcctaacggccttgtaggc

SEQ ID NO: 670082 - DNA, 75 bp, synthetic construct
  source 1..75: mol_type = other DNA
ctgtgtgaaatacggatgagcttctggggagcggagtttgcggcgttcttactgaaccgccccgggaatcctgga

SEQ ID NO: 670083 - DNA, 75 bp, synthetic construct
  source 1..75: mol_type = other DNA
tcacgttctgcgtgacggtaatcctcatcatctggatgttgcacggttcgctgtgcgaaatacggatgagtttct

SEQ ID NO: 670084 - DNA, 75 bp, synthetic construct
  source 1..75: mol_type = other DNA
atggctatcaaactcattgctatcgatatggatggcccccttctgctgcccgatcaccccatttcccctgccgtt

SEQ ID NO: 670085 - DNA, 75 bp, synthetic construct
  source 1..75: mol_type = other DNA
atgccgcggttgaagccgcgtgcgggtgaacagggccgtggttttgccgtggtggcgggtgaagtgcgtaatctt

SEQ ID NO: 670086 - DNA, 75 bp, synthetic construct
  source 1..75: mol_type = other DNA
atgaacaatatcgtcaatgctgtcactcgcgtgactgacattatgggcgagattgcatcggcatcggatgaacag

SEQ ID NO: 670087 - DNA, 75 bp, synthetic construct
  source 1..75: mol_type = other DNA
catcatctggatgctacacggttcgctgtgtgaaatacggatgagcttctggggagcggagtttgcggcgttctt

SEQ ID NO: 670088 - DNA, 75 bp, synthetic construct
  source 1..75: mol_type = other DNA
gcgctggctcagtcgattcatgttggcaatacgccagatctcccctctgccagcggcacgattaaccgtgtggtg

SEQ ID NO: 670089 - DNA, 75 bp, synthetic construct
  source 1..75: mol_type = other DNA
tgaagctcgtcttgtcagcaactgggccagtgcagcccgctcttatatagggaaaaactacacaactctccaggc

SEQ ID NO: 670090 - DNA, 75 bp, synthetic construct
  source 1..75: mol_type = other DNA
aaagaactgccgttgctggcgcatcatgttcgcctaacggccttgtaggccgcgataatacaggggcaatacttt

SEQ ID NO: 670091 - DNA, 75 bp, synthetic construct
  source 1..75: mol_type = other DNA
agctatgacgactaccgtttcctggaaaaactctctcgcgaagtcggttctcatttccacgccctggaccgcacc

SEQ ID NO: 670092 - DNA, 75 bp, synthetic construct
  source 1..75: mol_type = other DNA
tggaacagccgggcgactactgcattacttataacggcgcgttggtacagaaggccgccgatggtagcaccgtgg

SEQ ID NO: 670093 - DNA, 75 bp, synthetic construct
  source 1..75: mol_type = other DNA
cgctggatcgcaccacgctgtacaccgccaaccgtgacatcagctattacacggtgcacgaatcatttgttgcca

SEQ ID NO: 670094 - DNA, 75 bp, synthetic construct
  source 1..75: mol_type = other DNA
gcaacaccatgacgcatctcaacaagtttgccccttatctcgcgaagctcttctacggaagaaccaataccaatg

SEQ ID NO: 670095 - DNA, 75 bp, synthetic construct
  source 1..75: mol_type = other DNA
aagttgcctcggactggtacgagatgaaaaaaggccagaatctggcttacaacacgattaaggatatctggcgat

SEQ ID NO: 670096 - DNA, 75 bp, synthetic construct
  source 1..75: mol_type = other DNA
aatcgcttcaactattcttaacgagaaaggatttcctcctgacgtgatcgaagctgcgttagctcacattgatac

SEQ ID NO: 670097 - DNA, 75 bp, synthetic construct
  source 1..75: mol_type = other DNA
acgttcgaaaatgtggcggcggcatggtaccagatgaaaatcagccagaatctggcccccaacacgattaaggac

SEQ ID NO: 670098 - DNA, 75 bp, synthetic construct
  source 1..75: mol_type = other DNA
tactcacacccattaaagcacgcggcaacctggaaaccctgaaacgcgttttacaacgcatcaatgaagtgatgg

SEQ ID NO: 670099 - DNA, 75 bp, synthetic construct
  source 1..75: mol_type = other DNA
actggaaaccatgaagccaatcagcgcacacagggaacacgtttttcccagccttaaaaatccaatgctgccaat

SEQ ID NO: 670100 - DNA, 75 bp, synthetic construct
  source 1..75: mol_type = other DNA
cgacgacagggcaacacgttcgaaaatgtggccgcatcgtggtacgaaatgaaaaaaaaccagaatctcgcccac

SEQ ID NO: 670101 - DNA, 75 bp, synthetic construct
  source 1..75: mol_type = other DNA
gttggtaatatcagccttgcgattagtgagccagactttgaatttgacgtatacgcacaagcagaggaattttaa

SEQ ID NO: 670102 - DNA, 75 bp, synthetic construct
  source 1..75: mol_type = other DNA
ccaagttcaccaaaaaagaacgcaaaggcattgacgaagtaattcgggcaattacaccgaggaaccgttacatgc

SEQ ID NO: 670103 - DNA, 75 bp, synthetic construct
  source 1..75: mol_type = other DNA
tgcttcaggcatcaaaagaacgcaacaagcacaactcctacgcttacacaaacaatcccaccagctacgaattac

SEQ ID NO: 670104 - DNA, 75 bp, synthetic construct
  source 1..75: mol_type = other DNA
gatttatcggtcgccagcatagaacggcaaaccagattgctaatcgagtggcaactgctgaccgtagcacgccca

SEQ ID NO: 670105 - DNA, 75 bp, synthetic construct
  source 1..75: mol_type = other DNA
gccttggatcgctgaatgatgtttccctgtctgatgccagagagcgacggaatgaatacaggtcactaatagcaa

SEQ ID NO: 670106 - DNA, 75 bp, synthetic construct
  source 1..75: mol_type = other DNA
aatattcagcacggcggcgaatgaagaaggatttgaacctgacgtgatcgaagccgcactagcccacgtggacac

SEQ ID NO: 670107 - DNA, 75 bp, synthetic construct
  source 1..75: mol_type = other DNA
attaatctgctgatgagtacattgcagaaccgtctggtcgatcatggttatgtcaccacccgggttatggagtgg

SEQ ID NO: 670108 - DNA, 75 bp, synthetic construct
  source 1..75: mol_type = other DNA
gacctgttatcgagaatgctagcgcaaacaatatggtgatagcagcgcctggatcaggcaaatcgttcaccatga

SEQ ID NO: 670109 - DNA, 75 bp, synthetic construct
  source 1..75: mol_type = other DNA
aaagttcttgccaatttatcggaatatcaatccgaacccagattaaagtattttagtgatggggttaatagaggt

SEQ ID NO: 670110 - DNA, 75 bp, synthetic construct
  source 1..75: mol_type = other DNA
atggtcacatttacccgtgcagcaacaaattcattggctgaaaaactgaaacgtcgattaagtaagaaagaccag

SEQ ID NO: 670111 - DNA, 75 bp, synthetic construct
  source 1..75: mol_type = other DNA
atggaagacgactgcgacattattattatcggtgccggaattgctggcaccgcttgcgcgttacgctgcgcgcga

SEQ ID NO: 670112 - DNA, 75 bp, synthetic construct
  source 1..75: mol_type = other DNA
gatgcgctgtatgaagaaaacggcagggtgtgtggtgtcatttgtggtgacgatattctccgcgcccgttatgtg

SEQ ID NO: 670113 - DNA, 75 bp, synthetic construct
  source 1..75: mol_type = other DNA
gcccgcttatcaaaaacacggaatcgctggagtatggcgcgcatctggtgccagaaggtggcctgcacagtatgc

SEQ ID NO: 670114 - DNA, 75 bp, synthetic construct
  source 1..75: mol_type = other DNA
atgtaccaaaagaaaaaaagccagcctcgcttgagactggcctttctgacagatgcttacttactcgcggaacag

SEQ ID NO: 670115 - DNA, 75 bp, synthetic construct
  source 1..75: mol_type = other DNA
tacatcttccagtgttgccgcttcgtaccccagcaaaccgaatcgacgtgccagcacttcacgctgtttggcgtt

SEQ ID NO: 670116 - DNA, 75 bp, synthetic construct
  source 1..75: mol_type = other DNA
ctcttttggcgctgacccagcgggtgggatgacccgtttactttattcgccggaatggctggaaacccagcagca

SEQ ID NO: 670117 - DNA, 75 bp, synthetic construct
  source 1..75: mol_type = other DNA
tattcctggtacttcttataaggtggcatcaatcactggtaatggcgtctggattcagaatggtacagagaaacg

SEQ ID NO: 670118 - DNA, 75 bp, synthetic construct
  source 1..75: mol_type = other DNA
taaaaataattaaaccaacgattatttctgtctgttttttcagttcacttgcttacgcaacagaatctgaaagca

SEQ ID NO: 670119 - DNA, 75 bp, synthetic construct
  source 1..75: mol_type = other DNA
ttaccatgatcgacgaacacagcaactacgctctggcacaggccgtgccgtcacttaactgtgatatcatcaaac

SEQ ID NO: 670120 - DNA, 75 bp, synthetic construct
  source 1..75: mol_type = other DNA
ttgtcgttggtaatatcagccttacgacaagtgagccagactttgaatttgacgtatgcgcacaagcagaggaat

SEQ ID NO: 670121 - DNA, 75 bp, synthetic construct
  source 1..75: mol_type = other DNA
attcagtgggccagaggcacgccgggacaggggctgcttgttctgccactgagcgtcaccggggacactcagaca

SEQ ID NO: 670122 - DNA, 75 bp, synthetic construct
  source 1..75: mol_type = other DNA
gctggggaataacagtgctgacgcttatgtgtttaatggcggtgtacccgacagcagtacgtggcgcaccgccga

SEQ ID NO: 670123 - DNA, 75 bp, synthetic construct
  source 1..75: mol_type = other DNA
atttcttccggtgcagttcttaatcttcatttcagtaaaccggtgacaggacagtcagtctggcgggcagggatg

SEQ ID NO: 670124 - DNA, 75 bp, synthetic construct
  source 1..75: mol_type = other DNA
tattaaacgtcatgaaaaactttggtgaaaccatccgcgaccttcgagtcgctcaaggccttgggttgcgcgaga

SEQ ID NO: 670125 - DNA, 75 bp, synthetic construct
  source 1..75: mol_type = other DNA
atcactcagacactggggaataacagtgcggatgcttatgtgtttaatggcggcgtatccgacagcagtacgtgg

SEQ ID NO: 670126 - DNA, 75 bp, synthetic construct
  source 1..75: mol_type = other DNA
atgtgcgtcacaatgctgtgattgatattttgcttattattatcttttctctttctttattaatttgcggaaaag

SEQ ID NO: 670127 - DNA, 75 bp, synthetic construct
  source 1..75: mol_type = other DNA
atgattttaacgtgtaacgaatcggaattgggctgttttgaggaaggcgtacagtatacggctgaaaaaccgatg

SEQ ID NO: 670128 - DNA, 75 bp, synthetic construct
  source 1..75: mol_type = other DNA
cataaaatcgaaggttttatgtatctaaaagaaaatgatgatgcaaatgacattaatccagcgctcccaccagga

SEQ ID NO: 670129 - DNA, 75 bp, synthetic construct
  source 1..75: mol_type = other DNA
tattcaggcccgccagcgcttgggaagtgaggctgtccgccgcgtgttcacgaaaacagcgcagctctggcataa

SEQ ID NO: 670130 - DNA, 75 bp, synthetic construct
  source 1..75: mol_type = other DNA
ctgctacgccctatcgctcgtgaaacaggaagcaaaatctatctacaggaagaacccatctgcggcttttggtat

SEQ ID NO: 670131 - DNA, 75 bp, synthetic construct
  source 1..75: mol_type = other DNA
gcacgaagaattccgtaacgcgctggttaacgccgcctctgccgacgctatcgccagcctgctgcaacatgaact

SEQ ID NO: 670132 - DNA, 75 bp, synthetic construct
  source 1..75: mol_type = other DNA
tgagcaatccaccatcagcgtagcgcgtctgcaagcgccggtgcgctggggcgatgatgaagcgcaattcatcat

SEQ ID NO: 670133 - DNA, 75 bp, synthetic construct
  source 1..75: mol_type = other DNA
caaccagaaagagcacgaagaacagcatcaaaaattatttgaataacttcgacagctacgagcaactaccaagta

SEQ ID NO: 670134 - DNA, 75 bp, synthetic construct
  source 1..75: mol_type = other DNA
ttcgaagccttgatgagattagttcaagcacagtgacgagccatcttcaaagacaagcaaccagacttagctacg

SEQ ID NO: 670135 - DNA, 75 bp, synthetic construct
  source 1..75: mol_type = other DNA
tgcttcaagcatcaagagagcgcaacaagcacaactcctacgcttacacagacacccccaccagctacgaagtac

SEQ ID NO: 670136 - DNA, 75 bp, synthetic construct
  source 1..75: mol_type = other DNA
cgcatcattttaatgaagatatccgcgacatcaccctcagccataaagacggcgtgagtgatgaggcggcggcgg

SEQ ID NO: 670137 - DNA, 75 bp, synthetic construct
  source 1..75: mol_type = other DNA
attacaccgagggaacgttatatgccaaccagaaagagcacccagaacactattaaaaattatcttgctaacttt

SEQ ID NO: 670138 - DNA, 75 bp, synthetic construct
  source 1..75: mol_type = other DNA
ctgtagaagcgaaggtcacccgaaatacaacaaaaaactattttatcttctaaagaatcttgatgaaattaactc

SEQ ID NO: 670139 - DNA, 75 bp, synthetic construct
  source 1..75: mol_type = other DNA
tgcttcaggcatcgagacaacgtaacagatacaactcctacgcttacacagacacccccaccagctacgaactac

SEQ ID NO: 670140 - DNA, 75 bp, synthetic construct
  source 1..75: mol_type = other DNA
attacgccacgagacagatatatgtcagtacgcaaagaaaaagagaatactttaaaaactttcttgatgggcttt

SEQ ID NO: 670141 - DNA, 75 bp, synthetic construct
  source 1..75: mol_type = other DNA
catattaccgttggtaatatcagtcttacaagcagtgagccagactttgaatttgacgtgtacgcacaagcagaa

SEQ ID NO: 670142 - DNA, 75 bp, synthetic construct
  source 1..75: mol_type = other DNA
tacaacaaaaaactattttatcttctaaagaatcttgacgaaattaacgcagccagcgtgacaaatcatcttcag

SEQ ID NO: 670143 - DNA, 75 bp, synthetic construct
  source 1..75: mol_type = other DNA
gcttaatgggttttgaagcgccgggagaagcgaaattccgcattccggtttcggacactcaggcctatcgccagt

SEQ ID NO: 670144 - DNA, 75 bp, synthetic construct
  source 1..75: mol_type = other DNA
cgctggcgcagctgctggacccgatggtcgaggcgaaatatatcctgacgccggtactgtggaagtacctctatc

SEQ ID NO: 670145 - DNA, 75 bp, synthetic construct
  source 1..75: mol_type = other DNA
aagcacagtgacgagccatcttcaaagacaagcaaccagacttagctctgagagatcccctcataatttccccaa

SEQ ID NO: 670146 - DNA, 75 bp, synthetic construct
  source 1..75: mol_type = other DNA
gcccatgaactgaaggaagtgggcgatcagtggcgcacgccggacaacattttctggggaattaacaccctgttt

SEQ ID NO: 670147 - DNA, 75 bp, synthetic construct
  source 1..75: mol_type = other DNA
ttgatgacgcccgttatcaggcaaaatacgtttcagttatctggcaaaaactgatcccgagtcaggctgattttt

SEQ ID NO: 670148 - DNA, 75 bp, synthetic construct
  source 1..75: mol_type = other DNA
accgccgtagagttgtgcgcgctggaacatggtggattagatacctgcgacggtggcagtaatggcatcccctcg

SEQ ID NO: 670149 - DNA, 75 bp, synthetic construct
  source 1..75: mol_type = other DNA
atcgacccggtttattcgctctctgaaccgtcgcctgatgagctggcggtaaatgacgagcttcgcgccgctccg

SEQ ID NO: 670150 - DNA, 75 bp, synthetic construct
  source 1..75: mol_type = other DNA
acggcggaagacaacgcgctggcgcatgactggtcagaacgtcttgcggagcttaaaggtgctgcctttggtaat

SEQ ID NO: 670151 - DNA, 75 bp, synthetic construct
  source 1..75: mol_type = other DNA
atgagtaataaatattgccaggcgctggttgaactgcggaataaaccagcccatgaactgaaggaagtgggtgat

SEQ ID NO: 670152 - DNA, 75 bp, synthetic construct
  source 1..75: mol_type = other DNA
attctccagccgtcagcagcacaaactgatgcagtggaaactgaagtatctgatacccaaaaaaatgaaagcacg

SEQ ID NO: 670153 - DNA, 75 bp, synthetic construct
  source 1..75: mol_type = other DNA
atggtggtgtgggaaggaacgcgtccgttgctggtggagattcaggcgctggtcgatcactcgatgatggcgaat

SEQ ID NO: 670154 - DNA, 75 bp, synthetic construct
  source 1..75: mol_type = other DNA
aaacgcgcggtgtggcgattgtcatggttgggcacgtaaccaaagatggctcgctggctggccctaaagtgctgg

SEQ ID NO: 670155 - DNA, 75 bp, synthetic construct
  source 1..75: mol_type = other DNA
gtgtccgttaaactcaggctacctcagcgtatctcggcatcaatgcgcaaacagcctgatgcccttcgctacgac

SEQ ID NO: 670156 - DNA, 75 bp, synthetic construct
  source 1..75: mol_type = other DNA
cggtgctgtaccaggtcattctccgggttatccgcgggaaaaaacttaccgggcggccgtggtggtaccggcgct

SEQ ID NO: 670157 - DNA, 75 bp, synthetic construct
  source 1..75: mol_type = other DNA
aattgatggaaaaacgctccggcactcttatgacaagagtcgccgcaggggagcgattcatgtcattagtgcgtt

SEQ ID NO: 670158 - DNA, 75 bp, synthetic construct
  source 1..75: mol_type = other DNA
agtcagcatgaggggcaatacatcaccggcatgcgttacatcatgaaacatgccagtgccatgcgtgataagggc

SEQ ID NO: 670159 - DNA, 75 bp, synthetic construct
  source 1..75: mol_type = other DNA
ttatctgttaaggccaacaaataaagttcattttcagcaagcggatgatgataacgacgtggcggtatcgttggt

SEQ ID NO: 670160 - DNA, 75 bp, synthetic construct
  source 1..75: mol_type = other DNA
gttcattttcagcaagcggatgatgataacgacgtggcggtatcgttggttattgcgttgattgtggaaaatccg

SEQ ID NO: 670161 - DNA, 75 bp, synthetic construct
  source 1..75: mol_type = other DNA
ctgattgtcgaaaatccgcagcagcaactgaagcttttgcggtgcttatttggcaagttgcagcaaccagatatc

SEQ ID NO: 670162 - DNA, 75 bp, synthetic construct
  source 1..75: mol_type = other DNA
gtacgcgctggattgaacgactaatgccgccggttgtgacgggtgcggtagtgatggcgattggcctgaacttag

SEQ ID NO: 670163 - DNA, 75 bp, synthetic construct
  source 1..75: mol_type = other DNA
aaaatatttcccggtgtgacgttgtgcgttgaatgtcaggcgtatcaggaaaggcagaggaaacactatgcataa

SEQ ID NO: 670164 - DNA, 75 bp, synthetic construct
  source 1..75: mol_type = other DNA
caagttacaacagcccgatatcgtcgagacactaatcactcttcctgaaacccagttaaaggaatacttcacaaa

SEQ ID NO: 670165 - DNA, 75 bp, synthetic construct
  source 1..75: mol_type = other DNA
acagaactgaccatggacgaatggctctgtgcagtgtcctgcatcacctcacgccgtgtatatctgcagcggaca

SEQ ID NO: 670166 - DNA, 75 bp, synthetic construct
  source 1..75: mol_type = other DNA
ggtctcagaaactgaagcacagagtgctggtcaaagactggcgataatagaacaacggtggctcaggatgaagga

SEQ ID NO: 670167 - DNA, 75 bp, synthetic construct
  source 1..75: mol_type = other DNA
cgcccgtcattgtcgtgaaaaagcgtcgagttatttcaccactacctgtcgtcgataaaacagagtctgtcactc

SEQ ID NO: 670168 - DNA, 75 bp, synthetic construct
  source 1..75: mol_type = other DNA
cgaccgcgaagactggaagcgtatctcggcatcaatgcgcaaacagcctgatgcccttcgctacgaccgccagac

SEQ ID NO: 670169 - DNA, 75 bp, synthetic construct
  source 1..75: mol_type = other DNA
gccattgcgccgcgcgtggcgtttgctgtccccaatacgctgacgggcgaagggcagttaatggtcgatatcacg

SEQ ID NO: 670170 - DNA, 75 bp, synthetic construct
  source 1..75: mol_type = other DNA
tcgaactgccgtttgtcatggcggtgctggccgatctggccggtaagccacgtgaagagttgcccacagtaaccg

SEQ ID NO: 670171 - DNA, 75 bp, synthetic construct
  source 1..75: mol_type = other DNA
gccaacggtggcgcgtaacgagcgtctcagtggctatgccggtagcgccggggtggcaaaagtccagaaactctc

SEQ ID NO: 670172 - DNA, 75 bp, synthetic construct
  source 1..75: mol_type = other DNA
tatgaagcgtcacccacttaagcgcatcgatgtcggtattgcccaggtcaatctgggctggaatggtcaccattt

SEQ ID NO: 670173 - DNA, 75 bp, synthetic construct
  source 1..75: mol_type = other DNA
gctcaagcgtattgatgttggtattgcgcaagtcaatctgggctggaacggccaccatttcacatctacctggga

SEQ ID NO: 670174 - DNA, 75 bp, synthetic construct
  source 1..75: mol_type = other DNA
ttgtcctgctgctgttttccgtgccgttaccggctcgggaggtgccgccgggctaccgtgaggtggcccggcagg

SEQ ID NO: 670175 - DNA, 75 bp, synthetic construct
  source 1..75: mol_type = other DNA
aaatgaaatgtatccgggtggtaaccgcagatgaacatctgaaggaagtttatacggaagacgcttccctgccgg

SEQ ID NO: 670176 - DNA, 75 bp, synthetic construct
  source 1..75: mol_type = other DNA
ccggccgcacgttataccgctgtggtcagacggcatcttgcccggctccaccgggataatttcctgaatccgtct

SEQ ID NO: 670177 - DNA, 75 bp, synthetic construct
  source 1..75: mol_type = other DNA
atgaccgataaaatccgtattctgcaaggtcgcgttgttagcgacaaaatggagaaatccattgttgttgctatc

SEQ ID NO: 670178 - DNA, 75 bp, synthetic construct
  source 1..75: mol_type = other DNA
gctggaacacgctctggcacgtggcgcccacatctacgctgaaatcgttggctacggcgcaacgtctgatggcgc

SEQ ID NO: 670179 - DNA, 75 bp, synthetic construct
  source 1..75: mol_type = other DNA
ttgccgaagccgaaaaagaaggtgtcgagtgcatccctggcgcaacggtggatgcactacatatagaaaacggca

SEQ ID NO: 670180 - DNA, 75 bp, synthetic construct
  source 1..75: mol_type = other DNA
acccatgcgctcgcggaactcctcccccaatatcacctgactgcacctcttgagcgacgtatcactcacgaaagc

SEQ ID NO: 670181 - DNA, 75 bp, synthetic construct
  source 1..75: mol_type = other DNA
ctgagtgaatgccgtcgtcgtcatcctgtcagctggctgcaggcggccggttgttatcatcatccggcaggtggt

SEQ ID NO: 670182 - DNA, 75 bp, synthetic construct
  source 1..75: mol_type = other DNA
agacatggttgctccctctggcgaaggcgcagtacgttgtatgcagatggcgatgcatggcgttgataccccaat

SEQ ID NO: 670183 - DNA, 75 bp, synthetic construct
  source 1..75: mol_type = other DNA
tactccatcagctccgcgtgtgcgacctccgcacactgtatcggtaacgcagtagagcagatccaactgggcaaa

SEQ ID NO: 670184 - DNA, 75 bp, synthetic construct
  source 1..75: mol_type = other DNA
tgttctcagtaactgcaccacaagaatcgtacttcctgcactgaaggaattcggttctgaatcattgccgcacaa

SEQ ID NO: 670185 - DNA, 75 bp, synthetic construct
  source 1..75: mol_type = other DNA
gcaatatcacgtcgacgctcaatatttcgcaacaaacattaaagattcagaaattggtgatgctgccaacttact

SEQ ID NO: 670186 - DNA, 75 bp, synthetic construct
  source 1..75: mol_type = other DNA
gtcgagacactaatcactcttcctgaaacccagttaaaggaatacttcacaaagtatgttttagattcagacgaa

SEQ ID NO: 670187 - DNA, 75 bp, synthetic construct
  source 1..75: mol_type = other DNA
accgtcagccgttttgaaatgggtaaagacaaatgggcgtttaatcgcgaagaggtgatgctgacctgtcgtccg

SEQ ID NO: 670188 - DNA, 75 bp, synthetic construct
  source 1..75: mol_type = other DNA
ctggtactctcaggcggtagaactgcttatgtgcccggcagcgacgttactgtccgatatcgaacccattgagaa

SEQ ID NO: 670189 - DNA, 75 bp, synthetic construct
  source 1..75: mol_type = other DNA
gccgtagcagcatcattagttgtactttatgctggtattgctggcgttcgttggattcttcgtacagttaaatcg

SEQ ID NO: 670190 - DNA, 75 bp, synthetic construct
  source 1..75: mol_type = other DNA
gcaatatcacgtcaacgggtaatgactccaacttactgatagtgttttatgttcagataatgcccgatgactttg

SEQ ID NO: 670191 - DNA, 75 bp, synthetic construct
  source 1..75: mol_type = other DNA
cgcgtggtgacggagtatcatataccgcaggcattatagactggccccctgaatctccagacaaccagtatcact

SEQ ID NO: 670192 - DNA, 75 bp, synthetic construct
  source 1..75: mol_type = other DNA
agttaacattacccgctgacgtcgatattctcgcggagagcgataacccaacgcactatgcggatggttttcatt

SEQ ID NO: 670193 - DNA, 75 bp, synthetic construct
  source 1..75: mol_type = other DNA
cagcaggctgggaagaatcaatcgcggtccaggggagcatcggtggatttgattatcgcatcaacggtagttatt

SEQ ID NO: 670194 - DNA, 75 bp, synthetic construct
  source 1..75: mol_type = other DNA
ccgcaggtgattaccgtcagccgttttgaagtgggtaaagacaaatgggcgtttaatcgcgaagaggtgatgctg

SEQ ID NO: 670195 - DNA, 75 bp, synthetic construct
  source 1..75: mol_type = other DNA
gaaattgatttacttaatctaatcgaagttttatggcgggccaaaaaaacggtcatggcggtcgtggtaatgact

SEQ ID NO: 670196 - DNA, 75 bp, synthetic construct
  source 1..75: mol_type = other DNA
gaagtgacgctcattttcccgattatcctctggcgtcgcccagtaataatgaaattgatttacttaatctaatct

SEQ ID NO: 670197 - DNA, 75 bp, synthetic construct
  source 1..75: mol_type = other DNA
aaagccggtagaaggcagtccactgtttttactacaaatgtgcacagaacaattagtggagagtggaaaatttga

SEQ ID NO: 670198 - DNA, 75 bp, synthetic construct
  source 1..75: mol_type = other DNA
gcgtgacgttatggagtgtcagcgaacaggtggcgcaaagccgcacccaggcggagaaacagttcttaacgttgt

SEQ ID NO: 670199 - DNA, 75 bp, synthetic construct
  source 1..75: mol_type = other DNA
ttaccgatttcactaaccgtggtcggcattgcaccggaagaactgtctgcatgggctggtgcggacgccgaacgc

SEQ ID NO: 670200 - DNA, 75 bp, synthetic construct
  source 1..75: mol_type = other DNA
acggtcaatcaggacgttattttccagacttttttattcccgttgaaaagagacttcgagaaaactgtcgtcttt

SEQ ID NO: 670201 - DNA, 75 bp, synthetic construct
  source 1..75: mol_type = other DNA
tggcagcagaatttctgtttgccgctgggaatcttcacgccgtagaggtggaagtaccggggttgttaactgacc

SEQ ID NO: 670202 - DNA, 75 bp, synthetic construct
  source 1..75: mol_type = other DNA
gaagaagcactaaatcgtcgccagataaatcaggcgttattgagtacgggcgatttggcgcatgatgaattctaa

SEQ ID NO: 670203 - DNA, 75 bp, synthetic construct
  source 1..75: mol_type = other DNA
ccgctggcagcgccgtacacccgatgtggaacacggtatctggcctgacgttgctgacgaacgtctccagcaatg

SEQ ID NO: 670204 - DNA, 75 bp, synthetic construct
  source 1..75: mol_type = other DNA
tttacgctctcaggtgacgatggcgctgaaaaaatatcgcccacagaccgacgaaaccgatctgctcgctgagtt

SEQ ID NO: 670205 - DNA, 75 bp, synthetic construct
  source 1..75: mol_type = other DNA
actgcgtagcgcactggtggcagattatgttgtgcaacaggacgcgttacagaaagagggggatgcggtttccgg

SEQ ID NO: 670206 - DNA, 75 bp, synthetic construct
  source 1..75: mol_type = other DNA
gtcagcgattgccagcacgctgaaatcagcgtcactttccgacattgagatgcgtggtttcacctttgatcaaaa

SEQ ID NO: 670207 - DNA, 75 bp, synthetic construct
  source 1..75: mol_type = other DNA
gtcagcgattgccagtaccctgaaatcagcgtcacttaccgacattgagatgcgtggtttcacctttgatcaaaa

SEQ ID NO: 670208 - DNA, 75 bp, synthetic construct
  source 1..75: mol_type = other DNA
ggagcgccgggctggcgctggctccggtcatgttccgcgcccagctcaatgagcaggatttaccgctttcgctaa

SEQ ID NO: 670209 - DNA, 75 bp, synthetic construct
  source 1..75: mol_type = other DNA
ggcgcggcggtggtgccggtccggtggattatctgctgggcaaagaccggcagcgcgacggcgccagtatcctgc

SEQ ID NO: 670210 - DNA, 75 bp, synthetic construct
  source 1..75: mol_type = other DNA
ggttctgctggcgcgtgacgcaaaaggttttgcttcggtctgttatgacgacgaaggggcaatcaagatcctgat

SEQ ID NO: 670211 - DNA, 75 bp, synthetic construct
  source 1..75: mol_type = other DNA
gcagtggaaactgaggtatctgatatcccaaaaaatgaaaccgcgccggaagctgaaccatctgtagagcgtgag

SEQ ID NO: 670212 - DNA, 75 bp, synthetic construct
  source 1..75: mol_type = other DNA
tgccttctcaatgatgctgtgcggttctgaaggtccattcacaaaagaacaagcactctctggtttcgagcttgc

SEQ ID NO: 670213 - DNA, 75 bp, synthetic construct
  source 1..75: mol_type = other DNA
cggtaatgatgagcaggcaatgtataatgttacgcaagaagccgctcgtattctgcacgaagctgaaactaaaga

SEQ ID NO: 670214 - DNA, 75 bp, synthetic construct
  source 1..75: mol_type = other DNA
tcccgttccgcacgtgccatgcgtggacaaagcgataaagtcgtcgccattatcgttacccgtctggattcgtta

SEQ ID NO: 670215 - DNA, 75 bp, synthetic construct
  source 1..75: mol_type = other DNA
gccgttaatgaaattccttcatccggagatcgtcaccgtagatcctggttacgccgaagctggacgccaggcggc

SEQ ID NO: 670216 - DNA, 75 bp, synthetic construct
  source 1..75: mol_type = other DNA
gactcgataaagaccagtacagcgtgctgtgggttgagcaccaggataaggggcggctggagctgaacttcctga

SEQ ID NO: 670217 - DNA, 75 bp, synthetic construct
  source 1..75: mol_type = other DNA
tgccttcgcggaatggcggacgatgtctggacttatgcaacgggagaacgcggcgctgaacgagcgcgtcacggg

SEQ ID NO: 670218 - DNA, 75 bp, synthetic construct
  source 1..75: mol_type = other DNA
cctggcagaccattgtgaacggcaggctggggctgcacgacccgaacgcaccggagaaccggcgggcgctggtca

SEQ ID NO: 670219 - DNA, 75 bp, synthetic construct
  source 1..75: mol_type = other DNA
gattgtgaatttacgctctcaggtgacgatggcgctgaaaaaatatcgcccacaggccgacgatacccggctgct

SEQ ID NO: 670220 - DNA, 75 bp, synthetic construct
  source 1..75: mol_type = other DNA
tggagcggggcgtgacgttatggagcgtcagcgaacaggtggcgcaaagccgcacccaggcggaggaacagttct

SEQ ID NO: 670221 - DNA, 75 bp, synthetic construct
  source 1..75: mol_type = other DNA
gagcaggatttaccgctttcgctgacggtggtcggcattgcaccggaagagctatctgcatgggctggcgcagac

SEQ ID NO: 670222 - DNA, 75 bp, synthetic construct
  source 1..75: mol_type = other DNA
aggatataccgctttcactaaccgtggtcggcattgcaccggaagaactgtctgcatgggctggtgcggacgccg

SEQ ID NO: 670223 - DNA, 75 bp, synthetic construct
  source 1..75: mol_type = other DNA
tgttaactgatcgtggcgcgcagttagaagctgcggcgctggcgtcaggagtgccggtactgctaaataaattcg

SEQ ID NO: 670224 - DNA, 75 bp, synthetic construct
  source 1..75: mol_type = other DNA
aacacggggttagggcaatgtgaaatatgggatcgtgcagcgatacaaaagagagcggaacgtctggccgagctg

SEQ ID NO: 670225 - DNA, 75 bp, synthetic construct
  source 1..75: mol_type = other DNA
attttgagtttttccatgagcaaataggcaaactccacggcaatttcaccgcgttatgtcagggcctttccaaac

SEQ ID NO: 670226 - DNA, 75 bp, synthetic construct
  source 1..75: mol_type = other DNA
tccggtcaaaggcactcgctggctatatagcagtaaaccttatgcgctttcaacgccgccgctttcggtgattaa

SEQ ID NO: 670227 - DNA, 75 bp, synthetic construct
  source 1..75: mol_type = other DNA
caacgtggtggtaaacccgccgtggaacgtcccaccaactctggcacgcaaagatattctgccgaaagtgcgcaa

SEQ ID NO: 670228 - DNA, 75 bp, synthetic construct
  source 1..75: mol_type = other DNA
accccagttacttacttatgtaagctccaggggattcactgcgtcaccgccttcctgcacctcaaaatccattgg

SEQ ID NO: 670229 - DNA, 75 bp, synthetic construct
  source 1..75: mol_type = other DNA
ttaacagaagcagacctggcacgcatgattcacacctacagcgaccccataaacgactgggaatgcggcacctgt

SEQ ID NO: 670230 - DNA, 75 bp, synthetic construct
  source 1..75: mol_type = other DNA
gcaacaccatgacgcatctcaacaagtttgccccttatctcgcgaagctcttctgcggaagaaccaataccaata

SEQ ID NO: 670231 - DNA, 75 bp, synthetic construct
  source 1..75: mol_type = other DNA
gctgctcgatctcgatgaagaaattatcatccagtgggaaagcggagagtacgaaccaaccatcagcatgcttat

SEQ ID NO: 670232 - DNA, 75 bp, synthetic construct
  source 1..75: mol_type = other DNA
tctgtggcgcgctcgccggacattttaaaacctacggacagcaacggtgcgctgatttcaatcacgtataaatac

SEQ ID NO: 670233 - DNA, 75 bp, synthetic construct
  source 1..75: mol_type = other DNA
tggaatgaggctaatcttaaaccggttaaaacgattaacggggagtcgccggatgaaaatggcaacatagatata

SEQ ID NO: 670234 - DNA, 75 bp, synthetic construct
  source 1..75: mol_type = other DNA
tgttttccgccgtgcagtatgtgcaattccgacaaattctttgaacaagacatttgccactttttataaagttat

SEQ ID NO: 670235 - DNA, 75 bp, synthetic construct
  source 1..75: mol_type = other DNA
ggctatacggtgatgcgcggctggaacagcagagaagcgattgacccatggcaggttgactggtctacaatcacg

SEQ ID NO: 670236 - DNA, 75 bp, synthetic construct
  source 1..75: mol_type = other DNA
aaaacatcagacactgcatttcaggttaagtgctccagacttctccagcttcgacaaactgcgagatgcgcttgc

SEQ ID NO: 670237 - DNA, 75 bp, synthetic construct
  source 1..75: mol_type = other DNA
attccgcagtaacttttctctctacggacgtaatttcggcgatcttgatgatatcgacaataacgttcagaacta

SEQ ID NO: 670238 - DNA, 75 bp, synthetic construct
  source 1..75: mol_type = other DNA
gtccggagcttcgcctgtttgccacctggatggactggagcagcaaacttgatgattttgccagcaatgacgctt

SEQ ID NO: 670239 - DNA, 75 bp, synthetic construct
  source 1..75: mol_type = other DNA
gcatctctttgggatgcaaggaacgtgacagagcgtctgatcactgcaaccgatcgtctggcagattaccccagg

SEQ ID NO: 670240 - DNA, 75 bp, synthetic construct
  source 1..75: mol_type = other DNA
cgatcgcctggcagattaccccaggctgtatgaaacggatgaacgctatggtgaaggggttcgccgtattagctt

SEQ ID NO: 670241 - DNA, 75 bp, synthetic construct
  source 1..75: mol_type = other DNA
gtgtggtgacgttatggagcattaatgagcaggtaatacaaagccgtatacgtgttgagaaacagtttttatcgg

SEQ ID NO: 670242 - DNA, 75 bp, synthetic construct
  source 1..75: mol_type = other DNA
gtaaagaccgctatgccgatggcgacagctatcagtgggcaacattcaacctgcgtctgattcaggcaatcaatc

SEQ ID NO: 670243 - DNA, 75 bp, synthetic construct
  source 1..75: mol_type = other DNA
tcactggatcgactcggatgtcgtgttcctcgccggtaccggcggcggtatttacgatgtcaggtggaacgacag

SEQ ID NO: 670244 - DNA, 75 bp, synthetic construct
  source 1..75: mol_type = other DNA
atggtctgggggcggaagtgaaggggattggctctgacggtgcactacgcagtgatgcggatacttggcgtcttg

SEQ ID NO: 670245 - DNA, 75 bp, synthetic construct
  source 1..75: mol_type = other DNA
tagctatcaatatatggatctgaagccaaaggggtatcaaaaccacaacgccgtaaacggcagcttctataaact

SEQ ID NO: 670246 - DNA, 75 bp, synthetic construct
  source 1..75: mol_type = other DNA
cacccttggtaatgcgcaggcgatgatcagcggcgtgcgtggcggcactattgatatggagatgtctggctctaa

SEQ ID NO: 670247 - DNA, 75 bp, synthetic construct
  source 1..75: mol_type = other DNA
caatctttacgtttcggttatgaaacctcacaaaccgactcgcaacatattgcggcgaaaaaattcaatgaatta

SEQ ID NO: 670248 - DNA, 75 bp, synthetic construct
  source 1..75: mol_type = other DNA
ggcgggagaacaccgccactggatgatacctctcagaaagggagcgcaatatgaagagatcagaaaactgggtaa

SEQ ID NO: 670249 - DNA, 75 bp, synthetic construct
  source 1..75: mol_type = other DNA
gcttcaccgggacgtataccggagctgatgcgcgatcttgcaagtatgggacaacttgtgaaattaccgacgaga

SEQ ID NO: 670250 - DNA, 75 bp, synthetic construct
  source 1..75: mol_type = other DNA
atccagcgcggtggttctccggtgccttacgaccgtattctggcttcccgtatgggcgcttacgctattgagctg

SEQ ID NO: 670251 - DNA, 75 bp, synthetic construct
  source 1..75: mol_type = other DNA
gagaagggtgtatagcccggaagaagtgcgtaaaacgaactgacaggataaaagcgccctgctcaacctgtcagt

SEQ ID NO: 670252 - DNA, 75 bp, synthetic construct
  source 1..75: mol_type = other DNA
cccatatggcgatcaaattaaactccatgaaaaacatgctctatgaagcagcgtggaaagcggacaacggcacca

SEQ ID NO: 670253 - DNA, 75 bp, synthetic construct
  source 1..75: mol_type = other DNA
cgggttcaataccttcctgcgcgaaggcacacaagagcagatcgacaagattatggctttccgcggcaccggtaa

SEQ ID NO: 670254 - DNA, 75 bp, synthetic construct
  source 1..75: mol_type = other DNA
ctcgatatcgactggcagggcgcgcaacaaattcgccagaagatgccacatgcgcgtagtatctttattttaccg

SEQ ID NO: 670255 - DNA, 75 bp, synthetic construct
  source 1..75: mol_type = other DNA
ggtgatgagaatgctgatgacattgcagggcgcttcaccgggacgtataccggagctgatgcgcgatcttgcaag

SEQ ID NO: 670256 - DNA, 75 bp, synthetic construct
  source 1..75: mol_type = other DNA
cgccacgccgcatccgcaatggtgcggcctgaccctgctggccatcgatggtgtgttctggcgcacaccggatac

SEQ ID NO: 670257 - DNA, 75 bp, synthetic construct
  source 1..75: mol_type = other DNA
ccggtggttgtgaatttgtggtggttccggaagttgaattcagccgcgatgacctggtaaatgaaatcaaagcgg

SEQ ID NO: 670258 - DNA, 75 bp, synthetic construct
  source 1..75: mol_type = other DNA
ccggtaaaagttaccgctgacgaagtaaacaaaattatgcaggcagccaatatcagccagcctgacgctaatgaa

SEQ ID NO: 670259 - DNA, 75 bp, synthetic construct
  source 1..75: mol_type = other DNA
ttgaccgatttgaagaccattattcgcgccgaacgcttgcgcatgagtcgccaaaagcaacgtcatgacgcttta

SEQ ID NO: 670260 - DNA, 75 bp, synthetic construct
  source 1..75: mol_type = other DNA
tcgtccgcaggacatgggcggtctgggcttctggtacaagtggaacctcggctggatgcatgacaccctggacta

SEQ ID NO: 670261 - DNA, 75 bp, synthetic construct
  source 1..75: mol_type = other DNA
gggtgtcttactggcttataatctggtgagatatcagatgattaaaatggcggaacatctgaaaggttactggcc

SEQ ID NO: 670262 - DNA, 75 bp, synthetic construct
  source 1..75: mol_type = other DNA
cgcgcttactatggctggatgtgggcatttccgggcaagaaactgctgttcatggggaacgaatttgcccaaggc

SEQ ID NO: 670263 - DNA, 75 bp, synthetic construct
  source 1..75: mol_type = other DNA
aagcgattgaatttttacgcaataccaaccgtattatcggtgagcaagttcctggcgcggtaacgatggcggagg

SEQ ID NO: 670264 - DNA, 75 bp, synthetic construct
  source 1..75: mol_type = other DNA
attaccgacaagaagggaaagggccttcccgagagtggtaaaggagaggccctggaaataccccacagccccgaa

SEQ ID NO: 670265 - DNA, 75 bp, synthetic construct
  source 1..75: mol_type = other DNA
gacacatgccgggaacccggcgctctacccgcaggtcaaaatggtctgccagatggaactgaccagccatctgct

SEQ ID NO: 670266 - DNA, 75 bp, synthetic construct
  source 1..75: mol_type = other DNA
atgatacctctcagaaagggagcgcaatatgaagagctcagaaaactgggtaaaggcgatcatctggtgaagctg

SEQ ID NO: 670267 - DNA, 75 bp, synthetic construct
  source 1..75: mol_type = other DNA
gattgatgccaatggcaatctgcgtctgaagtccgatccctatgcctttgaagcacagatgcgcccggagaccgc

SEQ ID NO: 670268 - DNA, 75 bp, synthetic construct
  source 1..75: mol_type = other DNA
gaatttggcggtcgtgaaaaccttgaagccattgagtttttgcgcaataccaaccgcattcttggcgagcaggtg

SEQ ID NO: 670269 - DNA, 75 bp, synthetic construct
  source 1..75: mol_type = other DNA
gtcggacgactttggtttggcagagtttgatggcaccaacctgtatgagcacagcgacccgcgcgaaggatatca

SEQ ID NO: 670270 - DNA, 75 bp, synthetic construct
  source 1..75: mol_type = other DNA
cttccgctatttcattgatgccgcacacgcagccggtttgaacgttattcttgactgggtgccggggcacttccc

SEQ ID NO: 670271 - DNA, 75 bp, synthetic construct
  source 1..75: mol_type = other DNA
tttgaatggctggtggtggacgatcatgaacgttcggtgctgatttttgttcgtcgcgataaaaacggaaacgaa

SEQ ID NO: 670272 - DNA, 75 bp, synthetic construct
  source 1..75: mol_type = other DNA
tttccgttatttcattgatgctgcccatgccgctggcctgaatgtcattcttgactgggtgccagggcatttccc

SEQ ID NO: 670273 - DNA, 75 bp, synthetic construct
  source 1..75: mol_type = other DNA
cgcaggcacgaaaaaagtggccgggactgggaaatgaagtgacagcccgcctgttgaccgtgacgcgcaaaggaa

SEQ ID NO: 670274 - DNA, 75 bp, synthetic construct
  source 1..75: mol_type = other DNA
cggggttggggcaagatattttgggatcggtgccgacacgcaataccagctcgatcagattgccgtgaacctgcg

SEQ ID NO: 670275 - DNA, 75 bp, synthetic construct
  source 1..75: mol_type = other DNA
gtccaggcgggtgtcttccgctttattgactaccagcggttactggaaggggaagtgggttatacctctaacgaa

SEQ ID NO: 670276 - DNA, 75 bp, synthetic construct
  source 1..75: mol_type = other DNA
gcaaacactctccggtttcgagctcgcacagaccggccaagtgttggctggaaggctaaaaattcaggagcgaat

SEQ ID NO: 670277 - DNA, 75 bp, synthetic construct
  source 1..75: mol_type = other DNA
gtttgtaccgctggaacgtcagggtcttcaaaacttactgaacgaacgtaagattattcgtgcagcacaggaaaa

SEQ ID NO: 670278 - DNA, 75 bp, synthetic construct
  source 1..75: mol_type = other DNA
gccagcgccaacaggtaagatctttgtctcggtatacaatattcaggacgaaaccgggcaatttaaaccctaccc

SEQ ID NO: 670279 - DNA, 75 bp, synthetic construct
  source 1..75: mol_type = other DNA
atcccgcttcaatcgctgaccgcagccaatatcatggttgaaggctctattattggttatgaaagcaacgtcaaa

SEQ ID NO: 670280 - DNA, 75 bp, synthetic construct
  source 1..75: mol_type = other DNA
tctggagcgtggcctttggaaaacggaaacacgctggaatggaaacgatcgtgatcagctaggcaaagaggctct

SEQ ID NO: 670281 - DNA, 75 bp, synthetic construct
  source 1..75: mol_type = other DNA
tctgcaaacacgagcagagaattatctgaggtatcgcaaagcagaagagaatattctgcgttcgaccgttgaggg

SEQ ID NO: 670282 - DNA, 75 bp, synthetic construct
  source 1..75: mol_type = other DNA
gattctgcgttcgaccgttgaggggctaactaatccagaatctcctgtattcaaacaaacagcatggatggggca

SEQ ID NO: 670283 - DNA, 75 bp, synthetic construct
  source 1..75: mol_type = other DNA
gtcaaagaagtatttctggattattcagtcctgggtcaaatggtgaaaacgcaagtaataaaccgtcaagtggta

SEQ ID NO: 670284 - DNA, 75 bp, synthetic construct
  source 1..75: mol_type = other DNA
gcgtgataaagctgggctaccggtcatgagcggaacctctggctcctcctctgatgccactcttgcaacacgtta

SEQ ID NO: 670285 - DNA, 75 bp, synthetic construct
  source 1..75: mol_type = other DNA
tgccttttcaatgatgctgtgtggttctgcaggaccattcacgaaggagcaaacactctccggcttcgagctcgc

SEQ ID NO: 670286 - DNA, 75 bp, synthetic construct
  source 1..75: mol_type = other DNA
gccattgaagccggtgatgaacgtcgcgcccgcgcaaaatttcactggcaattcctggaacattatccggctgct

SEQ ID NO: 670287 - DNA, 75 bp, synthetic construct
  source 1..75: mol_type = other DNA
gaacatatcgatgccggtatcactctcgctaatgccattaactttctagtggaaaagtacgaactggttcgtatc

SEQ ID NO: 670288 - DNA, 75 bp, synthetic construct
  source 1..75: mol_type = other DNA
gatcgtaagggatttagctggcaagaacagtcgccttttattactgctgtagacattctaaaagccagacgggct

SEQ ID NO: 670289 - DNA, 75 bp, synthetic construct
  source 1..75: mol_type = other DNA
agataagtacgaactggttcgtatcgatcgcagagggtttagttggcaggagcaatcaccttatcttcgcgcggt

SEQ ID NO: 670290 - DNA, 75 bp, synthetic construct
  source 1..75: mol_type = other DNA
atctgtcacagcacaaacacatatggcgtggagcgatgccgataatcagcaggtgaaactgtcgatgccggaact

SEQ ID NO: 670291 - DNA, 75 bp, synthetic construct
  source 1..75: mol_type = other DNA
atgcacactggacaggcccttgatctggtatcccgttacgattctctgagtaacccacagacttctctgagggat

SEQ ID NO: 670292 - DNA, 75 bp, synthetic construct
  source 1..75: mol_type = other DNA
aacaatccccttatctccgggctgtagacattctgcgagcacggcaggcaactggcttgttgcggcaaagccgta

SEQ ID NO: 670293 - DNA, 75 bp, synthetic construct
  source 1..75: mol_type = other DNA
taacttgccttctgtttatggagatgccgcagaatggaacacagccgaattaagaagagaaatgtcgcactcata

SEQ ID NO: 670294 - DNA, 75 bp, synthetic construct
  source 1..75: mol_type = other DNA
agtgacagcccgcctgctgaccgtgacgcgcaaaggaaaagtctgccatctgctgacgtcgatgacggacgccat

SEQ ID NO: 670295 - DNA, 75 bp, synthetic construct
  source 1..75: mol_type = other DNA
tctggcgcacaccggatacaccagagaacgatgcagccttccctcgccagacacatgccgggaacccggcgctct

SEQ ID NO: 670296 - DNA, 75 bp, synthetic construct
  source 1..75: mol_type = other DNA
cgtgggcggtgaagctctgtctgtcgcccgtggctgtctggcaaatgttactgacacgcctgctggaacaacact

SEQ ID NO: 670297 - DNA, 75 bp, synthetic construct
  source 1..75: mol_type = other DNA
gggtggcgaagccatgcccgccgcctgtacttgtctggcaaacgctacttacacgtctgctggagcaacactatg

SEQ ID NO: 670298 - DNA, 75 bp, synthetic construct
  source 1..75: mol_type = other DNA
agtatgccccttctctccccctgaggggtgggggggggactctgcggcctatgttgagcttatgcggtctcggta

SEQ ID NO: 670299 - DNA, 75 bp, synthetic construct
  source 1..75: mol_type = other DNA
aagtgtctggcaacgtgctggcggatatagatgcaatggcggagcaaattgaagaggtggcgcgaacggtgcctg

SEQ ID NO: 670300 - DNA, 75 bp, synthetic construct
  source 1..75: mol_type = other DNA
atggcttgccggagaacccggaaatcagcgaaaccgtgaaattctggaaaggcatctggaaaccgctcgcggctg

SEQ ID NO: 670301 - DNA, 75 bp, synthetic construct
  source 1..75: mol_type = other DNA
tttgtggctcgctgttgccgcagtgttttctggtgcgggaatgataatattctactggttactccagccatcaga

SEQ ID NO: 670302 - DNA, 75 bp, synthetic construct
  source 1..75: mol_type = other DNA
gccgcagttacgcttcctgcaacggtttccgcacctcccgtaacacccgccgtcgtcaaatccgcattcagcact

SEQ ID NO: 670303 - DNA, 75 bp, synthetic construct
  source 1..75: mol_type = other DNA
cgccagtggatgcactgccggatctctccgatgtgcaggtgattattaaaaccagttaccccggtcaggcaccac

SEQ ID NO: 670304 - DNA, 75 bp, synthetic construct
  source 1..75: mol_type = other DNA
agcgattgccgagaaagtgcagttaaaaccgggcaccagcgtggcattctccgggcagttcgagttgctggagcg

SEQ ID NO: 670305 - DNA, 75 bp, synthetic construct
  source 1..75: mol_type = other DNA
accccgccgccatgataacgacgaagacactgacactggtgaaaccaccgaaacccggcatcccgcagacaagga

SEQ ID NO: 670306 - DNA, 75 bp, synthetic construct
  source 1..75: mol_type = other DNA
accacgccgccatgataacgatgaaggctcagagactggtgaaaccaccgaaaccactgaaacccggcatcccgc

SEQ ID NO: 670307 - DNA, 75 bp, synthetic construct
  source 1..75: mol_type = other DNA
ccgattcgatcatttctggcggtggtggcatggaaactaccgaggaaacccgaaacagggcgcagtattatgtgg

SEQ ID NO: 670308 - DNA, 75 bp, synthetic construct
  source 1..75: mol_type = other DNA
gtgaagaagtggcagaccccgcgattcatcaacacggataaagcgcccgcctatggtcgcgcgcttgctctgctc

SEQ ID NO: 670309 - DNA, 75 bp, synthetic construct
  source 1..75: mol_type = other DNA
ttcttactgctagctcagttgctccagtatttttcaccttagcttttctttcatgtatatcaaagcactataaat

SEQ ID NO: 670310 - DNA, 75 bp, synthetic construct
  source 1..75: mol_type = other DNA
gacactgacactggtgaaaccaccgaaaccaccgaaaccaccgaaaccaccgaaacccggcatcccgcagacaag

SEQ ID NO: 670311 - DNA, 75 bp, synthetic construct
  source 1..75: mol_type = other DNA
tgaaaaccatccctgacgttgcggaagtggcgtcggtgggcggtgtggtgaaagagtatcaggtggttatcgatc

SEQ ID NO: 670312 - DNA, 75 bp, synthetic construct
  source 1..75: mol_type = other DNA
tttatgcgtaatgcacagccacattcaaattatggtggggcgtgcggggcagtcgcaagactggccgggttccgt

SEQ ID NO: 670313 - DNA, 75 bp, synthetic construct
  source 1..75: mol_type = other DNA
atgtactggcaaaaatttcacgtctagactgttcagcggaattcactgagcgaaatttttcgcccagtgaatata

SEQ ID NO: 670314 - DNA, 75 bp, synthetic construct
  source 1..75: mol_type = other DNA
gcaacatcagattcaccgaaaccgttcctgatggcgcacgggtctgtaccatggagactttccggttggtaatga

SEQ ID NO: 670315 - DNA, 75 bp, synthetic construct
  source 1..75: mol_type = other DNA
tcgacgttaccacctgtatcggctgtaaagcctgtcaggtggcgtgttcagagtggaacgacattcgcgataccg

SEQ ID NO: 670316 - DNA, 75 bp, synthetic construct
  source 1..75: mol_type = other DNA
cctctggtggtgagtcatttaaactgactatcgaggctgccatcatggctactatccttaccctttctcaccctg

SEQ ID NO: 670317 - DNA, 75 bp, synthetic construct
  source 1..75: mol_type = other DNA
cctctgctggtgagttaattaacttatcacttgaggatgtcattatggctactaccctttctcaccctgacgtaa

SEQ ID NO: 670318 - DNA, 75 bp, synthetic construct
  source 1..75: mol_type = other DNA
tggggcacctggaccatcattaacacgccagtggatgcactgccggatctctccgatgtgcaggtgattattaaa

SEQ ID NO: 670319 - DNA, 75 bp, synthetic construct
  source 1..75: mol_type = other DNA
ggtgatgctgatgtatttacgtcacgccatagaggcagagccatccctggataatccgcaaacattcagcgagca

SEQ ID NO: 670320 - DNA, 75 bp, synthetic construct
  source 1..75: mol_type = other DNA
tggcggtatgatcaccgcaccgttgctgtcgctgtttattatcccggcggcgtataagttgatgtggctgcaccg

SEQ ID NO: 670321 - DNA, 75 bp, synthetic construct
  source 1..75: mol_type = other DNA
gcagagttgtaccagcttaataccactaccacagacaaaataattcctggtgatggtcgcactctcgttgttcac

SEQ ID NO: 670322 - DNA, 75 bp, synthetic construct
  source 1..75: mol_type = other DNA
gcttgaaaatttaagtctggcaatctgcactcctaccccctttacgctcaccaccgacgcggtgcaatggatcga

SEQ ID NO: 670323 - DNA, 75 bp, synthetic construct
  source 1..75: mol_type = other DNA
tgggcgctatatcaacgttgagattaaccgtgaaaaagccgcgcgttacggtatgacggtggcggatgtgcagtt

SEQ ID NO: 670324 - DNA, 75 bp, synthetic construct
  source 1..75: mol_type = other DNA
gcggacataagccgggtgtaagccaggctcagctaaaatcagaaatactgaaagctctagagaatgttccaaatg

SEQ ID NO: 670325 - DNA, 75 bp, synthetic construct
  source 1..75: mol_type = other DNA
atgtcacttgcaaccacagtgaaggagagcaaattacagagacgcatgtacacgcagaaagctctctggtatcgc

SEQ ID NO: 670326 - DNA, 75 bp, synthetic construct
  source 1..75: mol_type = other DNA
aggaaacccctcagcctcagcggatgttaaaaaacctggcgtttcgaaaagccgctctgcacagaatttggcaaa

SEQ ID NO: 670327 - DNA, 75 bp, synthetic construct
  source 1..75: mol_type = other DNA
aggtgtaaaagttagtggtaacaaaaatgttgtgattaatgctacagactccaccatcacagctcaaggtgaagg

SEQ ID NO: 670328 - DNA, 75 bp, synthetic construct
  source 1..75: mol_type = other DNA
cttctctctggtcactaccagcctatgccagccagacggatttatatccctaaaagcaacggcaaactgcgacca

SEQ ID NO: 670329 - DNA, 75 bp, synthetic construct
  source 1..75: mol_type = other DNA
gagagtgattttcatgcgctctcgtatggcttccggcctgaacgcagtgtccatcacgcgatccgcacggtaaaa

SEQ ID NO: 670330 - DNA, 75 bp, synthetic construct
  source 1..75: mol_type = other DNA
cagaagggagatcgtgaaggtgttcgcgtatttttaaatgcggcaaagactgaagtattaaatcagcgttattta

SEQ ID NO: 670331 - DNA, 75 bp, synthetic construct
  source 1..75: mol_type = other DNA
gggttttgacggtgatgcaaccgacaacatcacccttgctgactcaaatattattaatggcgggattgaaacaat

SEQ ID NO: 670332 - DNA, 75 bp, synthetic construct
  source 1..75: mol_type = other DNA
ttactcaataatcatccgcaggtgatggtgattgattgcagccacccgccgcgcgaggatgcgccgcgtaatcac

SEQ ID NO: 670333 - DNA, 75 bp, synthetic construct
  source 1..75: mol_type = other DNA
tgcgatttaaacaccgtgctggcactgaatgaggttatccgctcgccacgggtgattctgacgcatatcagccac

SEQ ID NO: 670334 - DNA, 75 bp, synthetic construct
  source 1..75: mol_type = other DNA
ctttcaaagtaaaggtggctgactatgagcaaatttttcaggtaagccgtaaccaggctatcaaggatgttaaag

SEQ ID NO: 670335 - DNA, 75 bp, synthetic construct
  source 1..75: mol_type = other DNA
atatctctggaaggggccaagggaaataatgtcacgcttaatggcacaaccataaatgctcaaggtaataagagt

SEQ ID NO: 670336 - DNA, 75 bp, synthetic construct
  source 1..75: mol_type = other DNA
ttgctcaaaaggttaatttgttgcagggttttgacggtgatgcaaccgacaacatcacccttgctgactcaaata

SEQ ID NO: 670337 - DNA, 75 bp, synthetic construct
  source 1..75: mol_type = other DNA
gattttcatacgctctcgtgtggcttccggcctgaacgcagcgtccatcacgcgatccgcacggtgaaattacag

SEQ ID NO: 670338 - DNA, 75 bp, synthetic construct
  source 1..75: mol_type = other DNA
aaaccaccgaaaccaccgaaaccaccgaaaccaccgaaaccaccgaaaccaccgaaaccaccgaaaccaccgaaa

SEQ ID NO: 670339 - DNA, 75 bp, synthetic construct
  source 1..75: mol_type = other DNA
aaaaggatggcggttctggttgcctttgtccttgcatgggaaacgctggcgctggatgatgcattggacgttctg

SEQ ID NO: 670340 - DNA, 75 bp, synthetic construct
  source 1..75: mol_type = other DNA
cgtggatctatgacgtcgtcaaggccatcacgatgttcattgttttcgtcaacattgttgttattccggcgctgg

SEQ ID NO: 670341 - DNA, 75 bp, synthetic construct
  source 1..75: mol_type = other DNA
caagcaacccgccggtaaagagttcgcctttgctggctcatcagtgaaagacaaaaaatacttcggtgatggtac

SEQ ID NO: 670342 - DNA, 75 bp, synthetic construct
  source 1..75: mol_type = other DNA
aactggcgcagtaagggtgtcgatgtggtggcctatgctaaccaggatttggtctattccgatctggctgcagga

SEQ ID NO: 670343 - DNA, 75 bp, synthetic construct
  source 1..75: mol_type = other DNA
gccaaccaggatttggtctattccgatctggctgcaggacgtctggatgctgcgttacaagatgaagttgctgcc

SEQ ID NO: 670344 - DNA, 75 bp, synthetic construct
  source 1..75: mol_type = other DNA
caaaattttttactcagtcagtcaaaatctttgacacgtataataacagtaataataagaaagaacttattaata

SEQ ID NO: 670345 - DNA, 75 bp, synthetic construct
  source 1..75: mol_type = other DNA
agacccaaaaagaaaactcacactgattcaaagaaagagaagattaaaccgaagatgtactatgcaggtggaggt

SEQ ID NO: 670346 - DNA, 75 bp, synthetic construct
  source 1..75: mol_type = other DNA
cacgcggaggtacctccttcgacattaattcgttttgccaatgcgtttggttttagcggattcaatgaaatgaaa

SEQ ID NO: 670347 - DNA, 75 bp, synthetic construct
  source 1..75: mol_type = other DNA
ttgaccacaactgtacctattcatccgttacctgaaattctgctgctaactcacggcggctgggggctgcagctc

SEQ ID NO: 670348 - DNA, 75 bp, synthetic construct
  source 1..75: mol_type = other DNA
tacttatccataagcgagaaaatagtgactcctacgccgttgcaatcacctgcggtagccagaactatcacgacg

SEQ ID NO: 670349 - DNA, 75 bp, synthetic construct
  source 1..75: mol_type = other DNA
tcattcagataaaaaacctggttaagaatagtgtcgacgatctcaaattagaaaatattagtgttgttatcaagt

SEQ ID NO: 670350 - DNA, 75 bp, synthetic construct
  source 1..75: mol_type = other DNA
gcaacgccgaacgagcggcaaaaatgcagtgggaacgcctgcaacgcggtgttgcgtcattctcgctacaactgg

SEQ ID NO: 670351 - DNA, 75 bp, synthetic construct
  source 1..75: mol_type = other DNA
cccgtgaacccgcgaagaaagaaagcactacagtgaagcgtaagcgcaggaccaagaagcagaagaaagagccgg

SEQ ID NO: 670352 - DNA, 75 bp, synthetic construct
  source 1..75: mol_type = other DNA
atcactactgtcctggataagcgcctgatgagtctgacgctgacggacaaccggggctttgaagcagaccagctt

SEQ ID NO: 670353 - DNA, 75 bp, synthetic construct
  source 1..75: mol_type = other DNA
aagacgcgtcgtgttaacctggcaattaccgccggtagcacgcccaaaggcatgtatgaatacctcaccaccctg

SEQ ID NO: 670354 - DNA, 75 bp, synthetic construct
  source 1..75: mol_type = other DNA
ccgtgaaaaatcgtggcataacaccaccatcgtggaagtggtgaaggaaatagccgcgcgtcacaagctgaagat

SEQ ID NO: 670355 - DNA, 75 bp, synthetic construct
  source 1..75: mol_type = other DNA
ctaccggttatcactatcacacgtaaggacggcgacagtcatcgcttcaccctggcagatcgcggagcctacacg

SEQ ID NO: 670356 - DNA, 75 bp, synthetic construct
  source 1..75: mol_type = other DNA
gatctggagctggacgacgccgatggaaaaatcgtgctgccgagccgtggtgcggtcattacgctggcgctgggc

SEQ ID NO: 670357 - DNA, 75 bp, synthetic construct
  source 1..75: mol_type = other DNA
tagctgcgcggcacaaactgaagatggcactgggtaaagacctgtcagataaacccgtggaacatatagaccaga

SEQ ID NO: 670358 - DNA, 75 bp, synthetic construct
  source 1..75: mol_type = other DNA
cccgcgaacccgcgaagaaagagagcaccacggtgaagcgtaagcgcaggaccgcaaagcagaagaaagagccgg

SEQ ID NO: 670359 - DNA, 75 bp, synthetic construct
  source 1..75: mol_type = other DNA
cagcatcagtattgagggcagggatatcaccactgtgctagataaccgcctgatgagtctgactctgacggacaa

SEQ ID NO: 670360 - DNA, 75 bp, synthetic construct
  source 1..75: mol_type = other DNA
gggtaaaagtgctagcggtaaagcactgccggtgatcactatcacacgtaaggacggcgacagtcaccgctttac

SEQ ID NO: 670361 - DNA, 75 bp, synthetic construct
  source 1..75: mol_type = other DNA
tagctgcgcggcacaaactgaagatggcactgggtaaagacctgtcggataagcccgtggaacatatagaccaga

SEQ ID NO: 670362 - DNA, 75 bp, synthetic construct
  source 1..75: mol_type = other DNA
ttcgacttggttcacagcaatattatggagtgaacaactggcaaacatggaatttccagtgcccgtcaggtcatg

SEQ ID NO: 670363 - DNA, 75 bp, synthetic construct
  source 1..75: mol_type = other DNA
ctgggaagcactgggcagggatgatgaagatgaaactgaagataccggaacagacgatttagacctttcattact

SEQ ID NO: 670364 - DNA, 75 bp, synthetic construct
  source 1..75: mol_type = other DNA
aatctggtatcagtgtactttatcgggctgttctacccggatgcgatccgtaacaagacaaaaatccactttgat

SEQ ID NO: 670365 - DNA, 75 bp, synthetic construct
  source 1..75: mol_type = other DNA
tttttactacgatgtatttgccagtctgtcagttaacgggcatcagattaaggcgaaatatcagccaacagatga

SEQ ID NO: 670366 - DNA, 75 bp, synthetic construct
  source 1..75: mol_type = other DNA
ctgaaagattttccgggctacggtaaaggccttgcgccgacgacccagttcgatgtgttgatccacattctttct

SEQ ID NO: 670367 - DNA, 75 bp, synthetic construct
  source 1..75: mol_type = other DNA
taagggaattagcaacactcattggaacaacaccaacctatcttttgggagaggatacagaagaaagtggacagg

SEQ ID NO: 670368 - DNA, 75 bp, synthetic construct
  source 1..75: mol_type = other DNA
tggtgcattgggtatcggaacatccagtgctcttggcggtaactcgattgttttgggtgataatgacacgggctt

SEQ ID NO: 670369 - DNA, 75 bp, synthetic construct
  source 1..75: mol_type = other DNA
ccaacttatacagcgaataaaccaacaggcctgacagatggaactgtatatgtaatttacagttcgcacattaaa

SEQ ID NO: 670370 - DNA, 75 bp, synthetic construct
  source 1..75: mol_type = other DNA
gatcgcggttcatatgcggctggttttttctcaatatattctactgctgagcgagctatacactcgattatttca

SEQ ID NO: 670371 - DNA, 75 bp, synthetic construct
  source 1..75: mol_type = other DNA
gtctcttctatcctgacgccatacgcaacaaaaccaagacgtacttcagtattgaagatcatgtgttcactgcaa

SEQ ID NO: 670372 - DNA, 75 bp, synthetic construct
  source 1..75: mol_type = other DNA
gcggatattcctggaaaagataccttcactaaaaatattggtgcatgtcgcgcttttcacagttctattagtaca

SEQ ID NO: 670373 - DNA, 75 bp, synthetic construct
  source 1..75: mol_type = other DNA
ctgccgataatattggaggggtatattacaggccggttcagaaacagattaatggaacatggtataacgtggcac

SEQ ID NO: 670374 - DNA, 75 bp, synthetic construct
  source 1..75: mol_type = other DNA
tagccgcgcgtcacaagctgaagatggcactgggtaaagacctgtcagataaacccgtggaacatatagaccaga

SEQ ID NO: 670375 - DNA, 75 bp, synthetic construct
  source 1..75: mol_type = other DNA
cggtagttacgtgtttgtacagcgttgggaacataacctgaagcagcttaaccgtatgagcgttcatgatcagga

SEQ ID NO: 670376 - DNA, 75 bp, synthetic construct
  source 1..75: mol_type = other DNA
ccgctggctactcctcattctatttcgatgaccagcaggcgataaaaaacggagcgggtcacgacggcttttttt

SEQ ID NO: 670377 - DNA, 75 bp, synthetic construct
  source 1..75: mol_type = other DNA
caatgcgagattactcatgaggcctggcagagtagggctgttatccgctatgacatggcggtgccgcgtaatctg

SEQ ID NO: 670378 - DNA, 75 bp, synthetic construct
  source 1..75: mol_type = other DNA
agactatcacttatttaagtgatattggttgtctggagattcagggggccagtctactgccgctgggctacgcca

SEQ ID NO: 670379 - DNA, 75 bp, synthetic construct
  source 1..75: mol_type = other DNA
gtgaagacctgcccgacgggcgcgattcacttcggtacgaaagagtcgatgaaaacgctggcgagcgagcgtgtg

SEQ ID NO: 670380 - DNA, 75 bp, synthetic construct
  source 1..75: mol_type = other DNA
gcggagctgaaaacccgcggttacgacaatgcgggtctgtacgatccggcaggcgtcggtggtacacacgttatg

SEQ ID NO: 670381 - DNA, 75 bp, synthetic construct
  source 1..75: mol_type = other DNA
atgcactgttccgatccaggctgcctgaaagcgtgcccggcggaaggggcaattattcagtatgccaacggtatc

SEQ ID NO: 670382 - DNA, 75 bp, synthetic construct
  source 1..75: mol_type = other DNA
gtcagcgtagacagcacctatcactcctcgctgtcagtcagccattgtcagctagaaaatttaagcctggcgatc

SEQ ID NO: 670383 - DNA, 75 bp, synthetic construct
  source 1..75: mol_type = other DNA
tttcgaccttaagcgcagctccactgccaccgggtttacgcgagcaagcaccgcaaggtccacgacgcgaacgct

SEQ ID NO: 670384 - DNA, 75 bp, synthetic construct
  source 1..75: mol_type = other DNA
ttcttaaaccagctggccatcttcaaccgtcgtcgcttcctcaccgctaaccagtcgctgcgaagccgcacgacg

SEQ ID NO: 670385 - DNA, 75 bp, synthetic construct
  source 1..75: mol_type = other DNA
tggtaaaaccagggatgggctttgacgaaggcctcgatattgtcttcaacgaaatgaatcgtactatcgcgctgt

SEQ ID NO: 670386 - DNA, 75 bp, synthetic construct
  source 1..75: mol_type = other DNA
agactaatgagagtgacggcagttttttgatgcggctggcgcgccagtacggtgccattgcatcggtgaaaaatg

SEQ ID NO: 670387 - DNA, 75 bp, synthetic construct
  source 1..75: mol_type = other DNA
gaaaaatggcaatctgttattcatccgacagggacagggtaaaagtgccagcggtaaaccactgccggtgatcac

SEQ ID NO: 670388 - DNA, 75 bp, synthetic construct
  source 1..75: mol_type = other DNA
ccggtcacaacctgtagctgctgcgacacctgaatcactcaatatcagctgtgaagtgacgttccggcacggatc

SEQ ID NO: 670389 - DNA, 75 bp, synthetic construct
  source 1..75: mol_type = other DNA
acaaaggcaataaaactccggcattcatcatcagtattgaaggcaaggatatcaccactgtgctggacaaccgcc

SEQ ID NO: 670390 - DNA, 75 bp, synthetic construct
  source 1..75: mol_type = other DNA
atcaccactgtgctggacaaccgcctgatggggctgacgctgacggataaccggggatttgaagcggaccagctt

SEQ ID NO: 670391 - DNA, 75 bp, synthetic construct
  source 1..75: mol_type = other DNA
accgtcagcccggataatggttttacgaccagtctggagcttgaagtgaggattgatgatttcgaaatggcatga

SEQ ID NO: 670392 - DNA, 75 bp, synthetic construct
  source 1..75: mol_type = other DNA
gatgaaactggcgagacagtacggggcgattgcttccgttaaggacgggaatctgctgtttatccggcagggaca

SEQ ID NO: 670393 - DNA, 75 bp, synthetic construct
  source 1..75: mol_type = other DNA
acaatgctgagcgcgcagcaaaaatgcagtgggaacgtctgcagcgtggggttgctacattttccctgcagctcg

SEQ ID NO: 670394 - DNA, 75 bp, synthetic construct
  source 1..75: mol_type = other DNA
gacattgagctcgatgacaccgatgggaaagtcgagttacccctgcgcggggcagtgctgacgttgtggcttggc

SEQ ID NO: 670395 - DNA, 75 bp, synthetic construct
  source 1..75: mol_type = other DNA
aagatgcgtcgcgttaacctggcaattaccgccggtagcacgcccaaaggcatgtacgaatatctcatcactctg

SEQ ID NO: 670396 - DNA, 75 bp, synthetic construct
  source 1..75: mol_type = other DNA
cccgcgaacccgcgaagaaagaaagcactacggtaaagcgtaagcgcagaacgaagaatcagaagaaagagccgg

SEQ ID NO: 670397 - DNA, 75 bp, synthetic construct
  source 1..75: mol_type = other DNA
ctgccggtgatcactatcacacgtaaggacggcgacagtcaccgctttaccctggcagatcgcggagcctatacg

SEQ ID NO: 670398 - DNA, 75 bp, synthetic construct
  source 1..75: mol_type = other DNA
ctcaacgagtccgccacgctgttccgccggaagtattacattaacggcagtcatgcagcttcatcatgtacatga

SEQ ID NO: 670399 - DNA, 75 bp, synthetic construct
  source 1..75: mol_type = other DNA
attgcaaaaaaggatgatggaactaaataaatggttaggccatgaaattttgaaatttgagacatatatacttag

SEQ ID NO: 670400 - DNA, 75 bp, synthetic construct
  source 1..75: mol_type = other DNA
ttacgaaaacggcgcacatgccggatacatcatgtacgtcaccgatgccgtgcaggatcgcaacgatatcgaaat

SEQ ID NO: 670401 - DNA, 75 bp, synthetic construct
  source 1..75: mol_type = other DNA
gtaacgcttacctggagaaacgcacgaaccggttcggtgaagttatcgcccttgagcctgctctggcaaaataca

SEQ ID NO: 670402 - DNA, 75 bp, synthetic construct
  source 1..75: mol_type = other DNA
ctactggtttgtgcaatacggcatgactacgcagccgtatcagttcacgaaaggcagcatctttcatctgatgga

SEQ ID NO: 670403 - DNA, 75 bp, synthetic construct
  source 1..75: mol_type = other DNA
tcgtgatatcgcccatgccaaactgaaagagcgcatggacaacggcgaagggctaccgcaatacatcaaagatca

SEQ ID NO: 670404 - DNA, 75 bp, synthetic construct
  source 1..75: mol_type = other DNA
gcatcgcgccagtgcaggaaaccgtacagcagaagaacacaactcacgtcgaagcgttcagctttggcgacccca

SEQ ID NO: 670405 - DNA, 75 bp, synthetic construct
  source 1..75: mol_type = other DNA
atgaccgccagcgccccgaaaatggaagcattcacctttggtgagccggtgccggtactcgaccgccgtgacatt

SEQ ID NO: 670406 - DNA, 75 bp, synthetic construct
  source 1..75: mol_type = other DNA
ccgcaacgatatcgaaatgcttcgcgaaaacatggtgaagtcgaaaggccgcaataactttaaaaatctgtttct

SEQ ID NO: 670407 - DNA, 75 bp, synthetic construct
  source 1..75: mol_type = other DNA
ggacaggatccgcgagataaacggctggctcggtcaggaggtcatccgctttaaaaactactcactggaccctga

SEQ ID NO: 670408 - DNA, 75 bp, synthetic construct
  source 1..75: mol_type = other DNA
cccgctattaagtcagcaggcattcagccgtttcgtgcaggactatctggtgttcggtaatgcctacctggagaa

SEQ ID NO: 670409 - DNA, 75 bp, synthetic construct
  source 1..75: mol_type = other DNA
ggctttggtgatgtggaaaaggccagccgcgtctttgtccgcaacgagctgatgccgctgcagaaaaggctcagt

SEQ ID NO: 670410 - DNA, 75 bp, synthetic construct
  source 1..75: mol_type = other DNA
ttgaagggcaggagattttgaaagttgcaccagaagcgttaactcttctggcgcgtcaggcgtttcatgatgcgt

SEQ ID NO: 670411 - DNA, 75 bp, synthetic construct
  source 1..75: mol_type = other DNA
gttttgctttgctggcaaccgtggttgtggctgaacggtgaatctgttagcggtattggtctggcgctggtggtg

SEQ ID NO: 670412 - DNA, 75 bp, synthetic construct
  source 1..75: mol_type = other DNA
aatatcttgaaagccagggtattgacctgccagacgttatcttatctttgctggtggagcaggcaaatagcgtta

SEQ ID NO: 670413 - DNA, 75 bp, synthetic construct
  source 1..75: mol_type = other DNA
ctatgccccgcaggggaaagccgacggcattaaaattatcccgctcagtgaagtggcgacgaaggacgatttttt

SEQ ID NO: 670414 - DNA, 75 bp, synthetic construct
  source 1..75: mol_type = other DNA
agggtggttatgacatcactttccctgacgatctctgccgaaagcggcagaagcttttccgcttcctggataacc

SEQ ID NO: 670415 - DNA, 75 bp, synthetic construct
  source 1..75: mol_type = other DNA
aagctgttccgctttctcgataacaaattcgattctgaaaaataccgaaataacgtgcgtgaactgaccccggca

SEQ ID NO: 670416 - DNA, 75 bp, synthetic construct
  source 1..75: mol_type = other DNA
agataatcaggatgtagttgccgcactcattgtgaatgagtatcgagcacagggcggcggcaccatcgattttcc

SEQ ID NO: 670417 - DNA, 75 bp, synthetic construct
  source 1..75: mol_type = other DNA
ctccgcaacgcgatgaaaagtgccaaaggtccaggcaacttccgcaatttgtttatgtactcgcctaacggcaaa

SEQ ID NO: 670418 - DNA, 75 bp, synthetic construct
  source 1..75: mol_type = other DNA
tcatcatgtacatgaccgacgccgcgcaaaaccaggaagatgtaaacaacctccgcaacgcgatgaaaagtgcca

SEQ ID NO: 670419 - DNA, 75 bp, synthetic construct
  source 1..75: mol_type = other DNA
cgcagccagcggtgaaaacaatgaccgccagcgccccgaaaatagaggcattcacctttggtgagccggtgccgg

SEQ ID NO: 670420 - DNA, 75 bp, synthetic construct
  source 1..75: mol_type = other DNA
tgtacgtcaccgacgcattgcaggatcgcgattacattgactcaatccgcgaaaacatggctaattcgaaaggcc

SEQ ID NO: 670421 - DNA, 75 bp, synthetic construct
  source 1..75: mol_type = other DNA
ggacaccccagcataaagctgccatcaggcgtattgtgaattcgatgcctgaaagcaatggcgggcgtgaagcct

SEQ ID NO: 670422 - DNA, 75 bp, synthetic construct
  source 1..75: mol_type = other DNA
agcgcacttaattcagcctggctgaatgaatccgccaccctgtttcgtcgcaagtattatcagaatggcgcccac

SEQ ID NO: 670423 - DNA, 75 bp, synthetic construct
  source 1..75: mol_type = other DNA
atgagcaagaaaaaagggaaaacaccgcgactagcggcaaaaaaaatgaccgccagcgccccgaaaatggaggca

SEQ ID NO: 670424 - DNA, 75 bp, synthetic construct
  source 1..75: mol_type = other DNA
acgtggcgaacgttacacgacggcgaccattcgcgaacgcctgacaatgcgcgattttatggacaccttacgcgc

SEQ ID NO: 670425 - DNA, 75 bp, synthetic construct
  source 1..75: mol_type = other DNA
gtgaacgtcaccgtggcctatcaaacctcagccgaaccggcgaaagtggctcaggccgacaacacctttgctaaa

SEQ ID NO: 670426 - DNA, 75 bp, synthetic construct
  source 1..75: mol_type = other DNA
cgatgagccccaatacggtgctatttttaaacgcgcgttaattttgagcctgactaatccgaaagccattttgtt

SEQ ID NO: 670427 - DNA, 75 bp, synthetic construct
  source 1..75: mol_type = other DNA
gtgattgatgcgattggtgagggaccgatagaaggcccggtgaaggggctgcagagtatcctggtgaacaaaacc

SEQ ID NO: 670428 - DNA, 75 bp, synthetic construct
  source 1..75: mol_type = other DNA
gcaaccgtggactggcgtaagtttgacagtggagccagcatcgtgcgggcgctggcttcgggcgacgtgcaaatc

SEQ ID NO: 670429 - DNA, 75 bp, synthetic construct
  source 1..75: mol_type = other DNA
cgtgtcctaatgtaattaaagatattttgtaccgcgcggcggaacgtatgcaaatgcccgtggtgctggtggcga

SEQ ID NO: 670430 - DNA, 75 bp, synthetic construct
  source 1..75: mol_type = other DNA
gcgtccgcaagctggataatcacaccgttgagttccgtctgtcccagcctgacgcctcctttttatggcacctgg

SEQ ID NO: 670431 - DNA, 75 bp, synthetic construct
  source 1..75: mol_type = other DNA
ttacgatatcaaaggtctggtacttagcccgttcggtaacgcctccttcgcaggggtatatcgagagaaacagaa

SEQ ID NO: 670432 - DNA, 75 bp, synthetic construct
  source 1..75: mol_type = other DNA
tgaataacccggcagtacgccacgcgctggcattgtcgatcaataatcaacgtttgatgcaatctatctattacg

SEQ ID NO: 670433 - DNA, 75 bp, synthetic construct
  source 1..75: mol_type = other DNA
cgatgttaatgcgccacatacggggatttcattctttattctggcgacaacgctggaactggtaagcttctgtta

SEQ ID NO: 670434 - DNA, 75 bp, synthetic construct
  source 1..75: mol_type = other DNA
taaaattctttacgcaactctgaagggtaaaaatagcgaggccaaatcagatgaacctcaatatggcgctatttt

SEQ ID NO: 670435 - DNA, 75 bp, synthetic construct
  source 1..75: mol_type = other DNA
cgtaaggcgctctcctcgcagcagctggcggcgcgtattgaagcctatgacgaagcgcaaagtattctggcgcag

SEQ ID NO: 670436 - DNA, 75 bp, synthetic construct
  source 1..75: mol_type = other DNA
acaaggcgatcgccgcgattcgcgccaacggaacctatgatcgtttagcgaaaaaatacttcaatttcaatatct

SEQ ID NO: 670437 - DNA, 75 bp, synthetic construct
  source 1..75: mol_type = other DNA
agtggaagatttcccggcgtttattcttgtggatgataaaggaaatgacttcttccagcagatacagctcacgca

SEQ ID NO: 670438 - DNA, 75 bp, synthetic construct
  source 1..75: mol_type = other DNA
tatattaatggcagccatgcaggattcataatgtacatgaccgatgccgctcagaaccaggaggatgtgaacaac

SEQ ID NO: 670439 - DNA, 75 bp, synthetic construct
  source 1..75: mol_type = other DNA
cagtatcccgtttctacgcgcttgtcgctgaatggcacgattatcgttggtcgtgatattgctcacgccaaactg

SEQ ID NO: 670440 - DNA, 75 bp, synthetic construct
  source 1..75: mol_type = other DNA
gccggatacatcatgtacgtcaccgatgccgtgcaggatcgcaacgatatcgaaatgcttcgcgaaaacatggtt

SEQ ID NO: 670441 - DNA, 75 bp, synthetic construct
  source 1..75: mol_type = other DNA
cgcgacctgcggcaaaaacaatcaccgccagcgccccgaaaatggaagcattcacctttggtgagccggtgccgg

SEQ ID NO: 670442 - DNA, 75 bp, synthetic construct
  source 1..75: mol_type = other DNA
aaggtccaggcaatttccgcaacctgtttatgtactcccccaatggcaaaaaggatggtattcagatcatcccac

SEQ ID NO: 670443 - DNA, 75 bp, synthetic construct
  source 1..75: mol_type = other DNA
tacattaacggcagccatgcgggctttatcatgtacatgaccgatgccgcgcaaaaccaggaggatgtgaacaac

SEQ ID NO: 670444 - DNA, 75 bp, synthetic construct
  source 1..75: mol_type = other DNA
atgaaagaacatatcgcgccagacgaaaccgtaactgcagaagaaactaaaaaatccgttgcggaggctttcagc

SEQ ID NO: 670445 - DNA, 75 bp, synthetic construct
  source 1..75: mol_type = other DNA
atgagcaagaaaaaagggaaaacacagcaacctgcggcaaaaaaaatgaccgccagcgccccgaaaatggaagca

SEQ ID NO: 670446 - DNA, 75 bp, synthetic construct
  source 1..75: mol_type = other DNA
ggagaacgtcgggtcactgggcgatattgagaaagtggcaaaggtctttgtccgcaatgagcttatcccgttaca

SEQ ID NO: 670447 - DNA, 75 bp, synthetic construct
  source 1..75: mol_type = other DNA
atgagcaagaaaaaagggaaaacaccgcaacctgcggcaaaaacaatgaccgccagcgccccgaaaatggaagca

SEQ ID NO: 670448 - DNA, 75 bp, synthetic construct
  source 1..75: mol_type = other DNA
cgccagcgccccgaaaatggaagcattcacctttggtgagccggtgccggtactcgaccgccgtgacattctgga

SEQ ID NO: 670449 - DNA, 75 bp, synthetic construct
  source 1..75: mol_type = other DNA
aggttgatggctgcgggtaaagctcagggtttgttttttggcctgccaacaatggcaacggccaatgccatgtac

SEQ ID NO: 670450 - DNA, 75 bp, synthetic construct
  source 1..75: mol_type = other DNA
gcagtgccatgcgtaacagtgcatatgtctacggggaattgagggatcccgcgttcgccagacctatgcattact

SEQ ID NO: 670451 - DNA, 75 bp, synthetic construct
  source 1..75: mol_type = other DNA
gtctacggtgaggacgtggtaatgccggaaggatttgcccgcagcgagcaggagcaagtgggcaaatattactgc

SEQ ID NO: 670452 - DNA, 75 bp, synthetic construct
  source 1..75: mol_type = other DNA
ttccagcctttcactttttcatagccgctttgcttttagcgatcgccagcgaattgaaacggaaacgctggcacg

SEQ ID NO: 670453 - DNA, 75 bp, synthetic construct
  source 1..75: mol_type = other DNA
cgccaatatcaacgattacctcccggaaaaactgtcgacacgtctggctgaggagtctgtttccctgtggctggc

SEQ ID NO: 670454 - DNA, 75 bp, synthetic construct
  source 1..75: mol_type = other DNA
cctccaaaagcagaaaccgcacctttcaccggaattaatacactgtttccttttattgagaatccgacaccgtta

SEQ ID NO: 670455 - DNA, 75 bp, synthetic construct
  source 1..75: mol_type = other DNA
accgacataacgccctgaaagcggtcttcacacaattaatggataacgccacgctgacaccactgtttaactatc

SEQ ID NO: 670456 - DNA, 75 bp, synthetic construct
  source 1..75: mol_type = other DNA
atatgggaaccagttgtcggcatcccgtgcaaatcaccattggcaaaccggaggagctgcaacgggtcagccagg

SEQ ID NO: 670457 - DNA, 75 bp, synthetic construct
  source 1..75: mol_type = other DNA
aaacccgacgtggcgagaaagagggtggtgacgactatcaccttctttgctggcattcgctggatgtagccgcga

SEQ ID NO: 670458 - DNA, 75 bp, synthetic construct
  source 1..75: mol_type = other DNA
ctaccgggcatcatggtcgaccacctgaccgtattgatgagctggataattttctgcctgaagacaaagctgccg

SEQ ID NO: 670459 - DNA, 75 bp, synthetic construct
  source 1..75: mol_type = other DNA
ttgctatttaacattacgtaaaagcgccagacttactctctggcaggcgcgaaaagtgatcgccatcattcatca

SEQ ID NO: 670460 - DNA, 75 bp, synthetic construct
  source 1..75: mol_type = other DNA
atacgcacatctacaatcgacactggatgccgtgcaaataatgcctgatgaagaaaaccgatttaatgccctgaa

SEQ ID NO: 670461 - DNA, 75 bp, synthetic construct
  source 1..75: mol_type = other DNA
atgtacgattttaatctggtattgctgctgcttcagcagatgtgcgtttttttagtcattgcgtggttaatgagt

SEQ ID NO: 670462 - DNA, 75 bp, synthetic construct
  source 1..75: mol_type = other DNA
tttgctgaactgctggcgcgggtgcgcactctcctgcggcgcggggcggcggtgattatcgaaagtcagtttcag

SEQ ID NO: 670463 - DNA, 75 bp, synthetic construct
  source 1..75: mol_type = other DNA
cgctgttgttaacggtcctgcttcgttttcgcttcataaataacagtctctttttcagagttctgagaagaccat

SEQ ID NO: 670464 - DNA, 75 bp, synthetic construct
  source 1..75: mol_type = other DNA
cccccaacctcgaaatattcgaatcgatttaccgggaaggaatgcagcctcatgaatggctcgatacctacctgg

SEQ ID NO: 670465 - DNA, 75 bp, synthetic construct
  source 1..75: mol_type = other DNA
agtatcgccgccagccatgcagcggcgtagtgaagtttaacgacgcgatcaccctgatcgacgccgggctgcacg

SEQ ID NO: 670466 - DNA, 75 bp, synthetic construct
  source 1..75: mol_type = other DNA
gcaccggcggcgcacagggcgttccggcatggggctgcgagtgcgtagcctgcgccagagcgcggcgctcaccgc

SEQ ID NO: 670467 - DNA, 75 bp, synthetic construct
  source 1..75: mol_type = other DNA
aaaatcgacaatgatttcgagccaaagttaattcagaccgtacgcggcgtaggttacatgcttgaggtgccggat

SEQ ID NO: 670468 - DNA, 75 bp, synthetic construct
  source 1..75: mol_type = other DNA
tgcagaggatgcatatttggcagtagttaaggattttgagttatcagaacgtacaaagatattagaatcaattta

SEQ ID NO: 670469 - DNA, 75 bp, synthetic construct
  source 1..75: mol_type = other DNA
atcaaattgtatgaagccaaaaaccgtttattcagttcaatcaaccgcacgttgggcgaggggattgcgcaactg

SEQ ID NO: 670470 - DNA, 75 bp, synthetic construct
  source 1..75: mol_type = other DNA
tgccgtcacgttcgtcgctgaaatggtgcaaatgttgatcatcctggcgatcgcccgaccttatgaagatgcggt

SEQ ID NO: 670471 - DNA, 75 bp, synthetic construct
  source 1..75: mol_type = other DNA
tacaccaaagtcatgagcggcgatgcccccaacctcgaaatattcgaatcgatttaccgggaaggaatgcagcct

SEQ ID NO: 670472 - DNA, 75 bp, synthetic construct
  source 1..75: mol_type = other DNA
cgtcggcagtaaattactggcatgggcagaagaagaagcccgccaggccggggccgaaatgaccgagctttccac

SEQ ID NO: 670473 - DNA, 75 bp, synthetic construct
  source 1..75: mol_type = other DNA
agcgtttacaggattgttatgctgcactggggatagtgcacactcactatcgccacctgccggatgagtttgacg

SEQ ID NO: 670474 - DNA, 75 bp, synthetic construct
  source 1..75: mol_type = other DNA
ggctatgccgccaatatcaacgattaccttccggaaaaactgtcgacacgtctggctgaggagtctgtttccttg

SEQ ID NO: 670475 - DNA, 75 bp, synthetic construct
  source 1..75: mol_type = other DNA
aagccatttgcttttgctgaactactggcgcgggtgcgcacgttactgcggcgcggggcgacagtgattatcgaa

SEQ ID NO: 670476 - DNA, 75 bp, synthetic construct
  source 1..75: mol_type = other DNA
gctgggatatcgtgcgcatgttgcgttctgccaataaagggatgccgattctgttgctcagcgcgctgggtacga

SEQ ID NO: 670477 - DNA, 75 bp, synthetic construct
  source 1..75: mol_type = other DNA
aaaccctttgcgtttgccgaactgctcgcccgggtgaggacccttctgaggcggggaaacacgatgatcacggaa

SEQ ID NO: 670478 - DNA, 75 bp, synthetic construct
  source 1..75: mol_type = other DNA
tgaaggcgttaaagctgaagtgtatggccgcccgaaacacatctacagcatctggcgcaaaatgcagaaaaagaa

SEQ ID NO: 670479 - DNA, 75 bp, synthetic construct
  source 1..75: mol_type = other DNA
aaggcgcggctgctggcggcgcacgttcgggacatgaagaccggattgcctggctgcgtaaactgattgcgtggc

SEQ ID NO: 670480 - DNA, 75 bp, synthetic construct
  source 1..75: mol_type = other DNA
cgaaaaacatcttaaccgtttcattgagggtaaatgtgtcagtgatatcaaactgatccacgatcaaatgctcaa

SEQ ID NO: 670481 - DNA, 75 bp, synthetic construct
  source 1..75: mol_type = other DNA
gccaatttttagccatagcgccatggtgctgcaagcggctattcacgggcagggagtggcgctggcaaataacgt

SEQ ID NO: 670482 - DNA, 75 bp, synthetic construct
  source 1..75: mol_type = other DNA
atgttctggtcagtaaaaacgctttttatctggtttgtcatgacaaccaggcagaactgggtaaaatagccgcct

SEQ ID NO: 670483 - DNA, 75 bp, synthetic construct
  source 1..75: mol_type = other DNA
gtccgtggcggaaaattacccgcaggctggtatcaggtcccagtgacaaaggaaaccctccaggccccggcgggg

SEQ ID NO: 670484 - DNA, 75 bp, synthetic construct
  source 1..75: mol_type = other DNA
aaaatagacaacgattacgagacaaaactgatccagacagtgcggggcgtgggctacatgctggagatcccggat

SEQ ID NO: 670485 - DNA, 75 bp, synthetic construct
  source 1..75: mol_type = other DNA
tccggggctgatcttccatccgcctctgctttatatggggtacgtcggcttctcggtggcgtttgcttttgccat

SEQ ID NO: 670486 - DNA, 75 bp, synthetic construct
  source 1..75: mol_type = other DNA
cgaattcaggcggtcgatcgccaggaagataaactggcggatgatgttgatgtggctatattttatggtcgcggc

SEQ ID NO: 670487 - DNA, 75 bp, synthetic construct
  source 1..75: mol_type = other DNA
actggggatagtgcacactcactatcgccacctgccggatgagttcgacgattacgtcgctaacccgaaaccaaa

SEQ ID NO: 670488 - DNA, 75 bp, synthetic construct
  source 1..75: mol_type = other DNA
gatggcggtgatgccgttcaaacataataatctgcggcttctggggttgagtaaaaaaatcctgctggctgatga

SEQ ID NO: 670489 - DNA, 75 bp, synthetic construct
  source 1..75: mol_type = other DNA
gaaaagatctctcattcaacgctgggctactggttgtggaatcattatttaattgaatgtgaagagttgcttcct

SEQ ID NO: 670490 - DNA, 75 bp, synthetic construct
  source 1..75: mol_type = other DNA
gtcgccctggctgggtggcggcaaaatgattcacgaagtgagttttgacggcttcacgactcaatctgcgccgtg

SEQ ID NO: 670491 - DNA, 75 bp, synthetic construct
  source 1..75: mol_type = other DNA
cccgcattctgggatgatgatgagggcattgaacttataaaacacctttcctggtatatctctgcaaccgtcgta

SEQ ID NO: 670492 - DNA, 75 bp, synthetic construct
  source 1..75: mol_type = other DNA
cagcctggtgctggcacacagtgcccgcacattaatggaccgctttaatgaatcactctggtccggtgatttagt

SEQ ID NO: 670493 - DNA, 75 bp, synthetic construct
  source 1..75: mol_type = other DNA
agagtgcgtcgaagctggtggaaaaaacatcgggatgagttttctttactggaaggggatgcgttcaggcagtgg

SEQ ID NO: 670494 - DNA, 75 bp, synthetic construct
  source 1..75: mol_type = other DNA
ctgttatacgaaatgccttgttacgtttggcaaatacgccaaaaggtagcacagcatatgacagagcgatcagta

SEQ ID NO: 670495 - DNA, 75 bp, synthetic construct
  source 1..75: mol_type = other DNA
tgataaaaaatattaacggtggcggaagctggaatgttacacccatgccaaatacggatgtatgcgtgcaggttc

SEQ ID NO: 670496 - DNA, 75 bp, synthetic construct
  source 1..75: mol_type = other DNA
tcctataaagattttatcgattctaaagtattagaaaactatgcacctctaaatgattttgttgaagcaattcta

SEQ ID NO: 670497 - DNA, 75 bp, synthetic construct
  source 1..75: mol_type = other DNA
tttttcaggtcacaaactttacggcccgacgggtatcggcgtgctgtatggcaaaccagaactgctggaagcaat

SEQ ID NO: 670498 - DNA, 75 bp, synthetic construct
  source 1..75: mol_type = other DNA
ggtgatggttgatggtgctcagggggcggtgcatttccctgcagatgttcagcaactggatatcgatttctacgc

SEQ ID NO: 670499 - DNA, 75 bp, synthetic construct
  source 1..75: mol_type = other DNA
tgcgcgatgctataacaggcgaaagccgaatgactccagagatggagagactgcaaaatgtcacctctgccccag

SEQ ID NO: 670500 - DNA, 75 bp, synthetic construct
  source 1..75: mol_type = other DNA
agcgtccagaaacctctcacctgacccgcgttgatctgaaagaagatggtaaagggctgaagattgttcgtcaga

SEQ ID NO: 670501 - DNA, 75 bp, synthetic construct
  source 1..75: mol_type = other DNA
gtaaataatggctctcaggtaaatgttactgattcctctctggtatcagataccattggtttaaccaacggttct

SEQ ID NO: 670502 - DNA, 75 bp, synthetic construct
  source 1..75: mol_type = other DNA
tcattcactgacaatgctggctcaaattattccatgaaaaacaatgtaaactttgaccattcaactctgttgggt

SEQ ID NO: 670503 - DNA, 75 bp, synthetic construct
  source 1..75: mol_type = other DNA
agtattaagactatcacttatttaagtgatactggttgtctggagattcagggggccagtctaaacggtaccatt

SEQ ID NO: 670504 - DNA, 75 bp, synthetic construct
  source 1..75: mol_type = other DNA
caaaagcaggtcagtgcctttaatgcgctgccgccaggtagcccgctgagggagcaaagggcaaaaagcacctgg

SEQ ID NO: 670505 - DNA, 75 bp, synthetic construct
  source 1..75: mol_type = other DNA
tatatctggtcattgcatccgcgagcgggtaagcctgaaggacgtgttgtgcaggctgctggctgccaactgccc

SEQ ID NO: 670506 - DNA, 75 bp, synthetic construct
  source 1..75: mol_type = other DNA
tcacagactccgctggaagaaagtgatggcttcttcggtaaatctgctgaaccaagtgattacgctggtaatggt

SEQ ID NO: 670507 - DNA, 75 bp, synthetic construct
  source 1..75: mol_type = other DNA
acagagcaactgacgctgatggctgatgtgcgccagtcccccctggttgcactgatgaatacgctggcggttcag

SEQ ID NO: 670508 - DNA, 75 bp, synthetic construct
  source 1..75: mol_type = other DNA
tgcgggctggtatgaatcagaatacagacctgctcgcggtcgtaatgcccctttatgcacaaaatgcacatcttt

SEQ ID NO: 670509 - DNA, 75 bp, synthetic construct
  source 1..75: mol_type = other DNA
ccgaaatggtctttagctggcccggtctggggcgctggttaattaacgctattcgccagcaggattacgcggcaa

SEQ ID NO: 670510 - DNA, 75 bp, synthetic construct
  source 1..75: mol_type = other DNA
gtctggtgatgactaccagctgagcaacgacatgaaagttgacggtcagtcttacgacagcattgtagtggtcaa

SEQ ID NO: 670511 - DNA, 75 bp, synthetic construct
  source 1..75: mol_type = other DNA
agacaccgttggtactcgtctgaccaactctcgtcatggcctggctgataacggcggcgcatgggtaagctactt

SEQ ID NO: 670512 - DNA, 75 bp, synthetic construct
  source 1..75: mol_type = other DNA
cagctctgttgacaacgttgttgctgcaaccggtaactacaaagttcgtatcgacaacgcaacaggcgctggcgc

SEQ ID NO: 670513 - DNA, 75 bp, synthetic construct
  source 1..75: mol_type = other DNA
cgagaaagtagtgaagtcgcggcgggacgagctcgattgggtactcacggacagtaagcgtcaggcgaataaatc

SEQ ID NO: 670514 - DNA, 75 bp, synthetic construct
  source 1..75: mol_type = other DNA
accgcctctgaggttgagttgttgaccccgggcctgacagaacagttctggcaggaagagcaggggacattgctt

SEQ ID NO: 670515 - DNA, 75 bp, synthetic construct
  source 1..75: mol_type = other DNA
atgctccccgggcttgttgctcaggggatacagcagatatgctgtgcccctcggtattattttttgttgtcgctg

SEQ ID NO: 670516 - DNA, 75 bp, synthetic construct
  source 1..75: mol_type = other DNA
atccgccgatggataatcgggtacgcgaggcttgtcagtacatcagcgatcacctggcagacagtaattttgata

SEQ ID NO: 670517 - DNA, 75 bp, synthetic construct
  source 1..75: mol_type = other DNA
tgttgttcatatcccagaggatatgcagcgacatgcaccggaatgcggtgaaacaacagctctgttgggtttaat

SEQ ID NO: 670518 - DNA, 75 bp, synthetic construct
  source 1..75: mol_type = other DNA
attttctgaacagcctgcagttacgccaggctcagacgctgtctgatgtgacagagcaactgacgctgatggctg

SEQ ID NO: 670519 - DNA, 75 bp, synthetic construct
  source 1..75: mol_type = other DNA
ggtgtgagtgccgctttctggcaggctagcggcccgaggctgctggcgtattatgcctccgggattattacccat

SEQ ID NO: 670520 - DNA, 75 bp, synthetic construct
  source 1..75: mol_type = other DNA
ggttgtcaggccggcggaagcagattttaaatatggtacatctccattacaggcaactctgggactggaatttgg

SEQ ID NO: 670521 - DNA, 75 bp, synthetic construct
  source 1..75: mol_type = other DNA
tattttattcgtatgactacggatcctggcgattttgttttcgatccattcggcggctcttgcgtgacaggtgca

SEQ ID NO: 670522 - DNA, 75 bp, synthetic construct
  source 1..75: mol_type = other DNA
tgcgcctgcaacaggtgaccaatgccgccgatccccaggcgatgacccaaacgattgctcagacggtattccagg

SEQ ID NO: 670523 - DNA, 75 bp, synthetic construct
  source 1..75: mol_type = other DNA
acccctcttactcctgatggacctaaagccaattatacggaagagtgggttatcagaccagcggaagctgattta

SEQ ID NO: 670524 - DNA, 75 bp, synthetic construct
  source 1..75: mol_type = other DNA
gggagaagtagattttaaatatggtacatctccactacaggcaactctagggctggagtttggcgcacatttcaa

SEQ ID NO: 670525 - DNA, 75 bp, synthetic construct
  source 1..75: mol_type = other DNA
tcaatggccggacaggctgtggggcatgctgtacaatgcaacacccaaggattaaagccagacgctattttatgg

SEQ ID NO: 670526 - DNA, 75 bp, synthetic construct
  source 1..75: mol_type = other DNA
ttgattcactgggatttcggtgtttccagcattaatggtcagtctattgccgaacagctaaaagaggtttttccg

SEQ ID NO: 670527 - DNA, 75 bp, synthetic construct
  source 1..75: mol_type = other DNA
caggcgcgacgctgcgcgatgaggtgtttttcaatcaaacggttgaaaacgtacagcgaattattattgaaggaa

SEQ ID NO: 670528 - DNA, 75 bp, synthetic construct
  source 1..75: mol_type = other DNA
tgctgtgtctggcgctaggaattgcgctgctgctgtccgtgtatccgctatggggcgtagcgcgcggagatgcgc

SEQ ID NO: 670529 - DNA, 75 bp, synthetic construct
  source 1..75: mol_type = other DNA
gtgaaacgttttatgcgtgaaaacagccgcggtccgcaagttccggcagggttaccgatgacagaagagcagctc

SEQ ID NO: 670530 - DNA, 75 bp, synthetic construct
  source 1..75: mol_type = other DNA
ggcgttcttgccatggccgtggccggatcgttgcgcttcttcggttttcctgaagatgccgtgacgtttatcggc

SEQ ID NO: 670531 - DNA, 75 bp, synthetic construct
  source 1..75: mol_type = other DNA
ttaatggatgaactgacgggcgatttgaaggcattaattgatgagaaatcggcgctgattgccggttgggtcaaa

SEQ ID NO: 670532 - DNA, 75 bp, synthetic construct
  source 1..75: mol_type = other DNA
cgcaggcttcgcgcctgttctgtatggagatgctggcaggcgcgccgctgttaatggatgaactgacgggcgatt

SEQ ID NO: 670533 - DNA, 75 bp, synthetic construct
  source 1..75: mol_type = other DNA
tggcagagtggcttgcagctgcgcgacctgatctaagcttcccacaaacagctggtgaagaggctgatgtgaatg

SEQ ID NO: 670534 - DNA, 75 bp, synthetic construct
  source 1..75: mol_type = other DNA
cctcagtgggtgattagtaaagtgaaactggccattgccgactttttgcaagccaacccagagaaaacttctaaa

SEQ ID NO: 670535 - DNA, 75 bp, synthetic construct
  source 1..75: mol_type = other DNA
catccgctccgatgacaaagtcgttttcgattatgtgatgcagaaaaaaatcaagtctcagggataccacctgca

SEQ ID NO: 670536 - DNA, 75 bp, synthetic construct
  source 1..75: mol_type = other DNA
gaagacgattaccacggcaaacatattgcgtatttcatgcgacaagcattggccttgctggaagggcattcatgc

SEQ ID NO: 670537 - DNA, 75 bp, synthetic construct
  source 1..75: mol_type = other DNA
cgcagaaaattattgaagcagccgatgaggttattagtgcgctgaccggaactaatgaggatgttaaccctgata

SEQ ID NO: 670538 - DNA, 75 bp, synthetic construct
  source 1..75: mol_type = other DNA
ttcatgcactggctgcgggtagcttacgaggctggcaactatccggatattccggatagttcggtgccagcgcca

SEQ ID NO: 670539 - DNA, 75 bp, synthetic construct
  source 1..75: mol_type = other DNA
cgcatcaatcggttttatgggcgcagagaaagcacgcgacaaggttattgcggcctttaatcgcagggtgaagga

SEQ ID NO: 670540 - DNA, 75 bp, synthetic construct
  source 1..75: mol_type = other DNA
tagtatcacaattagcattggcttgcactttggcaatcgcctctcaggcaaatgctactacttatgataccttcg

SEQ ID NO: 670541 - DNA, 75 bp, synthetic construct
  source 1..75: mol_type = other DNA
tcacttcaacaacgacctgtctgcaaccatgagcaacggtacttacgttgacggtagcaccaactccgacgcttg

SEQ ID NO: 670542 - DNA, 75 bp, synthetic construct
  source 1..75: mol_type = other DNA
gacgacgattttgacgcattctacttcactgatacttatctggatgcagacggtaaaacagcgaagacagattat

SEQ ID NO: 670543 - DNA, 75 bp, synthetic construct
  source 1..75: mol_type = other DNA
cgtttcagggcgtttcgatctgctgtacgaagtgaaaccgattaccggttttgcgttgattgatgcctggctttc

SEQ ID NO: 670544 - DNA, 75 bp, synthetic construct
  source 1..75: mol_type = other DNA
aggcggaaaagcagatttcatgcggcacaatgccgatgaaatgacgttgtatctgatggcgattgaattgataaa

SEQ ID NO: 670545 - DNA, 75 bp, synthetic construct
  source 1..75: mol_type = other DNA
tccagtttgacgggcgtgatggcgcagcgactggtccgtacgctgtgctccgactgctgccagtccgcgcctgcc

SEQ ID NO: 670546 - DNA, 75 bp, synthetic construct
  source 1..75: mol_type = other DNA
gtgaatcacgtccccttctgcctttttccttttcccgtacgcagagaattttgttgctgcgtgaacaggagggga

SEQ ID NO: 670547 - DNA, 75 bp, synthetic construct
  source 1..75: mol_type = other DNA
taagaataaatgatcaatttcttattggagaaattgacaacaaattacatagtgaaaaacttattcacaagcatc

SEQ ID NO: 670548 - DNA, 75 bp, synthetic construct
  source 1..75: mol_type = other DNA
ccggactctgtcagcaggtatttctggacgccgggcaggaagtggagatgccggagccggagaagaagaaacgag

SEQ ID NO: 670549 - DNA, 75 bp, synthetic construct
  source 1..75: mol_type = other DNA
aagtaacatcaacatcagcaacaactcccatgttgcaggtattactttggttcaacacgacctcggtaatgcgac

SEQ ID NO: 670550 - DNA, 75 bp, synthetic construct
  source 1..75: mol_type = other DNA
gtgataacaggtgtctggaaatataggggcaaatccagctatgtatacgaccatgcggctgatggttattttgat

SEQ ID NO: 670551 - DNA, 75 bp, synthetic construct
  source 1..75: mol_type = other DNA
gcaccgggatccacgagctgttgctgattgacgatcgcattcggacggcaatctatcagggggagggggagctgg

SEQ ID NO: 670552 - DNA, 75 bp, synthetic construct
  source 1..75: mol_type = other DNA
tcagcaacttccatccagaccgactggccgaccttatcgcctttaacaaagtggcccctgcggtaaaccagattg

SEQ ID NO: 670553 - DNA, 75 bp, synthetic construct
  source 1..75: mol_type = other DNA
gccgaatgcgaaagagcggtcattgacgctattaacaccggttatcgactgattgacaccgccgcctcctatcaa

SEQ ID NO: 670554 - DNA, 75 bp, synthetic construct
  source 1..75: mol_type = other DNA
gctgaatgcgaaagagcggttattgatgcgatcgatacgggataccgcctgatcgataccgcagcgtcttaccag

SEQ ID NO: 670555 - DNA, 75 bp, synthetic construct
  source 1..75: mol_type = other DNA
gacaacattgccgcgacgacctccccctcctccggcgaaggtttacaagagacgcgcctgaaacaggatgtctac

SEQ ID NO: 670556 - DNA, 75 bp, synthetic construct
  source 1..75: mol_type = other DNA
ccgttgggccgattaacctcaccatcaaacgtggtgaactgctgtttctgattggtggcaacggtagtggaaaat

SEQ ID NO: 670557 - DNA, 75 bp, synthetic construct
  source 1..75: mol_type = other DNA
aaatgaaggatgaagtttttcattatctcaactgcatccttgaaaatatacaaacttatcttgatactcaggctt

SEQ ID NO: 670558 - DNA, 75 bp, synthetic construct
  source 1..75: mol_type = other DNA
atcgaaatgacgcatatccttaaagccaatgcgtttattatattatataacttaattgaagccactatatctaat

SEQ ID NO: 670559 - DNA, 75 bp, synthetic construct
  source 1..75: mol_type = other DNA
gatgatttggcttttgtcattgataatttagatgctgccttggcagtattccaagagcattgccctaatgatcct

SEQ ID NO: 670560 - DNA, 75 bp, synthetic construct
  source 1..75: mol_type = other DNA
tttgtcattcattaggatttacgggtgattttaataaatttactctagctaagatggttcgatatcgtgtcgaag

SEQ ID NO: 670561 - DNA, 75 bp, synthetic construct
  source 1..75: mol_type = other DNA
aagttaaccctttcaatcagcagctacacgccgttccgtggatgcaaagtcgtggcattcagccagaagcctggg

SEQ ID NO: 670562 - DNA, 75 bp, synthetic construct
  source 1..75: mol_type = other DNA
gttgacctgtatttgattcaccagccatacggcgatgtccacggagcctggcgtgccatggaagagctgcaacag

SEQ ID NO: 670563 - DNA, 75 bp, synthetic construct
  source 1..75: mol_type = other DNA
ttacctagaagaaatactagaaaacatacaaaaataccttgatgatcgcttatacatacgatcatcaagactaca

SEQ ID NO: 670564 - DNA, 75 bp, synthetic construct
  source 1..75: mol_type = other DNA
acaatgataatgagaaagaagggacggatagcgtcagtatccactttaacagtacgaagattgaaatctcctcgg

SEQ ID NO: 670565 - DNA, 75 bp, synthetic construct
  source 1..75: mol_type = other DNA
tgcgagtaaaagacttcagcattgtcgttgattaccttaccaccttaccttacgttgatgccgggcgtattggtg

SEQ ID NO: 670566 - DNA, 75 bp, synthetic construct
  source 1..75: mol_type = other DNA
ccattacacatgatgaaatggctgataaatggatggaggatccagcttttaaagcagaatacgacgccatcgccg

SEQ ID NO: 670567 - DNA, 75 bp, synthetic construct
  source 1..75: mol_type = other DNA
gaccatattcgttttgttctgattgagtgcccgcaaagttttgaaaactgtttctgtgtctccatggggagtaat

SEQ ID NO: 670568 - DNA, 75 bp, synthetic construct
  source 1..75: mol_type = other DNA
ggaagtggattatcgcaggaagaacaacaacaactgtttaaacgctacagccaaacaagtgcaggtcgtcagcaa

SEQ ID NO: 670569 - DNA, 75 bp, synthetic construct
  source 1..75: mol_type = other DNA
acattatgcaatcttcctgcaagtgacaatgcagtatatatttgtggttggcaagatattactgaaacgcgtgat

SEQ ID NO: 670570 - DNA, 75 bp, synthetic construct
  source 1..75: mol_type = other DNA
agaaatagacctttttgaagcaacagaatattatcgttcgccacgaggctgtgcgcctaatggggtaaatcgttc

SEQ ID NO: 670571 - DNA, 75 bp, synthetic construct
  source 1..75: mol_type = other DNA
ttaaccacaaccttaatcaatatgattgaagagttggaaccagatgaagcacgcaaggcactgaaacttttaagt

SEQ ID NO: 670572 - DNA, 75 bp, synthetic construct
  source 1..75: mol_type = other DNA
tgaggttgatcaggatgagtcctccgaagaccgcctgacgttccgcattctggacaccggagaaggcgtaagtat

SEQ ID NO: 670573 - DNA, 75 bp, synthetic construct
  source 1..75: mol_type = other DNA
cggtttgctggcgctggcactttttggttataccacctttcgccatttctccggccgcaccacggaaagagcccc

SEQ ID NO: 670574 - DNA, 75 bp, synthetic construct
  source 1..75: mol_type = other DNA
ggggagaacgtcgccgccagtgggccagttgtatgataccaggcttcagcgatatggctggtggtcacggttttc

SEQ ID NO: 670575 - DNA, 75 bp, synthetic construct
  source 1..75: mol_type = other DNA
gatttagtctggcaagaaaaatcgcacatgtcgccaaacaccatcatcgcaccaataaccgaaacactcttctat

SEQ ID NO: 670576 - DNA, 75 bp, synthetic construct
  source 1..75: mol_type = other DNA
actcggttttcaggctccactctatttgtggcaggtctgtgacgacggtgattatcagaccggacgccccctgca

SEQ ID NO: 670577 - DNA, 75 bp, synthetic construct
  source 1..75: mol_type = other DNA
gtaaaggttcttcaactcaaggctggtgactctctttgtgaaggatatgtatcagagctatcagagatgagtctt

SEQ ID NO: 670578 - DNA, 75 bp, synthetic construct
  source 1..75: mol_type = other DNA
tacgtggctcctttagctgccgtctgagcttattaagttatacaggtacgcctgcgaccgccggtgtagcccagc

SEQ ID NO: 670579 - DNA, 75 bp, synthetic construct
  source 1..75: mol_type = other DNA
caatgcgagattattcatgaggcctggcagagcagggctgttatccgctatgaaatggcggtgccgcgtaatctg

SEQ ID NO: 670580 - DNA, 75 bp, synthetic construct
  source 1..75: mol_type = other DNA
cgaggctatcaacggataaaacggcagtacaccgatgagcaaaagcaacgggcagtagatcactatatcgaacaa

SEQ ID NO: 670581 - DNA, 75 bp, synthetic construct
  source 1..75: mol_type = other DNA
cgaaaccgcaatgcgagattactcatgaggcctggcagagcagggctgttatccgctatgacatggcggtgccgc

SEQ ID NO: 670582 - DNA, 75 bp, synthetic construct
  source 1..75: mol_type = other DNA
acagtgttacaacaaaatcccatgggatgcgatgaagctcaacaaagccggattcaacgtgccggaaagttatag

SEQ ID NO: 670583 - DNA, 75 bp, synthetic construct
  source 1..75: mol_type = other DNA
ctgtagtgacaaagttcatcgcgaaatcgtcgcccgcttcgaactggctgaagacatggcggataatctgattcg

SEQ ID NO: 670584 - DNA, 75 bp, synthetic construct
  source 1..75: mol_type = other DNA
ttcaatgtctctcagatggcattagaaatacccagcaccgttccgggtatctctggtaaatatggtgtccagcta

SEQ ID NO: 670585 - DNA, 75 bp, synthetic construct
  source 1..75: mol_type = other DNA
gccatcttccctaataaagaagatattgcccgtgcaacaggggctgatatacgagctatggaagaaggtataccc

SEQ ID NO: 670586 - DNA, 75 bp, synthetic construct
  source 1..75: mol_type = other DNA
taaagcaggtttatcacatgtaattattgcagcagtacatgaattaaaaggggggggcattaatgaaggaaatta

SEQ ID NO: 670587 - DNA, 75 bp, synthetic construct
  source 1..75: mol_type = other DNA
atgaaacaagcaaatcaagatagaggtacgctgctgctggcgctggttgcaggcttatcgatcaatggtactttt

SEQ ID NO: 670588 - DNA, 75 bp, synthetic construct
  source 1..75: mol_type = other DNA
aggatgtggtcatcaatatcgaaagcaataactcaccacatcataacccatcaaattatgttgataccgttgata

SEQ ID NO: 670589 - DNA, 75 bp, synthetic construct
  source 1..75: mol_type = other DNA
tatatggtggcatgcaagagaaggtgccattttcccaaataaagcagatattgaacatgccacaggggctgatat

SEQ ID NO: 670590 - DNA, 75 bp, synthetic construct
  source 1..75: mol_type = other DNA
ggcgtcctgttactgacagccctgatggcctgggtaatacagcccgccgtttatttactgactttcctgtttgcc

SEQ ID NO: 670591 - DNA, 75 bp, synthetic construct
  source 1..75: mol_type = other DNA
tcacgctaagctgggactccattcgcactcttctgcctgcagcattctcaatggcaatgctcggggcgattgaat

SEQ ID NO: 670592 - DNA, 75 bp, synthetic construct
  source 1..75: mol_type = other DNA
gaaggcaaacgaattgttattctgaagtgggatgcagttccggttcttgatgccggtggccttgatgcgttccag

SEQ ID NO: 670593 - DNA, 75 bp, synthetic construct
  source 1..75: mol_type = other DNA
attcactgacttagaatctcgcattgaaggtaagcgcgttgttattttgaaatgggatgcggtgccggttctgga

SEQ ID NO: 670594 - DNA, 75 bp, synthetic construct
  source 1..75: mol_type = other DNA
ttcatcctctgatagacaaaaaatcggatgttacgctttaaagttagcaaataagcataaaaaaggttggtttgc

SEQ ID NO: 670595 - DNA, 75 bp, synthetic construct
  source 1..75: mol_type = other DNA
gggtatcagtaaaaatcttttggctaacttcctgataatagaagagcctgaggctcatattcatacgcatataca

SEQ ID NO: 670596 - DNA, 75 bp, synthetic construct
  source 1..75: mol_type = other DNA
agtgggatgccgttccggtgcttgatgccggtggtcttgatgcgttccagcgttttgtgaagcgactgcctgaag

SEQ ID NO: 670597 - DNA, 75 bp, synthetic construct
  source 1..75: mol_type = other DNA
aatttcctgcgcgcccgttacgccgcgttgcaacaaagctcgctgtttcgcggtatgcgttactctgaagatcac

SEQ ID NO: 670598 - DNA, 75 bp, synthetic construct
  source 1..75: mol_type = other DNA
gcgtccgaggagcaggaaactgatgtactgttgattggcggcggcattatgagcgccacgttggggacctattta

SEQ ID NO: 670599 - DNA, 75 bp, synthetic construct
  source 1..75: mol_type = other DNA
gtgaacaaaatattttcctcacatgtgatacctttccgcgctctgatcgacgcttgctggaaagaaaaatatact

SEQ ID NO: 670600 - DNA, 75 bp, synthetic construct
  source 1..75: mol_type = other DNA
tcgccaggggcgtcaaccgccgcgccgattatgttgaatctgctggaaaaagtatttggcgatcgcgtttccagc

SEQ ID NO: 670601 - DNA, 75 bp, synthetic construct
  source 1..75: mol_type = other DNA
acgtggttaatcaccatctggcgaaggtttacggtaaagcatccgttggcgcaccaccgatgtcggttccgcata

SEQ ID NO: 670602 - DNA, 75 bp, synthetic construct
  source 1..75: mol_type = other DNA
gcgccctaaagcgtaatgacgataacacctggaccgttaccgttgccgatctgaaaaacggcactgcacagaaca

SEQ ID NO: 670603 - DNA, 75 bp, synthetic construct
  source 1..75: mol_type = other DNA
accagtcactcttttgaaccagtcaaagaaccagtcaatgaaccaatagctgttggtgcatctgctgatgagtct

SEQ ID NO: 670604 - DNA, 75 bp, synthetic construct
  source 1..75: mol_type = other DNA
ggtggcaattcaaaatctgcagccttcaaagcctggaaagcccgtttgaatgagggagtaaaccccgaaaccatg

SEQ ID NO: 670605 - DNA, 75 bp, synthetic construct
  source 1..75: mol_type = other DNA
actattgggcaagattattcaggcagtatggccatgatgtccggttgatggccccaaaatttgtctcaccctatc

SEQ ID NO: 670606 - DNA, 75 bp, synthetic construct
  source 1..75: mol_type = other DNA
cgtggagaagatgccgcatggctggctgccaccacggatgccaatgtcaaaacactgtttgggattgcgttttag

SEQ ID NO: 670607 - DNA, 75 bp, synthetic construct
  source 1..75: mol_type = other DNA
gtcacgttctttggtccggatcgtcatttcgaagaatcctgggaagttcctgcggtatctgcagccagacgcgag

SEQ ID NO: 670608 - DNA, 75 bp, synthetic construct
  source 1..75: mol_type = other DNA
tgcagtatctgcagccagacgcgaggacccgtacttcaaagccagttacgacaacgtggactacagccagatccc

SEQ ID NO: 670609 - DNA, 75 bp, synthetic construct
  source 1..75: mol_type = other DNA
caggtagtgcaggagttgcacctgtgggtagtgaaggagattcacccagaaccagtcactcttttgaatcagtca

SEQ ID NO: 670610 - DNA, 75 bp, synthetic construct
  source 1..75: mol_type = other DNA
aagagcaatggatgccatcaaggcacagatggataagcttgaaggcatcaaaacgagcactgtaaaagagaaaac

SEQ ID NO: 670611 - DNA, 75 bp, synthetic construct
  source 1..75: mol_type = other DNA
tgggtaacccagttgaacgtctggcaagggttcttaaagagaaccaggacaaactcaatcttagtaaagatggtt

SEQ ID NO: 670612 - DNA, 75 bp, synthetic construct
  source 1..75: mol_type = other DNA
ccatcgacatgaccattgagatttacaacctgcaagtgctgggtcgcgtgctgggtaaactcaaccaggtgccgg

SEQ ID NO: 670613 - DNA, 75 bp, synthetic construct
  source 1..75: mol_type = other DNA
tctgcagcagacgcaggggcatccagatgccagtctgctgttgtggcgtggtgtcgagatggtagagatactctc

SEQ ID NO: 670614 - DNA, 75 bp, synthetic construct
  source 1..75: mol_type = other DNA
aaacgttctgtgatgaatcatattacggctctttgtgaatctggactggtaaaaaaagtttcccggaaaggtgaa

SEQ ID NO: 670615 - DNA, 75 bp, synthetic construct
  source 1..75: mol_type = other DNA
cgcactggcgtggagaagatgccgcatggctggctgccaccacggatgccaatgttaaaacactgtttgggattg

SEQ ID NO: 670616 - DNA, 75 bp, synthetic construct
  source 1..75: mol_type = other DNA
ctgatctccgaagaacatctgcaattgcaggcggtgttcctcgcgtttctgacgccggaaatctcggcggcggtg

SEQ ID NO: 670617 - DNA, 75 bp, synthetic construct
  source 1..75: mol_type = other DNA
cctcagccgccagaacgaagaagtgcgtcggcgtctgcttgacgaagtgccgatggaagactgggcggtggcgct

SEQ ID NO: 670618 - DNA, 75 bp, synthetic construct
  source 1..75: mol_type = other DNA
aacgtcaggcgcagcaactggaagcgatcaccgcgcgtctggggccggtgccggtcagccgtatcgaacagatcc

SEQ ID NO: 670619 - DNA, 75 bp, synthetic construct
  source 1..75: mol_type = other DNA
caggctggtgcggaaatggcgcaggcggaaattcgtatctgggtacggggcccgtcaggtcgggagatcacggcg

SEQ ID NO: 670620 - DNA, 75 bp, synthetic construct
  source 1..75: mol_type = other DNA
cggaaatccgcatctgggtgcgcggtcagtccggccgggaaatcacagcagcgtcacgacttcatgtgctgagtg

SEQ ID NO: 670621 - DNA, 75 bp, synthetic construct
  source 1..75: mol_type = other DNA
aaggttatatactctgcataaaacctgacaacacgcagattgccaggcaaatgagcattatgcatccggttatcg

SEQ ID NO: 670622 - DNA, 75 bp, synthetic construct
  source 1..75: mol_type = other DNA
aaaaacgataaagagcacggtgagcgcgtggaagacgatattttcgcgggcggtgacatcggtgaccagcatgac

SEQ ID NO: 670623 - DNA, 75 bp, synthetic construct
  source 1..75: mol_type = other DNA
acttgcagttgagcgccagaaaagcggcaatcgctgaacggattgccgcccataaaattgcccgcagtaaagtgt

SEQ ID NO: 670624 - DNA, 75 bp, synthetic construct
  source 1..75: mol_type = other DNA
ttgtgcgaagaggtgcacctgaacctggcctatcgctggttctgccggttgggtctggaagacgaagtccccaat

SEQ ID NO: 670625 - DNA, 75 bp, synthetic construct
  source 1..75: mol_type = other DNA
tcggttatctcgccaccaatggcctaaataatttagttcctgaattccaaattttagataatgctgatcactatg

SEQ ID NO: 670626 - DNA, 75 bp, synthetic construct
  source 1..75: mol_type = other DNA
ggatttgaagattataaccactacgtcggttatctcgccaccaatggcctaaataatttagttcctgaattccat

SEQ ID NO: 670627 - DNA, 75 bp, synthetic construct
  source 1..75: mol_type = other DNA
ccagcgtgacgcgatgattgcggcctgcgagacatccggtggtggtctgctggtgcatccgacgctgggtgagat

SEQ ID NO: 670628 - DNA, 75 bp, synthetic construct
  source 1..75: mol_type = other DNA
cagcgccagccacagacaacagcccgcaggccaccgcgccggcatccgccacgtcttcggcgcagcatcgccggt

SEQ ID NO: 670629 - DNA, 75 bp, synthetic construct
  source 1..75: mol_type = other DNA
cggattgctttcactgtaaccggaattatttttcatattatgcttcgccgggtattcacgccggaactggacaaa

SEQ ID NO: 670630 - DNA, 75 bp, synthetic construct
  source 1..75: mol_type = other DNA
tagcggggctgacgatgccgttttttgcatcaatgaaaagcgatgaacggcagaaagccccgttatggaaaaggt

SEQ ID NO: 670631 - DNA, 75 bp, synthetic construct
  source 1..75: mol_type = other DNA
cggtgattacgttcagagtattgccgaaaagatcaaagcctttttcggaaaaattgaggaactggcattactcaa

SEQ ID NO: 670632 - DNA, 75 bp, synthetic construct
  source 1..75: mol_type = other DNA
cagaaagctccgctctggaaaaagctgattatggctttttccatggtgtgtttcctctctggcacactggccccg

SEQ ID NO: 670633 - DNA, 75 bp, synthetic construct
  source 1..75: mol_type = other DNA
gatattcacaccggaactggataaaataaagaaacgccttgttaaaaagaccacccttgaacgggaattgcgcac

SEQ ID NO: 670634 - DNA, 75 bp, synthetic construct
  source 1..75: mol_type = other DNA
ggaaggtttaggtgcggcgcgggataaaggcgtgcatattattatggaccaccagtccattgccgatttaaaaga

SEQ ID NO: 670635 - DNA, 75 bp, synthetic construct
  source 1..75: mol_type = other DNA
ggaaagctgaccaataccgcagacctgatccgtctgattatccgcgatgaagcagtgcacggttattacatcggc

SEQ ID NO: 670636 - DNA, 75 bp, synthetic construct
  source 1..75: mol_type = other DNA
ccgcgctttcgccgaatgccgatgaaaatcacgatttcttttccggttcaggctcctcttatgtgatgggaaaag

SEQ ID NO: 670637 - DNA, 75 bp, synthetic construct
  source 1..75: mol_type = other DNA
aagctcagattattcagcaacattatcgcggggatgatccgctgaaaaagaaaatcgccagtgtgtttcttgaat

SEQ ID NO: 670638 - DNA, 75 bp, synthetic construct
  source 1..75: mol_type = other DNA
gaatcttctcaagagtatggcggtcaaatctggatcgataatgcaaatgcaagagatcagaacgtttactttgcc

SEQ ID NO: 670639 - DNA, 75 bp, synthetic construct
  source 1..75: mol_type = other DNA
ccccgcctggcagacattaagcgccgtagagcaacaactgacgatgcgtgtttttactggcctgacgctactcga

SEQ ID NO: 670640 - DNA, 75 bp, synthetic construct
  source 1..75: mol_type = other DNA
aagcacagattattcagcaatattatcgcggtgatagcccgctgaaaaagaaaatcgccagtgtctttcttgaat

SEQ ID NO: 670641 - DNA, 75 bp, synthetic construct
  source 1..75: mol_type = other DNA
accattgaattgctatcttttgagacagaacaaatagaacaacacaataacaacgatatgccttccagtggttta

SEQ ID NO: 670642 - DNA, 75 bp, synthetic construct
  source 1..75: mol_type = other DNA
accctttctgaagggctggcactgcttgcggaacagcatcccagtaagcaatggcaagcgttgctgcaatcactg

SEQ ID NO: 670643 - DNA, 75 bp, synthetic construct
  source 1..75: mol_type = other DNA
gagagccgtgctttgctgctcatggcactacagcaacagatggttaccccacttagcctgaagcgaatcgccatc

SEQ ID NO: 670644 - DNA, 75 bp, synthetic construct
  source 1..75: mol_type = other DNA
aaacagcaccccgcgtaccgttgctattttcctcgacgagttgaaatatcatctttctcgccctgctcttgaagg

SEQ ID NO: 670645 - DNA, 75 bp, synthetic construct
  source 1..75: mol_type = other DNA
atgccgccacaccggcactccggacgcgtatcgcctcctggtcggccaatgaccagtggacgcgttcactaaacc

SEQ ID NO: 670646 - DNA, 75 bp, synthetic construct
  source 1..75: mol_type = other DNA
ggggacaaaaactcacgcagatctttacgattctggcgctgacacaaagtgcaggcattacttttttacagggcg

SEQ ID NO: 670647 - DNA, 75 bp, synthetic construct
  source 1..75: mol_type = other DNA
ctgacacaaatccagcacgatatcagtaacggtcatcccatctggctggcgctaaaaaatgccggtgagtttagc

SEQ ID NO: 670648 - DNA, 75 bp, synthetic construct
  source 1..75: mol_type = other DNA
aaaacgcctcaatacattccggtaaaagactggcaaaagcaacacgctgatataatcggcactacaggcgcgggt

SEQ ID NO: 670649 - DNA, 75 bp, synthetic construct
  source 1..75: mol_type = other DNA
catcaatgcgcctggtggtttttcactaaagcaaatttttgaagagggtggttgttgttatattgttggttcaat

SEQ ID NO: 670650 - DNA, 75 bp, synthetic construct
  source 1..75: mol_type = other DNA
ttgacgatgaaatgaggaaggtgagaaccgacttatcattaacagaaaaagttgatactgaccgcatgataagac

SEQ ID NO: 670651 - DNA, 75 bp, synthetic construct
  source 1..75: mol_type = other DNA
atttactggctgatatctctcatgaacaactggaagaattatttaacgctggctttagcctggctaagaaagggg

SEQ ID NO: 670652 - DNA, 75 bp, synthetic construct
  source 1..75: mol_type = other DNA
gggaaaggaataactgcgaccgttctgctttatcaggctattcttttaggtgaggctgttttggtagaagatcca

SEQ ID NO: 670653 - DNA, 75 bp, synthetic construct
  source 1..75: mol_type = other DNA
gttcagaattccactatggatcatgacagtcacatttacgacagcaggattattctttcatattgcagcccgacg

SEQ ID NO: 670654 - DNA, 75 bp, synthetic construct
  source 1..75: mol_type = other DNA
tggcattgtccagtacgcttgattccattcctttatccatgcaacgacagttccctgatttaactccgcgtcaca

SEQ ID NO: 670655 - DNA, 75 bp, synthetic construct
  source 1..75: mol_type = other DNA
gccacgaaagtggcggtaacgccagtcccgaatgtcatggtttataccagcggcaaaaaaatgccgatggtggtg

SEQ ID NO: 670656 - DNA, 75 bp, synthetic construct
  source 1..75: mol_type = other DNA
gcgaagaacatcgtgatgacgttgatttttatctctggttgcagtggctggcttacagccagtttgccgcctgct

SEQ ID NO: 670657 - DNA, 75 bp, synthetic construct
  source 1..75: mol_type = other DNA
ttgactgaagaacaggcaatagcacagcaattaaaaaatcaggtaactgaaggcagacttattgattcagggttt

SEQ ID NO: 670658 - DNA, 75 bp, synthetic construct
  source 1..75: mol_type = other DNA
ctggcgataatggggatggtcagcgtcggctttttgctgttcattctctttacctctaacccgttctcacgcacg

SEQ ID NO: 670659 - DNA, 75 bp, synthetic construct
  source 1..75: mol_type = other DNA
agcatcttggtataactgaacgctggttgcgggatcttcagaagcacccgggagcgccaaaaaatcgaaagcgtg

SEQ ID NO: 670660 - DNA, 75 bp, synthetic construct
  source 1..75: mol_type = other DNA
gaaaaagggcctcaccgaaattgagaaaacctattcggagttgcgccgtaagtttggtggcgacgatgcggctgt

SEQ ID NO: 670661 - DNA, 75 bp, synthetic construct
  source 1..75: mol_type = other DNA
cgaaaaattccgaagtttttgaggccggcagactacccagaactgaagaagccaatgcacgatataaaaatctag

SEQ ID NO: 670662 - DNA, 75 bp, synthetic construct
  source 1..75: mol_type = other DNA
tattctgaaaagtatgattatccaataactactccgagtggacgcattgtcaatccttctcatgggtcatgctgg

SEQ ID NO: 670663 - DNA, 75 bp, synthetic construct
  source 1..75: mol_type = other DNA
ggcatttgagtctgaccgatcgccagcttcgcagattgcagaaattaccgggtgcaccggtctcgaataagcgag

SEQ ID NO: 670664 - DNA, 75 bp, synthetic construct
  source 1..75: mol_type = other DNA
tgcaaatgcaccatccgtcaggtcagccgtggtgagtatgcgcaactggcggcacagggcaccattcacaccgaa

SEQ ID NO: 670665 - DNA, 75 bp, synthetic construct
  source 1..75: mol_type = other DNA
gaccagctctctggaatgttatctgaatgatttgctgcaagtggcaatacaacctgaaattcattttggaagctt

SEQ ID NO: 670666 - DNA, 75 bp, synthetic construct
  source 1..75: mol_type = other DNA
cgcaaagggagcgaatcagtgcgcgcgggcaggggataaattaccggagttactcgatgaatatatccgaattac

SEQ ID NO: 670667 - DNA, 75 bp, synthetic construct
  source 1..75: mol_type = other DNA
ccgccagatggtaggcatcccggaacagcgtgtaacagtccgtcaccccgtgttcaaaacgacgcccggtcaggt

SEQ ID NO: 670668 - DNA, 75 bp, synthetic construct
  source 1..75: mol_type = other DNA
atgcgccaaagcagcacagcaggatatcgccaggctgtgcggaaggcagggaaatcctgtaaaaaccagtcgcct

SEQ ID NO: 670669 - DNA, 75 bp, synthetic construct
  source 1..75: mol_type = other DNA
gtgaagcagttcaccgttgccgcagtaaatggcggcatgattagccaccgatgcgccgaagcagcacagcaggat

SEQ ID NO: 670670 - DNA, 75 bp, synthetic construct
  source 1..75: mol_type = other DNA
caggaatattttcactggtattttctgttcatgccagcgaaacacagaataaaaaaagtgatccagtacctgtct

SEQ ID NO: 670671 - DNA, 75 bp, synthetic construct
  source 1..75: mol_type = other DNA
cttccaactgcaatttcgaattatgttggttgggaagaatatgattatcgggtgagtatatttactaatccggtt

SEQ ID NO: 670672 - DNA, 75 bp, synthetic construct
  source 1..75: mol_type = other DNA
gtgaagcagttcaccgttgccgcagtaaatggcggcatgattggccaccgatgcgccaaagcagcacagcaggat

SEQ ID NO: 670673 - DNA, 75 bp, synthetic construct
  source 1..75: mol_type = other DNA
atcgcctgcctgtgcagaggacagggacacccggcaaaagccggtggcctccatattgtccaggtacaggttctg

SEQ ID NO: 670674 - DNA, 75 bp, synthetic construct
  source 1..75: mol_type = other DNA
ggcatttaagtctgaccgatcgccagcttcgcagattgcagaaattgccgggtgccccgatatcgaataagagag

SEQ ID NO: 670675 - DNA, 75 bp, synthetic construct
  source 1..75: mol_type = other DNA
ggcatttgagtctgactgatcgccagcttcgcagattacagaaactgccgggtgcaccggtctcgaataagcgag

SEQ ID NO: 670676 - DNA, 75 bp, synthetic construct
  source 1..75: mol_type = other DNA
gcacttgctgcatctgtccttacggatatccgtggtgggttgtcgaactcatccgccaccgcaggaccgttatac

SEQ ID NO: 670677 - DNA, 75 bp, synthetic construct
  source 1..75: mol_type = other DNA
ccatattgtccaggtacaggttctggccgttgcgccaccagtcatcctcgcggtgaaaatccggcagcgttatcc

SEQ ID NO: 670678 - DNA, 75 bp, synthetic construct
  source 1..75: mol_type = other DNA
ggcggccacgcgcggtctgtcacgattaacgattctgcgtcgtcacgtcctgcacaacgcccttccgccggtgat

SEQ ID NO: 670679 - DNA, 75 bp, synthetic construct
  source 1..75: mol_type = other DNA
atgaaacctgtatttgatgaaaatgggctggctagagtgccgggtgatatgcgttgtttttattataatgcagta

SEQ ID NO: 670680 - DNA, 75 bp, synthetic construct
  source 1..75: mol_type = other DNA
gactggctactgaacctggggaaactcgttgtttctattacgacgctgtgacgtctgaatatatgggatggtcag

SEQ ID NO: 670681 - DNA, 75 bp, synthetic construct
  source 1..75: mol_type = other DNA
aactgactcaggcagaaacaacccgacttaacgccgtgctggattacattgacggcggtgacggcaacagatacc

SEQ ID NO: 670682 - DNA, 75 bp, synthetic construct
  source 1..75: mol_type = other DNA
tgcaatggcttccatcagtctgattcaactgaaattgcaggccggacgtaaactgacgcaggcagaaccacccga

SEQ ID NO: 670683 - DNA, 75 bp, synthetic construct
  source 1..75: mol_type = other DNA
ttatatcggtgccatcaaagatggttatgtcacgctttcaccgttaatgccatacgataaatgggatggtgagaa

SEQ ID NO: 670684 - DNA, 75 bp, synthetic construct
  source 1..75: mol_type = other DNA
gtcacgctttcaccgttaacgccatacgataaatgggatggtgagaaatgggtgacagatactgaggcacagcat

SEQ ID NO: 670685 - DNA, 75 bp, synthetic construct
  source 1..75: mol_type = other DNA
ggtgccgcagtagaaacggcagaagtacagcgccagtcactgattgatgctgctatggcttccatcagtctgatt

SEQ ID NO: 670686 - DNA, 75 bp, synthetic construct
  source 1..75: mol_type = other DNA
tatcggtgccatcaaaaacggttatgtcacgctttcaccattaacgccatatgataaatgggatggtgagaaatg

SEQ ID NO: 670687 - DNA, 75 bp, synthetic construct
  source 1..75: mol_type = other DNA
gtcacgctttcaccgttaacgccatatgataaatgggatggtaagaaatgggtgacagatactgaggcacaacac

SEQ ID NO: 670688 - DNA, 75 bp, synthetic construct
  source 1..75: mol_type = other DNA
acttaacactgtgctggattacattgacgcggtgacggcaacagataccagtaccgcgccggatgtcatctggcc

SEQ ID NO: 670689 - DNA, 75 bp, synthetic construct
  source 1..75: mol_type = other DNA
tacattgacgcggtgacggcaacagataccagcaccgcgccggatgtcatctggcctgaactgccggaggcgtag

SEQ ID NO: 670690 - DNA, 75 bp, synthetic construct
  source 1..75: mol_type = other DNA
agctaatgcaggcagaaaccacccgacttaacattgtgctggattacattgacgcggtgacggcaacagatacca

SEQ ID NO: 670691 - DNA, 75 bp, synthetic construct
  source 1..75: mol_type = other DNA
caactgaaattgcaggccggacgtaaactgacgcaggcagaaccacccgacttaacgctgtgctggattacattg

SEQ ID NO: 670692 - DNA, 75 bp, synthetic construct
  source 1..75: mol_type = other DNA
ccaatctcacgcaggacaacatcgctcgcattcgcgatctgtttccaggctgcgtcaccgaagctaagggcgagg

SEQ ID NO: 670693 - DNA, 75 bp, synthetic construct
  source 1..75: mol_type = other DNA
cgggaagccattcctggcgtgcgcttatgcattcattgtcagcaggagaaagatttacaaaaaccagcttataca

SEQ ID NO: 670694 - DNA, 75 bp, synthetic construct
  source 1..75: mol_type = other DNA
tatgcatccactgccagcaggagaaagatttacaaaaaccttcttatacaggatataatcgcagaggctcgaagg

SEQ ID NO: 670695 - DNA, 75 bp, synthetic construct
  source 1..75: mol_type = other DNA
ttttgttattgattgtgaccttgttcctgctgaccttcgttggcttcagcttgagctatttcaccccacatgcgc

SEQ ID NO: 670696 - DNA, 75 bp, synthetic construct
  source 1..75: mol_type = other DNA
tcccaacctggagaagcttctggcagaaatatatggtgagaagaataatctcggaactattgtgtgggataagag

SEQ ID NO: 670697 - DNA, 75 bp, synthetic construct
  source 1..75: mol_type = other DNA
tatgcttttgaatgcggaagatggggcaaatcgtcgattcataatggttcaattgcccgaggaatgtgacgagaa

SEQ ID NO: 670698 - DNA, 75 bp, synthetic construct
  source 1..75: mol_type = other DNA
tggagacaagtatggctacgtcataaacctgaaaacatcaaaccagctatgaatgcaatgctggagcgagacgat

SEQ ID NO: 670699 - DNA, 75 bp, synthetic construct
  source 1..75: mol_type = other DNA
ggctgactacagtgccgggtgatatgcgttgtttttattatgatgcagtaacgtctgaatattcgggctggtctg

SEQ ID NO: 670700 - DNA, 75 bp, synthetic construct
  source 1..75: mol_type = other DNA
atctgacgcagtcagaaaccagccgacttaacacggtgttggattacattgacgcggtgacggcaacagatacca

SEQ ID NO: 670701 - DNA, 75 bp, synthetic construct
  source 1..75: mol_type = other DNA
cattacattacactataaaaaagatttcatttccttattactggaaaccacgcctattaaagctaaccatttgcg

SEQ ID NO: 670702 - DNA, 75 bp, synthetic construct
  source 1..75: mol_type = other DNA
gaactcattatgagtctcctcatagaatgcacatcgatagcgacatactaacgccttcatcagagcctattaatc

SEQ ID NO: 670703 - DNA, 75 bp, synthetic construct
  source 1..75: mol_type = other DNA
cagaagcagaaacatggagacaagtatggctaggccataagcctgaaaatatcagaaatgccatgaatgcaatgc

SEQ ID NO: 670704 - DNA, 75 bp, synthetic construct
  source 1..75: mol_type = other DNA
aaaccaccaccggtcctcttggacaaggtttggcgaacgccgtcgggctggcgatagcagagcgtacactggcgg

SEQ ID NO: 670705 - DNA, 75 bp, synthetic construct
  source 1..75: mol_type = other DNA
actacacccgcacggcgcaggtgctgatggacacgatggcagaagcgccaatgtgggcggtcgataaaccgctga

SEQ ID NO: 670706 - DNA, 75 bp, synthetic construct
  source 1..75: mol_type = other DNA
ggcccgctcgctggatgccatcgctgaccaggcaaaacccgtgaccgttgttgtgcgtgtgccgcagggtgaaac

SEQ ID NO: 670707 - DNA, 75 bp, synthetic construct
  source 1..75: mol_type = other DNA
gaacggctgcaacaccatcgccgaagtgaaggaataccgcgaacagttctcccagcgtgaaatgatggttatctg

SEQ ID NO: 670708 - DNA, 75 bp, synthetic construct
  source 1..75: mol_type = other DNA
atgccatgaccatgaaacaggctgcggcctggtcgctggtctgggtgacgctgtcgttactgtttaacgccgctt

SEQ ID NO: 670709 - DNA, 75 bp, synthetic construct
  source 1..75: mol_type = other DNA
cccaccgatacaacccccaatactcacaccttcccgataaccaagggcaaacaggccgccaccgctgcgcagcct

SEQ ID NO: 670710 - DNA, 75 bp, synthetic construct
  source 1..75: mol_type = other DNA
agaaccctcatcgttataatccaacatttctgtctctccctgaatatcaaggacaagaaggtcggcacaaatgcg

SEQ ID NO: 670711 - DNA, 75 bp, synthetic construct
  source 1..75: mol_type = other DNA
ggtatctgatatcccaaaaaatgaaaccgcgccggaagctgaaccatctgtagagcgtgaggggccgttctattt

SEQ ID NO: 670712 - DNA, 75 bp, synthetic construct
  source 1..75: mol_type = other DNA
tgaaattaataaccaggcaaacagaggatggcgtggtttcatcctaagatttgttctcccatacgtggatgagtt

SEQ ID NO: 670713 - DNA, 75 bp, synthetic construct
  source 1..75: mol_type = other DNA
gtctttacatggacagatgccatcgaccatggtacggaaatgaccgcgacccgtgatggtgttcgtggaaaagaa

SEQ ID NO: 670714 - DNA, 75 bp, synthetic construct
  source 1..75: mol_type = other DNA
tcgcccacatccggaaagttatattaaaggtggtacgctgaaagcgattaaacagaatctgaaagaggccggatt

SEQ ID NO: 670715 - DNA, 75 bp, synthetic construct
  source 1..75: mol_type = other DNA
acttgatatcaccaaagcctttgttcggttgacggggaaaacactcttcggtccaaaatggagtcttgggtacag

SEQ ID NO: 670716 - DNA, 75 bp, synthetic construct
  source 1..75: mol_type = other DNA
caggaaggcgtgaccacacagcttctggagatgggtatcgactccacctggaacgacaacaacgaattcgaagta

SEQ ID NO: 670717 - DNA, 75 bp, synthetic construct
  source 1..75: mol_type = other DNA
ttacgtgcgctggacaaactgatcgtcaaaccgaacgccgtgaatggcgactttcggaagatgatattcagctat

SEQ ID NO: 670718 - DNA, 75 bp, synthetic construct
  source 1..75: mol_type = other DNA
gctgtcgcacagtctgctggtggggtgtttgtatcacttcctgaaattgaggaagtagagaacgccgatatcaac

SEQ ID NO: 670719 - DNA, 75 bp, synthetic construct
  source 1..75: mol_type = other DNA
ctgattggctggatgtaacagagaacgcattatttaatcgccttcgtgccgatggtgatcagttttttccgttgg

SEQ ID NO: 670720 - DNA, 75 bp, synthetic construct
  source 1..75: mol_type = other DNA
ctgagtggctggatgtaacagagaacgctttattcaaccgccttcgtgccgatggtgatcagttttttccgttgg

SEQ ID NO: 670721 - DNA, 75 bp, synthetic construct
  source 1..75: mol_type = other DNA
aagtgccctggttaaaacagttgatctgatacagccctgccagaacaaggcgtgtgaacagaaatggtacgtttt

SEQ ID NO: 670722 - DNA, 75 bp, synthetic construct
  source 1..75: mol_type = other DNA
gattgctctggtgcgtcagcgactgagcatcccaggcggctgttgtagctttgatttacctacattgcacatttg

SEQ ID NO: 670723 - DNA, 75 bp, synthetic construct
  source 1..75: mol_type = other DNA
atgaagaattgttagatctgactatcggattacagacacgtattaatcagacatacgcagatttgacggattata

SEQ ID NO: 670724 - DNA, 75 bp, synthetic construct
  source 1..75: mol_type = other DNA
gctgaactgctggcgctggaagaaaagctggcacgtccgggaagcgatgtcgctctggacgatcaactctatcag

SEQ ID NO: 670725 - DNA, 75 bp, synthetic construct
  source 1..75: mol_type = other DNA
atgtcttccagagttttgaccccggacgtcgttggtattgacgccctggtacacgatcaccaaaccgttctggca

SEQ ID NO: 670726 - DNA, 75 bp, synthetic construct
  source 1..75: mol_type = other DNA
tggtggcactcacttcattgctgacgctgtggcgcagtctgcaaatggcgtctttgtgtctcttcctgacgtcga

SEQ ID NO: 670727 - DNA, 75 bp, synthetic construct
  source 1..75: mol_type = other DNA
gccgcgagtgtgcagctccgggcgtcgtggcgttttgtgtctgtggagaaactaacgcatgaacagtttaacggc

SEQ ID NO: 670728 - DNA, 75 bp, synthetic construct
  source 1..75: mol_type = other DNA
gccgatggcgatcagattttcccgctgggatgggcaatgattttgcaacgtgctggtggaactcacttcattgct

SEQ ID NO: 670729 - DNA, 75 bp, synthetic construct
  source 1..75: mol_type = other DNA
ggcggactagccaaacgagatgtgaacacggtcagcgaacctgacagccaaattccaccaggattcagagggtaa

SEQ ID NO: 670730 - DNA, 75 bp, synthetic construct
  source 1..75: mol_type = other DNA
catctggaactatgcgggcaataccctggtaaatcagcattcggacatcaacaaaacgcatgaaattcttcagga

SEQ ID NO: 670731 - DNA, 75 bp, synthetic construct
  source 1..75: mol_type = other DNA
attgaaatccgcggctgcctgacccagatgggtgacattccgctggaaatcaaagactggtcgcaggtcgagcaa

SEQ ID NO: 670732 - DNA, 75 bp, synthetic construct
  source 1..75: mol_type = other DNA
caatatggcgacgcgcattgttgatctcgatcgcggcaagcttgtgacctatccagggaattacgaccagtacct

SEQ ID NO: 670733 - DNA, 75 bp, synthetic construct
  source 1..75: mol_type = other DNA
ttgcttgaagatctggaagcgaagctggaagccttacaggcgcaggtggcggatgcctccttcttcagccagtct

SEQ ID NO: 670734 - DNA, 75 bp, synthetic construct
  source 1..75: mol_type = other DNA
tatctgcgtgaagccctgtcggtgtggctggccgcaggtaaaaaaattaattattccgtgcaggacaacgatatt

SEQ ID NO: 670735 - DNA, 75 bp, synthetic construct
  source 1..75: mol_type = other DNA
tgatgagcatcaacgcggtgaaaggtgtggaaattggtgatggttttgacgtggtagcgctgcgtggcagccaga

SEQ ID NO: 670736 - DNA, 75 bp, synthetic construct
  source 1..75: mol_type = other DNA
gatgcgcgcgctgaaaaaagagggcgactccatcggtgcgaaagtgactgttgttgccagtggcgtacctgccgg

SEQ ID NO: 670737 - DNA, 75 bp, synthetic construct
  source 1..75: mol_type = other DNA
tcttcgaaggcggcggtaaaattggtcgttatgtcggcggttatcatgatgcccgtggtcagcaagagcagtatg

SEQ ID NO: 670738 - DNA, 75 bp, synthetic construct
  source 1..75: mol_type = other DNA
ctggcgcgtttgttcctcaaaccaagcaacttattgattcttgacgaaccgaccaacgatcttgatgtcgaaacg

SEQ ID NO: 670739 - DNA, 75 bp, synthetic construct
  source 1..75: mol_type = other DNA
gcttctcgataacgcagaactgcatatcgaagataacgaacgtgtttgtctggtgggccgtaacggcgcgggcaa

SEQ ID NO: 670740 - DNA, 75 bp, synthetic construct
  source 1..75: mol_type = other DNA
ggtatggatccgtcaggggatcaaagcgcgtcgtacccgtaacgaaggtcgcgtgcgtgcattgaaagcgatgcg

SEQ ID NO: 670741 - DNA, 75 bp, synthetic construct
  source 1..75: mol_type = other DNA
tatgtcggcggttatcatgatgcccgtggtcagcaagaacagtatgtggcgctcaaacagcctgcggtgaaaaaa

SEQ ID NO: 670742 - DNA, 75 bp, synthetic construct
  source 1..75: mol_type = other DNA
gcattatttacgagcaagatttgatcgtggctcgtctgcaacaggatccgccgcgtaacgttgagggcagcgttt

SEQ ID NO: 670743 - DNA, 75 bp, synthetic construct
  source 1..75: mol_type = other DNA
agatgggcgacattccgctggaaatcaaagactggtcgcaggtcgagcaaaatccattcttctgcccggacccgg

SEQ ID NO: 670744 - DNA, 75 bp, synthetic construct
  source 1..75: mol_type = other DNA
ctccggtggtggaagttttccacagtcaacggaggctgccatcatggctacgatcccaaccctcactcaacctga

SEQ ID NO: 670745 - DNA, 75 bp, synthetic construct
  source 1..75: mol_type = other DNA
tgaattcaacataggggctgtcaccatgactaccaccactacccacccattcctcaaaattgagattattaacgg

SEQ ID NO: 670746 - DNA, 75 bp, synthetic construct
  source 1..75: mol_type = other DNA
tccgcaccgctgacaataagctttataccgggataaccacggatgttgaacgccgctatcagcagcatcaaagcg

SEQ ID NO: 670747 - DNA, 75 bp, synthetic construct
  source 1..75: mol_type = other DNA
tctgcggtcaaacgcctgatgaactgttacggtggttcgcttaaccagtatggctcttacagtactgcacaaatt

SEQ ID NO: 670748 - DNA, 75 bp, synthetic construct
  source 1..75: mol_type = other DNA
tcaggcaccttataaagcgggtgccgggcgtggaaacccggaattcaccaaagcgcacaaccgcgctcttgcggt

SEQ ID NO: 670749 - DNA, 75 bp, synthetic construct
  source 1..75: mol_type = other DNA
gcccaaattatggtgtggcgtgcagggccaatttcggttgggccgggttctatgttgaccggtatttccacccct

SEQ ID NO: 670750 - DNA, 75 bp, synthetic construct
  source 1..75: mol_type = other DNA
ggctggccgcaggtgaaaaaattaattattccgtgcaggacaacgatattttaacggccatcggattcaggcctg

SEQ ID NO: 670751 - DNA, 75 bp, synthetic construct
  source 1..75: mol_type = other DNA
gtggtggcgctgcgcggcagccagaaccgcgacgaaatcaccaaagacggtttccagagcaaccatgcgggcggc

SEQ ID NO: 670752 - DNA, 75 bp, synthetic construct
  source 1..75: mol_type = other DNA
tgatcgaaaacaccgatcaacgttcccaggattacagcgcaattaaagatgttttccgcccgggtcatgccgatt

SEQ ID NO: 670753 - DNA, 75 bp, synthetic construct
  source 1..75: mol_type = other DNA
gagcgtctggtagcggaaggcgtagggtttgcagagttattaaggagtctgcaaaccccggagattaaaagcgat

SEQ ID NO: 670754 - DNA, 75 bp, synthetic construct
  source 1..75: mol_type = other DNA
cgccgctatcagcagcaccaaagcggcaaaggggcgaaagcactgcgcgggaaaggagaactgacgctggcgttt

SEQ ID NO: 670755 - DNA, 75 bp, synthetic construct
  source 1..75: mol_type = other DNA
gcttctgtcaggagaaggcagaaacgtcagccgcctggacgaattacgcaatattatcgaagtcagaaaatggca

SEQ ID NO: 670756 - DNA, 75 bp, synthetic construct
  source 1..75: mol_type = other DNA
gttactgctgtttttagagcgcatcagcgttaaaaaattgatgattgccctggggattggtgcgggactcacggc

SEQ ID NO: 670757 - DNA, 75 bp, synthetic construct
  source 1..75: mol_type = other DNA
agcgttaaaaaattgatgatagcgttagggattggcgcggggctcacggcgtttaactatttgtttggtcagtct

SEQ ID NO: 670758 - DNA, 75 bp, synthetic construct
  source 1..75: mol_type = other DNA
gaaccggcatttttcgctctggcattaatctcaatttggctcagcatcaaacagtttggtatcaaaacgcctaaa

SEQ ID NO: 670759 - DNA, 75 bp, synthetic construct
  source 1..75: mol_type = other DNA
tttggtgtgggcggcaccagcgcaacgggcgttttccgactggcaggtcacctgtaataaccaaaatttctgtgt

SEQ ID NO: 670760 - DNA, 75 bp, synthetic construct
  source 1..75: mol_type = other DNA
aacggctgggtatctgtactacgtatttaaaatgttcattaacgcttttgggaataatcgtaatttcgccgtgca

SEQ ID NO: 670761 - DNA, 75 bp, synthetic construct
  source 1..75: mol_type = other DNA
aatctgaaaaaactgatgattgccctcggactgggcgtgggattgacgttgttcaactatctgtttggacaatcg

SEQ ID NO: 670762 - DNA, 75 bp, synthetic construct
  source 1..75: mol_type = other DNA
cgcataacggtctgcgcatccagatgaacggaaccgcctctgatatcgcctgtgttcaggtcattaatacaactc

SEQ ID NO: 670763 - DNA, 75 bp, synthetic construct
  source 1..75: mol_type = other DNA
gggcatgccgctgcctttaacgcaaagttctaaaccggtcatcaatgccgagcacgatggtcgccactggcgacg

SEQ ID NO: 670764 - DNA, 75 bp, synthetic construct
  source 1..75: mol_type = other DNA
ggcgttctggttgccctacgtccggtaccgggtatccgcgttgaacaagccctgacgctgtgtcgccctaaccgt

SEQ ID NO: 670765 - DNA, 75 bp, synthetic construct
  source 1..75: mol_type = other DNA
ggataacggtggcgatgccgacttgctgcgcctgaatctgtcgctcgattcacagctttatccgcaaatttccgg

SEQ ID NO: 670766 - DNA, 75 bp, synthetic construct
  source 1..75: mol_type = other DNA
gacagccaggtagaaacctggattgccagcctgaacccgctcacccaggcacttaccatggtgctggatttaatt

SEQ ID NO: 670767 - DNA, 75 bp, synthetic construct
  source 1..75: mol_type = other DNA
tcataagagtcgttttgccattcgctttatgccactggacagtgagaacggacaggtgccggagcgtctggactt

SEQ ID NO: 670768 - DNA, 75 bp, synthetic construct
  source 1..75: mol_type = other DNA
ttttctcagaagtggccgtccaggcggtcaccgaactcgataataaagcggctcattgccatacgccagtcccgc

SEQ ID NO: 670769 - DNA, 75 bp, synthetic construct
  source 1..75: mol_type = other DNA
atgaaagcttcactggcgctggtcagcctgctaacggcatttaccagccactccttaaaatctcccgccattcca

SEQ ID NO: 670770 - DNA, 75 bp, synthetic construct
  source 1..75: mol_type = other DNA
acgctcattatgacgccctcgaaacccgcttctggcagttttatccgcggatgatggcgcaggcgtcacgcaagg

SEQ ID NO: 670771 - DNA, 75 bp, synthetic construct
  source 1..75: mol_type = other DNA
attaaaattgattaaatccccaaaaaaattcgctcaagacatgctcttgaaaaaaaataaaaaaaatgaaataat

SEQ ID NO: 670772 - DNA, 75 bp, synthetic construct
  source 1..75: mol_type = other DNA
tttgccgattatccgcaaaagtggaagttaaagcgcccggacagcaacatcgatcaccgtcgggtgcctaatctg

SEQ ID NO: 670773 - DNA, 75 bp, synthetic construct
  source 1..75: mol_type = other DNA
gaaacctggtttacccgccacgataaaacacgccccaccagcaaaaacgccagtgactaccaagcgggcgatatt

SEQ ID NO: 670774 - DNA, 75 bp, synthetic construct
  source 1..75: mol_type = other DNA
ctggtgatacataacattggcgcaggcgcgcaggaagaagatgtgttgtttagctggcagattgtcgggcactac

SEQ ID NO: 670775 - DNA, 75 bp, synthetic construct
  source 1..75: mol_type = other DNA
gcacatgacggcgctggagaacgtcatgctggctccgcggcgggtgctgaagaagtcccaggccgaatgccggga

SEQ ID NO: 670776 - DNA, 75 bp, synthetic construct
  source 1..75: mol_type = other DNA
ctacctgatgagaaacgactcgcggatgaactcgttcgaacacaggcggtgttagaggaaggctatagacgccgt

SEQ ID NO: 670777 - DNA, 75 bp, synthetic construct
  source 1..75: mol_type = other DNA
ggcgagtgaatataagatgcaactacctgatgaaaaacgactcgcggatgaactcgttcgaacacaggcggtgct

SEQ ID NO: 670778 - DNA, 75 bp, synthetic construct
  source 1..75: mol_type = other DNA
gtaaaaaagtgattcttgcactgcaactacccggagatactactttagataaagaatcatatccacttcaactca

SEQ ID NO: 670779 - DNA, 75 bp, synthetic construct
  source 1..75: mol_type = other DNA
tttcagaatgttacccagcagagcttttaacgttaatacactatcaagatttaataacttttagtgcagctgtaa

SEQ ID NO: 670780 - DNA, 75 bp, synthetic construct
  source 1..75: mol_type = other DNA
caactgtgctcaggtagcaacaaaccgttcttcgaaatcaaaaatggcgtaccgacggtaggagtcatcgacaca

SEQ ID NO: 670781 - DNA, 75 bp, synthetic construct
  source 1..75: mol_type = other DNA
gggaaaataccgctagcctgcgcgccaccgatgaacgtttgttattggcctgcggtgcaaatatggttattccgt

SEQ ID NO: 670782 - DNA, 75 bp, synthetic construct
  source 1..75: mol_type = other DNA
cgagacggtgctggtcgatccgaaacgcacctttatgagtatcagcggtgcgcagatccgcgaaaacccgttccg

SEQ ID NO: 670783 - DNA, 75 bp, synthetic construct
  source 1..75: mol_type = other DNA
taagatgcaactacctgatgagaaacgactcgcggatgaactcgttcgaacacaggcggtgttagaggaaggcta

SEQ ID NO: 670784 - DNA, 75 bp, synthetic construct
  source 1..75: mol_type = other DNA
ctggtctgttcgccagctagaacggcaaattgcgacccaattttatgagcgaacactactgtcacatgacaaatc

SEQ ID NO: 670785 - DNA, 75 bp, synthetic construct
  source 1..75: mol_type = other DNA
gacaccgtctgcagaattcccatcggcaaagatttggcagacgctgtctgccaaatctttccccctgccctggtc

SEQ ID NO: 670786 - DNA, 75 bp, synthetic construct
  source 1..75: mol_type = other DNA
tacgccaataaagtggcgtttattgacactgattttgtcactacccaggcgttctgcaaaaagtacgaagggcgt

SEQ ID NO: 670787 - DNA, 75 bp, synthetic construct
  source 1..75: mol_type = other DNA
ccccagcgcgcaaaagctggaggcgttgcaccgttttttggggcttgaatttccccggcagaagaaaaccattgg

SEQ ID NO: 670788 - DNA, 75 bp, synthetic construct
  source 1..75: mol_type = other DNA
tggggattggcgcgggactcacggcgtttaactacctgtttggtcagtcgttggatgccagtaaatacgtcactt

SEQ ID NO: 670789 - DNA, 75 bp, synthetic construct
  source 1..75: mol_type = other DNA
acagtttggtatcaaaacgcctaaaacagatgctatgattctcgcagggataatattatccggatcgttttcagg

SEQ ID NO: 670790 - DNA, 75 bp, synthetic construct
  source 1..75: mol_type = other DNA
caagcgcacgacagcactttatttcgaaccggcatttttcgctctggcattaatctcaatttggctcagcatcaa

SEQ ID NO: 670791 - DNA, 75 bp, synthetic construct
  source 1..75: mol_type = other DNA
gaggcgctctgggatcatctggggaataatcaggtgctgtcggtaaacagattggtttacttttcattgctgaaa

SEQ ID NO: 670792 - DNA, 75 bp, synthetic construct
  source 1..75: mol_type = other DNA
ttacaggcgaaaaaatcagatagtgccacgacggatgccacctttctggatagatacggtacgaatattgcctct

SEQ ID NO: 670793 - DNA, 75 bp, synthetic construct
  source 1..75: mol_type = other DNA
ctgattatttatttttcctggttcgcagtgtttttatcgctgtggtacatggggaaagtgataaaaatgatgatc

SEQ ID NO: 670794 - DNA, 75 bp, synthetic construct
  source 1..75: mol_type = other DNA
gaatttgaacaaggcggcgaggccagagcggcttatggtgcacagcttatcaaacggctctcaaaggatttaagt

SEQ ID NO: 670795 - DNA, 75 bp, synthetic construct
  source 1..75: mol_type = other DNA
ccgcccttctccgggataaaatcacatccgatgtcgatctggcatacacattgatacaggtaaatgaaaagtctc

SEQ ID NO: 670796 - DNA, 75 bp, synthetic construct
  source 1..75: mol_type = other DNA
gactcaaggcacagcaggaaatgaaaaaaaatgctgctgttgtttctgatattgaacagatcattgccaataaac

SEQ ID NO: 670797 - DNA, 75 bp, synthetic construct
  source 1..75: mol_type = other DNA
attgcccgtccggatatcgaacctgatggacagataatccgtgtcgatataaatctggtttatgctgaagaacaa

SEQ ID NO: 670798 - DNA, 75 bp, synthetic construct
  source 1..75: mol_type = other DNA
tgctgtttctctcattctgtcggattaacgatctggataccgcgttgaatcatattttcccattgcctactggcg

SEQ ID NO: 670799 - DNA, 75 bp, synthetic construct
  source 1..75: mol_type = other DNA
acaaaggcagcttccgctggccacgtgcaaatgacgctgcctggcacctcactcccgacgagtttaactggctga

SEQ ID NO: 670800 - DNA, 75 bp, synthetic construct
  source 1..75: mol_type = other DNA
atatttatgttggtaaaccaccgcgggaaagaaaagaacgcatcatcggtcagctcattgaaaacctgcagcagt

SEQ ID NO: 670801 - DNA, 75 bp, synthetic construct
  source 1..75: mol_type = other DNA
aaatgccgatattaatcgccgcgttaacacgctggcgcttgcagataatcaaggagaaaacctcacgtttgcatt

SEQ ID NO: 670802 - DNA, 75 bp, synthetic construct
  source 1..75: mol_type = other DNA
cgtgaactggcattacgtattacatcgctgttagatttcctgccattatatgacgtcgactgccaggataatggt

SEQ ID NO: 670803 - DNA, 75 bp, synthetic construct
  source 1..75: mol_type = other DNA
gtatgctggataaccggcacgatgccgatcctgaaccaaccgggaaagcagaagcgactgagccggtaacatcaa

SEQ ID NO: 670804 - DNA, 75 bp, synthetic construct
  source 1..75: mol_type = other DNA
catgatgctggttggtgataatcttgatggtattaaaggaatgatacatgacctcgatcccgacgctggcgctta

SEQ ID NO: 670805 - DNA, 75 bp, synthetic construct
  source 1..75: mol_type = other DNA
aacgcgtgaagcgacgccgggtaaagaagttgaagcaatcactcgtcgaatgcttgatttcagcccaagactgaa

SEQ ID NO: 670806 - DNA, 75 bp, synthetic construct
  source 1..75: mol_type = other DNA
tatgacctgggtgagtaccggctggtccttaagttttcacccggttttaaccactacaatgttgatagcaaagcg

SEQ ID NO: 670807 - DNA, 75 bp, synthetic construct
  source 1..75: mol_type = other DNA
tgtttaccgcctggcaacaggctggagcccccgcaaaagacaactgggcatttctggcgttaagtctctttggcg

SEQ ID NO: 670808 - DNA, 75 bp, synthetic construct
  source 1..75: mol_type = other DNA
tgaagacgaatttgtctatggcttaggtgagtatcgtctggtgcttaagttttcacccggttttcaccactacaa

SEQ ID NO: 670809 - DNA, 75 bp, synthetic construct
  source 1..75: mol_type = other DNA
gattggcattgcgcacccgttagaaatgccaacagaaatgcgtggtgaatttgcacaactttttgccgattacga

SEQ ID NO: 670810 - DNA, 75 bp, synthetic construct
  source 1..75: mol_type = other DNA
tccacgtcttgatttggcatcgctcgaattaactccgcaagtttactggcaaccaggcgaacaagagaggcttgc

SEQ ID NO: 670811 - DNA, 75 bp, synthetic construct
  source 1..75: mol_type = other DNA
gtggcctgaacatacttaccctgatgaataatgatatggcgctgatacaactgcaccatatttcgcaacgagcga

SEQ ID NO: 670812 - DNA, 75 bp, synthetic construct
  source 1..75: mol_type = other DNA
gattttacaatggccggaacatacggctactgcacttattccactcgtctttgttaaaccctgcgacaacagcga

SEQ ID NO: 670813 - DNA, 75 bp, synthetic construct
  source 1..75: mol_type = other DNA
accaaagttcgccgcccttttattgcgctgatcctcccggaaaaaccagaaatagccaatgagttggtaggcctt

SEQ ID NO: 670814 - DNA, 75 bp, synthetic construct
  source 1..75: mol_type = other DNA
gatccccactgttcgccgcccttttattgcgcagatgcttccagaaaaaccagatatagcgaatgaacttgccag

SEQ ID NO: 670815 - DNA, 75 bp, synthetic construct
  source 1..75: mol_type = other DNA
cactttgcagtatcaggacgaggactatggctacggttatggctccgcgacctataacgatttcgatctccgttt

SEQ ID NO: 670816 - DNA, 75 bp, synthetic construct
  source 1..75: mol_type = other DNA
aatagcgaagctgcattacttgccctgcgtttactgtatgaacaagggcatggcgaattactgcaaaccgtggca

SEQ ID NO: 670817 - DNA, 75 bp, synthetic construct
  source 1..75: mol_type = other DNA
aaaagcgttccccggttgcgcgccgatgacgatcaactgaaagcacccgaggcactggcccgactaaaagggcta

SEQ ID NO: 670818 - DNA, 75 bp, synthetic construct
  source 1..75: mol_type = other DNA
tacacatcaataggactattgcgtacttatcacgcgcatcaggccaaatctaaacagtatcgtgaagaagccacc

SEQ ID NO: 670819 - DNA, 75 bp, synthetic construct
  source 1..75: mol_type = other DNA
gcggagaatgcgggaataaagtctgcaattccagaaccacgggatattgaggatgacaatgacaatatggatgac

SEQ ID NO: 670820 - DNA, 75 bp, synthetic construct
  source 1..75: mol_type = other DNA
accctggttcagacctggtagggaaggttgaaatgactgagtggttagttgactttgctgcccagcttcgcaaag

SEQ ID NO: 670821 - DNA, 75 bp, synthetic construct
  source 1..75: mol_type = other DNA
ggaagatgatgttactgaaaccccagccaccgatgctttcctggctgaagtacgggcgcagggcgtggagatggc

SEQ ID NO: 670822 - DNA, 75 bp, synthetic construct
  source 1..75: mol_type = other DNA
cgtatcgacggtctgaacaaagcccttagcgaagtacgggcgaattgttcggatagtcagttgcgtgccgatcat

SEQ ID NO: 670823 - DNA, 75 bp, synthetic construct
  source 1..75: mol_type = other DNA
cctgatagggaaggttgaaatgactgagtggttagttgactttgctgcccagcttcgcaaaggaggcaaccagtg

SEQ ID NO: 670824 - DNA, 75 bp, synthetic construct
  source 1..75: mol_type = other DNA
tggaggccatgaaggcaacaggaaatatgccagccaccgatgctttcctgtctgaagtgcgggcgctgggggtgg

SEQ ID NO: 670825 - DNA, 75 bp, synthetic construct
  source 1..75: mol_type = other DNA
gacgtttttatagcgggctggaacaactgaaaacgttctgccagccacaaacgctggccgcttttgcctgggatc

SEQ ID NO: 670826 - DNA, 75 bp, synthetic construct
  source 1..75: mol_type = other DNA
aacacaaaccctcagtcccggcccgcacaatggcggcgctagcctgtatcgcgcaaaatgacagccaacagttgc

SEQ ID NO: 670827 - DNA, 75 bp, synthetic construct
  source 1..75: mol_type = other DNA
aaaaacaaacccagcctgcaacgtgtggctaaatacagtaaaaacttcccccatgcgacgcttgccgcactggca

SEQ ID NO: 670828 - DNA, 75 bp, synthetic construct
  source 1..75: mol_type = other DNA
accgggatggaaagcaaagcggagtagttattcctgacaaacatgctgtatgggctgcgcgtgaagccatcgccc

SEQ ID NO: 670829 - DNA, 75 bp, synthetic construct
  source 1..75: mol_type = other DNA
gaataatgatatggcgctgatacagctgcatcatatatcgcaacgggcgaaatcccgccccttacgtgataacgc

SEQ ID NO: 670830 - DNA, 75 bp, synthetic construct
  source 1..75: mol_type = other DNA
gcgtgatctggctcgccagtggattttacaatggccggaacatacggctactgcacttatccctcttgtcttcac

SEQ ID NO: 670831 - DNA, 75 bp, synthetic construct
  source 1..75: mol_type = other DNA
acgtaaagcgcctgaagcactggctcgcctgaaaggattgagaaaagacgcgactcagatcagcaaagatctgct

SEQ ID NO: 670832 - DNA, 75 bp, synthetic construct
  source 1..75: mol_type = other DNA
aaacgctgggatctgtcgccgcaaaatgtggtagccattggtgacagcggtaatgacgcagagatgcttaaaatg

SEQ ID NO: 670833 - DNA, 75 bp, synthetic construct
  source 1..75: mol_type = other DNA
ccttgccgaaggcgaagacgctctcagctttagtgagtttaaagaggcgctttccagttcggcaaaatctaacgg

SEQ ID NO: 670834 - DNA, 75 bp, synthetic construct
  source 1..75: mol_type = other DNA
accctgtagccatcatggtcgtacgccaccgtgctgtgacgcactcatcgccgctggcgtagcgcgcgtggttgc

SEQ ID NO: 670835 - DNA, 75 bp, synthetic construct
  source 1..75: mol_type = other DNA
cggcgaaaatcttcaggatcacctggagatgtatctgcaatatgagtgcaaagaaccggtttccctctaccctgc

SEQ ID NO: 670836 - DNA, 75 bp, synthetic construct
  source 1..75: mol_type = other DNA
atgtcagaacaacggatgccttgcaaacggggatgcgttcatacagagctgttatgtgcaggtgcgatcgcctct

SEQ ID NO: 670837 - DNA, 75 bp, synthetic construct
  source 1..75: mol_type = other DNA
gccgaaggcgaagaagctctcagcttcagtgaatttaaacaggcgctttccagttcggcaaaatctaacggctga

SEQ ID NO: 670838 - DNA, 75 bp, synthetic construct
  source 1..75: mol_type = other DNA
gggcttgagaaattagccgacgccccccaatttaaattcaaagagatacgtcatgtaggcccggatgtttgcctg

SEQ ID NO: 670839 - DNA, 75 bp, synthetic construct
  source 1..75: mol_type = other DNA
tattgtgattgatagccaaaatcgcgtgacgccggaacatcgcattgtgcagcagcccggcgaaacctggttcgc

SEQ ID NO: 670840 - DNA, 75 bp, synthetic construct
  source 1..75: mol_type = other DNA
cgtggcgcgtgtggttgccgcgatgcaggaccccaatccgcaggttgcaggacgagggctttatcgcctgcaaca

SEQ ID NO: 670841 - DNA, 75 bp, synthetic construct
  source 1..75: mol_type = other DNA
tcatgatgcagctgggtaaacagcagattaacagcatatgggtagaagcggggccaaccctggcaggggcactac

SEQ ID NO: 670842 - DNA, 75 bp, synthetic construct
  source 1..75: mol_type = other DNA
ggctggcattgacgtcagccacggcctgatgatgagtgaagccgagcaattgaataaaggctttctcaagcggat

SEQ ID NO: 670843 - DNA, 75 bp, synthetic construct
  source 1..75: mol_type = other DNA
gctctacccgcaacaaaatctccgccagccggtacgtattgtgattgatagccaaaatcgcgtgacgccggaaca

SEQ ID NO: 670844 - DNA, 75 bp, synthetic construct
  source 1..75: mol_type = other DNA
ggacaggaagcgttgccgaggagcacggcgggatattttgtggcaaatgggatgccggtgagagcgaaaaaatga

SEQ ID NO: 670845 - DNA, 75 bp, synthetic construct
  source 1..75: mol_type = other DNA
gatcagcaaaacgttcgccagaaaagcgttccccggttgcgcgccgatgacgatcaactgaaagcgcccgaggca

SEQ ID NO: 670846 - DNA, 75 bp, synthetic construct
  source 1..75: mol_type = other DNA
ctgaacatccttaccctgatgaataatgatatggcgctgatacagctgcatcatatatcgcaacgggcgaaatcc

SEQ ID NO: 670847 - DNA, 75 bp, synthetic construct
  source 1..75: mol_type = other DNA
cgactaaaagggctaaaaaaagatgctactcaggtgagcaaaaacctgctcccgcgtcttgaagctgccctacgt

SEQ ID NO: 670848 - DNA, 75 bp, synthetic construct
  source 1..75: mol_type = other DNA
gctacgcggcctgcgccgcccttttgcgcgaacaaggactggcagccgttccacgcctggcaatgtatgcccata

SEQ ID NO: 670849 - DNA, 75 bp, synthetic construct
  source 1..75: mol_type = other DNA
ctactcacgctatcgtcgggaaaagagtatctggaacctgtatttattggcacagttgccgcgtgagatagcttt

SEQ ID NO: 670850 - DNA, 75 bp, synthetic construct
  source 1..75: mol_type = other DNA
catcgcagccacaactggcagaagaggtgatgccgtggttaagtactcaagcccgggcagtgctgaatagttatt

SEQ ID NO: 670851 - DNA, 75 bp, synthetic construct
  source 1..75: mol_type = other DNA
catccaccagcaggacgtgtgaccatctaatgatcgaccttgaaaccatgggaaaaatcctgatgccccgatcat

SEQ ID NO: 670852 - DNA, 75 bp, synthetic construct
  source 1..75: mol_type = other DNA
aagacgaatccggcagaggcttaccggctggctgcatgggctgacgatgagccgttacccgtgacacaggtcaga

SEQ ID NO: 670853 - DNA, 75 bp, synthetic construct
  source 1..75: mol_type = other DNA
ttaaattgacagagtttgtttttcctcttgcagaatatgggactgatttattttaccatgattttaaagagttaa

SEQ ID NO: 670854 - DNA, 75 bp, synthetic construct
  source 1..75: mol_type = other DNA
aagtgtgctgggtaccgatgctttgcctggattaaacaccgcctttgcccgacatccaaaagagatatttccgct

SEQ ID NO: 670855 - DNA, 75 bp, synthetic construct
  source 1..75: mol_type = other DNA
caaacaagaacgttccggggctgattagaggcgcagagatatgcgtaagtattgctgaacagcttcgcaaaggag

SEQ ID NO: 670856 - DNA, 75 bp, synthetic construct
  source 1..75: mol_type = other DNA
tgaaagaacgaatcgaaaaggcacttgaagacttcaccaaaggccgcgccagcatgcatgttcctccgcttgata

SEQ ID NO: 670857 - DNA, 75 bp, synthetic construct
  source 1..75: mol_type = other DNA
tgttttttctgttgatatttttcttcctgttattgtttctgcgatgttcacgcgtttctttattcgtcgtattcc

SEQ ID NO: 670858 - DNA, 75 bp, synthetic construct
  source 1..75: mol_type = other DNA
ttgcctgatatcggtgagcaggtggaggtgctgctggatgcaaatggtgaggacggtgttatcctgggggccgtt

SEQ ID NO: 670859 - DNA, 75 bp, synthetic construct
  source 1..75: mol_type = other DNA
tcatcacgggtaatgtccgcgtcaccggcaatatcagtgcgtcaggctctatcatcgacgctggcggcaatacca

SEQ ID NO: 670860 - DNA, 75 bp, synthetic construct
  source 1..75: mol_type = other DNA
cttgcctttctctgcggcacaatccttcccggtaactggctggtcgtcatgattaatctggtgttctgcgtgctg

SEQ ID NO: 670861 - DNA, 75 bp, synthetic construct
  source 1..75: mol_type = other DNA
ttttaacctgctgttctgcgtgctggtgatacgcgcacgtgggaacgtcacaaaaatctttgtattacgaaggcg

SEQ ID NO: 670862 - DNA, 75 bp, synthetic construct
  source 1..75: mol_type = other DNA
tgaataccgcaattgcgtttgtttttcgtgccgttgtgattaagtttgtgctttttacggcggtttatcttttta

SEQ ID NO: 670863 - DNA, 75 bp, synthetic construct
  source 1..75: mol_type = other DNA
acttattcttgaaaactcatatcaaatagcacaaatatcaaacatggtggggatatctagtacttcatattttat

SEQ ID NO: 670864 - DNA, 75 bp, synthetic construct
  source 1..75: mol_type = other DNA
aaaaaactctatcagttcggacagcaatagcagttcgggaagttcgggaagttcgggcagtagttccagtgattc

SEQ ID NO: 670865 - DNA, 75 bp, synthetic construct
  source 1..75: mol_type = other DNA
gggtaaagcccttcctcagccagctggtgttgcgttaccagtccaggaaacggctgcacaggaagaaattaaaac

SEQ ID NO: 670866 - DNA, 75 bp, synthetic construct
  source 1..75: mol_type = other DNA
actggcttaacgtactgcagcgcaacacccaggataacaaggattactggctacctgacgtgggggagcaggttg

SEQ ID NO: 670867 - DNA, 75 bp, synthetic construct
  source 1..75: mol_type = other DNA
tgtggtgatcgaggttgcagtgggtattagtctgaaagggaaaaccattgatttgacagctgacactatcatggt

SEQ ID NO: 670868 - DNA, 75 bp, synthetic construct
  source 1..75: mol_type = other DNA
tgatcatccggggcggcattgagcatattgtcattgagtgtggtgctgatgtggtattgaaatgttgtctgatgg

SEQ ID NO: 670869 - DNA, 75 bp, synthetic construct
  source 1..75: mol_type = other DNA
tgaatgtggcgttgtgctcgtttatcgtgccgacgctctttttttatcgccgtcgtgactccagacacaaaccgc

SEQ ID NO: 670870 - DNA, 75 bp, synthetic construct
  source 1..75: mol_type = other DNA
aactgtgcatttaattggcggctgcgatgtggctatggagctggacgcacgacgggcgatcgcgaaggggacacg

SEQ ID NO: 670871 - DNA, 75 bp, synthetic construct
  source 1..75: mol_type = other DNA
atgaagagatcctgcaactgatcgacgatttcgcccgctgcgcgcaactggcgcgggaggccggatacgatggcg

SEQ ID NO: 670872 - DNA, 75 bp, synthetic construct
  source 1..75: mol_type = other DNA
accgcgcattccgcctatcgacggaatcgatcatccgaaggtgttgagttatctcgacgtactgcgcgacaaagc

SEQ ID NO: 670873 - DNA, 75 bp, synthetic construct
  source 1..75: mol_type = other DNA
agaacaagcggaatacctgaaacgctatcacgatatttcgcgcctggtgatgaatgacccgagcgagaaaaatct

SEQ ID NO: 670874 - DNA, 75 bp, synthetic construct
  source 1..75: mol_type = other DNA
tcgacagtagcctacaacaggctggtggcttaagcccgcagggaatgcagatcccgcgtagcccacggcagattg

SEQ ID NO: 670875 - DNA, 75 bp, synthetic construct
  source 1..75: mol_type = other DNA
aaccgtgcatttaatcggtggctgcgatgtggcaatggaactggacgcgcggcgagcgatagcgcagggaacaca

SEQ ID NO: 670876 - DNA, 75 bp, synthetic construct
  source 1..75: mol_type = other DNA
tcggcgggcagtttaatatcgccaaacagatccctggcaaagaggagttttacgaaacgctgcgctattaccgcc

SEQ ID NO: 670877 - DNA, 75 bp, synthetic construct
  source 1..75: mol_type = other DNA
tagcggcgaactggctggcggtggggcttaatctgctgttctgcgtgctggtgattcgtgcacgtgggaacgttt

SEQ ID NO: 670878 - DNA, 75 bp, synthetic construct
  source 1..75: mol_type = other DNA
ctcagctatctgtgtggtcgcccgttagcggcgaactggctggcggtggggcttaatctgctgttctgcgtgctg

SEQ ID NO: 670879 - DNA, 75 bp, synthetic construct
  source 1..75: mol_type = other DNA
tgatgctccagcgcaaagccagcaaaccaggacaagggttaggcaaaaccaccggctggatccatcgcaccaccc

SEQ ID NO: 670880 - DNA, 75 bp, synthetic construct
  source 1..75: mol_type = other DNA
tgctctcgcggggtgtgaaaatgatcccaggcgtaagttatcagaagattgacgatgacgggctgcatgtggtga

SEQ ID NO: 670881 - DNA, 75 bp, synthetic construct
  source 1..75: mol_type = other DNA
atgagctacccgtcgctgttcgccccgcttgatttaggcttcaccacgttaaaaaaccgtgtgctgatgggctca

SEQ ID NO: 670882 - DNA, 75 bp, synthetic construct
  source 1..75: mol_type = other DNA
gcggtcaacgaactgtggaaactgaagcgccgtggtgaagcggataacaaggggtcgatgtggtggctgattcag

SEQ ID NO: 670883 - DNA, 75 bp, synthetic construct
  source 1..75: mol_type = other DNA
tgaatcctattcagaatatgggcagaacattttcgaccgttatgttacctacgcggatttctggattcaggatca

SEQ ID NO: 670884 - DNA, 75 bp, synthetic construct
  source 1..75: mol_type = other DNA
agttttgcatattttaactatattttttgttatttattatttcttttgtgattatggcgtatatatatatgattt

SEQ ID NO: 670885 - DNA, 75 bp, synthetic construct
  source 1..75: mol_type = other DNA
ggctttggtaaacctgttggtaatccagaagaaagcactactacatggcgtgaagttcttaatcaaaatggtgtt

SEQ ID NO: 670886 - DNA, 75 bp, synthetic construct
  source 1..75: mol_type = other DNA
tcgttacccaacatggccgtctggtgaagactctgctcggcggcgacaacctgattgaagtgaataaccttgctg

SEQ ID NO: 670887 - DNA, 75 bp, synthetic construct
  source 1..75: mol_type = other DNA
cgaggagctgttgccggttatttcgtttaacgccaaaacgtcaaccgacgagcagaagaaacacgacgactttgt

SEQ ID NO: 670888 - DNA, 75 bp, synthetic construct
  source 1..75: mol_type = other DNA
agcagaagaaacacgacgactttgttgaccgtatgatggaaaaaggctacacccgtaaacaggtgcgtttactgt

SEQ ID NO: 670889 - DNA, 75 bp, synthetic construct
  source 1..75: mol_type = other DNA
tctgcctgttattacaggcctgttcagccactactcaagaactgggcaactcactgtgggacagcctgttcggta

SEQ ID NO: 670890 - DNA, 75 bp, synthetic construct
  source 1..75: mol_type = other DNA
agcaggtacgctacgccaccgcacgctcagtcttcaaatgggatggcaccgataccgtcaacgtcggcagcgatg

SEQ ID NO: 670891 - DNA, 75 bp, synthetic construct
  source 1..75: mol_type = other DNA
cttgtcctcccggagaaagggcatcatggtttttaccctgaagctggagttgtctatagaacagtagctccagaa

SEQ ID NO: 670892 - DNA, 75 bp, synthetic construct
  source 1..75: mol_type = other DNA
caagttctggtcagtgggattataaatatctcacagaaatgggggatggaaatgatactctcattgttggggcat

SEQ ID NO: 670893 - DNA, 75 bp, synthetic construct
  source 1..75: mol_type = other DNA
ccgagcaggcagtggccgatgcaaaagctcatttggaaaaggcactaaatactgtctatcagccaaataatgacc

SEQ ID NO: 670894 - DNA, 75 bp, synthetic construct
  source 1..75: mol_type = other DNA
tggtcaggttactgaagctgtcctgacccaggatggtcctgtactggagaatttcactgcagggcaaagtggcac

SEQ ID NO: 670895 - DNA, 75 bp, synthetic construct
  source 1..75: mol_type = other DNA
gaagactctgcttggcggcgacaacctgattgaagtgaataaccttgccgccgacccgctgattaaacccgcaca

SEQ ID NO: 670896 - DNA, 75 bp, synthetic construct
  source 1..75: mol_type = other DNA
ggcgtctgattcgcgtgaatcagggcggtaaatttcgttactgcatgccgggcgataatttaccagcagagccgg

SEQ ID NO: 670897 - DNA, 75 bp, synthetic construct
  source 1..75: mol_type = other DNA
cgttgataaaagcgtatacacctggcgtgtggcttatagcaacgttcagcaggaacagccagcgcgggcagaact

SEQ ID NO: 670898 - DNA, 75 bp, synthetic construct
  source 1..75: mol_type = other DNA
atggaaaccgtttttgacgcactgaaagcactgaaaagagcctcttcacaggaggtgtcggcccgccttggaatc

SEQ ID NO: 670899 - DNA, 75 bp, synthetic construct
  source 1..75: mol_type = other DNA
agcggataacaaggggtcgatgtggtggctgactcaggctggtgaaagtgaaccggtgtcaccggtaccgaaagt

SEQ ID NO: 670900 - DNA, 75 bp, synthetic construct
  source 1..75: mol_type = other DNA
tcgctggcaatggcaatcagcaaagggcgtctgattcgcgtgaatcagggcggtaaatttcgttactgcatgccg

SEQ ID NO: 670901 - DNA, 75 bp, synthetic construct
  source 1..75: mol_type = other DNA
agtgggagcgtgtctgtgccgcgctgcgggaactgaacaaacacagggatattctccgggatattaccaccacca

SEQ ID NO: 670902 - DNA, 75 bp, synthetic construct
  source 1..75: mol_type = other DNA
ggctggaccgagtaccagcaggtacgctacgccaccgcacgctcagtcttcaaatgggatggcaccgataccgtc

SEQ ID NO: 670903 - DNA, 75 bp, synthetic construct
  source 1..75: mol_type = other DNA
atatccgtacctgcgctgcacccgtattctccagccgggcatggtgttaaccatcgagccgggtatctacttcat

SEQ ID NO: 670904 - DNA, 75 bp, synthetic construct
  source 1..75: mol_type = other DNA
tggcgctgatcgccaccatgaaagcaggcgtcagctatgtggattaccatatccagttccatcagcgcatcgcca

SEQ ID NO: 670905 - DNA, 75 bp, synthetic construct
  source 1..75: mol_type = other DNA
ggtcaggttcagaagtgggagcgagtctgtgctgcgctgcgtgagctgaacaagcaccaggatattgttcgacag

SEQ ID NO: 670906 - DNA, 75 bp, synthetic construct
  source 1..75: mol_type = other DNA
atgcaatacaggaagaaattaaaacagaaactgtggcggacattgagcagtcgttgtcattgcttaccgaaacgc

SEQ ID NO: 670907 - DNA, 75 bp, synthetic construct
  source 1..75: mol_type = other DNA
atcccatcgaaaccctgaaagccgccgaaacgctggtacaacagggatttgtcgtgctgccttactgcggggccg

SEQ ID NO: 670908 - DNA, 75 bp, synthetic construct
  source 1..75: mol_type = other DNA
accccgatcctgaggtgcacgggtgacattgttgataactgtgaaaccaatacccgaacactgaaagagctgcgg

SEQ ID NO: 670909 - DNA, 75 bp, synthetic construct
  source 1..75: mol_type = other DNA
ctatgtgcgtaccaatgacaccggtttaaccttcaccgatgccagcgcacagggtgttggcgctacagcagtggg

SEQ ID NO: 670910 - DNA, 75 bp, synthetic construct
  source 1..75: mol_type = other DNA
gataccgatgcggttaacgtgggtcagttgaaagtaacggacgcgcaggtttcccagaatacccagagcattact

SEQ ID NO: 670911 - DNA, 75 bp, synthetic construct
  source 1..75: mol_type = other DNA
ggtacttacaacggtgaatcggctgttgctttaggtgtgtcgatggtgagcgccaatggtcgttgggtctacaaa

SEQ ID NO: 670912 - DNA, 75 bp, synthetic construct
  source 1..75: mol_type = other DNA
ggagcggtcgccactacgccaaccaagtactttcacgccaactcaacggcagaagactcactggccgttggtgaa

SEQ ID NO: 670913 - DNA, 75 bp, synthetic construct
  source 1..75: mol_type = other DNA
tgatgataacgccctgctgtgggatgagacagccaatggcggtacaggtgcctacaatgccagccatgacggtaa

SEQ ID NO: 670914 - DNA, 75 bp, synthetic construct
  source 1..75: mol_type = other DNA
agccgtttaatagttaaaggttctcgtgacaccagcgtgtcggaagaaggtgttgtgattggttatgacacaact

SEQ ID NO: 670915 - DNA, 75 bp, synthetic construct
  source 1..75: mol_type = other DNA
aaattcagcgccaaacacggcattaataatgctcccagtgtaatcactgatgttgcaaacggtgcagtctcgtcc

SEQ ID NO: 670916 - DNA, 75 bp, synthetic construct
  source 1..75: mol_type = other DNA
cggtgcaaatgccaccaacaaaataactaatgttgctaaaggtacggtttctgcaaccagcaccgatgtagtaaa

SEQ ID NO: 670917 - DNA, 75 bp, synthetic construct
  source 1..75: mol_type = other DNA
accgtaaccgcagtaagctacgtgttgagaagcggaacctataataacgtgggtgatgctctgtcaggaatcgac

SEQ ID NO: 670918 - DNA, 75 bp, synthetic construct
  source 1..75: mol_type = other DNA
acaacgacgcagtgaactatgcgcagttgaagcaaagtgtgcaggaaacgaagcaatacaccgatcagcgcatgg

SEQ ID NO: 670919 - DNA, 75 bp, synthetic construct
  source 1..75: mol_type = other DNA
atttggttcagaagcggaagcgaacgcccttgacagtgttgcattaggcagattatcacttgccagtgcagcgaa

SEQ ID NO: 670920 - DNA, 75 bp, synthetic construct
  source 1..75: mol_type = other DNA
aagcaagctgagtggtggtatcgcttctgcaatggcaatgaccggtctgccgcaggcttacacgccgggagccag

SEQ ID NO: 670921 - DNA, 75 bp, synthetic construct
  source 1..75: mol_type = other DNA
ggtaaagccagcatcatcactaatgtcgctaatggcagtattagtgaggacagtaccgatgcagtgaacggttct

SEQ ID NO: 670922 - DNA, 75 bp, synthetic construct
  source 1..75: mol_type = other DNA
ccgtagcagacgaagaaaatacgatctctgtgggttcttctaccaaccagcgccgtatcaccaacgttgctgccg

SEQ ID NO: 670923 - DNA, 75 bp, synthetic construct
  source 1..75: mol_type = other DNA
acattaccaaaacctttggcacggtgaaggcaattgataacgtcagtttgcggttgagcgttggcgaaatcgtct

SEQ ID NO: 670924 - DNA, 75 bp, synthetic construct
  source 1..75: mol_type = other DNA
gcatccggttaatcgccatattaaacgggttaacgatgtctctttttctctgaaacgcggtgaaatactgggtat

SEQ ID NO: 670925 - DNA, 75 bp, synthetic construct
  source 1..75: mol_type = other DNA
cggtgcattgtcaattggtgatgacggtaaataccgtcaaatcatcaacgtcgccgatggttccgaagcccatga

SEQ ID NO: 670926 - DNA, 75 bp, synthetic construct
  source 1..75: mol_type = other DNA
cgcagtcgccattggtgcaaattcttccgcaggtgctgacaataccgtgtctgtaggtagctccagtttaaagcg

SEQ ID NO: 670927 - DNA, 75 bp, synthetic construct
  source 1..75: mol_type = other DNA
ctctgtgggttcttctaccaaccagcgccgtatcaccaacgttgctgccggtgttaatgccaccgatgcggttaa

SEQ ID NO: 670928 - DNA, 75 bp, synthetic construct
  source 1..75: mol_type = other DNA
caatttaaaaaatggtagcaaaaataacgtaggggctgcgctcgctgtacttgatgaaaacaccctgcaatggga

SEQ ID NO: 670929 - DNA, 75 bp, synthetic construct
  source 1..75: mol_type = other DNA
aagtctgacagttacgatgccattaatggttcacagctttatgccattagcgactcggtagcaaaaaggcttgga

SEQ ID NO: 670930 - DNA, 75 bp, synthetic construct
  source 1..75: mol_type = other DNA
tgggtaacggttctcagaccacccgtggtgcacagactggctacaccgcctacaacatggacgcaccgcagaact

SEQ ID NO: 670931 - DNA, 75 bp, synthetic construct
  source 1..75: mol_type = other DNA
cgagttaatgatgtctcgttttccctgaaacgtggcgaaatactgggtattgccggactcgttggtgccggacgt

SEQ ID NO: 670932 - DNA, 75 bp, synthetic construct
  source 1..75: mol_type = other DNA
attctcattcttgatgaacctaccaggggtattgatattggcgcgaaatacgagatctacaaattaattaaccaa

SEQ ID NO: 670933 - DNA, 75 bp, synthetic construct
  source 1..75: mol_type = other DNA
tggataacaaactgtctaaaactgaaagcaagttgagcggtggtatcgcttctgcaatggcaatgaccggtctgc

SEQ ID NO: 670934 - DNA, 75 bp, synthetic construct
  source 1..75: mol_type = other DNA
cggttcccagttaaacgcaaccaatattctggttacgcaaaatagccaaatgattaaccagcttgctggtaacac

SEQ ID NO: 670935 - DNA, 75 bp, synthetic construct
  source 1..75: mol_type = other DNA
aacattgctgtcaaaaacgcatcttcagtacaaacaggaaaatggttagcttcgttaatagaaaaagttgcaaca

SEQ ID NO: 670936 - DNA, 75 bp, synthetic construct
  source 1..75: mol_type = other DNA
tattggagcactggctggagccacattaaacacgatgtttaccgactattatcaagatatggctcgaggtcattt

SEQ ID NO: 670937 - DNA, 75 bp, synthetic construct
  source 1..75: mol_type = other DNA
gcgctttagaaagagccgtagaattattagcacaagatacaattacagaaacactaacccaattagttggaaccc

SEQ ID NO: 670938 - DNA, 75 bp, synthetic construct
  source 1..75: mol_type = other DNA
atttatgaggtacagacagggagttctgaaggttcagggctggcgctggcagcaaaactgttatcagggcgtttt

SEQ ID NO: 670939 - DNA, 75 bp, synthetic construct
  source 1..75: mol_type = other DNA
ggtaacggggtatatttatgaggtgcagacagggcgctctgaaggttcggggctggcactggctgcaaaactgtt

SEQ ID NO: 670940 - DNA, 75 bp, synthetic construct
  source 1..75: mol_type = other DNA
ccggtaacttccggctcattcttatcaggtgagggggattcactggttttcagggggacacgttcagaactggca

SEQ ID NO: 670941 - DNA, 75 bp, synthetic construct
  source 1..75: mol_type = other DNA
ggatgaacactttgaagacatggccaaaaagacagtgatacgaaaactgttcaagtatctgccggtatctattga

SEQ ID NO: 670942 - DNA, 75 bp, synthetic construct
  source 1..75: mol_type = other DNA
agcggttaagagatctattgaaaaaacctatgctaccactagtattagaggtgacggtcaagtgatccttgtacc

SEQ ID NO: 670943 - DNA, 75 bp, synthetic construct
  source 1..75: mol_type = other DNA
aatataaaggaacgatttgggcggtacggcgggtactggaaatactttctctaccaggaactatttcagaatggt

SEQ ID NO: 670944 - DNA, 75 bp, synthetic construct
  source 1..75: mol_type = other DNA
tgaatgacgttcagtcttatcctcagtttttgccgggttgtaccggaagtcggattctggagtccactcctgggc

SEQ ID NO: 670945 - DNA, 75 bp, synthetic construct
  source 1..75: mol_type = other DNA
caaaattttttacccaaaacccggtaaaaaattttgcgttctgcccaggacaggtgcgtcaggccgtggcagtga

SEQ ID NO: 670946 - DNA, 75 bp, synthetic construct
  source 1..75: mol_type = other DNA
atggtgaataccggagggaacaaaaggcaggtccccgcaaaacgtcaaaaccgcggctcccgaaactcaacagat

SEQ ID NO: 670947 - DNA, 75 bp, synthetic construct
  source 1..75: mol_type = other DNA
acggataaccgctttaaggtggtatccgcgccgcagctgcgcatggattcaggcagggaggcgatattttccgtt

SEQ ID NO: 670948 - DNA, 75 bp, synthetic construct
  source 1..75: mol_type = other DNA
gactatagcaatatcaccctcggtgggggcaacggcggtacgactcgtatcagcaacgtctccgctggcgtcaac

SEQ ID NO: 670949 - DNA, 75 bp, synthetic construct
  source 1..75: mol_type = other DNA
tgccggaaaacgtgatgatacaaagctgatgcggactcgcctttcacgtgccggtggcatgtatctgaatcaggt

SEQ ID NO: 670950 - DNA, 75 bp, synthetic construct
  source 1..75: mol_type = other DNA
tgtctatcatgagcgtgggggatggctgaaagggcatcacagcggtatgccttactgggcccagggaagcacaac

SEQ ID NO: 670951 - DNA, 75 bp, synthetic construct
  source 1..75: mol_type = other DNA
gcagcagcgaccgacaattctgtcgctatcggcgcaggatcgaccacagatgcaagcaatacagtttcagttggc

SEQ ID NO: 670952 - DNA, 75 bp, synthetic construct
  source 1..75: mol_type = other DNA
atgcggttaacgtttcgcagctgaagtcttctgaggcaggcggcgttcgttacgacaccaaagctgatggttcta

SEQ ID NO: 670953 - DNA, 75 bp, synthetic construct
  source 1..75: mol_type = other DNA
attgcgttaggaaatacggctaaagcttacgaaattatgagcatcgccctcggtgataatgccaatgcgtcaaaa

SEQ ID NO: 670954 - DNA, 75 bp, synthetic construct
  source 1..75: mol_type = other DNA
cccattggcattggcttcggtacgctgtttgcgctggcaataacggcgctgtgggtctggcaacgccgtcattaa

SEQ ID NO: 670955 - DNA, 75 bp, synthetic construct
  source 1..75: mol_type = other DNA
accggcgaaatacggtattcttggcgaattaaccacgggtagtaagttagtgaaagctaacggtttaatggaagc

SEQ ID NO: 670956 - DNA, 75 bp, synthetic construct
  source 1..75: mol_type = other DNA
ttgctaacggccttaagctgttgggcgctgccagtatctgctttggcatcaatccctttctcggctatacgctag

SEQ ID NO: 670957 - DNA, 75 bp, synthetic construct
  source 1..75: mol_type = other DNA
gtatcctcagcttgcccgtgcttatcccgggtgtaagctgccggatttgcgcggtgtttttatccgtggctggga

SEQ ID NO: 670958 - DNA, 75 bp, synthetic construct
  source 1..75: mol_type = other DNA
agtttattctggggagcgggtgtcacgctgcgtttcctgttggtgctgtgggtaccggtggcgctgggtattacc

SEQ ID NO: 670959 - DNA, 75 bp, synthetic construct
  source 1..75: mol_type = other DNA
ggagcggtcgttgccaatatctatattccaaaactggcggcggcgcgtccgggtcagtcgtggaatctcattaac

SEQ ID NO: 670960 - DNA, 75 bp, synthetic construct
  source 1..75: mol_type = other DNA
ccgggccaacctatagtattggcggcactgactacactaacgtcggggatgctctggctgcgattaacacttcat

SEQ ID NO: 670961 - DNA, 75 bp, synthetic construct
  source 1..75: mol_type = other DNA
tggcaatgaccggtctgccgcaggcttacacgccgggagccagcatggcctctattggtggtggtacttacaacg

SEQ ID NO: 670962 - DNA, 75 bp, synthetic construct
  source 1..75: mol_type = other DNA
agcgcggagcagatgtatcagttagtgaatgacgttcagtcttatcctcagtttttgcctggttgcaccggaagc

SEQ ID NO: 670963 - DNA, 75 bp, synthetic construct
  source 1..75: mol_type = other DNA
tgcggcacatggtacagatgccaccagcaaaatcactaacgttaccgctggcgacctttcagccaccagcaccga

SEQ ID NO: 670964 - DNA, 75 bp, synthetic construct
  source 1..75: mol_type = other DNA
tgggtagcagttccgtttccagccgtttaatagttaaaggttctcgtgacaccagcgtgtcggaagaaggtgttg

SEQ ID NO: 670965 - DNA, 75 bp, synthetic construct
  source 1..75: mol_type = other DNA
gctacagtgacgttgatacaggtatcgctcttggtagcagttccgtttccagccgtgtaatagttaaaggttctc

SEQ ID NO: 670966 - DNA, 75 bp, synthetic construct
  source 1..75: mol_type = other DNA
caacctgaccggcgaagttgctaacaacaccaccaatatcactaacctgacgaatgatgttgccgccaacaccac

SEQ ID NO: 670967 - DNA, 75 bp, synthetic construct
  source 1..75: mol_type = other DNA
gccaacggtcgttgggtctacaaattacaaggtagtaccaatagccagggtgaatactccgccgcacttggtgcc

SEQ ID NO: 670968 - DNA, 75 bp, synthetic construct
  source 1..75: mol_type = other DNA
tggcaaccaacaccactaatatcagcaacctgaccggcgaagttgctaacaacaccaccaatatcactaacctga

SEQ ID NO: 670969 - DNA, 75 bp, synthetic construct
  source 1..75: mol_type = other DNA
tcaaatcatcaacgtcgcggatggttctgaagcccatgatgcggtcactgttcgccagttgcaaaacgccattgg

SEQ ID NO: 670970 - DNA, 75 bp, synthetic construct
  source 1..75: mol_type = other DNA
gatggcgaactgcttggcgcgttgtcgattggtgatgacggtaaatatcgtcaaatcatcaacgtcgcggatggt

SEQ ID NO: 670971 - DNA, 75 bp, synthetic construct
  source 1..75: mol_type = other DNA
cggcaggtgagctgacggagaccagtaccgatgcggttaacggttctcagttgaaaaccactaacgataacgtgg

SEQ ID NO: 670972 - DNA, 75 bp, synthetic construct
  source 1..75: mol_type = other DNA
accagcaccgacgccgttaacggttctcagctgaaaaccactaacgataacgtggcgactaacaccaccaatatc

SEQ ID NO: 670973 - DNA, 75 bp, synthetic construct
  source 1..75: mol_type = other DNA
gctatcaacggttctcagctgtttaacaccaatatgctgatccagcagaacagcgaagtcatcaatcagcttgcc

SEQ ID NO: 670974 - DNA, 75 bp, synthetic construct
  source 1..75: mol_type = other DNA
aataagtacatcgctgatgcgctgggtggtgatgcagaagtcaacgctgacggaactatcactgcaccgacttac

SEQ ID NO: 670975 - DNA, 75 bp, synthetic construct
  source 1..75: mol_type = other DNA
cactgacgccgttaacggctcccagctcaaaaccaccaacgaaaacgtgtcgaccaacaccaccaacatcgccac

SEQ ID NO: 670976 - DNA, 75 bp, synthetic construct
  source 1..75: mol_type = other DNA
caaatgctattgctcttggacaaggtagttatgccggtttagaaaatggcattgcaattggtggtcaagccagtg

SEQ ID NO: 670977 - DNA, 75 bp, synthetic construct
  source 1..75: mol_type = other DNA
cgctcgggagtggtgcaaatgctgctggtgatcattccctggcattagggggggcgactaatgctcaaggtgagt

SEQ ID NO: 670978 - DNA, 75 bp, synthetic construct
  source 1..75: mol_type = other DNA
cagtgaagacggtcaacgtcagatcaccaacgtcgcagcggggtcggcggataccgatgcggttaacgtgggtca

SEQ ID NO: 670979 - DNA, 75 bp, synthetic construct
  source 1..75: mol_type = other DNA
aggccaatgcacttaacggcattgccatcggtagcaatgcgcaagtcattcatgtcaacagtattgcgataggta

SEQ ID NO: 670980 - DNA, 75 bp, synthetic construct
  source 1..75: mol_type = other DNA
ttctgaagcccatgacgccgttacggttcgccagttgcagaatgccattggtgcggtcgcaaccacgccgactaa

SEQ ID NO: 670981 - DNA, 75 bp, synthetic construct
  source 1..75: mol_type = other DNA
aacggcagtgggtactgatgcgaaagcaaatgggcttaatagtatcgcgttgggttccgggagtattgccgatgc

SEQ ID NO: 670982 - DNA, 75 bp, synthetic construct
  source 1..75: mol_type = other DNA
cactgacgccgttaacggctctcagctcaaaaccaccaacgacaacgtgacgaccaacaccaccaacatcgccac

SEQ ID NO: 670983 - DNA, 75 bp, synthetic construct
  source 1..75: mol_type = other DNA
cactgacgccgttaacggctctcagctcaaaaccaccaacgaaaacgtgccgaccaacaccaccaacatcgccac

SEQ ID NO: 670984 - DNA, 75 bp, synthetic construct
  source 1..75: mol_type = other DNA
cactgacgccgttaacggctcacagctcaaaaccaccaacgacaacgtgtcgaccaacaccaccaacatcgccac

SEQ ID NO: 670985 - DNA, 75 bp, synthetic construct
  source 1..75: mol_type = other DNA
tatttagtggctggaaatgggctaactggcgtatgccaaggctatatgaaaaaacagaaccagaacaaacacttt

SEQ ID NO: 670986 - DNA, 75 bp, synthetic construct
  source 1..75: mol_type = other DNA
caccaacactgccaatatcgccgataacactgcggatatcgccactaacactacggatattgcgactaataccgc

SEQ ID NO: 670987 - DNA, 75 bp, synthetic construct
  source 1..75: mol_type = other DNA
tatttcagacaccagtaaagatgcggttaacggttcccagttgaaagaaaccaaagacgatgtggccaccaacac

SEQ ID NO: 670988 - DNA, 75 bp, synthetic construct
  source 1..75: mol_type = other DNA
tgcgggtattggtatcggcctgaacactttagttctggcagatgcgattaacggtattgctatcggtagcaacgc

SEQ ID NO: 670989 - DNA, 75 bp, synthetic construct
  source 1..75: mol_type = other DNA
cgatggtgtagacgccaacgcgcagggtaaagatagtgtcgcgattggctccggttctattgcctccgctgataa

SEQ ID NO: 670990 - DNA, 75 bp, synthetic construct
  source 1..75: mol_type = other DNA
aatacccaaagcatcactaacctgaatactcaggtaggtaatctggatacgcgcgtcacgacgctggaaaatggg

SEQ ID NO: 670991 - DNA, 75 bp, synthetic construct
  source 1..75: mol_type = other DNA
gcaaattcagcgccaaacacggcattaataatgctcccagtgtaatcactgatgttgcaaacggtgcagtctcgt

SEQ ID NO: 670992 - DNA, 75 bp, synthetic construct
  source 1..75: mol_type = other DNA
ctctgttgttgatgccctgggcggtggcgccgcagtaaatgctgacggtagcatcagtgcgccgacgtactccat

SEQ ID NO: 670993 - DNA, 75 bp, synthetic construct
  source 1..75: mol_type = other DNA
agaccactcgcggcgcacagactggctacaccgcctacaacatggacgcaccgcagaactctgtgggtgagttct

SEQ ID NO: 670994 - DNA, 75 bp, synthetic construct
  source 1..75: mol_type = other DNA
ttggtatcggcctgaacactctggttctgccagatgccatcaacggtattgctatcggttctaacgcacgcgcca

SEQ ID NO: 670995 - DNA, 75 bp, synthetic construct
  source 1..75: mol_type = other DNA
cgtggcgcgcagaccaactacactgcctacaacatggacgcaccgcagaactctgtgggtgagttctctgtcggc

SEQ ID NO: 670996 - DNA, 75 bp, synthetic construct
  source 1..75: mol_type = other DNA
gcgcaaatcatgccgacagcattgcaatgggtaatggttctcagactacccgtggcgcgcagaccaactacactg

SEQ ID NO: 670997 - DNA, 75 bp, synthetic construct
  source 1..75: mol_type = other DNA
caacggctgaagactcactggcagtcggtgaagactcgctggcaatgggcgcgaaaaccatcgttaatggtaatg

SEQ ID NO: 670998 - DNA, 75 bp, synthetic construct
  source 1..75: mol_type = other DNA
gacgaaaaaaacaagggatacagcgccagccataccgtctttaatgcagatggcacaactaaaagcgtccaggcg

SEQ ID NO: 670999 - DNA, 75 bp, synthetic construct
  source 1..75: mol_type = other DNA
attcttggcggtggttccactgttaatgctgacggcacaatcaacgcaccagcctatactatcgctaatactgac

SEQ ID NO: 671000 - DNA, 75 bp, synthetic construct
  source 1..75: mol_type = other DNA
tcacagccagtcatggtggtagtgccagtaaaatcactaacgtcgccgccggttcaatttctaaagacagcgcag

SEQ ID NO: 671001 - DNA, 75 bp, synthetic construct
  source 1..75: mol_type = other DNA
tcgcttcggcaatggcgatgactggtctgcctcaggcctacacgccaggtgccagcatggcttctattggtggcg

SEQ ID NO: 671002 - DNA, 75 bp, synthetic construct
  source 1..75: mol_type = other DNA
aacgttgcggctggtgatctctccacaaccagtaccgatgctgttaacggttcccagttaaacgcaaccaatatc

SEQ ID NO: 671003 - DNA, 75 bp, synthetic construct
  source 1..75: mol_type = other DNA
cgcgcagggtaaagacagtgttgcgattggttctggttccattgcagccgctgacaacagcgtcgcactgggcac

SEQ ID NO: 671004 - DNA, 75 bp, synthetic construct
  source 1..75: mol_type = other DNA
tgcgggtattggtatcggcctgaacactttagttctggctgatgcgatcaacggtattgctatcggttctaacgc

SEQ ID NO: 671005 - DNA, 75 bp, synthetic construct
  source 1..75: mol_type = other DNA
gcctctggcattggcgccacggctgtaggctacaattctgtggcttctgctactggcagcgtcgccattggtcag

SEQ ID NO: 671006 - DNA, 75 bp, synthetic construct
  source 1..75: mol_type = other DNA
ctcagtgggcacttcgctgggagatgcgctgatgtgggataactccagcagaacattcagcgccagccgtgcggg

SEQ ID NO: 671007 - DNA, 75 bp, synthetic construct
  source 1..75: mol_type = other DNA
gatatcgcaactaacaccgctggtattgcagctaataccacgaatattgcaaccaacaccagcaacatcgcaact

SEQ ID NO: 671008 - DNA, 75 bp, synthetic construct
  source 1..75: mol_type = other DNA
cagttgaaagtgacggatgcgcgcgttgagatcaacacgaccagtatcaataacctgaacaatcaggtgagcaat

SEQ ID NO: 671009 - DNA, 75 bp, synthetic construct
  source 1..75: mol_type = other DNA
catgcagaagtcgctcttgatggcggtaaatctgctgaagctactccacttagtaatggctggattgccattggt

SEQ ID NO: 671010 - DNA, 75 bp, synthetic construct
  source 1..75: mol_type = other DNA
ttctgaccgcgttatcgtaaaaggctcgcgcaataccagcgtaacaggaaacggtgtggtgattggttatgacac

SEQ ID NO: 671011 - DNA, 75 bp, synthetic construct
  source 1..75: mol_type = other DNA
accttaagccacttaaccctttataccctatgttccaacctgattttatcgaggttgttggcgtggctattcatt

SEQ ID NO: 671012 - DNA, 75 bp, synthetic construct
  source 1..75: mol_type = other DNA
cgttcgtgctggggctgctggataaaatgttaggctggcaacgcgctggtggcgaaggcatcctgggctttgttg

SEQ ID NO: 671013 - DNA, 75 bp, synthetic construct
  source 1..75: mol_type = other DNA
tatcagtaataccagcccgaatctgtttaccgtccccggagaccggattatcgccgtgaacagtctggatggtgc

SEQ ID NO: 671014 - DNA, 75 bp, synthetic construct
  source 1..75: mol_type = other DNA
tttgaacacgctgacgaagggctgacggagcacggtcatgagtgtccttatgtcaggccggaacgcagagaaata

SEQ ID NO: 671015 - DNA, 75 bp, synthetic construct
  source 1..75: mol_type = other DNA
ctgcatcctaaaagaatggaaagatcgcagtaaggcaaagtctgtatacaatacaatcacacacagttcaccagg

SEQ ID NO: 671016 - DNA, 75 bp, synthetic construct
  source 1..75: mol_type = other DNA
gatatgcaacaagtacaaataatttagttttctacaaaccgacgcagcttggacctacaggtgtaaaattacagt

SEQ ID NO: 671017 - DNA, 75 bp, synthetic construct
  source 1..75: mol_type = other DNA
gacgatacccgtgaccgcgcgttgttcgaagacagtgccatgtcgcagcagccgaccgtgccggatcgtttgcgc

SEQ ID NO: 671018 - DNA, 75 bp, synthetic construct
  source 1..75: mol_type = other DNA
cgcagatccgcgaaaacccgttccgctactgggaatatatccctaccgaagtgaagccgttttttgtgcgtaccg

SEQ ID NO: 671019 - DNA, 75 bp, synthetic construct
  source 1..75: mol_type = other DNA
ttgcaccgttttttggggcttgaatttccccgacagaagaaaaccattggtgtcgtattcggtaagttctacccg

SEQ ID NO: 671020 - DNA, 75 bp, synthetic construct
  source 1..75: mol_type = other DNA
cagcgaaatgtcagcaatgtgcatataaacctatctgcaatggcggttgtcctaagcatcgtattactaaagtaa

SEQ ID NO: 671021 - DNA, 75 bp, synthetic construct
  source 1..75: mol_type = other DNA
ccctcttgaggtttatcattttttaaaatctatcggcagtaaacatatgcaatttatcgaattgctagaaaccgg

SEQ ID NO: 671022 - DNA, 75 bp, synthetic construct
  source 1..75: mol_type = other DNA
ctcgctaacattttcaacaccaccagtgcgtgggagtttggtcgtgattatgttttttcgcatcttggcggtgac

SEQ ID NO: 671023 - DNA, 75 bp, synthetic construct
  source 1..75: mol_type = other DNA
cacggcaaggccgaactcgaagccaccgccatgggcgtagccgctcgtctgggtatgaaagaaatgagcagcctt

SEQ ID NO: 671024 - DNA, 75 bp, synthetic construct
  source 1..75: mol_type = other DNA
cgcttgattaatcgtctgcagcaattcgttccggatgccttacccgtggttcgtaaagccagctggcactgcaga

SEQ ID NO: 671025 - DNA, 75 bp, synthetic construct
  source 1..75: mol_type = other DNA
cgcttgattaatcgtctgcagcaattcgttccggatgccttacccgtggtacgtaaagccagctggcactgcagt

SEQ ID NO: 671026 - DNA, 75 bp, synthetic construct
  source 1..75: mol_type = other DNA
gcaatacgacactgaatgtccctggtttgaacacgctgacgacgggctgactgagtatggtcatgagtgccctta

SEQ ID NO: 671027 - DNA, 75 bp, synthetic construct
  source 1..75: mol_type = other DNA
caatgtcaccacgattattatggggagcagtactgcacacactgccagaccgggcggttcagtgaggaggcggta

SEQ ID NO: 671028 - DNA, 75 bp, synthetic construct
  source 1..75: mol_type = other DNA
cgcttgatttatcgtctgcagcaattcgttccggatgccttacccgtggtgcgtaaagccagctggcactgcagc

SEQ ID NO: 671029 - DNA, 75 bp, synthetic construct
  source 1..75: mol_type = other DNA
cgcttgatttatcgtctgcagcaattcgttccggatgccttacccgtggtccgtaaagccagctggcactgcagg

SEQ ID NO: 671030 - DNA, 75 bp, synthetic construct
  source 1..75: mol_type = other DNA
ctgcaggccccggcggggctgtcttcagtggcagatgccgtatggacggggaatcacctgaagatggtccgcttt

SEQ ID NO: 671031 - DNA, 75 bp, synthetic construct
  source 1..75: mol_type = other DNA
tcctttcttgcacttgatggcaacgggcgtctgacgggtgcccgtaccgcacagactgcaccttacgatcgctac

SEQ ID NO: 671032 - DNA, 75 bp, synthetic construct
  source 1..75: mol_type = other DNA
ttgatggcaacggacgtctgaccggtgcccgtaccgcacagactgcgccatatgatcgttatacctgtcatcttt

SEQ ID NO: 671033 - DNA, 75 bp, synthetic construct
  source 1..75: mol_type = other DNA
cggtactgacgatattaaccttcctggtgcatatcaccctcggcgtgtggtggtggaatatgctgatcggctgga

SEQ ID NO: 671034 - DNA, 75 bp, synthetic construct
  source 1..75: mol_type = other DNA
gcggcagtgcactcagataccatccgcagtacgacactgaacttccctggtttgaacacactgacgacgggctga

SEQ ID NO: 671035 - DNA, 75 bp, synthetic construct
  source 1..75: mol_type = other DNA
acaaagaagaggcggaaaaactggctcgtgagttactggcgaaagttggtctggcagaacgcgcgcatcactacc

SEQ ID NO: 671036 - DNA, 75 bp, synthetic construct
  source 1..75: mol_type = other DNA
tgtttcctgactccggaaaagtcaaaggagaaagtgtgtttgattttagcaaactgattcgggagattcgagtga

SEQ ID NO: 671037 - DNA, 75 bp, synthetic construct
  source 1..75: mol_type = other DNA
ctaagtttgctggtgggctatatcgcctggctggcgaccgcttaccgcatgagtttctcccgcgaaataaacatg

SEQ ID NO: 671038 - DNA, 75 bp, synthetic construct
  source 1..75: mol_type = other DNA
tacccgttatgtgatgatggaaaccatccgtcaaatccacgtttttccaatgagcagccagtttcacattgggat

SEQ ID NO: 671039 - DNA, 75 bp, synthetic construct
  source 1..75: mol_type = other DNA
aaaatccagggcataggtgctggctttatcccggctaaccttgatcttaaactggtcgataaagttattggcatc

SEQ ID NO: 671040 - DNA, 75 bp, synthetic construct
  source 1..75: mol_type = other DNA
caagaatattgtggttattctgccgtcatcgggtgagcgttatttaagcaccgcattgtttgccgatctcttcac

SEQ ID NO: 671041 - DNA, 75 bp, synthetic construct
  source 1..75: mol_type = other DNA
ctgacgtgctgaaaattgataagtcatttaccgcagctataggttctgacgcggttaactcgacggtgaccgata

SEQ ID NO: 671042 - DNA, 75 bp, synthetic construct
  source 1..75: mol_type = other DNA
tccacagattccccaaccacagccattgaacctgcaaggcgaagcggtagcgaatgagttcatcccacgtaatgt

SEQ ID NO: 671043 - DNA, 75 bp, synthetic construct
  source 1..75: mol_type = other DNA
gcacctcgctatggcgcaatggtgaaacgcgtttttcgctggtgggcaccagtttattctggggagcaggtgtca

SEQ ID NO: 671044 - DNA, 75 bp, synthetic construct
  source 1..75: mol_type = other DNA
gatgcacataatgaccatgatcatgtggttaaaaatgcccagagtggcaatgacaatatccgcagccaaaaaaca

SEQ ID NO: 671045 - DNA, 75 bp, synthetic construct
  source 1..75: mol_type = other DNA
tgccattacgcaagcaagcggcgaagctacaaacggtgcgctcaattggtctggtgcaaaacggcacgctttatt

SEQ ID NO: 671046 - DNA, 75 bp, synthetic construct
  source 1..75: mol_type = other DNA
catttcagtttctctcaccttcggaatataaatataaggctattgagttattttctgaattaatatcatcttcct

SEQ ID NO: 671047 - DNA, 75 bp, synthetic construct
  source 1..75: mol_type = other DNA
atcagccccaatttatgggcgggcgttggcttagtgcgcggcggtgccgggacggcgctggtgggcgatggtcct

SEQ ID NO: 671048 - DNA, 75 bp, synthetic construct
  source 1..75: mol_type = other DNA
gtgaatatcttaattgcatggccatatggcatgtaccgcgatctgtttatgcgcgcggcacgcaaagttagccac

SEQ ID NO: 671049 - DNA, 75 bp, synthetic construct
  source 1..75: mol_type = other DNA
acgcatgcatgaacatgccaccaaatttgaaactgaaatcatctttgatcacatcaacaaagtggatttgcagaa

SEQ ID NO: 671050 - DNA, 75 bp, synthetic construct
  source 1..75: mol_type = other DNA
tcaggccattacttcggccggtacaggctgcatggcagcacttgatgcggaacgctacctcgatggtttagctga

SEQ ID NO: 671051 - DNA, 75 bp, synthetic construct
  source 1..75: mol_type = other DNA
ttgaagaagctctgtatctttccaacattgcttccgaggtgcatttgatccaccgccgcgacggtttccgtgcag

SEQ ID NO: 671052 - DNA, 75 bp, synthetic construct
  source 1..75: mol_type = other DNA
tttaccgttcccggtgatcggattatcgccgtgaacagtctggatggtgccctgaccaataatgagcagaccgcc

SEQ ID NO: 671053 - DNA, 75 bp, synthetic construct
  source 1..75: mol_type = other DNA
ggtcagtgacctgcgcggaaccggagaagaagtcggtgcgtgggaaacgtccacgccttacgaatccctgcttgt

SEQ ID NO: 671054 - DNA, 75 bp, synthetic construct
  source 1..75: mol_type = other DNA
aaagcaggctgaagaagccgcaaaacaggccgagttaaagcagaagcaagctgaagaggcggcagcgaaagcggc

SEQ ID NO: 671055 - DNA, 75 bp, synthetic construct
  source 1..75: mol_type = other DNA
aagcgaaagccgtgtaccaacaggttatcagtaagtaccctggtactgatggcgccaaacaggcacaaaaacgtc

SEQ ID NO: 671056 - DNA, 75 bp, synthetic construct
  source 1..75: mol_type = other DNA
aggatgatgcgatggtggcatttcagaatttcatcaaaaattatcctgactcaacttacctgccaaatgccaatt

SEQ ID NO: 671057 - DNA, 75 bp, synthetic construct
  source 1..75: mol_type = other DNA
ttatcgccaggccattacatctgctggtacaggctgcatggcagcacttgatgcggaacgctacctcgatggttt

SEQ ID NO: 671058 - DNA, 75 bp, synthetic construct
  source 1..75: mol_type = other DNA
acgcaaaacagcgataacatcgagtcactcgacgttgccggtctgtttgttgctatcggtcacagcccgaatact

SEQ ID NO: 671059 - DNA, 75 bp, synthetic construct
  source 1..75: mol_type = other DNA
agctgaagcaagaaagaaagcggcaactgaagctgctgaaaaagccaaagcagaagctgagaagaaagcggctgc

SEQ ID NO: 671060 - DNA, 75 bp, synthetic construct
  source 1..75: mol_type = other DNA
gtgacgaatgttcagtccggtagtttacctcaagaactgaagaaccgtttatcttcattgttgctgatgaatcag

SEQ ID NO: 671061 - DNA, 75 bp, synthetic construct
  source 1..75: mol_type = other DNA
ttgaggggcatctgttcgaagtggcagagcgcggtggtcctggttttacgccttttatcacgttcagtagtaatg

SEQ ID NO: 671062 - DNA, 75 bp, synthetic construct
  source 1..75: mol_type = other DNA
atggttgggctggtttacgcgctggagaattatcaccaggggcaggcagtcatcaccgcggaacagctccagcca

SEQ ID NO: 671063 - DNA, 75 bp, synthetic construct
  source 1..75: mol_type = other DNA
gtcggggcagctttctttcaccctgaatcaggggatggcagtcagtgccggcagacaggaagacggggcatccgt

SEQ ID NO: 671064 - DNA, 75 bp, synthetic construct
  source 1..75: mol_type = other DNA
gtaacggacagccttttactgtgacggaaggaaatggtacctcagcacagcacttccgcgcctctgtcccggtgc

SEQ ID NO: 671065 - DNA, 75 bp, synthetic construct
  source 1..75: mol_type = other DNA
gcccgggtagagagtggccagtttatttttgatttgcatgataaaggttcattgccatttcttgaaggacatctg

SEQ ID NO: 671066 - DNA, 75 bp, synthetic construct
  source 1..75: mol_type = other DNA
gcgttaatcggttcttatttatggcataaggatgacaaacgtgcattgcaggatccgttatcgttcagaacaacg

SEQ ID NO: 671067 - DNA, 75 bp, synthetic construct
  source 1..75: mol_type = other DNA
tggaagcgttgaatggcaatgtcgcgccggtactgccgcagtcgatcgccgtgcgtcctttcccgcagttggctg

SEQ ID NO: 671068 - DNA, 75 bp, synthetic construct
  source 1..75: mol_type = other DNA
tggccgccagcaatcatatcatcgcggaactctattactgttttgcaatgacacaaatcgcttgtctgccattaa

SEQ ID NO: 671069 - DNA, 75 bp, synthetic construct
  source 1..75: mol_type = other DNA
tgcgcggccataacgtcgattacggtgcatcgatcctcagcgcgatccgcttaggtggcgggcgcgttgtggagg

SEQ ID NO: 671070 - DNA, 75 bp, synthetic construct
  source 1..75: mol_type = other DNA
ctcgctttaccggggcggaggatagctacgttacctcctgtgcctcagcagggatcgccatcgctgtcgccgccg

SEQ ID NO: 671071 - DNA, 75 bp, synthetic construct
  source 1..75: mol_type = other DNA
tgtcacactgtttctggctgcaccagtgcttgtaatagggggaaccgcagaattcggaaaaaatcgtacgctaag

SEQ ID NO: 671072 - DNA, 75 bp, synthetic construct
  source 1..75: mol_type = other DNA
ggaagggagttgtgtttcagcacagcattttcgtgcttctgtcccggtacgggacccggaaagcggtaacgtgac

SEQ ID NO: 671073 - DNA, 75 bp, synthetic construct
  source 1..75: mol_type = other DNA
aggaaggcagtggcacaacagcgcaacgttttcgcgcctctgtcccggtgcgtgacccggaaacggggaacgtat

SEQ ID NO: 671074 - DNA, 75 bp, synthetic construct
  source 1..75: mol_type = other DNA
cccttctttctgccattatttcggtgaccctgttttattcggcagcaccacatgcagatattcttgatggcggcg

SEQ ID NO: 671075 - DNA, 75 bp, synthetic construct
  source 1..75: mol_type = other DNA
atgcctcagcagtgtcggattttgaactgtggttaccggcagagggcacgtctgcagcatggcaggcagggctga

SEQ ID NO: 671076 - DNA, 75 bp, synthetic construct
  source 1..75: mol_type = other DNA
ttttaaggttgatattacactagaggaaaaaggattaaatgaagatgaattcaatgcacttatcacattaattca

SEQ ID NO: 671077 - DNA, 75 bp, synthetic construct
  source 1..75: mol_type = other DNA
gctgcactggttgaacctgagctgtatggaagggtttgataccgggtgtgaagagtttgaaaaattaactaacgg

SEQ ID NO: 671078 - DNA, 75 bp, synthetic construct
  source 1..75: mol_type = other DNA
ggcagcggtaactatccgcgtaggttatcgtctgggtcagggctcaacgctggatgcgcaaaccgctgcgcggac

SEQ ID NO: 671079 - DNA, 75 bp, synthetic construct
  source 1..75: mol_type = other DNA
gtgatccggagacgggaaatgtgtcaggacagctttctttcaccctgaatcaggggatggccgtcagtgccggca

SEQ ID NO: 671080 - DNA, 75 bp, synthetic construct
  source 1..75: mol_type = other DNA
tacagagaacgggcaactggtttttaatttgcgtgacaaaggatccctgccgtttctggaagggcatttgtatga

SEQ ID NO: 671081 - DNA, 75 bp, synthetic construct
  source 1..75: mol_type = other DNA
gacaggaagacggtgcatccgttccggctggcatgtcgctagtcagtggacagagtgtgacagatgtacagccgg

SEQ ID NO: 671082 - DNA, 75 bp, synthetic construct
  source 1..75: mol_type = other DNA
tacagagaatgggcaactggtttttgatttgcgtgataaagggcctcttccgtttcttgaagggcatttatatga

SEQ ID NO: 671083 - DNA, 75 bp, synthetic construct
  source 1..75: mol_type = other DNA
tttttctctttttttttatttctatctccttgctttatttgacggcgccacatgccgagatccttgatggtggtg

SEQ ID NO: 671084 - DNA, 75 bp, synthetic construct
  source 1..75: mol_type = other DNA
ccattctttctgccattatttcggtggccctgttttattcggcggcgccccgtgcagatattcttgatggcggcg

SEQ ID NO: 671085 - DNA, 75 bp, synthetic construct
  source 1..75: mol_type = other DNA
tgcagctgaagcaagaaagaaagcggcaactgaagctgctgaaaaagccaaagcagaagctgagaagaaagcggc

SEQ ID NO: 671086 - DNA, 75 bp, synthetic construct
  source 1..75: mol_type = other DNA
aataaaaaatccctcgcggcggaagacagcaagctggtagaaacactcaaagccgatcacgatgccacacgccag

SEQ ID NO: 671087 - DNA, 75 bp, synthetic construct
  source 1..75: mol_type = other DNA
gaatgcagcgacggtcgatctgcgtatcatggaaaccactgatctgcatagcaacatgatggatttcgattatta

SEQ ID NO: 671088 - DNA, 75 bp, synthetic construct
  source 1..75: mol_type = other DNA
atgtacgcaaaatcctttctcgctcttgattgcaacggacgtctgacgggcgcccgtactgtacaggccgcacct

SEQ ID NO: 671089 - DNA, 75 bp, synthetic construct
  source 1..75: mol_type = other DNA
ccgctcggtgctggcagcgtggattgcagatgagtcgaagcgtgcgggggaaattcacccggcggcagataacaa

SEQ ID NO: 671090 - DNA, 75 bp, synthetic construct
  source 1..75: mol_type = other DNA
gcttttgcttcaccggatgagaaccgctcggtgctggcagcgtggattgctgaagagtcgaaacgtgcgggggaa

SEQ ID NO: 671091 - DNA, 75 bp, synthetic construct
  source 1..75: mol_type = other DNA
gtgcaagtagtgaacaacgcgcaaaaagcgtatgtcgaacattacattcagggcgatccggatctggcaaaactg

SEQ ID NO: 671092 - DNA, 75 bp, synthetic construct
  source 1..75: mol_type = other DNA
caatgtcaccacgattattatggggagcggtactgcacacactgccagaccgggcgattcagtgaggaggcggta

SEQ ID NO: 671093 - DNA, 75 bp, synthetic construct
  source 1..75: mol_type = other DNA
caatgtcaccacgattattatggggagccgtactgcacacactgccagaccgggcgcttcagtgaggaggaggta

SEQ ID NO: 671094 - DNA, 75 bp, synthetic construct
  source 1..75: mol_type = other DNA
caatgtcaccacgattattatggggagctgtactgcacacactgccagaccgggcgtttcagtgaggaggcggta

SEQ ID NO: 671095 - DNA, 75 bp, synthetic construct
  source 1..75: mol_type = other DNA
atgtacgcaaaatcctttttcgctcttgatcgcaacggacgtctgacgggcgcccgtactgtacaggccgcacct

SEQ ID NO: 671096 - DNA, 75 bp, synthetic construct
  source 1..75: mol_type = other DNA
atgtacgcaaaatcctttatcgctcttgatagcaacggacgtctgacgggcgcccgtactgaacaggccgcacct

SEQ ID NO: 671097 - DNA, 75 bp, synthetic construct
  source 1..75: mol_type = other DNA
taaatccgttatcaacagacaactcattcgcaaacgaagctcaaatcatcacggatagcgataatttgatcacgg

SEQ ID NO: 671098 - DNA, 75 bp, synthetic construct
  source 1..75: mol_type = other DNA
ttacctcagtgaaattccgggcgttaacgccattatgtttggccatgctcacgccgttttcccaggtaaagattt

SEQ ID NO: 671099 - DNA, 75 bp, synthetic construct
  source 1..75: mol_type = other DNA
gcctgcaacgcctcctccccaatgctgctcccagggtcagtaaagcggcctggaactgctcacagtgtgcgatcg

SEQ ID NO: 671100 - DNA, 75 bp, synthetic construct
  source 1..75: mol_type = other DNA
ttgatggcaacgggcgtctgaccggtgcccgtaccgcacagactgcgccatacgatcgttatacctgccatcttt

SEQ ID NO: 671101 - DNA, 75 bp, synthetic construct
  source 1..75: mol_type = other DNA
tttgaacacactggcgaagggctggctgagcacggtcatgagtgcccttatgtcagaccggagcgcagggagata

SEQ ID NO: 671102 - DNA, 75 bp, synthetic construct
  source 1..75: mol_type = other DNA
atgtacgcaaaatcttttctcgcattcgatggcaacggacgcctgaccggtgcccgtactgcacaggccgcacct

SEQ ID NO: 671103 - DNA, 75 bp, synthetic construct
  source 1..75: mol_type = other DNA
atgtacgcaaaatcctttcttgcacttgatggcaacgggcgtctgactggtgcccgtaccgcacagactgcacct

SEQ ID NO: 671104 - DNA, 75 bp, synthetic construct
  source 1..75: mol_type = other DNA
caatgtcatcaagattattatggggagcggtactgcacgcactgccataccgggcacttcagtgaggagggggtg

SEQ ID NO: 671105 - DNA, 75 bp, synthetic construct
  source 1..75: mol_type = other DNA
tgccagaaatgcgtgagaaaggcgccgatgtggtagtggtactggcgcattctggactgtctgccgatccgtata

SEQ ID NO: 671106 - DNA, 75 bp, synthetic construct
  source 1..75: mol_type = other DNA
cgatgtcgttgtcgttctggcgcattctggtctgtctgccgatccgtataaagtgatggcggaaaactcagttta

SEQ ID NO: 671107 - DNA, 75 bp, synthetic construct
  source 1..75: mol_type = other DNA
agactttattaaagagaagggtcagtatccaatgaataaagtcgcgactgatgatatcgggtttgcgatttatca

SEQ ID NO: 671108 - DNA, 75 bp, synthetic construct
  source 1..75: mol_type = other DNA
tcgatggtaacggtcgtctgatcggtgcccgtaccgcgcagaccgccccttacgaccgctacacctgccatctct

SEQ ID NO: 671109 - DNA, 75 bp, synthetic construct
  source 1..75: mol_type = other DNA
tttgaacacactgacgacaggctgacagagcacggtcaacagtgcccttatgtcaggccggagcgcagagaatga

SEQ ID NO: 671110 - DNA, 75 bp, synthetic construct
  source 1..75: mol_type = other DNA
tccgcacctataactttgatgttattgatggcgtgaattatcagattgatgttacccagcccgctcgctatgacg

SEQ ID NO: 671111 - DNA, 75 bp, synthetic construct
  source 1..75: mol_type = other DNA
ggcggcaaaactctggcgaaccgataacggacatgttcatgctgattttaaattctggcttccggaaggacggct

SEQ ID NO: 671112 - DNA, 75 bp, synthetic construct
  source 1..75: mol_type = other DNA
gggatggacaagctgatccttaccgacggtgatgtaatcgaccatgctcagattaaggaagagctacagctgtgg

SEQ ID NO: 671113 - DNA, 75 bp, synthetic construct
  source 1..75: mol_type = other DNA
tgccgctgagtctgcctggatggacatgatgaaatgggaaaaatgcgagtttatcgccccgcagcacgaacttaa

SEQ ID NO: 671114 - DNA, 75 bp, synthetic construct
  source 1..75: mol_type = other DNA
atttgacccgtggagcgcaatgcagttcagtctggcgctggctgaagaagggataccgctggtggaagttccgca

SEQ ID NO: 671115 - DNA, 75 bp, synthetic construct
  source 1..75: mol_type = other DNA
gccggttaccccacaggcagacatgcagcaacttgcccgtgatctgaaagcagagctggacagacgggatgagga

SEQ ID NO: 671116 - DNA, 75 bp, synthetic construct
  source 1..75: mol_type = other DNA
taattcgcaattgttatgcattgaaaatgctaaaaaacaggggtactcagacgaatcagtcttgccactttttct

SEQ ID NO: 671117 - DNA, 75 bp, synthetic construct
  source 1..75: mol_type = other DNA
caaactcacccgcccattccgtgctgcacaggccagttcgaaagagctggctggcgcaatcagaaactcccgtga

SEQ ID NO: 671118 - DNA, 75 bp, synthetic construct
  source 1..75: mol_type = other DNA
tcctgaagtgattgaaaaacagatgacgaaggatgcgatgggaaccatccagcgcgtgctggagaaggtaaacgc

SEQ ID NO: 671119 - DNA, 75 bp, synthetic construct
  source 1..75: mol_type = other DNA
tggcgatactgcgcggtggactgaccgccgcaggtacggtgctgcgtgtgctggcatccggttcgctggcgatgc

SEQ ID NO: 671120 - DNA, 75 bp, synthetic construct
  source 1..75: mol_type = other DNA
aaagctgattttctggaatggattagcggcgaaaacctgaaggaaaccgggtttgacccctggagcgcaacgcag

SEQ ID NO: 671121 - DNA, 75 bp, synthetic construct
  source 1..75: mol_type = other DNA
atccacgccggaagccaaaatcgacggccctgttgcgatgtttacagcaatgagtcggatgctggtcaatggtgg

SEQ ID NO: 671122 - DNA, 75 bp, synthetic construct
  source 1..75: mol_type = other DNA
acgatctggcacacggcgaagagcgcggtattttcttcagtgaaccgcgcgcgcagcacattctgaatttctata

SEQ ID NO: 671123 - DNA, 75 bp, synthetic construct
  source 1..75: mol_type = other DNA
cggtcatgaactggatgatgtctaacgttacggtaaaaccggacaaaaacgacaatatcttcccgaataaatcca

SEQ ID NO: 671124 - DNA, 75 bp, synthetic construct
  source 1..75: mol_type = other DNA
ccacgccgactatttctacggcaccattccctgtacgcgtaaaatgaccgatgcggaaatcaacggtgaatatga

SEQ ID NO: 671125 - DNA, 75 bp, synthetic construct
  source 1..75: mol_type = other DNA
attccctgcacccgcaaaatgaccgatgcggaaatcaacggcgaatatgaatgggaaacaggaaaagtgatcgtc

SEQ ID NO: 671126 - DNA, 75 bp, synthetic construct
  source 1..75: mol_type = other DNA
ggtccattctcacggcccatttgcatggggcaaaaatgccgaagatgcggtgcacaacgccatcgtgctggaaga

SEQ ID NO: 671127 - DNA, 75 bp, synthetic construct
  source 1..75: mol_type = other DNA
atgattagttacgaaattattatttccacaacggaatacagaaacgatgtatcagttcgcacagatacatctgtc

SEQ ID NO: 671128 - DNA, 75 bp, synthetic construct
  source 1..75: mol_type = other DNA
tattctgccgtcagttagcgccgcagttaccggatatgcagcaaacgctgctggataaacactatctgcgtaagc

SEQ ID NO: 671129 - DNA, 75 bp, synthetic construct
  source 1..75: mol_type = other DNA
ggtccattctcacggcccgtttgcatggggcaaaaatgccgaagatgcggtgcataatgccatcgtgctggaaga

SEQ ID NO: 671130 - DNA, 75 bp, synthetic construct
  source 1..75: mol_type = other DNA
gagtcaccaagagcgcaacactgtgcgtctggcttacattcataaggccgaacatatggaagcccgcatggacat

SEQ ID NO: 671131 - DNA, 75 bp, synthetic construct
  source 1..75: mol_type = other DNA
cggtttcaggacaatggcatgcagcgcccttatggagtccagtatatggtcacaggatgctgttgaacggcaaat

SEQ ID NO: 671132 - DNA, 75 bp, synthetic construct
  source 1..75: mol_type = other DNA
atgcgcaatcgcttgcccctttggcgtcgttgagatggtcgatacgattgcacagaaatgcgacctttgtaacca

SEQ ID NO: 671133 - DNA, 75 bp, synthetic construct
  source 1..75: mol_type = other DNA
aaaacataacctggtcacgctcacatggggcaacgtcagcgccgttgatcgcgagcgcggcgtcttggtgatcaa

SEQ ID NO: 671134 - DNA, 75 bp, synthetic construct
  source 1..75: mol_type = other DNA
tgtacagcctgatcgggacgtgcaaactgaatggagtggagccagaaagctacctccgctatgtccttgacgtca

SEQ ID NO: 671135 - DNA, 75 bp, synthetic construct
  source 1..75: mol_type = other DNA
ttcctgagctgcttgaacggattgacagttatcaccaaggacgggaactcaccaggcttgcagtcctgctgacgt

SEQ ID NO: 671136 - DNA, 75 bp, synthetic construct
  source 1..75: mol_type = other DNA
acccgcaatattgaacagctcggcgatgcgctgaactatctggatgataacgcaatgtcgaaaggggcagacatc

SEQ ID NO: 671137 - DNA, 75 bp, synthetic construct
  source 1..75: mol_type = other DNA
gcgcggcgctgaaaagtaaagcgcaggaactgacgaagaaaaacagccagctgatcggtctgtccattctgactg

SEQ ID NO: 671138 - DNA, 75 bp, synthetic construct
  source 1..75: mol_type = other DNA
tgccgcaggctcggtgctgcgagtactggcatccggtccgctggcgatgctgcgcgttgccctgtatgccatatc

SEQ ID NO: 671139 - DNA, 75 bp, synthetic construct
  source 1..75: mol_type = other DNA
acgggaaatgtcatgaaaactgtagcaggtgcgccagttgcactgttgcggtctggattatccggtttacgtgcg

SEQ ID NO: 671140 - DNA, 75 bp, synthetic construct
  source 1..75: mol_type = other DNA
cactgtgccgcccgttcaacggattgaggcaccgatgcagatcatcattcaaacgcagccaggacaaagtgcgca

SEQ ID NO: 671141 - DNA, 75 bp, synthetic construct
  source 1..75: mol_type = other DNA
gaattgtccattgcgaccatgcaaagcaagagtttctttgaaggaatgaatctgctgaaactcaatcctgaagtg

SEQ ID NO: 671142 - DNA, 75 bp, synthetic construct
  source 1..75: mol_type = other DNA
cccggctgcgggaacgtccggcactcaccggaggtacagcttaccgtcagtggttgtcgaaaggggcagacatca

SEQ ID NO: 671143 - DNA, 75 bp, synthetic construct
  source 1..75: mol_type = other DNA
tggcggtactgcgcggtggactggctgccgcaggcgcggtgcttcgtgtgcttgcatctggtccgctggcgatgc

SEQ ID NO: 671144 - DNA, 75 bp, synthetic construct
  source 1..75: mol_type = other DNA
aatcgcccagctctacaaaatccctacccgcaatattgaacagctcggtgacgcgctgaactatctggatgataa

SEQ ID NO: 671145 - DNA, 75 bp, synthetic construct
  source 1..75: mol_type = other DNA
tgcaggcgctgtggggctggtttactgatctgctggcgcccgttaagtcgacctctgccgaactacagatcgcag

SEQ ID NO: 671146 - DNA, 75 bp, synthetic construct
  source 1..75: mol_type = other DNA
ggtgaatgcagacggtaaagtgatgatgtcatcgggtgcttttccgtcatggggatatggctttgcggggatgta

SEQ ID NO: 671147 - DNA, 75 bp, synthetic construct
  source 1..75: mol_type = other DNA
tgcaggctgataacaagaagttaggcgacaggctgaactatgccagacagaaggctaatttgcttagctctgagc

SEQ ID NO: 671148 - DNA, 75 bp, synthetic construct
  source 1..75: mol_type = other DNA
agtcgcttaaatcaggtgtgtcgtggttgctggataaactcggcattgtcagtaaagaggctgcaaaggcgaaac

SEQ ID NO: 671149 - DNA, 75 bp, synthetic construct
  source 1..75: mol_type = other DNA
ccgctgatggatattcagtacacggtgaaaagcattacgggggcgttgcgccgctgggtggaagctaacccggaa

SEQ ID NO: 671150 - DNA, 75 bp, synthetic construct
  source 1..75: mol_type = other DNA
tgacagcggcgggtatatcccgcgcaggcagtttggcatcgtcggtgaaaacggaccggaaattgttaacggccc

SEQ ID NO: 671151 - DNA, 75 bp, synthetic construct
  source 1..75: mol_type = other DNA
gggcttgcttcatcgggtaacgccgcaggtttacttactacgccgttgtcgtctttgcgccgtacggcatcactg

SEQ ID NO: 671152 - DNA, 75 bp, synthetic construct
  source 1..75: mol_type = other DNA
agatgcagccaggacaaagtgcgcaggatattgcgcgggaggtggcacgccagcttgatgaacgtgaacgcaggc

SEQ ID NO: 671153 - DNA, 75 bp, synthetic construct
  source 1..75: mol_type = other DNA
tggcagtcatccgtctgggattctctgtgctgggcatcaaaacgttaccttccgttatggcagcagtaacacgaa

SEQ ID NO: 671154 - DNA, 75 bp, synthetic construct
  source 1..75: mol_type = other DNA
gtctttgcgccgcacggcatcactgacagggaatgtcctgaaaactgtagcaggtgtgccggttgcactgttgcg

SEQ ID NO: 671155 - DNA, 75 bp, synthetic construct
  source 1..75: mol_type = other DNA
ggatattgcgcgggaggtagcccgccagcttgatgaacgcgaacgcaggctgaaagcaaaagccaggagtaacta

SEQ ID NO: 671156 - DNA, 75 bp, synthetic construct
  source 1..75: mol_type = other DNA
cttccgttacggcagcagtaacgcgaaccagcagcgcgttgtcctggttggctggcgcaccacttgcactgctgc

SEQ ID NO: 671157 - DNA, 75 bp, synthetic construct
  source 1..75: mol_type = other DNA
agtttggcgatgacgcagcgaaactggcaaacaacctgccggaacttcagcgccagttaaaactgactgcgggca

SEQ ID NO: 671158 - DNA, 75 bp, synthetic construct
  source 1..75: mol_type = other DNA
gtgaagcgatggtgagtcgtgcagctactgtgccgcccatttaccggattgaagcaccgacgcagatcatcatcc

SEQ ID NO: 671159 - DNA, 75 bp, synthetic construct
  source 1..75: mol_type = other DNA
tcaaagcggcggcaggtcccgtcagtgcagcgttcgaaccgcttaagcccgtgttccagtggattggcgacaaag

SEQ ID NO: 671160 - DNA, 75 bp, synthetic construct
  source 1..75: mol_type = other DNA
cgcaccactggcactgctgcgacgccggcttacttcatcgggtaacgcagcgggtttacttactgcgccgttgtc

SEQ ID NO: 671161 - DNA, 75 bp, synthetic construct
  source 1..75: mol_type = other DNA
ctgacaggcacactgatgaaagtagcagctgtggtggctgcggttaccgtaggcctcggcaccttggctgtggcg

SEQ ID NO: 671162 - DNA, 75 bp, synthetic construct
  source 1..75: mol_type = other DNA
ggtctgcatacaatacaacaactgatattcaatcaccaggagtctatatcggagacactgcagtgcaagaatttc

SEQ ID NO: 671163 - DNA, 75 bp, synthetic construct
  source 1..75: mol_type = other DNA
ggtctgcatacaatacaacaactgatattcaatcaccaggaatctatatcggagacacttcaacccaacaatttc

SEQ ID NO: 671164 - DNA, 75 bp, synthetic construct
  source 1..75: mol_type = other DNA
tgcctgaactgcttgaacgtattgaggcatatcatcagggtcgtgaactgacgcggttggccgtcctgctgatgc

SEQ ID NO: 671165 - DNA, 75 bp, synthetic construct
  source 1..75: mol_type = other DNA
acggtaccgacacgatggaagaaactgcttacttcctcgacctgacggtgaaatgggacaaaccggtggtgatgg

SEQ ID NO: 671166 - DNA, 75 bp, synthetic construct
  source 1..75: mol_type = other DNA
atgcgaatacaaaaaataaatattgggccgttggcggcgttatgcaaacgctcacgattgaattttataccgata

SEQ ID NO: 671167 - DNA, 75 bp, synthetic construct
  source 1..75: mol_type = other DNA
tcgactttaacccgacaacgaatcagcaggtaacattatccagaacagataattatctctactctttcaaaggat

SEQ ID NO: 671168 - DNA, 75 bp, synthetic construct
  source 1..75: mol_type = other DNA
taaaagtgcacaaatggtactgaaaccaaatgatgcaacgtctatttataaagattatgaaactgaagatgacac

SEQ ID NO: 671169 - DNA, 75 bp, synthetic construct
  source 1..75: mol_type = other DNA
ggtatggttcaggcaccaataatttagttttttataaaccaacccaacttggcccaaccggggtgtcattaaaat

SEQ ID NO: 671170 - DNA, 75 bp, synthetic construct
  source 1..75: mol_type = other DNA
ttttatactgataccgattttaaccctacaacaaaccagcaagtatcattgtccagctcatcgacatatctttac

SEQ ID NO: 671171 - DNA, 75 bp, synthetic construct
  source 1..75: mol_type = other DNA
cacggtctgtatctgctggtcaagccgggtggctcccgccactggtatctcaaataccgtattagcggtaaagaa

SEQ ID NO: 671172 - DNA, 75 bp, synthetic construct
  source 1..75: mol_type = other DNA
tgaccgtctgcttgccagcatgaacaatcacatctttccggtcattggcaacctgcctgtatcagaacttaaacc

SEQ ID NO: 671173 - DNA, 75 bp, synthetic construct
  source 1..75: mol_type = other DNA
ataccgataccgactttaacccgacaacgaatcaacgggtaacattactcagaacagataattatctctactcat

SEQ ID NO: 671174 - DNA, 75 bp, synthetic construct
  source 1..75: mol_type = other DNA
acggtaccgacacgatggaagaaaccgcttacttccttgacctgacggtgaaatgggacaaaccggtggtgatgg

SEQ ID NO: 671175 - DNA, 75 bp, synthetic construct
  source 1..75: mol_type = other DNA
gatatcacaattacagcaaactctaagaataattatttcgcacctcctgaatccaaaaagcttgttgttaactgg

SEQ ID NO: 671176 - DNA, 75 bp, synthetic construct
  source 1..75: mol_type = other DNA
attatattcaatacatctcaataggttcaggctccgcctgtgaagtacctattggcggaacttcctgtaccattg

SEQ ID NO: 671177 - DNA, 75 bp, synthetic construct
  source 1..75: mol_type = other DNA
tacgttaattctaacactatcactgcctcaggtgcaggcacagcctgtaatgtaacggttgatgatcgagcgact

SEQ ID NO: 671178 - DNA, 75 bp, synthetic construct
  source 1..75: mol_type = other DNA
acggcctgttatgttcagtggaacaacgttccatctggtctcgaattttactcgaagtctaaagttcctggcctg

SEQ ID NO: 671179 - DNA, 75 bp, synthetic construct
  source 1..75: mol_type = other DNA
actgcgctgactgaagcattgccggtcaatgatgcgggcattgtcgaaaccaagattaaaattgaaaatatggat

SEQ ID NO: 671180 - DNA, 75 bp, synthetic construct
  source 1..75: mol_type = other DNA
caaactgatgctgtctgataacccaacgcttatggttctcaaagatgggcaggtattaactaaacgagcacccgt

SEQ ID NO: 671181 - DNA, 75 bp, synthetic construct
  source 1..75: mol_type = other DNA
aaagcgccgcccaagtatcaatttgaagaaaatggtgaaacgaaatactggtctggtcgtgggcgtgcaccaaaa

SEQ ID NO: 671182 - DNA, 75 bp, synthetic construct
  source 1..75: mol_type = other DNA
ctgttcggacatacggcaagaccactgacccgtaccgagatggtggtggtcttcggggttgttttccatgagtac

SEQ ID NO: 671183 - DNA, 75 bp, synthetic construct
  source 1..75: mol_type = other DNA
gaagacggtatgtgcgcatctttacaatgcgatggagaaaagcggtctgcgaggtgtcagtgttaaatatctctg

SEQ ID NO: 671184 - DNA, 75 bp, synthetic construct
  source 1..75: mol_type = other DNA
cgtttgttcaacgtcttaaagtggcatcagccccgttgtggacgaagaatgtcttcgacatagctgtcgagtact

SEQ ID NO: 671185 - DNA, 75 bp, synthetic construct
  source 1..75: mol_type = other DNA
gcaagatatacgagttgtcgcgtatgatgatagtggggattcagcaactcagcgtacgaccgtttatggtctgga

SEQ ID NO: 671186 - DNA, 75 bp, synthetic construct
  source 1..75: mol_type = other DNA
ccggagactggcaccattaaaactgaccggcgggcgcttgaagcaacggctgaagcgctgcaaaagctgatagac

SEQ ID NO: 671187 - DNA, 75 bp, synthetic construct
  source 1..75: mol_type = other DNA
actcgccaatactctgcaaggtaacggtgcagcagagggcgtcggcgtacttattgaaggcttaaaaaacagtgt

SEQ ID NO: 671188 - DNA, 75 bp, synthetic construct
  source 1..75: mol_type = other DNA
acacagatcctttcatcaaggatgagtactatcgtctcatttcgcagatatcagacaaaatgcctgttacgagaa

SEQ ID NO: 671189 - DNA, 75 bp, synthetic construct
  source 1..75: mol_type = other DNA
gcagctcgtgacctgcaactcatcaaaccacaaaactgcgcatcaaattttaaacgcatgatgggcacatcaaag

SEQ ID NO: 671190 - DNA, 75 bp, synthetic construct
  source 1..75: mol_type = other DNA
agtgtggagattgaaggaaggcgatattactggcatctgactacagaaaaatttgaatttttattacagaccttt

SEQ ID NO: 671191 - DNA, 75 bp, synthetic construct
  source 1..75: mol_type = other DNA
atggcaaaaggcaaatccgcactggcactggcgctgaaaaagaaaatcggcagcaatgacgagattcagaaggtc

SEQ ID NO: 671192 - DNA, 75 bp, synthetic construct
  source 1..75: mol_type = other DNA
gacgaagacgacggtcagtgggtatacaagcagccagataccttcgaagactctgtagagttgatcggcacaata

SEQ ID NO: 671193 - DNA, 75 bp, synthetic construct
  source 1..75: mol_type = other DNA
ccacatcaatgatggtcgcggcattgaggttgtgagcgcgagtgggctactgctacagcagattcgcctcatgct

SEQ ID NO: 671194 - DNA, 75 bp, synthetic construct
  source 1..75: mol_type = other DNA
cgccgcccgccgtactcaaattctggatcgcgcccgcgatgcaatccgtagcttatccgtgctggcttataccgt

SEQ ID NO: 671195 - DNA, 75 bp, synthetic construct
  source 1..75: mol_type = other DNA
gaacggtttagccatcagcatgccgtactgggatgagcgagtggaagcaatggctgagaattacccggagatccg

SEQ ID NO: 671196 - DNA, 75 bp, synthetic construct
  source 1..75: mol_type = other DNA
gaacttgcgcaaagccgcccacgtaagacgctaacttctgccactaaatcgaacggtttagccatcagcatgccg

SEQ ID NO: 671197 - DNA, 75 bp, synthetic construct
  source 1..75: mol_type = other DNA
gatactgcgtcagctaaaagaagatgctgaaagctatttaggtgaagagataacagaagcagtaattagcgtacc

SEQ ID NO: 671198 - DNA, 75 bp, synthetic construct
  source 1..75: mol_type = other DNA
acaactttttggtcgtataccggcaatgcatttaaacccggatgaagtcattgctcagggcgcggctattcaggc

SEQ ID NO: 671199 - DNA, 75 bp, synthetic construct
  source 1..75: mol_type = other DNA
ttcgaacgagtccatatgccactggagcgggcaattcgcgatgccaaaattaatattagccaattagaccaggtt

SEQ ID NO: 671200 - DNA, 75 bp, synthetic construct
  source 1..75: mol_type = other DNA
gatggagatgaaagccggaggctacctgacagacggcaccgaactgcacgacaccaactttgcccgcattgccga

SEQ ID NO: 671201 - DNA, 75 bp, synthetic construct
  source 1..75: mol_type = other DNA
aatgaacggtaaacgccgattgttaggttcgtttaaccacggttcgatggccaacgccatgccacaggcgctggg

SEQ ID NO: 671202 - DNA, 75 bp, synthetic construct
  source 1..75: mol_type = other DNA
gccattccaccgcagatcaaactcgaacaggccaaaggtttcagcctgtatatgctgcgcgcatcatcagcggac

SEQ ID NO: 671203 - DNA, 75 bp, synthetic construct
  source 1..75: mol_type = other DNA
ctgaagctcaactttcgggggaactggctgtctgcgcgggatcgtgtggccccggcaacctgcacttaatcaacg

SEQ ID NO: 671204 - DNA, 75 bp, synthetic construct
  source 1..75: mol_type = other DNA
gaagggctttgttttattcgtgacggcgaacctgtcacatttgactggaaaggatatgaccattttgccacgcca

SEQ ID NO: 671205 - DNA, 75 bp, synthetic construct
  source 1..75: mol_type = other DNA
agcaaaaggatttagcttgtatatgttgcgggcgatcatcaacggacgtggtgatgaagtcatcgaactggcgaa

SEQ ID NO: 671206 - DNA, 75 bp, synthetic construct
  source 1..75: mol_type = other DNA
ttaccggtgaaaatcatcgtgtttaacaacagcgtgctgggtttcgtggcaatggaaatgaaagtcgggggctat

SEQ ID NO: 671207 - DNA, 75 bp, synthetic construct
  source 1..75: mol_type = other DNA
cactattgcgagctggtttccagcccggagcagatcccacaagtgctggcgattgccatgcgcaaagcggtgctt

SEQ ID NO: 671208 - DNA, 75 bp, synthetic construct
  source 1..75: mol_type = other DNA
aaaccgagcgagaaagccattcacccgcaatatctggcgcagcaaattagtcattttgccgccgatgacgctatt

SEQ ID NO: 671209 - DNA, 75 bp, synthetic construct
  source 1..75: mol_type = other DNA
catattccctccagcgaaattggcagcggctatttccaggaaacccacccacaagagctattccgcgaatgtagt

SEQ ID NO: 671210 - DNA, 75 bp, synthetic construct
  source 1..75: mol_type = other DNA
ataaagagttagttgagtttgccgggaaaattaaagcgcctattgttcatgccctgcgcggtaaagaacatgtcg

SEQ ID NO: 671211 - DNA, 75 bp, synthetic construct
  source 1..75: mol_type = other DNA
gattgctatgcgtaaagcggtgctaaaccgtggcgtttcggttgtcgttttaccgggcgacgtggcgctaaaacc

SEQ ID NO: 671212 - DNA, 75 bp, synthetic construct
  source 1..75: mol_type = other DNA
aaaccgagcgagaaagccattcacccgcaatatctggcgcagcaaattagtcattttgccgccgatgacgccatc

SEQ ID NO: 671213 - DNA, 75 bp, synthetic construct
  source 1..75: mol_type = other DNA
ggcaagatacgtgcagcagggaatgatggcttccctgaatgggtagatgaacctaaaccgactcacgaagaactt

SEQ ID NO: 671214 - DNA, 75 bp, synthetic construct
  source 1..75: mol_type = other DNA
tactaattaaccaggctaacgaatacatgaacagtaagcaatggcccggtaaagccgctattggtcgtctgaaag

SEQ ID NO: 671215 - DNA, 75 bp, synthetic construct
  source 1..75: mol_type = other DNA
atgaacgaatatgtttatagtgccagacataatgcttttttccctgtggatatgattgataaatataaatcagag

SEQ ID NO: 671216 - DNA, 75 bp, synthetic construct
  source 1..75: mol_type = other DNA
gacggcaatggttgggtaaacccattgctgaagtggtcaggcccgccgatttctttaccgaacagattgatgaaa

SEQ ID NO: 671217 - DNA, 75 bp, synthetic construct
  source 1..75: mol_type = other DNA
aaagcaaatcgcacgcgtggtccgtcagcaagaggcgctgtttagttcggtttatgaagggctgattgcggtgga

SEQ ID NO: 671218 - DNA, 75 bp, synthetic construct
  source 1..75: mol_type = other DNA
ttgttcaacagatacccaggtgaagcaagaaagtttaataaaaactatgatgagttaaggagaacagatcctttt

SEQ ID NO: 671219 - DNA, 75 bp, synthetic construct
  source 1..75: mol_type = other DNA
atgaacactaaggtgaaagaagcagtaaaatgttgggcttctagtccaacgtggtttagcaggcatccaatggat

SEQ ID NO: 671220 - DNA, 75 bp, synthetic construct
  source 1..75: mol_type = other DNA
aaaaaggggattatttacaaggatactctttaactcgtcgcgcatttcgtacctttttgaaagaccgtgttattc

SEQ ID NO: 671221 - DNA, 75 bp, synthetic construct
  source 1..75: mol_type = other DNA
cagctcgtcgatacgtttttgcaggtctgcgatttttcttctgttgcggttattgtctgctttggagacgaactg

SEQ ID NO: 671222 - DNA, 75 bp, synthetic construct
  source 1..75: mol_type = other DNA
gaaaaattgtcttactccgttttacgtattagtgccagcgaacaatacagcaaaggtacaccgctaaaactgtat

SEQ ID NO: 671223 - DNA, 75 bp, synthetic construct
  source 1..75: mol_type = other DNA
cttccgaagttcttagattatcagcgttacatgcaaacaaagtagtgaaaacacaggtacaaaaaaagccgccct

SEQ ID NO: 671224 - DNA, 75 bp, synthetic construct
  source 1..75: mol_type = other DNA
gtggtttagcaggcatccaatggatacggcggagttccgacgggctgtttcaaatctcaagcgcattacccctac

SEQ ID NO: 671225 - DNA, 75 bp, synthetic construct
  source 1..75: mol_type = other DNA
ccaggactggacagcaccgagtttgcagccattgttggcaatttacttgataacgccttcgaagccagcctgcgt

SEQ ID NO: 671226 - DNA, 75 bp, synthetic construct
  source 1..75: mol_type = other DNA
ttaaatctttccgtacggccattacacaacgtcaggtttacgtgaaatcaattctggatggtgacagcgtgtttg

SEQ ID NO: 671227 - DNA, 75 bp, synthetic construct
  source 1..75: mol_type = other DNA
tgccgtaatcaacatagccactgcgttgagcagaagcggatacaacattgctgtggtagatacagatccacaaat

SEQ ID NO: 671228 - DNA, 75 bp, synthetic construct
  source 1..75: mol_type = other DNA
aagtgcagcgcgcccgcgaactggggctaaaaatggtcatcgtccccggtagccagctttcgcaactgccgccag

SEQ ID NO: 671229 - DNA, 75 bp, synthetic construct
  source 1..75: mol_type = other DNA
tggaatccgaaaagatctggcggactatgactttgctattgtggacggggcaggttcgctctcagtaatcacctc

SEQ ID NO: 671230 - DNA, 75 bp, synthetic construct
  source 1..75: mol_type = other DNA
tttgaatccagtgatggcgcagcaaaaggtgaaatagaaatccttacaaaagagatagttagcacatttgagtaa

SEQ ID NO: 671231 - DNA, 75 bp, synthetic construct
  source 1..75: mol_type = other DNA
tatgactttgctatcgtggacggggcaggttcactctcagtaatcacatccgcagccgttatggtaagcgacctg

SEQ ID NO: 671232 - DNA, 75 bp, synthetic construct
  source 1..75: mol_type = other DNA
accatcctaatcccgagaaaattggttatcctatgcaattcaccaaacccggcgcgctggagaaaggggagagct

SEQ ID NO: 671233 - DNA, 75 bp, synthetic construct
  source 1..75: mol_type = other DNA
tgacagtatcatcagcgcagtaaaaacgcgtgactacaaacggctggcgaccatcgctaacaaattacaaagaga

SEQ ID NO: 671234 - DNA, 75 bp, synthetic construct
  source 1..75: mol_type = other DNA
cccctgggcggcaatggctgggcagaccaatctctgcggtggtcaagcctgccgatttctttactgagcagattg

SEQ ID NO: 671235 - DNA, 75 bp, synthetic construct
  source 1..75: mol_type = other DNA
tctcaattggatgtcgacgctcaatggtctgttgcagatgaaagagtatgatcgcgtgctggcgatggtgcaggg

SEQ ID NO: 671236 - DNA, 75 bp, synthetic construct
  source 1..75: mol_type = other DNA
ggggatggcgatgcgcgccaaaacgccaatctttgatgacgatggaaaagtcatcggcgtggtgtcgattggcta

SEQ ID NO: 671237 - DNA, 75 bp, synthetic construct
  source 1..75: mol_type = other DNA
agcgatgaaggaaacaagatcgttgaattattcctcagcgatgaaggcgatgatgtggtgattgaagtcgccgat

SEQ ID NO: 671238 - DNA, 75 bp, synthetic construct
  source 1..75: mol_type = other DNA
tattcgccaaccatgaagatcagctcctgttcttctcaattgaaccggaagaaaactggcgcggtagtgggcgta

SEQ ID NO: 671239 - DNA, 75 bp, synthetic construct
  source 1..75: mol_type = other DNA
gagaaaaccattcaggcaaaaccagcgttctctgctttcgcaggtgagatcgccagcatgagcagcaacattcgc

SEQ ID NO: 671240 - DNA, 75 bp, synthetic construct
  source 1..75: mol_type = other DNA
gcccgttatgaagcgtcaccgcgtagtgcgaatgcgcatgcattgcgtgagctggctgatgtggcggggacaact

SEQ ID NO: 671241 - DNA, 75 bp, synthetic construct
  source 1..75: mol_type = other DNA
caagttcagcctgaccagatgatcaacattagcgggagtctggataagaaaagcaccctagtcgtcgttcgagtc

SEQ ID NO: 671242 - DNA, 75 bp, synthetic construct
  source 1..75: mol_type = other DNA
atatcaggtgcataaatccctgccggtgcagactgaaatcaacggcaatcgctttaccagtaaggcgcatatcaa

SEQ ID NO: 671243 - DNA, 75 bp, synthetic construct
  source 1..75: mol_type = other DNA
ctgctgaccgctcaggaagttagcaaagagcaaatgcagatccgcgatattctggcgcgtccggcgttttatctc

SEQ ID NO: 671244 - DNA, 75 bp, synthetic construct
  source 1..75: mol_type = other DNA
aggaatggagcgttacggttatcgcgatgatgccctgaaactggcggatacgttcttccagcatgccaaaggatt

SEQ ID NO: 671245 - DNA, 75 bp, synthetic construct
  source 1..75: mol_type = other DNA
accccggagtccattattgtcgaaggggattatttcccggcctcggccattcatttaattgataacctgagagta

SEQ ID NO: 671246 - DNA, 75 bp, synthetic construct
  source 1..75: mol_type = other DNA
acccgcaatattgaacagctcggcgatgcgctgaactatctggatgataacgcgatgtcgaaaggggcggacatc

SEQ ID NO: 671247 - DNA, 75 bp, synthetic construct
  source 1..75: mol_type = other DNA
gtgaagcgatggtgagtcgtgcagccactgtgccgcccgttcaacggattgaggcaccgatgcagatcatcattc

SEQ ID NO: 671248 - DNA, 75 bp, synthetic construct
  source 1..75: mol_type = other DNA
tgccctgctcacctcctgccctaccttgcatgggcatgttccgttgacagctgggaccgcaactggccggaagag

SEQ ID NO: 671249 - DNA, 75 bp, synthetic construct
  source 1..75: mol_type = other DNA
gtctcgttgctgatgcaaaacctgcaagccgccatctgacgggactggctatcagtttaagtacaacaggcaaca

SEQ ID NO: 671250 - DNA, 75 bp, synthetic construct
  source 1..75: mol_type = other DNA
ggctgattgctgatgccaaacctgcaagccgtcaccttattggtctgaacattacccgggacattcccggctacc

SEQ ID NO: 671251 - DNA, 75 bp, synthetic construct
  source 1..75: mol_type = other DNA
aggatgtgggctttgtccccgacctgatagcgtggaaccttagccccgagcgtggcggcgatggcggcaactgga

SEQ ID NO: 671252 - DNA, 75 bp, synthetic construct
  source 1..75: mol_type = other DNA
gagcaaagagcatatcattgatgttcacctcagagagtatggcagaacagaaaacataaatgcacctttgttttt

SEQ ID NO: 671253 - DNA, 75 bp, synthetic construct
  source 1..75: mol_type = other DNA
gcggtacgtaaagagttactgactggataccagatccccaaaagtaactatattgttacacaaccagggagatcg

SEQ ID NO: 671254 - DNA, 75 bp, synthetic construct
  source 1..75: mol_type = other DNA
cattggtccggatgaagaagcgcaactcaagaaaattgcgcaggcgctgcagttgccgctggagcagtacctgtg

SEQ ID NO: 671255 - DNA, 75 bp, synthetic construct
  source 1..75: mol_type = other DNA
ttgctatcgcggactttcacgctcccggttcaatgatgtggagccgtgaggctctaattacctatctctatggat

SEQ ID NO: 671256 - DNA, 75 bp, synthetic construct
  source 1..75: mol_type = other DNA
atgaacgtgggcgatgtgcaacgtctgtcagtcgcggtagtggtgaattacaaaaccttgccagacggtaaacca

SEQ ID NO: 671257 - DNA, 75 bp, synthetic construct
  source 1..75: mol_type = other DNA
aaaccgttgagcaagtcgctaaggcgctggatatctccatcaccactgtgcgcctagtcctgggcggcaaagcgg

SEQ ID NO: 671258 - DNA, 75 bp, synthetic construct
  source 1..75: mol_type = other DNA
agcaaggcgcaccaaatttctcctggagtgccgcacatttgtatatgttgtataacgattttttccgtaagcaat

SEQ ID NO: 671259 - DNA, 75 bp, synthetic construct
  source 1..75: mol_type = other DNA
aatcagcgccacccgtgatggcctgaaagtcacctttggcaaagtgcgcgccacctgggatctgctgacctccgg

SEQ ID NO: 671260 - DNA, 75 bp, synthetic construct
  source 1..75: mol_type = other DNA
cgcgctggtgcaaaaactgacagcaaaagatgtgcaggtcgaaatgactctgcgcttcgccacgccgcgcacgtc

SEQ ID NO: 671261 - DNA, 75 bp, synthetic construct
  source 1..75: mol_type = other DNA
tgagattgcacaaatgagtgcaaatatccgcgcccgttatgaagcatcgccgcgttctgccaatgccgaagccct

SEQ ID NO: 671262 - DNA, 75 bp, synthetic construct
  source 1..75: mol_type = other DNA
cccgcaaggccattaccgaagtgaagaagatggagaaccgcgatgcagtggaggcgaccgtctggggtgcgtatt

SEQ ID NO: 671263 - DNA, 75 bp, synthetic construct
  source 1..75: mol_type = other DNA
aattacaacccgctgactggcgcgcagcaaggcgcaccaaatttctcctggagtgccgcgcatttgtatatgttg

SEQ ID NO: 671264 - DNA, 75 bp, synthetic construct
  source 1..75: mol_type = other DNA
aaagaaatctttggtgttattcctgactttaaccttaaagatggtgcacgccaggtttctgtaacccgtccactg

SEQ ID NO: 671265 - DNA, 75 bp, synthetic construct
  source 1..75: mol_type = other DNA
tggcaggtcgtatctcctctggaacatcctgataactgggaaagtattattacccggttatcatcagcagatctc

SEQ ID NO: 671266 - DNA, 75 bp, synthetic construct
  source 1..75: mol_type = other DNA
gatcagccgcattaccggcacaggaatactggccaggccggagcgcaatcattatttttcccttgctctggcttt

SEQ ID NO: 671267 - DNA, 75 bp, synthetic construct
  source 1..75: mol_type = other DNA
ctgataaagcctccgctaatcgtggcgtgctggtggtgatgaacgacaccgtactggacggtcgcgatgtcacca

SEQ ID NO: 671268 - DNA, 75 bp, synthetic construct
  source 1..75: mol_type = other DNA
gtgatgtcaccaaaaccaacaccaccgacgtagcgaccttcaagtctgttaactacggtcctctgggttacattc

SEQ ID NO: 671269 - DNA, 75 bp, synthetic construct
  source 1..75: mol_type = other DNA
aacggccatcgtgtcagtctgccgttatcggttttcgatccccaggactaccatccactgctgattaccgtttcc

SEQ ID NO: 671270 - DNA, 75 bp, synthetic construct
  source 1..75: mol_type = other DNA
gttttcttaatgtcacgctaaccgatacagattcgggacgggacattattatcaaccagagcgaagataacctgt

SEQ ID NO: 671271 - DNA, 75 bp, synthetic construct
  source 1..75: mol_type = other DNA
tcgccagaacagcgacgtgccatctgtgaagcttttgaatctgccaacaatacccatggcttaaacctgacagcc

SEQ ID NO: 671272 - DNA, 75 bp, synthetic construct
  source 1..75: mol_type = other DNA
atgagtataattagcgcccctgtgccaggccgcaatcgaactttatctggttttctcgtttcactaaccgaagga

SEQ ID NO: 671273 - DNA, 75 bp, synthetic construct
  source 1..75: mol_type = other DNA
attatttttccctggcactggctttctgctcatgggtcagaaatggatacggtgtcttccggtacagcgataagg

SEQ ID NO: 671274 - DNA, 75 bp, synthetic construct
  source 1..75: mol_type = other DNA
aacagcgcgtcccctcacatcataaacacaagtctcatgtaaaacccagacggcttacctccctgaaagtgactg

SEQ ID NO: 671275 - DNA, 75 bp, synthetic construct
  source 1..75: mol_type = other DNA
cttgacaacggcggcagcggggaaggcttcgggccactgaccctttccctgcgcctgaaagacgaacagggtaat

SEQ ID NO: 671276 - DNA, 75 bp, synthetic construct
  source 1..75: mol_type = other DNA
atgattcacctgttcaaaacctgcatgattaccgccttcattctggggttaacttggtctgccccactccgggca

SEQ ID NO: 671277 - DNA, 75 bp, synthetic construct
  source 1..75: mol_type = other DNA
agcatgccagatggaaaaggatggtttgtcggttcgattcacgatacagaagacggtccgatctgcgtttggttc

SEQ ID NO: 671278 - DNA, 75 bp, synthetic construct
  source 1..75: mol_type = other DNA
tacaccatctggtgaatggaagaatacttccattattttatcggtagttgccgtcatgcttatgatattcgccag

SEQ ID NO: 671279 - DNA, 75 bp, synthetic construct
  source 1..75: mol_type = other DNA
ggtattaacgctgatatcaacacagccggagaaaaacatccccctgttattcgcctttggcggcgtaattatttt

SEQ ID NO: 671280 - DNA, 75 bp, synthetic construct
  source 1..75: mol_type = other DNA
cgccagctaaaactgacagcgggcaatgatgcgctcggttcgatgcagaaagaatccgacattaacaaggactca

SEQ ID NO: 671281 - DNA, 75 bp, synthetic construct
  source 1..75: mol_type = other DNA
tgcgcgttgccctgtatgccatctctggtttgttaggtgcactgtttaatccgataggtcttgtggttactgcac

SEQ ID NO: 671282 - DNA, 75 bp, synthetic construct
  source 1..75: mol_type = other DNA
tgaaatccggcgtttcctggttgctggataaactcggcattgtcagtaaagaggctgcaaaggctaaactgccgg

SEQ ID NO: 671283 - DNA, 75 bp, synthetic construct
  source 1..75: mol_type = other DNA
tttctgtcattcaggtcgatcttgaccattttaaagcgattaatgaccgctttggtcatcaggcgggcgaccgtg

SEQ ID NO: 671284 - DNA, 75 bp, synthetic construct
  source 1..75: mol_type = other DNA
ttatcggttttcaatccccaggactaccatccactgctgattaccgtttccggaaaaacgttaactgatccctga

SEQ ID NO: 671285 - DNA, 75 bp, synthetic construct
  source 1..75: mol_type = other DNA
aacttggtctgccccactccgggcacaggatcaacgttacatcagtatacgcaatacagatacgatatggctccc

SEQ ID NO: 671286 - DNA, 75 bp, synthetic construct
  source 1..75: mol_type = other DNA
atgctggagaataaaaccaccgatgattttatttttgttaagcaacatatctaccgcatatttcagtggatgcac

SEQ ID NO: 671287 - DNA, 75 bp, synthetic construct
  source 1..75: mol_type = other DNA
gcaggcgtggcaacgacaccttaacgcgtttatataaccgtggcgcactgttcgaaaaagcccgtccgctcgcga

SEQ ID NO: 671288 - DNA, 75 bp, synthetic construct
  source 1..75: mol_type = other DNA
gttgccgggcgggtcggtggtgaggagttttgtgtgattctgccaggcgcgagtctgacggaggctgcggaggtc

SEQ ID NO: 671289 - DNA, 75 bp, synthetic construct
  source 1..75: mol_type = other DNA
ttgcgtggcttttgcatacaatttattactattacccctaaatttcccctccccagcggcgcagagatgagtata

SEQ ID NO: 671290 - DNA, 75 bp, synthetic construct
  source 1..75: mol_type = other DNA
ctggaataaatctggtgaggtgagcgatttttctgcgttgcattacccgggatatgataacaattttgcatggag

SEQ ID NO: 671291 - DNA, 75 bp, synthetic construct
  source 1..75: mol_type = other DNA
aagccgacgaaaaactgtctgccgagctgtctcgtctggaagcgctgcgtgcagtgaacccgaacattcgtgacg

SEQ ID NO: 671292 - DNA, 75 bp, synthetic construct
  source 1..75: mol_type = other DNA
cagcgaagatgcccagagcgcccgtcaggaactggtttccatgctgatggatcgccacggcaccagccgcgtgct

SEQ ID NO: 671293 - DNA, 75 bp, synthetic construct
  source 1..75: mol_type = other DNA
tatgtgaccggtaaagcaggtgcttctgttatgtcacttgcagaccagcgtttcctgtcgggggatggagaggaa

SEQ ID NO: 671294 - DNA, 75 bp, synthetic construct
  source 1..75: mol_type = other DNA
ttacgcccgtggaaaagctgacacaacatacaacctctataaggaccacgtgggacatagtgacttgaagaatga

SEQ ID NO: 671295 - DNA, 75 bp, synthetic construct
  source 1..75: mol_type = other DNA
cagttaccgctgcctgtatacttgcagcaaatgcgggtgctgaggagggtaaaagcggtttttatctgaccggta

SEQ ID NO: 671296 - DNA, 75 bp, synthetic construct
  source 1..75: mol_type = other DNA
atgagtagcaagatcctcggtaatgtctgggatgcatgcgcagcatatggcgtcaaaggtgcaaaactgatgatt

SEQ ID NO: 671297 - DNA, 75 bp, synthetic construct
  source 1..75: mol_type = other DNA
tggggcgataaatataaatcagaggttgatgttaaaagtcatgacatcatgcttggtgtgacttataacttctga

SEQ ID NO: 671298 - DNA, 75 bp, synthetic construct
  source 1..75: mol_type = other DNA
gaaaaccgtcaagttagcaagcgctcactattacgatgaactgccgacggaagggaacgaacatggtcaggcgtt

SEQ ID NO: 671299 - DNA, 75 bp, synthetic construct
  source 1..75: mol_type = other DNA
caactggcagagcacgtgccgggcgttctgctgctgctgaccgcgaccccggaacagctggggatggaaagccac

SEQ ID NO: 671300 - DNA, 75 bp, synthetic construct
  source 1..75: mol_type = other DNA
caaaaattgccgcgaacaacatgaagccctgaaagcgcaactggagcagggccgtgaccgtctgctggagatcca

SEQ ID NO: 671301 - DNA, 75 bp, synthetic construct
  source 1..75: mol_type = other DNA
tttgcgctgcgttatcgcgcgcgtaagtattccagcgaacagttccgtatgccgtacagcggcctgcgcggtcag

SEQ ID NO: 671302 - DNA, 75 bp, synthetic construct
  source 1..75: mol_type = other DNA
tgatgacattaagaatgaggtatcactcaacactctgatgctgaatgcatactatgacttccggaatgacagtgc

SEQ ID NO: 671303 - DNA, 75 bp, synthetic construct
  source 1..75: mol_type = other DNA
caataccgaatactatctactcacttccgattacgttagcgttgccgacttcgacggcgaaaccatcctgaaagt

SEQ ID NO: 671304 - DNA, 75 bp, synthetic construct
  source 1..75: mol_type = other DNA
gccatcggcttcatgcagcagctcttcaagggcagcaacatccgcgaaaccaccctgcgcgccgtgatggaggat

SEQ ID NO: 671305 - DNA, 75 bp, synthetic construct
  source 1..75: mol_type = other DNA
cctctctgtcgctattggaaaccatcaagaagctggaaagctatcatcgcgactttttccttgtctttgcccatg

SEQ ID NO: 671306 - DNA, 75 bp, synthetic construct
  source 1..75: mol_type = other DNA
cgaaagtatccgcgccagcacctggaggatttaagcaccgggaagaaagaggcgttaccagtagatgacgatggt

SEQ ID NO: 671307 - DNA, 75 bp, synthetic construct
  source 1..75: mol_type = other DNA
tcagcgacctacttcatgcgggcggcagacagccatcaccgtgagggaatattgcagggtgctttgctggtggtt

SEQ ID NO: 671308 - DNA, 75 bp, synthetic construct
  source 1..75: mol_type = other DNA
ggcgttaccagtagatgacgatggatgcacgggcagtaatgctgtgtttggtgtgatcactcatgtcattaatga

SEQ ID NO: 671309 - DNA, 75 bp, synthetic construct
  source 1..75: mol_type = other DNA
cgccggacgtaacccgcaaacgaaagatctggcgctgacacagcgttgtttaataaagggtgatgtgcttgatgg

SEQ ID NO: 671310 - DNA, 75 bp, synthetic construct
  source 1..75: mol_type = other DNA
aactggaatgagaataagaatactaattattattcaaatagttcaaaaaataaaagagaaaatatttttagtgtt

SEQ ID NO: 671311 - DNA, 75 bp, synthetic construct
  source 1..75: mol_type = other DNA
tgagttacaaggacgagtggggcgataaatataaatcagaggttgatgttaaaagtcatgacatcatgcttggtg

SEQ ID NO: 671312 - DNA, 75 bp, synthetic construct
  source 1..75: mol_type = other DNA
catccacaccctggttgttttttccgacgactggttggccgatggccatgaccatattaaccccttcctgggcgt

SEQ ID NO: 671313 - DNA, 75 bp, synthetic construct
  source 1..75: mol_type = other DNA
tcatcttcgaagttaaaaaaaattaaactgttagcaactgcaataaaagatggtgttgtgggtaagatgggaaaa

SEQ ID NO: 671314 - DNA, 75 bp, synthetic construct
  source 1..75: mol_type = other DNA
ttataaagatgaggatggcgctaaatataaatcctctgttgatgtcagaagtaatgagtttatgttaggtgcaac

SEQ ID NO: 671315 - DNA, 75 bp, synthetic construct
  source 1..75: mol_type = other DNA
aaattgtcggttaaggttgaggggaactcgcaggtagaggtaggtaaaaaagttactttgcagggtacctacacg

SEQ ID NO: 671316 - DNA, 75 bp, synthetic construct
  source 1..75: mol_type = other DNA
ttactggcggcgcactaccgccatgatgcaggtttacttggggctgcgttgttggctcagggagaaaaattatga

SEQ ID NO: 671317 - DNA, 75 bp, synthetic construct
  source 1..75: mol_type = other DNA
ccgttgcaagctcatgcgcagcaggtggccatcgcttcaaccgggataatccgcaatggcagcctgctggcgcta

SEQ ID NO: 671318 - DNA, 75 bp, synthetic construct
  source 1..75: mol_type = other DNA
actgcttaccggccctggcggtctggcggggcatatcgggcatacgcttgccgatccacacggcccagtctgcgg

SEQ ID NO: 671319 - DNA, 75 bp, synthetic construct
  source 1..75: mol_type = other DNA
gcgattgcttctggtcgcggcattgcggcggcggcgcaaggggagttggctggtgcgaatgcgaaaactattttc

SEQ ID NO: 671320 - DNA, 75 bp, synthetic construct
  source 1..75: mol_type = other DNA
ggaaggcgatataaccgagatggtgtttatcaccgtttccactggcgtcggcggcggtgtagtgagcggcggcaa

SEQ ID NO: 671321 - DNA, 75 bp, synthetic construct
  source 1..75: mol_type = other DNA
caaaacggttaactgaatttgcaggaaaacgtcaccaggcataccgcataggaggtgacgagtttgctctggtgc

SEQ ID NO: 671322 - DNA, 75 bp, synthetic construct
  source 1..75: mol_type = other DNA
ttgatggcgataattttaaatatatcaatgacacatggggtcacgcgacgggcgatcaggtcttgatcgagatag

SEQ ID NO: 671323 - DNA, 75 bp, synthetic construct
  source 1..75: mol_type = other DNA
ttgatcttcataatggtcatcagaccaccatgacattaagcattggttacgcgatgaccattgagcatgcctctg

SEQ ID NO: 671324 - DNA, 75 bp, synthetic construct
  source 1..75: mol_type = other DNA
ctgaaagcccactttcttcagatgcatccaaaatttcaaaagaaaagtccatttccgctgtggtgccagtgctag

SEQ ID NO: 671325 - DNA, 75 bp, synthetic construct
  source 1..75: mol_type = other DNA
agtaaaaggtccgttcatgatggaccgcgtcctgtgggaaaaaaccggtcactgggacaactacaaagatgcgat

SEQ ID NO: 671326 - DNA, 75 bp, synthetic construct
  source 1..75: mol_type = other DNA
tcctggacgaaaatattgcccatgatgaccagccaggcctctatttccatgaagaatatgtcgatatgtgccgtg

SEQ ID NO: 671327 - DNA, 75 bp, synthetic construct
  source 1..75: mol_type = other DNA
tctggagatcattcgtcactcctgcgcgcacctgttagggcacgcgattaaacaactttggccgcataccaaaat

SEQ ID NO: 671328 - DNA, 75 bp, synthetic construct
  source 1..75: mol_type = other DNA
tacgaagttattcaactgaacgatacccacccgactatcgcgattccagagctgctgcgcgtgctgattgatgag

SEQ ID NO: 671329 - DNA, 75 bp, synthetic construct
  source 1..75: mol_type = other DNA
gacattggtccaggtctggcgaaagcctgtatcgcagggcgcgttaatggtgaactggttgatgcttgcgatctg

SEQ ID NO: 671330 - DNA, 75 bp, synthetic construct
  source 1..75: mol_type = other DNA
gcagccaacgccattacgatcacgctgtaagccccagggatgttgcgctggacattggtccaggtctggcgaaag

SEQ ID NO: 671331 - DNA, 75 bp, synthetic construct
  source 1..75: mol_type = other DNA
tttcaaacgtagagaagccgctggtggcattctgtgatgaacagggtgataccttcgactacgagcgttttgatt

SEQ ID NO: 671332 - DNA, 75 bp, synthetic construct
  source 1..75: mol_type = other DNA
tctggggtcgatggaacgtttcatcggtatcctgaccgaagaattcgctggtttcttcccgacctggcttgcgcc

SEQ ID NO: 671333 - DNA, 75 bp, synthetic construct
  source 1..75: mol_type = other DNA
aatgaatcgtgtacatgccggatttaccgcaatgaccgaaatcatccgatctgcgttaccgactggatggatgaa

SEQ ID NO: 671334 - DNA, 75 bp, synthetic construct
  source 1..75: mol_type = other DNA
tcgacgagctgaacgccaccagcgataacacaatggtggcgcatctgggaatcgtttacacccgtctggacgatg

SEQ ID NO: 671335 - DNA, 75 bp, synthetic construct
  source 1..75: mol_type = other DNA
cattgaacgccgcaaacgaaattagtgttgcagccttccttgcgcaacggattcgttttacggatatcgccgcgt

SEQ ID NO: 671336 - DNA, 75 bp, synthetic construct
  source 1..75: mol_type = other DNA
cgccagccagatggaagtgctgattcacccgcagtcagtgattcactcaatggtgcgctatcaggacggcagtgt

SEQ ID NO: 671337 - DNA, 75 bp, synthetic construct
  source 1..75: mol_type = other DNA
caatcccactcgggctggcgcgtgaaaacaaaggtgttgcagcattcgcgggttttgtcggttacgcggtcatga

SEQ ID NO: 671338 - DNA, 75 bp, synthetic construct
  source 1..75: mol_type = other DNA
gccgcactatcatcgacattatggagatgtatcacgcattgcatgtttcctggtctaatttgcaggatcaacaag

SEQ ID NO: 671339 - DNA, 75 bp, synthetic construct
  source 1..75: mol_type = other DNA
attgccattaatgatgcgcaggccgcagcatgggcggagtatcaggcgctggatggcgatataaccgatatagtg

SEQ ID NO: 671340 - DNA, 75 bp, synthetic construct
  source 1..75: mol_type = other DNA
tgctgaatgtattgcaacgcttatagcagatctaagaataataacggattgccagaagattgttcttggcggtag

SEQ ID NO: 671341 - DNA, 75 bp, synthetic construct
  source 1..75: mol_type = other DNA
agatgatggcggtaatacacctgttccgccagatgatggcggcgatactccggttaaacacgatcctgtcgtgta

SEQ ID NO: 671342 - DNA, 75 bp, synthetic construct
  source 1..75: mol_type = other DNA
atcaccgatcagggcggcaatacggcgctgaatggcggtactgtcatgacggttgagggtgacaacatcaccctc

SEQ ID NO: 671343 - DNA, 75 bp, synthetic construct
  source 1..75: mol_type = other DNA
ggtgatacgccagttccagacgacggcggtgatacgcctgttccgccagacgatggtggcgataccccggttaaa

SEQ ID NO: 671344 - DNA, 75 bp, synthetic construct
  source 1..75: mol_type = other DNA
caacaaaggcattctgccaaccactgacgccgccgttctgaaagccaataacatacagagcattcttgggatcca

SEQ ID NO: 671345 - DNA, 75 bp, synthetic construct
  source 1..75: mol_type = other DNA
gtggcattattgtcgttctgcggcattatgctcggcattggtagttctcttagcagccatgatgtcataaccctg

SEQ ID NO: 671346 - DNA, 75 bp, synthetic construct
  source 1..75: mol_type = other DNA
gggtcatcaacttcgataaagataacgccagcgcggttaagttcacccacagcaactatgttgcgctgaacgatg

SEQ ID NO: 671347 - DNA, 75 bp, synthetic construct
  source 1..75: mol_type = other DNA
cagatttttcgccgcaacattcgagcgtcgtcagaactgtcccaagccgaagcagagaaggctcttggattcctt

SEQ ID NO: 671348 - DNA, 75 bp, synthetic construct
  source 1..75: mol_type = other DNA
tgctgcgtgtgcatgaagaattaaccacattgcaggggcagagcgatccgctggaaattattgctgatcgtttca

SEQ ID NO: 671349 - DNA, 75 bp, synthetic construct
  source 1..75: mol_type = other DNA
aaatttgagttccagcgttgcctgtcacgtctgcaagagatgcaaagcgaagagtatctgaagcgcgagcattta

SEQ ID NO: 671350 - DNA, 75 bp, synthetic construct
  source 1..75: mol_type = other DNA
ttatcagggtgagcggctgaagtttgagttccagcgttgcctgtcacgtctgcaagagatgcaaagcgaagagta

SEQ ID NO: 671351 - DNA, 75 bp, synthetic construct
  source 1..75: mol_type = other DNA
tggatgaactgaacgctaccagcgataacacgatggtggcgcatctgggaattgtttacacccgtctgggtgatg

SEQ ID NO: 671352 - DNA, 75 bp, synthetic construct
  source 1..75: mol_type = other DNA
accgcaaggaccgcaatcatcctatctgcgttaccgagtggatggatgaatgtcgccgcgaaccattcaaaaccc

SEQ ID NO: 671353 - DNA, 75 bp, synthetic construct
  source 1..75: mol_type = other DNA
cccggacgtgcaggcgcactgcttacgacacttcttcgccatatatcgataatcaacggcttcgacaatccgatg

SEQ ID NO: 671354 - DNA, 75 bp, synthetic construct
  source 1..75: mol_type = other DNA
gaactgggtgtcggaaccacgaaaaacgccgtttttcagcatatccagagcctgccccgcggacagcagaaagag

SEQ ID NO: 671355 - DNA, 75 bp, synthetic construct
  source 1..75: mol_type = other DNA
tattgcgctggtggatgagttttacgagcgccacgtcaagctggtggtgagcgcggaagtccctttgtacgaaat

SEQ ID NO: 671356 - DNA, 75 bp, synthetic construct
  source 1..75: mol_type = other DNA
aaagaggccgtcagtcggctggagattatctaccaggaattaatcaacagcacgccgccagtccccagggctagc

SEQ ID NO: 671357 - DNA, 75 bp, synthetic construct
  source 1..75: mol_type = other DNA
caggccaccagcccccaggacgagtgggctaatggcgcgggtcggtaagctgtggggtaaacgcgaagacacaaa

SEQ ID NO: 671358 - DNA, 75 bp, synthetic construct
  source 1..75: mol_type = other DNA
gtgggggtgacggtgtacgatcgccatccagaaatcggtggcttgctcactttcggcattccttctttcaaactg

SEQ ID NO: 671359 - DNA, 75 bp, synthetic construct
  source 1..75: mol_type = other DNA
ggcgagccggatgcccaggggcgtcggcgacctgtactgatgaatcccctaatgatttttatcaaaatcattaag

SEQ ID NO: 671360 - DNA, 75 bp, synthetic construct
  source 1..75: mol_type = other DNA
taaccgcgatggcggaagggcgtcatgcggcgcaggggattattgactggctgggcgtaaaatcaatcaagcctc

SEQ ID NO: 671361 - DNA, 75 bp, synthetic construct
  source 1..75: mol_type = other DNA
acccgtcgcggcgggcaaagtaaaagccacggcgcataaatgcgacctttgtgcagggcgcgaaaacggtcctgc

SEQ ID NO: 671362 - DNA, 75 bp, synthetic construct
  source 1..75: mol_type = other DNA
cggactcaatgtcgtggtactgggcggtggcgacaccgcgatggactgtgtgcgtaccgcgctgcgccatggcgc

SEQ ID NO: 671363 - DNA, 75 bp, synthetic construct
  source 1..75: mol_type = other DNA
tgcgcaccgcgttgcgtcacggcgcgagtaacgtcacctgtgcctatcgtcgtgacgaagctaacatgcctggct

SEQ ID NO: 671364 - DNA, 75 bp, synthetic construct
  source 1..75: mol_type = other DNA
ttttcgttaaagccatttacaccatatatctttacatttgttttcggccatgactatgtcacatcggcaaattat

SEQ ID NO: 671365 - DNA, 75 bp, synthetic construct
  source 1..75: mol_type = other DNA
cgctgaagcgcaagggatggtggggaccgcgtgacacgactgacccggtaacgggtgaaccggtcaccattcagc

SEQ ID NO: 671366 - DNA, 75 bp, synthetic construct
  source 1..75: mol_type = other DNA
gctgcaattttctgccggggatgtagcggaaatagagcagacgattctctcttttgtcgatgcctgccacacccg

SEQ ID NO: 671367 - DNA, 75 bp, synthetic construct
  source 1..75: mol_type = other DNA
atcaggcgttggcgaaaggttggcgtcctgacttaagccatgtcaccaaagtggacaagcgggtggcgattatcg

SEQ ID NO: 671368 - DNA, 75 bp, synthetic construct
  source 1..75: mol_type = other DNA
gccgtgcgtggtgcggatctggtggttaccgcaatggcagaaggacgtcatgcggcacaggggattattgactgg

SEQ ID NO: 671369 - DNA, 75 bp, synthetic construct
  source 1..75: mol_type = other DNA
ggcaatctgaagggaaattatacctctcaggtatcatccagatctttggctgcattatcaggatactaacactat

SEQ ID NO: 671370 - DNA, 75 bp, synthetic construct
  source 1..75: mol_type = other DNA
gtcttggcgagccggatgcccaggggcgtcggcgtccagtgccggtggaaggcagtgaatttgtcatgccagccg

SEQ ID NO: 671371 - DNA, 75 bp, synthetic construct
  source 1..75: mol_type = other DNA
cgccgaaaccgccttccatccgtgcggtacctgcaaaatgggttatgacgagatggcagtggttgacgccgaagg

SEQ ID NO: 671372 - DNA, 75 bp, synthetic construct
  source 1..75: mol_type = other DNA
cagttcaccaaaatcttcatgggcctggcgaccattttcctggagcgcgaccttgcgcttatcgaaatcaacccg

SEQ ID NO: 671373 - DNA, 75 bp, synthetic construct
  source 1..75: mol_type = other DNA
cgtaccggtcgtggtacgtctggaaggtaacaacgccgaactcggcgctaagaaactggctgacagcggcctgaa

SEQ ID NO: 671374 - DNA, 75 bp, synthetic construct
  source 1..75: mol_type = other DNA
aggagcacggcgggatattttgtggcaaatgggatgccggtgagagcgaaaaaaatgagtcgtgatttgaactga

SEQ ID NO: 671375 - DNA, 75 bp, synthetic construct
  source 1..75: mol_type = other DNA
agctcgatgagttcgtgcgtaatcacgccgaaaccgccttccacccatgcggtacgtgcaaaatggggtacgacg

SEQ ID NO: 671376 - DNA, 75 bp, synthetic construct
  source 1..75: mol_type = other DNA
cgcaaattatcaccggcaatttgaacgccacgacgattatgattggcgagaaaatggcggatatgattcgcggga

SEQ ID NO: 671377 - DNA, 75 bp, synthetic construct
  source 1..75: mol_type = other DNA
ggagataaagtcttaccgcttgagcgcaaagcgctccttggccaattattactcgacgagattgtgacccgttat

SEQ ID NO: 671378 - DNA, 75 bp, synthetic construct
  source 1..75: mol_type = other DNA
tgcctataaaacccctgaactggtgcgtcgtttgcgcgatcgcggggccgacgtccgcgtagccatgaccgaagc

SEQ ID NO: 671379 - DNA, 75 bp, synthetic construct
  source 1..75: mol_type = other DNA
atgagcctggccggtaaaaaaatcgttctcggcgttagcggcggtattgctgcctataaaacccctgaactggtg

SEQ ID NO: 671380 - DNA, 75 bp, synthetic construct
  source 1..75: mol_type = other DNA
atggatttcgacacaatcatgaaaaaggcttacgaagaatacttcgaaaacctcgccgaaggcgaagaaactctc

SEQ ID NO: 671381 - DNA, 75 bp, synthetic construct
  source 1..75: mol_type = other DNA
atgaacttacatgaataccaggcaaaacaactttttgcccgctatggcttaccggcgccagtgggttatgcctgt

SEQ ID NO: 671382 - DNA, 75 bp, synthetic construct
  source 1..75: mol_type = other DNA
gatgctgccgcgctccggattgggacataagcacggtatcgtgcttggtaacctggtaggattgatcgattctga

SEQ ID NO: 671383 - DNA, 75 bp, synthetic construct
  source 1..75: mol_type = other DNA
agcaaatggagaacgttgatgacagaccgtactggatgtataccggcatcagtgaccgccgtacccgcaggagcc

SEQ ID NO: 671384 - DNA, 75 bp, synthetic construct
  source 1..75: mol_type = other DNA
gaagctctggaatgctgggatgagaaactggtaaaagccctgctgccgcgccatatgcagataatcaacgaaatc

SEQ ID NO: 671385 - DNA, 75 bp, synthetic construct
  source 1..75: mol_type = other DNA
gcaaagtgacgaaagaggggcgctgggaaccggaatttaccattaccgggcaagcgtgggatcttccagtgttgg

SEQ ID NO: 671386 - DNA, 75 bp, synthetic construct
  source 1..75: mol_type = other DNA
cccgtggtttagtcataacgaagctctggatgtgcaggtgggcatcggcggcaaagtgacgaaagaggggcgctg

SEQ ID NO: 671387 - DNA, 75 bp, synthetic construct
  source 1..75: mol_type = other DNA
tatggtgtgaaatggccgaacggcagtggttttcactgtattgatggcgggtatgcgacggagttatccgcagag

SEQ ID NO: 671388 - DNA, 75 bp, synthetic construct
  source 1..75: mol_type = other DNA
tacggtgtgaaatggccgaatggcagtggttttcgctgtattgatgacggggaggccaccacgctgtcagtaacg

SEQ ID NO: 671389 - DNA, 75 bp, synthetic construct
  source 1..75: mol_type = other DNA
actggccgaaatgctgcgtgctcagccattcgccaaaccggtggcgaatcagcgacatgttaactacatctcaat

SEQ ID NO: 671390 - DNA, 75 bp, synthetic construct
  source 1..75: mol_type = other DNA
gggcagtcagctactggctatggtcttaactaccagtatggtctgttccgtcagtcctttgtcggtggcaaacag

SEQ ID NO: 671391 - DNA, 75 bp, synthetic construct
  source 1..75: mol_type = other DNA
gcgggcccagccttttgccaaaccggcggcgaatcagcgtcatgttaactacatctcaatggagtttttgattgg

SEQ ID NO: 671392 - DNA, 75 bp, synthetic construct
  source 1..75: mol_type = other DNA
gcatgagtacaaacgccagcacctgaatctgctgcatattctggcgttgtacaaagaaattcgtgaaaacccgca

SEQ ID NO: 671393 - DNA, 75 bp, synthetic construct
  source 1..75: mol_type = other DNA
cggcgctgggtaacggtggcctggggcgtctggctgcgtgtttcctcgactcaatggcgactgtcgggcagtctg

SEQ ID NO: 671394 - DNA, 75 bp, synthetic construct
  source 1..75: mol_type = other DNA
cctttcgttaaaccggcggcgaatcagcgccatgttaactacatctcaatggagtttttgattgggcgtctgacg

SEQ ID NO: 671395 - DNA, 75 bp, synthetic construct
  source 1..75: mol_type = other DNA
aatcaacccgcaggcaattttcgatgtccaaattaaacgtctgcacgagtacaaacggcaacacctgaatctgct

SEQ ID NO: 671396 - DNA, 75 bp, synthetic construct
  source 1..75: mol_type = other DNA
aggtagcgaaggtagcgaatgctagcactggagcattcgataccatggatgaggcgatttccgccgccgtcttgg

SEQ ID NO: 671397 - DNA, 75 bp, synthetic construct
  source 1..75: mol_type = other DNA
ggcctttatgcgcgggcacggcaggctggccacgctcccggccctgcgcaccctcctcaccatcacccgcgatct

SEQ ID NO: 671398 - DNA, 75 bp, synthetic construct
  source 1..75: mol_type = other DNA
aactccccgtcttaccgaactggcggaagagagcgctaacgaaacgggaatgggaaataaagaagataagtactt

SEQ ID NO: 671399 - DNA, 75 bp, synthetic construct
  source 1..75: mol_type = other DNA
gtgtatcgctgaaaaaagcctgattgtcgtggcgtcagtggcagagtatttaattcaacagatgcaaagttttgg

SEQ ID NO: 671400 - DNA, 75 bp, synthetic construct
  source 1..75: mol_type = other DNA
gtgacccgtctggatattctggaagatatccgccgggccttacagcaggcgctggatgagggaaaaaccggtcgc

SEQ ID NO: 671401 - DNA, 75 bp, synthetic construct
  source 1..75: mol_type = other DNA
accgagtgacacgactgacccggtaacgggtgagccggtcaccattcagcagggcagttcgtggcggctcgatac

SEQ ID NO: 671402 - DNA, 75 bp, synthetic construct
  source 1..75: mol_type = other DNA
cgagaaagaaatcaccgacccggacaccggggaagtgaccatcatccagcaaggcagcacatggcggctcgacac

SEQ ID NO: 671403 - DNA, 75 bp, synthetic construct
  source 1..75: mol_type = other DNA
ccgacggatttaaggtcagctcctcgttttataccgaaaaaacgttggttgaagaagataaagcattgttgattg

SEQ ID NO: 671404 - DNA, 75 bp, synthetic construct
  source 1..75: mol_type = other DNA
gcctgctgggtctgtggtggttttctgtgggaatgacggaaaaaatccgggagccggctcgctttgctgcgtggg

SEQ ID NO: 671405 - DNA, 75 bp, synthetic construct
  source 1..75: mol_type = other DNA
cctatcaaaagcagatatctattctatccagcatgcaagtattggacgaaaagcaaccgcaggacctcaagcaaa

SEQ ID NO: 671406 - DNA, 75 bp, synthetic construct
  source 1..75: mol_type = other DNA
cgcccttcttcttaaccatgaacaaactgaaaaattgcgtgctgtttgcctgccagacggtgtcgccaacaaaaa

SEQ ID NO: 671407 - DNA, 75 bp, synthetic construct
  source 1..75: mol_type = other DNA
caccgaccggagaggggacaacgtcagcacggacttttgcccgctcacgacgctgcgtgttgaccactggttttt

SEQ ID NO: 671408 - DNA, 75 bp, synthetic construct
  source 1..75: mol_type = other DNA
gaaagccgccgaggacatcatcaacggcgcttcatttgattacaacctgccgtgtatcgctgaaaaaagcctgat

SEQ ID NO: 671409 - DNA, 75 bp, synthetic construct
  source 1..75: mol_type = other DNA
ttttcttgcatcggtgatcccgatgaatgtgcaggatattgaatcgacgatattacgggctacaggaagtatcca

SEQ ID NO: 671410 - DNA, 75 bp, synthetic construct
  source 1..75: mol_type = other DNA
tcgatgaaacagagcgaggtgctggtggctttggtagcacatcggaagaccgcattgaaatcaagcgtacaccgc

SEQ ID NO: 671411 - DNA, 75 bp, synthetic construct
  source 1..75: mol_type = other DNA
tggatgatgtgataaatcagacagttaaccgtgttcttgaccagtttgccataacgcttcctgaagatctttttg

SEQ ID NO: 671412 - DNA, 75 bp, synthetic construct
  source 1..75: mol_type = other DNA
ggggggccaggctttctgagctacgtctcgctacagccagtgagttcaacatggaagatctggtctggacaaccc

SEQ ID NO: 671413 - DNA, 75 bp, synthetic construct
  source 1..75: mol_type = other DNA
tgggaagaaaccagatgtggggagtcgcgtacttacctatacggaactggcaaagatctggctggcactggagaa

SEQ ID NO: 671414 - DNA, 75 bp, synthetic construct
  source 1..75: mol_type = other DNA
ctggttgtggacgggtacacggacaagataacgcattaccggaagccaacggaaaaggaacgactggagctggcg

SEQ ID NO: 671415 - DNA, 75 bp, synthetic construct
  source 1..75: mol_type = other DNA
tgttactgagccgctgataatcacgctggcaaaccagatctatttcgaaaaagcgcaattacctcaggccctggt

SEQ ID NO: 671416 - DNA, 75 bp, synthetic construct
  source 1..75: mol_type = other DNA
cggtaaaccccggataaaatgcggggactgtacgcaccgtcagttacttcctgtatctgatcttgtcatctacca

SEQ ID NO: 671417 - DNA, 75 bp, synthetic construct
  source 1..75: mol_type = other DNA
aaatgcaaatcaagtcgttgaagcgagaagccaggctggcgcaatcgatcgaagaacaaaagcaaaaccaggaaa

SEQ ID NO: 671418 - DNA, 75 bp, synthetic construct
  source 1..75: mol_type = other DNA
tggtgatgagccaggcggcgcgccagaccttatccctcgaaacggatttttccctgcgcgaagtgcaggcgttag

SEQ ID NO: 671419 - DNA, 75 bp, synthetic construct
  source 1..75: mol_type = other DNA
gaccttatctcttgaaacggatttttccctgcgcgaagtgcaggcattagccgatgtgacgcacgatgcgcgcga

SEQ ID NO: 671420 - DNA, 75 bp, synthetic construct
  source 1..75: mol_type = other DNA
tatccagtgctgctcagaatgtgggataaacgccagcggggttataaggcgatggggtacaggattgtggctgat

SEQ ID NO: 671421 - DNA, 75 bp, synthetic construct
  source 1..75: mol_type = other DNA
caggttgagccttatattgagcgattgcttaatatcggatttgatgtgctgttccctgggcaggaaatagataaa

SEQ ID NO: 671422 - DNA, 75 bp, synthetic construct
  source 1..75: mol_type = other DNA
gcacaatcggcattgccccttccgccaacctgaatccagaacgaaacttcccgtcgcttttcgagccggttcacg

SEQ ID NO: 671423 - DNA, 75 bp, synthetic construct
  source 1..75: mol_type = other DNA
aaactccgaaatcgctgccaaaggcgtgctgccgacctgccaggataccggcaccgcgatcatcgtcggtaaaaa

SEQ ID NO: 671424 - DNA, 75 bp, synthetic construct
  source 1..75: mol_type = other DNA
caggcactgcgcgatctggcgagttcagccatcgatctctctgacggtctgatctccgacctcgggcatatcgtg

SEQ ID NO: 671425 - DNA, 75 bp, synthetic construct
  source 1..75: mol_type = other DNA
tccacggctttgtcccgatgggacgagccttaatgcgctctggtgcgaaaccgggtgactggatttatgtgactg

SEQ ID NO: 671426 - DNA, 75 bp, synthetic construct
  source 1..75: mol_type = other DNA
agatccgtgacaaccagaagcgtgttctgctgctggaaaacctgagcgattacatcaaacctggtatgagcgtcg

SEQ ID NO: 671427 - DNA, 75 bp, synthetic construct
  source 1..75: mol_type = other DNA
tgtcccgatgaacaggacacatggagtgaggcaggactaaacgccttggctgaatgggaaaaatcaggccatcaa

SEQ ID NO: 671428 - DNA, 75 bp, synthetic construct
  source 1..75: mol_type = other DNA
agtaaggcagaatatgccaaacacaaaggcgtaagccgccagacagtttacgactggatcgagaaaggcgaagtg

SEQ ID NO: 671429 - DNA, 75 bp, synthetic construct
  source 1..75: mol_type = other DNA
gtagcatcaatgctaagccatacagcggcgcagctgaggtcacagatggtgacgggctaagtgtacgcataactc

SEQ ID NO: 671430 - DNA, 75 bp, synthetic construct
  source 1..75: mol_type = other DNA
cggtaaaccccggataaaatgcggggactgtacgcatcgtcagttactccctgtatctgatcttgtcatctacca

SEQ ID NO: 671431 - DNA, 75 bp, synthetic construct
  source 1..75: mol_type = other DNA
aaagacactgtttctgaaatgtggcctgagagaacgctggaaatgacgtggggcgagttctggaaagctgtcagg

SEQ ID NO: 671432 - DNA, 75 bp, synthetic construct
  source 1..75: mol_type = other DNA
aactggtgattggtacgctgcgacgtgaggtctgttatgtggctgatgcttgtcctgacgagctggataactgga

SEQ ID NO: 671433 - DNA, 75 bp, synthetic construct
  source 1..75: mol_type = other DNA
aacagcgtattggacgttgtcaccgatacgggcaaaaatttgatgtggttgttattaacttcctcaatcagcgaa

SEQ ID NO: 671434 - DNA, 75 bp, synthetic construct
  source 1..75: mol_type = other DNA
gatggtctgatcctgctgcaaactgcaactgttggtgaaatcgatgctggcgtgctgaatgacaccgttggcgct

SEQ ID NO: 671435 - DNA, 75 bp, synthetic construct
  source 1..75: mol_type = other DNA
ataatgcgaatagcacccgtaaatactgggctgtaggtggtatttatcagacccttacaattgaattctatacag

SEQ ID NO: 671436 - DNA, 75 bp, synthetic construct
  source 1..75: mol_type = other DNA
caccggaactggtacataccctgtgggaagacttacgtaaaacgcttccagagatcggagcagttccggctattc

SEQ ID NO: 671437 - DNA, 75 bp, synthetic construct
  source 1..75: mol_type = other DNA
ccgtaaagcgctgtccgatagtgggctgctgaaagatatcagtgaaaaacgtctgaacgtaaaactttccacaac

SEQ ID NO: 671438 - DNA, 75 bp, synthetic construct
  source 1..75: mol_type = other DNA
gtgcggtatggggattcgcgaagataacacgctgataaccaaagacacctcacgttttgtcccacattacattgc

SEQ ID NO: 671439 - DNA, 75 bp, synthetic construct
  source 1..75: mol_type = other DNA
ttccgcaccggggaaatgtggtggacagattcattgaaggggcttacgaggtggtgggcgtgtttgaccggatag

SEQ ID NO: 671440 - DNA, 75 bp, synthetic construct
  source 1..75: mol_type = other DNA
cgtgggcgtaattggcgatcgcgccagcggcccgttctcggtctatatgccgtataaagattttgaccgcattca

SEQ ID NO: 671441 - DNA, 75 bp, synthetic construct
  source 1..75: mol_type = other DNA
aagtggacagcaaaatgatgcagtccatcaaggacatcacccaggtcatctatcaggttgctgtggcggccaacg

SEQ ID NO: 671442 - DNA, 75 bp, synthetic construct
  source 1..75: mol_type = other DNA
ggtgaccaggcgatgagcggtcaggcgaacacctcctctaccaccgggacttttacgcagcaaaaccgccagggc

SEQ ID NO: 671443 - DNA, 75 bp, synthetic construct
  source 1..75: mol_type = other DNA
ccgatttatcggggttttttgttatctgactacagaataactggctttaggccctttttttatgtcttgggggtg

SEQ ID NO: 671444 - DNA, 75 bp, synthetic construct
  source 1..75: mol_type = other DNA
ctgctggaacagggcgaccagattgtgatcccgaacaaaaccgacctgattcaggtgggtggcgaagtgatgatg

SEQ ID NO: 671445 - DNA, 75 bp, synthetic construct
  source 1..75: mol_type = other DNA
cgtaggcgtgattggcgatcgctccaacggcccgttctcggtctacatgccatataaagattttgaccgcattca

SEQ ID NO: 671446 - DNA, 75 bp, synthetic construct
  source 1..75: mol_type = other DNA
caaagaacgtactgcgaaaggccagccggtgctggtgggtactatctccatcgaaaaatcggagctggtgtcaaa

SEQ ID NO: 671447 - DNA, 75 bp, synthetic construct
  source 1..75: mol_type = other DNA
actgaaagggaaaaccgcagagtttcgtgcacgtctggaaaaaggcgaagtgctggaaaatctgatcccagaagc

SEQ ID NO: 671448 - DNA, 75 bp, synthetic construct
  source 1..75: mol_type = other DNA
gtggctaacgatcagcgtcgcgccatttactcccagcgtaacgaactgctggatgtcagcgatgtgagtgaaacc

SEQ ID NO: 671449 - DNA, 75 bp, synthetic construct
  source 1..75: mol_type = other DNA
cgcaacgctgcctgcttacctgaacgcattaaccggtaagggcgtacacgttgttaccgtcaacgactacctggc

SEQ ID NO: 671450 - DNA, 75 bp, synthetic construct
  source 1..75: mol_type = other DNA
ctatgctgttgatctgaaggctaggctacacagctaccttgaagatagacttgaccaagcattgcctagtatgag

SEQ ID NO: 671451 - DNA, 75 bp, synthetic construct
  source 1..75: mol_type = other DNA
gtacatcgcgtgaagcaatggcaaggctggataaaatggatctggaattgttagacgtaatgatggcctctggag

SEQ ID NO: 671452 - DNA, 75 bp, synthetic construct
  source 1..75: mol_type = other DNA
tttactcccagcgtaatgaactgctggatgtcagcgatgtgagcgataccatcaacagcattcgtgaagatgtgt

SEQ ID NO: 671453 - DNA, 75 bp, synthetic construct
  source 1..75: mol_type = other DNA
atgctaatcaaattattaactaaagttttcggtagtcgtaacgatcgcaccctgcgccggatgcgcaaagtggtc

SEQ ID NO: 671454 - DNA, 75 bp, synthetic construct
  source 1..75: mol_type = other DNA
gtccatcgaagtgtatcagcgtaaagaagaagtggttggtgctgagatgatgcgtcacttcgagaaaggcgtcat

SEQ ID NO: 671455 - DNA, 75 bp, synthetic construct
  source 1..75: mol_type = other DNA
cacaacgtcctgaacgccaaattccacgccaacgaagcggcgattgttgctcaggcaggttatccggctgcggtg

SEQ ID NO: 671456 - DNA, 75 bp, synthetic construct
  source 1..75: mol_type = other DNA
gagcgtaaagttggtcgtaacgacccctgtccgtgtggttcggggaaaaaatacaagcagtgccatggtcgcctg

SEQ ID NO: 671457 - DNA, 75 bp, synthetic construct
  source 1..75: mol_type = other DNA
cactacgtgagcgtattctggcgcaatccatcgaagtgtatcagcgtaaagaagaggtggttggtgctgagatga

SEQ ID NO: 671458 - DNA, 75 bp, synthetic construct
  source 1..75: mol_type = other DNA
aaaatctcgccaggtgaacctgaccgaacgtggtctggtgctgattgaagaactgctggtgaaagaaggcatcat

SEQ ID NO: 671459 - DNA, 75 bp, synthetic construct
  source 1..75: mol_type = other DNA
tggcgacagaagaactgaatgtgaccgggcaaaaggccacgggcgttaatattgctggcgatgataataccgtag

SEQ ID NO: 671460 - DNA, 75 bp, synthetic construct
  source 1..75: mol_type = other DNA
aacgcaggtacggtgacagggggagcgataaccgtcgccgactacggacacctgacaaacgaaaccacggggagc

SEQ ID NO: 671461 - DNA, 75 bp, synthetic construct
  source 1..75: mol_type = other DNA
ttttataacgatggcacaggaacaattgttaactatggtacaatctgcactttcggcgtgtgccaatcggggaat

SEQ ID NO: 671462 - DNA, 75 bp, synthetic construct
  source 1..75: mol_type = other DNA
cggcattatcaatatcaatgccgaaaacggccaggcattctataacgacggcacaggcatcatcataaactacgg

SEQ ID NO: 671463 - DNA, 75 bp, synthetic construct
  source 1..75: mol_type = other DNA
agcgtcggcgtgaagtacagcagcaaagaaagttcgctgaatctggatgcctaccactggaaagaggacgggatc

SEQ ID NO: 671464 - DNA, 75 bp, synthetic construct
  source 1..75: mol_type = other DNA
ttatcaggagcgcaatgcgggcgattttaacctcaacatgaacagcggtagcgaaacggcagtggacagcatcgt

SEQ ID NO: 671465 - DNA, 75 bp, synthetic construct
  source 1..75: mol_type = other DNA
aggcaagtcattctggacagcatatctaatcaataactatcttggagctggaccgcgatctaataacctcgttca

SEQ ID NO: 671466 - DNA, 75 bp, synthetic construct
  source 1..75: mol_type = other DNA
attgatgcactctcaccgcaaggtgaagtgtcaccacaagccaataacgatctgctttccgcaggcatggaactg

SEQ ID NO: 671467 - DNA, 75 bp, synthetic construct
  source 1..75: mol_type = other DNA
gaagtgtcaccacaagccaataacgatctgctttccgcaggcatggagttgctgaaagggaaactcttccgctaa

SEQ ID NO: 671468 - DNA, 75 bp, synthetic construct
  source 1..75: mol_type = other DNA
tggaaattggcagtggcgctacgctaacaatgcaggatattgacagttttgaacatcatgggacaagaaccccag

SEQ ID NO: 671469 - DNA, 75 bp, synthetic construct
  source 1..75: mol_type = other DNA
cgtggtatggactgccaaaggcagcaccgatgccagcggtaacgttgacgtcaccatgagcaaaaatgcctacac

SEQ ID NO: 671470 - DNA, 75 bp, synthetic construct
  source 1..75: mol_type = other DNA
aaggattccaccggtacggaaatcaacggtaataacggaaaagttattcaggacggcgatctggatgtcagcggc

SEQ ID NO: 671471 - DNA, 75 bp, synthetic construct
  source 1..75: mol_type = other DNA
cactgctggctgccgcgctcttctttgttggttgcgatcaaaaaccacaacccgccaaaacccacgctactgaag

SEQ ID NO: 671472 - DNA, 75 bp, synthetic construct
  source 1..75: mol_type = other DNA
cacgagaatggtgtgattaccgtctacaacgcgggtgcggggatggcggcgtatggtaataccaacacggtcatt

SEQ ID NO: 671473 - DNA, 75 bp, synthetic construct
  source 1..75: mol_type = other DNA
tatctggaatggggcgctacgtttgtggccgtcggcagcgatctcggcgtattccgttccgccacgcagaaactg

SEQ ID NO: 671474 - DNA, 75 bp, synthetic construct
  source 1..75: mol_type = other DNA
taggtcatctcggcaatgcgtcgcatccggatgtgcaaaaagcgattcaacatatttttaatcgcgccagagcca

SEQ ID NO: 671475 - DNA, 75 bp, synthetic construct
  source 1..75: mol_type = other DNA
aataccgcaggtggtatcacctggagttacgacgatgatggactcatccacatcactaaagaggccggcgtcgtt

SEQ ID NO: 671476 - DNA, 75 bp, synthetic construct
  source 1..75: mol_type = other DNA
cgagtatgacatgctggcactgcgtaaaaccgttgacctgagcgaaagccagagcatgagcctggaatacggtat

SEQ ID NO: 671477 - DNA, 75 bp, synthetic construct
  source 1..75: mol_type = other DNA
caccaataacgagctgtataccagcctgaacgtgggcaccactgctgaactgaatagcgccctgaagcaggtgag

SEQ ID NO: 671478 - DNA, 75 bp, synthetic construct
  source 1..75: mol_type = other DNA
ccgtggtatgaacggtgaaggccagccgtggcgggtagcgattcaaaaaccaaccgataaagaaaatgcggttca

SEQ ID NO: 671479 - DNA, 75 bp, synthetic construct
  source 1..75: mol_type = other DNA
gaagcgatggccgatatcgtcaccacctcgctgcgcattggcgcaaggaccgatggtgcgatggatataaccgtc

SEQ ID NO: 671480 - DNA, 75 bp, synthetic construct
  source 1..75: mol_type = other DNA
gggccgctggtgaatctgtggggctttggcccggaacaacagccggttcaaattccgagccaggaacagatcgat

SEQ ID NO: 671481 - DNA, 75 bp, synthetic construct
  source 1..75: mol_type = other DNA
atgaataacgatattttcccaaataagttcaaagccgcgttggcagcgaaacaggtacagattggctgctggtca

SEQ ID NO: 671482 - DNA, 75 bp, synthetic construct
  source 1..75: mol_type = other DNA
cccctctcatggtcactttgatgtggcggtatgcagtccgggggagctgaatcttcgctggatagtggtctttgt

SEQ ID NO: 671483 - DNA, 75 bp, synthetic construct
  source 1..75: mol_type = other DNA
ctgccagagctatatgtggatctttccaccgtgggagaaggctatgcggcggatcatctggcacgcttgatggag

SEQ ID NO: 671484 - DNA, 75 bp, synthetic construct
  source 1..75: mol_type = other DNA
caggagctgcaacagacagaaaagccagacattattatcgcggcgacacatatggggcattacgataacggcgat

SEQ ID NO: 671485 - DNA, 75 bp, synthetic construct
  source 1..75: mol_type = other DNA
gataacgccgaaattctgcgcggaacgctggcgctgtacgactggaccgaaagcgagatgaaccgccgtcgtctg

SEQ ID NO: 671486 - DNA, 75 bp, synthetic construct
  source 1..75: mol_type = other DNA
gttttgcctgcagtgaactggctgactggtctcaggtcgatttgcatcgtctgagcctgtatctggcagcagaag

SEQ ID NO: 671487 - DNA, 75 bp, synthetic construct
  source 1..75: mol_type = other DNA
cagcagatttacctgtgacagacgatgccctgtgtctgcattgtgtgccggtgattaacctttttacgcttgaag

SEQ ID NO: 671488 - DNA, 75 bp, synthetic construct
  source 1..75: mol_type = other DNA
taacttttcaatctattggtatttaatattatcaatacttttttttatattgggagggggggtgtcatatgttat

SEQ ID NO: 671489 - DNA, 75 bp, synthetic construct
  source 1..75: mol_type = other DNA
cgaaaccggagcatggaaagacgctgttgactggatactcaaagaggcctgcctggttgtaaacactggcatcaa

SEQ ID NO: 671490 - DNA, 75 bp, synthetic construct
  source 1..75: mol_type = other DNA
ttcaggcgttattcacggccccgccagccccggtgacatcagaaggactggttaaagctgtgcgcttttatgaac

SEQ ID NO: 671491 - DNA, 75 bp, synthetic construct
  source 1..75: mol_type = other DNA
gatttcataaataacactttaaaagacatcagagctaaagatagcactatagaatacatacaatccatatttaaa

SEQ ID NO: 671492 - DNA, 75 bp, synthetic construct
  source 1..75: mol_type = other DNA
gcgggcaaccacttccttcctgatatcgatcctgcagatctggcgtataaagcgctggcggtgaacttaagcgat

SEQ ID NO: 671493 - DNA, 75 bp, synthetic construct
  source 1..75: mol_type = other DNA
cctggctgacgctggcattaaccttaccggacgtcgacgaagcgtggcttgagtccttcagcgacagtttgtttg

SEQ ID NO: 671494 - DNA, 75 bp, synthetic construct
  source 1..75: mol_type = other DNA
atgtggctcactcaaaccctcatttacttcccgatttgcagcgcaagttgtggagcatggtgatcgcacagcact

SEQ ID NO: 671495 - DNA, 75 bp, synthetic construct
  source 1..75: mol_type = other DNA
gtgccgcgcaacgcgtggagagttactacagcggcgagcagtcctataagctacagattgttttgcaaactgtta

SEQ ID NO: 671496 - DNA, 75 bp, synthetic construct
  source 1..75: mol_type = other DNA
cgtgaaattcaggacgttgagaaaaagatccgtgacaaccagaagcgcgtcctgttgctggacaaccagaagcgc

SEQ ID NO: 671497 - DNA, 75 bp, synthetic construct
  source 1..75: mol_type = other DNA
ttttcgctgaaagcactactgggagtagcctgtattatgagcgggttgatgctgattttcctgcccacgacaaaa

SEQ ID NO: 671498 - DNA, 75 bp, synthetic construct
  source 1..75: mol_type = other DNA
ttggcagcatcaccggaaaagtgggctaagttcccgttgctttccgccaatatctaccagaaaagtaccggcgag

SEQ ID NO: 671499 - DNA, 75 bp, synthetic construct
  source 1..75: mol_type = other DNA
ctgtttaaaccgtgggcgctgtttaagcgtcaggatctgaaaattgccgttattgggctgacaaccgatgacaca

SEQ ID NO: 671500 - DNA, 75 bp, synthetic construct
  source 1..75: mol_type = other DNA
ctgaaagactatatccagaaaaactcgccgctggatgcgagcgcgtatgagccgaaaggtgaggtgagctggcag

SEQ ID NO: 671501 - DNA, 75 bp, synthetic construct
  source 1..75: mol_type = other DNA
cggtcgatccggcaaaaacttaccgtatggcgacattaaacttcaatgccaccggcggtgatggttatccgcgcc

SEQ ID NO: 671502 - DNA, 75 bp, synthetic construct
  source 1..75: mol_type = other DNA
agcccaaatggatcgcactggtgctgactttgcggtgatgagtggaggcggaattcgtgattctatcgaagcagg

SEQ ID NO: 671503 - DNA, 75 bp, synthetic construct
  source 1..75: mol_type = other DNA
tgccgacgaagccagactggtgattcaggaactgcaacagacagaaaagccagacattattatcgctgcgaccca

SEQ ID NO: 671504 - DNA, 75 bp, synthetic construct
  source 1..75: mol_type = other DNA
ggtacttcccggctgggaagggactttttcgctgaaagcactactgggagtagcctgtattatgagtgggttgat

SEQ ID NO: 671505 - DNA, 75 bp, synthetic construct
  source 1..75: mol_type = other DNA
catctgccgccgatgacgcacttatgggattttatcgcggcgctgttagcttttggcctggatgcccggatactg

SEQ ID NO: 671506 - DNA, 75 bp, synthetic construct
  source 1..75: mol_type = other DNA
atgggcctgatgtggggattattcagcgtcattatcgcctccgctgcgcaattaagcctgggttttgcggcgagt

SEQ ID NO: 671507 - DNA, 75 bp, synthetic construct
  source 1..75: mol_type = other DNA
gcgctgattggcactggcactttatttaatgacagttgcagcctgaacattagcggtagcgatgaagagcaggcg

SEQ ID NO: 671508 - DNA, 75 bp, synthetic construct
  source 1..75: mol_type = other DNA
taccagcaggtcctactggccgcgggcgacaagccgattatcttccgcacaatggacatcggcggcgataaaagc

SEQ ID NO: 671509 - DNA, 75 bp, synthetic construct
  source 1..75: mol_type = other DNA
tgtcagggtattcggcatattctgactccagtagcgtggatcatttgtaccgctctggctaccggtaccctaatt

SEQ ID NO: 671510 - DNA, 75 bp, synthetic construct
  source 1..75: mol_type = other DNA
agtagcggaccgtcttggtggaggggctaccgtcaatgcgcaaggtgtcgttactgccccgaattacagactgaa

SEQ ID NO: 671511 - DNA, 75 bp, synthetic construct
  source 1..75: mol_type = other DNA
tatgggttattccgccagaaagagacgagatcgagaacgttagattttctgaaagaggatctaaaatgcgcatac

SEQ ID NO: 671512 - DNA, 75 bp, synthetic construct
  source 1..75: mol_type = other DNA
gcgaggagattttacgtttgaagccgtagctcgtgattggcacaaaaaaatgtctgttagtgagcggtggatacc

SEQ ID NO: 671513 - DNA, 75 bp, synthetic construct
  source 1..75: mol_type = other DNA
taatacgccataatcccgcctatgatatggaaggtgctgttcagaaaccgcagactgaacaccgccccgcgctgg

SEQ ID NO: 671514 - DNA, 75 bp, synthetic construct
  source 1..75: mol_type = other DNA
cgccagcgggaagaagaaaaccctctcggatcaatggggattgcataaccagctggcagtgtttaacccggcacc

SEQ ID NO: 671515 - DNA, 75 bp, synthetic construct
  source 1..75: mol_type = other DNA
cgaacgtcttccagcccggtgccggggtggatatgtcgcagttggcgaccgtcgatatctcgaaatatcagagca

SEQ ID NO: 671516 - DNA, 75 bp, synthetic construct
  source 1..75: mol_type = other DNA
cgctacataagatgggctatgacaccacgcaggacatctgcggtcatggtttccgcacactggctgatcctaccc

SEQ ID NO: 671517 - DNA, 75 bp, synthetic construct
  source 1..75: mol_type = other DNA
tcttagagaactaaactctcttgttaattatatagatgataatcaagaaaaagcagaagaaatctatacaacctt

SEQ ID NO: 671518 - DNA, 75 bp, synthetic construct
  source 1..75: mol_type = other DNA
cagagcacaatatgaaatgaaaataatcgagcaagagttgactcatgaggttcgcgtaagaaccgttaggctgta

SEQ ID NO: 671519 - DNA, 75 bp, synthetic construct
  source 1..75: mol_type = other DNA
ccccagctactgaacaaaattgccgaatacaaaggccgcaggttaaccatactggcaatacagctcaatctgatg

SEQ ID NO: 671520 - DNA, 75 bp, synthetic construct
  source 1..75: mol_type = other DNA
tacccagccagattacgattaccaggatggcaaaagtattctgaaaggctaccgggcagtgagaacggtagaggt

SEQ ID NO: 671521 - DNA, 75 bp, synthetic construct
  source 1..75: mol_type = other DNA
taagcaagagttctggaatgaagtaagtggtggttgggatcgttttgctatacccaaaaaatctgcaataaaatt

SEQ ID NO: 671522 - DNA, 75 bp, synthetic construct
  source 1..75: mol_type = other DNA
cgaccggccgtggtacgccgtacggcctgatggaggtacccgttattaaaatggcgacccgcaccgggctggcga

SEQ ID NO: 671523 - DNA, 75 bp, synthetic construct
  source 1..75: mol_type = other DNA
cggggcgttcttctcctgtatcgggataaccttccttgcctatgcgggctttggcatgatggcgaacgcggcgga

SEQ ID NO: 671524 - DNA, 75 bp, synthetic construct
  source 1..75: mol_type = other DNA
agcacagtctgatttttgccagcgttatcggcattatcacgctgttgcaggcgtatgtgtttactgggatgttag

SEQ ID NO: 671525 - DNA, 75 bp, synthetic construct
  source 1..75: mol_type = other DNA
gaagaagaaaaccttctcggatcaatggggattgcgtaaccagctggcagtgtttaacccggcaccggtggtctg

SEQ ID NO: 671526 - DNA, 75 bp, synthetic construct
  source 1..75: mol_type = other DNA
taaatatgccccaatgctttacatcaatgatgagtttttaatttccgtccttgttactaaatgcatacatatgaa

SEQ ID NO: 671527 - DNA, 75 bp, synthetic construct
  source 1..75: mol_type = other DNA
atggaaaactatcaggctttatcattgattgtcaacgacggatgaaaagtgatccacttatatctccaccaacgg

SEQ ID NO: 671528 - DNA, 75 bp, synthetic construct
  source 1..75: mol_type = other DNA
agagattaaatgaacagagcatacctgcagaaaatggaacatcatggactcgtgcaaaaatacatcaaattttga

SEQ ID NO: 671529 - DNA, 75 bp, synthetic construct
  source 1..75: mol_type = other DNA
atgggcaaaaccgaccgcagcgccaacccttcgccgggcaacaaaaaaggcgggctcgcgaacgtggtaaagaaa

SEQ ID NO: 671530 - DNA, 75 bp, synthetic construct
  source 1..75: mol_type = other DNA
atgggcaaaaccgaccgcagcgccaacccttcgccgggcaacaaaaaaggcggcctcgccaacgtggtaaagaaa

SEQ ID NO: 671531 - DNA, 75 bp, synthetic construct
  source 1..75: mol_type = other DNA
atgggcaaaaccgaccgcagcgccaacccttcgccgggcaacaaaaaaggcggactcgcaaacgtggtaaagaaa

SEQ ID NO: 671532 - DNA, 75 bp, synthetic construct
  source 1..75: mol_type = other DNA
atgggcaaaaccgaccgcagcgccaacccttcgccgggcaacaaaaagggcgggctcgcaaacgtggtaaagaaa

SEQ ID NO: 671533 - DNA, 75 bp, synthetic construct
  source 1..75: mol_type = other DNA
atgggcaaaaccgaccgcagcgccaacccttcgccgggcaacaaaaacggcggcctcgcaaacgtggtaaagaaa

SEQ ID NO: 671534 - DNA, 75 bp, synthetic construct
  source 1..75: mol_type = other DNA
atgggcaaaaccgaccgcagcgccaacccttcgccgggcaacaaaaatggcgggctcgctaacgtggtaaagaaa

SEQ ID NO: 671535 - DNA, 75 bp, synthetic construct
  source 1..75: mol_type = other DNA
agtttactctggaagagcaacttatcattatcgtcgataaatatatctcaaaacgataccagccaggtgataaaa

SEQ ID NO: 671536 - DNA, 75 bp, synthetic construct
  source 1..75: mol_type = other DNA
ctgggagaacctgccgggccttggggggacaaacaacgagcctcctgtgatggaagaaatagtcgactactttaa

SEQ ID NO: 671537 - DNA, 75 bp, synthetic construct
  source 1..75: mol_type = other DNA
atgacaaactgaaaaatgaggcttatgcggtgctggaaaaattaaatatcacgcctactgaagcagtgcggctgc

SEQ ID NO: 671538 - DNA, 75 bp, synthetic construct
  source 1..75: mol_type = other DNA
atgacaactaacaaccacccggcgcacggtcctgtatcactcgatcgcctgcaccagataagcgaaatactcagc

SEQ ID NO: 671539 - DNA, 75 bp, synthetic construct
  source 1..75: mol_type = other DNA
gtgcgtaagggcaacccgaagaatatccacgactggaacgacctggtgcgctccgacgtgaagctgattttcccg

SEQ ID NO: 671540 - DNA, 75 bp, synthetic construct
  source 1..75: mol_type = other DNA
ctggtcgccgggctggaaaaaccgggcgaagggcaaatttttattgatggcgaagatgtcacgcatcgttccatt

SEQ ID NO: 671541 - DNA, 75 bp, synthetic construct
  source 1..75: mol_type = other DNA
cgcgataagatccgcgagctgcaaaagcagtttaatatcacgtcgctctacgtgactcacgatcaaagtgaagct

SEQ ID NO: 671542 - DNA, 75 bp, synthetic construct
  source 1..75: mol_type = other DNA
gggcgtgacggaattcagcggcacgctgtatgtccgcgatgtgtcctggcagtggcagccccgtgctgtgcggat

SEQ ID NO: 671543 - DNA, 75 bp, synthetic construct
  source 1..75: mol_type = other DNA
ggcctatgccggattaaccgcgcgtcctgatgcgtttgtttcaggggctgagtcgctgttgtcacaggaaaatgg

SEQ ID NO: 671544 - DNA, 75 bp, synthetic construct
  source 1..75: mol_type = other DNA
ggatttttatattcttggcggacataccacatcactgacaactgcccgtccggggctgcagccgtcagtgacatt

SEQ ID NO: 671545 - DNA, 75 bp, synthetic construct
  source 1..75: mol_type = other DNA
ggcggcagcaatgcaatttttgctgtggaacgtagggaacccatatttgtaactgaagacaattggtttggtcat

SEQ ID NO: 671546 - DNA, 75 bp, synthetic construct
  source 1..75: mol_type = other DNA
acatagttgccaggcttcaagatggcaggaaggttgtaggccaaatccctattgctgttgctgagaaacaaatga

SEQ ID NO: 671547 - DNA, 75 bp, synthetic construct
  source 1..75: mol_type = other DNA
ggggtcccgagcatgcagaccgcgcatatcaaattgctaatctctcaagtgacaaaagagagatagccctgccat

SEQ ID NO: 671548 - DNA, 75 bp, synthetic construct
  source 1..75: mol_type = other DNA
gttatacctatctggcggcatggggcgcagcggataaagctgacggtggcgataaagccaaaaccgaacagttta

SEQ ID NO: 671549 - DNA, 75 bp, synthetic construct
  source 1..75: mol_type = other DNA
attgcagcgccacgttcatcacttatgagtcggtacagcgatacattgtgaagccgggagaagtccacgccgtaa

SEQ ID NO: 671550 - DNA, 75 bp, synthetic construct
  source 1..75: mol_type = other DNA
ttcagtcatacgctctgttcccgcatatgtcgctgggtgaaaacgttggctacgggctgaagatgcttggcgtct

SEQ ID NO: 671551 - DNA, 75 bp, synthetic construct
  source 1..75: mol_type = other DNA
cgcccggaagccatcaccttaagcaatcacggcgaagagagtcagcgttgtgttattcgccatgtcgcctacatg

SEQ ID NO: 671552 - DNA, 75 bp, synthetic construct
  source 1..75: mol_type = other DNA
aaacgatatcagccacatgataaaagtttttctcaccagttgtatttgatatttgttgggtaccatttgaaatat

SEQ ID NO: 671553 - DNA, 75 bp, synthetic construct
  source 1..75: mol_type = other DNA
catgtggctggttggccggattgagacagacaacaacgatgcaacctttacggcccgttttgaagggcaaacggt

SEQ ID NO: 671554 - DNA, 75 bp, synthetic construct
  source 1..75: mol_type = other DNA
tgagtgatgtgttttattttatctgtttgttttataaggataaattaactaaaatggcaacatcaacaaaaccgg

SEQ ID NO: 671555 - DNA, 75 bp, synthetic construct
  source 1..75: mol_type = other DNA
tgacccagttcctgaaaaacgttgaagtcttcgataccggcggtcgtggcgcgaccacaacctttgccgagcgtg

SEQ ID NO: 671556 - DNA, 75 bp, synthetic construct
  source 1..75: mol_type = other DNA
acggaactgctgaacagttcttatgacgtctcccgcgagctctttgccgccctgaataccccgtttgagcagcag

SEQ ID NO: 671557 - DNA, 75 bp, synthetic construct
  source 1..75: mol_type = other DNA
gcaaccaccacttttgccgagcgtggcctgggcgatgtgctgattagctttgaatcggaagtgaacaacatccgt

SEQ ID NO: 671558 - DNA, 75 bp, synthetic construct
  source 1..75: mol_type = other DNA
atgaaaaatatcgttcctgattaccgtcttgatatggtgggtgaaccctgcccttatccggcagtcgcaaccctt

SEQ ID NO: 671559 - DNA, 75 bp, synthetic construct
  source 1..75: mol_type = other DNA
gccttgatatggtgggtgaaccctgcccttatccggcagtcgcaacccttgaggcgatgccgcaattaaaaaaag

SEQ ID NO: 671560 - DNA, 75 bp, synthetic construct
  source 1..75: mol_type = other DNA
atggccgttaacttactgaaaaagaactcactcgtgctggttgcttctctgctactggcgggccatgtacaggca

SEQ ID NO: 671561 - DNA, 75 bp, synthetic construct
  source 1..75: mol_type = other DNA
gattaacattatcaatcacggggaagacgttgcccaaatcgatgctttcgttgcaaaaaccaggctggatcgcgt

SEQ ID NO: 671562 - DNA, 75 bp, synthetic construct
  source 1..75: mol_type = other DNA
gttttcttttggtgaaggccagtttacttttaatggtgatgatagttcattgtctaacctggatattgaaggcaa

SEQ ID NO: 671563 - DNA, 75 bp, synthetic construct
  source 1..75: mol_type = other DNA
aatcgacttcaccatgagtgatatcgataagctttcccgcaaggttccacagctgtgtaaagttgcgccgagcac

SEQ ID NO: 671564 - DNA, 75 bp, synthetic construct
  source 1..75: mol_type = other DNA
gatcgcgttaaagacaaagattatatcaatgtcaatctgacctacgaacttgataagttaacaaaagggaatcag

SEQ ID NO: 671565 - DNA, 75 bp, synthetic construct
  source 1..75: mol_type = other DNA
ttgaaaaaggtttttttaattcccattttcagatgcaaattatatttgataacggtgcacccgatctcaatatca

SEQ ID NO: 671566 - DNA, 75 bp, synthetic construct
  source 1..75: mol_type = other DNA
cagtttacttttaatggtgatggtagttcattgtctaacctggatattgaaggcaaagtcgaagatattgttctg

SEQ ID NO: 671567 - DNA, 75 bp, synthetic construct
  source 1..75: mol_type = other DNA
tccgctcgctggagcacgcctacagcaaagacggcggcctggcggtgctttacggcaacttcgcggaaaacggct

SEQ ID NO: 671568 - DNA, 75 bp, synthetic construct
  source 1..75: mol_type = other DNA
gcaagattgccgttgggatacgctggacgacgatcgcgccaatggctgtatccgctcgctggaacacgcctacag

SEQ ID NO: 671569 - DNA, 75 bp, synthetic construct
  source 1..75: mol_type = other DNA
ggccacgtctcaccggaagcggcaagcggcggcagcattggcctgattgaagacggcgacctgatcgccatcgac

SEQ ID NO: 671570 - DNA, 75 bp, synthetic construct
  source 1..75: mol_type = other DNA
cggatcgtgttccgggatgttcaccgctaactcgatgaactgcctgaccgaagctctgggcctgtcgcagccggg

SEQ ID NO: 671571 - DNA, 75 bp, synthetic construct
  source 1..75: mol_type = other DNA
tgtttccggcggcccgatggaggctgggaaaaccaaactgtccgatcagatcattaagctcgatctggttgatgc

SEQ ID NO: 671572 - DNA, 75 bp, synthetic construct
  source 1..75: mol_type = other DNA
tggatcgtgctccgggatgttcaccgctaactcgatgaattgcctgaccgaagcgctgggtttgtcgcagccggg

SEQ ID NO: 671573 - DNA, 75 bp, synthetic construct
  source 1..75: mol_type = other DNA
acaaaaaagtgaaccggttattaaattaccgattagttggaaaagtacagtcggagaacttaacgctaatctgga

SEQ ID NO: 671574 - DNA, 75 bp, synthetic construct
  source 1..75: mol_type = other DNA
atattaacaaaggtcagttcagcagcatcaatttggtctccaatgatttcgaccattatgataaccgtcgcgata

SEQ ID NO: 671575 - DNA, 75 bp, synthetic construct
  source 1..75: mol_type = other DNA
gatagtagcggattacttgatacgttattagataaatttcagcaagtagccagcgcatggactttagtaattggt

SEQ ID NO: 671576 - DNA, 75 bp, synthetic construct
  source 1..75: mol_type = other DNA
atggtttggacatttggtatgttggcgatgcaaggggaaggtttaatcagtgcacttgcagaaatagttcgtttt

SEQ ID NO: 671577 - DNA, 75 bp, synthetic construct
  source 1..75: mol_type = other DNA
ctggccgatggcgagcctggagtcggactcgttaactttgcccgcaacgcttaaccccgggctggatttttccga

SEQ ID NO: 671578 - DNA, 75 bp, synthetic construct
  source 1..75: mol_type = other DNA
agcagttcagttagcgccagcggaggaagtcaggggtttgcttcattctcacgagctggccgcatggcaagccat

SEQ ID NO: 671579 - DNA, 75 bp, synthetic construct
  source 1..75: mol_type = other DNA
ttttaggtaccatacttttcttttctgtaaacgcctatgctggtcaattagatagtagtgggttacttgatactt

SEQ ID NO: 671580 - DNA, 75 bp, synthetic construct
  source 1..75: mol_type = other DNA
aaaaaccctggtgtagcgtaggaacagcagcggcggtgggtatttttatcggcgcgctgttaggtatacgaaaat

SEQ ID NO: 671581 - DNA, 75 bp, synthetic construct
  source 1..75: mol_type = other DNA
atgcgtgatgcttccgcatttgatttcgaagaaaatattcgtttaaccaaagaggctgttgatttcttccatccg

SEQ ID NO: 671582 - DNA, 75 bp, synthetic construct
  source 1..75: mol_type = other DNA
gttaccgcttaatgtcgtcacagaaaccgcaaaacagcttaatttatctgaaggaatggatgcggaaaaagcgca

SEQ ID NO: 671583 - DNA, 75 bp, synthetic construct
  source 1..75: mol_type = other DNA
tgccacagttactatcaggtatagtaggtggcgcatccttacaaggaatgggcgatttcggagctgggatgattg

SEQ ID NO: 671584 - DNA, 75 bp, synthetic construct
  source 1..75: mol_type = other DNA
atgggcggcggtggcgaagacactggcagcgtagacgctaccggcggtaatacgtcaggttctgacaacggttct

SEQ ID NO: 671585 - DNA, 75 bp, synthetic construct
  source 1..75: mol_type = other DNA
cctgcctgactctcttgttactttttttaagtacgcaagtgcaggccgcgccattagatagtgcagggctgcttg

SEQ ID NO: 671586 - DNA, 75 bp, synthetic construct
  source 1..75: mol_type = other DNA
atgcctaagtaccgttccgccacccccactcatggtcgtaatatggcgggtgctcgtgcgctgtggcgcgccacc

SEQ ID NO: 671587 - DNA, 75 bp, synthetic construct
  source 1..75: mol_type = other DNA
catattatattagcgcctgtttccgcaccctctcatattgttgaaagctcctcaacactctggaatgaagttgaa

SEQ ID NO: 671588 - DNA, 75 bp, synthetic construct
  source 1..75: mol_type = other DNA
gataccactgatgctgaccatgacaagcgtatcgcagagaactatatctatgatgaagtgctggatgtcaatgtt

SEQ ID NO: 671589 - DNA, 75 bp, synthetic construct
  source 1..75: mol_type = other DNA
cgctcttactctgtttaccagcttcctgaaccggaagagatcgttctccctgacttcccagctacaactaaacag

SEQ ID NO: 671590 - DNA, 75 bp, synthetic construct
  source 1..75: mol_type = other DNA
catgaagcacaaagtcctgtattggtagcgcctattcctcatactcatgtgcgtggagttaaatcttaccgcgat

SEQ ID NO: 671591 - DNA, 75 bp, synthetic construct
  source 1..75: mol_type = other DNA
attacctatttcagaaggatatatcaggcgcttcgtgggcaatcatctcaatatcctgccgctaaaattgcacaa

SEQ ID NO: 671592 - DNA, 75 bp, synthetic construct
  source 1..75: mol_type = other DNA
aaaaaagacagaagctggaatgataagaagataatgctccaatggcgtgagtcatgggccaccatgtcaaacagc

SEQ ID NO: 671593 - DNA, 75 bp, synthetic construct
  source 1..75: mol_type = other DNA
gggctgtcatcaaccctggcgctggcactggcgcacaccggccatgcattcaccttcttctcgccgttccttggc

SEQ ID NO: 671594 - DNA, 75 bp, synthetic construct
  source 1..75: mol_type = other DNA
tggctggataccgttcgccaacagcttagccagtatgagtctgatccagaggtcctcaacgcctcgctggatttt

SEQ ID NO: 671595 - DNA, 75 bp, synthetic construct
  source 1..75: mol_type = other DNA
aagtcatgatttcgactgaccacaaattgatgcgcattgatacgggtcaccaaacggtggaaatcacccttgatg

SEQ ID NO: 671596 - DNA, 75 bp, synthetic construct
  source 1..75: mol_type = other DNA
ccgcaaaacagcgcgcatctgctggtctggcatttacgcctgccgcgcacgctgctggcgatggtggtcggcgcg

SEQ ID NO: 671597 - DNA, 75 bp, synthetic construct
  source 1..75: mol_type = other DNA
tagaatgcttcttgcgcgcttcaaagaagaatataaaaaacaggtagatagcaatgctaatatatatgatacttt

SEQ ID NO: 671598 - DNA, 75 bp, synthetic construct
  source 1..75: mol_type = other DNA
tcgaaagggattgctggcgtgccgggcgtgtcgtttgtggtgctgctggcaacgctgggtagcgtaggtattccg

SEQ ID NO: 671599 - DNA, 75 bp, synthetic construct
  source 1..75: mol_type = other DNA
taccttgaagccgcaggcagtgaagaacgtatcgatcaccgttctctcaggacacaatgtgctgatgcccttgct

SEQ ID NO: 671600 - DNA, 75 bp, synthetic construct
  source 1..75: mol_type = other DNA
caggaaatgctctacccaaccagcttcctgaaatcaatgggtctcggtaaagcctgtgcgctgatcaccgacggt

SEQ ID NO: 671601 - DNA, 75 bp, synthetic construct
  source 1..75: mol_type = other DNA
aatgaagtttaaaaatcgcattgataatatatcatctgaagaaaccctctcggctaaagataatcacaaacccaa

SEQ ID NO: 671602 - DNA, 75 bp, synthetic construct
  source 1..75: mol_type = other DNA
tgcaggtatgtggttatggaatttacttctttctgccaacacaaatcgccaccttaatagggacaaaagttggtt

SEQ ID NO: 671603 - DNA, 75 bp, synthetic construct
  source 1..75: mol_type = other DNA
gggaaaaccaaactgtccgatcagatcattaagctcgatctggttgatgcgatgatccagggcgcagacccgaaa

SEQ ID NO: 671604 - DNA, 75 bp, synthetic construct
  source 1..75: mol_type = other DNA
aggtaagcgatgccgaactggcggcgcgtcgtgaagcgcaggaagctcgtggcgacaaagcctggacgccgaaaa

SEQ ID NO: 671605 - DNA, 75 bp, synthetic construct
  source 1..75: mol_type = other DNA
gcaggattgccgttgggattctctcgatgacgatcgcgcaaacggctgtatccgctcgctggaacacgcctacag

SEQ ID NO: 671606 - DNA, 75 bp, synthetic construct
  source 1..75: mol_type = other DNA
ctcgcactgaatatgagaaaaaagccaagtttaaccaagatgactataaaccaacaccggatgagatcaaccgtt

SEQ ID NO: 671607 - DNA, 75 bp, synthetic construct
  source 1..75: mol_type = other DNA
ttttgaatttcactatcagcaagccccacagcaattaggggtaatctatcaatattattttgaacaagcaggagt

SEQ ID NO: 671608 - DNA, 75 bp, synthetic construct
  source 1..75: mol_type = other DNA
tgaacgagttaagaggaaaacagccactccgcgtcaggataatgtttttaaacgcttcacggacctcatagttga

SEQ ID NO: 671609 - DNA, 75 bp, synthetic construct
  source 1..75: mol_type = other DNA
gtgtattacgtaccacgtatatcggaaaaactgcaggaacgtcgttacgttgcatcaatcacatttatgtccggt

SEQ ID NO: 671610 - DNA, 75 bp, synthetic construct
  source 1..75: mol_type = other DNA
tatcacttgcaattcaaaaatccatacgtcgcatcattccgatggtcatactaatgtttattctggcctatctgg

SEQ ID NO: 671611 - DNA, 75 bp, synthetic construct
  source 1..75: mol_type = other DNA
aagaaaaagcgctatggcttgctaaagccgctgaaacaaaccgtcctgcaatgaaacgtatccatagtgccaaat

SEQ ID NO: 671612 - DNA, 75 bp, synthetic construct
  source 1..75: mol_type = other DNA
aaaccatgcaaacagtattgcaatgggtaacggttctcagaccacccgtggtgcacagactggctacaccgccta

SEQ ID NO: 671613 - DNA, 75 bp, synthetic construct
  source 1..75: mol_type = other DNA
aaggcaaatacagcgctgctcatggtactagtagcccagccagcgtaatcaccgatgttgcggatggcacgattt

SEQ ID NO: 671614 - DNA, 75 bp, synthetic construct
  source 1..75: mol_type = other DNA
tacattccggaaccagagcgtgcaattgacaagccgttcctgctgccgatcgaagacgtattctccatctccggt

SEQ ID NO: 671615 - DNA, 75 bp, synthetic construct
  source 1..75: mol_type = other DNA
atgctaaatcagatcgcactgacggtcaggtcgcctatggtaagagcaaattcaatgcctccggcaaaaatgcgg

SEQ ID NO: 671616 - DNA, 75 bp, synthetic construct
  source 1..75: mol_type = other DNA
gatggtctgcgtttcgcaatccgtgaaggcggccgtaccgttggcgcgggcgttgttgctaaagttctgggctaa

SEQ ID NO: 671617 - DNA, 75 bp, synthetic construct
  source 1..75: mol_type = other DNA
aaaaagctcgtggtatcaccatcaacacttctcacgttgaatacgacaccccgacccgtcactacgcgcacgtag

SEQ ID NO: 671618 - DNA, 75 bp, synthetic construct
  source 1..75: mol_type = other DNA
cagcactgatgctgttaacggctctcagctgaaaaccaccaacgatgctgtggcgacgaataccaccaatatcgc

SEQ ID NO: 671619 - DNA, 75 bp, synthetic construct
  source 1..75: mol_type = other DNA
gccaccaacaccaccaatatcaccaacctgacgaattccgttggtgaccttaaggatgatgccctgctgtggaat

SEQ ID NO: 671620 - DNA, 75 bp, synthetic construct
  source 1..75: mol_type = other DNA
ggaatccggcgacgggcagttatagcgttgccagcgaaacagcaaagagccgtggtaagaaatctggtcgcagta

SEQ ID NO: 671621 - DNA, 75 bp, synthetic construct
  source 1..75: mol_type = other DNA
actacgctgaccgctgcaatcactaccgtactggctaaaacctacggcggtgctgctcgtgcattcgaccagatc

SEQ ID NO: 671622 - DNA, 75 bp, synthetic construct
  source 1..75: mol_type = other DNA
acaacgctgaccgctgcaatcacaaccgtactggctaaaacctacggcggtgctgctcgtgcattcgaccagatc

SEQ ID NO: 671623 - DNA, 75 bp, synthetic construct
  source 1..75: mol_type = other DNA
tatcggccacgttgaccaaggtaaaacgaccctgaccgctgcaatcacaaccgtactggctaaaacctacggcgg

SEQ ID NO: 671624 - DNA, 75 bp, synthetic construct
  source 1..75: mol_type = other DNA
acgaccctgaccgctgcaatcaccaccgtactggctaaaacctacggcggtgctgctcgtgcattcgaccagatc

SEQ ID NO: 671625 - DNA, 75 bp, synthetic construct
  source 1..75: mol_type = other DNA
acgacactgaccgctgcaatcacaaccgtactggctaaaacctacggcggtgctgctcgtgcattcgaccagatc

SEQ ID NO: 671626 - DNA, 75 bp, synthetic construct
  source 1..75: mol_type = other DNA
accacgctgaccgctgcaatcaccaccgtactggctaaaacctacggcggtgctgctcgtgcattcgaccagatc

SEQ ID NO: 671627 - DNA, 75 bp, synthetic construct
  source 1..75: mol_type = other DNA
caaaaccgcacgttaacgtcggtactatcggccacgttgaccaaggtaaaaccactctgaccgctgcaatcacta

SEQ ID NO: 671628 - DNA, 75 bp, synthetic construct
  source 1..75: mol_type = other DNA
tatcggccacgttgaccaaggtaaaaccacactgaccgctgcaatcaccaccgtactggctaaaacctacggcgg

SEQ ID NO: 671629 - DNA, 75 bp, synthetic construct
  source 1..75: mol_type = other DNA
tatcggccacgttgaccaaggtaaaacaaccctgaccgctgcaatcacgaccgtactggctaaaacctacggcgg

SEQ ID NO: 671630 - DNA, 75 bp, synthetic construct
  source 1..75: mol_type = other DNA
gggccgcaggtctgaaatatgacgctaacaacatttacctggccactacctattctgaaacccagaatatgactg

SEQ ID NO: 671631 - DNA, 75 bp, synthetic construct
  source 1..75: mol_type = other DNA
agctacaaacttttctcagtttgccgggaatataggcggaggtgcgggacacgcaattaactttcatgatggcat

SEQ ID NO: 671632 - DNA, 75 bp, synthetic construct
  source 1..75: mol_type = other DNA
gacagctggtccagtatggtgtttttgaagttcaacggggcgaaattttctgcctctgattaccctgtgctggca

SEQ ID NO: 671633 - DNA, 75 bp, synthetic construct
  source 1..75: mol_type = other DNA
aaccgcagggtattttcagtaaatcaccggcaacgccgctgcaggataaaacgaacacagtacacaacgagaagc

SEQ ID NO: 671634 - DNA, 75 bp, synthetic construct
  source 1..75: mol_type = other DNA
gacagctggtccggtatggtgtttttgaagttcaacggggcgaaattttctgcctctgattaccctgtgctggcg

SEQ ID NO: 671635 - DNA, 75 bp, synthetic construct
  source 1..75: mol_type = other DNA
gggagcattgaggcacacggccatgattacaatggggccatctatacttctagcggtccttcctgggctaatacg

SEQ ID NO: 671636 - DNA, 75 bp, synthetic construct
  source 1..75: mol_type = other DNA
cgaattattaagctggcaggcagctacaaacttttctcagtttgccgggaatataggcgaaggggcgggacacgc

SEQ ID NO: 671637 - DNA, 75 bp, synthetic construct
  source 1..75: mol_type = other DNA
ctctgtgcgccagatcgctcaatccagcgaaccacactttgtgatggaagactggcataactttggcgccgatta

SEQ ID NO: 671638 - DNA, 75 bp, synthetic construct
  source 1..75: mol_type = other DNA
gcacgccttttcaatctacaaagtaaaaaacgtgcctggatagttggcaaagagcattacgatctcggtaatgac

SEQ ID NO: 671639 - DNA, 75 bp, synthetic construct
  source 1..75: mol_type = other DNA
ataaagcccctgaaaacgggcataatacgtgatgtgcttgaggatgctaaatcacgggaattaccgattggtcat

SEQ ID NO: 671640 - DNA, 75 bp, synthetic construct
  source 1..75: mol_type = other DNA
ctgaatgcctgtgcaggtgctttccgcgcccgtgatattcagctctggcaggtggtgttctcacgcggtgttgaa

SEQ ID NO: 671641 - DNA, 75 bp, synthetic construct
  source 1..75: mol_type = other DNA
gcgaaagttatatggatggctggtgggaatgtgaccgactggatatgttttttagcaaggtcttacgcgcaggtc

SEQ ID NO: 671642 - DNA, 75 bp, synthetic construct
  source 1..75: mol_type = other DNA
acatggcgtctaattatgacgtaagcgtggtcggcgtcaccatttctgccgaacagcaaaaaatggctcaggaac

SEQ ID NO: 671643 - DNA, 75 bp, synthetic construct
  source 1..75: mol_type = other DNA
ataacgacttctttggtctggttgatggtctgaactttgctgctcagtaccaaggcaaaaacgatcgtagcgatt

SEQ ID NO: 671644 - DNA, 75 bp, synthetic construct
  source 1..75: mol_type = other DNA
tatcggccacgttgaccagggtaaaaccactctgaccgctgcaatcactaccgtactggctaaaacctacggcgg

SEQ ID NO: 671645 - DNA, 75 bp, synthetic construct
  source 1..75: mol_type = other DNA
tgtacattctgtccaaagatgaaggcggccgtcatactcctttcttcaaaggctaccgtccgcagttctacttcc

SEQ ID NO: 671646 - DNA, 75 bp, synthetic construct
  source 1..75: mol_type = other DNA
gcgtttgcagggcttcgctttggcgattatggttcgctcgactatggtcgcaactacggtgtagcgtatgatgtt

SEQ ID NO: 671647 - DNA, 75 bp, synthetic construct
  source 1..75: mol_type = other DNA
gggcgacaacatcaaaatggttgttaccctgatccacccgatcgcgatggacgacggtctgcgtttcgcaatccg

SEQ ID NO: 671648 - DNA, 75 bp, synthetic construct
  source 1..75: mol_type = other DNA
agagcattacttctcttcttcagctagtgatgacggggataaaacttatgctcgtatgggtttcaaaggtgaaac

SEQ ID NO: 671649 - DNA, 75 bp, synthetic construct
  source 1..75: mol_type = other DNA
aaggctggccggtttccttgtacgccggtactgcgaactctgttcagtccaccaccagcgagtttcgcagctccg

SEQ ID NO: 671650 - DNA, 75 bp, synthetic construct
  source 1..75: mol_type = other DNA
caaaaccgcacgttaacgtaggtactatcggccacgttgaccaaggtaaaacaaccctgaccgctgcaatcacga

SEQ ID NO: 671651 - DNA, 75 bp, synthetic construct
  source 1..75: mol_type = other DNA
gctactggcgtcgcgacctatcgtaacaatgatttcttcggcttggttgatggtctgaactttgctttgcagtat

SEQ ID NO: 671652 - DNA, 75 bp, synthetic construct
  source 1..75: mol_type = other DNA
gcatttgctggcctccgttttgctgattatggttcaatcgactatggtcgcaactatggtgtagcttatgatatt

SEQ ID NO: 671653 - DNA, 75 bp, synthetic construct
  source 1..75: mol_type = other DNA
aataccagtttgatttcggcctgcgtccgtccatcgcttacctacactctcgcggtgaaaatattggtgcgttcg

SEQ ID NO: 671654 - DNA, 75 bp, synthetic construct
  source 1..75: mol_type = other DNA
tatcggccacgttgaccatggtaaaaccacgctgaccgctgcaatcactaccgtactggctaaaacctacggcgg

SEQ ID NO: 671655 - DNA, 75 bp, synthetic construct
  source 1..75: mol_type = other DNA
caaaaccgcacgttaacgtgggtactatcggccacgttgaccaaggtaaaacaacgctgaccgctgcaatcacaa

SEQ ID NO: 671656 - DNA, 75 bp, synthetic construct
  source 1..75: mol_type = other DNA
gacggtctgcgtttcgcaatccgtgaaggtggccgtaccgttggcgcgggcgttgtagcaaaagttctgagctaa

SEQ ID NO: 671657 - DNA, 75 bp, synthetic construct
  source 1..75: mol_type = other DNA
cgtcaggcgctggacgcggcgggctttaccgacaccgccatcatgtcttactccaccaaatttgcctcctccttc

SEQ ID NO: 671658 - DNA, 75 bp, synthetic construct
  source 1..75: mol_type = other DNA
caaaaccgcacgttaacgtgggtactatcggccacgttgaccagggtaaaacgacactgaccgctgcaatcacga

SEQ ID NO: 671659 - DNA, 75 bp, synthetic construct
  source 1..75: mol_type = other DNA
ggtgtacctcgaaccgttaaaccgctatcaggatcacatgatcaacaccctcgccgatgctcgtcgttacatcgt

SEQ ID NO: 671660 - DNA, 75 bp, synthetic construct
  source 1..75: mol_type = other DNA
agtgggaagcgaaaatcctggaactggctggcttcctgggatttcctacatttccgggaaccagagcgtgcgatt

SEQ ID NO: 671661 - DNA, 75 bp, synthetic construct
  source 1..75: mol_type = other DNA
aatggcttaaagcagatcgaacgcattcttgaagcgctggccgaagtgggcggtaaaggtatcgtcgttcctgct

SEQ ID NO: 671662 - DNA, 75 bp, synthetic construct
  source 1..75: mol_type = other DNA
gaagcgcattaaaaggtgaccgcaaaagttatcagatgaacccaatgaaccgtcgtgaggcaattcgtgaatcac

SEQ ID NO: 671663 - DNA, 75 bp, synthetic construct
  source 1..75: mol_type = other DNA
ttgtgggtaaccgtctcatttaaacccgtctttcgccttcctttcctgtttccgatactaatgtccattttcaca

SEQ ID NO: 671664 - DNA, 75 bp, synthetic construct
  source 1..75: mol_type = other DNA
gtgaccgacaccaaagcctttaccgacgctattaaagcaggcgatatcgaaaaagcaaaagcactgtatgcgccg

SEQ ID NO: 671665 - DNA, 75 bp, synthetic construct
  source 1..75: mol_type = other DNA
aaaattgggtattttattagtacgaataagcactgtgtattcattccaacgagtgaatacacggagcaatgtcgc

SEQ ID NO: 671666 - DNA, 75 bp, synthetic construct
  source 1..75: mol_type = other DNA
gggggtaacggaattcagcggtacgctgtatgtccgcgatgtgtcctggcagtggcagccccgcgctgtgcggat

SEQ ID NO: 671667 - DNA, 75 bp, synthetic construct
  source 1..75: mol_type = other DNA
cggagaggtgactcctggggctgaacggcaggtgaaacaccagttatggcaggtgaacggctatgaatggacccc

SEQ ID NO: 671668 - DNA, 75 bp, synthetic construct
  source 1..75: mol_type = other DNA
cagaatatggcgaagaacgattttgttctgaactaataaaatatggtgcagggaatcttgaatggctattttctg

SEQ ID NO: 671669 - DNA, 75 bp, synthetic construct
  source 1..75: mol_type = other DNA
cggccacgttgaccacggtaaaactactctgaccgctgcaaccaccaccgtactggctaaaacctacggcggtgc

SEQ ID NO: 671670 - DNA, 75 bp, synthetic construct
  source 1..75: mol_type = other DNA
agtggtgctcgaaagcttaggttcgattaagcgcgcgggggcggatctgattttcagctactttgcgctggatct

SEQ ID NO: 671671 - DNA, 75 bp, synthetic construct
  source 1..75: mol_type = other DNA
tgaacagggggatggagtttatatttctggcatcttcagacagatataaaaaatatctcagtaagagagatgagg

SEQ ID NO: 671672 - DNA, 75 bp, synthetic construct
  source 1..75: mol_type = other DNA
gataacgcgccggaagaaaaagctcgtggtatcaccatcaatacttctcacgttgaatacgacaccccgacccgt

SEQ ID NO: 671673 - DNA, 75 bp, synthetic construct
  source 1..75: mol_type = other DNA
atgggagggaaaaagaaaatagaggatgtaggttctacttttttccatgcaatgattgtttatgtttttgtaact

SEQ ID NO: 671674 - DNA, 75 bp, synthetic construct
  source 1..75: mol_type = other DNA
ctggctaagccgggcaccatcaaagccgcacaccaagttcgaatctgaagtgtacattctgtccaaagatgaagg

SEQ ID NO: 671675 - DNA, 75 bp, synthetic construct
  source 1..75: mol_type = other DNA
tgggcaaaagataacggtggcgacaaactgacgattaaacaatctcatgccggatcatcaaaacaggcgctggca

SEQ ID NO: 671676 - DNA, 75 bp, synthetic construct
  source 1..75: mol_type = other DNA
acgtctcgcgcgagctgtttgccgccctgaacccgccgtttgaacagcaatgggccaaagataacggcggcgaca

SEQ ID NO: 671677 - DNA, 75 bp, synthetic construct
  source 1..75: mol_type = other DNA
ctgcgtggtatcaaacgtgaagaaatcgaacgtggtcaggtactggctaagccgggcaccatcaagccgcacacc

SEQ ID NO: 671678 - DNA, 75 bp, synthetic construct
  source 1..75: mol_type = other DNA
aaattacaacaaatttcactttatgagaactataatttgctaaatgctatgctggcatgtgcatggaacagcaat

SEQ ID NO: 671679 - DNA, 75 bp, synthetic construct
  source 1..75: mol_type = other DNA
gaaatggaagttcgtgaacttctgtctcagtacgacttcccgggcgacgacactccgatcgatcgaagacgtatt

SEQ ID NO: 671680 - DNA, 75 bp, synthetic construct
  source 1..75: mol_type = other DNA
aacactcaatattaaacgctacgatggtagttttattgaacacgatcaagggttactggttgatataaaaaattc

SEQ ID NO: 671681 - DNA, 75 bp, synthetic construct
  source 1..75: mol_type = other DNA
gaaggcgacgcagagtgggaagcgaaaatcctggaactggctggcttcctggattcttacattccggaaccagag

SEQ ID NO: 671682 - DNA, 75 bp, synthetic construct
  source 1..75: mol_type = other DNA
acgacgctgaccgctgcaatcacgaccgtactggctaaaacctacggcggtgctgctcgtgcattcgaccagatc

SEQ ID NO: 671683 - DNA, 75 bp, synthetic construct
  source 1..75: mol_type = other DNA
tcaatcaggacgatcgcggcgacaacatgatcgtgctgacgccgtccgatcatatgctggtgccggacttccctg

SEQ ID NO: 671684 - DNA, 75 bp, synthetic construct
  source 1..75: mol_type = other DNA
gggtgctgaaagtttccttggtcttttacaggagtttaatgtcagagtgacctcatacggcggacggacaaagga

SEQ ID NO: 671685 - DNA, 75 bp, synthetic construct
  source 1..75: mol_type = other DNA
tcgcagatgctggaaaataccgttgatttacgggtctcctggaaagatggttctgttcattttgatggtgtggca

SEQ ID NO: 671686 - DNA, 75 bp, synthetic construct
  source 1..75: mol_type = other DNA
cgaaggccgtgctggtgagaacgtaggtgttctgctgcgtggtattaaacgtgaagaaatcgaacgtggtcaggt

SEQ ID NO: 671687 - DNA, 75 bp, synthetic construct
  source 1..75: mol_type = other DNA
gatgaacaggaagataagccactgaaagtcgaagggattgatgtggtttctctgccgttctataaactgagcacc

SEQ ID NO: 671688 - DNA, 75 bp, synthetic construct
  source 1..75: mol_type = other DNA
tgattttagctcgattgatgtggaacgttacgtcggcggcggtttaaatcagcatattgaatccgcgcgcgtgaa

SEQ ID NO: 671689 - DNA, 75 bp, synthetic construct
  source 1..75: mol_type = other DNA
gtgggaagcgaaaatcctggaactggctggcttcctggattcctacattccggaaccagagcgtgcgattgacaa

SEQ ID NO: 671690 - DNA, 75 bp, synthetic construct
  source 1..75: mol_type = other DNA
cgtttcgcaatccgtgaaggcggccgtaccgttggcgcgggcgttgttgctaagttctgggctaattacacgttt

SEQ ID NO: 671691 - DNA, 75 bp, synthetic construct
  source 1..75: mol_type = other DNA
gtactactgacgtgactggtaccatcgaactgccggaaggcgtagagatggtaatgccgggcgacaatatcaaaa

SEQ ID NO: 671692 - DNA, 75 bp, synthetic construct
  source 1..75: mol_type = other DNA
acctggctgctgtggtgtgagcgcggggtgatgagccgcctgcaggcactctatctacgcgagcagggctttaaa

SEQ ID NO: 671693 - DNA, 75 bp, synthetic construct
  source 1..75: mol_type = other DNA
tatctgtggaaccgctttggcagctcccaccgcgtgcgttttgtcgctattaatttcgaaccggtcgtcggggaa

SEQ ID NO: 671694 - DNA, 75 bp, synthetic construct
  source 1..75: mol_type = other DNA
atttggcgatctcgaccagaacaaaacctggctgttgtggtgtgagcgcggggtgatgagccgcctgcaggcgct

SEQ ID NO: 671695 - DNA, 75 bp, synthetic construct
  source 1..75: mol_type = other DNA
tatttaacatctgttttatctgatatatgcgattcaaatgaaaaagattcgaatgaagcgatgttcaatcccttt

SEQ ID NO: 671696 - DNA, 75 bp, synthetic construct
  source 1..75: mol_type = other DNA
ataactggcagattgaaaatattgcccttgagcggaacagagaacgtcaggttcatgagcgtgaaaccaggcagc

SEQ ID NO: 671697 - DNA, 75 bp, synthetic construct
  source 1..75: mol_type = other DNA
tggctcctacgcttgtacgtagtccgatgtttaatgatgatggaactgttgcaggctacagggaaacgcatcgca

SEQ ID NO: 671698 - DNA, 75 bp, synthetic construct
  source 1..75: mol_type = other DNA
accgtattaaacgtgctaaaagtactgggcgtgatccgaaatcacctaagttgtcagggcggcatactcacgcca

SEQ ID NO: 671699 - DNA, 75 bp, synthetic construct
  source 1..75: mol_type = other DNA
tggcggagatgtcattgcgttgacactcgacggtattggtatggggagaacggcgctttgtggggggagagtgcc

SEQ ID NO: 671700 - DNA, 75 bp, synthetic construct
  source 1..75: mol_type = other DNA
gtggcggcgggactgggctgtgcgccagccacgttaagttatgaaggtgaagcggcttgtgctctggaggcgctc

SEQ ID NO: 671701 - DNA, 75 bp, synthetic construct
  source 1..75: mol_type = other DNA
caaattgttcccgatgccgccacttgccctgcttgccttgccgaaatgaataccccaggcgaacgacgctggcgt

SEQ ID NO: 671702 - DNA, 75 bp, synthetic construct
  source 1..75: mol_type = other DNA
cgactggtcggcaagtaataaccgtatttctgaagatattaattggtttcccgggattagcctggaacacgcatt

SEQ ID NO: 671703 - DNA, 75 bp, synthetic construct
  source 1..75: mol_type = other DNA
ttacgctgggcgtttttcgcccgacagccgtgtatggtcccggcgataaagagttaaaaccgctgtttgactgga

SEQ ID NO: 671704 - DNA, 75 bp, synthetic construct
  source 1..75: mol_type = other DNA
gggcgtttttcgcccaacggcagtctatggccccggcgataaagagttaaaaccactgtttgactggatgctgcg

SEQ ID NO: 671705 - DNA, 75 bp, synthetic construct
  source 1..75: mol_type = other DNA
gtgctaccgggtttattggtaaatatattatcgataacctgctcgttcgcggctttcatgttcgcgcgttgacgc

SEQ ID NO: 671706 - DNA, 75 bp, synthetic construct
  source 1..75: mol_type = other DNA
gagtcagtggttaagcgccgaaactgtaccaacgcaaacatatgaattatgcgatggcgtctccggaggatatga

SEQ ID NO: 671707 - DNA, 75 bp, synthetic construct
  source 1..75: mol_type = other DNA
acgttaccgatttcgcgcaagctgtgagtcagtggttaagcgccgaaactgtaccaacgcaaacatatgaattat

SEQ ID NO: 671708 - DNA, 75 bp, synthetic construct
  source 1..75: mol_type = other DNA
tgacagaaggcgtgttcagcatggacggcgatagtgcgccactggcggaaatccagcaggtaacgcaacagcaca

SEQ ID NO: 671709 - DNA, 75 bp, synthetic construct
  source 1..75: mol_type = other DNA
gcactgtctcggagctaaaccgtggcggtcaggtcttgatgcatttcatgcgaatgttgcatcagactttaatgc

SEQ ID NO: 671710 - DNA, 75 bp, synthetic construct
  source 1..75: mol_type = other DNA
ctatttttcagtacactgcaactcgtctggctgggtactaacttccaactgcctgatactcggtatcatttctca

SEQ ID NO: 671711 - DNA, 75 bp, synthetic construct
  source 1..75: mol_type = other DNA
atgcgagaaaggccttagagtcaagacatgagtggcttaatactacgcctgaatgggagtttaagcatttaaaaa

SEQ ID NO: 671712 - DNA, 75 bp, synthetic construct
  source 1..75: mol_type = other DNA
ttcagcgccggtattgattcgtggaaaacagatccggaattaaataatttgatttatatgtggaacatcctgatg

SEQ ID NO: 671713 - DNA, 75 bp, synthetic construct
  source 1..75: mol_type = other DNA
gcattcctttaattcgttatcaggagaactcaggcatcgctgtcattggttcccccggcacaggtaaatccacga

SEQ ID NO: 671714 - DNA, 75 bp, synthetic construct
  source 1..75: mol_type = other DNA
cccttcatgagatcccctcgctttgtgattatatttcaacgtgccgtaagtttggtggcttcccattcttggggt

SEQ ID NO: 671715 - DNA, 75 bp, synthetic construct
  source 1..75: mol_type = other DNA
cgggcactgctgtttatctctggttttgccgctaatcaggcagtcattgccgcgatgatggcgaaagaggaccgt

SEQ ID NO: 671716 - DNA, 75 bp, synthetic construct
  source 1..75: mol_type = other DNA
gtggcgcaaggggccggacgctggctggtggcggatgatcgccagtatctgaacttttcctgcaatgattacctc

SEQ ID NO: 671717 - DNA, 75 bp, synthetic construct
  source 1..75: mol_type = other DNA
gtctacgcttaacgctaaccgcagcgcatgaaacgcaggatattgaccgtttgctggaggtgctacatggcaacg

SEQ ID NO: 671718 - DNA, 75 bp, synthetic construct
  source 1..75: mol_type = other DNA
gaggctatttctatgatagtgctgtccatttgtatcaggcttcaaaaaaaatgaagacaggtggatattatgtga

SEQ ID NO: 671719 - DNA, 75 bp, synthetic construct
  source 1..75: mol_type = other DNA
gcgcgactggcagccggccctggaagcactggcgacgttcctgccagagcaggcgtggctgacgacaatgaactg

SEQ ID NO: 671720 - DNA, 75 bp, synthetic construct
  source 1..75: mol_type = other DNA
cctggcggcaacaacgtcgggcggcctttcttcgtttctggttgttggcgtttgtttctcctctactgctggcag

SEQ ID NO: 671721 - DNA, 75 bp, synthetic construct
  source 1..75: mol_type = other DNA
aaccgctgtttgactggatgctgcgcggacttctgccacgtactggcgcaccagatacgcagctctcttttctgc

SEQ ID NO: 671722 - DNA, 75 bp, synthetic construct
  source 1..75: mol_type = other DNA
tcctgtgtatggttcctgcataaaaatgaaaaaccagctacaggattactggtctaacgttatcagggatgacag

SEQ ID NO: 671723 - DNA, 75 bp, synthetic construct
  source 1..75: mol_type = other DNA
gacggatgaggtttttgccgccgcaaccgcaaaactggtacgcaataatcgccgctggagcgagaactggatgat

SEQ ID NO: 671724 - DNA, 75 bp, synthetic construct
  source 1..75: mol_type = other DNA
atgcagttgttcaataacttactggaaaacagcctgcgctacactgacagcggcggcagcctgaaaatctctgcc

SEQ ID NO: 671725 - DNA, 75 bp, synthetic construct
  source 1..75: mol_type = other DNA
actggcgcagcaggcgggcatcgatcagtcacatccggcgctgcagcgctggtatgcctcaatccatgaaacgca

SEQ ID NO: 671726 - DNA, 75 bp, synthetic construct
  source 1..75: mol_type = other DNA
gcaggacttctgacggcacgactggggattaaagctatggagctttgccgcccgctgccgtggattgacgatgac

SEQ ID NO: 671727 - DNA, 75 bp, synthetic construct
  source 1..75: mol_type = other DNA
ttgatttcgacggtccgctggatgtcgatcagaatcctaaattcagggcgcagcagacctttgacgaaaatcagg

SEQ ID NO: 671728 - DNA, 75 bp, synthetic construct
  source 1..75: mol_type = other DNA
cgtctccggcaaatgtgacggtttccatcctgtccactgaaggcgacggcacggcaacggaggcgttgcttaata

SEQ ID NO: 671729 - DNA, 75 bp, synthetic construct
  source 1..75: mol_type = other DNA
taccggaaccggccatcatcgcgcagccggattttgagtccatcctggcagacattaaaaccatgatggtgagct

SEQ ID NO: 671730 - DNA, 75 bp, synthetic construct
  source 1..75: mol_type = other DNA
tcggaacccctgaacgttatcgctcaaaccatgtcgtttcgtgaaatgctgttacgccagcgggttaacgagggc

SEQ ID NO: 671731 - DNA, 75 bp, synthetic construct
  source 1..75: mol_type = other DNA
ttgtggtgactgttacgaatgatgaaactgaaatatttatggagatggctattaataactttaaaaagcatcttc

SEQ ID NO: 671732 - DNA, 75 bp, synthetic construct
  source 1..75: mol_type = other DNA
ggccgaaaccttcggtgaagacgatttcgcttttgcccagcagcatttgcgtatgctttccggtttgtatggcgt

SEQ ID NO: 671733 - DNA, 75 bp, synthetic construct
  source 1..75: mol_type = other DNA
tttaaatcggtgaagccgaagaaattgaatgccgagattatcaagccggtgttcctcgatgagaagaacggcaaa

SEQ ID NO: 671734 - DNA, 75 bp, synthetic construct
  source 1..75: mol_type = other DNA
tgagaaaaacggcgatgcaaatcacctggagagggatgtatcagaggttactgaaggttgacccgctgaagtgca

SEQ ID NO: 671735 - DNA, 75 bp, synthetic construct
  source 1..75: mol_type = other DNA
tttaaaccgctgtacgccgccgggctgtgcctgattgttaacaccgcgccagtggcatttggcgcgatgggtatt

SEQ ID NO: 671736 - DNA, 75 bp, synthetic construct
  source 1..75: mol_type = other DNA
gttcgcctttatctctaactattccgggctgtcatcaacactggcgctggcactggcgcacaccggtcatgcttt

SEQ ID NO: 671737 - DNA, 75 bp, synthetic construct
  source 1..75: mol_type = other DNA
acgttggcagccggtgcgcgttttccgcttcggcgatctgggtgcatcgcaagttgatatgacgctggctcatac

SEQ ID NO: 671738 - DNA, 75 bp, synthetic construct
  source 1..75: mol_type = other DNA
ctggcggtagctttgctgttctataaaatgccggtcgccaacgcgctggcctccgtggtttatggcttcttctac

SEQ ID NO: 671739 - DNA, 75 bp, synthetic construct
  source 1..75: mol_type = other DNA
agcctgatcttcacctgtatagtgggcgtgatcaccacgcttcaggcttatgtcttaacgtggatgattccttaa

SEQ ID NO: 671740 - DNA, 75 bp, synthetic construct
  source 1..75: mol_type = other DNA
ggatcatggcgattatggacggctggcgcggtatcaaagagacgtggcctgcggtcgtggttgcgggcggctcgt

SEQ ID NO: 671741 - DNA, 75 bp, synthetic construct
  source 1..75: mol_type = other DNA
ggttcgggttcgccctataaaaatcgccatacccgtggattattttatgggcttagcgatacgttaaatattgac

SEQ ID NO: 671742 - DNA, 75 bp, synthetic construct
  source 1..75: mol_type = other DNA
gcttggcgatacgttaagtatcgacatgttaattgccagcgtctcactgggattaaccatggaatttgccaactg

SEQ ID NO: 671743 - DNA, 75 bp, synthetic construct
  source 1..75: mol_type = other DNA
gaagaatacctgttgatgagtggagatgagttcatggaaaggttctcctggcatgtagcagataaggggttccgt

SEQ ID NO: 671744 - DNA, 75 bp, synthetic construct
  source 1..75: mol_type = other DNA
ggatcatggcgattatggacggttggcgcggaatcaaagaaacgtggcctgcggtcgtggttgcaggtggttcgt

SEQ ID NO: 671745 - DNA, 75 bp, synthetic construct
  source 1..75: mol_type = other DNA
ccgcaatctatcgctatcgcctgtgcggcggtaggcctggtgggcaaagagtctgatttgttccgctttactgtc

SEQ ID NO: 671746 - DNA, 75 bp, synthetic construct
  source 1..75: mol_type = other DNA
ctgccttcaaaatgcgttggttactggagcattacccgctgcgtaatcgccgcggcctgcgctggctacatgccc

SEQ ID NO: 671747 - DNA, 75 bp, synthetic construct
  source 1..75: mol_type = other DNA
tcccgcagttgagccctactcaattgatgaaatgtttattgatttgcgggggataaatcattgcatctctccgga

SEQ ID NO: 671748 - DNA, 75 bp, synthetic construct
  source 1..75: mol_type = other DNA
ttcacaccatcgggtatagcgcagccgggattatttgatgaaatccagccccataaaaacagcgaaaagttaatg

SEQ ID NO: 671749 - DNA, 75 bp, synthetic construct
  source 1..75: mol_type = other DNA
aaagaaccctgttacagcaatgccgctgtggaaaagcttccattgcccacacaggacagccgggacattattgcc

SEQ ID NO: 671750 - DNA, 75 bp, synthetic construct
  source 1..75: mol_type = other DNA
gctattttcttggcgtgttaatgacggcaacttttggcaactatgcatatcttcgcgcagaaaaactcgggcaac

SEQ ID NO: 671751 - DNA, 75 bp, synthetic construct
  source 1..75: mol_type = other DNA
aaaggctcctggcctgtaccggagaagctgcgtctgataaaagccggaatgaataaggatcagatatatcagttg

SEQ ID NO: 671752 - DNA, 75 bp, synthetic construct
  source 1..75: mol_type = other DNA
gaaaattgtatgtcaggtatatcaagcgatactcctggtgagaacacagtaaaagaggattctgtctctcataaa

SEQ ID NO: 671753 - DNA, 75 bp, synthetic construct
  source 1..75: mol_type = other DNA
ctgctgtcactgcagccggtggaggtaatctggggtatgggccgcaggatctcaaagaagctgaacacaatggag

SEQ ID NO: 671754 - DNA, 75 bp, synthetic construct
  source 1..75: mol_type = other DNA
ctatcggtgtcggaatggggccaaccaaaacgctggcaaagtcagcacaatgggcttccaaagagtggccacagt

SEQ ID NO: 671755 - DNA, 75 bp, synthetic construct
  source 1..75: mol_type = other DNA
atgggggtacagtggtttcagctgaagtcggtgaaattttcggagccggtcattgccttctccagtaattacccg

SEQ ID NO: 671756 - DNA, 75 bp, synthetic construct
  source 1..75: mol_type = other DNA
ctgcccttttcgccactggattttcagttgcccggcgcacaactggttttctggcatccatccgcgcagggaggc

SEQ ID NO: 671757 - DNA, 75 bp, synthetic construct
  source 1..75: mol_type = other DNA
cggcaggtgacgacatttgtacggacatccccctttgcagtaaaagaaccctgttacagcaatgccgctgtggaa

SEQ ID NO: 671758 - DNA, 75 bp, synthetic construct
  source 1..75: mol_type = other DNA
aagtctggaaaaactctacgaccatcttaattacaccctgacggacgatcaggaactgatcaatatgtatcgtgc

SEQ ID NO: 671759 - DNA, 75 bp, synthetic construct
  source 1..75: mol_type = other DNA
atgaaaacctcaaagactgtggcaaaactattatttgttatcggggcgctggtttatctggttgggctatggatc

SEQ ID NO: 671760 - DNA, 75 bp, synthetic construct
  source 1..75: mol_type = other DNA
attgagcttctttcagccggtgaagattgttgaagttgtaaagagcccctggtgcagcccctttcttgaaggcac

SEQ ID NO: 671761 - DNA, 75 bp, synthetic construct
  source 1..75: mol_type = other DNA
gctgcaaaaatcacagttcgacatcggcaagagcaatactaaccagcctatgaccgcaacagaagccggattcta

SEQ ID NO: 671762 - DNA, 75 bp, synthetic construct
  source 1..75: mol_type = other DNA
actgaagtctctgcgccgcatcgaccgctccaatgtgcgcgaaaaaaccgtacgcgggcaatatactgcgggctt

SEQ ID NO: 671763 - DNA, 75 bp, synthetic construct
  source 1..75: mol_type = other DNA
ttcacctcagattcaatgccggacggcagttgtttttctgtattcataaactttttcctttaaaacaacttgtta

SEQ ID NO: 671764 - DNA, 75 bp, synthetic construct
  source 1..75: mol_type = other DNA
atgaaacggctcaaaggcgaggtatataataagttttttgatgagttgaaaacctctctggaagaggctgtcgag

SEQ ID NO: 671765 - DNA, 75 bp, synthetic construct
  source 1..75: mol_type = other DNA
taaacaaggtttgaaaaaacctgcacgggtggcccgccacgaaattgaggatgctaaggctgttgtagaccggaa

SEQ ID NO: 671766 - DNA, 75 bp, synthetic construct
  source 1..75: mol_type = other DNA
acaggacagccgggacattattgccgccgcatgcagagccttagtaaccggctcatttaaaccgtctggtctgtt

SEQ ID NO: 671767 - DNA, 75 bp, synthetic construct
  source 1..75: mol_type = other DNA
cctgcatatccctggaagaagcaccaccggcaaaacagcagattgtctgtagtcgcagttttggtgaacgaatca

SEQ ID NO: 671768 - DNA, 75 bp, synthetic construct
  source 1..75: mol_type = other DNA
tgggcaacaaagcaatggccacagttttccggtgtggtcgcgctggaggcagaaaaccgtaattggatcttgaag

SEQ ID NO: 671769 - DNA, 75 bp, synthetic construct
  source 1..75: mol_type = other DNA
acgtcgctggcgacctcgcaggaaatcaacgatcaggttggcgaatacttcgaggagtgccaggtttaccgtatc

SEQ ID NO: 671770 - DNA, 75 bp, synthetic construct
  source 1..75: mol_type = other DNA
ccaaataacatagaggcaaaagcccttggtatcagaatggggcagccctggtttcaggtcagacaaatgcgcctg

SEQ ID NO: 671771 - DNA, 75 bp, synthetic construct
  source 1..75: mol_type = other DNA
acacaggacagccgggacattattgccgccgcatgcagagccttaaaccatgtctggcgtgaagggtaccgctat

SEQ ID NO: 671772 - DNA, 75 bp, synthetic construct
  source 1..75: mol_type = other DNA
gttgcctacctgattgtcgctatactggtaatcatctcccagttgtttaaagcgaaaaaacgcgacctgtttggt

SEQ ID NO: 671773 - DNA, 75 bp, synthetic construct
  source 1..75: mol_type = other DNA
taaggatagtgccagtaatggaaatccgaatagtgaaacagataaaaaacctgttcacccttacagccgggaaaa

SEQ ID NO: 671774 - DNA, 75 bp, synthetic construct
  source 1..75: mol_type = other DNA
ccttatcccccaaagaactagagctccttgagctgtttaatgcactgccagaatcagaacaggatacccagctcg

SEQ ID NO: 671775 - DNA, 75 bp, synthetic construct
  source 1..75: mol_type = other DNA
gtgccaggtaaaattgccgttgaggtggcttatgcgctacctaagaagcagtacttgcagcgcgtgacgttgcag

SEQ ID NO: 671776 - DNA, 75 bp, synthetic construct
  source 1..75: mol_type = other DNA
gcgcgtaaatttgccaaccgtattcatggtcgtttcggtgttgaagtaaagctccatgacgagcgtcttagcact

SEQ ID NO: 671777 - DNA, 75 bp, synthetic construct
  source 1..75: mol_type = other DNA
gaacctcatcgagcgtttactgaaagagtggcagccggacgaaatcatcgtcggtttgccgctgaatatggacgg

SEQ ID NO: 671778 - DNA, 75 bp, synthetic construct
  source 1..75: mol_type = other DNA
gcgctcaacaaaggcaaagtcgactctgcctctgcggttattattctcgaaagctatttcgagcagggatattaa

SEQ ID NO: 671779 - DNA, 75 bp, synthetic construct
  source 1..75: mol_type = other DNA
gatttatatgtggaatatcctgatatatgtcattccgtatacgttatatgcgcttgcagccgggtttcttgttac

SEQ ID NO: 671780 - DNA, 75 bp, synthetic construct
  source 1..75: mol_type = other DNA
ccgtcggcaagccaggctttattcctggtgactggatcaaagaaggcgcaattgtgattgatgtcggcatcaacc

SEQ ID NO: 671781 - DNA, 75 bp, synthetic construct
  source 1..75: mol_type = other DNA
agcatggaactgttgctcgcaggttgcaccactaccgtgactcaccgcttcactaaaaatctgcgtcatcacgta

SEQ ID NO: 671782 - DNA, 75 bp, synthetic construct
  source 1..75: mol_type = other DNA
gagagcacaatgtgcttcgtcttaaacgctacaggtgagccgaagcaccctttgtatatgaaaaacgacagtgtt

SEQ ID NO: 671783 - DNA, 75 bp, synthetic construct
  source 1..75: mol_type = other DNA
ctaaaatttacacaccacttaccctaaagctttatgactggtgggttttgggtgtatcaaatcggcttgcatggg

SEQ ID NO: 671784 - DNA, 75 bp, synthetic construct
  source 1..75: mol_type = other DNA
cgtaaacgccttatccgacctacggttctacccctgcgtaggcctgataagacgcaccagcgtcgcatcaggcaa

SEQ ID NO: 671785 - DNA, 75 bp, synthetic construct
  source 1..75: mol_type = other DNA
tcggtttgccgctgaatatggacggcaccgaacagccgttaaccgccagagcgcgtaaatttgccaaccgtattc

SEQ ID NO: 671786 - DNA, 75 bp, synthetic construct
  source 1..75: mol_type = other DNA
agacggcggaattctctgagcagatcatcgtgttctcaagcaattacgagctgtacgcgtccatgtctaacaggg

SEQ ID NO: 671787 - DNA, 75 bp, synthetic construct
  source 1..75: mol_type = other DNA
gaaaagctgcgtaaagagcaccagtattgccggcatatttccgttttcatcaaaacgtctccgttcgccgttaaa

SEQ ID NO: 671788 - DNA, 75 bp, synthetic construct
  source 1..75: mol_type = other DNA
acgaaaggtacccggaaaaaatatatgcattttcaagtaactatgaactttacgcctcgatgtcagcgcgcgtga

SEQ ID NO: 671789 - DNA, 75 bp, synthetic construct
  source 1..75: mol_type = other DNA
agccggtcctttggggagcgtatcacgacctatgaagctatgcggcaggcagtctgtcagtacgctgagcgtgca

SEQ ID NO: 671790 - DNA, 75 bp, synthetic construct
  source 1..75: mol_type = other DNA
agacggcacaattcccggagccggtcatcaccttctcgagcaattacgagctctatgcgtctatgtcgaacagag

SEQ ID NO: 671791 - DNA, 75 bp, synthetic construct
  source 1..75: mol_type = other DNA
tccgccgaaacagcagatagtctgcagccggagctttggtgaacgtgtcacaacttatgatgctatgcggcaggc

SEQ ID NO: 671792 - DNA, 75 bp, synthetic construct
  source 1..75: mol_type = other DNA
tccgctgcgttatgtagcgatggttatctggttgtatagtgcgttccgcggtgtgcagttaacttacgagcacac

SEQ ID NO: 671793 - DNA, 75 bp, synthetic construct
  source 1..75: mol_type = other DNA
gcgcgtaaattcgccaaccgtattcatggtcgtttcggtgttgaagtaaagctccatgacgagcgtcttagcacc

SEQ ID NO: 671794 - DNA, 75 bp, synthetic construct
  source 1..75: mol_type = other DNA
tcggtttgccgctgaatatggacggtaccgagcaaccgttgactgcccgggcgcgtaaattcgccaatcgtattc

SEQ ID NO: 671795 - DNA, 75 bp, synthetic construct
  source 1..75: mol_type = other DNA
atgtccacgacctggtttgtaggagccgactggctcgccgaacatattgatgacccggaaattcagattattgat

SEQ ID NO: 671796 - DNA, 75 bp, synthetic construct
  source 1..75: mol_type = other DNA
cgcggcgtcagctacgacaaaccaattatcgtcagctgcggctctggtgtaacggcagccgtggttttgttagca

SEQ ID NO: 671797 - DNA, 75 bp, synthetic construct
  source 1..75: mol_type = other DNA
gcgaaggcgaactaaaaacgaccgatgaactggatgcgatattttttggtcgcggcgtcagctacgacaaaccaa

SEQ ID NO: 671798 - DNA, 75 bp, synthetic construct
  source 1..75: mol_type = other DNA
ccttcgataattggttctgacaaatacaggctgttactggaaaatattgtcatcaatggtctgttgaatattgcc

SEQ ID NO: 671799 - DNA, 75 bp, synthetic construct
  source 1..75: mol_type = other DNA
tcgataaatctttcgaccaagcaagaagctatgataaaagctatggcaacaaggttgaaatcccatgaagacatc

SEQ ID NO: 671800 - DNA, 75 bp, synthetic construct
  source 1..75: mol_type = other DNA
actatgtttccgatccagttccagcggttgacggtggggatgggaaggcctcgataaatctttcgaccaagcaag

SEQ ID NO: 671801 - DNA, 75 bp, synthetic construct
  source 1..75: mol_type = other DNA
gaagttatgagtaccattgcggctatcaatggtctttatgtggggcagtcatcatataatacgttggataattct

SEQ ID NO: 671802 - DNA, 75 bp, synthetic construct
  source 1..75: mol_type = other DNA
ggcgaattataaaggtagcaccggagagattaacaatccatttggaggaaaattacatgtggctcaaaatacaga

SEQ ID NO: 671803 - DNA, 75 bp, synthetic construct
  source 1..75: mol_type = other DNA
cttactaccggtgcaacgggcgtcgactggttaactctggctgacgaaaaagttacttttgctcagtttatggag

SEQ ID NO: 671804 - DNA, 75 bp, synthetic construct
  source 1..75: mol_type = other DNA
ggctaacgttgaaggctcgcagaaaattgtcgatctgctgcgtccacaactgcaaaaagccaacccggaactgct

SEQ ID NO: 671805 - DNA, 75 bp, synthetic construct
  source 1..75: mol_type = other DNA
agtacgctgaccagctttataccgatgtggtcgatttgcaaaaacgcatcagtgaactggctttcccaccttcaa

SEQ ID NO: 671806 - DNA, 75 bp, synthetic construct
  source 1..75: mol_type = other DNA
gatttaagtcctgagcaattattgaagctgaatgtattcttgacctatcagaatgaattaaacccttacagtgag

SEQ ID NO: 671807 - DNA, 75 bp, synthetic construct
  source 1..75: mol_type = other DNA
atgaacaattacccaatgcaagttatggttgaccaagaaactatgaattggcttaatgacctgaacaggtcggga

SEQ ID NO: 671808 - DNA, 75 bp, synthetic construct
  source 1..75: mol_type = other DNA
aatgccgaaggaaaaccgctattgctggaaattaacatgcggccttcaggaggtatcggttatacgcggcacagt

SEQ ID NO: 671809 - DNA, 75 bp, synthetic construct
  source 1..75: mol_type = other DNA
tactattacaaacccctttggcggagaaatgagagttacggccggaaaagaaaaaactaacaggtacgcaattac

SEQ ID NO: 671810 - DNA, 75 bp, synthetic construct
  source 1..75: mol_type = other DNA
gctgtggatgctggcgatcgggatgcagcaatgcgtctttacggccagttgtcagagggtaatccgctgaggctg

SEQ ID NO: 671811 - DNA, 75 bp, synthetic construct
  source 1..75: mol_type = other DNA
gtacagacgcaaacctatgaattatgcgatggcgtcgccggcggctatgactggcaacgcgtaagacagcttgcc

SEQ ID NO: 671812 - DNA, 75 bp, synthetic construct
  source 1..75: mol_type = other DNA
gtacagacgcaaacctatgaattatgcgatggcgtcgccggcggctatgactggcaacgcgtacagcaacttgcc

SEQ ID NO: 671813 - DNA, 75 bp, synthetic construct
  source 1..75: mol_type = other DNA
atgttattcaataaccaagactggaaactgtcagtcaccgacatcaatctttacgagaatactgtaagtctcgac

SEQ ID NO: 671814 - DNA, 75 bp, synthetic construct
  source 1..75: mol_type = other DNA
atgttattcaacaacaacgactggaaactatcagtcaccgacatcaatctctacgagaatactgtgagtctggac

SEQ ID NO: 671815 - DNA, 75 bp, synthetic construct
  source 1..75: mol_type = other DNA
tagcggcggacgcgatcaagaatggcggtaatgcacaggctgcggtggatgaatattatgctgcgactggttcac

SEQ ID NO: 671816 - DNA, 75 bp, synthetic construct
  source 1..75: mol_type = other DNA
acgcactggcgatcattgcgctgatgacactatttaactccttaagcaatcatgcggtagggcggctggaagtga

SEQ ID NO: 671817 - DNA, 75 bp, synthetic construct
  source 1..75: mol_type = other DNA
acgcgttggggatcattgcggtgatgacgcttttcaactccttaagcaaccatgcggtagggcggctggaagtga

SEQ ID NO: 671818 - DNA, 75 bp, synthetic construct
  source 1..75: mol_type = other DNA
gaataaatccctgtggcggcagagtacctggggcaacatcatcgtcgtggtgttgattatgctgatgacggcggc

SEQ ID NO: 671819 - DNA, 75 bp, synthetic construct
  source 1..75: mol_type = other DNA
gacgcacggtaggctggcgatgcatcaacgattgttctttgattacgcgcttggagtcggcgttatcacaagtca

SEQ ID NO: 671820 - DNA, 75 bp, synthetic construct
  source 1..75: mol_type = other DNA
gttcaaagtggatcaggaggtcagaaaactggtggaggctggccgtaaatttatcatggagccggtgccgcgtga

SEQ ID NO: 671821 - DNA, 75 bp, synthetic construct
  source 1..75: mol_type = other DNA
gatgtatcggcattagagttagaaaaatatgccgataccgccgtagcgcaggccgcatctccgctcctcgggcat

SEQ ID NO: 671822 - DNA, 75 bp, synthetic construct
  source 1..75: mol_type = other DNA
tcaagacggagaacaagttaatttgaccgacttccagggagagcgtgttctggtttatttctacccgaaagccat

SEQ ID NO: 671823 - DNA, 75 bp, synthetic construct
  source 1..75: mol_type = other DNA
ctaagatagctaatgtaattaaatttcctgtcatcgatacagcattaaacttatggtctcttggtgaatctattc

SEQ ID NO: 671824 - DNA, 75 bp, synthetic construct
  source 1..75: mol_type = other DNA
atggctattgtcggtattattcaatatatgaaaattacggggtatggtggctatgtatcagcgatagaccatgcg

SEQ ID NO: 671825 - DNA, 75 bp, synthetic construct
  source 1..75: mol_type = other DNA
tgtatgatttagataataataaaaatataaatgttaatattgatacttcagatttaaatataacgctcagacaag

SEQ ID NO: 671826 - DNA, 75 bp, synthetic construct
  source 1..75: mol_type = other DNA
gtcctcgcgcgttgccgcctggcgtctggggccgagtggtttgagtaccgaagatagccgacgcatctctttcca

SEQ ID NO: 671827 - DNA, 75 bp, synthetic construct
  source 1..75: mol_type = other DNA
gtccattgttgctgatcgaagatccagaaacccgtttacaccccattatgctttcagttgcctggcatctgttga

SEQ ID NO: 671828 - DNA, 75 bp, synthetic construct
  source 1..75: mol_type = other DNA
gctatctggatatcatcaaccggatgattgaccgacctggagggcgctcgtatcgggttattttgctcggcctgt

SEQ ID NO: 671829 - DNA, 75 bp, synthetic construct
  source 1..75: mol_type = other DNA
taattacggcaatgatgctcttaaggaatatgttcaatctatttacatgaatgttcatcctataaaagatgctga

SEQ ID NO: 671830 - DNA, 75 bp, synthetic construct
  source 1..75: mol_type = other DNA
tgcacttggtgataaccgtgaccggtttaacagcgctgaagaaattcaaaactacgcaggtatagcaccggtgac

SEQ ID NO: 671831 - DNA, 75 bp, synthetic construct
  source 1..75: mol_type = other DNA
gaatgaagcgatgttcaatccctttcatcctctttatcgagatcatcatcctattgatagtagagaatggagtgg

SEQ ID NO: 671832 - DNA, 75 bp, synthetic construct
  source 1..75: mol_type = other DNA
aaatataatacgttacaagagaaccttgatttaatcagctcattatatcaacaagatatatctgacaatgcacat

SEQ ID NO: 671833 - DNA, 75 bp, synthetic construct
  source 1..75: mol_type = other DNA
atataataggcgctcctggagcaaaaaacatactatcatttagtcaattatcaaaaaattttgatgtttttgtca

SEQ ID NO: 671834 - DNA, 75 bp, synthetic construct
  source 1..75: mol_type = other DNA
caagagaaccttgatttaatcagctcattatatcaacaagatatatctgacaatgcacatctttcagaaagtgat

SEQ ID NO: 671835 - DNA, 75 bp, synthetic construct
  source 1..75: mol_type = other DNA
gatctctaccattttgatcgcaatgatttctggtttccaccgggcgacatcaatggtcgggaacatcatttacat

SEQ ID NO: 671836 - DNA, 75 bp, synthetic construct
  source 1..75: mol_type = other DNA
ctcattgtgaatgagtatcgggagcagggcgacggcaccatcgatttccctgatgatgtcagccgtgcacgccag

SEQ ID NO: 671837 - DNA, 75 bp, synthetic construct
  source 1..75: mol_type = other DNA
gtcgttgatgctggaacaaaacaacgtcctgattggggagaacgcgtggggtaaatccagcttgctggatgcctt

SEQ ID NO: 671838 - DNA, 75 bp, synthetic construct
  source 1..75: mol_type = other DNA
atcttcccgtgtcgccgcctggcgactggggccaagtgggttgagtaccgaagatagccggcgtatctcgtttca

SEQ ID NO: 671839 - DNA, 75 bp, synthetic construct
  source 1..75: mol_type = other DNA
atatcgtccgctggaagcctgttggacgccgtgcactgatggttatcatcgtattttttatcgtctggaagggga

SEQ ID NO: 671840 - DNA, 75 bp, synthetic construct
  source 1..75: mol_type = other DNA
atagatgtttccaaccgcgttaatgcaccggatgacatcattataaacccatactcacaggagagcagaacctaa

SEQ ID NO: 671841 - DNA, 75 bp, synthetic construct
  source 1..75: mol_type = other DNA
gaaaaaacagttatacgtgaaaggctatcctcgctaagggaaaattacgatatggaaaaagccatttacatttac

SEQ ID NO: 671842 - DNA, 75 bp, synthetic construct
  source 1..75: mol_type = other DNA
cagtccgtggtgctcagtgagctgtccgggctgcagagaattgaatatctggcgtttgttcagcagcgaacggca

SEQ ID NO: 671843 - DNA, 75 bp, synthetic construct
  source 1..75: mol_type = other DNA
catccgttattacaacatggtcgtatgatgccctgggtgcgggggcggagatggttctgtcgctgagcggtatgg

SEQ ID NO: 671844 - DNA, 75 bp, synthetic construct
  source 1..75: mol_type = other DNA
tgggtgcgccgctaaactccgttaccgcattgcactacgccgaggcggttgccgatatccccaacaaacggtggg

SEQ ID NO: 671845 - DNA, 75 bp, synthetic construct
  source 1..75: mol_type = other DNA
tatgtctcactttatatctaatcatgaaattgattgggtcttggatgatgcttatcgtgatgaagaaaagttaac

SEQ ID NO: 671846 - DNA, 75 bp, synthetic construct
  source 1..75: mol_type = other DNA
tctgttcgtcatgtagaggccttcatatccattcaacaatacttgactcatggtgactgtataacaggatttcat

SEQ ID NO: 671847 - DNA, 75 bp, synthetic construct
  source 1..75: mol_type = other DNA
gtcattttggttgaagggaatcagaagcagtttcagttgttaaaacataatattcctttaaataaagaatgggtt

SEQ ID NO: 671848 - DNA, 75 bp, synthetic construct
  source 1..75: mol_type = other DNA
tggcaatggatgttcgccatgtgttgtatggcccgtcactgcgtagccgtattattcagcgtctgcaaaaatcga

SEQ ID NO: 671849 - DNA, 75 bp, synthetic construct
  source 1..75: mol_type = other DNA
ctgactgcgaatctggcgaacgtcgatacgccaaatttcaaggctaaagatattgattttgccagggagatgcaa

SEQ ID NO: 671850 - DNA, 75 bp, synthetic construct
  source 1..75: mol_type = other DNA
atttaaaaatataataaaaatagaaagtcaactaaggagtctaaaatttatgctgcttgtgggctatattattta

SEQ ID NO: 671851 - DNA, 75 bp, synthetic construct
  source 1..75: mol_type = other DNA
tcccgtcgccattctggcaggcattgtctttggctgcctcactgcgttaatccaggcattctggcaaggagccgc

SEQ ID NO: 671852 - DNA, 75 bp, synthetic construct
  source 1..75: mol_type = other DNA
tcccgtcgccattctggcaggtattgtctgtggttgcctcaccgcgctcatccagtcgttctggcaaggagcacc

SEQ ID NO: 671853 - DNA, 75 bp, synthetic construct
  source 1..75: mol_type = other DNA
atagcccggcatctgcaaaaatcgaaaactgcgctgtgggcgtttggcctgacagacgaagtttttgcagcggca

SEQ ID NO: 671854 - DNA, 75 bp, synthetic construct
  source 1..75: mol_type = other DNA
ctgcactaccatagcgacagccgcgactggctggtcgtcaatttgctctctccggcgggtgatatcttcatccat

SEQ ID NO: 671855 - DNA, 75 bp, synthetic construct
  source 1..75: mol_type = other DNA
tttctggaggctctgaaagccagcggtaagcagcgaattttgctcaccaacgctcacccgcataacctggccgta

SEQ ID NO: 671856 - DNA, 75 bp, synthetic construct
  source 1..75: mol_type = other DNA
caactgggtctggatatctgtgcgatgaccaccgagatgggaccgcgtgccgtactgcgtgaagataccattccg

SEQ ID NO: 671857 - DNA, 75 bp, synthetic construct
  source 1..75: mol_type = other DNA
atgcctgctgttgacctttcccagttaccggaacccgccatcatcgcggagcctgactttgaagcaattctggct

SEQ ID NO: 671858 - DNA, 75 bp, synthetic construct
  source 1..75: mol_type = other DNA
cgtttccgccgcgctggagctggaatcggaacccctgaacgttatcgctcaaaccatgtcttttcgtgaaatgct

SEQ ID NO: 671859 - DNA, 75 bp, synthetic construct
  source 1..75: mol_type = other DNA
gacgggcgtgtcgcggatatttctgtaaccagtccgtctccggcctgcgtcaccatctctgtgctgtcacgtgaa

SEQ ID NO: 671860 - DNA, 75 bp, synthetic construct
  source 1..75: mol_type = other DNA
cgtcactaaccccgactccgggattgccgaaaaacagtatcttcgccatccgtcactgaatgactaccgacgtct

SEQ ID NO: 671861 - DNA, 75 bp, synthetic construct
  source 1..75: mol_type = other DNA
actcctttaacctcgatggttcgacgctgtatcaaagtattgccgctatctttatcgcgcagttgtatggcattg

SEQ ID NO: 671862 - DNA, 75 bp, synthetic construct
  source 1..75: mol_type = other DNA
ttggggtgttcgcgttgattgcggtgacggtggccaacttcggtttctcttctctgtggccgctggcgaagctgg

SEQ ID NO: 671863 - DNA, 75 bp, synthetic construct
  source 1..75: mol_type = other DNA
cagagcactacggaagcggtacaaagcagttcccacggcattatgggcacgattttgtcgctggtgccgacgaac

SEQ ID NO: 671864 - DNA, 75 bp, synthetic construct
  source 1..75: mol_type = other DNA
ctggttatcactccggcaacggataccaccgacgcagtgatggaaagtgacacctcgctgagactacgggcgcaa

SEQ ID NO: 671865 - DNA, 75 bp, synthetic construct
  source 1..75: mol_type = other DNA
gcgttccggtaaaagacactgaagtggttgaacgactgagcacaccctgcgtgagtttcacgagaagctgcgtga

SEQ ID NO: 671866 - DNA, 75 bp, synthetic construct
  source 1..75: mol_type = other DNA
ttatctctatccggggccggaatctgagccgatcctgagtgcggcagataatgcactgcggacatggctgggagc

SEQ ID NO: 671867 - DNA, 75 bp, synthetic construct
  source 1..75: mol_type = other DNA
ggattaaagctatggagctttgccgcccgctgccgtggattgacgatgacaaacctcgcctcggggatttccgtc

SEQ ID NO: 671868 - DNA, 75 bp, synthetic construct
  source 1..75: mol_type = other DNA
ggcaatgacccgtcgtaaggagcttggtttgcgagaagcacagcttgctcagcaacagaaaaataacgagcgcga

SEQ ID NO: 671869 - DNA, 75 bp, synthetic construct
  source 1..75: mol_type = other DNA
tatcgctaaagagctggcgtctcagaaagagcgtacccgcgaaatgttcatgaccgaagacgaatggcagaaaga

SEQ ID NO: 671870 - DNA, 75 bp, synthetic construct
  source 1..75: mol_type = other DNA
ctattaagaccctgattccgggctacctgtcaggactgcctgccaccagccgcgaggcaatggaaatgctggaag

SEQ ID NO: 671871 - DNA, 75 bp, synthetic construct
  source 1..75: mol_type = other DNA
ccccggaaaatctcgatgtgttttccggcgtgtttgccccggaactacaacagcgtattggcatgcctgattcaa

SEQ ID NO: 671872 - DNA, 75 bp, synthetic construct
  source 1..75: mol_type = other DNA
aagcgggtcaggccgtgatcaacctgcaaaaaatctttggtgataagccggacatggcgatcgattcgctgaata

SEQ ID NO: 671873 - DNA, 75 bp, synthetic construct
  source 1..75: mol_type = other DNA
cgcgcgaacaaggcgcgaaaggttatgtcattaattccgcaggcggaaatgaccagatgttcggtactgcaacca

SEQ ID NO: 671874 - DNA, 75 bp, synthetic construct
  source 1..75: mol_type = other DNA
tgatgctggtgtgaccatcggcaacttcttcagtaatgacctgatgaacgcctaccagcgtcgccagcttaacaa

SEQ ID NO: 671875 - DNA, 75 bp, synthetic construct
  source 1..75: mol_type = other DNA
tggtaacttcttcagtaatgacctgatgaccgcctaccaacgccgccagatgaataagcgtgtcgaggctgagcg

SEQ ID NO: 671876 - DNA, 75 bp, synthetic construct
  source 1..75: mol_type = other DNA
gctgagcgtatgcgtgaagagaacatgaccgatgcagagtggcagaaagagctacagcgtcgcgaacaggtcaaa

SEQ ID NO: 671877 - DNA, 75 bp, synthetic construct
  source 1..75: mol_type = other DNA
gctgaacgccggacctatggtgagaacctccgcagtgctacccattccgctggtcgctcccgtgccgctatcgtc

SEQ ID NO: 671878 - DNA, 75 bp, synthetic construct
  source 1..75: mol_type = other DNA
aactatcagtcaccgacatcaatctctacgagaacactgtgagtcttgacggtcagccctatccgctgtcgctcg

SEQ ID NO: 671879 - DNA, 75 bp, synthetic construct
  source 1..75: mol_type = other DNA
acctccgcagtgctacccattccgctgggcgctcccgtgcttctatggtcgctgacattgagtccacggacaact

SEQ ID NO: 671880 - DNA, 75 bp, synthetic construct
  source 1..75: mol_type = other DNA
cgcgaagtggggatggactggatgtcacaagatctcgccgctcgtttgtcgacacgtgctgcccaggggattggc

SEQ ID NO: 671881 - DNA, 75 bp, synthetic construct
  source 1..75: mol_type = other DNA
gcaatctgcgtttgatcaatcgcatcgccacgctgtatggcattgaactgggatattacagccgtttgcgcctgt

SEQ ID NO: 671882 - DNA, 75 bp, synthetic construct
  source 1..75: mol_type = other DNA
ggccgcgcattttgcgaaaaactggcgcagcaggcgggcatcgaccagtcgcatccggcactgcaacgctggtat

SEQ ID NO: 671883 - DNA, 75 bp, synthetic construct
  source 1..75: mol_type = other DNA
ggcagtcaggcgaaagtaaacccgttttcagaacgcgatatcgatgtggcgcggcaaaattatctggcgcaggaa

SEQ ID NO: 671884 - DNA, 75 bp, synthetic construct
  source 1..75: mol_type = other DNA
ttaaaaatagtgaggagcatgctgcagctatggaaaggctcattgaacttgcgtctagtgatttacaacctggaa

SEQ ID NO: 671885 - DNA, 75 bp, synthetic construct
  source 1..75: mol_type = other DNA
aaatgagtctgaaagacgcccgctatgcggtgtctgaatacagggagttgcttacgaaagggaagaatccggcac

SEQ ID NO: 671886 - DNA, 75 bp, synthetic construct
  source 1..75: mol_type = other DNA
accgtgaagtggtcagcctgtatgcgcatttggtccagccagttttagatgcccaggcgcggcgcgaaatcagcc

SEQ ID NO: 671887 - DNA, 75 bp, synthetic construct
  source 1..75: mol_type = other DNA
ggggcagcaactggtggtgacagaaggcgtgttcagcatggacggcgatattgcgccactggcggaaatccagca

SEQ ID NO: 671888 - DNA, 75 bp, synthetic construct
  source 1..75: mol_type = other DNA
atcgcgaagtcgtcagtttgtatgcccatctggttcagccggtgctggatgcgcaggcgcgccgcgaaatcagcc

SEQ ID NO: 671889 - DNA, 75 bp, synthetic construct
  source 1..75: mol_type = other DNA
cccgctgccgtggatcgacgatgacaaacctcgcctgggggattttcgtcgccagcttatcggtcaggtaaagga

SEQ ID NO: 671890 - DNA, 75 bp, synthetic construct
  source 1..75: mol_type = other DNA
gtggcgcggcaaaattatctggcgcaggaagcctccgtaaagtcatcggcggcggaacaaaaacagatccagagc

SEQ ID NO: 671891 - DNA, 75 bp, synthetic construct
  source 1..75: mol_type = other DNA
ataaacagcgggcgttgggcgcagagttagatgagatggcggcgaatactcagcaggcaaaggccacgcgggata

SEQ ID NO: 671892 - DNA, 75 bp, synthetic construct
  source 1..75: mol_type = other DNA
agctatttgccccataactttacattttgcgcaaacctcattatcgctgctgattttctttcttttctttttcac

SEQ ID NO: 671893 - DNA, 75 bp, synthetic construct
  source 1..75: mol_type = other DNA
gatgcatatatcaaaaatgaacgtatgatcagcgtgtcatttccaaagattgaacccgaaatgaatctgtatgcg

SEQ ID NO: 671894 - DNA, 75 bp, synthetic construct
  source 1..75: mol_type = other DNA
acgatcgtggtgaggttcatattgaggcgaaagtgacgccacgaatgatgccgggtgtggtcgcactgggtgaag

SEQ ID NO: 671895 - DNA, 75 bp, synthetic construct
  source 1..75: mol_type = other DNA
cattaacattaccttttagtcgaatagcgcacgctgtcgataacgccattgcggcaaattctgacgagaaggtta

SEQ ID NO: 671896 - DNA, 75 bp, synthetic construct
  source 1..75: mol_type = other DNA
tcaggagaaagcggttcgtggaaccatctctaatcgcctgaagaacgcgattaccagcgatcctaccaaactgga

SEQ ID NO: 671897 - DNA, 75 bp, synthetic construct
  source 1..75: mol_type = other DNA
atggcgaccgccgggattttaaccatacgatcagcaaactccccagaacaacacgttcaggctgtttacaaagca

SEQ ID NO: 671898 - DNA, 75 bp, synthetic construct
  source 1..75: mol_type = other DNA
gcaatgacgtttatgaaaattatatggcactggcctttgacagtgtagacgatgtgaacgtgagacgttcggcag

SEQ ID NO: 671899 - DNA, 75 bp, synthetic construct
  source 1..75: mol_type = other DNA
ggaagacagggatgaggctgttgaaaacctcggattaaaacccacggtggataaggcaaaaaatgccgttcagcg

SEQ ID NO: 671900 - DNA, 75 bp, synthetic construct
  source 1..75: mol_type = other DNA
ccgtaactcagcggataacgtcaacggcgtgtattaccgaccgctgcaaaaactgattaatggcacctggtataa

SEQ ID NO: 671901 - DNA, 75 bp, synthetic construct
  source 1..75: mol_type = other DNA
cgctcaccttcgggacacgggctgtcagggatatcgatatcggataccggccgtaactcagcggataacgtcaac

SEQ ID NO: 671902 - DNA, 75 bp, synthetic construct
  source 1..75: mol_type = other DNA
cacgaatgatgccgggcgtggtcgcactgggtgaaggtgcctggtatgacccggatgcaaaacgtgtcgataagg

SEQ ID NO: 671903 - DNA, 75 bp, synthetic construct
  source 1..75: mol_type = other DNA
tatggcgactactcctccgcgcaaattgcggaaggtctgaactatacctacggcggctgggcagatggcaacagc

SEQ ID NO: 671904 - DNA, 75 bp, synthetic construct
  source 1..75: mol_type = other DNA
tgaggattttcaacgacacttttggccttatttttcgtcgttcggaagagtgcctgcatcttattcccacccggg

SEQ ID NO: 671905 - DNA, 75 bp, synthetic construct
  source 1..75: mol_type = other DNA
atggacttttaacagccatgacttctctttacgtcaatttggtcaaggccagagtagcgtcacagaactggcggc

SEQ ID NO: 671906 - DNA, 75 bp, synthetic construct
  source 1..75: mol_type = other DNA
cgttttataaccgagaaactaccttttccttatgtggataaccttgagtgcctttcaccaaccttaaggcaacgg

SEQ ID NO: 671907 - DNA, 75 bp, synthetic construct
  source 1..75: mol_type = other DNA
tgatattgttctgcgcaaccagtgcaacggtagctggcaattaacctttaatgtggatgagtggcagaatagcga

SEQ ID NO: 671908 - DNA, 75 bp, synthetic construct
  source 1..75: mol_type = other DNA
gtattcacacttgaaaagtacacctgatgccccgcagctggtaaaagagtcaattaacagtccaagaataaaaat

SEQ ID NO: 671909 - DNA, 75 bp, synthetic construct
  source 1..75: mol_type = other DNA
gtatatgttggtagtatggcagcagaacgaaaaatagagcattttcttgattcatatattatgaggcagaaaaaa

SEQ ID NO: 671910 - DNA, 75 bp, synthetic construct
  source 1..75: mol_type = other DNA
aagcaaaagcccacgccaaatacctttcacggtcgctcaatatcaatctaagctacgcccgggatgcagtggcat

SEQ ID NO: 671911 - DNA, 75 bp, synthetic construct
  source 1..75: mol_type = other DNA
atatgattaagaatgctggaattaacggcaatcgacgtatgcttatgcttgaatacctaaggaaggtgcgaataa

SEQ ID NO: 671912 - DNA, 75 bp, synthetic construct
  source 1..75: mol_type = other DNA
aaaaagccaagtgccaaccaatgcaggaacagccagcaccactaaagacacccttccgacgtatgacggagaagt

SEQ ID NO: 671913 - DNA, 75 bp, synthetic construct
  source 1..75: mol_type = other DNA
gtaatgtacgcaggtaactggcaaggaaatgaatggcaacccattgagattcaggagaaagcggtccgcggaacc

SEQ ID NO: 671914 - DNA, 75 bp, synthetic construct
  source 1..75: mol_type = other DNA
ttggggctaatatgaaaaaacgtgttaacactgaaaaatcaagtgaaggtgaagacactattactcctgccttta

SEQ ID NO: 671915 - DNA, 75 bp, synthetic construct
  source 1..75: mol_type = other DNA
tgaaacaccgattaaaagcgatcctggcttgttaaagagtgcaggggtgaacgggaacagaagatcattagctat

SEQ ID NO: 671916 - DNA, 75 bp, synthetic construct
  source 1..75: mol_type = other DNA
actaaggttaatccgacaccacaaaaagcacctacgagtacaggtcaggatgtggtaacaccagtatttaaacaa

SEQ ID NO: 671917 - DNA, 75 bp, synthetic construct
  source 1..75: mol_type = other DNA
tcattgtacggcgaattcgggcaggaacccttttccgacggtgcggtggaggagggcttcatcagcggggatatt

SEQ ID NO: 671918 - DNA, 75 bp, synthetic construct
  source 1..75: mol_type = other DNA
gtaagttggcagcatcaccagaatctaacatcaaatgcaggtctttttctgctccttgagaatgcaaaaagcaat

SEQ ID NO: 671919 - DNA, 75 bp, synthetic construct
  source 1..75: mol_type = other DNA
ttctgcaattgatatcgcacatcgagtggattgggacttcagagaagcggagcgacttgctaaagagcaggcgaa

SEQ ID NO: 671920 - DNA, 75 bp, synthetic construct
  source 1..75: mol_type = other DNA
agatcgaaaaacgcgaagagaaagatggcgaaaccgttatctcctgggagaaaatcaacaaagcgcaggcgctgt

SEQ ID NO: 671921 - DNA, 75 bp, synthetic construct
  source 1..75: mol_type = other DNA
caccaaagaagatcgcggtactgaaatcaccctgcatctgcgtgaaggtgaagatgagttccttgatgactggcg

SEQ ID NO: 671922 - DNA, 75 bp, synthetic construct
  source 1..75: mol_type = other DNA
agcctgctgtacatcccgtcccaggctccgtgggatatgtggaaccgtgatcataaacacggcctgaaactgtac

SEQ ID NO: 671923 - DNA, 75 bp, synthetic construct
  source 1..75: mol_type = other DNA
cggacctggcaccgttgattaaaacattgtcgctggcgtttgtggtaatcccccacgggcaacagttccgcgcgt

SEQ ID NO: 671924 - DNA, 75 bp, synthetic construct
  source 1..75: mol_type = other DNA
cctgctgactgtgtcgctggtgatcatcgcgctggcagatacgctttctgacttcggtatcgctaactccattat

SEQ ID NO: 671925 - DNA, 75 bp, synthetic construct
  source 1..75: mol_type = other DNA
tcttaccaataactctgtccaaacagtatccttacagggaaaggatattcttgtcattgaaataccaatcgcacg

SEQ ID NO: 671926 - DNA, 75 bp, synthetic construct
  source 1..75: mol_type = other DNA
cggcagggattggcgtaacgaaaccgtttggtgagctgggggcgttatccctgagtgcccagacagctaaagccc

SEQ ID NO: 671927 - DNA, 75 bp, synthetic construct
  source 1..75: mol_type = other DNA
cagatggcgggcgcaatcggcgtcacgccttggcttcctgctggtgcagattatcaacaccattctgagctattt

SEQ ID NO: 671928 - DNA, 75 bp, synthetic construct
  source 1..75: mol_type = other DNA
gtgcaggttgctgcgggcgcactggcgtttggggtgatgattgtgctgtcacgcaatgcgctggtggtggaaatg

SEQ ID NO: 671929 - DNA, 75 bp, synthetic construct
  source 1..75: mol_type = other DNA
caggacgacaccgaaaagctgcgcgtcaacttctacaagctgctgtcggtggtggggattatcaactttccggcg

SEQ ID NO: 671930 - DNA, 75 bp, synthetic construct
  source 1..75: mol_type = other DNA
ctttaggaacctgtgctgctgtggcagtacctggatgcaattgccctttctgttcaatgttgcgtaatcaaaagc

SEQ ID NO: 671931 - DNA, 75 bp, synthetic construct
  source 1..75: mol_type = other DNA
tattcacaaagagacattattcttagtgaagtaacaaaactaatcgcatcattaagtttagtaggggcattcaca

SEQ ID NO: 671932 - DNA, 75 bp, synthetic construct
  source 1..75: mol_type = other DNA
atcaacattcatggttggcattctcttatccgccggaatattatttatctgtttttctctatttgcttcgacaag

SEQ ID NO: 671933 - DNA, 75 bp, synthetic construct
  source 1..75: mol_type = other DNA
gcggcgcgaagtggtcggcgattgccacggtgatcatcatcggcctcgggctggtgcaaatgaccgtgctggcgc

SEQ ID NO: 671934 - DNA, 75 bp, synthetic construct
  source 1..75: mol_type = other DNA
gtgctgcaattgctgtgtattgtggggctactgcgctccgtgggtaacccgattggttcgctgctgatggcgaaa

SEQ ID NO: 671935 - DNA, 75 bp, synthetic construct
  source 1..75: mol_type = other DNA
atgagcttacgtgaaaaaaccatcagcggcgcgaaatggtcggcgattgccacagtaatcatcatcggcctcggg

SEQ ID NO: 671936 - DNA, 75 bp, synthetic construct
  source 1..75: mol_type = other DNA
cgctgctgtttggctactttggccgtaaaatttatcgtcccggcctgcatttttcgctggcgtcggtggcaccaa

SEQ ID NO: 671937 - DNA, 75 bp, synthetic construct
  source 1..75: mol_type = other DNA
gtggcgcgaagtggtcagcgattgccacggtgatcatcatcggcctgggactggtacagatgaccgtgttggcgc

SEQ ID NO: 671938 - DNA, 75 bp, synthetic construct
  source 1..75: mol_type = other DNA
aacgtggccgttgtgccaccgatgaagctgaacccaatcatcactcgcgtgttgtttccggcgtttgccaaaatt

SEQ ID NO: 671939 - DNA, 75 bp, synthetic construct
  source 1..75: mol_type = other DNA
attgacagccacgagggaaattacaggctttaccgcattgaagatggcaccccgtccgttattggcatttaccag

SEQ ID NO: 671940 - DNA, 75 bp, synthetic construct
  source 1..75: mol_type = other DNA
tcccgcgaggcatattacagggatgaggttatcccgatgcgccgcctgattatggaggggatcaacagcgacccg

SEQ ID NO: 671941 - DNA, 75 bp, synthetic construct
  source 1..75: mol_type = other DNA
tggggctgcttaaagtgcgtaacggcttcgggcgggtggtgcgcctgcatacgttgccgtcgctgtacctgcggc

SEQ ID NO: 671942 - DNA, 75 bp, synthetic construct
  source 1..75: mol_type = other DNA
acatcgccatgccgacacagaagacaccgtgctggaaattcagcggctggctacagcctgccgcgacaccctgaa

SEQ ID NO: 671943 - DNA, 75 bp, synthetic construct
  source 1..75: mol_type = other DNA
cccgaccgttattggcatttaccagcgcccatcctctgcaatcgtcgatgtgattgccgacagcatccgcatcac

SEQ ID NO: 671944 - DNA, 75 bp, synthetic construct
  source 1..75: mol_type = other DNA
acatcgccatgccgacacagaagacaccgtgctggaaattcagcgtctggctgccgtttgccgtgacaccctgaa

SEQ ID NO: 671945 - DNA, 75 bp, synthetic construct
  source 1..75: mol_type = other DNA
cgtattaccgtgatgaagtgatccctatgcgacggctgataatggaaagtatcaacagtgaccgtgatattctcc

SEQ ID NO: 671946 - DNA, 75 bp, synthetic construct
  source 1..75: mol_type = other DNA
agcgcgaacagcgcggcgataagtccaaaaaaatgagcattatcagctttggcaaaccagaaccggtactgacta

SEQ ID NO: 671947 - DNA, 75 bp, synthetic construct
  source 1..75: mol_type = other DNA
cagccccggccctcgcgccagctattcaaaaacagatgtcttttagcgtggaattcggcgacgccgagcgcgtgc

SEQ ID NO: 671948 - DNA, 75 bp, synthetic construct
  source 1..75: mol_type = other DNA
tggggttgcttaaagtgcgcaatggcttcggtcgagtggtgcgcctgcatacgttaccttctctgtacctgcggc

SEQ ID NO: 671949 - DNA, 75 bp, synthetic construct
  source 1..75: mol_type = other DNA
tatggaggggatcaacagcgacccggatatccggagactggggcaggtggaatttattcttgaatttaatgaagc

SEQ ID NO: 671950 - DNA, 75 bp, synthetic construct
  source 1..75: mol_type = other DNA
ggaagatgagatgaaggaacaaattgctgcaggtaaaggtgtcggtaactttaaatcaatgctgattaacatccc

SEQ ID NO: 671951 - DNA, 75 bp, synthetic construct
  source 1..75: mol_type = other DNA
atgggcgcttttacaggtaagacagttctcatcctcggtggcagccgtggaatcggtgccgctatcgtacgtcgt

SEQ ID NO: 671952 - DNA, 75 bp, synthetic construct
  source 1..75: mol_type = other DNA
atcatttgcaaatcagacttggttactcacaggtattgtcctgtctgcgatggccgtgcttgtggctgtggttac

SEQ ID NO: 671953 - DNA, 75 bp, synthetic construct
  source 1..75: mol_type = other DNA
atggcagagaatgttgcacatatttcgcggttcagaaaaaagaaagagaatgcctataatgtatccaacaaccaa

SEQ ID NO: 671954 - DNA, 75 bp, synthetic construct
  source 1..75: mol_type = other DNA
aactacatattgccccgtcaactattagacgtcaactagttttgccgactcgcgccaactatactggccgcaccc

SEQ ID NO: 671955 - DNA, 75 bp, synthetic construct
  source 1..75: mol_type = other DNA
tcgtgattagaaaaaaaatgacattaccagaactataccattcactctctaagcttgaacatgtttgcgctatcg

SEQ ID NO: 671956 - DNA, 75 bp, synthetic construct
  source 1..75: mol_type = other DNA
ctctgtttttgagaagatgaatgataacttaattcaaagatatatatctgaatactttcttaaacatacttctta

SEQ ID NO: 671957 - DNA, 75 bp, synthetic construct
  source 1..75: mol_type = other DNA
aaatcacggcatcactttaaggcatgcggcaaggttgcaaacgttccctgatgactatattttttggggtaatgc

SEQ ID NO: 671958 - DNA, 75 bp, synthetic construct
  source 1..75: mol_type = other DNA
acgtcctcaacaatctgtgggcggctccgctgctggtgctgtatcgcattatcaccgaatgctttttcggttatg

SEQ ID NO: 671959 - DNA, 75 bp, synthetic construct
  source 1..75: mol_type = other DNA
acagctggagcctgcgcccttgctgcatggtgatcgcctaccgtgtggctcatttttgctcggtgtggcgcaaga

SEQ ID NO: 671960 - DNA, 75 bp, synthetic construct
  source 1..75: mol_type = other DNA
tctgtttatggtcacggaagggattaaactgatgttttcagcattgttaactcgctttattattcgtcgcattcc

SEQ ID NO: 671961 - DNA, 75 bp, synthetic construct
  source 1..75: mol_type = other DNA
gggcaaacctgtattgattgccataaagggatagcgcacaagctgcccgatatgcgcgaagtcgagccaggtttt

SEQ ID NO: 671962 - DNA, 75 bp, synthetic construct
  source 1..75: mol_type = other DNA
gaactgaaaaaggtcattgccgacatctatcccggtcagacacagttttatgtgattgaatttaaatgtctttaa

SEQ ID NO: 671963 - DNA, 75 bp, synthetic construct
  source 1..75: mol_type = other DNA
atgaccctgcctgaactgaaaaaggtcattgccgacatctatcctgggcagacacagttttatgtaattgaattt

SEQ ID NO: 671964 - DNA, 75 bp, synthetic construct
  source 1..75: mol_type = other DNA
caaactacacagacgtctggtatgacaatgaagcggaacactggacgctcccgattgaccggctggcgctggcgc

SEQ ID NO: 671965 - DNA, 75 bp, synthetic construct
  source 1..75: mol_type = other DNA
gtcaggattttctgacatttttcagtaaccgggagccttgcctgattggcatggaggcctgtgggggctctcagc

SEQ ID NO: 671966 - DNA, 75 bp, synthetic construct
  source 1..75: mol_type = other DNA
taccgaacttatcgataaaccggacgaaacagcaattacatgtccccaatgtcggacgggccatctggtccagcg

SEQ ID NO: 671967 - DNA, 75 bp, synthetic construct
  source 1..75: mol_type = other DNA
gtgcggggctgaactggttattcgatccgggaaacacggtccgtttcttggatgctcacagtatccggcgtgtga

SEQ ID NO: 671968 - DNA, 75 bp, synthetic construct
  source 1..75: mol_type = other DNA
actggacggcgaacatctcacgctgcgcatccagtggcgcgccgccgatggcgttattaatgaaacggaggtggt

SEQ ID NO: 671969 - DNA, 75 bp, synthetic construct
  source 1..75: mol_type = other DNA
accatcagacggattgattttgatagccaaaatacccgttgcgttgcattgatcagcgccatgaacgaacatgga

SEQ ID NO: 671970 - DNA, 75 bp, synthetic construct
  source 1..75: mol_type = other DNA
gtcaggattttctggcgtatttcagtaaccgcgaaccctgcctgattggcatggaagcttgtggaggcccagtac

SEQ ID NO: 671971 - DNA, 75 bp, synthetic construct
  source 1..75: mol_type = other DNA
atatcataaacaacctgtgggctgccccggtgctggtgatgtatcgccttatcaccgaatgcctgtttggctatg

SEQ ID NO: 671972 - DNA, 75 bp, synthetic construct
  source 1..75: mol_type = other DNA
tgttctggtttatgaggtcgatagccagtggggaaaagtgtatatcctgcgcgtattgcatactgcacagaagtg

SEQ ID NO: 671973 - DNA, 75 bp, synthetic construct
  source 1..75: mol_type = other DNA
cgcaacggtcgtgtggaaggtatccgggaactggttatttacccgcattttgttctggtttatgagatcgatagc

SEQ ID NO: 671974 - DNA, 75 bp, synthetic construct
  source 1..75: mol_type = other DNA
gcaatcctgccagcctgactaagctgatgactggctatgttgttgatcgtgcaatcgatagccatcgcattacgc

SEQ ID NO: 671975 - DNA, 75 bp, synthetic construct
  source 1..75: mol_type = other DNA
cagcatagctcggcttatgatttagctgtgctttctcgcgctatcatccacggcgagcccgagttttatcatatg

SEQ ID NO: 671976 - DNA, 75 bp, synthetic construct
  source 1..75: mol_type = other DNA
tatggcgataaagaaaacattgcccttgggacggaacagggcttctggatggtgctgcctaaaactgagatcccc

SEQ ID NO: 671977 - DNA, 75 bp, synthetic construct
  source 1..75: mol_type = other DNA
ctggatgatattcaccaggcaatacacatcattctgcgcacaccgcgcggcagtgatccccacagaccgctgttt

SEQ ID NO: 671978 - DNA, 75 bp, synthetic construct
  source 1..75: mol_type = other DNA
gttaacaacgatcctgaaataccggaaaggctacaccttaactttgatttaagttacacagaatcaacggataag

SEQ ID NO: 671979 - DNA, 75 bp, synthetic construct
  source 1..75: mol_type = other DNA
agcggtcattttccgacgccgctattaccacaacggtgcgcacacaggcggtattctttatactcgcgatcccag

SEQ ID NO: 671980 - DNA, 75 bp, synthetic construct
  source 1..75: mol_type = other DNA
ccctggcggtcataccggaataccaagggatgggcgtaggcggtttgctgatacgtacaggcatagaacacctga

SEQ ID NO: 671981 - DNA, 75 bp, synthetic construct
  source 1..75: mol_type = other DNA
ccgcaagtattacaagaacggcgcacatcttggttatatcctgtattccactgacccggacatggatcccgagct

SEQ ID NO: 671982 - DNA, 75 bp, synthetic construct
  source 1..75: mol_type = other DNA
acacgccgccatggcggcagcagtaaccaatctgctgatattcggggatatggggttgcttaaagtgcggaatgg

SEQ ID NO: 671983 - DNA, 75 bp, synthetic construct
  source 1..75: mol_type = other DNA
gtcgcgcaccgtttcccacccggacttgccggcatcattcccgcaaatacggccgggcttggtgacccactgaaa

SEQ ID NO: 671984 - DNA, 75 bp, synthetic construct
  source 1..75: mol_type = other DNA
tcacatctacaactgggatgagtggtcgcaaaaaaccattccggtgccaatggtcgtaggccatgaatatgttgg

SEQ ID NO: 671985 - DNA, 75 bp, synthetic construct
  source 1..75: mol_type = other DNA
gccgccagcgtttcgtaccatgctcgacaccatgaaccacggtggtcgtattgcgatgctgggtattccaccgtc

SEQ ID NO: 671986 - DNA, 75 bp, synthetic construct
  source 1..75: mol_type = other DNA
tatcgatgatttccagaagggctttgacgctatgcgttcgggccagtccgggaaagtaattctgagttgggatta

SEQ ID NO: 671987 - DNA, 75 bp, synthetic construct
  source 1..75: mol_type = other DNA
ccggtggcggtgattgcgccaacacatcaaatcttcaggtctatgtgaacggcgctttcattggtatgaatgcca

SEQ ID NO: 671988 - DNA, 75 bp, synthetic construct
  source 1..75: mol_type = other DNA
ttgcgatgctgggtatcccgccgtctgacatgtctatcgactggacaaaagtgatctttaagggcttgttcatta

SEQ ID NO: 671989 - DNA, 75 bp, synthetic construct
  source 1..75: mol_type = other DNA
gaaaagtaagaaaattatgtgaggttactttacgtaataagagtaaggacctacaaattagttgctggtatgtgg

SEQ ID NO: 671990 - DNA, 75 bp, synthetic construct
  source 1..75: mol_type = other DNA
aaggaggggggcgattactgcttcagtgtcccgaccttgacagctttgccaatcctgcaaatccggcaccggtag

SEQ ID NO: 671991 - DNA, 75 bp, synthetic construct
  source 1..75: mol_type = other DNA
gcaactggcaatgatcgatccgaaccagccgaataaaatcgcatgtggttttctgggctatacgcgcccggtgtt

SEQ ID NO: 671992 - DNA, 75 bp, synthetic construct
  source 1..75: mol_type = other DNA
tgactatgtctgaatggcttgaggaattacttaaagataatgatactatggagcaaataaatcgtattttaaaag

SEQ ID NO: 671993 - DNA, 75 bp, synthetic construct
  source 1..75: mol_type = other DNA
atagaaagcgaaggggaccattctgttgaactgttcaaaaaatctgtgggtaaatatccttccagcaaaattagt

SEQ ID NO: 671994 - DNA, 75 bp, synthetic construct
  source 1..75: mol_type = other DNA
tcctcttcttgaggataaggaaatcacactttctgaatggtataaggtgttatcgtttgaacatggagcaagttt

SEQ ID NO: 671995 - DNA, 75 bp, synthetic construct
  source 1..75: mol_type = other DNA
gccaatgccattggtttgagtctgtataacttcctcaacatcctcaatattaatcagatttggttgtacggtcgc

SEQ ID NO: 671996 - DNA, 75 bp, synthetic construct
  source 1..75: mol_type = other DNA
ttgatcctgaaaaactgactaccgcgcagttaatcgctgcctggcagagtggagaaccgtggatcaccagttggg

SEQ ID NO: 671997 - DNA, 75 bp, synthetic construct
  source 1..75: mol_type = other DNA
ctggaaaacgaaaagcgggtggtgaatatcgacgatgaaagccagacgcgcgggcatagtagcggcacatggctg

SEQ ID NO: 671998 - DNA, 75 bp, synthetic construct
  source 1..75: mol_type = other DNA
acagagttaactgaagaaaaaaatagggcagagataagccttgccaatggcgaacgttggcagggagacagtata

SEQ ID NO: 671999 - DNA, 75 bp, synthetic construct
  source 1..75: mol_type = other DNA
ggcaggaagagctgctctggaagctggtcaaagggcggatactgtacccgtcgctgacggcgctttgcgtcacgg

SEQ ID NO: 672000 - DNA, 75 bp, synthetic construct
  source 1..75: mol_type = other DNA
tcactggccgcgctttatggcgatatcggtaaacaggcggagtcgctcatcggtaaggctggcagtatggcgacc

SEQ ID NO: 672001 - DNA, 75 bp, synthetic construct
  source 1..75: mol_type = other DNA
atagaaagagaaggtgatcactctgttgaatcgttcaaaaaatctgtaggtaaatataatgcacgcaagattagt

SEQ ID NO: 672002 - DNA, 75 bp, synthetic construct
  source 1..75: mol_type = other DNA
ggcagaagcacactggcaggatttcagcgtcgagcaaatccttcagtcagccgtcaaaaactggacgctgaccgc

SEQ ID NO: 672003 - DNA, 75 bp, synthetic construct
  source 1..75: mol_type = other DNA
cagtttactgaccagctgcgcggcattattcatgccgaccaaaaactggcgcgggaagattttattattcatcgc

SEQ ID NO: 672004 - DNA, 75 bp, synthetic construct
  source 1..75: mol_type = other DNA
tggtcgcttcgccccctctccttctggcgagcttcattttggctctctgattgccgcgcttggaagctttctaca

SEQ ID NO: 672005 - DNA, 75 bp, synthetic construct
  source 1..75: mol_type = other DNA
atccgcaatggagttctgcgtttaactcgaagtcattgtatttaaatccagacaaaaatacggttaacgctttta

SEQ ID NO: 672006 - DNA, 75 bp, synthetic construct
  source 1..75: mol_type = other DNA
gtgctcgtgataaagtcctgtctcgctgaacttcgcgaaggtgatgtactgatagtctggaaactggatcgactt

SEQ ID NO: 672007 - DNA, 75 bp, synthetic construct
  source 1..75: mol_type = other DNA
gctggctggtacgcatagaagatatcgacccgcctcgtgaagttcccggtgccgcagaaactatcctgcgccagc

SEQ ID NO: 672008 - DNA, 75 bp, synthetic construct
  source 1..75: mol_type = other DNA
gcttcgccccctcaccttccggcgagctccattttggttctctgattgccgcgctcggcagctttcttcaggccc

SEQ ID NO: 672009 - DNA, 75 bp, synthetic construct
  source 1..75: mol_type = other DNA
ctgtccgtgaaagaagtgaagcgtgggatgcgcctggcacgcctggctcaaaccgacggctggcaatgctacagg

SEQ ID NO: 672010 - DNA, 75 bp, synthetic construct
  source 1..75: mol_type = other DNA
tatctggctaaatttatatctcagtactggactacatgctggccatcgcaggaagaaggactggaaatacgttac

SEQ ID NO: 672011 - DNA, 75 bp, synthetic construct
  source 1..75: mol_type = other DNA
acgagatgacagacacacactatattggtcgcttcgccccctctccttctggcgagcttcattttggctctctga

SEQ ID NO: 672012 - DNA, 75 bp, synthetic construct
  source 1..75: mol_type = other DNA
agtcagccgtcaaaaactggcggcttaccgccgtgcctgagtcggcaattgtaaattcaacattctcaaatgcgt

SEQ ID NO: 672013 - DNA, 75 bp, synthetic construct
  source 1..75: mol_type = other DNA
cgggaaatgctcccgccttattttttgttcaacgagatgacagacacacactatattggccgctttgccccctct

SEQ ID NO: 672014 - DNA, 75 bp, synthetic construct
  source 1..75: mol_type = other DNA
cgacgcaaattggcttcgggcaattaagccgcgcacaacaggtgctggggattggctatttgtatgttgaggcgc

SEQ ID NO: 672015 - DNA, 75 bp, synthetic construct
  source 1..75: mol_type = other DNA
gtcttctgaagcaggcggcgttcgctacgacaccaaagctgatggctctatcgactacagcaacatcactctcgg

SEQ ID NO: 672016 - DNA, 75 bp, synthetic construct
  source 1..75: mol_type = other DNA
cggctctcagttgtatgacctgcagcaggatgctctgttgtggaacggcacagcattcagtgccgcgcacggcac

SEQ ID NO: 672017 - DNA, 75 bp, synthetic construct
  source 1..75: mol_type = other DNA
gtgctgcacacggaacactcaaaaccgccagcaagattaccaacgttgcaaatggtgacatattagccaacagtt

SEQ ID NO: 672018 - DNA, 75 bp, synthetic construct
  source 1..75: mol_type = other DNA
tgatgatggtaaatatcgtcaaatcatcaacgtcgcggatggttctgaagcccatgacgctgttacggttcgcca

SEQ ID NO: 672019 - DNA, 75 bp, synthetic construct
  source 1..75: mol_type = other DNA
gggtattaactatgtacgtaccaacgacaacggcttagcgttcaacgatgccagcgcctcaggtattggtgctac

SEQ ID NO: 672020 - DNA, 75 bp, synthetic construct
  source 1..75: mol_type = other DNA
gcagtgaagacggtcaacgtcagatcaccaacgtcgcagcaggttcggcggataccgatgcggtcaacgtgggtc

SEQ ID NO: 672021 - DNA, 75 bp, synthetic construct
  source 1..75: mol_type = other DNA
gtggtgcacagactggctacaccgcctacaacatggacgcaccgcagaactctgtaggtgagttttctgttggta

SEQ ID NO: 672022 - DNA, 75 bp, synthetic construct
  source 1..75: mol_type = other DNA
ccctgggtagcagctctgtttccagccgagtgattgcaaaaggctcccgtgacaccagcataacggaaaatggcg

SEQ ID NO: 672023 - DNA, 75 bp, synthetic construct
  source 1..75: mol_type = other DNA
aacggctcacaactccacggcgtgagcagttatgttgttgatgcgctggggggtggtgccgaagtcaatgcagac

SEQ ID NO: 672024 - DNA, 75 bp, synthetic construct
  source 1..75: mol_type = other DNA
tcaatggatcacaactttatgccatcagtaagtctgtatccgacaggcttggaggatatcatgatgatcctgata

SEQ ID NO: 672025 - DNA, 75 bp, synthetic construct
  source 1..75: mol_type = other DNA
gcagactatctctcgccagcgcagcaaacgcgattgctatgggtgcagagagcgaagctgctgaaaatgcgacgg

SEQ ID NO: 672026 - DNA, 75 bp, synthetic construct
  source 1..75: mol_type = other DNA
acgcttgccggtgtgctttatcctgaactgaccggtggaaagctgacgatgaccacgctcagactgatggcagag

SEQ ID NO: 672027 - DNA, 75 bp, synthetic construct
  source 1..75: mol_type = other DNA
tagtgcaattgctattggccagggcaacaaggctaacggcgctgatgctatcgctctgggtaatggtagccagtc

SEQ ID NO: 672028 - DNA, 75 bp, synthetic construct
  source 1..75: mol_type = other DNA
acctgcttatcactgacggcagttttacgctgaacagcggaaacgagccacagcgatgtgataaccgggtcagca

SEQ ID NO: 672029 - DNA, 75 bp, synthetic construct
  source 1..75: mol_type = other DNA
gtgggatgaagacgcaggtgcctacaacgccagccatgatggcaatgccagcaaaattaccaacgttgcggctgg

SEQ ID NO: 672030 - DNA, 75 bp, synthetic construct
  source 1..75: mol_type = other DNA
atgcgctgggtggtgatgcagaagtcaacgctgacggtactatcactgcgccgacttacaccattgcaaataccg

SEQ ID NO: 672031 - DNA, 75 bp, synthetic construct
  source 1..75: mol_type = other DNA
agcgacacagattggcttcgggcaattaagccgcgcacaacaggtgctgggaattggctatttatatgttgaagc

SEQ ID NO: 672032 - DNA, 75 bp, synthetic construct
  source 1..75: mol_type = other DNA
tgatggtcgataatgactgcgtgatgctggcgctggcggagaaatggcaaaataattcgcaggaacgggatttct

SEQ ID NO: 672033 - DNA, 75 bp, synthetic construct
  source 1..75: mol_type = other DNA
attgcaagtcttttatgtttgctatatttgatactcctaagcaacatgaaatacatcacgaagacatagataatt

SEQ ID NO: 672034 - DNA, 75 bp, synthetic construct
  source 1..75: mol_type = other DNA
atcgccgataacactgctgatatcgccactaacaccacggatattgcaaccaacactgccaatatcgccgataac

SEQ ID NO: 672035 - DNA, 75 bp, synthetic construct
  source 1..75: mol_type = other DNA
ctcgccgcggtgtatggcgatattggaaaacaggccgaaagtctggtcgggaaagctggcgatctgctgtcgatg

SEQ ID NO: 672036 - DNA, 75 bp, synthetic construct
  source 1..75: mol_type = other DNA
acgcttgccggtgtgctttatcctgaactgaccggcggaaagctgacgatgactacgctcaggctgatggcagag

SEQ ID NO: 672037 - DNA, 75 bp, synthetic construct
  source 1..75: mol_type = other DNA
gcaacagccaataacggcgcaggtgcttacagcgccagtcatgacggcaaggccagcattatcacaaacgttgct

SEQ ID NO: 672038 - DNA, 75 bp, synthetic construct
  source 1..75: mol_type = other DNA
attactaacctgaacaatcaggtcactaatctggatactcgcgtggccaatatcgaaaacggcattggcgatatc

SEQ ID NO: 672039 - DNA, 75 bp, synthetic construct
  source 1..75: mol_type = other DNA
cattactaacctgaacactcaggtcactaatctggatactcgcgtgaccaatatcgaaaacggcattggcgatat

SEQ ID NO: 672040 - DNA, 75 bp, synthetic construct
  source 1..75: mol_type = other DNA
tccgtttgacctgaaaggcacccgtcattacagcagtaacagcgtggggtatacccggacgggcggaacgacatt

SEQ ID NO: 672041 - DNA, 75 bp, synthetic construct
  source 1..75: mol_type = other DNA
gaatggcagctcaacagtctgcgcgaagaggcgtaccgcgacacacagtcgcaggatgcagcaggtgcacaattc

SEQ ID NO: 672042 - DNA, 75 bp, synthetic construct
  source 1..75: mol_type = other DNA
atggcggtcctgccggatgcgcagaatcttctgatagttcagaaggtgcagatgatgaataaagagagatgccgg

SEQ ID NO: 672043 - DNA, 75 bp, synthetic construct
  source 1..75: mol_type = other DNA
agggccgggacaccaccacgctgtcgggtagcctgtcagggtcggccatcgccacccgggagaccggcctgctgt

SEQ ID NO: 672044 - DNA, 75 bp, synthetic construct
  source 1..75: mol_type = other DNA
attttgatgctgcaatcaacctagggcgctgggtactctccagtaacatgaacgtgtctcatgaacgtgataaaa

SEQ ID NO: 672045 - DNA, 75 bp, synthetic construct
  source 1..75: mol_type = other DNA
gagcgtggtgcgtctgcatctgccagttacgcctttgatgccattcagaccaacctaggtgtgtctcgttcgtac

SEQ ID NO: 672046 - DNA, 75 bp, synthetic construct
  source 1..75: mol_type = other DNA
gtttcacccaaagcccgctccctcatcctctggacagaacgaggcgcagcacgccacggcaaaatgctcgaaacc

SEQ ID NO: 672047 - DNA, 75 bp, synthetic construct
  source 1..75: mol_type = other DNA
tcaacatcgtcgaagtgggcgagcagatccgtaaagatatcactgtagtcatggttgcgccgaaatgccctggca

SEQ ID NO: 672048 - DNA, 75 bp, synthetic construct
  source 1..75: mol_type = other DNA
cagaaacatatggacgacatcatctccggcgaattctcctccggcatgatggcggactgggccaacgatgataag

SEQ ID NO: 672049 - DNA, 75 bp, synthetic construct
  source 1..75: mol_type = other DNA
acgttgctggacagcactgagccggtactgaatttcagtgagcatgcgaccagagagcgcgtggacacggatatc

SEQ ID NO: 672050 - DNA, 75 bp, synthetic construct
  source 1..75: mol_type = other DNA
gcctggcaggtagacgccctgcgtgaagaggcctgccgcgacaccgggaagccggaaccggaattcagtgaacaa

SEQ ID NO: 672051 - DNA, 75 bp, synthetic construct
  source 1..75: mol_type = other DNA
attcagcgtggcctgaccgttatagccttcagcgctgctgccgctgacgctgtgggcataaccggcctgaacgcc

SEQ ID NO: 672052 - DNA, 75 bp, synthetic construct
  source 1..75: mol_type = other DNA
cctgcgcccgggtggccagctggacgcggccgggaactacaccttcctgagcgggaaggagaaggcccgctacga

SEQ ID NO: 672053 - DNA, 75 bp, synthetic construct
  source 1..75: mol_type = other DNA
caggaaaacccgtagtttgagtgctaatttatcttatggttttgatgctattcagaccaatatggcggtaacaaa

SEQ ID NO: 672054 - DNA, 75 bp, synthetic construct
  source 1..75: mol_type = other DNA
ccagcgaaaccggacctctctttacaaaagagtcttccgatactgtcgctattgtcagcgtaccgggcgtcagtg

SEQ ID NO: 672055 - DNA, 75 bp, synthetic construct
  source 1..75: mol_type = other DNA
ttattcacggtaatcagaaatcacggtatgaggctcgtctgtctcatcggtttgatacgacttatctgagtggag

SEQ ID NO: 672056 - DNA, 75 bp, synthetic construct
  source 1..75: mol_type = other DNA
atatttctggtattgcggccacaccgtctcgtattaccgtaacgcagaatggctacaccgtttattcccgaatga

SEQ ID NO: 672057 - DNA, 75 bp, synthetic construct
  source 1..75: mol_type = other DNA
gcaaaaagtatttcccggcgctccgagttgcagcttctgacttatcgctatcagagtaagggatatgtggagttt

SEQ ID NO: 672058 - DNA, 75 bp, synthetic construct
  source 1..75: mol_type = other DNA
ttctgcttctgccagttatgcttttgattctgtgcagacgaatttcgccgtgtcgcagacccgctacgcttatgg

SEQ ID NO: 672059 - DNA, 75 bp, synthetic construct
  source 1..75: mol_type = other DNA
ttcggcatctgccagttacgcctttgattccattcagacgaactttggggtgtcgcagagtcgctcatcttatgg

SEQ ID NO: 672060 - DNA, 75 bp, synthetic construct
  source 1..75: mol_type = other DNA
cagtatattactgatgtcgtggttaatggtgagcgtacggggcgttccaatttaactattagcgaagaagatgaa

SEQ ID NO: 672061 - DNA, 75 bp, synthetic construct
  source 1..75: mol_type = other DNA
gcagcgccaccacggagcaggggctggacgcgggctttattaccgggaacggggtgctgctgatgaacgtgctgg

SEQ ID NO: 672062 - DNA, 75 bp, synthetic construct
  source 1..75: mol_type = other DNA
tccagcaacagtgtaggttatacccggaacggcggaacgacattcaatgccagtgtgtcagccacgccgacagac

SEQ ID NO: 672063 - DNA, 75 bp, synthetic construct
  source 1..75: mol_type = other DNA
cggacatctccggtatcgcctccaccccttcacgcattaccgtgaaacagaacgggtatacagtctattcaaaaa

SEQ ID NO: 672064 - DNA, 75 bp, synthetic construct
  source 1..75: mol_type = other DNA
gggcaatatatcgttgatgttgccttgaataaagagcgtatgggacgtattggcctgaacatcagcaaggaagac

SEQ ID NO: 672065 - DNA, 75 bp, synthetic construct
  source 1..75: mol_type = other DNA
gccgttcacccggaaaacgatccgaaaggtgaaggcatggcgattgctaaagcctgggcggcagcaaccggcggt

SEQ ID NO: 672066 - DNA, 75 bp, synthetic construct
  source 1..75: mol_type = other DNA
gactcaggccagtctttgggttccacgtaagcaacgtgcgccaaaaatccagcagccgcgttaccgacgtgcctg

SEQ ID NO: 672067 - DNA, 75 bp, synthetic construct
  source 1..75: mol_type = other DNA
tgaagcgtatggcaagcctgattgagtacacaacttcctgggctgtggatcagggtgtcagatttaccgacagga

SEQ ID NO: 672068 - DNA, 75 bp, synthetic construct
  source 1..75: mol_type = other DNA
tgaagcgcatggcaagcctgattgagtacacgacagcatgggctattggtcagggtgtcagatttaccgacagga

SEQ ID NO: 672069 - DNA, 75 bp, synthetic construct
  source 1..75: mol_type = other DNA
tatcgccagtatgggccgcttggcatgaacaaccagagtcgtggccgcactggtaaccgtctgttgccagcgtca

SEQ ID NO: 672070 - DNA, 75 bp, synthetic construct
  source 1..75: mol_type = other DNA
gattgaagacagcgaattcagtcgtcgggcgattggtaaatacatcgatgtctggcattacccggatggacataa

SEQ ID NO: 672071 - DNA, 75 bp, synthetic construct
  source 1..75: mol_type = other DNA
cgacgaaaaaatcccagcgttccctggatcaggacgatatgctcaatgccctggtgaaacttcagtcacgctctg

SEQ ID NO: 672072 - DNA, 75 bp, synthetic construct
  source 1..75: mol_type = other DNA
acgggcagatcataaccggtctaggagaccgggtaacccaacgttgctatcttatgggtggtgtagagaacgtga

SEQ ID NO: 672073 - DNA, 75 bp, synthetic construct
  source 1..75: mol_type = other DNA
tctgaaccacaagctgaagggtgtagaagcgatttatgacagatatgattatcttgaagagagatctgaggctct

SEQ ID NO: 672074 - DNA, 75 bp, synthetic construct
  source 1..75: mol_type = other DNA
ttaaacgattaaaacatcctcacatacctgaacgggtttaccggaaagatattgcccctactataggtagacttg

SEQ ID NO: 672075 - DNA, 75 bp, synthetic construct
  source 1..75: mol_type = other DNA
ttcaatggtgcggcaaatggttaaaaccggaacaatggaaggttttgttgatcagcggtcatgcagtggcaacaa

SEQ ID NO: 672076 - DNA, 75 bp, synthetic construct
  source 1..75: mol_type = other DNA
ttcagtggcgcgataaatggttaaaaccagaacaatggaaggttttgttgataagcggtcatgcagtggcaacga

SEQ ID NO: 672077 - DNA, 75 bp, synthetic construct
  source 1..75: mol_type = other DNA
ggaagggattagtgggtattctgctggcccattgcctgttatttgtaatcggcgtaggacgtaaatcgctaagga

SEQ ID NO: 672078 - DNA, 75 bp, synthetic construct
  source 1..75: mol_type = other DNA
acctcactttacaggatcgtctggtcaaagagctgcggttacagggcatttgttcaatggaggctgcaaatgact

SEQ ID NO: 672079 - DNA, 75 bp, synthetic construct
  source 1..75: mol_type = other DNA
aactcagcattgctgacaggcttattgctggcggtaagtattcccccctcgcgccatggtggatggtcgtgctgg

SEQ ID NO: 672080 - DNA, 75 bp, synthetic construct
  source 1..75: mol_type = other DNA
agcaacgtctccgctggcgtcaacaacaacgacgcagtgaactatgcgcagttgaagcaaagcgtgcaggaaacg

SEQ ID NO: 672081 - DNA, 75 bp, synthetic construct
  source 1..75: mol_type = other DNA
caagaccaacaccgatggcgtagatgctaacgcgcagggtaaagacagtgttgcgattggctctggctctattgc

SEQ ID NO: 672082 - DNA, 75 bp, synthetic construct
  source 1..75: mol_type = other DNA
cgaactgccgctgattgctaacaccatcgcccgtaagcgtctgtacgaaatgaacgtggttatctctgataccgc

SEQ ID NO: 672083 - DNA, 75 bp, synthetic construct
  source 1..75: mol_type = other DNA
gagcaggagtacttcgataaaggcgtactgatgatcgcgatggtaaaagcgggcgttgagctggcgtttgaaacc

SEQ ID NO: 672084 - DNA, 75 bp, synthetic construct
  source 1..75: mol_type = other DNA
ggacagcaacggacgttttctggtgttgccgaaggggatgaaagccgaaacgaactggacggaggacaacggcaa

SEQ ID NO: 672085 - DNA, 75 bp, synthetic construct
  source 1..75: mol_type = other DNA
ggtgcagagagcaaagctgctgaaaatgcgacggcagttggtactaacgcggaggcaaatggacttaatagtatc

SEQ ID NO: 672086 - DNA, 75 bp, synthetic construct
  source 1..75: mol_type = other DNA
gaaaatacattgatgataaagatgcgaaaaagcatgccgtcgtcaatggcgtccttatggttcatcgcggatggg

SEQ ID NO: 672087 - DNA, 75 bp, synthetic construct
  source 1..75: mol_type = other DNA
attttcaataatacccaagtgcaaattgccgtattaattgttcccacaaccaaagacgagacaattgaacaatat

SEQ ID NO: 672088 - DNA, 75 bp, synthetic construct
  source 1..75: mol_type = other DNA
gccaccagcaaaatcaccaacgtcaaagacggtgacctgacggctggcagcactgacgcggttaacggctctcag

SEQ ID NO: 672089 - DNA, 75 bp, synthetic construct
  source 1..75: mol_type = other DNA
caacgtcggtgacgcgctggaagcgatcgataccacgctggatgacgctctgttgtgggatgccacagccaatga

SEQ ID NO: 672090 - DNA, 75 bp, synthetic construct
  source 1..75: mol_type = other DNA
accgatcagcggatggttgagatggataacaaactgtccaaaaccgaaagcaagttgagcggtggtatcgcttct

SEQ ID NO: 672091 - DNA, 75 bp, synthetic construct
  source 1..75: mol_type = other DNA
gacaatgcttaatgcgctagcaggtaaacaaccgctggacaatacgctgactaatttgagtggaaaggatgtagc

SEQ ID NO: 672092 - DNA, 75 bp, synthetic construct
  source 1..75: mol_type = other DNA
aaggcaccccaccggcgcaactacctgttgctatcgattattccgccgcgcttgcactgcgccagatggctgtag

SEQ ID NO: 672093 - DNA, 75 bp, synthetic construct
  source 1..75: mol_type = other DNA
ctgctccattatgtgcccgatctccaccgtaagatgctgctggccaccctctggaacaccggcgcgcgcattaac

SEQ ID NO: 672094 - DNA, 75 bp, synthetic construct
  source 1..75: mol_type = other DNA
gggcaagatgtttgcctgcgaacatgagaacgttcagccggacattctgtgtctggcaaaagccctcggcggcgg

SEQ ID NO: 672095 - DNA, 75 bp, synthetic construct
  source 1..75: mol_type = other DNA
tctatctactccatcctggcgctgcgcgatcaggctgttccgccaaccatcaacctggataacctggatgaaggt

SEQ ID NO: 672096 - DNA, 75 bp, synthetic construct
  source 1..75: mol_type = other DNA
tcgcacttgatgttgctgcgcggcatcgagttcagtttcagatgcccgaagcggatgcggtagccatgctgaaag

SEQ ID NO: 672097 - DNA, 75 bp, synthetic construct
  source 1..75: mol_type = other DNA
cgcaccgagaaagcggccagaacagcaggtcgagcgccggccggtagtcaggctcatcgtctggttccgctttcc

SEQ ID NO: 672098 - DNA, 75 bp, synthetic construct
  source 1..75: mol_type = other DNA
gccattacccgggcctattacatgaaagccgcagaaacactgtttccgctgccggaagggttgaacctgcctctg

SEQ ID NO: 672099 - DNA, 75 bp, synthetic construct
  source 1..75: mol_type = other DNA
gcaccaaactgccgcgcggtattccgctgtgtatccatctgatgtccagccagctggttggcgagcggattgagt

SEQ ID NO: 672100 - DNA, 75 bp, synthetic construct
  source 1..75: mol_type = other DNA
acaccacgatgggctttatgctggaagccattcccattaatggtgcgaatgagtccattgtggaggctctcgatc

SEQ ID NO: 672101 - DNA, 75 bp, synthetic construct
  source 1..75: mol_type = other DNA
ttacgaaattcatcctgcaaaaatgaaacgcgttatcaacggtgttgatgttcttgcgggcgtcgctcgaatcct

SEQ ID NO: 672102 - DNA, 75 bp, synthetic construct
  source 1..75: mol_type = other DNA
caggcgcagcttgcgatgctcgccgaatgggtgaatgagctaccggacggcgaaccggtattggtggcgggtgat

SEQ ID NO: 672103 - DNA, 75 bp, synthetic construct
  source 1..75: mol_type = other DNA
cgcattgtgccgccgatgaccgggaaagcgattcatgtgatgtgcgtacatctgggcctgcgtgaggcgcaccgt

SEQ ID NO: 672104 - DNA, 75 bp, synthetic construct
  source 1..75: mol_type = other DNA
tatctacccgcaatgataacccgcaagcggcgagccgcccgtgggataaagagcgtgatggtttcgtactgggcg

SEQ ID NO: 672105 - DNA, 75 bp, synthetic construct
  source 1..75: mol_type = other DNA
cggcaggcgggcgtgatgaccgtgctggacggtgatattacgccgcaggatatcagcgaactggtggcgttaagc

SEQ ID NO: 672106 - DNA, 75 bp, synthetic construct
  source 1..75: mol_type = other DNA
cggcaggcgggcgtgatgaccgttctggacggggacattacgccgcaggatatcagtgagctggtggcattaagc

SEQ ID NO: 672107 - DNA, 75 bp, synthetic construct
  source 1..75: mol_type = other DNA
tcctggggcgttaacacccgttacaccaaacggtataaccaggcgaaatcttcgcaatccgccatcatggtggat

SEQ ID NO: 672108 - DNA, 75 bp, synthetic construct
  source 1..75: mol_type = other DNA
aaaacccttgctgcgctaacgcccggtaaactgaaatacagcttcttctgtaatagcggcaccgagtccgttgaa

SEQ ID NO: 672109 - DNA, 75 bp, synthetic construct
  source 1..75: mol_type = other DNA
aaagcgcggatctgggaagtgacggacagaacggtcaggacctggattggggaggcggttgccgccgctgctgct

SEQ ID NO: 672110 - DNA, 75 bp, synthetic construct
  source 1..75: mol_type = other DNA
cggcaggcgggcgtgatgaccgtgctggacggtgatattacgccgcaggatatcagcgagctggtggcattaagc

SEQ ID NO: 672111 - DNA, 75 bp, synthetic construct
  source 1..75: mol_type = other DNA
gcagatatcaccgcgatcaaacgtctttccgatatgggcttcaaagtgaccgtcaccggtggtttggcgctggaa

SEQ ID NO: 672112 - DNA, 75 bp, synthetic construct
  source 1..75: mol_type = other DNA
cgattcatgtctttatcgctggtcgtagcatccgtgatgccgcgtctccggttgaagctgcgcgtcagttcaaac

SEQ ID NO: 672113 - DNA, 75 bp, synthetic construct
  source 1..75: mol_type = other DNA
gggacaggagtttatcgactgcctgggaggttttggaattttcaacgtggggcaccgtaatccagttgtggtttc

SEQ ID NO: 672114 - DNA, 75 bp, synthetic construct
  source 1..75: mol_type = other DNA
caacagcctgctggcagagctggaatcctggggcgttaacacccgttacaccaaacggtataaccaggcgaaatc

SEQ ID NO: 672115 - DNA, 75 bp, synthetic construct
  source 1..75: mol_type = other DNA
ggcaccgccatatccgttcgtacagctggccacgctcaaacaacggactgaaaaagcgaccagaacggcaggccg

SEQ ID NO: 672116 - DNA, 75 bp, synthetic construct
  source 1..75: mol_type = other DNA
tggatgtggctgcacggcaccgggtgcagttttcgatgcctgagtccgatgcggtcacaatgctgaaaaacagac

SEQ ID NO: 672117 - DNA, 75 bp, synthetic construct
  source 1..75: mol_type = other DNA
gtgtgttggcggcctgcaaggattgtaagacccgttaagggttatgagtcaggaaaaaaagcgacagaggaatct

SEQ ID NO: 672118 - DNA, 75 bp, synthetic construct
  source 1..75: mol_type = other DNA
gggcgccagctcaggcggctaaacagcaagcggctccggcagcaggcccttgcatcagcggctggcgtgaaagaa

SEQ ID NO: 672119 - DNA, 75 bp, synthetic construct
  source 1..75: mol_type = other DNA
gcgcgccagctcaggcggctaaacaggaagcggctccggcagcaggcccttgcatcagcggctggcgtgaaagaa

SEQ ID NO: 672120 - DNA, 75 bp, synthetic construct
  source 1..75: mol_type = other DNA
gtgcgccagctcaggcggctaaacaggaagcggctccggcagcaggcccctgcatcagcggctggcgtgaaagaa

SEQ ID NO: 672121 - DNA, 75 bp, synthetic construct
  source 1..75: mol_type = other DNA
ggggcgctttctggcggtaaaacgacgcatcaggaaacgttacaaaccagtcccgatgccattcttaactgcatg

SEQ ID NO: 672122 - DNA, 75 bp, synthetic construct
  source 1..75: mol_type = other DNA
gctggcaggcaatttgcgacgcagcgcggcagattggtatatcagaagagacgttgcaggctttctgccagcaat

SEQ ID NO: 672123 - DNA, 75 bp, synthetic construct
  source 1..75: mol_type = other DNA
ggttttccctcgtaaagataattttccgctgttgctcgattacgccaccagcgccattgcatttggcaaaacccg

SEQ ID NO: 672124 - DNA, 75 bp, synthetic construct
  source 1..75: mol_type = other DNA
gcgttcacagaaaccggatgttaacgctaaagagggcggcaacgtctctgcaggcgctattggtttgctcggcgg

SEQ ID NO: 672125 - DNA, 75 bp, synthetic construct
  source 1..75: mol_type = other DNA
acagatatatcagcaagctggacgcttggtgcgattgctctacagttgcatatgagtgagagcttgttaaagaaa

SEQ ID NO: 672126 - DNA, 75 bp, synthetic construct
  source 1..75: mol_type = other DNA
aaagagcgagttgggggagattcctgaagattggaattgtattaatcttggtgagctaggtaattgcattattgg

SEQ ID NO: 672127 - DNA, 75 bp, synthetic construct
  source 1..75: mol_type = other DNA
gtgcgccagctcaggcggctaaacagcaagcggctccggcagcaggcccgtgcatcagcggctggcgtgaaagaa

SEQ ID NO: 672128 - DNA, 75 bp, synthetic construct
  source 1..75: mol_type = other DNA
gagcgccagctcaggcggctaaacagtaagcggctccggcagcaggcccatgcatcagcggctggcgtgaaagaa

SEQ ID NO: 672129 - DNA, 75 bp, synthetic construct
  source 1..75: mol_type = other DNA
ggccatcgcgaaggctggtgcctgtaccacctcggctgtaaagggccggaaacttacggtaactgctccacactg

SEQ ID NO: 672130 - DNA, 75 bp, synthetic construct
  source 1..75: mol_type = other DNA
gtgacgctaatttcttgtatatcaatgggcatcgcctcgcagatcccgatagtttccgtgtgctggcacaaaagt

SEQ ID NO: 672131 - DNA, 75 bp, synthetic construct
  source 1..75: mol_type = other DNA
gtcccgggtgttgcgggggcatatatgctggggcttccgttttctctgggggccttcttttccggcggactggct

SEQ ID NO: 672132 - DNA, 75 bp, synthetic construct
  source 1..75: mol_type = other DNA
atgggggcgcacgaagtccatccactgcatgtgaagaactggcccgatacttcgcactacgagtttcttgccgac

SEQ ID NO: 672133 - DNA, 75 bp, synthetic construct
  source 1..75: mol_type = other DNA
cccccgcctggtctgtattgcggtgaccataggcagtgtcaccagctttctgggtgcgtgggcaagttactacct

SEQ ID NO: 672134 - DNA, 75 bp, synthetic construct
  source 1..75: mol_type = other DNA
caggaagctcgtgaccgcaagcgtcagaaaaaacgccgtggccatgcgcctggtagccgtgcaaatggcggtaac

SEQ ID NO: 672135 - DNA, 75 bp, synthetic construct
  source 1..75: mol_type = other DNA
gcaaaggtcatgcaaaagcgcgtcgcaaaacgcgcgaagagctgaatcaggaagctcgtgaccgcaagcgtcaga

SEQ ID NO: 672136 - DNA, 75 bp, synthetic construct
  source 1..75: mol_type = other DNA
aaacggatgagcgtctggatgcgctgctggaacgtctggaagcaggcgaaaccctgagtgccgaagagcaatcct

SEQ ID NO: 672137 - DNA, 75 bp, synthetic construct
  source 1..75: mol_type = other DNA
ccgacaaattaagaaatttagaaactccttttcttgatgatcgctatttctttatgaccatcaatcagtgtgacg

SEQ ID NO: 672138 - DNA, 75 bp, synthetic construct
  source 1..75: mol_type = other DNA
caactaaacagattgcatttgaaggatatacagacacagataacttctccgattctaaatttatttcttcattta

SEQ ID NO: 672139 - DNA, 75 bp, synthetic construct
  source 1..75: mol_type = other DNA
tgcaaaactcatattgaagaatgatttacaaataggaaaaatatccaaactggttgggatatcaagcgtgtcata

SEQ ID NO: 672140 - DNA, 75 bp, synthetic construct
  source 1..75: mol_type = other DNA
catcattggtttgatcttttcatcctttttcgcgcttggattatttatcatctcgctgaatcctgtttcggtaaa

SEQ ID NO: 672141 - DNA, 75 bp, synthetic construct
  source 1..75: mol_type = other DNA
atatcgaagccatgcgcacagcgcttagcgagtgcaaaaaaaccggcgacgatgtagccgcggtgatcctcgagc

SEQ ID NO: 672142 - DNA, 75 bp, synthetic construct
  source 1..75: mol_type = other DNA
gcgatagcatcaacgggatggctttccactggtataccggtgaccatttttcgcaaattcagtatctggcccgga

SEQ ID NO: 672143 - DNA, 75 bp, synthetic construct
  source 1..75: mol_type = other DNA
cgaaatcgctgtttaagatgatcaaaaacaccttcgaaaccacgccagattacgttctctctgcttataaagata

SEQ ID NO: 672144 - DNA, 75 bp, synthetic construct
  source 1..75: mol_type = other DNA
cagatatcgccactctgggtgacgatcgtctggctgcattgtttagcgaagaactgggtgcggtgattcaggtgc

SEQ ID NO: 672145 - DNA, 75 bp, synthetic construct
  source 1..75: mol_type = other DNA
ggtggcgctgcgctacgtcgataacttcggcaaagtcaccgaaacctacccggctaacccgaacggttccccgaa

SEQ ID NO: 672146 - DNA, 75 bp, synthetic construct
  source 1..75: mol_type = other DNA
cggcaacattcgtgccgatcacgtacaaaaaggcgaaatcaacgttggggcgaagttggtcgttctcggcggccc

SEQ ID NO: 672147 - DNA, 75 bp, synthetic construct
  source 1..75: mol_type = other DNA
ccgaacgacatagagctttatatgttcgcccaggcgaactctgagcactgccgtcataagatttttaacgccgac

SEQ ID NO: 672148 - DNA, 75 bp, synthetic construct
  source 1..75: mol_type = other DNA
gccaggctcccggttcacaacatttacgccgagtatgtccattttgctgacctcaatgcgccgttaaacgatgat

SEQ ID NO: 672149 - DNA, 75 bp, synthetic construct
  source 1..75: mol_type = other DNA
gatctcgccgtcagggggctggcattcgggccaggggcattgcgtgcgacgctggcatcttatgcgcagtgtccg

SEQ ID NO: 672150 - DNA, 75 bp, synthetic construct
  source 1..75: mol_type = other DNA
gagaaaaaacagcttccgcacctgctggcgaccaccaatatgctgctgcacggcattgaagtaccggtacaaatt

SEQ ID NO: 672151 - DNA, 75 bp, synthetic construct
  source 1..75: mol_type = other DNA
gagaaaaaacagcttccgcacctgctggcgaccaccaatatgctgctacacggcattgaagtgccagtgcaaatt

SEQ ID NO: 672152 - DNA, 75 bp, synthetic construct
  source 1..75: mol_type = other DNA
gatctcgccgtcagggggctggcattcgggccgggggcattacgtgcgacgctggcatcttatgcgcagtctccg

SEQ ID NO: 672153 - DNA, 75 bp, synthetic construct
  source 1..75: mol_type = other DNA
cggcgactggaacggaagaaccggaaaaacagccagcagcaggtaaccggagatgatggcagtgataagcgacag

SEQ ID NO: 672154 - DNA, 75 bp, synthetic construct
  source 1..75: mol_type = other DNA
ataaagcccctgaaaactggcgtgatccgtgatgtgcttaaggacgctaaggaacgggaattgccgattggtcac

SEQ ID NO: 672155 - DNA, 75 bp, synthetic construct
  source 1..75: mol_type = other DNA
ggcaatgaacatcggtcttggcggcggagcagcgtcttctatggcttccggtcagtctgatgccgacctcgattt

SEQ ID NO: 672156 - DNA, 75 bp, synthetic construct
  source 1..75: mol_type = other DNA
gtgatcaacaagctgaacgaaattgactttaccagcgccagcgaacgccatctgtttggtgatatttacgaacag

SEQ ID NO: 672157 - DNA, 75 bp, synthetic construct
  source 1..75: mol_type = other DNA
gtttctccgtatccaacctgcgaattcctggcttcgaacagccgtgggaagaagatttcggtaagcctgagcgca

SEQ ID NO: 672158 - DNA, 75 bp, synthetic construct
  source 1..75: mol_type = other DNA
aggcgaaatcaaacgacgccgatccgggcctgaatgtgaaactgtcgtttgatatcaacgaagatgtggcagcac

SEQ ID NO: 672159 - DNA, 75 bp, synthetic construct
  source 1..75: mol_type = other DNA
gaaagccattgtcgctggcggcgcacggtatggactgaacgggcaaccttgcggtgaagtcacggaagaagataa

SEQ ID NO: 672160 - DNA, 75 bp, synthetic construct
  source 1..75: mol_type = other DNA
cgaggtgacatcacaggaacaacaggacgcagaaacgcggctgatgatgctgaatgagaagcgtaaacgccggac

SEQ ID NO: 672161 - DNA, 75 bp, synthetic construct
  source 1..75: mol_type = other DNA
cagggggctggcattcgggccaggggcattacgtgcgacgctggcatcttatgcgcagtgtccgcgctattaccg

SEQ ID NO: 672162 - DNA, 75 bp, synthetic construct
  source 1..75: mol_type = other DNA
actgacacagcacggccttgctgattgcatccattatatcgggcaggcggtttccggcgatcgttttgtgattac

SEQ ID NO: 672163 - DNA, 75 bp, synthetic construct
  source 1..75: mol_type = other DNA
atgacgcccgtttcccccccccccttgggtacaccgaaagcttagaagacgagagacttatgatggaaattctgc

SEQ ID NO: 672164 - DNA, 75 bp, synthetic construct
  source 1..75: mol_type = other DNA
tgatcgaccgctgctggcagttgggcgatgcaaacccaatcctgtttatccatgacgttggtgcaggtggtcttt

SEQ ID NO: 672165 - DNA, 75 bp, synthetic construct
  source 1..75: mol_type = other DNA
tatgtaacggttgccagatgatgtctaatctgcgtgaactgatcccaggtagtgagttgtggccacgttttgtgc

SEQ ID NO: 672166 - DNA, 75 bp, synthetic construct
  source 1..75: mol_type = other DNA
cgaaatgacgtcgccgctgtcgctggtgatttctgcatttgcccgcgtggaagatgtacgtcacaccatcacgcc

SEQ ID NO: 672167 - DNA, 75 bp, synthetic construct
  source 1..75: mol_type = other DNA
aactcgcatgttgaaatggcggcagctttccaccgtgcgggcttcgatgctatcgacgtgcatatgagcgacctg

SEQ ID NO: 672168 - DNA, 75 bp, synthetic construct
  source 1..75: mol_type = other DNA
cattacaagatattatgcgcaaagatgccggtgtggatggcgatgcgcagcgtctcggtcagctctcctggctgc

SEQ ID NO: 672169 - DNA, 75 bp, synthetic construct
  source 1..75: mol_type = other DNA
gaggtctacacgaaggtttttgcgctggatgtggctgcacggcaccgggtgcagttttcgatgtctgagtctgat

SEQ ID NO: 672170 - DNA, 75 bp, synthetic construct
  source 1..75: mol_type = other DNA
agctcaacggaggtctacacgaaggtgtttgcactggatgtggctgcacggcaccgggtgcagttttcgatgcct

SEQ ID NO: 672171 - DNA, 75 bp, synthetic construct
  source 1..75: mol_type = other DNA
ttaaattgtcttatcccttcaccactgctgcaggcaccagaattgagcaggttgaactgaaacgcctgacggtaa

SEQ ID NO: 672172 - DNA, 75 bp, synthetic construct
  source 1..75: mol_type = other DNA
tcgatgtcgcagcgcgccatcgtgtgcagttcgccatgccggaagctgaagctgttgcgttgataaaaaagttaa

SEQ ID NO: 672173 - DNA, 75 bp, synthetic construct
  source 1..75: mol_type = other DNA
tgatggtggccacgctgaaaatacctcttgaacgacgtaacaagcgaagcggcagaaccgagaaggcgcgtatct

SEQ ID NO: 672174 - DNA, 75 bp, synthetic construct
  source 1..75: mol_type = other DNA
cttcctgttgccattgattatccggcagcgctggcactccgccagatgtcgatggttcatgatgaactgccgaaa

SEQ ID NO: 672175 - DNA, 75 bp, synthetic construct
  source 1..75: mol_type = other DNA
gaagcactggcgctgacgcggggggatttttcgctcgcgcctccgtatccgtttgtgcagcttgcgaccctgaaa

SEQ ID NO: 672176 - DNA, 75 bp, synthetic construct
  source 1..75: mol_type = other DNA
ggatctgggaagtgacggacagaacggtcaggacctggattggggaggcggttgccgccgctgccgctgatggag

SEQ ID NO: 672177 - DNA, 75 bp, synthetic construct
  source 1..75: mol_type = other DNA
ggatggaaggtgaattaaccaacactatgactcaatgggccgataaaattggtcacctgcaaattgccgataatc

SEQ ID NO: 672178 - DNA, 75 bp, synthetic construct
  source 1..75: mol_type = other DNA
ggatttttcgctcgcgcctccgtatccgtttgtgcagctggccactctgaagcagcggacagaaaaagccgccag

SEQ ID NO: 672179 - DNA, 75 bp, synthetic construct
  source 1..75: mol_type = other DNA
gcagactcaccggctggttccgctctccgactcctggtacgtcagccagctgcagacgatggtggccacactgaa

SEQ ID NO: 672180 - DNA, 75 bp, synthetic construct
  source 1..75: mol_type = other DNA
atttttcgctcacgcctccgtatccgtttgtgcagcttgcgaccctgaaacaacggaccgaaaaagccgccagga

SEQ ID NO: 672181 - DNA, 75 bp, synthetic construct
  source 1..75: mol_type = other DNA
tatgaatacgaaggattcggtatcggtgcaacttatgcgaaatctgatcgtaccgacgctcaagttaatgcaggg

SEQ ID NO: 672182 - DNA, 75 bp, synthetic construct
  source 1..75: mol_type = other DNA
tctctgactcctggtacgtcagccagctgcagacgatggtggcaacactgaaaataccatggagcggcgtaaccg

SEQ ID NO: 672183 - DNA, 75 bp, synthetic construct
  source 1..75: mol_type = other DNA
tgtttgcactggatgtggctgcacggcaccgggtgcagttttcgatgcctgagtccgatgcggtgtctatgctca

SEQ ID NO: 672184 - DNA, 75 bp, synthetic construct
  source 1..75: mol_type = other DNA
ccggtataccgctgaaggtcctgcagagtctgatggggcataagtccatcagctcaacggaggtctacacgaagg

SEQ ID NO: 672185 - DNA, 75 bp, synthetic construct
  source 1..75: mol_type = other DNA
gaggtgtacacgaaggtgtttgcgctcgatgtggcagcaaggcacagggtacagttcctgatgcccggtgacgat

SEQ ID NO: 672186 - DNA, 75 bp, synthetic construct
  source 1..75: mol_type = other DNA
gtctacacgaaggtgtttgcgctggatgtggctgcacggcaccgggtgcagttttcgatgcctgagtccgatgct

SEQ ID NO: 672187 - DNA, 75 bp, synthetic construct
  source 1..75: mol_type = other DNA
gctggcgccggaagtcagcgccctgctccactacgtgccggatcttcaccgcaagatgctgctggcgacgctctg

SEQ ID NO: 672188 - DNA, 75 bp, synthetic construct
  source 1..75: mol_type = other DNA
gaacggtcaggacctggattggggaggcggttgccgccgctgccgctgacggtgtgacgttctctgtcccggtca

SEQ ID NO: 672189 - DNA, 75 bp, synthetic construct
  source 1..75: mol_type = other DNA
agcagcggacagaaaaagcagccaggacggcaggaagaacgcctgctgggcagcagactcaccggctggttccgc

SEQ ID NO: 672190 - DNA, 75 bp, synthetic construct
  source 1..75: mol_type = other DNA
atgctgctggccacactgtggaacaccggtgcgcgcattaatgaagcactggcgctgacgcggggggatttttcg

SEQ ID NO: 672191 - DNA, 75 bp, synthetic construct
  source 1..75: mol_type = other DNA
gttgccgccgctgccgctgatggtgtgacgttctctgtcccggtcacgccacatacgttccgccattcctatgcg

SEQ ID NO: 672192 - DNA, 75 bp, synthetic construct
  source 1..75: mol_type = other DNA
acggtcaggacctggattggggaggcggttgccgccgcttcctgcaggtctgtgttaatgagatcaacagcagaa

SEQ ID NO: 672193 - DNA, 75 bp, synthetic construct
  source 1..75: mol_type = other DNA
gatttttcgctcacgcctccgtatccgtttgtgcagcttgcgcccctgaaacaacggaccgaaaaagcagccagg

SEQ ID NO: 672194 - DNA, 75 bp, synthetic construct
  source 1..75: mol_type = other DNA
aggcccaacgttaaccggttttaattctgcttacagaacgtcatcaaccagcgacacggtatcgatgaattacag

SEQ ID NO: 672195 - DNA, 75 bp, synthetic construct
  source 1..75: mol_type = other DNA
ggtgatggatggatgaaattacccaacggtaaaatcctgcaatatggtcgaggtgcggttacgccgacattatcg

SEQ ID NO: 672196 - DNA, 75 bp, synthetic construct
  source 1..75: mol_type = other DNA
tgatcgtaccgacactcaagtcaaattgggtaaacttctcccaggagtatttgcttccggcgaaaatgcagaagt

SEQ ID NO: 672197 - DNA, 75 bp, synthetic construct
  source 1..75: mol_type = other DNA
ctggtaaatgagaaacgccgggttgcgctgaatatgctctatatcgacccgcagaacagcagccagattattgcc

SEQ ID NO: 672198 - DNA, 75 bp, synthetic construct
  source 1..75: mol_type = other DNA
gggctggtcttgcgtactattccgggttgacaggttctacaggacgcggtgctgatggtgccgtatacatctact

SEQ ID NO: 672199 - DNA, 75 bp, synthetic construct
  source 1..75: mol_type = other DNA
tttcagcaccaccattaacaatgcgctggcactcaaagcgccgctgtcgagtccggcactcaccggaacgccaac

SEQ ID NO: 672200 - DNA, 75 bp, synthetic construct
  source 1..75: mol_type = other DNA
ccgccgtgacgctgaaaattgacccttcggtagtactggcgactcgtcagtatgttgatgaccagataatccagg

SEQ ID NO: 672201 - DNA, 75 bp, synthetic construct
  source 1..75: mol_type = other DNA
gtaacccgacagtgatcggcgcgatcatggttcagcgtggcgaagccgatgcaatgatctgcggtacggtgggcg

SEQ ID NO: 672202 - DNA, 75 bp, synthetic construct
  source 1..75: mol_type = other DNA
ttcaaaaggcgttatctatcagggccgtgagccaaacatggcggaaaccaaagccgcatatgcggtggtggatga

SEQ ID NO: 672203 - DNA, 75 bp, synthetic construct
  source 1..75: mol_type = other DNA
ctgcttccgcaatcacaaaaagcggctttcgtggtttttccagcgtagcgactgccgcaaatcctgtatcgggct

SEQ ID NO: 672204 - DNA, 75 bp, synthetic construct
  source 1..75: mol_type = other DNA
gcaggtaaacaaccgctggacaatacgctgactaatttgagtggaaaggatgtagcaggtcttctcacatacctt

SEQ ID NO: 672205 - DNA, 75 bp, synthetic construct
  source 1..75: mol_type = other DNA
tggcgggttattgtattcgtggaaggatgggagtggaacaacaaatgacagtaaacgaatggatagaaccaatca

SEQ ID NO: 672206 - DNA, 75 bp, synthetic construct
  source 1..75: mol_type = other DNA
cgctgaatatgctctatatcgacccgcagaacagcagccagattattgttgaacaggtgatccctgaaaacgagg

SEQ ID NO: 672207 - DNA, 75 bp, synthetic construct
  source 1..75: mol_type = other DNA
cgccaacaggctggctgaaatgtaacggtgcagtattttctgctgggaagtaccccaaactggcacaggcttacc

SEQ ID NO: 672208 - DNA, 75 bp, synthetic construct
  source 1..75: mol_type = other DNA
tcactttcatcaacgggttttcaaaaacttccttcaggtctgattattcagtggggtattgtcagtggagcatca

SEQ ID NO: 672209 - DNA, 75 bp, synthetic construct
  source 1..75: mol_type = other DNA
agcgcgtggtaaagggatgttgatggcgattgagtttgttgataacgaaatcggctataactttgccagcgagat

SEQ ID NO: 672210 - DNA, 75 bp, synthetic construct
  source 1..75: mol_type = other DNA
caaagctccaacgccagtggcggggaataataccacgcaacttgcgaccaccgcgtttgttcaggcggcactgac

SEQ ID NO: 672211 - DNA, 75 bp, synthetic construct
  source 1..75: mol_type = other DNA
tgtagctggtcttctcacataccttggtttgggagaaggctctgcattaccggttggggtgcctgttccgtggcc

SEQ ID NO: 672212 - DNA, 75 bp, synthetic construct
  source 1..75: mol_type = other DNA
actggtggcaatggaaattttgtgattcgtcaacctgacgggctaatcactcagatggttactgtaagtataagc

SEQ ID NO: 672213 - DNA, 75 bp, synthetic construct
  source 1..75: mol_type = other DNA
ctgcaggtaaaggggggggagccggaagaaattcaggtagtgaaggtggcacaacttatttcggttccctgataa

SEQ ID NO: 672214 - DNA, 75 bp, synthetic construct
  source 1..75: mol_type = other DNA
cggcggtggggttcctgaaacaacagaaaatcagcaggcaacagccggagctggattgagcggtgcatttattga

SEQ ID NO: 672215 - DNA, 75 bp, synthetic construct
  source 1..75: mol_type = other DNA
ccgattcagggcgaaggtggcgtaattctgccgccgccgggctatctcaccgccgtgcgtaagctgtgcgatgag

SEQ ID NO: 672216 - DNA, 75 bp, synthetic construct
  source 1..75: mol_type = other DNA
ggtggcgggtggtttaagttgccgagtggatatgttattcaggctttcgaggcgtcttttgattctaacgggcta

SEQ ID NO: 672217 - DNA, 75 bp, synthetic construct
  source 1..75: mol_type = other DNA
tcatattgcagtggtttggtgctgctacaactgattatgtgacaccagtaactgcgaatttccctattgcattcc

SEQ ID NO: 672218 - DNA, 75 bp, synthetic construct
  source 1..75: mol_type = other DNA
ttttattgccaccagcggcgcgttccacggtaaatcgcttggcgcactgtcagccacggcaaaatcgaccttccg

SEQ ID NO: 672219 - DNA, 75 bp, synthetic construct
  source 1..75: mol_type = other DNA
agtactggaccgaatacttccagatcatgaagcgtcgcggtgtcactcaggaacaggcgcagcgtgcgctgatca

SEQ ID NO: 672220 - DNA, 75 bp, synthetic construct
  source 1..75: mol_type = other DNA
tgtagctggtcttctcgcataccttggtttaggagaaggctcagcattgcctgttggcgtacctgttccgtggcc

SEQ ID NO: 672221 - DNA, 75 bp, synthetic construct
  source 1..75: mol_type = other DNA
cgctgactaatttgagtggaaaggatgtcgctggtcttctctcataccttggtttgggagaagcggcgaaaaggg

SEQ ID NO: 672222 - DNA, 75 bp, synthetic construct
  source 1..75: mol_type = other DNA
gctataagccgcaactggctgaaggcagcgggcgcacccagaccgtgcgtatggtgttgattaccagcagcacgg

SEQ ID NO: 672223 - DNA, 75 bp, synthetic construct
  source 1..75: mol_type = other DNA
caccgaaaattattcaatatgggaatcagtaggctcgtttaagggggcagtagtgcctttgaacccctcaacgaa

SEQ ID NO: 672224 - DNA, 75 bp, synthetic construct
  source 1..75: mol_type = other DNA
cgtgtgggatgacggacgtggtatcgatagcggacgttcattgctcagtccgcagggtgatgcaatccgaaatat

SEQ ID NO: 672225 - DNA, 75 bp, synthetic construct
  source 1..75: mol_type = other DNA
aataataccacgcaggttgcgaccactgcatttgttcaggcggcactgacggctcttattaatggtgcgccagcc

SEQ ID NO: 672226 - DNA, 75 bp, synthetic construct
  source 1..75: mol_type = other DNA
tgatactggtcgcgctttgcttaattggcagccacacacaattttggaccatgcacactatatggaattatggac

SEQ ID NO: 672227 - DNA, 75 bp, synthetic construct
  source 1..75: mol_type = other DNA
gacggactctcctgtctgctcaggacgggagcattgaggcacacggccatgattacaatggggtcatctatactt

SEQ ID NO: 672228 - DNA, 75 bp, synthetic construct
  source 1..75: mol_type = other DNA
cggaagtggtggtgatggattgatgtctgctgttttcaaagatgacaatagtgcaatgtcatactatccagcagg

SEQ ID NO: 672229 - DNA, 75 bp, synthetic construct
  source 1..75: mol_type = other DNA
aggcaccattgattcagcaactttcaggttacagactggtactggtgcttttgccttagcatctcaagctacgcg

SEQ ID NO: 672230 - DNA, 75 bp, synthetic construct
  source 1..75: mol_type = other DNA
cacgattgtgactgatgcaacgattaatttttattttgatgaaacatgggtaaacagtggtactgatattatcaa

SEQ ID NO: 672231 - DNA, 75 bp, synthetic construct
  source 1..75: mol_type = other DNA
cattaaccggttttaattccgcttacagaactgcatcaaccagttccacagtatcgatgaattacagttggtggg

SEQ ID NO: 672232 - DNA, 75 bp, synthetic construct
  source 1..75: mol_type = other DNA
gcaggtaaacaaccgctggacaatacgcttaccaatttgagtgggaaggatgttgccggtcttcttgcatacctt

SEQ ID NO: 672233 - DNA, 75 bp, synthetic construct
  source 1..75: mol_type = other DNA
aatggtgggttctgcacctgcggcactggatacactgaacgaactggcggcagcgctggggaatgacccgaactt

SEQ ID NO: 672234 - DNA, 75 bp, synthetic construct
  source 1..75: mol_type = other DNA
cctgtttgatgagtccggggcattgattgccgtgggaaactgcccggaaagctataagccgcaactggctgaagg

SEQ ID NO: 672235 - DNA, 75 bp, synthetic construct
  source 1..75: mol_type = other DNA
cagtgttatgtctgatgccgttcagtcagccccgtcgaatcctgccccgcaggttttgtctgtaaattttgaaca

SEQ ID NO: 672236 - DNA, 75 bp, synthetic construct
  source 1..75: mol_type = other DNA
aattctgccgccgctggcaaaagaagtgcgtccggatgccatcatctgtaccggccgttccgactacccgaacca

SEQ ID NO: 672237 - DNA, 75 bp, synthetic construct
  source 1..75: mol_type = other DNA
tggcggagatcaccttgatggcggcagaaactgttcgtcgttttggtattgagccgcgcgtggctctgttgtcgc

SEQ ID NO: 672238 - DNA, 75 bp, synthetic construct
  source 1..75: mol_type = other DNA
cgattgctgatttcgacgtctacatcgacaaactgaccgagttcgtttacaaaaccaacctgtttatgaagccga

SEQ ID NO: 672239 - DNA, 75 bp, synthetic construct
  source 1..75: mol_type = other DNA
gatgtcggacgtaccctactttcagggcaatcacacacaattatggatcatgcacacaatatggagttgtggacg

SEQ ID NO: 672240 - DNA, 75 bp, synthetic construct
  source 1..75: mol_type = other DNA
tggcaaccacacacaattttggaccatgcacactatatggaattatggacaggggacggactcgccgcaggaagt

SEQ ID NO: 672241 - DNA, 75 bp, synthetic construct
  source 1..75: mol_type = other DNA
cctgatttacgcggtgagtttattaggggctgggatgacgggcgtggtattgatgctgtacgtgccttgctaagt

SEQ ID NO: 672242 - DNA, 75 bp, synthetic construct
  source 1..75: mol_type = other DNA
cttttgtgaaatcggcgattgcagcaatggtggggtctgcacctgcggcactggatacattgaacgaactggcag

SEQ ID NO: 672243 - DNA, 75 bp, synthetic construct
  source 1..75: mol_type = other DNA
ggtttgggagaagcggcaaaacgggatgtgggaacaggggaaaatcagataccggatatggcttcttttgccagt

SEQ ID NO: 672244 - DNA, 75 bp, synthetic construct
  source 1..75: mol_type = other DNA
ccgcattcacagtatgcacccaaagaaagtccgacgtttaccgggacaccaaaagcgccaacgccagcggcaggg

SEQ ID NO: 672245 - DNA, 75 bp, synthetic construct
  source 1..75: mol_type = other DNA
ctacggcagcggctggcagaatcaacaagttgagttcgctcgcttccctggtcccatcgtgatgacctctaactg

SEQ ID NO: 672246 - DNA, 75 bp, synthetic construct
  source 1..75: mol_type = other DNA
catcatcgacccaaccgtaggcgcttatgacgatcgtatctggacccgcagcatcgttggctggccgggtgtgcg

SEQ ID NO: 672247 - DNA, 75 bp, synthetic construct
  source 1..75: mol_type = other DNA
ataaaatcatggcgtggctgggaacctggcctgccgatatgaacgcgcttcttgagtgttcaatggaaatcggcc

SEQ ID NO: 672248 - DNA, 75 bp, synthetic construct
  source 1..75: mol_type = other DNA
atctggcagcctgagttcacagataaaacactctccaggaaacccggggcggttcatcccgccatcagcaggctt

SEQ ID NO: 672249 - DNA, 75 bp, synthetic construct
  source 1..75: mol_type = other DNA
caactcatgtgatttttcttaaagttctctgcttgcgccagtccccccatataaacatcatcattcgctacttga

SEQ ID NO: 672250 - DNA, 75 bp, synthetic construct
  source 1..75: mol_type = other DNA
ccgatacgctgattgatctggtgagccgtgaaaaactgcgtcatatcttcctgcttggcggctgtgacggtgccc

SEQ ID NO: 672251 - DNA, 75 bp, synthetic construct
  source 1..75: mol_type = other DNA
tcatctggatggcgaagatttctctgcggtcatcgcccaggcgcaacaaatggcgggcttcccgtacagcgaaat

SEQ ID NO: 672252 - DNA, 75 bp, synthetic construct
  source 1..75: mol_type = other DNA
ggtaaaacggcggaaacttctgaccttcaggatttactcatcgcggcgctgcaagggctttctgcctgggcggta

SEQ ID NO: 672253 - DNA, 75 bp, synthetic construct
  source 1..75: mol_type = other DNA
cttttgtgaaatcagcaattgcggcaatggtgggttctgcccctgcggcattggatacactgaatgaactggcgg

SEQ ID NO: 672254 - DNA, 75 bp, synthetic construct
  source 1..75: mol_type = other DNA
aaagcacgtgaatacggcatcatcaaccacgacgtagacagcttcgcgccgcgtgcatttttctcaacgctgact

SEQ ID NO: 672255 - DNA, 75 bp, synthetic construct
  source 1..75: mol_type = other DNA
cggatacgctgattgatctggtgagccgcgaaaaactgcgtcatatcttcctgcttggcggctgtgacggcgcgc

SEQ ID NO: 672256 - DNA, 75 bp, synthetic construct
  source 1..75: mol_type = other DNA
tgtctacactcacggcgaaatgctgcctgcccacggctacccggagctgcgtaaattcaagcatctggtcggtaa

SEQ ID NO: 672257 - DNA, 75 bp, synthetic construct
  source 1..75: mol_type = other DNA
ctataaaacggtgctgggggctgctgccgcccatgttgactgcgaaaacccgttgagctgggtcaagttgaccca

SEQ ID NO: 672258 - DNA, 75 bp, synthetic construct
  source 1..75: mol_type = other DNA
ttgtttccccatgcattgaagaacaaaccgccatcgccaccatcctctccgatatggacaaggaaattcagaccc

SEQ ID NO: 672259 - DNA, 75 bp, synthetic construct
  source 1..75: mol_type = other DNA
atggggatatcgttgccctttctgctgctaatgttaaataaaggatatatagatttatctactgaatgttacttt

SEQ ID NO: 672260 - DNA, 75 bp, synthetic construct
  source 1..75: mol_type = other DNA
aaaggatatatagatttatctactgaatgttactttggttccgaagaactatataagcgctggatgacatccggt

SEQ ID NO: 672261 - DNA, 75 bp, synthetic construct
  source 1..75: mol_type = other DNA
atggggggcgtggtgggttgaatcttactattatcaggaaattacatcttgcatttccgccaaaagaagaacaaa

SEQ ID NO: 672262 - DNA, 75 bp, synthetic construct
  source 1..75: mol_type = other DNA
aaaagccgctgctatgcaacaactactcaccggtaaaacccgtttgccgcagtttgcgttgcgcaaagatggatc

SEQ ID NO: 672263 - DNA, 75 bp, synthetic construct
  source 1..75: mol_type = other DNA
tgcaacaacgtctggacaaaacccgtcagcttaaacaggggatgatgcaggagctgttaaccgggaaaacacgct

SEQ ID NO: 672264 - DNA, 75 bp, synthetic construct
  source 1..75: mol_type = other DNA
gttgccggcctgacgcttgacgacgttgatcgcatgtcagtacgtgaattgcgtcaggccctgcgcgaagcgcgc

SEQ ID NO: 672265 - DNA, 75 bp, synthetic construct
  source 1..75: mol_type = other DNA
gccggcctgacgcttgatgatgttgatcgcatgtcagtacgtgaacttcgccaggccctgcgtgaagcgcgcgaa

SEQ ID NO: 672266 - DNA, 75 bp, synthetic construct
  source 1..75: mol_type = other DNA
ctcaaccttcgggttgaaaactgccagctaaaaaacacctccagtgcaatgatgatagccactatgcaaagtgat

SEQ ID NO: 672267 - DNA, 75 bp, synthetic construct
  source 1..75: mol_type = other DNA
atgccgaaaatcagggcaacaagcgtaactggcaaactgcacttgagtatgttgctgcacatccggaactggacg

SEQ ID NO: 672268 - DNA, 75 bp, synthetic construct
  source 1..75: mol_type = other DNA
gcaaccgattgttgatagaacaacagctagccgacaagccctggaagctggactggttttacgaagtgcgtcatc

SEQ ID NO: 672269 - DNA, 75 bp, synthetic construct
  source 1..75: mol_type = other DNA
cctgtgtgaatactgcaccaaaaacatgatcgatacccccagagatttcatggccggtctggtctgccagattga

SEQ ID NO: 672270 - DNA, 75 bp, synthetic construct
  source 1..75: mol_type = other DNA
ctgcgcaacacgcggtgcatatgctggtcactgaactggctgtctttcgttttattgacggcaaaatgtggctca

SEQ ID NO: 672271 - DNA, 75 bp, synthetic construct
  source 1..75: mol_type = other DNA
gtgaatctgaacctgtatcactatcagaatatatggaaattgatccagtaatgattcattactccgatggctcat

SEQ ID NO: 672272 - DNA, 75 bp, synthetic construct
  source 1..75: mol_type = other DNA
gtttttaatgtatttaatggtattgaatatcctttagcaagaaatttaggcgcatcccaaattggagcaataagc

SEQ ID NO: 672273 - DNA, 75 bp, synthetic construct
  source 1..75: mol_type = other DNA
atatccaaaaagttcatcgatttaggatatttgccagagctaacagtcgttccacccaacattgcacttcctaat

SEQ ID NO: 672274 - DNA, 75 bp, synthetic construct
  source 1..75: mol_type = other DNA
aggtggagccaaaggaaatctcttcacttcaggagctgctgaacgcttccaaaaatctggagccgacttcgcctg

SEQ ID NO: 672275 - DNA, 75 bp, synthetic construct
  source 1..75: mol_type = other DNA
aaagaaggggttacaataaatatgtttccttcatgatctggtctttaaattataatcttagtgtaaaaaatgtat

SEQ ID NO: 672276 - DNA, 75 bp, synthetic construct
  source 1..75: mol_type = other DNA
gccgtatcgtctgggcaaacaatctgtcggctggcgtgaatccgaactggatgagtggattctccagcgtatacc

SEQ ID NO: 672277 - DNA, 75 bp, synthetic construct
  source 1..75: mol_type = other DNA
cgggaggatacattttgcagtggggatctgcgaatgcgggtaactcagcatcaacgggaatatctaatacgttcc

SEQ ID NO: 672278 - DNA, 75 bp, synthetic construct
  source 1..75: mol_type = other DNA
gcaatagaagtatttggaaccggtggatctaatgataatggactggctaaagttgtttacccaattgcactgcct

SEQ ID NO: 672279 - DNA, 75 bp, synthetic construct
  source 1..75: mol_type = other DNA
ctggcactaaaagcaccgctgtcgagtccggcactcaccggaaccccaacagcacctactgcggcacagtcggtc

SEQ ID NO: 672280 - DNA, 75 bp, synthetic construct
  source 1..75: mol_type = other DNA
aggccttaagttacttggcagtacggccttatttatcaagaaaacaacgatggcagacttagttgttattggttc

SEQ ID NO: 672281 - DNA, 75 bp, synthetic construct
  source 1..75: mol_type = other DNA
gtggttgggatgacgggcgcggtattgacgcgggcgcgaaattctgtctgctcagggggatgctattcgtaatat

SEQ ID NO: 672282 - DNA, 75 bp, synthetic construct
  source 1..75: mol_type = other DNA
ctggcacaaaaagcgccgctgtcgagtccggcactcaccggaactccaacagcacctactgcggcacagtcggtc

SEQ ID NO: 672283 - DNA, 75 bp, synthetic construct
  source 1..75: mol_type = other DNA
tgtcgctggtcttctcgcataccttggtttgggagaagcggcaaaacggaatgtgggcaacggggaaaaccaaat

SEQ ID NO: 672284 - DNA, 75 bp, synthetic construct
  source 1..75: mol_type = other DNA
ggtttgggagaaggttcggcattacccgttggtgtgcctgtcccgtggccttccgccactccgccaacaggctgg

SEQ ID NO: 672285 - DNA, 75 bp, synthetic construct
  source 1..75: mol_type = other DNA
gccctcagccactccgccaacaggctggctaaaatgcaacggagcagctttttctgctgaagaatacccggaact

SEQ ID NO: 672286 - DNA, 75 bp, synthetic construct
  source 1..75: mol_type = other DNA
gatctggtttttttcaaaactggctccgggcaaaatggtttacatgtgggtatttatgataccaacaaccaattt

SEQ ID NO: 672287 - DNA, 75 bp, synthetic construct
  source 1..75: mol_type = other DNA
gttaactcaactggtacttcaagaacgggttttacagcccgtatgtcaggcgccggtgggtttaatctttgctat

SEQ ID NO: 672288 - DNA, 75 bp, synthetic construct
  source 1..75: mol_type = other DNA
ggtttgggagaaggctcagcgttacccgttggtgtacctgttccgtggccttcagccactccgccaacaggctgg

SEQ ID NO: 672289 - DNA, 75 bp, synthetic construct
  source 1..75: mol_type = other DNA
tgccagcgccgccgcgctcggtgtgccgctaaaaattacctatatggcggtgggcgatggcggtggagtattgcc

SEQ ID NO: 672290 - DNA, 75 bp, synthetic construct
  source 1..75: mol_type = other DNA
tgactaatcagggcgcggcacgactggctaacgcgacaatgctcggcagtaagctgaatctgacgcaaatggccg

SEQ ID NO: 672291 - DNA, 75 bp, synthetic construct
  source 1..75: mol_type = other DNA
agttagggaccgctgcaacacgagatgttggagcagataatgcctcgaagttactggatttagacagcttcaggt

SEQ ID NO: 672292 - DNA, 75 bp, synthetic construct
  source 1..75: mol_type = other DNA
ggtaatacccacttcccgttctctgacctgaataatgtgcaaatcgctgatttggtcagtaaattcattcatgac

SEQ ID NO: 672293 - DNA, 75 bp, synthetic construct
  source 1..75: mol_type = other DNA
ttcgtggctgggatgacgggcgtggagctgacagtggtcggggattattaagctttcaaaaagccactctggttg

SEQ ID NO: 672294 - DNA, 75 bp, synthetic construct
  source 1..75: mol_type = other DNA
tgattattcagtgggggcaggcgagatttggtgggtctggtggtgaagatgccggatatcttaatgattttcctt

SEQ ID NO: 672295 - DNA, 75 bp, synthetic construct
  source 1..75: mol_type = other DNA
tatgtggatgacaaggtactggagctgaaggtgtacgtggttgacctgatggcaaaacatcttgctgcacaggac

SEQ ID NO: 672296 - DNA, 75 bp, synthetic construct
  source 1..75: mol_type = other DNA
gcaggatctcatctatgcaggcgatccggttcattatcatggcagtcgcgctaccgaagggacgctttcctggcg

SEQ ID NO: 672297 - DNA, 75 bp, synthetic construct
  source 1..75: mol_type = other DNA
gcagtggcggcgcgcgttacaagacgagacggggtacaacgagccagacgtattcgcggtgtgccgtttagtctc

SEQ ID NO: 672298 - DNA, 75 bp, synthetic construct
  source 1..75: mol_type = other DNA
atcgggaaggcgattgcctgaccatccccgacagcagcgccacgcagcgtgtttctgcttcgccagcgaccacgg

SEQ ID NO: 672299 - DNA, 75 bp, synthetic construct
  source 1..75: mol_type = other DNA
atatgatcctaactccggctatacgacgcttagcgatgatacctatcgcactattctgaaagcaaaaatcgctat

SEQ ID NO: 672300 - DNA, 75 bp, synthetic construct
  source 1..75: mol_type = other DNA
agatattcccctgctggctaaccattttcttcagcgatttgccgaacgcaatcgcaaggcggtaaaaggctttac

SEQ ID NO: 672301 - DNA, 75 bp, synthetic construct
  source 1..75: mol_type = other DNA
tttctgcagcgctttgctgaacgtaatcgcaaggcggtaaaaggctttacgccgcaggcgatggatctgctaatt

SEQ ID NO: 672302 - DNA, 75 bp, synthetic construct
  source 1..75: mol_type = other DNA
tcaaagtgtcagccggggagcgtcaggaagaccgggcgcatgcagccctgctgacgcttcaggcagaactccgga

SEQ ID NO: 672303 - DNA, 75 bp, synthetic construct
  source 1..75: mol_type = other DNA
atgagatggcccgcaagggggcacaggatgaactccggctgcagttgcgtgatggcggtatgttatcagggagcg

SEQ ID NO: 672304 - DNA, 75 bp, synthetic construct
  source 1..75: mol_type = other DNA
tttaacccacgagtatctgcatctggcctttgatggctatcccaccgggctggatgagacgtatatcgaaacgct

SEQ ID NO: 672305 - DNA, 75 bp, synthetic construct
  source 1..75: mol_type = other DNA
tggatctgtttgctcgctatccactgaaaaaagtgacacaggataagagcacgaaggcggtaccaccaggcgtgc

SEQ ID NO: 672306 - DNA, 75 bp, synthetic construct
  source 1..75: mol_type = other DNA
tcgcttccggcaattcttgacgcggcaacagcaggatccggactgcgaatgcagatagtcgataaccaggacatg

SEQ ID NO: 672307 - DNA, 75 bp, synthetic construct
  source 1..75: mol_type = other DNA
tggagcatatccggaaaccgctggcagcacgtcaggcactgacccggtcagaggcggtattgcagaaaagcctgg

SEQ ID NO: 672308 - DNA, 75 bp, synthetic construct
  source 1..75: mol_type = other DNA
gacgctggagacctgggcggataaaacagggaaggcgttcaaatcgatgtgggatgccattctggatattggtcg

SEQ ID NO: 672309 - DNA, 75 bp, synthetic construct
  source 1..75: mol_type = other DNA
atgtcgggtaactttgcagatctgacagccattcttaccctggattccacccgtttttctgaagaaatggggagg

SEQ ID NO: 672310 - DNA, 75 bp, synthetic construct
  source 1..75: mol_type = other DNA
accatgtggtgattaataacgacggcacgaatggtctgccaggtccacagatgctgaaggcagtgtatgacatgg

SEQ ID NO: 672311 - DNA, 75 bp, synthetic construct
  source 1..75: mol_type = other DNA
ggcggtgcggtttgaagagcagcagagcgcgaagcaggccgccatcagcgcaaaagcccgcggtctcactgaccg

SEQ ID NO: 672312 - DNA, 75 bp, synthetic construct
  source 1..75: mol_type = other DNA
aaacacagcggtgcgaatgggaaaatcagccagcagcgtcgcgatttatggaaagcggaaaatcagtatgcggtc

SEQ ID NO: 672313 - DNA, 75 bp, synthetic construct
  source 1..75: mol_type = other DNA
aacctgtatcgtctgatgcgcgggtatgcggaaggtggttatgtgggcggtgccggaagtccggcgcagatgcgg

SEQ ID NO: 672314 - DNA, 75 bp, synthetic construct
  source 1..75: mol_type = other DNA
gacccgtcgcctgaaagaaaacatggggacactggagacctgggcggataaaacagggaaggcattcaaatcgat

SEQ ID NO: 672315 - DNA, 75 bp, synthetic construct
  source 1..75: mol_type = other DNA
ggatatgctcgccagtgcgcagaaggcatttgatgaggcggataaaaaatggcagtggtaccagagccggagcca

SEQ ID NO: 672316 - DNA, 75 bp, synthetic construct
  source 1..75: mol_type = other DNA
acggctgaagtataccggagaggcgcagaaggcgtatgagcgtctgctgacgccgctggagaaatatactaaccg

SEQ ID NO: 672317 - DNA, 75 bp, synthetic construct
  source 1..75: mol_type = other DNA
gctcgccagtgcgcagaaggcatttgatgaggcggataaaaaatggcagtggtaccagagccggagccagcgccg

SEQ ID NO: 672318 - DNA, 75 bp, synthetic construct
  source 1..75: mol_type = other DNA
ggtccggctggagcgagtggaaagagagtgccacggacagtatgtcgcaggttaaaagtgctgccacgcagacct

SEQ ID NO: 672319 - DNA, 75 bp, synthetic construct
  source 1..75: mol_type = other DNA
ccggaggatttacggggacgggcggcaaatatgagcctgcggggattgttcatcgcggggagtttgttttcacga

SEQ ID NO: 672320 - DNA, 75 bp, synthetic construct
  source 1..75: mol_type = other DNA
ggtgataatccggatgcgctggcgaaggccacatctgcactgaagaacacctggtctgcggaggaccagcttcgt

SEQ ID NO: 672321 - DNA, 75 bp, synthetic construct
  source 1..75: mol_type = other DNA
attacaacacgctgatggcggcggcgaaaaaggattatgaatcgacgctgaaaaagccgaagtcgtcaggagtca

SEQ ID NO: 672322 - DNA, 75 bp, synthetic construct
  source 1..75: mol_type = other DNA
ggctgcgcggtttgagcagcagggcgcgaagcaggcggcaatcagtgcccaggcgcggggcctcaccgaccgtca

SEQ ID NO: 672323 - DNA, 75 bp, synthetic construct
  source 1..75: mol_type = other DNA
cagccatcggtgcgtgaagtgcgttttggtgacgggtattcgcagcgtatggcggcggggctgaatgctgacctg

SEQ ID NO: 672324 - DNA, 75 bp, synthetic construct
  source 1..75: mol_type = other DNA
tgcagaaaagcctggatataacggaagaggcagatgcgtattttcatgaaaggagatcactcaataacttccatc

SEQ ID NO: 672325 - DNA, 75 bp, synthetic construct
  source 1..75: mol_type = other DNA
gagtgagtcactggcagccctggtgaatgccggtgtgcgtggtggtgaacagtttgataccatcaaccagagtgt

SEQ ID NO: 672326 - DNA, 75 bp, synthetic construct
  source 1..75: mol_type = other DNA
tatgacatggcccgcaagggggcgcaggatgagattcaggcgcagatgcgtgatggcggcgtattttccggaggc

SEQ ID NO: 672327 - DNA, 75 bp, synthetic construct
  source 1..75: mol_type = other DNA
ccgtttcgatgagcagatgagccgggtaaggcgtcatttttcaggactggataccgacgccagaaaaaccgccgg

SEQ ID NO: 672328 - DNA, 75 bp, synthetic construct
  source 1..75: mol_type = other DNA
gcagggctgacgtttaaccaggcgagagagtcactggcagccctggtgaatgccggtgtgcgtggtggtgaacag

SEQ ID NO: 672329 - DNA, 75 bp, synthetic construct
  source 1..75: mol_type = other DNA
ctggggtgagtgggtggaaagtgcgacggacagtttttcgcaggttaaaagtgctgcaacgcagacctttgatgg

SEQ ID NO: 672330 - DNA, 75 bp, synthetic construct
  source 1..75: mol_type = other DNA
aacgctggagacctgggcggataaggtcggcagtgcgtttaaatccatgtgggatgcagtgctggatatcgggcg

SEQ ID NO: 672331 - DNA, 75 bp, synthetic construct
  source 1..75: mol_type = other DNA
gcagcgccttcgtgacgtgtacggtgataatccggatgcgctggcgaaggccacatctgcactgaagaacacctg

SEQ ID NO: 672332 - DNA, 75 bp, synthetic construct
  source 1..75: mol_type = other DNA
aactggcgtggtttcacccgttccgtgctctccatgctgacagagattttgcttaaacaggccatggtgggaatt

SEQ ID NO: 672333 - DNA, 75 bp, synthetic construct
  source 1..75: mol_type = other DNA
ttgaacagcagcagagcgcgaagcaggcggcaatcagcgcaaaagcccgcggcctcactgaccgtcaggcgcagc

SEQ ID NO: 672334 - DNA, 75 bp, synthetic construct
  source 1..75: mol_type = other DNA
gacggagacaggctgggtaaggcgtatcagcaggtgattaacaaatctgtcaacgatggtatcgccagggcaatc

SEQ ID NO: 672335 - DNA, 75 bp, synthetic construct
  source 1..75: mol_type = other DNA
ccgtgccaccgatacggccagtgcccagacgctggagctacagacacagctgcgcaccctgcaggagcataagag

SEQ ID NO: 672336 - DNA, 75 bp, synthetic construct
  source 1..75: mol_type = other DNA
atgcatcgcgcgaagcggctgcggaatcggatcgccagaagtatgctgcgcaggcacaggcaaactatgccaaaa

SEQ ID NO: 672337 - DNA, 75 bp, synthetic construct
  source 1..75: mol_type = other DNA
tgacatggcccgcaagggggcgcaggatgagctccggctgcagttgcgtgatggcggtatgttatcagggagcgg

SEQ ID NO: 672338 - DNA, 75 bp, synthetic construct
  source 1..75: mol_type = other DNA
gggcagatcagcgattcattcggtggaccgctcagcctgcttaccctggctgaaggaggaacttctcgggatcag

SEQ ID NO: 672339 - DNA, 75 bp, synthetic construct
  source 1..75: mol_type = other DNA
cagtttgatgccatcaaccagagtgtcgcgcgttttgcgtctgcatccggtgtggaggtggataaagtcgctgaa

SEQ ID NO: 672340 - DNA, 75 bp, synthetic construct
  source 1..75: mol_type = other DNA
actggcggggattcacccgttcggtgctgtccatgatgacagaaatcctgcttaaacaggccatggtgggcattg

SEQ ID NO: 672341 - DNA, 75 bp, synthetic construct
  source 1..75: mol_type = other DNA
gcagttcaggcatatctgccgtactggcggcgtgtggcgccagcctggttggggtgttgatgctgcgctttttca

SEQ ID NO: 672342 - DNA, 75 bp, synthetic construct
  source 1..75: mol_type = other DNA
ttgaatcgctggtgtgggactggccgattgccatctatctgtttttagtgggaatttctgcggggttggtgacgc

SEQ ID NO: 672343 - DNA, 75 bp, synthetic construct
  source 1..75: mol_type = other DNA
aaggactatgaagcgacgctgaaaaagccgaagcagtccggcgtgaaagtgtctgcgggcgatcgtcaggaagac

SEQ ID NO: 672344 - DNA, 75 bp, synthetic construct
  source 1..75: mol_type = other DNA
atgtcccagccggttggtgatcttgttattgacctgagtctggatgcggtccgtttcgatgagcagataagccgg

SEQ ID NO: 672345 - DNA, 75 bp, synthetic construct
  source 1..75: mol_type = other DNA
ccgggcgcatgcagccctgctggcgcttgaaaccgagctcaggacgctggaaaaacacagcggtgtgaatgagaa

SEQ ID NO: 672346 - DNA, 75 bp, synthetic construct
  source 1..75: mol_type = other DNA
ctgccaggtccacagatgatgaaggcggtgtatgacatggcccgcaagggtgcccgtgatgaaatccaggcacag

SEQ ID NO: 672347 - DNA, 75 bp, synthetic construct
  source 1..75: mol_type = other DNA
tgagatggcccgcaagggggcacaggatgaactccggctgcagttgcgtgatggcggtatgttatcagggagcgg

SEQ ID NO: 672348 - DNA, 75 bp, synthetic construct
  source 1..75: mol_type = other DNA
gatgaaagcggtgtatgagatggcccgcaagggggcacaggatgaactccggctgcagttgcgtgatggcggtat

SEQ ID NO: 672349 - DNA, 75 bp, synthetic construct
  source 1..75: mol_type = other DNA
atggtctgccaggtccacagatgatgaaggcagtgtatgacatggcccgcaagggtgcccgtgatgaaatccagg

SEQ ID NO: 672350 - DNA, 75 bp, synthetic construct
  source 1..75: mol_type = other DNA
aattttaatcagaacaatcacgtggtgattcagaacgacggcaccaacggacaggcggggccgcagctgatgaag

SEQ ID NO: 672351 - DNA, 75 bp, synthetic construct
  source 1..75: mol_type = other DNA
ccacacgtcacccttctgcggaatctcgccgctatctctacaaagtgaacatggcacagaaatcttatcgccgcc

SEQ ID NO: 672352 - DNA, 75 bp, synthetic construct
  source 1..75: mol_type = other DNA
gaaacggctgaatgagctggcacagcaggcggcgcggtttgaacagcagcagagtgcgaagcaggcggcaatcag

SEQ ID NO: 672353 - DNA, 75 bp, synthetic construct
  source 1..75: mol_type = other DNA
tggcaaatcaggctgtgcggtttgaacagcagcagagtgcgaagcaggctgcaatcagcgcaaaagcccgggggc

SEQ ID NO: 672354 - DNA, 75 bp, synthetic construct
  source 1..75: mol_type = other DNA
cgaaaggctttgatgagcagacccgtcgcctgaaagaaaacatggggacgctggagacctgggcggataaaacag

SEQ ID NO: 672355 - DNA, 75 bp, synthetic construct
  source 1..75: mol_type = other DNA
agcagcagagtgcaaaacaggctgccatcagtgcaaaagcccgtgggctgacagatcggcaggcacagcgggagt

SEQ ID NO: 672356 - DNA, 75 bp, synthetic construct
  source 1..75: mol_type = other DNA
tgggcagaaagtgcgacggacagtttttcgcaggttaaaagcgtggccacgcagacctttgacggtattgcacag

SEQ ID NO: 672357 - DNA, 75 bp, synthetic construct
  source 1..75: mol_type = other DNA
gtcgatctctattccgacgttgatgatattacgatttcgaaagaacctttcctttacggtcaggtggtggacaac

SEQ ID NO: 672358 - DNA, 75 bp, synthetic construct
  source 1..75: mol_type = other DNA
caggcgctggctgcgcaaaaagccgggatttccgtcggacagtataaagcggccatgcgaaccctgcccgcacag

SEQ ID NO: 672359 - DNA, 75 bp, synthetic construct
  source 1..75: mol_type = other DNA
gaacaatcacgtggtgattcagaacgacggtatcaacggacaggcggggccgcagctgatgaaggcggtgtatga

SEQ ID NO: 672360 - DNA, 75 bp, synthetic construct
  source 1..75: mol_type = other DNA
acaggccatggtgggcattgtcgggcgtatcggcagcgccattggcggtgctttcggtggtggtgcatctgcttc

SEQ ID NO: 672361 - DNA, 75 bp, synthetic construct
  source 1..75: mol_type = other DNA
ctttgattgcgccgttgctcatctcctgttcgacgaccaaaaaaggcgatacctataacgaagcctgggtcaaag

SEQ ID NO: 672362 - DNA, 75 bp, synthetic construct
  source 1..75: mol_type = other DNA
tctcggcatggtccgccaggcgtcacggaaatatggcgttgatgagtcgctgattctggcgattatgcagaccga

SEQ ID NO: 672363 - DNA, 75 bp, synthetic construct
  source 1..75: mol_type = other DNA
tgctaatattattaataccatgaccccgggcgatgtttatcagacgctaacgacccgccatccttctgcggaatc

SEQ ID NO: 672364 - DNA, 75 bp, synthetic construct
  source 1..75: mol_type = other DNA
aagcttccgtactggttacgcgcgcttctgatcacaatccgctactcgttgaattcagtcccggcaagcctgata

SEQ ID NO: 672365 - DNA, 75 bp, synthetic construct
  source 1..75: mol_type = other DNA
cagaaagtgcgacggacagtttttcgcaggttaaaagcgtggccacgcagacctttgacggtattgcacagaata

SEQ ID NO: 672366 - DNA, 75 bp, synthetic construct
  source 1..75: mol_type = other DNA
ttttaatcagaacaatcacgtggtgattcagaacgacggtatcaacggacaggcggggccgcagctgatgaaggc

SEQ ID NO: 672367 - DNA, 75 bp, synthetic construct
  source 1..75: mol_type = other DNA
ttcattttcaggcgcgaaatcagcagattaagcacggattttatcgtgatttaccacgactctggatgcagcctg

SEQ ID NO: 672368 - DNA, 75 bp, synthetic construct
  source 1..75: mol_type = other DNA
atgtattcttttactggtatatgccagcgggttattttaccgctgttttcggtgatgctgccaacttactgattt

SEQ ID NO: 672369 - DNA, 75 bp, synthetic construct
  source 1..75: mol_type = other DNA
cgcgtaaagaggcggcaacacacagtgggcggcgtcggaaaggggaaacacggaaactggattatgcgttgctag

SEQ ID NO: 672370 - DNA, 75 bp, synthetic construct
  source 1..75: mol_type = other DNA
cagcggtcaggcgggccggataagcgccataaaaatcttttaccgctggctgctgaaacggcatgtgatcctgta

SEQ ID NO: 672371 - DNA, 75 bp, synthetic construct
  source 1..75: mol_type = other DNA
taacgccggagccggataataaaatcccggcccccgcacaggaaccagagcagataaatacaccgtccgacagtc

SEQ ID NO: 672372 - DNA, 75 bp, synthetic construct
  source 1..75: mol_type = other DNA
gcaacgttatgcccacggtgaagctatcgttaactatcttgcgcgtaaagaggcagcaacacacagtgggcggcg

SEQ ID NO: 672373 - DNA, 75 bp, synthetic construct
  source 1..75: mol_type = other DNA
ttaatgaaggcgcgaccagaaataatgaggtattactgcccgcagagcagttattactggaagcgttatttcgta

SEQ ID NO: 672374 - DNA, 75 bp, synthetic construct
  source 1..75: mol_type = other DNA
cagatgcacctgagtctgggggccaataccagtttgttggggcgaagttattccggtggtggtgctggcggcggg

SEQ ID NO: 672375 - DNA, 75 bp, synthetic construct
  source 1..75: mol_type = other DNA
agcaggcgctggccgccccggtgaccagcgtcgttccccgcatcagctcactgacggtcagtctttctccggggg

SEQ ID NO: 672376 - DNA, 75 bp, synthetic construct
  source 1..75: mol_type = other DNA
ctgacggggtatctcaccgccctggggtatatttttctgccacagtttacacaaactgggcagcaacgttatgcc

SEQ ID NO: 672377 - DNA, 75 bp, synthetic construct
  source 1..75: mol_type = other DNA
atcatctctaagttatgcagaaaacacggagatcccttcttatgaagaagggatctcgctctttgatgttgaagc

SEQ ID NO: 672378 - DNA, 75 bp, synthetic construct
  source 1..75: mol_type = other DNA
cgacgaatattttcagccatcttcttttaccctctacgtcatcgttgttaatttggtttccgtgtctgttcctgg

SEQ ID NO: 672379 - DNA, 75 bp, synthetic construct
  source 1..75: mol_type = other DNA
gttaacggtctgaaaattagcgccagtgcttcgctgggcgcgcgtgaacgggtcgtggtggtcgatgtggaagat

SEQ ID NO: 672380 - DNA, 75 bp, synthetic construct
  source 1..75: mol_type = other DNA
tttttggccttgtccgtgagcgtccgatcgacattcacaaagatcccgtagcactgaacaaatatatctgcgaat

SEQ ID NO: 672381 - DNA, 75 bp, synthetic construct
  source 1..75: mol_type = other DNA
gtaattcagacctgggactaataactgcttttttcgaagcatacctagacgctgactacactgatcggggtctgc

SEQ ID NO: 672382 - DNA, 75 bp, synthetic construct
  source 1..75: mol_type = other DNA
gcttgcgcaacacagcagcgaaaaaccagtaacgcacgttgcacgggaagaacttcaggcattacatatagcacg

SEQ ID NO: 672383 - DNA, 75 bp, synthetic construct
  source 1..75: mol_type = other DNA
cagcgatgaggcatagacgcttgaccttgaaaaagtctgaaaaagaaaaagagaaaaagatggtgattgaagcag

SEQ ID NO: 672384 - DNA, 75 bp, synthetic construct
  source 1..75: mol_type = other DNA
actgacaaaattttccctaatcctggtaattcagacctgggactaataactgcttttttcgaagcatacctggac

SEQ ID NO: 672385 - DNA, 75 bp, synthetic construct
  source 1..75: mol_type = other DNA
gtggaggtggacaaggttgcagaggctttcggaaaactgaccactgacccgacgtcggggctgattgcgatggcg

SEQ ID NO: 672386 - DNA, 75 bp, synthetic construct
  source 1..75: mol_type = other DNA
actcagtgatgcatcaggaagtattgtcattgatgtcgatgatgaagtatggcgcccgctggccctgaaagccgg

SEQ ID NO: 672387 - DNA, 75 bp, synthetic construct
  source 1..75: mol_type = other DNA
ggtatgggcaaaatcagatcagcaaatccgggatgaggctaaaaataatgtgatcactgtttctcaggtgagtgg

SEQ ID NO: 672388 - DNA, 75 bp, synthetic construct
  source 1..75: mol_type = other DNA
gccagtgcttcgctgggcgcgcgtgaacgggttgtggtggtcgatgtggaagatgcacggctggtgctcggcgtt

SEQ ID NO: 672389 - DNA, 75 bp, synthetic construct
  source 1..75: mol_type = other DNA
tgccctgattgtggcgcagtgatgggggacgcaacctaccaggagacattcaacgaagaaagccaggatgaagcc

SEQ ID NO: 672390 - DNA, 75 bp, synthetic construct
  source 1..75: mol_type = other DNA
tagcatcgcgcgataaaaggtatgtccagttttccgatggcgcagcgtttgaatatgaccgcagcacccaccagc

SEQ ID NO: 672391 - DNA, 75 bp, synthetic construct
  source 1..75: mol_type = other DNA
aacttagtaaaacttgacaagggtgccgtcattaaaaatgccggggtgatgacgaataacgtcgatgttagcggt

SEQ ID NO: 672392 - DNA, 75 bp, synthetic construct
  source 1..75: mol_type = other DNA
cgatggtgcccgtcgcctgaaggtcaggggtgggccggataatctgcgggtgtggcgtatcggcgatgacctgta

SEQ ID NO: 672393 - DNA, 75 bp, synthetic construct
  source 1..75: mol_type = other DNA
ttgcgcttcaacataacccggacattcgtgcattcgggctgcgtcttctggctgcgggtaaaccaagaatgcttg

SEQ ID NO: 672394 - DNA, 75 bp, synthetic construct
  source 1..75: mol_type = other DNA
aaacggttaatgaagtgcggcaaaaagatgcctctggtgttcatcgcgagctgcttgataaatgggtgcgtgatt

SEQ ID NO: 672395 - DNA, 75 bp, synthetic construct
  source 1..75: mol_type = other DNA
ttgtggctcagggcttggtagtagttttatggtcgaaatgaatattaaaaaagttctgaaaaaaatggatataga

SEQ ID NO: 672396 - DNA, 75 bp, synthetic construct
  source 1..75: mol_type = other DNA
ttacttcgactttatctgtaatgctatgactaaatgtattgtaaggctagcgcctaagaggattaaaaaattact

SEQ ID NO: 672397 - DNA, 75 bp, synthetic construct
  source 1..75: mol_type = other DNA
gaattaaatgacgttattatatatttttccaaaataattccctgtttggatgtcgtttcgctgccaagtaatatg

SEQ ID NO: 672398 - DNA, 75 bp, synthetic construct
  source 1..75: mol_type = other DNA
ggccacctgaacagaggtgatatgctcacctcagaacaacacaggtgctccaatgaaaaaaagaaatttcagcgc

SEQ ID NO: 672399 - DNA, 75 bp, synthetic construct
  source 1..75: mol_type = other DNA
ccataatgcacttgatgacgcccgttaccaggcaaaatacgtttcagctatctggcaaaaactgatcccaaatca

SEQ ID NO: 672400 - DNA, 75 bp, synthetic construct
  source 1..75: mol_type = other DNA
cacatctgcactgaagaacacctggtctgcggaggagcagcttcgtggaagctggatggccggtctgaagtccgg

SEQ ID NO: 672401 - DNA, 75 bp, synthetic construct
  source 1..75: mol_type = other DNA
aacagcctgaaccagtggcgcaccaggaagtggaaaaagcctgcaccgcctgcggtcagaccggcggcggcaact

SEQ ID NO: 672402 - DNA, 75 bp, synthetic construct
  source 1..75: mol_type = other DNA
gaccgggaaaatgcccgtctggggctggcagcggcaacgctgcagtcggatatggaaaaagccggtgaactggcg

SEQ ID NO: 672403 - DNA, 75 bp, synthetic construct
  source 1..75: mol_type = other DNA
cctgaaagaggccgccacgaaacggcagttatccgggcaggaaaaatccctgctggctcatgagaaagagacgct

SEQ ID NO: 672404 - DNA, 75 bp, synthetic construct
  source 1..75: mol_type = other DNA
aagcaggccgccatcagcgcaaaagcccgcggcctcagcgaccgtcaggcgcagcgggagtcggaagcgcagcgg

SEQ ID NO: 672405 - DNA, 75 bp, synthetic construct
  source 1..75: mol_type = other DNA
actgcgctggaaactgccttatccctgtcctggcgagcatgaactggtttcagaagtggtggaggcggggcagcc

SEQ ID NO: 672406 - DNA, 75 bp, synthetic construct
  source 1..75: mol_type = other DNA
gcgtggtgacatttaccgatatcaacggttcaccatggccacaatccgatcctccttataacgcggcaccaaaac

SEQ ID NO: 672407 - DNA, 75 bp, synthetic construct
  source 1..75: mol_type = other DNA
gttccggcaacactggtaaaaggtgagctgcctgcccccgggcaggccagcccgctggtacaggatgcggcaagg

SEQ ID NO: 672408 - DNA, 75 bp, synthetic construct
  source 1..75: mol_type = other DNA
cacaaaagcggataaagccaacatgcttgcagcgtctaccaaactagcatacttcaccaacaacgttttaaacgc

SEQ ID NO: 672409 - DNA, 75 bp, synthetic construct
  source 1..75: mol_type = other DNA
gctgaccccggacgaaatccgggaactggcaaaacggctgcaggccacggagcaggcgctggccgccccggtgac

SEQ ID NO: 672410 - DNA, 75 bp, synthetic construct
  source 1..75: mol_type = other DNA
tgacctggcgaagactattcaggacccgctggcggcgaagctgcgcgagcgcctgaaaagcgattttggcgtggt

SEQ ID NO: 672411 - DNA, 75 bp, synthetic construct
  source 1..75: mol_type = other DNA
caaaagcggaagtcatggcggaacgtattcgccagattaacccggagtgccgtgtaacggtggtggatgatttcg

SEQ ID NO: 672412 - DNA, 75 bp, synthetic construct
  source 1..75: mol_type = other DNA
tcaaacccacgctcacgggcagcctggagaaagtacgcgagcaagtgcaggcggcgcatgcgctggggctgacgg

SEQ ID NO: 672413 - DNA, 75 bp, synthetic construct
  source 1..75: mol_type = other DNA
ggatcttatgcaggcgcagcagattcgccgctggccggggagttctctgccttttgtcgacgttgatgcactgga

SEQ ID NO: 672414 - DNA, 75 bp, synthetic construct
  source 1..75: mol_type = other DNA
gcagcccacgcgctggggttgacggcggtgatcagttcttccatcgagtcgagtttaggtttaacgcaactggcg

SEQ ID NO: 672415 - DNA, 75 bp, synthetic construct
  source 1..75: mol_type = other DNA
aatctttgcgaacgtctgggactggtcgaaaaaatcaaaggaatgggtgcagcgaaaaacggatcacagcaatat

SEQ ID NO: 672416 - DNA, 75 bp, synthetic construct
  source 1..75: mol_type = other DNA
catacttcaccaacaacgttttaaacgctgttaatgatgagaaattagctggtatcttttactacgcgattaaag

SEQ ID NO: 672417 - DNA, 75 bp, synthetic construct
  source 1..75: mol_type = other DNA
atggcatcgttttacacccaggatccacaggttaaacatgtcgttgtgattctgatttggctaaatgctttattt

SEQ ID NO: 672418 - DNA, 75 bp, synthetic construct
  source 1..75: mol_type = other DNA
taagctccgatgctgatatttggttgattaccggttcccctcaggctttggtcgaagcggtttatttcgatacgc

SEQ ID NO: 672419 - DNA, 75 bp, synthetic construct
  source 1..75: mol_type = other DNA
gttgaagcggtttatttcgatacgccctggctgccgcgggttaatcttatcgccagccaaattcagcgtggctat

SEQ ID NO: 672420 - DNA, 75 bp, synthetic construct
  source 1..75: mol_type = other DNA
ttggcaactcacgagcgtcgtgtggtgttttttgacttagatggaacattgcatcagcaggatatgttcggcagt

SEQ ID NO: 672421 - DNA, 75 bp, synthetic construct
  source 1..75: mol_type = other DNA
atggaacattgcatcagcaggatatgttcggcagtttttctgcgctatttactgcgtcgccaaccgctgaatgcg

SEQ ID NO: 672422 - DNA, 75 bp, synthetic construct
  source 1..75: mol_type = other DNA
tgggaggcggtttctgttcgtcagccgccgctaccgccgccaggtggagactttgccatcgcgctggggctggcg

SEQ ID NO: 672423 - DNA, 75 bp, synthetic construct
  source 1..75: mol_type = other DNA
gttatgctatgacacattacgtatggcggccgttgaaaatccacgaatagcggttgcagcacttaatcctcatgc

SEQ ID NO: 672424 - DNA, 75 bp, synthetic construct
  source 1..75: mol_type = other DNA
gctcgtcgcgatgcggaaggtatggagcaccatgttagtgaagagacgctggaggcatttcgtctgtttacccag

SEQ ID NO: 672425 - DNA, 75 bp, synthetic construct
  source 1..75: mol_type = other DNA
agaagcgagtggcgtctcagacacgacgagttcatctctccgctgagcctggcagcaaacaaagcggcgtggagt

SEQ ID NO: 672426 - DNA, 75 bp, synthetic construct
  source 1..75: mol_type = other DNA
acctgactgggaagactttacacgcaaagccagtcaggccgacttacgtgtgaaaattcttttcctgtgtaatcc

SEQ ID NO: 672427 - DNA, 75 bp, synthetic construct
  source 1..75: mol_type = other DNA
atatctgggtgatatctgacgaaattcactgtgacctgtcccgaagtggtatcggtcatacaccggccgcctctc

SEQ ID NO: 672428 - DNA, 75 bp, synthetic construct
  source 1..75: mol_type = other DNA
cgcagcaaaagtgggcttgtgtgcaatttatcgccgagatatctcttattgccaactgcaaaccggcagatttga

SEQ ID NO: 672429 - DNA, 75 bp, synthetic construct
  source 1..75: mol_type = other DNA
ggtatatgacatggcccgtaagggtgcccgtgatgaactccaggcgcagatgcgtgatggcggactgttctccgg

SEQ ID NO: 672430 - DNA, 75 bp, synthetic construct
  source 1..75: mol_type = other DNA
ctgaagtataccggagaggcgcagaaggcgtatgagcgcctgctgacgccactggagaaatataccgcccggcag

SEQ ID NO: 672431 - DNA, 75 bp, synthetic construct
  source 1..75: mol_type = other DNA
cgacccgacgtcgggactgatggcgatggcgcgccagttccgtaacgtgacggcagagcagattgcgtatgttgc

SEQ ID NO: 672432 - DNA, 75 bp, synthetic construct
  source 1..75: mol_type = other DNA
cgagtgggcggaaagtgcgacggacagtttttcgcaggttaaaagcgtggccacgcagacctttgacggtattgc

SEQ ID NO: 672433 - DNA, 75 bp, synthetic construct
  source 1..75: mol_type = other DNA
atcacgtggtgattcagaacgacggtacgaatggtctgccaggtccacagatgatgaaggcagtgtatgacatgg

SEQ ID NO: 672434 - DNA, 75 bp, synthetic construct
  source 1..75: mol_type = other DNA
atgattgttttgttaacgatgaatctcgggggcgtatgggatgatcgtgcgaatgcgcgtcttgggctttcagcc

SEQ ID NO: 672435 - DNA, 75 bp, synthetic construct
  source 1..75: mol_type = other DNA
gccaatctccggggagcatgggaggacagagcgaatgcgcaacttgggctttcagccgccacgttgcaggccgat

SEQ ID NO: 672436 - DNA, 75 bp, synthetic construct
  source 1..75: mol_type = other DNA
aagtactgactgaaaccgatcatgccaaccctgatccggaaatcgtggatattgcctgcggtcgctcctctgccc

SEQ ID NO: 672437 - DNA, 75 bp, synthetic construct
  source 1..75: mol_type = other DNA
ccagcgagtctcttacggcgctggtgaatgccggcgtgcgtggcggtgagcagtttgaggcgatcagtcagagtg

SEQ ID NO: 672438 - DNA, 75 bp, synthetic construct
  source 1..75: mol_type = other DNA
cagcaaaaaaagtgacgcagttagtgaacgtggaagagcacgttgaagggtttcgccaggtaagagaagcgcatc

SEQ ID NO: 672439 - DNA, 75 bp, synthetic construct
  source 1..75: mol_type = other DNA
ccattgaggctgcggcggcgaacttccatttcgcgaccggaggatttacggggacgggcggcaaatatgagcctg

SEQ ID NO: 672440 - DNA, 75 bp, synthetic construct
  source 1..75: mol_type = other DNA
agcaccataatgcacttgatgacgctcgttaccaggcaaaatacgtttcagctatctggcaaaaactgatcccga

SEQ ID NO: 672441 - DNA, 75 bp, synthetic construct
  source 1..75: mol_type = other DNA
atgccccggtgacggtcgagaatgcttccggtaacgcacagcagcaaaacgacggagacaggctgggtaaggcgt

SEQ ID NO: 672442 - DNA, 75 bp, synthetic construct
  source 1..75: mol_type = other DNA
ccgattgccgaccagattggtcaggccgtcgcgaaccgatgatgcaggtctggggcgggcaaaacgtttatttcc

SEQ ID NO: 672443 - DNA, 75 bp, synthetic construct
  source 1..75: mol_type = other DNA
cagtcagcgcgaccgggaaatcttccgggagtttaacggacgcaaccaccatgaactggcccgcaagtttggtgt

SEQ ID NO: 672444 - DNA, 75 bp, synthetic construct
  source 1..75: mol_type = other DNA
gacagagatttttctgaagcaggcgatggtggggattgtcgggagtatcggcagcgccattggtggtgctttcgg

SEQ ID NO: 672445 - DNA, 75 bp, synthetic construct
  source 1..75: mol_type = other DNA
agaggccgccacgaaacggcagttatctgagcaggaaaaatccctgctggcccatgagaaagagacgctggagta

SEQ ID NO: 672446 - DNA, 75 bp, synthetic construct
  source 1..75: mol_type = other DNA
gtggcaaaagcccaggccgcgtttaaaaaggctgatgaaatctggaatctgcgtaaaggtgatcgttatgtgaat

SEQ ID NO: 672447 - DNA, 75 bp, synthetic construct
  source 1..75: mol_type = other DNA
ccggcgcagatgcggcgggcggaaggtattaattttaatcagaacaatcacgtggtgattcagaacgacggtatc

SEQ ID NO: 672448 - DNA, 75 bp, synthetic construct
  source 1..75: mol_type = other DNA
atgccaatggagagctgtacgcaaatgaacgccgtagaaattgaacaagccatcacggatcttgcagagcaaccc

SEQ ID NO: 672449 - DNA, 75 bp, synthetic construct
  source 1..75: mol_type = other DNA
cacgcgatgagcgaagtgttgtcggtatcccgcgttgggctgctgagtttccttatgtaaacggcgctcttttct

SEQ ID NO: 672450 - DNA, 75 bp, synthetic construct
  source 1..75: mol_type = other DNA
atgccaatggagaactgtacgcaaatgaacgccgtagaaattgagcaagccatcacggatcttgcggaacaaccc

SEQ ID NO: 672451 - DNA, 75 bp, synthetic construct
  source 1..75: mol_type = other DNA
ggtgttgggcgtcagtccggaaatcgcccgtcgcgacgcggaaggcatggagcaccatgtcagtgaagagacgct

SEQ ID NO: 672452 - DNA, 75 bp, synthetic construct
  source 1..75: mol_type = other DNA
agcgagttaagaaaagattatgttaatccattggcagatactttatatttgtgtgcgggtaacaatatattaagt

SEQ ID NO: 672453 - DNA, 75 bp, synthetic construct
  source 1..75: mol_type = other DNA
gcactaatagcatcaagattgcatctaatctggattagcaccgtctgtggaaagctagaaacacgatttagttac

SEQ ID NO: 672454 - DNA, 75 bp, synthetic construct
  source 1..75: mol_type = other DNA
agtagcagaaagtacaaatactcaaaccattctggattttaaaaatggacgtggttattactgctcacatcagtt

SEQ ID NO: 672455 - DNA, 75 bp, synthetic construct
  source 1..75: mol_type = other DNA
gtgaacgccataacgccctgcacgatgcgcgttaccaagcaaaatacgtgtcagcaatctggcaaaaactgatcc

SEQ ID NO: 672456 - DNA, 75 bp, synthetic construct
  source 1..75: mol_type = other DNA
gacagtctgcgggcgtatcaaaactgactatcgctactctaatacccttggctggaatactttccctgtcccacc

SEQ ID NO: 672457 - DNA, 75 bp, synthetic construct
  source 1..75: mol_type = other DNA
caaccttttgatcctatagagtttccttatgctttccttgaagcctttggtaacaaagaaacgactatcaaacgc

SEQ ID NO: 672458 - DNA, 75 bp, synthetic construct
  source 1..75: mol_type = other DNA
acaagccatcactgatcttgcagagcaaccttttgatcctatagagtttccttatgctttccttgaagcctttgg

SEQ ID NO: 672459 - DNA, 75 bp, synthetic construct
  source 1..75: mol_type = other DNA
gcaaaagcccgtggtctcactgaccgtcaggcgcagcgggagtctgaagcgcagcgtcttcgtgacgtgtatggc

SEQ ID NO: 672460 - DNA, 75 bp, synthetic construct
  source 1..75: mol_type = other DNA
ggagagctttccataaggttgatacagaagaagctggtaagccggttgatccgacacttgaaaaaagtgttggta

SEQ ID NO: 672461 - DNA, 75 bp, synthetic construct
  source 1..75: mol_type = other DNA
cgtattgatgctcttggcgttgatggtctgggggctgcgggtattccggcatgggttgatttgcatttctggcag

SEQ ID NO: 672462 - DNA, 75 bp, synthetic construct
  source 1..75: mol_type = other DNA
gaaatacattattgcttgaggcgggtactaagttctttggtgaacagcaaaacgcccttgttcaaggtcaggcgc

SEQ ID NO: 672463 - DNA, 75 bp, synthetic construct
  source 1..75: mol_type = other DNA
atagtctgtatgcactgatattgcttgcacaatatcataatataactgtcaatgctgaaactataaggcatcagt

SEQ ID NO: 672464 - DNA, 75 bp, synthetic construct
  source 1..75: mol_type = other DNA
agaaattttgattatctgcagtgtgttgcttttgtcgaagaactcgaaaaggcacgggtgaatgagaatgtaaga

SEQ ID NO: 672465 - DNA, 75 bp, synthetic construct
  source 1..75: mol_type = other DNA
cggggttactggcacaaatggccggtgtaagcgaggctgaactggttcatgcactcaagacaaccggggaaatct

SEQ ID NO: 672466 - DNA, 75 bp, synthetic construct
  source 1..75: mol_type = other DNA
ggtacttaagaaccgtcattatctgcttggtatgggtaaagtgctgccatgtgtgcttaaaacgaaaattgttac

SEQ ID NO: 672467 - DNA, 75 bp, synthetic construct
  source 1..75: mol_type = other DNA
gcgcgttgcctctgacgaacttaacagtctgtggcgtgaatattcgcccgtcacgtatgccagaaccgatgcact

SEQ ID NO: 672468 - DNA, 75 bp, synthetic construct
  source 1..75: mol_type = other DNA
atttgtatccggtatcagtggcttttgttttaaggggctgagttttacggatgacaaatatccttttcatcgtga

SEQ ID NO: 672469 - DNA, 75 bp, synthetic construct
  source 1..75: mol_type = other DNA
agaagaagcgggtaagccggttgatccgacacttgaaaaaagtgtaggtagcgatactgggaacaggggcgtgga

SEQ ID NO: 672470 - DNA, 75 bp, synthetic construct
  source 1..75: mol_type = other DNA
atattaatcagggtgagttgatttcaatcatcgtaccgcgtgatacttattttaataatgtttacgaacttcatt

SEQ ID NO: 672471 - DNA, 75 bp, synthetic construct
  source 1..75: mol_type = other DNA
tcggtgctatcccttcaattgatgatgatcgcgcaacggtagacttacaaggccagcgcggtaagaaagcctcaa

SEQ ID NO: 672472 - DNA, 75 bp, synthetic construct
  source 1..75: mol_type = other DNA
cagcgccggtatgaatgaatcacgtcatccgggaagcacacagatgacgcgcactggtcaggcgcatcgtggtgg

SEQ ID NO: 672473 - DNA, 75 bp, synthetic construct
  source 1..75: mol_type = other DNA
caaagacctcgaaaaaggcaaatgggttaaagttgacggctgggataacgccgaagccgctaaagctgaaatcgt

SEQ ID NO: 672474 - DNA, 75 bp, synthetic construct
  source 1..75: mol_type = other DNA
atgaacaataccaaaatgatcacactctttcatccacatgacaaaacaccatttatgatctgtattataaacaaa

SEQ ID NO: 672475 - DNA, 75 bp, synthetic construct
  source 1..75: mol_type = other DNA
agccggagggcggaatacggcacgcggcactgttgcaaagttagcgatgaggcagccttttgtcttattcaaagg

SEQ ID NO: 672476 - DNA, 75 bp, synthetic construct
  source 1..75: mol_type = other DNA
ttgcagatgcctgcgaagatggtgatcgttaccttgacgagatctttggacgcattcaggaccagcttaatgaac

SEQ ID NO: 672477 - DNA, 75 bp, synthetic construct
  source 1..75: mol_type = other DNA
tggctatagagtctggcacccctttgggtatcgttcctagctccaactatgccaaggctttaaaccgtgactctg

SEQ ID NO: 672478 - DNA, 75 bp, synthetic construct
  source 1..75: mol_type = other DNA
gtggaaggttgggaaaacgcagaagccgctaaagctgaaatcgttgcttccttcgagcgcgccaagaataaataa

SEQ ID NO: 672479 - DNA, 75 bp, synthetic construct
  source 1..75: mol_type = other DNA
tcgataactacaccgaaggtaacggtgatggcttcggtttctctgctacctatgaatacgaaggattcggtatcg

SEQ ID NO: 672480 - DNA, 75 bp, synthetic construct
  source 1..75: mol_type = other DNA
cgcgcaagaactactaaagtggagatgcggtaaatattggctttggtatttctgccaacgtaccacgcattctac

SEQ ID NO: 672481 - DNA, 75 bp, synthetic construct
  source 1..75: mol_type = other DNA
ttcgcgctactactgccgatgaacgcggcaatctgacttatgaacatgaaggggcttatcttgggccactggaac

SEQ ID NO: 672482 - DNA, 75 bp, synthetic construct
  source 1..75: mol_type = other DNA
aaagagttcgggtgtgataacccggactgtcagcacgtaaagtacctgaccaactcatgcggcagccgtgcctgc

SEQ ID NO: 672483 - DNA, 75 bp, synthetic construct
  source 1..75: mol_type = other DNA
tgaagaagccgccgatagcagcctcccggctggcacattacaacggaggggcgagcctgagcttccgttacctgg

SEQ ID NO: 672484 - DNA, 75 bp, synthetic construct
  source 1..75: mol_type = other DNA
agaagcctggtgctgaaagctggcggaaaatactggcatgtgtacatgtcgaagaaaacggccggcgggaggaat

SEQ ID NO: 672485 - DNA, 75 bp, synthetic construct
  source 1..75: mol_type = other DNA
tgcatatgctggaggcgcgtaaacataaagaagatccggcgcagagccagcagcgtctggagaagctggcggcgc

SEQ ID NO: 672486 - DNA, 75 bp, synthetic construct
  source 1..75: mol_type = other DNA
ctccgcaatgcaatgaaaagcgccaaaggaccaggtaacttccgcaatctgtttatgtactctcctaacggcaaa

SEQ ID NO: 672487 - DNA, 75 bp, synthetic construct
  source 1..75: mol_type = other DNA
ttggtaacgcctacctggagaagcgcacgaaccgtttcggtgaagttatttcgctggagcctgcactggcaaaat

SEQ ID NO: 672488 - DNA, 75 bp, synthetic construct
  source 1..75: mol_type = other DNA
tttttgtacgcaatgaactaatgtcactgcagaaacgtttacaggaactaaataactggcttggtgaagaaattc

SEQ ID NO: 672489 - DNA, 75 bp, synthetic construct
  source 1..75: mol_type = other DNA
attcggtaatccggttgcttgaagataccatcgagcgtgaagggtattcggctgagtttgaaattcagcgttcaa

SEQ ID NO: 672490 - DNA, 75 bp, synthetic construct
  source 1..75: mol_type = other DNA
tgtatagtgggatcgggcgactcctggacggtggcactatgtgccgccgcctggctggggaaatacacacatctg

SEQ ID NO: 672491 - DNA, 75 bp, synthetic construct
  source 1..75: mol_type = other DNA
atgggtaagagtgagaagaaccgcgctgcggcgacgaaacagatccagcttaaaagccagactacagccgaagca

SEQ ID NO: 672492 - DNA, 75 bp, synthetic construct
  source 1..75: mol_type = other DNA
tattacattaacggcagtcatgctggcttcatcatgtacatgaccgatgcagcgcagaatcaggaggatgtgaac

SEQ ID NO: 672493 - DNA, 75 bp, synthetic construct
  source 1..75: mol_type = other DNA
tgtcagaagtcgcagcgaaagatgaatttctgaacatcaagaacgtgagtcgtgatgacatgatggccgcgcatc

SEQ ID NO: 672494 - DNA, 75 bp, synthetic construct
  source 1..75: mol_type = other DNA
tacattaacggcagtcatgctggcttcatcatgtacatgaccgacgctgcgcagaaccaggaggacgtgaacaac

SEQ ID NO: 672495 - DNA, 75 bp, synthetic construct
  source 1..75: mol_type = other DNA
aaggcagcatttttcatctgatggaaccggacattaaccaggagatctacggcctgcccggttatctttctgcca

SEQ ID NO: 672496 - DNA, 75 bp, synthetic construct
  source 1..75: mol_type = other DNA
accgccgcgaactgctggactatgtggaatgcgtacagatggatcgctggtatgagccgcccgtcagctttgacg

SEQ ID NO: 672497 - DNA, 75 bp, synthetic construct
  source 1..75: mol_type = other DNA
ttgttcgtaatgaattaatacctttgcaaaaacgtttcgaagaattaaatttatggctaaaaaataatattatta

SEQ ID NO: 672498 - DNA, 75 bp, synthetic construct
  source 1..75: mol_type = other DNA
gcggttgtccacggtgagtatgcagaccccgacgacatgctgagcttcgacaaagaagcgataggcgagaagatg

SEQ ID NO: 672499 - DNA, 75 bp, synthetic construct
  source 1..75: mol_type = other DNA
atacccacacacaagattttggggtgactgaatggttactggcagcgaaatccattggcttaaaagcaaaatatg

SEQ ID NO: 672500 - DNA, 75 bp, synthetic construct
  source 1..75: mol_type = other DNA
tgatgatcattacgctatggttaggtgcccatcttgtcatcaaggggcagctgaccattggtcagctgattgctt

SEQ ID NO: 672501 - DNA, 75 bp, synthetic construct
  source 1..75: mol_type = other DNA
tagataataaaaaaataaaaaagaatataaaagcctttgcaccggatatactgtcttatatgaatgtagtatttt

SEQ ID NO: 672502 - DNA, 75 bp, synthetic construct
  source 1..75: mol_type = other DNA
gataatggtattatttctgaagatggcacacataaagagcttatctccaaaaaagacagtttatatgcatattta

SEQ ID NO: 672503 - DNA, 75 bp, synthetic construct
  source 1..75: mol_type = other DNA
gaggcagccagacttgcaggtgcccatgattttattacggaactaaaagaagggtacaatactattgttggagaa

SEQ ID NO: 672504 - DNA, 75 bp, synthetic construct
  source 1..75: mol_type = other DNA
tcgggagagataagcatcgggcagttaatcgcgtttaatatgcttgcaggtcaggtcattgctcctgttatcaga

SEQ ID NO: 672505 - DNA, 75 bp, synthetic construct
  source 1..75: mol_type = other DNA
gcgaacgatccccggtgccggtgaagatgcgctctacattttgtggcgctggcaagactgctgtaactcgggagg

SEQ ID NO: 672506 - DNA, 75 bp, synthetic construct
  source 1..75: mol_type = other DNA
gtgatatggcaatcatcaaacgtgaatggcttgaagccgcaaccgatgcgcacaagaaactcggatggaaagcga

SEQ ID NO: 672507 - DNA, 75 bp, synthetic construct
  source 1..75: mol_type = other DNA
agcggtaagtcatgggcaatcgcgagactgcttgttgaagcggcgcgtcggcagcctgtgcgtattctctgcgct

SEQ ID NO: 672508 - DNA, 75 bp, synthetic construct
  source 1..75: mol_type = other DNA
aaccgatcccttgacagttacactaccaactgtctccacaaaatcattagattcaaccgggaaggtagcaggcct

SEQ ID NO: 672509 - DNA, 75 bp, synthetic construct
  source 1..75: mol_type = other DNA
aatttactttcttgcggcccacagattcgtgcgacagcctttccactggaagaattttatcattcattacgctta

SEQ ID NO: 672510 - DNA, 75 bp, synthetic construct
  source 1..75: mol_type = other DNA
acctggaacaatgatgagctcgctttttttaccaatccagaggcggcggcagtagcaaacccaattgcggcggct

SEQ ID NO: 672511 - DNA, 75 bp, synthetic construct
  source 1..75: mol_type = other DNA
cgtcgtagttttgccagcaccgagcgtgtggagcgtcttgaaaaccggatgaccgaaatggaaacccgctacgcc

SEQ ID NO: 672512 - DNA, 75 bp, synthetic construct
  source 1..75: mol_type = other DNA
ccgtttacttcaaatttttcatcgggttatttgcgctggtcaacccggtagggattattcccgtctttatcagca

SEQ ID NO: 672513 - DNA, 75 bp, synthetic construct
  source 1..75: mol_type = other DNA
tggtggttgtgaaggctcacgggaacagtgtgctgtacgtgacccgagtcgcgatggtagccgggggccggggca

SEQ ID NO: 672514 - DNA, 75 bp, synthetic construct
  source 1..75: mol_type = other DNA
gcgtcggtaactcgatcccggatattcccgatccggttgctcgtcataccaccgatggcttactgaaactgaaag

SEQ ID NO: 672515 - DNA, 75 bp, synthetic construct
  source 1..75: mol_type = other DNA
tcatagcgttgtcgatcccgttgccgcgattgaaaatgctgagatcgtgattgtcggcggcggtaatactttcca

SEQ ID NO: 672516 - DNA, 75 bp, synthetic construct
  source 1..75: mol_type = other DNA
ggtcaggcgacactgggtggcccaaataccacctacgtgtttaaggctggagaagaagcggttccgctggaagct

SEQ ID NO: 672517 - DNA, 75 bp, synthetic construct
  source 1..75: mol_type = other DNA
gctggatctctcccggcaagaatctctgattgagttaagtgcccatcacaatatgatcactgaccttatattaca

SEQ ID NO: 672518 - DNA, 75 bp, synthetic construct
  source 1..75: mol_type = other DNA
atgaaaacaatcactttaaacgacaaccatattgcacatttaaacaccaaaaccactacaaaacttgaatattta

SEQ ID NO: 672519 - DNA, 75 bp, synthetic construct
  source 1..75: mol_type = other DNA
tatttataatgaggataaatcttccttaggttatggtccaacatccaataattggttaagccagtcctttacaac

SEQ ID NO: 672520 - DNA, 75 bp, synthetic construct
  source 1..75: mol_type = other DNA
ggcgattcagttaaccccggatttcgaaatgggggaatacaagcgccaggatctggtttacgagaaagaggatct

SEQ ID NO: 672521 - DNA, 75 bp, synthetic construct
  source 1..75: mol_type = other DNA
tcaggtattgcgggcgggcttgtcggcaacagtacaagtgctgccggtacgggggcacaggcaggcaggaactcg

SEQ ID NO: 672522 - DNA, 75 bp, synthetic construct
  source 1..75: mol_type = other DNA
atgaaaaaactgttactgatctgtttgccggtgcttctcaccggctgtagcgcgttcaatcaactggttgagcac

SEQ ID NO: 672523 - DNA, 75 bp, synthetic construct
  source 1..75: mol_type = other DNA
gttggtaggacctttatttggttcttccgctccagctccggttacggtaggcaacacggcggcaccagctgtggc

SEQ ID NO: 672524 - DNA, 75 bp, synthetic construct
  source 1..75: mol_type = other DNA
tcgcccaactgaacgaacgtattttagcggcggataacacgccgctttatattaagtttgccgaaacggtaaaaa

SEQ ID NO: 672525 - DNA, 75 bp, synthetic construct
  source 1..75: mol_type = other DNA
atggaacaagcgcatacccagctgattgcccaactgaacgagcgtattttagcggcggataacacgccgctttat

SEQ ID NO: 672526 - DNA, 75 bp, synthetic construct
  source 1..75: mol_type = other DNA
ggttactgtaaagcatctttcttccaggacacttcaagataccctacttccgttgccaccacttgccgagcaaaa

SEQ ID NO: 672527 - DNA, 75 bp, synthetic construct
  source 1..75: mol_type = other DNA
atactcgttgaaagaagcgcgaggtttttctcagcaggtggtgttgcgcgggaaaaagcccgatacgctatgggt

SEQ ID NO: 672528 - DNA, 75 bp, synthetic construct
  source 1..75: mol_type = other DNA
atgccgtgcgcagcggggtgctggagcatggcaatattttgcccggcgagcgtgatttgagccagttaaccggcg

SEQ ID NO: 672529 - DNA, 75 bp, synthetic construct
  source 1..75: mol_type = other DNA
ctttatgactatttccgcagccagcacatttacccacaacgtacgcgttcccgcgttagcgcccggatgccggat

SEQ ID NO: 672530 - DNA, 75 bp, synthetic construct
  source 1..75: mol_type = other DNA
tgagtgacacagccgctaacgcttatacgattcgctggctgaaagacgtttctgttaagcgtggtgagattattg

SEQ ID NO: 672531 - DNA, 75 bp, synthetic construct
  source 1..75: mol_type = other DNA
agagggtatgaacgggttgaatgtatctggatgaatcaattagcgccggaattatggcgtggtaaatcagacgga

SEQ ID NO: 672532 - DNA, 75 bp, synthetic construct
  source 1..75: mol_type = other DNA
tccagacccggttgcccgtcataccaccgatggtctgctgaaactgaaagtgaaaaccaactccagctccagcgt

SEQ ID NO: 672533 - DNA, 75 bp, synthetic construct
  source 1..75: mol_type = other DNA
tcaccagttatgcaaacatggctagttcagtcatctaaggaggtcgccagaaagacattaaatttaaaagatctt

SEQ ID NO: 672534 - DNA, 75 bp, synthetic construct
  source 1..75: mol_type = other DNA
ttggggctataggtagaataggtattgttagagaagatataaatgttaatatcgctcgtgccgttgccagaatat

SEQ ID NO: 672535 - DNA, 75 bp, synthetic construct
  source 1..75: mol_type = other DNA
cgtcttgagcaaatcccacaaatcctgaaacgttttcgtcaggccattcttgcgacagcaatgaatggaaaacta

SEQ ID NO: 672536 - DNA, 75 bp, synthetic construct
  source 1..75: mol_type = other DNA
gacaatgccagcctcgtcaatatcaacctcagctttaataaaattaaaacgataacctttccaaatgaatcaaaa

SEQ ID NO: 672537 - DNA, 75 bp, synthetic construct
  source 1..75: mol_type = other DNA
atgattttcacctgccagatggagttgcttatatcaaatgtgagcgggatcggtgatgcttattactggagtgtt

SEQ ID NO: 672538 - DNA, 75 bp, synthetic construct
  source 1..75: mol_type = other DNA
atggagccgaaagagagaaaggactggtaccagtctgaaaatgaaaggatcaagctggaaaaggagcagcgaaaa

SEQ ID NO: 672539 - DNA, 75 bp, synthetic construct
  source 1..75: mol_type = other DNA
cgcgttcaatcaactggttgagcgcatgcaaaccgatacgctggaataccagtgtgatgaaaaaccgttgacggt

SEQ ID NO: 672540 - DNA, 75 bp, synthetic construct
  source 1..75: mol_type = other DNA
cagaaatcccgctggatcaggctatcgacgtgctggagcaggtgggcgactacatgaaggccaataacgtaacgc

SEQ ID NO: 672541 - DNA, 75 bp, synthetic construct
  source 1..75: mol_type = other DNA
atcgccaccggcgaccgcctgcgccgcatgtacacccgcgacagtgatatgatttcccgcggtttgaatggcacg

SEQ ID NO: 672542 - DNA, 75 bp, synthetic construct
  source 1..75: mol_type = other DNA
ttcatgatccatcccgtatggagccgaaagagagaaaggactggtaccagtctgaaaatgaaaggatcaagctgg

SEQ ID NO: 672543 - DNA, 75 bp, synthetic construct
  source 1..75: mol_type = other DNA
ggctgaccataaacgcgacatggtttacaaccgactggttcgtcgtttgcgttcgctgggactgacggatttcgg

SEQ ID NO: 672544 - DNA, 75 bp, synthetic construct
  source 1..75: mol_type = other DNA
aaagtgcttttaaaagagtgatcgaaaatataaagtttttatattctaataatattgatttcatgttgaaagcaa

SEQ ID NO: 672545 - DNA, 75 bp, synthetic construct
  source 1..75: mol_type = other DNA
ttgactggaaaggtgaagatgaagaaggtgagctggctaattttgctgcagatcgcttttatgaactcacaaaaa

SEQ ID NO: 672546 - DNA, 75 bp, synthetic construct
  source 1..75: mol_type = other DNA
tttggtatggaacgtagcctgtttgccgcgttacttttgatctgtgcaggtatcgcaattcgctctctcccttcg

SEQ ID NO: 672547 - DNA, 75 bp, synthetic construct
  source 1..75: mol_type = other DNA
cctgacggcattttttcgtgaagggcatcattttccgctgatcgcagctcatgcccgccgctgttctggggaata

SEQ ID NO: 672548 - DNA, 75 bp, synthetic construct
  source 1..75: mol_type = other DNA
accggcgaagagccgtacagcattgcgatgacgctggctgacacattgggcaccgcgcccggacgctggaaagtg

SEQ ID NO: 672549 - DNA, 75 bp, synthetic construct
  source 1..75: mol_type = other DNA
cagggggtaaaacccgtgtccttcctgacctgctgccgcaccttcctacagccgactgcctgatcgaaccgttcg

SEQ ID NO: 672550 - DNA, 75 bp, synthetic construct
  source 1..75: mol_type = other DNA
gaatacgaaaagactatggtattacatacaaatttccaaaaccaacacatggtgatggcttgaaaccatattcaa

SEQ ID NO: 672551 - DNA, 75 bp, synthetic construct
  source 1..75: mol_type = other DNA
gaatacgaaaggactacggtattacatacaaatttccaaaaccaacacatggtgatggtttgacaccatattcca

SEQ ID NO: 672552 - DNA, 75 bp, synthetic construct
  source 1..75: mol_type = other DNA
actgttttaaatctgattcttggatttatcatcggtggcatcgtggtgctgggagtgaaagccgtagagaaaatg

SEQ ID NO: 672553 - DNA, 75 bp, synthetic construct
  source 1..75: mol_type = other DNA
aatttgtcctaatgtattcctcgacatagctggtgttggaccattaactgctttgtgtaaaaaatactctcagca

SEQ ID NO: 672554 - DNA, 75 bp, synthetic construct
  source 1..75: mol_type = other DNA
gaacccacgttgcttgtactgctctgatgcaaccctttttgcaaaaacagcaggaaaaatgtctggagcaggcct

SEQ ID NO: 672555 - DNA, 75 bp, synthetic construct
  source 1..75: mol_type = other DNA
ttactattaaagatgctatagggcatttacctgaatggccagaaggtgaattttatgatatgggattccattggt

SEQ ID NO: 672556 - DNA, 75 bp, synthetic construct
  source 1..75: mol_type = other DNA
gggggggcaggcacatgattacaccgtcgaggggttcaaggccatggtggagcagtatccgtcagaaacccgttt

SEQ ID NO: 672557 - DNA, 75 bp, synthetic construct
  source 1..75: mol_type = other DNA
aatgtacaagattagcaaaggtgaactaccgctgtgcatcgataccgatccgctcaatcctacattctctaatta

SEQ ID NO: 672558 - DNA, 75 bp, synthetic construct
  source 1..75: mol_type = other DNA
aatcttaattttgatgacacactatcaatgctgaccttcgggcctaatcttgttatttactgtgatccgccatat

SEQ ID NO: 672559 - DNA, 75 bp, synthetic construct
  source 1..75: mol_type = other DNA
ttggccgggagtagtttactgacgttgctcgatgatatcgccacactgctggacgatatctccgtgatgggcaaa

SEQ ID NO: 672560 - DNA, 75 bp, synthetic construct
  source 1..75: mol_type = other DNA
cgccctgatggcgatgatattaccgactgttttaaatctgattcttggttttattatcggtggtatcgtggtgct

SEQ ID NO: 672561 - DNA, 75 bp, synthetic construct
  source 1..75: mol_type = other DNA
cgcgcatggcgcaaattttagataccacgccgcagcccgcgcagaacattgcacccagtgcggtgattgacgcga

SEQ ID NO: 672562 - DNA, 75 bp, synthetic construct
  source 1..75: mol_type = other DNA
actttgagtgacgatgaccgggcatcgttagcaacggatattcaggggatccgcgaccagttgttgaatctggcg

SEQ ID NO: 672563 - DNA, 75 bp, synthetic construct
  source 1..75: mol_type = other DNA
gtggcctgaaaaactcgctgaataatgtgctcaccgtacgtgcggaattaggcacacagttgaacgaactggagt

SEQ ID NO: 672564 - DNA, 75 bp, synthetic construct
  source 1..75: mol_type = other DNA
tagcgaagcggataaagaaatcgccgctgcggcattggataaaaccaaccgtggactgaaaaactcgctgaataa

SEQ ID NO: 672565 - DNA, 75 bp, synthetic construct
  source 1..75: mol_type = other DNA
gtattaagcaacaggtcgatgcttcgcgttcgatggtgataggacatacgggcgacaaaattttcgacagtatta

SEQ ID NO: 672566 - DNA, 75 bp, synthetic construct
  source 1..75: mol_type = other DNA
gcaagggtcgtccaggtggatgtgatggtttgttcctgaccgccgccagtaccggtggaactaaagacgctcgcc

SEQ ID NO: 672567 - DNA, 75 bp, synthetic construct
  source 1..75: mol_type = other DNA
cctgggtgtgatattcctgttcatcaccaggaaaaaatgggcactatggaccccacctttaacccagtgatcacc

SEQ ID NO: 672568 - DNA, 75 bp, synthetic construct
  source 1..75: mol_type = other DNA
ttctccggcctgtaaagaaaaacagcagtgttcactggtggatggcaaaaatacttttagcgcgaaatatcaaca

SEQ ID NO: 672569 - DNA, 75 bp, synthetic construct
  source 1..75: mol_type = other DNA
ttccggtacatcatcagctcaaaatggggactatggacccaacttttaacccggtaatcactgatgactcagccg

SEQ ID NO: 672570 - DNA, 75 bp, synthetic construct
  source 1..75: mol_type = other DNA
ccggaaggctatcagttacaacaagtgttgctgatgagccgtcataatttacgtgcaccgttggcaaataacggc

SEQ ID NO: 672571 - DNA, 75 bp, synthetic construct
  source 1..75: mol_type = other DNA
aggatttacggggacgggcggcaaatatgagcctgcggggattgttcatcgcggggagtttgttttcacgaagga

SEQ ID NO: 672572 - DNA, 75 bp, synthetic construct
  source 1..75: mol_type = other DNA
acatggcccgcaagggggcgcaggatgagattcaggcgcagatgcgtgatggcggcgtattttccggaggcaggc

SEQ ID NO: 672573 - DNA, 75 bp, synthetic construct
  source 1..75: mol_type = other DNA
atgcggaaggtggttatgtgggcggtgccggaagtccggcgcagatgcggcggacggaaggcattaattttaatc

SEQ ID NO: 672574 - DNA, 75 bp, synthetic construct
  source 1..75: mol_type = other DNA
aaggcattaattttaatcagaacaatcacgtggtgattcagaacgacggtatcaacggacaggccgggccgcagc

SEQ ID NO: 672575 - DNA, 75 bp, synthetic construct
  source 1..75: mol_type = other DNA
gagtcggaagagcagcaccttcgtgacgtgtacggtgataatccggatgcgctggcgaaggccacatctgcactg

SEQ ID NO: 672576 - DNA, 75 bp, synthetic construct
  source 1..75: mol_type = other DNA
aaagcgtggccacgcagacctttgacggtattgcacagaatatggcagcgatgctgaccggcagcgaacagaact

SEQ ID NO: 672577 - DNA, 75 bp, synthetic construct
  source 1..75: mol_type = other DNA
gaaaaagccgaagtcgtcaggcgtaaaagtgtcagccggtgagcgtcaggaagaccaggcgcatgccgcgctgct

SEQ ID NO: 672578 - DNA, 75 bp, synthetic construct
  source 1..75: mol_type = other DNA
gaaaaagccgaagtcgtcaggcgtgaaagtgtcagccggtgagcgtcaggaagaccagccgcatgccgcactgct

SEQ ID NO: 672579 - DNA, 75 bp, synthetic construct
  source 1..75: mol_type = other DNA
gaaaaagccgaagtcgtcaggcgtgaaagtgtcagccggtgagcgtcaggaagaccagacgcatgccgccctgct

SEQ ID NO: 672580 - DNA, 75 bp, synthetic construct
  source 1..75: mol_type = other DNA
gaaaaagccgaagtcgtcaggcgtcaaagtgtcagccggtgagcgtcaggaagaccagtcgcatgccgctctgct

SEQ ID NO: 672581 - DNA, 75 bp, synthetic construct
  source 1..75: mol_type = other DNA
gcatctgcttcctcggggacggccattcaggctgcggcggcgaacttccatttcgcgaccggaggatttacgggg

SEQ ID NO: 672582 - DNA, 75 bp, synthetic construct
  source 1..75: mol_type = other DNA
tactggcgtacccacagtggtaatggggcctgccacccgccacggacattgcgcggcatcgattgccgattgccg

SEQ ID NO: 672583 - DNA, 75 bp, synthetic construct
  source 1..75: mol_type = other DNA
cattgtgctggataccgcctgctgggcgaaaaactttgattatggcgcggctaaccatcgccagattggtaacgg

SEQ ID NO: 672584 - DNA, 75 bp, synthetic construct
  source 1..75: mol_type = other DNA
agcgacaagtcgctgattgcgccgccaaaacttaccgcctggatcgaaaccgtggcggcagaaattggcgtgccg

SEQ ID NO: 672585 - DNA, 75 bp, synthetic construct
  source 1..75: mol_type = other DNA
ggcggtgtatgacatggcccgcaagggggcgcaggatgagctccggctgcagttgcgtgatggcggtatgttatc

SEQ ID NO: 672586 - DNA, 75 bp, synthetic construct
  source 1..75: mol_type = other DNA
ccgcctcggttgctacctgctggtgactttactgcgcgagctgcacgacgccgaactccctgtggaagtctggct

SEQ ID NO: 672587 - DNA, 75 bp, synthetic construct
  source 1..75: mol_type = other DNA
atggatttatcgctcttaaaagcgttgagcgaggcagatgcgatcgcctcctcagaacaggaagtacggcagatc

SEQ ID NO: 672588 - DNA, 75 bp, synthetic construct
  source 1..75: mol_type = other DNA
gctggataaatataccgcccgtcagaaagagctgaataaggccctgaaagacggaaaaatcctgcaggcggatta

SEQ ID NO: 672589 - DNA, 75 bp, synthetic construct
  source 1..75: mol_type = other DNA
tgatgcgcggctatgcggaaggtgggttatgtgggtggtgccggaagtccggcgcagatgcggcgggcggaaggt

SEQ ID NO: 672590 - DNA, 75 bp, synthetic construct
  source 1..75: mol_type = other DNA
ggaagtgtggctggtggcaagttccagcgaagaggtgggattacgcggcgggcaaactgccacccgcgcggtgtc

SEQ ID NO: 672591 - DNA, 75 bp, synthetic construct
  source 1..75: mol_type = other DNA
ccggcactggcgtacccacagtggtgatggggcctgcaacccgccacggacattgcgccgcatcgattgccgact

SEQ ID NO: 672592 - DNA, 75 bp, synthetic construct
  source 1..75: mol_type = other DNA
agccgtcaggtgtgaaggtgtctgccggtgagcgccaggaagaccgggcgcatgcagccatgctggcgcttgaaa

SEQ ID NO: 672593 - DNA, 75 bp, synthetic construct
  source 1..75: mol_type = other DNA
cgggatgacatgatggcggcgcatcgtgtgccgccgcagatgatggggataatgccaaacaatgttggggggttt

SEQ ID NO: 672594 - DNA, 75 bp, synthetic construct
  source 1..75: mol_type = other DNA
cgctgccgtgcatcacagttccccgattgcagtaaagtgcaacattctgaccagtacctatatccctcacccgct

SEQ ID NO: 672595 - DNA, 75 bp, synthetic construct
  source 1..75: mol_type = other DNA
tcccgtcagccctgctcaacgagtccgccacactgttccgccgtaagtattacatcaacggcagccatgcaggtt

SEQ ID NO: 672596 - DNA, 75 bp, synthetic construct
  source 1..75: mol_type = other DNA
ggggatgtcgaaaaggcgagtcatgtatttgttcgtaacgagttaattccattacaaaaaaggctaattgaatta

SEQ ID NO: 672597 - DNA, 75 bp, synthetic construct
  source 1..75: mol_type = other DNA
cgctggtatgagccgcccgtcagctttgacggactggcgcgcaccttccgcgctgccgtgcaccacagttcacca

SEQ ID NO: 672598 - DNA, 75 bp, synthetic construct
  source 1..75: mol_type = other DNA
ggggatgtggagaaggccgcaaatgtatttgtgcgtaatgagttaattccgcttcaaagaattatacaaggattt

SEQ ID NO: 672599 - DNA, 75 bp, synthetic construct
  source 1..75: mol_type = other DNA
ccagtacctacatcccccacccgctgctcagccagcaggcatttacccgttttgtgcaggactatctggtatttg

SEQ ID NO: 672600 - DNA, 75 bp, synthetic construct
  source 1..75: mol_type = other DNA
ggacagccgaaagccagtatgccgtgttgcatgagaagttgtctgctgacgttctggatggacagaagaaatcgc

SEQ ID NO: 672601 - DNA, 75 bp, synthetic construct
  source 1..75: mol_type = other DNA
catttcgcgaccgggggatttacggggacggggggtaaatatgaacctgcgggaattgttcatcgcggggagttt

SEQ ID NO: 672602 - DNA, 75 bp, synthetic construct
  source 1..75: mol_type = other DNA
cgccgccgtgcatcacagttcaccaattgcggtgaaatgcaacattctgaccagtacctacatccctcacccgct

SEQ ID NO: 672603 - DNA, 75 bp, synthetic construct
  source 1..75: mol_type = other DNA
gtaacgcctacctggaaaaacgcacgaaccgattcggtgaagttatcgcccttgagcctgcactggccaaataca

SEQ ID NO: 672604 - DNA, 75 bp, synthetic construct
  source 1..75: mol_type = other DNA
ggggatgtggaaaaagccgcgaaggtttttgtcagaaatgagttggttcctttgcagaaaagactagttgagcta

SEQ ID NO: 672605 - DNA, 75 bp, synthetic construct
  source 1..75: mol_type = other DNA
ttccatccgccctgctcaacgagtccgccacgctgttccgccggaagtattacattaacggcagccatgcgggct

SEQ ID NO: 672606 - DNA, 75 bp, synthetic construct
  source 1..75: mol_type = other DNA
ctactggtttgtgcaatacggcatgactacacagccgtatcagttcacgaaaggcagcatttttcacctgatgga

SEQ ID NO: 672607 - DNA, 75 bp, synthetic construct
  source 1..75: mol_type = other DNA
aacttcttggtacagaaatcccgaaaattacatgggaaaagattgagagaagtttaacagatgttgaagatgaaa

SEQ ID NO: 672608 - DNA, 75 bp, synthetic construct
  source 1..75: mol_type = other DNA
ttcttccaaagataaaacacgtcttgcattcgcaggtctgaaattcggcgattacggttctatcgattatggccg

SEQ ID NO: 672609 - DNA, 75 bp, synthetic construct
  source 1..75: mol_type = other DNA
gtttctgaatatcaaaaacgtgagccgtgacgacatgatggcggcacaccgtgtgccgcctcagatgatggggat

SEQ ID NO: 672610 - DNA, 75 bp, synthetic construct
  source 1..75: mol_type = other DNA
tatttgttcgcaatgaattgatgccactacagaagcgactacatgaactaaacgaatgggtgggtgcagaagtaa

SEQ ID NO: 672611 - DNA, 75 bp, synthetic construct
  source 1..75: mol_type = other DNA
ctatgtggaatgcgtacagatggatcgctggtatgagccgcctgtgagtttcgacggcctggcgcgaaccttccg

SEQ ID NO: 672612 - DNA, 75 bp, synthetic construct
  source 1..75: mol_type = other DNA
gagtgccgccgcaaatgatggggataatgcctaataatgttggggggtttggggatgtggagaaagctgccaaag

SEQ ID NO: 672613 - DNA, 75 bp, synthetic construct
  source 1..75: mol_type = other DNA
atgggaaagagtaagaaaaaccgcgctgcggcgacgaatcagctcaagcataaaaaccagacttcagccgaagca

SEQ ID NO: 672614 - DNA, 75 bp, synthetic construct
  source 1..75: mol_type = other DNA
cttgagcctgcgctggcaaaatacacccgacgagggttagacctggagacctactggtttgtgcaatacggcatg

SEQ ID NO: 672615 - DNA, 75 bp, synthetic construct
  source 1..75: mol_type = other DNA
ggacaggattcgggaaataaacggctggcttggtcaggaagtcatccgctttaaaaactactcactggacactga

SEQ ID NO: 672616 - DNA, 75 bp, synthetic construct
  source 1..75: mol_type = other DNA
cacaaagtagcgccaccatgcagaatacctggtggcaggtatctggagactctgtgctcaaatcgctgaaaacca

SEQ ID NO: 672617 - DNA, 75 bp, synthetic construct
  source 1..75: mol_type = other DNA
tcatgacgcagcgcttaaccagaacaatgactatagaggtattttctttactgaaaatggtggtactctggattt

SEQ ID NO: 672618 - DNA, 75 bp, synthetic construct
  source 1..75: mol_type = other DNA
tttggcctggagctggagaaatcagcgttcgggaaatataacgtggacaatgcgataaacgccaacttccgttat

SEQ ID NO: 672619 - DNA, 75 bp, synthetic construct
  source 1..75: mol_type = other DNA
ccgctattgacccggcaggagttcaccgcctgggtgcaggattatttaattttcggtaactgttacatggaatgc

SEQ ID NO: 672620 - DNA, 75 bp, synthetic construct
  source 1..75: mol_type = other DNA
aatctgaacaagcgtatgggtgacctgcgggatactcagggggatgccggcgtctggacgcgcatcatgaacggt

SEQ ID NO: 672621 - DNA, 75 bp, synthetic construct
  source 1..75: mol_type = other DNA
aaaaccagaaaacggaaatctgaatgttgaactggtcagtgcaccagatggcactgctggcgacgtattccgggc

SEQ ID NO: 672622 - DNA, 75 bp, synthetic construct
  source 1..75: mol_type = other DNA
gacagaaatcctgcttaaacaggccatggtgggcattgtcgggcgtatcggcagcgccattggtggtgctttcgg

SEQ ID NO: 672623 - DNA, 75 bp, synthetic construct
  source 1..75: mol_type = other DNA
atgatgttaatcgtcgtctgtgtgacgattctgtgttttgtctggatggtgagggattcgctttgcggactccgg

SEQ ID NO: 672624 - DNA, 75 bp, synthetic construct
  source 1..75: mol_type = other DNA
atgtcggcggtgccggaagtccggcgcagatgcggcgggcggaagggatccggtttgagcagaacaacagcgtgg

SEQ ID NO: 672625 - DNA, 75 bp, synthetic construct
  source 1..75: mol_type = other DNA
tgtacgcttcagcactctttgattccggggcttattttgacctgattggtaaatatctccatcacgacaatcagt

SEQ ID NO: 672626 - DNA, 75 bp, synthetic construct
  source 1..75: mol_type = other DNA
ttgaaaccgagctccggacgctggagaagcacagcggtgcgaatgagaaaatcagccagcagcgccgtgatttat

SEQ ID NO: 672627 - DNA, 75 bp, synthetic construct
  source 1..75: mol_type = other DNA
cgtcaggcgcagcgggagtcggaagagcagcgccttcgtgacgtgtacggtgataatccggatgcgctggcgaag

SEQ ID NO: 672628 - DNA, 75 bp, synthetic construct
  source 1..75: mol_type = other DNA
aggtggtatgagccgcccgtaagttttgacgggctggcgcgcacttaccgcgccgctgttcatcacagctcgccg

SEQ ID NO: 672629 - DNA, 75 bp, synthetic construct
  source 1..75: mol_type = other DNA
gatcgctggtatgaaccgccggtgagctttgacggactggcgcggacctatcgcgccgccgtgcatcacagctca

SEQ ID NO: 672630 - DNA, 75 bp, synthetic construct
  source 1..75: mol_type = other DNA
ggcgcggcgttgacctagaatcctactggtttgtgaactacggcctgacgatgcagccttatgagttcaccagag

SEQ ID NO: 672631 - DNA, 75 bp, synthetic construct
  source 1..75: mol_type = other DNA
cattttcggcggataagtcaattgatctatcaacgagccgggatcgttctggctgaccataaacgcgacatggtt

SEQ ID NO: 672632 - DNA, 75 bp, synthetic construct
  source 1..75: mol_type = other DNA
ggggcgcttcttacccttctgtgcctcatcaagctactgccattactgcccagcgaacattccggctcattaaaa

SEQ ID NO: 672633 - DNA, 75 bp, synthetic construct
  source 1..75: mol_type = other DNA
aatactaccgaatttgtccctgttggcctgctttctgacatcgcacaaagtttccatatgcaaaccgctcaagtc

SEQ ID NO: 672634 - DNA, 75 bp, synthetic construct
  source 1..75: mol_type = other DNA
cgcaacctgcggcaaaaaaaatgactgccagtgccccaaaaatggaggcattcacctttggtgagccggtgccgg

SEQ ID NO: 672635 - DNA, 75 bp, synthetic construct
  source 1..75: mol_type = other DNA
gcaatcagaaaccgggtcagcgattacgtggaaatatcccagctgcattttgcgcggcgataattccattggtga

SEQ ID NO: 672636 - DNA, 75 bp, synthetic construct
  source 1..75: mol_type = other DNA
tgcaaagacgtgttctcggaactgccgctggaatttgccgttgaagcacaaaaactcctcgccatcagtcttgaa

SEQ ID NO: 672637 - DNA, 75 bp, synthetic construct
  source 1..75: mol_type = other DNA
gttctactcggtggcgctgaccagcggtcatcagcaggctgataccggcaccaagatgatccacatcggtaagaa

SEQ ID NO: 672638 - DNA, 75 bp, synthetic construct
  source 1..75: mol_type = other DNA
tggctgcgcttttgctaagtgcgaatgcatcagcagccattgaaattaataaccaccaggccagaaatatggatg

SEQ ID NO: 672639 - DNA, 75 bp, synthetic construct
  source 1..75: mol_type = other DNA
atgtctcgtaatactgaagcaactgacgatatcaaaacctggaccggcggcccgctgaattataaagaaggattc

SEQ ID NO: 672640 - DNA, 75 bp, synthetic construct
  source 1..75: mol_type = other DNA
tgttccgctccggtgcgtgacagctatcagttacacgcggcggtggtggaagtcatcatccataaaaacgccgag

SEQ ID NO: 672641 - DNA, 75 bp, synthetic construct
  source 1..75: mol_type = other DNA
aaagctcgctcaagtatgatgccaccagccgccagattgagatctacccgattgccggaacacgcccacgcggtc

SEQ ID NO: 672642 - DNA, 75 bp, synthetic construct
  source 1..75: mol_type = other DNA
taactcgtgcctacggtgagtcatcgcaacttggcaacctgtttaccgatgcaatgcttgtcgctgcaccgactg

SEQ ID NO: 672643 - DNA, 75 bp, synthetic construct
  source 1..75: mol_type = other DNA
ttgccgcaacattgctgactattttttcggtctcagtcatggcgcaggatgtcacgattatttataccaatgatc

SEQ ID NO: 672644 - DNA, 75 bp, synthetic construct
  source 1..75: mol_type = other DNA
cttccagtgacaacgtggaggcgctggagcagcagtattattcccagtgcctgcagacgctgattgagtccattg

SEQ ID NO: 672645 - DNA, 75 bp, synthetic construct
  source 1..75: mol_type = other DNA
gcttttcgcttgttgcaggatctgctgaatgtaccgaaggaagaacgggaagcgatgttcttcggtggcctgttc

SEQ ID NO: 672646 - DNA, 75 bp, synthetic construct
  source 1..75: mol_type = other DNA
agacctcgacagccgcatcgaactggaaatgcgtaccgaccataaagaactttcagaacatctgatgctggtgga

SEQ ID NO: 672647 - DNA, 75 bp, synthetic construct
  source 1..75: mol_type = other DNA
ggtggttatcgatccgctggtgactgaaacttctaccttctggcagaaccacggcgagtcgaacgatgtcgatcc

SEQ ID NO: 672648 - DNA, 75 bp, synthetic construct
  source 1..75: mol_type = other DNA
gttactgctcggtaacatgggtatggccggtggcggcgtgaacgcattgcgtggtcactccaacattcaggggct

SEQ ID NO: 672649 - DNA, 75 bp, synthetic construct
  source 1..75: mol_type = other DNA
atgaagatgattgcagctgtcggccgcaactatgaaatcggcattggcaacgaacttccctggcgttgcccgacc

SEQ ID NO: 672650 - DNA, 75 bp, synthetic construct
  source 1..75: mol_type = other DNA
ggcacgattacctttggcgacattaccagtacattccccttcaagaatgaacttactgaaatggatctcagcggt

SEQ ID NO: 672651 - DNA, 75 bp, synthetic construct
  source 1..75: mol_type = other DNA
aaatcaacgccgaatacgttaagcattacaccaacgctagcctgctggtgcgtgatgattttgctttcgaagatg

SEQ ID NO: 672652 - DNA, 75 bp, synthetic construct
  source 1..75: mol_type = other DNA
caaccgtgcttcggcggatatcaacggtaaaccgtgggatccgaaacggatgctgatccagtggaacggcagcaa

SEQ ID NO: 672653 - DNA, 75 bp, synthetic construct
  source 1..75: mol_type = other DNA
tcgtgactacgatccggatgttctgcagaaggcggttctggatgcggtgagtgccctgccggctccgcaggacgg

SEQ ID NO: 672654 - DNA, 75 bp, synthetic construct
  source 1..75: mol_type = other DNA
gaattaaaccgttgttgcatcagtgtgtgcgggttcttgatagacccgatataacgccagatggcttaacgttag

SEQ ID NO: 672655 - DNA, 75 bp, synthetic construct
  source 1..75: mol_type = other DNA
ggattaaacctttgctgcatcaatgcgtgcaggtgcttgataaacccggcatcacgccagatggtttaacgttag

SEQ ID NO: 672656 - DNA, 75 bp, synthetic construct
  source 1..75: mol_type = other DNA
agccaggcacgtttcacggcgaaaggcgtacgctggattggtggactgtgggcagaacacattgccagggggcag

SEQ ID NO: 672657 - DNA, 75 bp, synthetic construct
  source 1..75: mol_type = other DNA
atggggttatttcataagagtgcggataaggaaaagttagaggcactggaaaaagttatttcaaaaaccaatcgg

SEQ ID NO: 672658 - DNA, 75 bp, synthetic construct
  source 1..75: mol_type = other DNA
atggggttatttcataagagtgcggagaaggagaagttagaggcactggaaaaggttatttcaaaaaccaatcgt

SEQ ID NO: 672659 - DNA, 75 bp, synthetic construct
  source 1..75: mol_type = other DNA
aaagccgtgaaaagctacaggtacttgaggaagtaattgctcagagtcatcgtggagtgtttaaacgcatcgatg

SEQ ID NO: 672660 - DNA, 75 bp, synthetic construct
  source 1..75: mol_type = other DNA
atgtctgttttattatcgcctttatctcttcaggctgcggatgtccggcgtagcggagatgaagcatttatcatt

SEQ ID NO: 672661 - DNA, 75 bp, synthetic construct
  source 1..75: mol_type = other DNA
aggcccgcaggtcgcgtaactacattaatgatacggaaatccaggtccagcgccggcagacggcggcctggcgac

SEQ ID NO: 672662 - DNA, 75 bp, synthetic construct
  source 1..75: mol_type = other DNA
gtatcagccgcttgatctgcaagcctgggcgtattttaaggaccgcgttagagaggaaggcatgacttataaagc

SEQ ID NO: 672663 - DNA, 75 bp, synthetic construct
  source 1..75: mol_type = other DNA
ggtttggcgcacagccggcgccggaagaaacgttcggtgaggcaacggcgctcagtaagatcctgcagatgaatg

SEQ ID NO: 672664 - DNA, 75 bp, synthetic construct
  source 1..75: mol_type = other DNA
ggtttggtgcacagccggcaccggaggaaatcttcggtgaggcaacggcgctcagtaagatcctgcagatgaatg

SEQ ID NO: 672665 - DNA, 75 bp, synthetic construct
  source 1..75: mol_type = other DNA
cgatcatggttatatcaccacacgggttctggcgccttcgcaggatttaaaaagcggtattctccggctgcttat

SEQ ID NO: 672666 - DNA, 75 bp, synthetic construct
  source 1..75: mol_type = other DNA
gatctgaagctatttaagagactcaccaaaaacgccactgtcgttatggggcgtaaaacgatggaaagtctcaaa

SEQ ID NO: 672667 - DNA, 75 bp, synthetic construct
  source 1..75: mol_type = other DNA
ttgaagttcaggaagatgatccggaggaaatggaaggcgctgaacatccacacaaggagaacactgacggcaatc

SEQ ID NO: 672668 - DNA, 75 bp, synthetic construct
  source 1..75: mol_type = other DNA
agcagggctggcctgcggtcttaccggaaacagcaccgcatcagcagcagtgggagcacaaagcgggaagaatgc

SEQ ID NO: 672669 - DNA, 75 bp, synthetic construct
  source 1..75: mol_type = other DNA
taacacgattgatgccaccggcgacacggcatccacggaagataaaaccttcgaagcgtgccgcacggcggtgac

SEQ ID NO: 672670 - DNA, 75 bp, synthetic construct
  source 1..75: mol_type = other DNA
gattgcttgcgggtgaactatgagccgaatatcgatattcgggcagtaaaaactaagacaggtgaggttgtggcc

SEQ ID NO: 672671 - DNA, 75 bp, synthetic construct
  source 1..75: mol_type = other DNA
ctgaaagtgtgtgaagtgctggcctccaccagcgcaccggatcgcaccaccaccttcctgtacgcgctgggctgg

SEQ ID NO: 672672 - DNA, 75 bp, synthetic construct
  source 1..75: mol_type = other DNA
gtcactgtctcaagcaagcgtggctttatccgcgcggtggctgtggtaacgcgccgtctgaaaccgctgaatgta

SEQ ID NO: 672673 - DNA, 75 bp, synthetic construct
  source 1..75: mol_type = other DNA
aggtgatcaaactggttaacagcattgataaaattggttttattcagacttcggcagtgaatgatttaaatcagc

SEQ ID NO: 672674 - DNA, 75 bp, synthetic construct
  source 1..75: mol_type = other DNA
tcgctggcaccgcttgatattgatgccaacggcactctaatcggcaatgatgattacaactgtcttgcagaaggt

SEQ ID NO: 672675 - DNA, 75 bp, synthetic construct
  source 1..75: mol_type = other DNA
cggctatcaccctgaaaatcgacccgtcagtcgtgctggcaacgcgccagtatgtcgacgacaaagttatcgagg

SEQ ID NO: 672676 - DNA, 75 bp, synthetic construct
  source 1..75: mol_type = other DNA
cctaaccgcgataccattctgaagaactataagggaatggcgataaaatcgaaggaccttctggagttaaaaaat

SEQ ID NO: 672677 - DNA, 75 bp, synthetic construct
  source 1..75: mol_type = other DNA
gttaaagcttattggctctcagttcgacaggaacgctcaatacacattagttcttgagaatgcggaaatgagaac

SEQ ID NO: 672678 - DNA, 75 bp, synthetic construct
  source 1..75: mol_type = other DNA
gtagtgccattgaagagctaaaagacctcgttgggcgggtcatcaaccgtctaaacggcagccgagttgtgatca

SEQ ID NO: 672679 - DNA, 75 bp, synthetic construct
  source 1..75: mol_type = other DNA
acagcaccatgagctgccgctggtgatcccgctgttgttctatcacggagagcggagtccgtacccgtacagcat

SEQ ID NO: 672680 - DNA, 75 bp, synthetic construct
  source 1..75: mol_type = other DNA
gctggtggatttaagtgatatggccacactcagtaatgccctaatgagaagggcgcacatggctggtatgccggt

SEQ ID NO: 672681 - DNA, 75 bp, synthetic construct
  source 1..75: mol_type = other DNA
atggtgctaccgaaagccgaaattccacatatcaaagccaaatatacccttgatggtaaagaactcaccgcgcca

SEQ ID NO: 672682 - DNA, 75 bp, synthetic construct
  source 1..75: mol_type = other DNA
atgtgcagtttcgcctgactcaaaatgttgaggaactcttaaaaagagaagcagccaaacagcatttaagcccaa

SEQ ID NO: 672683 - DNA, 75 bp, synthetic construct
  source 1..75: mol_type = other DNA
gcgtcaggccgtggaaatcgccacccgcccgctggtagcctatggtgccgcgcagccatgctacgttaatgggat

SEQ ID NO: 672684 - DNA, 75 bp, synthetic construct
  source 1..75: mol_type = other DNA
actcgctctgacaatgaaaataccaggacagctatcgctgagtttcttttcggtctcgatgatttggaaactcac

SEQ ID NO: 672685 - DNA, 75 bp, synthetic construct
  source 1..75: mol_type = other DNA
agacgatgtcggcaatctcgaaacaatgggttgcaggcatgcatcaatattggcgtgataacaatttatctatgc

SEQ ID NO: 672686 - DNA, 75 bp, synthetic construct
  source 1..75: mol_type = other DNA
gccccagcacgaggacaacattatgacactggctgaacgcattgagcagaaaggtattgccaagggcattgagcg

SEQ ID NO: 672687 - DNA, 75 bp, synthetic construct
  source 1..75: mol_type = other DNA
gccacagcacgagggcaatattatgacactggcagaacaactgaagcagagcgggcgtgaggaaggcattgcgct

SEQ ID NO: 672688 - DNA, 75 bp, synthetic construct
  source 1..75: mol_type = other DNA
ccagatcgtttcatctggtggacgtgacggtgctggatgacgacgagataatgcagcaccggcgtatgggggctc

SEQ ID NO: 672689 - DNA, 75 bp, synthetic construct
  source 1..75: mol_type = other DNA
agccgagctgcaagtgacccggccaaggctttgggaacggttcagacctactggggtatcctcagtttcttccta

SEQ ID NO: 672690 - DNA, 75 bp, synthetic construct
  source 1..75: mol_type = other DNA
atgcgtccgaacattacaatcatcatcccagagccatacctgcctttagacgagtattgccgccgtactggtacc

SEQ ID NO: 672691 - DNA, 75 bp, synthetic construct
  source 1..75: mol_type = other DNA
gtggaccaggacctgaagcagtatgcgtgtgatgcactgttcagtatgaagaccgtcagcggtgaggatggttat

SEQ ID NO: 672692 - DNA, 75 bp, synthetic construct
  source 1..75: mol_type = other DNA
tccaaaccctaactacgatacgaatagacggctatctattgagcatgattaccaaatggtacatggcgaggcgaa

SEQ ID NO: 672693 - DNA, 75 bp, synthetic construct
  source 1..75: mol_type = other DNA
atgaccaaagcggagatcgccagcgctgttaatgagtggttcaacattgaaaattacagcgtcctgcaaaatttg

SEQ ID NO: 672694 - DNA, 75 bp, synthetic construct
  source 1..75: mol_type = other DNA
acagtggaacagcttttccaagagatagaaaacaggattgtcgcctatcgtatggaacaaaaccgggctgagttg

SEQ ID NO: 672695 - DNA, 75 bp, synthetic construct
  source 1..75: mol_type = other DNA
caacgccattcgccagcttgccgctgccaacatcttccctggggatatgttatttaaaaactttggcgtcacccg

SEQ ID NO: 672696 - DNA, 75 bp, synthetic construct
  source 1..75: mol_type = other DNA
agatgcacgccgacctgttccgcgccgactactggcgcgcgctacaaaaccgtatccgtgacgggcatgtggaag

SEQ ID NO: 672697 - DNA, 75 bp, synthetic construct
  source 1..75: mol_type = other DNA
tttaagtctacaatgtttaaagattttgttcttggtaggttttttaaaatcgttgaatttgtttctccaccgaca

SEQ ID NO: 672698 - DNA, 75 bp, synthetic construct
  source 1..75: mol_type = other DNA
ggaatgttgtcgggtatattgtccctgctattgtcacgatccctgcgttgggaatattaggtcgaatcttaggtg

SEQ ID NO: 672699 - DNA, 75 bp, synthetic construct
  source 1..75: mol_type = other DNA
ggaacctttgcgggtatgtacttccagctattgtgacactaccagctttgggtattatggggcgaaaattaggcc

SEQ ID NO: 672700 - DNA, 75 bp, synthetic construct
  source 1..75: mol_type = other DNA
cgcaaggcccggagttttgccgttttgtgatgggctactggcgattcatggactggaatatgtgcgcccgccagt

SEQ ID NO: 672701 - DNA, 75 bp, synthetic construct
  source 1..75: mol_type = other DNA
gaaatcatcaatcacctgaaagtcatggttcctgagtggaaagaacaactacaggctcctgagcctgcagccaga

SEQ ID NO: 672702 - DNA, 75 bp, synthetic construct
  source 1..75: mol_type = other DNA
atgctggttcaaattaatctggcagaaacatcacccgaagaaatcatcaatcacctgaaagtcatggttcctgag

SEQ ID NO: 672703 - DNA, 75 bp, synthetic construct
  source 1..75: mol_type = other DNA
actatggaattattggtgccgcgtatgcatggagtataagagtgactattgattatatattattggcattttttg

SEQ ID NO: 672704 - DNA, 75 bp, synthetic construct
  source 1..75: mol_type = other DNA
agatgcacgccgacttgttccgcgctgattactggcgcgcactacaaaaccgcatacgtgaagggcatgtggaag

SEQ ID NO: 672705 - DNA, 75 bp, synthetic construct
  source 1..75: mol_type = other DNA
agcactccaacctggacaaactacttaatcggctagacgccatctccagcgggttctttggcggcattatctcaa

SEQ ID NO: 672706 - DNA, 75 bp, synthetic construct
  source 1..75: mol_type = other DNA
atgacgcccgcacaacacagcattcagcactccaatctggacaaacttcttaaccggctcgacaccatctccagt

SEQ ID NO: 672707 - DNA, 75 bp, synthetic construct
  source 1..75: mol_type = other DNA
gcatactgtgaggttaagcttggtgaaaaaagcacatatcatgaggtggagcattttaaagataagaatgattac

SEQ ID NO: 672708 - DNA, 75 bp, synthetic construct
  source 1..75: mol_type = other DNA
gtaggcaaattactgttttcgatgacacatcacagttaacatttgatgatttcgctagagaaaacggtgttacct

SEQ ID NO: 672709 - DNA, 75 bp, synthetic construct
  source 1..75: mol_type = other DNA
actccacccttgcaaaacacagcgatgtgtttctcagtgcggctgttaaacaggaaagttgtcccttaaatctgg

SEQ ID NO: 672710 - DNA, 75 bp, synthetic construct
  source 1..75: mol_type = other DNA
aacactccaatctggacaaactccttaaccggttagattccatctcaagtgggttctttggcggcattgtttcta

SEQ ID NO: 672711 - DNA, 75 bp, synthetic construct
  source 1..75: mol_type = other DNA
tctctatgacgctaatggcgtgctgattgcgaagaaaggtcagttgctgagtagctttgcgcatctgcgtgatga

SEQ ID NO: 672712 - DNA, 75 bp, synthetic construct
  source 1..75: mol_type = other DNA
cccgtcggtttccgctgggcgatggaagcaaaaaacaacaacgatgcaaccctgatcgttgtcgatcctcgtttt

SEQ ID NO: 672713 - DNA, 75 bp, synthetic construct
  source 1..75: mol_type = other DNA
acggagagtcgaatgatgtcgatccggcatctatccagaccgaggtattccgtctgccgtccacctgctttgccg

SEQ ID NO: 672714 - DNA, 75 bp, synthetic construct
  source 1..75: mol_type = other DNA
gtgatgataatccgggctctctggaagatcatctgaattttgttccttcagatgatctgaaatatgagctcggga

SEQ ID NO: 672715 - DNA, 75 bp, synthetic construct
  source 1..75: mol_type = other DNA
aattaccgccctgttttttatggacaaggtaaaattccgcattaaatggaataaaaattcaggagagatttcatt

SEQ ID NO: 672716 - DNA, 75 bp, synthetic construct
  source 1..75: mol_type = other DNA
aaatcagcgaaacgctggcggcggcgaaaggcattaataatggcgatcgtgtcactgtctccagcaagcgtggct

SEQ ID NO: 672717 - DNA, 75 bp, synthetic construct
  source 1..75: mol_type = other DNA
aaaatcgctctctgccagccaaaaattatggctggagttacctggcaaccgcccacaacatgccgccggaacgcc

SEQ ID NO: 672718 - DNA, 75 bp, synthetic construct
  source 1..75: mol_type = other DNA
cctattgtatcaaggcgcgacatttacgccttacaccagtgattacggaactctatacgatggtagtgaagacat

SEQ ID NO: 672719 - DNA, 75 bp, synthetic construct
  source 1..75: mol_type = other DNA
ttgacaagttgcagccaggccgacgcgtgccagctcgccgcagtgcctggcatcttccgtacatcgtctttctcg

SEQ ID NO: 672720 - DNA, 75 bp, synthetic construct
  source 1..75: mol_type = other DNA
gcgtgcgcgtgatctgcagcgtgaacatctggccattgccgtggggcaggtacagaaagcggccagcgcctatgt

SEQ ID NO: 672721 - DNA, 75 bp, synthetic construct
  source 1..75: mol_type = other DNA
atgtcgtaccgtcatttcgccgcttataacgtgatcggcgcactgttgtgggtactgctttttacctacgcaggc

SEQ ID NO: 672722 - DNA, 75 bp, synthetic construct
  source 1..75: mol_type = other DNA
cgtcgggattattgtggtttctattttgccgggcgtcatcgaaataatccgtcacaaacgcgctgcggcacgcgc

SEQ ID NO: 672723 - DNA, 75 bp, synthetic construct
  source 1..75: mol_type = other DNA
gggcgctggcctcgctgggaactaacgatctcaatgtccatatgatggtagtactgatgctggttgccgcgattg

SEQ ID NO: 672724 - DNA, 75 bp, synthetic construct
  source 1..75: mol_type = other DNA
tttctcgcttttgctgcgctggcggcgaaacatcagattgataatcctggttatgcgcataaatcgttttattat

SEQ ID NO: 672725 - DNA, 75 bp, synthetic construct
  source 1..75: mol_type = other DNA
tcaactggaaatgcgtaaggcggaatccgggatactgcgcatgatggcgccggaatggtggtacctgcgtcttaa

SEQ ID NO: 672726 - DNA, 75 bp, synthetic construct
  source 1..75: mol_type = other DNA
tgagctgcgtcggttgcgtgatcaggtactgactgaccgcagaatggatgcggttctggctgctgcggatgttgg

SEQ ID NO: 672727 - DNA, 75 bp, synthetic construct
  source 1..75: mol_type = other DNA
tttgaggacatagccaatgagcaggggcttgccggtgagttctacactataaccgcgccttctcgcttccacgcg

SEQ ID NO: 672728 - DNA, 75 bp, synthetic construct
  source 1..75: mol_type = other DNA
atcacgccgtcgatacctggcggcgtgagacgttcgcgccgggtacgccagctgatgcaacgattacagagcgcc

SEQ ID NO: 672729 - DNA, 75 bp, synthetic construct
  source 1..75: mol_type = other DNA
ggacttaccgacgcgggcggctttctcgatatttctctcgattttctcttttacgcgctggtgccgtttggtttt

SEQ ID NO: 672730 - DNA, 75 bp, synthetic construct
  source 1..75: mol_type = other DNA
ggcaaaaccattattcttgcccgttttgtgccaatcgtcagaacgttcgccccgttcgttgcggggatgggccac

SEQ ID NO: 672731 - DNA, 75 bp, synthetic construct
  source 1..75: mol_type = other DNA
gcgcggtctggtttatctgccggaagatcgccagtcatccggactgaatctcgatgcttcgctggcctggaatgt

SEQ ID NO: 672732 - DNA, 75 bp, synthetic construct
  source 1..75: mol_type = other DNA
atgaataacaccacacattacgaaaacgccaatttcctgcgcgagctggccgaaagcctgcctcgtattttgcca

SEQ ID NO: 672733 - DNA, 75 bp, synthetic construct
  source 1..75: mol_type = other DNA
acgccaatttcctgcgcgagctggctgaaagcctgcctcgtattttgcctgaaggcagtacagacaagtctgcat

SEQ ID NO: 672734 - DNA, 75 bp, synthetic construct
  source 1..75: mol_type = other DNA
gcggcgctgggctgccagtttgatctgcatagtctggcaggatcgctggatgttgccgatcgccaaatggtggaa

SEQ ID NO: 672735 - DNA, 75 bp, synthetic construct
  source 1..75: mol_type = other DNA
atgcaaacgagtgatacccgcgcgttaccgctactttgcgcccgctcggtttataaacagtattcaggggttaat

SEQ ID NO: 672736 - DNA, 75 bp, synthetic construct
  source 1..75: mol_type = other DNA
tggatgtctcggcccgtaatgatatctaccagctgttgcgcagcatcgccgcacagaatgtggctgtgctgctta

SEQ ID NO: 672737 - DNA, 75 bp, synthetic construct
  source 1..75: mol_type = other DNA
atgttttgtgtgatttatcgaagcagcaagcgtgaccagacctatttatatgtccaaaaaaaagacgatttttcg

SEQ ID NO: 672738 - DNA, 75 bp, synthetic construct
  source 1..75: mol_type = other DNA
aagttaaacaggccttagctgagcatggctattatcttcaattgccaccacctcctgaggatttgctgaagcaac

SEQ ID NO: 672739 - DNA, 75 bp, synthetic construct
  source 1..75: mol_type = other DNA
ggtgattctctactgtttgttgccggagcgttggcatcactggaaactaacgatctcaacgttcatatgatggtc

SEQ ID NO: 672740 - DNA, 75 bp, synthetic construct
  source 1..75: mol_type = other DNA
gccggcctgctgtcgtaaggcggttcagatggtcagtctgttccggcagggtgtgcgtaattaccggcaactgaa

SEQ ID NO: 672741 - DNA, 75 bp, synthetic construct
  source 1..75: mol_type = other DNA
aagatattgaacgttcggccctgacattaaaggactcactgtatttattaaaaaatacagaggagattcaacgtg

SEQ ID NO: 672742 - DNA, 75 bp, synthetic construct
  source 1..75: mol_type = other DNA
gaaatggaaaatgccgtgctcccgaataagcaatgcaccgaaggcgatcaacatgccaatggcaataatgaaaca

SEQ ID NO: 672743 - DNA, 75 bp, synthetic construct
  source 1..75: mol_type = other DNA
ctcttacgatctcaacctgcggatcaaaaatatgctacccgatctctatgctgaagatcccgatttctaccgcaa

SEQ ID NO: 672744 - DNA, 75 bp, synthetic construct
  source 1..75: mol_type = other DNA
aaaaaagcccggttggctgtctgttttatgattttttcggcgggaatactcttaaggctgatgtctctatttcgg

SEQ ID NO: 672745 - DNA, 75 bp, synthetic construct
  source 1..75: mol_type = other DNA
atgtcagcgtgcaggatatgcggatggcgctctggtttttttgaatatgcgctggggcaggcggaagatatcgcc

SEQ ID NO: 672746 - DNA, 75 bp, synthetic construct
  source 1..75: mol_type = other DNA
agcgccatttacaacggaagaatatttacaatgaaacgtttacatacccttatgttatttctggcggttctgttc

SEQ ID NO: 672747 - DNA, 75 bp, synthetic construct
  source 1..75: mol_type = other DNA
atgggcgacgcaacataccaggaaacattcgatgaaaaaaatcgggctgaagttcaggaagatgatccggaggaa

SEQ ID NO: 672748 - DNA, 75 bp, synthetic construct
  source 1..75: mol_type = other DNA
cgtagggcaacattaccccggttttgaaacggatattcacggcgcgaaacaggacgaagacggcgtttaccgcgt

SEQ ID NO: 672749 - DNA, 75 bp, synthetic construct
  source 1..75: mol_type = other DNA
cgccgcctgctgggtcttaatggtgagtcttatgttctaactcttgatatattgaatagattccttctgtcttga

SEQ ID NO: 672750 - DNA, 75 bp, synthetic construct
  source 1..75: mol_type = other DNA
cagcacgcagtaaaaaaggccgcatcaaacggcagatgtttacaaaacttcgcaccacaaaatacctgaaaaccg

SEQ ID NO: 672751 - DNA, 75 bp, synthetic construct
  source 1..75: mol_type = other DNA
gtggctgaactgcagaaggtggacgactggctgagtgccttgctggcgaatctggaaccagccacgagaagccgc

SEQ ID NO: 672752 - DNA, 75 bp, synthetic construct
  source 1..75: mol_type = other DNA
gccagtctggctgaaaccgacgcgtaatgcgttggggattcttggtgggatcccgcgccgtgaatttactcgcga

SEQ ID NO: 672753 - DNA, 75 bp, synthetic construct
  source 1..75: mol_type = other DNA
atggcggcgcttgaggcaccccggtttaatctggtgataaaggcgttttacatgcgcctacttgcagccggaaac

SEQ ID NO: 672754 - DNA, 75 bp, synthetic construct
  source 1..75: mol_type = other DNA
acagtttgaaggtaaggtgcagagcattgcccgcgttcaccattatggcctgcgtgatcgcgtcagccgcaaagg

SEQ ID NO: 672755 - DNA, 75 bp, synthetic construct
  source 1..75: mol_type = other DNA
ggaggtatcacgccagtaaacattaacggtacagtctggttccagggcgacggttgcaaagccaatacctgcggc

SEQ ID NO: 672756 - DNA, 75 bp, synthetic construct
  source 1..75: mol_type = other DNA
ttgctaacccgtttactggattaataaataaagactcaacgcctgaatcacaaaactcagcaacgttgaatattg

SEQ ID NO: 672757 - DNA, 75 bp, synthetic construct
  source 1..75: mol_type = other DNA
acgagcatactattgtggtgactgataacggctgcgaaattctgacgctacgtaaggatgacaccatcccggcga

SEQ ID NO: 672758 - DNA, 75 bp, synthetic construct
  source 1..75: mol_type = other DNA
tggcattaatctgcgcgaaatcggtgcggcgattcagaaatttgtcgaagcagaaggcttctccgtcgttcgtga

SEQ ID NO: 672759 - DNA, 75 bp, synthetic construct
  source 1..75: mol_type = other DNA
caggtgtgtcgttcggcgtatcctgacgcccgccactggctggtgctgtgcggtcatggtaataacggcggcgat

SEQ ID NO: 672760 - DNA, 75 bp, synthetic construct
  source 1..75: mol_type = other DNA
atgagctgatgcttcgcgctggcgaagcagcattccaggtgtgtcgttcggcttatcctgacgcccgccactggc

SEQ ID NO: 672761 - DNA, 75 bp, synthetic construct
  source 1..75: mol_type = other DNA
cactcatcaccgccagcacggtagcaatagcgggcataattggttgggtcggcctggtcgttccgcacattgccc

SEQ ID NO: 672762 - DNA, 75 bp, synthetic construct
  source 1..75: mol_type = other DNA
tgctgtgtgtcctgtggatgcccgttaacacttcagcggggcaatcacggacaaccaccgtggtttgaacatgac

SEQ ID NO: 672763 - DNA, 75 bp, synthetic construct
  source 1..75: mol_type = other DNA
gaagcaagcccttagttgtaacccggaagcctgggctgaacaacctggggcgtgtccatcaacacacgagttgta

SEQ ID NO: 672764 - DNA, 75 bp, synthetic construct
  source 1..75: mol_type = other DNA
ttccggaaggtttcactgatgagaaattttccagcgccatttacaacggaagaatatttacaatgaaacgtttac

SEQ ID NO: 672765 - DNA, 75 bp, synthetic construct
  source 1..75: mol_type = other DNA
gcagcccctgataatcacctgacccacgaagagcgctctgctttgcagaaactctggggcggtttggagacagga

SEQ ID NO: 672766 - DNA, 75 bp, synthetic construct
  source 1..75: mol_type = other DNA
aaaagtgctgcccgagttgtggtaccggggtatacagcagggagggggggcaggagggcaactggaaggatagga

SEQ ID NO: 672767 - DNA, 75 bp, synthetic construct
  source 1..75: mol_type = other DNA
cgaatgacagcaaggggcattttgttacggcgaaagaagcagcgaagcacaaccgccgggacgttttgtgctgtg

SEQ ID NO: 672768 - DNA, 75 bp, synthetic construct
  source 1..75: mol_type = other DNA
tgcgtgatcgcgtcagtcgcaaaggacctgaggtccgttacgcagagcgccgcctgctgggtgtaaatgatgatg

SEQ ID NO: 672769 - DNA, 75 bp, synthetic construct
  source 1..75: mol_type = other DNA
tggtcaatggtgttgaagttggcgcggtgatcgcctcacccgttgaacggttaacccgcaataccgatatcaatt

SEQ ID NO: 672770 - DNA, 75 bp, synthetic construct
  source 1..75: mol_type = other DNA
ggtgatcgcctcccctgttgaacgactgacccgtaatactgatatcaattttgacagacaacagaggcaaaccag

SEQ ID NO: 672771 - DNA, 75 bp, synthetic construct
  source 1..75: mol_type = other DNA
aacctccttggattcaactctgaatctgagagattgatcaaagacaccatgataaattggttatgtcgattgtta

SEQ ID NO: 672772 - DNA, 75 bp, synthetic construct
  source 1..75: mol_type = other DNA
gtggctgaattgcagaaggtggacgactggctgagtgcattattggcgaatctggagccagccgcaagaagccgc

SEQ ID NO: 672773 - DNA, 75 bp, synthetic construct
  source 1..75: mol_type = other DNA
ctactcgcgtagcccccaccagcgaagatgagttgggcagactggcagaggatttcaatcaactcgccagcacac

SEQ ID NO: 672774 - DNA, 75 bp, synthetic construct
  source 1..75: mol_type = other DNA
cacaaactggcggcgggcgatttcactacccgcgtgacgcccaccagtgaagatgaactgggcaaactggcgcaa

SEQ ID NO: 672775 - DNA, 75 bp, synthetic construct
  source 1..75: mol_type = other DNA
aatctgctccggcggataagctgttcccgttctttggctttaccgccgagaatattgtggcaaaagcgcataagg

SEQ ID NO: 672776 - DNA, 75 bp, synthetic construct
  source 1..75: mol_type = other DNA
agatggtccgacccaccaggccgttgagcaactggccagtctgcgcttgacgccgaattttagcacctggcgacc

SEQ ID NO: 672777 - DNA, 75 bp, synthetic construct
  source 1..75: mol_type = other DNA
tatttccatcgacggtgaaaccgaaggctggtttaccgacgatacggcaaaacgttttgaagcctatcactggca

SEQ ID NO: 672778 - DNA, 75 bp, synthetic construct
  source 1..75: mol_type = other DNA
agcggctacgagccgcgccgcgttacggctcgtacgaagcaggggcgaattaagcggcagatgttcaccaaattg

SEQ ID NO: 672779 - DNA, 75 bp, synthetic construct
  source 1..75: mol_type = other DNA
gtaaaccttttcttctcattactggttaatgaaaactgtcgtgaactgccggaacacaacccggacctgaaatac

SEQ ID NO: 672780 - DNA, 75 bp, synthetic construct
  source 1..75: mol_type = other DNA
aagctgattggtttttacgatcacaacggtatttctattgatggggaaaccgaaggctggtttaccgacgatacg

SEQ ID NO: 672781 - DNA, 75 bp, synthetic construct
  source 1..75: mol_type = other DNA
acaggaattctgcaggaaactggcacgcttaatttattcctgaaaaccaccgacagcgagtctggccatgagtga

SEQ ID NO: 672782 - DNA, 75 bp, synthetic construct
  source 1..75: mol_type = other DNA
attgcccgtgttcaccattacggtctgcgtgatcgcgtcagtcgcaaaggaccggagggtccgttacgcagagcg

SEQ ID NO: 672783 - DNA, 75 bp, synthetic construct
  source 1..75: mol_type = other DNA
attgcccgcgttcaccattatggcctgcgcgatcgcgtcagccgcaaaggaccagaagtgcgttacgcagagcgt

SEQ ID NO: 672784 - DNA, 75 bp, synthetic construct
  source 1..75: mol_type = other DNA
gccggaggtccgttacgcagagcgtcgccttctgggtgtgaataatgaggtggaaacagtcactcgtgacaccct

SEQ ID NO: 672785 - DNA, 75 bp, synthetic construct
  source 1..75: mol_type = other DNA
atgaacctgaagaaatgtggacggttaaacgtggctgaactgcagaaagtggacgactggctgagtgccttgctg

SEQ ID NO: 672786 - DNA, 75 bp, synthetic construct
  source 1..75: mol_type = other DNA
tctggaaccagccacgagaagtcgcatgatgcgccagctgacgcaggaactgcgccggacacaacagaagaacat

SEQ ID NO: 672787 - DNA, 75 bp, synthetic construct
  source 1..75: mol_type = other DNA
tgcgtgatcgcgtcagtcgtaaagggccggagatccgttacgcagagcgccgcctgctgggtgtaaatgatgatg

SEQ ID NO: 672788 - DNA, 75 bp, synthetic construct
  source 1..75: mol_type = other DNA
tcaggccgctgaggcccgccgtaatctggccacagtacttaaacgcaacgcggaccggggtatgttcaccattaa

SEQ ID NO: 672789 - DNA, 75 bp, synthetic construct
  source 1..75: mol_type = other DNA
taataacaggctgatgcacctgtccttcagttccccttttcgcgaaataaccgaaacggtgcttgttgataccgt

SEQ ID NO: 672790 - DNA, 75 bp, synthetic construct
  source 1..75: mol_type = other DNA
gcacctgccgtccggcatcctgaaagacgccactaccgtcagcctgttcctgaaagccacagataccgaggataa

SEQ ID NO: 672791 - DNA, 75 bp, synthetic construct
  source 1..75: mol_type = other DNA
tgcgcgatcgcgtcagtccaaaggggggagtcattaagtatccatcccgaaaattgctgggtttaaatgaacata

SEQ ID NO: 672792 - DNA, 75 bp, synthetic construct
  source 1..75: mol_type = other DNA
ccgccagtgccgattctgccagcgtgcagtttgaaggcaaggtacagcgcattgcccgcgttcaccattatggcc

SEQ ID NO: 672793 - DNA, 75 bp, synthetic construct
  source 1..75: mol_type = other DNA
aaccaccgaaaccaccgaaaccaccgaaaccaccgaaaccaccgaaaccaccgaaaccaccgaaaccaccgaaaa

SEQ ID NO: 672794 - DNA, 75 bp, synthetic construct
  source 1..75: mol_type = other DNA
gaactgggagatgagccgggacaggtgtttgcggcttggcaagccagtgccggagtataaaccaaagctggcaag

SEQ ID NO: 672795 - DNA, 75 bp, synthetic construct
  source 1..75: mol_type = other DNA
gcctaccgaagcgacggaacaaaaacagcagcggtaaggaagatgagaaccgacagcaacaaggcatggaaggga

SEQ ID NO: 672796 - DNA, 75 bp, synthetic construct
  source 1..75: mol_type = other DNA
cccgaccccccttgaacctattgcaatgaaaaaagaaggttttggctatgaagaagatgcttatgctaaacatgc

SEQ ID NO: 672797 - DNA, 75 bp, synthetic construct
  source 1..75: mol_type = other DNA
gcttaatttccgctgtgccgcaaaccgttagcgggcctttagccaacagtacgcttcagggggaaatatttctca

SEQ ID NO: 672798 - DNA, 75 bp, synthetic construct
  source 1..75: mol_type = other DNA
gtggcctggaaatatcaacctgtagctcaggttgccgaagtgaaggcgattcagtttgcggtgggtaagagcggt

SEQ ID NO: 672799 - DNA, 75 bp, synthetic construct
  source 1..75: mol_type = other DNA
aaaagttcagcgggtgaatattggttccgtcagacgctggcaggagtgggacatagcgcctggcgatcaaatcct

SEQ ID NO: 672800 - DNA, 75 bp, synthetic construct
  source 1..75: mol_type = other DNA
taatctggctatgatgcatgttttcgctaatcgtggttataacatcattcgtcattccgaagactccaatttctc

SEQ ID NO: 672801 - DNA, 75 bp, synthetic construct
  source 1..75: mol_type = other DNA
gaagactacgcaccaatcgctttctcttctcacggtggcttctacggttacgatgaaggcttagatatgctgtaa

SEQ ID NO: 672802 - DNA, 75 bp, synthetic construct
  source 1..75: mol_type = other DNA
tatgcgttttaccgtaataagaagccgaccattgtagttaactgcttcaccgatgaagaacgcttaaagtaccag

SEQ ID NO: 672803 - DNA, 75 bp, synthetic construct
  source 1..75: mol_type = other DNA
tcatcgactgtcttactgatgaaggtcgtgaacaataccagaatctaccagcaattattgttcgtgaatatgacg

SEQ ID NO: 672804 - DNA, 75 bp, synthetic construct
  source 1..75: mol_type = other DNA
atgatcaatactaaaactcctttcgtacttctgggtctggactctgaaaactatggtaacttccatatgctagaa

SEQ ID NO: 672805 - DNA, 75 bp, synthetic construct
  source 1..75: mol_type = other DNA
gccaacccatgcctttactggcaaatacgccgtttattgtcaccggctccggcaattcttccgtaacgtccagct

SEQ ID NO: 672806 - DNA, 75 bp, synthetic construct
  source 1..75: mol_type = other DNA
ccgatcgtttaaaggagctggctaccgcaggttttactctaacgcagacgtatacccgcgcggttaaaaatgctg

SEQ ID NO: 672807 - DNA, 75 bp, synthetic construct
  source 1..75: mol_type = other DNA
aaagtatttgtagagccagtagttttagaaggtggtgctggtggcaattggacagtatttgatgaggttttagat

SEQ ID NO: 672808 - DNA, 75 bp, synthetic construct
  source 1..75: mol_type = other DNA
tatgtcgacgataaggttattgaggtcaaagtctatgccgatagcctgctggccgcacacctcaccgccttgaac

SEQ ID NO: 672809 - DNA, 75 bp, synthetic construct
  source 1..75: mol_type = other DNA
cgctgaacctgctgaccgttgacccggccaataccagccagattatcgcggaacagattattcccgagaatgagg

SEQ ID NO: 672810 - DNA, 75 bp, synthetic construct
  source 1..75: mol_type = other DNA
ccgcaggaattggcttatggcgagcgtggcgctggtgcgtccattcctccattcagcaccctggtgtttgaagtc

SEQ ID NO: 672811 - DNA, 75 bp, synthetic construct
  source 1..75: mol_type = other DNA
aaaggaaagtttccatatttcactgcggagaaggcagccgcgctggctgatttgagtgattttattcgtttgatg

SEQ ID NO: 672812 - DNA, 75 bp, synthetic construct
  source 1..75: mol_type = other DNA
acccggtaacattcccaagtcgttcacttgcgctgttggctgtaccacatacaacgtcgttggctggtatatctg

SEQ ID NO: 672813 - DNA, 75 bp, synthetic construct
  source 1..75: mol_type = other DNA
aggaaaatagacgacatttttggtgataatgtcccaaatatgtcccactctggaattatggaggatataaagaag

SEQ ID NO: 672814 - DNA, 75 bp, synthetic construct
  source 1..75: mol_type = other DNA
ttggctaccgggtcaggcgaactggttggtggcgtggaaatatcaacccgtggcacaggttgccgaagtgaatgc

SEQ ID NO: 672815 - DNA, 75 bp, synthetic construct
  source 1..75: mol_type = other DNA
aggttgcgcgcgtacgcaatgagtggtggaaagcgaaattacccttcgtcaccgatggcgtggttgtgcgagcgg

SEQ ID NO: 672816 - DNA, 75 bp, synthetic construct
  source 1..75: mol_type = other DNA
cctacaagccgcaactgcaggagggaagcggtcgcacgcagaccattcgcatgattctgattgtgtcgagcacgt

SEQ ID NO: 672817 - DNA, 75 bp, synthetic construct
  source 1..75: mol_type = other DNA
tcgtggcgaaccggctgaattcccggtgaacggcgtgatcccaggctggattgaagcactgactctgatgccagt

SEQ ID NO: 672818 - DNA, 75 bp, synthetic construct
  source 1..75: mol_type = other DNA
cattacaccggtaaattgatcgacggcactgtatttgacagctctgttgctcgtggcgaaccggctgaattcccg

SEQ ID NO: 672819 - DNA, 75 bp, synthetic construct
  source 1..75: mol_type = other DNA
gctggtcgtctcgtggcagggcgcggaaatggccccgcttacgctgattaaagacggcggcaacatggcaacctt

SEQ ID NO: 672820 - DNA, 75 bp, synthetic construct
  source 1..75: mol_type = other DNA
tggctggcagcggtcggcaggtgctaaggcagaactggcacttgcggggaagctggggcatgcggttattttaca

SEQ ID NO: 672821 - DNA, 75 bp, synthetic construct
  source 1..75: mol_type = other DNA
atgcgagcagcgttttgggtagggtgtgccgctttattgttgtcggcgtgtagtagtagtgaacctgttcagcag

SEQ ID NO: 672822 - DNA, 75 bp, synthetic construct
  source 1..75: mol_type = other DNA
gctgaatggctggcagcggtcggcgggtgccagggcagaactggcgctggcggagaagctggggcatgcagttat

SEQ ID NO: 672823 - DNA, 75 bp, synthetic construct
  source 1..75: mol_type = other DNA
tacatggatatctgcatggcgatgattcgttgcgtggatgcgatttacatgctgcaaggctggcagcggtcagca

SEQ ID NO: 672824 - DNA, 75 bp, synthetic construct
  source 1..75: mol_type = other DNA
aggctggcagcagtcggcaggtgcaaggactgagctggcactgacggagaaactgggtcatgcggttatttttca

SEQ ID NO: 672825 - DNA, 75 bp, synthetic construct
  source 1..75: mol_type = other DNA
cgggctgactcagccacactacatggatatttgcatggcaatgctccgttgcgtggatgcggtttacatgctgaa

SEQ ID NO: 672826 - DNA, 75 bp, synthetic construct
  source 1..75: mol_type = other DNA
caatgctgttagtttcagatgaaaatattgagttcagtcgcttcccggaattctacaatgagcgaagaaacgccc

SEQ ID NO: 672827 - DNA, 75 bp, synthetic construct
  source 1..75: mol_type = other DNA
cactggcagggggatttcagaagagaactggatgaactgacaaaaaatatttatcagaacaacgagatggggttt

SEQ ID NO: 672828 - DNA, 75 bp, synthetic construct
  source 1..75: mol_type = other DNA
tcaagcgcattctaaaaacaaaggaagcacttgataacatcaggaattttattgataaacagcagttaacgaata

SEQ ID NO: 672829 - DNA, 75 bp, synthetic construct
  source 1..75: mol_type = other DNA
tacatggatatctgcatggcgatgatacgttgcgtggatgcgatttacatgctgaatggctggcagcggtcggcg

SEQ ID NO: 672830 - DNA, 75 bp, synthetic construct
  source 1..75: mol_type = other DNA
atgcagtcattcctgtggcctactggctttacaaaaagcaaaccagtggacatgcattatatacaacgattaatc

SEQ ID NO: 672831 - DNA, 75 bp, synthetic construct
  source 1..75: mol_type = other DNA
ccaggccgatgcgctactcacgagcatcagagatgtaatgaaaaatagtctttcagatattcattttcctcttga

SEQ ID NO: 672832 - DNA, 75 bp, synthetic construct
  source 1..75: mol_type = other DNA
gctgaaaggctggcagcggtcggcaggcgctaaggcagaactggcactggcagagaaactggggcatgcggtgat

SEQ ID NO: 672833 - DNA, 75 bp, synthetic construct
  source 1..75: mol_type = other DNA
tcaataaacccaacgccgcgaaacagcaggggcaattgctggaaaaagcgcgtaatgaaatgggcgaactggcct

SEQ ID NO: 672834 - DNA, 75 bp, synthetic construct
  source 1..75: mol_type = other DNA
gatcatgtggcgttaaatctccccgccgccgataaaccgagccgttatttgttaaccgtctccgccagtgacggc

SEQ ID NO: 672835 - DNA, 75 bp, synthetic construct
  source 1..75: mol_type = other DNA
tttattttcagtcagcaggataacgaaccggtagagctggtaagtaaatttgcgggtgttgaaatgcgccagacg

SEQ ID NO: 672836 - DNA, 75 bp, synthetic construct
  source 1..75: mol_type = other DNA
ttgcgaagagacgcagatgctcagatggaacaatccggaagcaattgcagacagcgttaggtttcattaatgggg

SEQ ID NO: 672837 - DNA, 75 bp, synthetic construct
  source 1..75: mol_type = other DNA
cggtgcatccagtaatttcatctcgccgcagccgggcaatgtctatattcctctcggcaaacaagagcctggact

SEQ ID NO: 672838 - DNA, 75 bp, synthetic construct
  source 1..75: mol_type = other DNA
cgtactttctcttctcagtcacggcagaatgtgactcaggcgttacccgaattacagctcggcaatgccattatt

SEQ ID NO: 672839 - DNA, 75 bp, synthetic construct
  source 1..75: mol_type = other DNA
tcaatacaaccgactcgaacgaaagttgctgaaaaattcgaaagcagagatcaatgccctgatgagaaagatgat

SEQ ID NO: 672840 - DNA, 75 bp, synthetic construct
  source 1..75: mol_type = other DNA
tgttttttataaaggtaatgatattgatttcataagaaaacttgccaactcacataaaatgtacacaaaaataac

SEQ ID NO: 672841 - DNA, 75 bp, synthetic construct
  source 1..75: mol_type = other DNA
tacatggatatctgcatggaaatgctccgtagcgcggatgcggtttacatgcttcgaaactggttccagtcagca

SEQ ID NO: 672842 - DNA, 75 bp, synthetic construct
  source 1..75: mol_type = other DNA
gaaactaatacgcattgagatacagatggctgaggggtttattgatggatgcctttcaattctggatattaaact

SEQ ID NO: 672843 - DNA, 75 bp, synthetic construct
  source 1..75: mol_type = other DNA
ttatacagaatatccaagcgtaagattgcaaaggtgcgtggaaaggatgaaaaattggtacgcatagaaatacaa

SEQ ID NO: 672844 - DNA, 75 bp, synthetic construct
  source 1..75: mol_type = other DNA
atcatgatagacggttgtgtggcgcggttgcgtaaatataaaccagaagaatatgaattattaattgctcacttt

SEQ ID NO: 672845 - DNA, 75 bp, synthetic construct
  source 1..75: mol_type = other DNA
gtgagtattctctactacatcggtgtgatggggattttaattcgcattctcggcggtatattccagaaagcatta

SEQ ID NO: 672846 - DNA, 75 bp, synthetic construct
  source 1..75: mol_type = other DNA
aatcgcagtatgaaaaaataggtgatatttcaaccagcaatgaaatgtcgactgcagacgcgaaagaagatttga

SEQ ID NO: 672847 - DNA, 75 bp, synthetic construct
  source 1..75: mol_type = other DNA
gaatgccttggcagttacaacgcaggattcagcaaaaataacacagcccggcgcatgatatatgcccgaataatc

SEQ ID NO: 672848 - DNA, 75 bp, synthetic construct
  source 1..75: mol_type = other DNA
tgatttttccgttatctttcacccttccggctgaagctaccgccacaaacacattactggacagttgctttattc

SEQ ID NO: 672849 - DNA, 75 bp, synthetic construct
  source 1..75: mol_type = other DNA
aagaatgagtttaatccaatagatatatcatcttataatgtttccgaccgttcatggagtgaaagtcaaataatg

SEQ ID NO: 672850 - DNA, 75 bp, synthetic construct
  source 1..75: mol_type = other DNA
aaaaattatattccatcgtccgttgaacagtttataggtaaaggagggagtgcaattgtatatgaagatgcatca

SEQ ID NO: 672851 - DNA, 75 bp, synthetic construct
  source 1..75: mol_type = other DNA
aaaatgccattaccgccatgttacgggtacatgaagggttaaatacattacgtttaccaaatacgccgcaggtaa

SEQ ID NO: 672852 - DNA, 75 bp, synthetic construct
  source 1..75: mol_type = other DNA
cccgcgctgttactcattctcctgttgttgttgcccttgattataataatcgtgacgctgcgctggcgtttgtcg

SEQ ID NO: 672853 - DNA, 75 bp, synthetic construct
  source 1..75: mol_type = other DNA
atggtgtggtgtgttctgctcaggaagctgtgcgttttaaacaggtattcggtcaggagttcaaactggttacgc

SEQ ID NO: 672854 - DNA, 75 bp, synthetic construct
  source 1..75: mol_type = other DNA
tatggtaatcgggcgcccggttactcaatcagtagatccagagcaaacgctgaaagcgatcaacgcttcattaca

SEQ ID NO: 672855 - DNA, 75 bp, synthetic construct
  source 1..75: mol_type = other DNA
aggagagtggctgcgccggggccagaacctgctcattaccggcccctgtggctgtggaaaaacctacctggcttg

SEQ ID NO: 672856 - DNA, 75 bp, synthetic construct
  source 1..75: mol_type = other DNA
atgcagaaacgagaacccgtcataatcgcgccagactataccgatgatgaactttatgagtggatgcgccagaaa

SEQ ID NO: 672857 - DNA, 75 bp, synthetic construct
  source 1..75: mol_type = other DNA
accctgtttgggccgcagtttgttcgtgaactgcaacaacgtggttttgatatcttcctcgacctgaaattccac

SEQ ID NO: 672858 - DNA, 75 bp, synthetic construct
  source 1..75: mol_type = other DNA
gtctggtcgtggagcaactgcgctgcattactaacggccaaagtacggacgcggcatttttactacgcgttaaag

SEQ ID NO: 672859 - DNA, 75 bp, synthetic construct
  source 1..75: mol_type = other DNA
tctgggggcgaggtgattaccaccctcgctggaccactgaaaaagagatgacgcgttttgtggggctgtgttttc

SEQ ID NO: 672860 - DNA, 75 bp, synthetic construct
  source 1..75: mol_type = other DNA
attctcaccaggatgcccgcaatatctctcttcatgagggggcttctgttgaacgctatcttgcctggtttaaga

SEQ ID NO: 672861 - DNA, 75 bp, synthetic construct
  source 1..75: mol_type = other DNA
gctgaattcatcgccagtgaatagggctatggaaagaggaagtgttcattcgaacagacctgatttacctcctgt

SEQ ID NO: 672862 - DNA, 75 bp, synthetic construct
  source 1..75: mol_type = other DNA
tgcttttgcgaggttgattccccgacctgaagaatgtaatttattaaataatctactacagacccagtataataa

SEQ ID NO: 672863 - DNA, 75 bp, synthetic construct
  source 1..75: mol_type = other DNA
cgaacagacctgatttacctccagtggattatgcgcagccggagttacctccagcggattatactcagtcagagt

SEQ ID NO: 672864 - DNA, 75 bp, synthetic construct
  source 1..75: mol_type = other DNA
gtgattaccaccctcgctggaccactgaaaaagagatgacgcgttttgtggggctgtgttttcagcatatgaacg

SEQ ID NO: 672865 - DNA, 75 bp, synthetic construct
  source 1..75: mol_type = other DNA
cgaaagctaccgcgaatatctcgtttatctacagggctgtaatgagcagttcattgaagcgccgggtattcgtgg

SEQ ID NO: 672866 - DNA, 75 bp, synthetic construct
  source 1..75: mol_type = other DNA
ttttaccgtaataaagccgcctggctggtgggcaaactaataacgccttccggcacattgccatttttattgccg

SEQ ID NO: 672867 - DNA, 75 bp, synthetic construct
  source 1..75: mol_type = other DNA
atcaccgatctcggcgaacagattgtgattcgccatctctacatcgaacggcgaatggtgccgctcaatatctgg

SEQ ID NO: 672868 - DNA, 75 bp, synthetic construct
  source 1..75: mol_type = other DNA
gccaatatcttcccaggcgacatgctatttaaaaactttggcgtcactcgtcacggtcgcgtggtgttttatgat

SEQ ID NO: 672869 - DNA, 75 bp, synthetic construct
  source 1..75: mol_type = other DNA
cggaaagtcatttacaggtggcgaacgaactgttttaccgcaataaagccgcctggctggtgggcaaactgatca

SEQ ID NO: 672870 - DNA, 75 bp, synthetic construct
  source 1..75: mol_type = other DNA
tgtttattgatacctgtctgacgacgaccgccgaagcgagcattgtctttggctttgcgcgttcttattttatgg

SEQ ID NO: 672871 - DNA, 75 bp, synthetic construct
  source 1..75: mol_type = other DNA
tttaaacaagcatttggtcaggatttcaaacttgttacccctggtattcgcccgcaggggagtgatgttggcgac

SEQ ID NO: 672872 - DNA, 75 bp, synthetic construct
  source 1..75: mol_type = other DNA
accgcagcgcggacagcaatccggagatggtggaaaaagggggttcgcgcccatttcctctaaaagtctcacctt

SEQ ID NO: 672873 - DNA, 75 bp, synthetic construct
  source 1..75: mol_type = other DNA
gtattggctgaatgaaggtggctcacatcattttgcagctgcccgttatcaggcatgccgtctgggaatttctgt

SEQ ID NO: 672874 - DNA, 75 bp, synthetic construct
  source 1..75: mol_type = other DNA
gctattcctgcagatgaacggttagcctgctttttcagggcgatgattgcctttgaagtaagcgactcgtcagaa

SEQ ID NO: 672875 - DNA, 75 bp, synthetic construct
  source 1..75: mol_type = other DNA
atggcggtccggtgatcctcgacctgctgttaaaacgcattctgaccattcccggcctgcggattgctcgcccgg

SEQ ID NO: 672876 - DNA, 75 bp, synthetic construct
  source 1..75: mol_type = other DNA
caaggactggtgaaggcgtggacgtgctgcgtaaccatctcaaacagagcatgggctttgacaccaatatggaag

SEQ ID NO: 672877 - DNA, 75 bp, synthetic construct
  source 1..75: mol_type = other DNA
aaggatggcttcgatatcttggttttactccattagctgacttgcctgctttatatgcaggtgccaggagtttta

SEQ ID NO: 672878 - DNA, 75 bp, synthetic construct
  source 1..75: mol_type = other DNA
acgcaaaccctgcccaccgccgtgtttatgctgaaaagctacttcgacaccatccctgatgagatcgaagaagcg

SEQ ID NO: 672879 - DNA, 75 bp, synthetic construct
  source 1..75: mol_type = other DNA
ggcgctgtttctcatcatcacgctgtttccattttttgtgatgctgatgacctcgttcaagggcgcgaaagaggc

SEQ ID NO: 672880 - DNA, 75 bp, synthetic construct
  source 1..75: mol_type = other DNA
tgcaagagcgtgccctggatgtgcgcgacgtctgcttccagttactccagcaaatttacggtgaacaacgcttcc

SEQ ID NO: 672881 - DNA, 75 bp, synthetic construct
  source 1..75: mol_type = other DNA
tatcttccgagctgtcagataaaactcaactttctgttttgcgcagtatagttggatggggctatgaaaaaataa

SEQ ID NO: 672882 - DNA, 75 bp, synthetic construct
  source 1..75: mol_type = other DNA
cggaaagtctcattggcccctaccgcgttgtgtcccgcaccgataccggcaaggtcgccagcgtcgagattgagg

SEQ ID NO: 672883 - DNA, 75 bp, synthetic construct
  source 1..75: mol_type = other DNA
tcgctggtgaccgcattgccggtggtgattatgtacgcgctttcggaacgttttattaagagtggtttgaccgcc

SEQ ID NO: 672884 - DNA, 75 bp, synthetic construct
  source 1..75: mol_type = other DNA
catttacgtcgaagcggcaattgatttccccgatgaagagatcgatttcctctccgacggcaaaattgaagccca

SEQ ID NO: 672885 - DNA, 75 bp, synthetic construct
  source 1..75: mol_type = other DNA
caggatatcaccaatctggaaaaagcagcggcattaagcattgccagaatggttaacatacccgcgttaatagct

SEQ ID NO: 672886 - DNA, 75 bp, synthetic construct
  source 1..75: mol_type = other DNA
aacatcaccgttgatatggtgattagcgcgcaggaattgttgcaggaagacatggcaacattcgacggacatatc

SEQ ID NO: 672887 - DNA, 75 bp, synthetic construct
  source 1..75: mol_type = other DNA
atgcccacgcctggcgttgaggataaaagcgatcgaaaagccagcaatcatggtcgtctgtcggcgtttctacgc

SEQ ID NO: 672888 - DNA, 75 bp, synthetic construct
  source 1..75: mol_type = other DNA
agagatgtttacgctgtttgggccgcagtttgtgcatgaattgcaacatcgcggttttgatattttcctcgatct

SEQ ID NO: 672889 - DNA, 75 bp, synthetic construct
  source 1..75: mol_type = other DNA
aagccagcgatctggctgatcttggcgtgacactgtcacctgcagattacgcagaacgcctggcagcgctgacgc

SEQ ID NO: 672890 - DNA, 75 bp, synthetic construct
  source 1..75: mol_type = other DNA
acgctgtttggaccgcagtttgttcgtgaactgcaacagcgcggttttgatattttcctcgacctgaaattccac

SEQ ID NO: 672891 - DNA, 75 bp, synthetic construct
  source 1..75: mol_type = other DNA
gccgaagcgattgcggatcttatcgacgccagctcagaacaggcggctcgttcggcgcttaactcactgcaaggc

SEQ ID NO: 672892 - DNA, 75 bp, synthetic construct
  source 1..75: mol_type = other DNA
gcgcagcagaacttaagcgaaatcaccggggaatttacttctgacgacctgctggggcggattttctccagcttc

SEQ ID NO: 672893 - DNA, 75 bp, synthetic construct
  source 1..75: mol_type = other DNA
cccggcctgcggattgcccgccctggtgagttttccgaacgcgcgtttcttaacgataaactcgacttagcccag

SEQ ID NO: 672894 - DNA, 75 bp, synthetic construct
  source 1..75: mol_type = other DNA
actgctggcggaagagttgcgcctggcacagcagaacttaagcgaaatcaccggggaatttacttctgatgacct

SEQ ID NO: 672895 - DNA, 75 bp, synthetic construct
  source 1..75: mol_type = other DNA
aactgttaggtgcctgggcgggtgaactgctggcggaagagttgcgcctggcacagcagaacttaagcgaaatca

SEQ ID NO: 672896 - DNA, 75 bp, synthetic construct
  source 1..75: mol_type = other DNA
gcgcagcagaacttaagcgaaatcaccggggagtttacctctgatgacctgctggggcggattttctccagcttc

SEQ ID NO: 672897 - DNA, 75 bp, synthetic construct
  source 1..75: mol_type = other DNA
attatccgggggtcagcaaaacagcggattacaaagcgcgggcgcagaaattctttgatgaactggacgccttct

SEQ ID NO: 672898 - DNA, 75 bp, synthetic construct
  source 1..75: mol_type = other DNA
aattttggcagcttcgtggttgccgttattggtgcgattgtcgtgctatttatctacaggaagattaaaagttaa

SEQ ID NO: 672899 - DNA, 75 bp, synthetic construct
  source 1..75: mol_type = other DNA
gcctgaaaagcgattttggcgtagtgaaaaacagtaaaggtaagctcggcgtggattgcgtgttctctaccgaag

SEQ ID NO: 672900 - DNA, 75 bp, synthetic construct
  source 1..75: mol_type = other DNA
atgaaactggccctgacgctggaagccggcagcgttaacgtgcaggcgctgaacatggggcgcattgtcgttgac

SEQ ID NO: 672901 - DNA, 75 bp, synthetic construct
  source 1..75: mol_type = other DNA
gcaggacaatatcgactgcgggtccggaattattttcgacaacgatgaggataaaacggattcggcagcactgct

SEQ ID NO: 672902 - DNA, 75 bp, synthetic construct
  source 1..75: mol_type = other DNA
ctgggctttgatggttcgccggtttatgacgataccgccgtgcttaaccgctggctggacgttaccgaaaaagat

SEQ ID NO: 672903 - DNA, 75 bp, synthetic construct
  source 1..75: mol_type = other DNA
cttgatagctggctgctggatgtgctctacaacagcgatacccacagtagctggaatttagccgggatccagaat

SEQ ID NO: 672904 - DNA, 75 bp, synthetic construct
  source 1..75: mol_type = other DNA
tcggccttatcgctggtatcatcgcaaaatggattatgccgggtaaagaaaacgtaggaattatcgtcaccatta

SEQ ID NO: 672905 - DNA, 75 bp, synthetic construct
  source 1..75: mol_type = other DNA
cggtgattactcctggcgctccggttctggcaaaaaagagtcttactcttcaggcggctttaccaccagaaaagc

SEQ ID NO: 672906 - DNA, 75 bp, synthetic construct
  source 1..75: mol_type = other DNA
aggccgctgaaaacggtgattcactccgcgtggtggatgaccgtgactctaccgaaacaccggcaacttatgcca

SEQ ID NO: 672907 - DNA, 75 bp, synthetic construct
  source 1..75: mol_type = other DNA
aagcctggctggcgaaaaaaatgccgcagtggcggcgcgtgttacaagatgaaatggggtataacgaacctgacg

SEQ ID NO: 672908 - DNA, 75 bp, synthetic construct
  source 1..75: mol_type = other DNA
atccatgctcggtagtcgggtacgggtgaaaacctggagctggtttgccgatgataaacaggaaatccgtcaggg

SEQ ID NO: 672909 - DNA, 75 bp, synthetic construct
  source 1..75: mol_type = other DNA
cactggaagccgacagcgttaacgtacaggcactgaatatggggcgaattgtcgttgatattgatggtgttaata

SEQ ID NO: 672910 - DNA, 75 bp, synthetic construct
  source 1..75: mol_type = other DNA
ctgttgggtgtccgccggattctggacggcgttgatgggcttcctgcaactgcttattggtcgcgataaatacag

SEQ ID NO: 672911 - DNA, 75 bp, synthetic construct
  source 1..75: mol_type = other DNA
acggtatttgtggttagcgccttcctcggctgggaagtggtgtggaattccccgcaacgtgatgacgactctacc

SEQ ID NO: 672912 - DNA, 75 bp, synthetic construct
  source 1..75: mol_type = other DNA
agccgcactgatgcgccgtgcaggctggggggtatggattgcttacgatctccctggctcttatgaagaactgcc

SEQ ID NO: 672913 - DNA, 75 bp, synthetic construct
  source 1..75: mol_type = other DNA
actcacgatcctgatgcaccgcagtccgtgtttctgcgccagtatcgggcgttatcacgattgccggcatacctt

SEQ ID NO: 672914 - DNA, 75 bp, synthetic construct
  source 1..75: mol_type = other DNA
tggcgacaaaccggcggtcaacaatttatcaggctggccgatgacacctggcggcagctattaataaaacaataa

SEQ ID NO: 672915 - DNA, 75 bp, synthetic construct
  source 1..75: mol_type = other DNA
gtgcatagcgcgtcagggttaaaactcatcgactgggagtatgccggagatggtgatatcgcgctggaactggcg

SEQ ID NO: 672916 - DNA, 75 bp, synthetic construct
  source 1..75: mol_type = other DNA
cagagcaaaaagcctggatggagcttatcgctgaagtcggtggcgaaggtcagattttctatcgccgccgccgtc

SEQ ID NO: 672917 - DNA, 75 bp, synthetic construct
  source 1..75: mol_type = other DNA
gagtcgcactactgggggcataacgcgataatccgcgtgaaaccgtttatcgagcattgtgcgctggcaccgctg

SEQ ID NO: 672918 - DNA, 75 bp, synthetic construct
  source 1..75: mol_type = other DNA
tgatgaagtctgcaacgtacagaaaggagaacgtaacttacttaactttgatgagtatcctcgtttagtggaaat

SEQ ID NO: 672919 - DNA, 75 bp, synthetic construct
  source 1..75: mol_type = other DNA
ccgggattatccagtcgtcgccgaaagcgtctggtatggatacgctatatgcacgttgccaacagtttgcgaccc

SEQ ID NO: 672920 - DNA, 75 bp, synthetic construct
  source 1..75: mol_type = other DNA
ggcgtactaacccggtaggacgcttctgggatcgtttgcgtggacgcgacgttacgccacgttatctggcgcgat

SEQ ID NO: 672921 - DNA, 75 bp, synthetic construct
  source 1..75: mol_type = other DNA
ccgaaccgcaatacttcctgcaaccacggcagttgttcccggtgtggccgcagtggcgtcctgagctggcgattg

SEQ ID NO: 672922 - DNA, 75 bp, synthetic construct
  source 1..75: mol_type = other DNA
atcgaaaggttcgatgtggcatatccgctatccgctggctgacggcgcgaaaactgctgatggcaaagattatct

SEQ ID NO: 672923 - DNA, 75 bp, synthetic construct
  source 1..75: mol_type = other DNA
tcagtatccaaccgcaattagcttcctcaatgcgatgcttgaccgacataaagagcgcgacgcctgcaaatcact

SEQ ID NO: 672924 - DNA, 75 bp, synthetic construct
  source 1..75: mol_type = other DNA
acaatcgcgtttctgggcgtgattaccacgaaaagaacattcggatagagcggtatgatggtcgtcatacagtca

SEQ ID NO: 672925 - DNA, 75 bp, synthetic construct
  source 1..75: mol_type = other DNA
tcagtatccaaccgcggttagttttctcaatgcgatgcttgaccgatataaggatcatgacgcctgcaaatctct

SEQ ID NO: 672926 - DNA, 75 bp, synthetic construct
  source 1..75: mol_type = other DNA
tattgtttccgctgctggtgcaagccgccggggaggggatgtggcaggcgagtagtgtgggcgttacgctaaatc

SEQ ID NO: 672927 - DNA, 75 bp, synthetic construct
  source 1..75: mol_type = other DNA
agtattttgcaatccagcggcgtccctctgctggatgggatgaatttgtccaccgaaagcctcaacaacctcgaa

SEQ ID NO: 672928 - DNA, 75 bp, synthetic construct
  source 1..75: mol_type = other DNA
atatcgcaatcccttcgaataatgatgatgacgatcgccctttgcttaaggctcagcgtaaggagctaaatagct

SEQ ID NO: 672929 - DNA, 75 bp, synthetic construct
  source 1..75: mol_type = other DNA
acccgcttgtcgcaggctgattttgaagcacggctggaagcggtattccatcagaacactggtgagtcgcaacag

SEQ ID NO: 672930 - DNA, 75 bp, synthetic construct
  source 1..75: mol_type = other DNA
caggtgaacaggcaacaactgaaacaatggaaccggatacaactgaacatggccaaaacgcgcagtcgctggatg

SEQ ID NO: 672931 - DNA, 75 bp, synthetic construct
  source 1..75: mol_type = other DNA
tccatccgccggcgtattaatcatcccgatcgcttgaattacccaatgaaacgcgtgggcaaacgcggcgaaggc

SEQ ID NO: 672932 - DNA, 75 bp, synthetic construct
  source 1..75: mol_type = other DNA
gcagcatccggcgcaggataaagaaacccagcagaagctggcagaacttgagaaaaaaaccggtaagaagcccaa

SEQ ID NO: 672933 - DNA, 75 bp, synthetic construct
  source 1..75: mol_type = other DNA
tggaaggcattggacaaacgcaggtgaatacccgtgtggatatgtctttcgctcgcggcctgcgcgccatacttc

SEQ ID NO: 672934 - DNA, 75 bp, synthetic construct
  source 1..75: mol_type = other DNA
gcgcaaattgcggttcaggcctcgctcaccggccatctggtgctctcaacactccacaccaacagtgcatcaggc

SEQ ID NO: 672935 - DNA, 75 bp, synthetic construct
  source 1..75: mol_type = other DNA
gccaacaattctgccggtagtcaattacagatgaattttcagcaaataattagaaaatacccgaaagaaacagga

SEQ ID NO: 672936 - DNA, 75 bp, synthetic construct
  source 1..75: mol_type = other DNA
gatcttgtgctttgcgatgtacgaatggcagagatggatggtatcgccacgctaaaagagatcaaaacattaaac

SEQ ID NO: 672937 - DNA, 75 bp, synthetic construct
  source 1..75: mol_type = other DNA
cggtgattactcctggcgctccggttctggcaaaaaagagtcttactcttcgggcggctttaccaccaaaaaagc

SEQ ID NO: 672938 - DNA, 75 bp, synthetic construct
  source 1..75: mol_type = other DNA
ttcgtattgaaaggatgtgccgatagtagcgacgtcgataacgacggcgacggaacgttttattcgacagtgcag

SEQ ID NO: 672939 - DNA, 75 bp, synthetic construct
  source 1..75: mol_type = other DNA
gcattccggcatggtacgacgaagcgggtaacgtttatgttggccgcaacgaagatgaagtgcgcaaggaaaata

SEQ ID NO: 672940 - DNA, 75 bp, synthetic construct
  source 1..75: mol_type = other DNA
tctccacgctcggctggccggaaaacaccgacgcactgcgccagttccacccaaccagcgtgatggtatccggct

SEQ ID NO: 672941 - DNA, 75 bp, synthetic construct
  source 1..75: mol_type = other DNA
aaagagcgtgagaagctggaaggttatgcagaagcgaaagccaagctgattgaacagcaggctgttatcgccgca

SEQ ID NO: 672942 - DNA, 75 bp, synthetic construct
  source 1..75: mol_type = other DNA
gataaacaaaaagatccgaaaacgcgcttgcaagaatatttgcaggggcgccatctgcctctgccaacttatctg

SEQ ID NO: 672943 - DNA, 75 bp, synthetic construct
  source 1..75: mol_type = other DNA
agcattaattggcggcgtattcctcgacagcgatattcagaccgtcgagaaattaatccttaactggtatcaaac

SEQ ID NO: 672944 - DNA, 75 bp, synthetic construct
  source 1..75: mol_type = other DNA
agatagcctcaagcacccgctgcaattctacttaactatccttttcccgcaaaccgtttttatccccagcggcaa

SEQ ID NO: 672945 - DNA, 75 bp, synthetic construct
  source 1..75: mol_type = other DNA
ctggaacaacgccaaagcggcattttatgccgatgttccgaagaatatgactcagcagaattgtcagtctaagta

SEQ ID NO: 672946 - DNA, 75 bp, synthetic construct
  source 1..75: mol_type = other DNA
tcacaaactaaccccgcttgtcttggcggtttcggttcttgtcgcctttctatcaatcctgtttattgcaatgcg

SEQ ID NO: 672947 - DNA, 75 bp, synthetic construct
  source 1..75: mol_type = other DNA
tcatctgccgctgccgacttatctggttgttcaggtccgtggcgaagcgcacgatcaggaatttacaatccactg

SEQ ID NO: 672948 - DNA, 75 bp, synthetic construct
  source 1..75: mol_type = other DNA
ggtgccgcgctggcagagacggaactgcaggcaatgggcccgctctgttcgcgtgaaaaacggatgctggggctg

SEQ ID NO: 672949 - DNA, 75 bp, synthetic construct
  source 1..75: mol_type = other DNA
actggcgactgggggcgatttttggactgatattcctcgtgttgctggtgattaccggcttgctgtggatgcccg

SEQ ID NO: 672950 - DNA, 75 bp, synthetic construct
  source 1..75: mol_type = other DNA
gctgatcctcgcacctgtaacaccgtccaactcggcgcgtggtgcggggattatctatcccatcatccgtaacct

SEQ ID NO: 672951 - DNA, 75 bp, synthetic construct
  source 1..75: mol_type = other DNA
actggttcctcgggatgttgccgctcagtattttgctggtgctgctggttccctggcttatgtgctgtacccgcc

SEQ ID NO: 672952 - DNA, 75 bp, synthetic construct
  source 1..75: mol_type = other DNA
actcacgccacgctgagttggggcgactggttcctcggtatgttaccgctcagtatcttactggttctgctggtt

SEQ ID NO: 672953 - DNA, 75 bp, synthetic construct
  source 1..75: mol_type = other DNA
actggcgactgggggcgatttttgggctgatattcctcgtgttgctggtgattaccggcttactgtggatgcccg

SEQ ID NO: 672954 - DNA, 75 bp, synthetic construct
  source 1..75: mol_type = other DNA
gttagctgatgtatggcggtgtacttatagcgatgaacagcaattttattatcttcgtctgcttaagttgcttgt

SEQ ID NO: 672955 - DNA, 75 bp, synthetic construct
  source 1..75: mol_type = other DNA
gtgaaaaccatttttattaaacctgcgccgggatgcctgattcgcgatcccgacacgatgaatccgctctcacag

SEQ ID NO: 672956 - DNA, 75 bp, synthetic construct
  source 1..75: mol_type = other DNA
atgaacatagggcgactgcgtgacagggtaacgattcagaccctgaaacagaccagagccatgacgggcgaaata

SEQ ID NO: 672957 - DNA, 75 bp, synthetic construct
  source 1..75: mol_type = other DNA
cacgccacgctgagttggggcgactggttcctcgggatgttgccgctcagtattttactggtcctgctggttccc

SEQ ID NO: 672958 - DNA, 75 bp, synthetic construct
  source 1..75: mol_type = other DNA
agtggttatctgccaacggcggattactggcgactgggggcgatttttgggctgatattcctcgtgttgctggtg

SEQ ID NO: 672959 - DNA, 75 bp, synthetic construct
  source 1..75: mol_type = other DNA
gcaaacatatttaccccagaattgggagttttccgttatcacggtgcgatacgcggtattgggttaactgctttg

SEQ ID NO: 672960 - DNA, 75 bp, synthetic construct
  source 1..75: mol_type = other DNA
taacaaaaatgatcagtaactcacaaaagatctccgaggatttttctctcataaaaaattattgtattaaggaaa

SEQ ID NO: 672961 - DNA, 75 bp, synthetic construct
  source 1..75: mol_type = other DNA
atgcaaacacaaaaaccgactctcgaactgctaacctgcgaaggcgcttatcgcgacaacccgaccgcgcttttt

SEQ ID NO: 672962 - DNA, 75 bp, synthetic construct
  source 1..75: mol_type = other DNA
agcctgctgctggtagacagtgcgctgcgcattacagcattaggtgacactgtcacaattcaggcactttccggc

SEQ ID NO: 672963 - DNA, 75 bp, synthetic construct
  source 1..75: mol_type = other DNA
aaagtacgtcactttggggtatccaatttcacacctgcgcaatttgcgctattgcaatcgcgtttgccatttacc

SEQ ID NO: 672964 - DNA, 75 bp, synthetic construct
  source 1..75: mol_type = other DNA
tatgcttccctgtttgaaaaaattaacctgagtccggtatctgccctgagtgcactggatatctggcaggatcca

SEQ ID NO: 672965 - DNA, 75 bp, synthetic construct
  source 1..75: mol_type = other DNA
gcgtgggaggatgtggatttcgagaagggaattgtgaatgtcagaagaaacctgacgatacttgatatgttcggt

SEQ ID NO: 672966 - DNA, 75 bp, synthetic construct
  source 1..75: mol_type = other DNA
gcccgtacatgttttttatgcaggataatgatttcaccctgtttggcgcgtcgccggaaagttcgctcaagtatg

SEQ ID NO: 672967 - DNA, 75 bp, synthetic construct
  source 1..75: mol_type = other DNA
gattcagggggccagtctaccgatcatctggatctgctgttaatccaccgaccagacccgttaatggatgccgat

SEQ ID NO: 672968 - DNA, 75 bp, synthetic construct
  source 1..75: mol_type = other DNA
gggaatacctattactttcccccgtctattctgaaattaacgattgtctggctagtctctcaatggaagacgtga

SEQ ID NO: 672969 - DNA, 75 bp, synthetic construct
  source 1..75: mol_type = other DNA
ccaatgaagagatctcggaacgtctgggaattgttccaggatggatggataacatcgactccagccaacttatct

SEQ ID NO: 672970 - DNA, 75 bp, synthetic construct
  source 1..75: mol_type = other DNA
gtggcattgctacgactgcgcgtgaagaaaacgtcattggccattacatcactgaccgcgaccatattattaaaa

SEQ ID NO: 672971 - DNA, 75 bp, synthetic construct
  source 1..75: mol_type = other DNA
ggatggtacgctcgaccaactgcaacaactgcgtgttcgtccgatggcgtggtcctgccttggtggtggtcgtct

SEQ ID NO: 672972 - DNA, 75 bp, synthetic construct
  source 1..75: mol_type = other DNA
actgaccgcgatcacatcattaagagcgccgaacagtcgctaattaatcttgcgaccgatcatctggatctgctg

SEQ ID NO: 672973 - DNA, 75 bp, synthetic construct
  source 1..75: mol_type = other DNA
gaatgggcgtaccaattgactacctgttagcggcatcgctgatggcgatcccaggtggtattttgtttgcacgta

SEQ ID NO: 672974 - DNA, 75 bp, synthetic construct
  source 1..75: mol_type = other DNA
tggataccatgatccgctatcagcgcatgcagggtaaaaataccctgtggcaggtcggtactgaccacgccggga

SEQ ID NO: 672975 - DNA, 75 bp, synthetic construct
  source 1..75: mol_type = other DNA
ataacgtagccaccagtaactccagcattgaataccgtcgggatgaagaccgtctgatacaactgaactaccgtt

SEQ ID NO: 672976 - DNA, 75 bp, synthetic construct
  source 1..75: mol_type = other DNA
cagttccaggtcttcaacgaacagaacaccagtagctactcggcagaaccgcagttagacgttaattactatcaa

SEQ ID NO: 672977 - DNA, 75 bp, synthetic construct
  source 1..75: mol_type = other DNA
gctatcgtttgtactcccgactagggttaccgggcagcactattacgcggattttctcgctcagtattaccacca

SEQ ID NO: 672978 - DNA, 75 bp, synthetic construct
  source 1..75: mol_type = other DNA
gtactcgccatacgctggtgaccgtactggaaggtctgctgcgcctcgcgcatccgatcattccgttcatcaccg

SEQ ID NO: 672979 - DNA, 75 bp, synthetic construct
  source 1..75: mol_type = other DNA
tctcgtcaactgtggtggggtcaccgcattccggcatggtacgacgaagcgggtaacgtttatgttggccgcaac

SEQ ID NO: 672980 - DNA, 75 bp, synthetic construct
  source 1..75: mol_type = other DNA
tgttaacaccagagatgacatgccagaggcgactcgtgttcacctggaaccgaccatcaatctgccgctctctaa

SEQ ID NO: 672981 - DNA, 75 bp, synthetic construct
  source 1..75: mol_type = other DNA
atggatgtcatgagaagtgttctgggaatggtggtattgctgacgattgcgtttttactgtcagtaaacaagaag

SEQ ID NO: 672982 - DNA, 75 bp, synthetic construct
  source 1..75: mol_type = other DNA
caccggaaatcgcccagcttggtttacgcgcgctggcagcggcgacactttctaacctgatgagcgctaccattg

SEQ ID NO: 672983 - DNA, 75 bp, synthetic construct
  source 1..75: mol_type = other DNA
ccgatgaagttcagctccatcaaaaagaggcccccggacaagcggaaccggtacgtaccgttgatgcgctcggta

SEQ ID NO: 672984 - DNA, 75 bp, synthetic construct
  source 1..75: mol_type = other DNA
tcagcgacccgacctatttcaacgattttgataataaatatggttccagtaccgatggttacgcaacgcaaaaat

SEQ ID NO: 672985 - DNA, 75 bp, synthetic construct
  source 1..75: mol_type = other DNA
gccgaacagtataagaacggtatttcacaggtaggtgccgtcgccagttggccgattgccgatcgttggtcaatc

SEQ ID NO: 672986 - DNA, 75 bp, synthetic construct
  source 1..75: mol_type = other DNA
accgtgtcctgtactactttatcccgctgctgctggcgctgatctgttacctgctgctggaaacccaggcgaaga

SEQ ID NO: 672987 - DNA, 75 bp, synthetic construct
  source 1..75: mol_type = other DNA
aagccctcaacatcagcaaaatcgaatcttttgttgcggttaccactattttcctcgggcaaaatgagatcccgg

SEQ ID NO: 672988 - DNA, 75 bp, synthetic construct
  source 1..75: mol_type = other DNA
tcttgccggaagtttgattgggcagaaactggcgattaatgagtttgttgcttatctcaatttctcgccctatct

SEQ ID NO: 672989 - DNA, 75 bp, synthetic construct
  source 1..75: mol_type = other DNA
gtcctacagcgatgcgggtagcgcctttatttttggctctctggtggggccgaaaatggatgtcctgtttgatgg

SEQ ID NO: 672990 - DNA, 75 bp, synthetic construct
  source 1..75: mol_type = other DNA
cgggcaaaatgagatcccggcgatcgttaaaccgtttatcgatcgcatgaatcgcaacgagttgtttaccgcaat

SEQ ID NO: 672991 - DNA, 75 bp, synthetic construct
  source 1..75: mol_type = other DNA
cttaacatcagcaaaatcgaatcttttgtcgcagtcacaactattttcctcgggcaaaatgagatcccggcgatc

SEQ ID NO: 672992 - DNA, 75 bp, synthetic construct
  source 1..75: mol_type = other DNA
tcttgccggaagtttgattggacagaagctggcgattaatgaatttgtcgcttatctcaacttctcgccctatct

SEQ ID NO: 672993 - DNA, 75 bp, synthetic construct
  source 1..75: mol_type = other DNA
ggcgattatctggctgttacttggtcaaagcgtgaactatttctttgtactgggctacgggcgaaaaatgaagcg

SEQ ID NO: 672994 - DNA, 75 bp, synthetic construct
  source 1..75: mol_type = other DNA
gtggagctgccggaccactggtatgtcgatcaaaccacgctgcgcattctcggcattggcttactgatgattatc

SEQ ID NO: 672995 - DNA, 75 bp, synthetic construct
  source 1..75: mol_type = other DNA
ggggattatctttaccgcaggcgtggtggagttgccggatcactggtatgtcgatcaaactacgctgcgtattct

SEQ ID NO: 672996 - DNA, 75 bp, synthetic construct
  source 1..75: mol_type = other DNA
tggtggcatcatgctctattttccgccgggaaagtgggctgtagaacaggcggcattaggcgttcataaagtgat

SEQ ID NO: 672997 - DNA, 75 bp, synthetic construct
  source 1..75: mol_type = other DNA
tgtcgttcagcgaaacgccgccaaaaagctttatcgaagcggcggcgagcggtgcgatgaccgggctgaaaatcg

SEQ ID NO: 672998 - DNA, 75 bp, synthetic construct
  source 1..75: mol_type = other DNA
cgactgtttccgaaaggtccggctaagcaagccaccaaaattgctggcctgcctaaaccggtaaaatgcatttaa

SEQ ID NO: 672999 - DNA, 75 bp, synthetic construct
  source 1..75: mol_type = other DNA
cagaaaaatgcctcacaccatgacgggcaggaagggcagcgccgcaggcgcggccctcctgcatttcaggcaggc

SEQ ID NO: 673000 - DNA, 75 bp, synthetic construct
  source 1..75: mol_type = other DNA
tggtgtgaattatcagattgatgttacccagcccgcccgttatgacggcgagtgccagatgattaatgccaatgc

SEQ ID NO: 673001 - DNA, 75 bp, synthetic construct
  source 1..75: mol_type = other DNA
aataaaaacacagggaaagaagtctctgaaattcgctttactgcgcgggagaaaatgaccgggcttgaaggttat

SEQ ID NO: 673002 - DNA, 75 bp, synthetic construct
  source 1..75: mol_type = other DNA
atcgtatgagaagatatcaaaatatccttaaagaacatggtattaaacaaagcatgtccagaaaaggcaattgtc

SEQ ID NO: 673003 - DNA, 75 bp, synthetic construct
  source 1..75: mol_type = other DNA
catccaccagcaggacgtgtgaccatctaatgatcgaccttgaaaccatgggaaaaaatcctgatgccccgatta

SEQ ID NO: 673004 - DNA, 75 bp, synthetic construct
  source 1..75: mol_type = other DNA
tgttacggaatatattgaatactacaacagcagaagaattagcctgaaattaaaaggtctgactccaattgaata

SEQ ID NO: 673005 - DNA, 75 bp, synthetic construct
  source 1..75: mol_type = other DNA
gcagattggctggttacgcttatgacaggtgtattggcgtcttccctgtgggcagctacccatatcaacattggc

SEQ ID NO: 673006 - DNA, 75 bp, synthetic construct
  source 1..75: mol_type = other DNA
attcaacaactggcctttggtcaatgataggtatcctttttgtctatgcaaggatgtgtacaggtatggtcgcta

SEQ ID NO: 673007 - DNA, 75 bp, synthetic construct
  source 1..75: mol_type = other DNA
aagcagaagcagatatttctgaatatataacaaaaaaaattattgaacttaagaaaaagaccgggaaagaagtta

SEQ ID NO: 673008 - DNA, 75 bp, synthetic construct
  source 1..75: mol_type = other DNA
ggtcaaagggcggatactgtacccgtcgctgacggcgctttgcgtcacgggcgggatttttctggcgtcatgggg

SEQ ID NO: 673009 - DNA, 75 bp, synthetic construct
  source 1..75: mol_type = other DNA
aatttctggtgttgccggacggggtgaaaggggaaaacacctggacggtgggcgacaagaacgccgtgaggctgg

SEQ ID NO: 673010 - DNA, 75 bp, synthetic construct
  source 1..75: mol_type = other DNA
gcagcgtgacgcatggaagacacaggaaacagggcataaagataaagcgtcaggacgcgcagaacgcatcacagc

SEQ ID NO: 673011 - DNA, 75 bp, synthetic construct
  source 1..75: mol_type = other DNA
ttgatggttggaaatcatggggaaaccgtaatgctatttatccaacatctacagaccccaaagacgcatttcgtg

SEQ ID NO: 673012 - DNA, 75 bp, synthetic construct
  source 1..75: mol_type = other DNA
gacgaactggagccgctgccggtttcactgactaatctgaatccgcgcattatccgcgcccgcaccgtgtgtaac

SEQ ID NO: 673013 - DNA, 75 bp, synthetic construct
  source 1..75: mol_type = other DNA
ccaccatcagcgtagcgcgtctgcaagcgccggtgcgctggggcgatgatgaagcgcaattcatcattatgttaa

SEQ ID NO: 673014 - DNA, 75 bp, synthetic construct
  source 1..75: mol_type = other DNA
agtccgccaacggacgcagcattattgtgcgcactatggatattggcggtgacaaacccgttgattatctgaaca

SEQ ID NO: 673015 - DNA, 75 bp, synthetic construct
  source 1..75: mol_type = other DNA
gtcactacaacagcctgaatccagcattcttgcgggcgctcgattacgccgtgcaggcggtgcatcgccagggca

SEQ ID NO: 673016 - DNA, 75 bp, synthetic construct
  source 1..75: mol_type = other DNA
tatccgcgcccgcaccgtgtgtaacggtagcgcaggcggcatcctgacgccgatttcctctttagatctcaatac

SEQ ID NO: 673017 - DNA, 75 bp, synthetic construct
  source 1..75: mol_type = other DNA
aacaggacgcaccgctggtcaccgccgagtgcatcacgctggaaagcgactggcgcagcaaagaagaagtgctca

SEQ ID NO: 673018 - DNA, 75 bp, synthetic construct
  source 1..75: mol_type = other DNA
tatccgcgcccgcaccgtatgcagtggtagcgcaggcggcattctgacgccaatctcttctttagatctcaacgc

SEQ ID NO: 673019 - DNA, 75 bp, synthetic construct
  source 1..75: mol_type = other DNA
atcgccagggcaaatggattggtctgtgcggtgagctgggagcgaaaggttccgtgctgccgttgctggtcggct

SEQ ID NO: 673020 - DNA, 75 bp, synthetic construct
  source 1..75: mol_type = other DNA
ttgagtggcataacctgcgcactgaccgcaagggcaacgccaaaagcgcccttgcgctgattggcaccgatacgc

SEQ ID NO: 673021 - DNA, 75 bp, synthetic construct
  source 1..75: mol_type = other DNA
tgcaagaacgtgcgctggacgtacgcgacgtctgcttccagttactccagcaaatctacggtgagcaacgcttcc

SEQ ID NO: 673022 - DNA, 75 bp, synthetic construct
  source 1..75: mol_type = other DNA
ttggcgctgatcggtaccgatactctgatgggcgatagctgtcagttactgatttccggggcagacgaacaaaca

SEQ ID NO: 673023 - DNA, 75 bp, synthetic construct
  source 1..75: mol_type = other DNA
aacgaacacattccgtttgatgagaagatccagctcggcattatgctggaagtgccgtcggtgatgttcatcatc

SEQ ID NO: 673024 - DNA, 75 bp, synthetic construct
  source 1..75: mol_type = other DNA
actccgcccagaaaccggcgctgtatgataccgctgacgccaccgccaacagccgtatcaacgcccgtttgccct

SEQ ID NO: 673025 - DNA, 75 bp, synthetic construct
  source 1..75: mol_type = other DNA
gagatgaccgatccgggtgatgaactgcaggcgtctcacccgctgcgcgacggtaaggttatcgtggaagatatt

SEQ ID NO: 673026 - DNA, 75 bp, synthetic construct
  source 1..75: mol_type = other DNA
cgtttattggttcagttggcccggcgttcttccagaaagaaaccatggaagaggtggctgccatcaaggatattg

SEQ ID NO: 673027 - DNA, 75 bp, synthetic construct
  source 1..75: mol_type = other DNA
tccgcgtgaaactctatgctgtaccacatttccaggtggaaggaatggacgtcagtctgtcactggtttcgcaga

SEQ ID NO: 673028 - DNA, 75 bp, synthetic construct
  source 1..75: mol_type = other DNA
cggcaaccaggtgaagatcccgtcagaagtgatgatcccggaaacccgcgaatttgaattcgctaaccttggctt

SEQ ID NO: 673029 - DNA, 75 bp, synthetic construct
  source 1..75: mol_type = other DNA
cggtaaggttatcgtggaagatattgaggacaatccgggcttcttccgcgtcagactctttgccgtgccgcattt

SEQ ID NO: 673030 - DNA, 75 bp, synthetic construct
  source 1..75: mol_type = other DNA
tgataccgctgacgccaccgccaacagccgtattaacgcccgtctgccctatatcttcctgctgtcccgcattgc

SEQ ID NO: 673031 - DNA, 75 bp, synthetic construct
  source 1..75: mol_type = other DNA
cgtgagacggacgatgcccgttatattggcctggtgatgccccgtgtactgggacgtctgccgtatggtcctgat

SEQ ID NO: 673032 - DNA, 75 bp, synthetic construct
  source 1..75: mol_type = other DNA
tccatctttacgatctcggcaccggcaatcaggtcaaaattccgtccgaagtgatgatcccggaaacccgcgagt

SEQ ID NO: 673033 - DNA, 75 bp, synthetic construct
  source 1..75: mol_type = other DNA
cagcctgggagtttgatgcatctgcacaggacgtggcgttgctgaaaaatatttcccgggtggcggcatctgcac

SEQ ID NO: 673034 - DNA, 75 bp, synthetic construct
  source 1..75: mol_type = other DNA
gctgaataactggatccggggactggtgacggagatgaccgatccgggtgatgaactgcaggcctcgcatccgct

SEQ ID NO: 673035 - DNA, 75 bp, synthetic construct
  source 1..75: mol_type = other DNA
ctggtgtgttcagatccgcggtcctcaggccggtggtgcggtgcaggatttgccgatccatctgtatgatttggg

SEQ ID NO: 673036 - DNA, 75 bp, synthetic construct
  source 1..75: mol_type = other DNA
aaccggtaatcaggtcaaaattccgtcagaggtgatgatcccggaaacgcgggagtttgaattcgcgaatctggg

SEQ ID NO: 673037 - DNA, 75 bp, synthetic construct
  source 1..75: mol_type = other DNA
gacatcgaagacaacccgggatttttccgcgtgaaactctatgctgtaccacatttccaggtggaaggtatggac

SEQ ID NO: 673038 - DNA, 75 bp, synthetic construct
  source 1..75: mol_type = other DNA
tgaacaacgtagcgcggaaattctcgaccgcattccagctggccgttggggactgccgagtgacctgatggggcc

SEQ ID NO: 673039 - DNA, 75 bp, synthetic construct
  source 1..75: mol_type = other DNA
tctaaatcccgatctggctccgccggaaatctctgagaccatgcaggagttcaataatatgtttgatcgcctgga

SEQ ID NO: 673040 - DNA, 75 bp, synthetic construct
  source 1..75: mol_type = other DNA
gaaacgaaactgcttgaaccagtagcgcaacaggaaccggaaaaagtctgcaccgcctgcggtcagcgcggtggc

SEQ ID NO: 673041 - DNA, 75 bp, synthetic construct
  source 1..75: mol_type = other DNA
tctgccctatgggccggacacagtgccggtacgcagctttaactatgtggaagaagtcaaaggcccggatcacga

SEQ ID NO: 673042 - DNA, 75 bp, synthetic construct
  source 1..75: mol_type = other DNA
attgcaaatggttttataaccttaccccaattcgccttctatcttttgagtaccttgaggatgatgaatcaagaa

SEQ ID NO: 673043 - DNA, 75 bp, synthetic construct
  source 1..75: mol_type = other DNA
tcgtggttgcgtccgtgaaagaagcaccaattggtatcgaggtcatccctgcacatgtcactgaatatctgaaca

SEQ ID NO: 673044 - DNA, 75 bp, synthetic construct
  source 1..75: mol_type = other DNA
taacgataaactcgacttagcccaggccgaggcgattgcggatcttatcgacgccagctcggaacaggcggcccg

SEQ ID NO: 673045 - DNA, 75 bp, synthetic construct
  source 1..75: mol_type = other DNA
cggcctgggagtttgatgcatctgcacaggacgtggcgctgctgaaaaatatttcccgggtggcagcatccgcgc

SEQ ID NO: 673046 - DNA, 75 bp, synthetic construct
  source 1..75: mol_type = other DNA
gtgtgacggaaaagtggtggtggaagatatcgaagacaatccgggattcttccgcgtgaaactctatgctgtacc

SEQ ID NO: 673047 - DNA, 75 bp, synthetic construct
  source 1..75: mol_type = other DNA
gttctgaacatggtttgctgcagctggataaacaagacgtgaatctggcggaagagctgaatgaattacgtgagc

SEQ ID NO: 673048 - DNA, 75 bp, synthetic construct
  source 1..75: mol_type = other DNA
tgtatggtatatagcatggcagacagaacgctcgaaagaagaagactttaaatcaagcataaaaccagaagattt

SEQ ID NO: 673049 - DNA, 75 bp, synthetic construct
  source 1..75: mol_type = other DNA
gaaggttatagcctgtgatatatcaatatatctggaaccagcattttaccttctcattggcactgttgttttgtt

SEQ ID NO: 673050 - DNA, 75 bp, synthetic construct
  source 1..75: mol_type = other DNA
tgtcgcgcaactcgcgggagttggcacaatgactgtatccagagcgttacgcactcccgaacaagtttcagataa

SEQ ID NO: 673051 - DNA, 75 bp, synthetic construct
  source 1..75: mol_type = other DNA
atcttctcgcagtcgtatctgctttacgttatcgcacagggtactgatgttggtaacgtggctaacaaggccaac

SEQ ID NO: 673052 - DNA, 75 bp, synthetic construct
  source 1..75: mol_type = other DNA
ctgtcgattgtcgggacgtggcccagcggaaccgccaacagatcaatgcagctaaccttttccggctctgttcct

SEQ ID NO: 673053 - DNA, 75 bp, synthetic construct
  source 1..75: mol_type = other DNA
aacgatcttggtgtccgtaagccagattatttcttaaacgctgcagggaaaaatgcggcggaaaccattggtcag

SEQ ID NO: 673054 - DNA, 75 bp, synthetic construct
  source 1..75: mol_type = other DNA
caagcaatatctattctgaaagagcaacctcgaggctctgaaaggttacttcgattagtaaatgattacagcatg

SEQ ID NO: 673055 - DNA, 75 bp, synthetic construct
  source 1..75: mol_type = other DNA
tgaagttgccgccattcaaaacacgctttcagaccatgaaacgcgcatcgatgctcttgagtatgccactactcg

SEQ ID NO: 673056 - DNA, 75 bp, synthetic construct
  source 1..75: mol_type = other DNA
atggctgattcgaatctcaatgagccggtaatcattcaggctacacgactcgacacatcagtccttccacgcaat

SEQ ID NO: 673057 - DNA, 75 bp, synthetic construct
  source 1..75: mol_type = other DNA
gaattaagaatactgatgacggtctttgctttcctggcgtcggcctggtacagcgttgtgaaatacagaaaggaa

SEQ ID NO: 673058 - DNA, 75 bp, synthetic construct
  source 1..75: mol_type = other DNA
gctgaaggggaaagagccgggtgacgaatttcgtgtcctgatcaccgttttcgctttcctggcttcaatctggta

SEQ ID NO: 673059 - DNA, 75 bp, synthetic construct
  source 1..75: mol_type = other DNA
gaattaagagtgctgatcaccatttttgctttcctggcttcggcctggtacagcattgtgcagtacaaaaaagaa

SEQ ID NO: 673060 - DNA, 75 bp, synthetic construct
  source 1..75: mol_type = other DNA
ttcgatccggggtgggttaaacttatatgcttatgctccgaatacactgagttgggctgatccattagggttgac

SEQ ID NO: 673061 - DNA, 75 bp, synthetic construct
  source 1..75: mol_type = other DNA
tgtttggtacacctgttgcggcggcgttgatattttcgcaaaccttaaatggcagtagtgaagttccgctatggg

SEQ ID NO: 673062 - DNA, 75 bp, synthetic construct
  source 1..75: mol_type = other DNA
gtcaatatcgcccttgcggttgccattggcgctcgtctgttaccgcgcgtcaaccgaatggagtggactatttta

SEQ ID NO: 673063 - DNA, 75 bp, synthetic construct
  source 1..75: mol_type = other DNA
ccaaatgtttcagataaagttgttcgtattgttcattcttatgtcgattatgtaaaacgtgtggtttggaaaagt

SEQ ID NO: 673064 - DNA, 75 bp, synthetic construct
  source 1..75: mol_type = other DNA
agtttgtgttctgcggctttaggaaaggggacgctgggctatttatctcggtagccactttgcgcgatggtgttt

SEQ ID NO: 673065 - DNA, 75 bp, synthetic construct
  source 1..75: mol_type = other DNA
attacaatcttacttcactcaggaggggtataccgtttccgttacagcgagcggtgccgggctgcgggaaattat

SEQ ID NO: 673066 - DNA, 75 bp, synthetic construct
  source 1..75: mol_type = other DNA
gtttgagagtactgaggtctatacgaaaatatttgcgctcgacgtggctgccagtcagcagctgcgcttcaccct

SEQ ID NO: 673067 - DNA, 75 bp, synthetic construct
  source 1..75: mol_type = other DNA
cccgcagccattatcactggtgatgagtggttgccactggtcaatgccgcgacgcataacaaccccgaattacat

SEQ ID NO: 673068 - DNA, 75 bp, synthetic construct
  source 1..75: mol_type = other DNA
ctgcatttgttaagaaagaggacggaaaagaccccgtaaaagaaggtgccttctcagcagttgcgaatttcaacc

SEQ ID NO: 673069 - DNA, 75 bp, synthetic construct
  source 1..75: mol_type = other DNA
aaagacacaagtggcaatgatgtagctgaaggtgccttctcagcagttgcgaatttcaaccttacttatcagtaa

SEQ ID NO: 673070 - DNA, 75 bp, synthetic construct
  source 1..75: mol_type = other DNA
acaacaattttatgagacatccagcaaaggcaaaattcctctgttgcaacggttattaagcttgcatcagccatc

SEQ ID NO: 673071 - DNA, 75 bp, synthetic construct
  source 1..75: mol_type = other DNA
agcttaaagttatcactttcgttggcacccgtcctgaaataattcgattgtctagaataattgctttattagata

SEQ ID NO: 673072 - DNA, 75 bp, synthetic construct
  source 1..75: mol_type = other DNA
tgattcgcctgagaagttgcgctctcttattgagacgttaaatatagtatctgagaaatataaactgccagtaat

SEQ ID NO: 673073 - DNA, 75 bp, synthetic construct
  source 1..75: mol_type = other DNA
atgatgcctgggaatttactgctcttgcctgttatctcggcgatggacagggaggttataggggagtatctggtt

SEQ ID NO: 673074 - DNA, 75 bp, synthetic construct
  source 1..75: mol_type = other DNA
gatactgctgcgtgggatgttgatcttaatacaggtacaatcaccttcaccaatgatgaaaaagagatcatggtc

SEQ ID NO: 673075 - DNA, 75 bp, synthetic construct
  source 1..75: mol_type = other DNA
atgactaatttattcaagaagctttttggcagaaagaataaagattccagtgctaacacagcaattctttcagag

SEQ ID NO: 673076 - DNA, 75 bp, synthetic construct
  source 1..75: mol_type = other DNA
cagtgactcttttaactggtattaacctgttctttgttccgtttcagcctgtccccgctctgtggggggctgtcc

SEQ ID NO: 673077 - DNA, 75 bp, synthetic construct
  source 1..75: mol_type = other DNA
tttagaggagtacggctttaagttcgaccgtcgaatccgtgaagaagaatgtagcgagatcaccagcctttcccg

SEQ ID NO: 673078 - DNA, 75 bp, synthetic construct
  source 1..75: mol_type = other DNA
gaagaacgcatcagggaagagaagtgtaaaaaaatgaccacgctttcacgctcccgccgctgggaactggagaag

SEQ ID NO: 673079 - DNA, 75 bp, synthetic construct
  source 1..75: mol_type = other DNA
actacatcatcaaccagatcgattctgacaacaaactgggcgtaggttctgacgacaccgttgctgtgggtatcg

SEQ ID NO: 673080 - DNA, 75 bp, synthetic construct
  source 1..75: mol_type = other DNA
aatccacaccgcagatttcaaaatcaagcacatcaaaaaacaggacaatgcgattgtcatcgactttacgcgccc

SEQ ID NO: 673081 - DNA, 75 bp, synthetic construct
  source 1..75: mol_type = other DNA
cgctgaactcgctgatgtaccacgggatagtcagcgccgagaatgcctattacgggttagagaaggtgcaaacgg

SEQ ID NO: 673082 - DNA, 75 bp, synthetic construct
  source 1..75: mol_type = other DNA
gcttctttcggatgtgctctggtgggttcgtaatccgccagcagtagagaacgtcaataacccgtacagccgcaa

SEQ ID NO: 673083 - DNA, 75 bp, synthetic construct
  source 1..75: mol_type = other DNA
gctagctcgccacggtgaattggcttgcggttatgtacgtactgactcagggtgtggttttctgggtgatgctgc

SEQ ID NO: 673084 - DNA, 75 bp, synthetic construct
  source 1..75: mol_type = other DNA
tccctgtttgataaaattaatttaaccccggtgtcttccattcaggaaatagatttatggcaaaacagcgaaaca

SEQ ID NO: 673085 - DNA, 75 bp, synthetic construct
  source 1..75: mol_type = other DNA
cgtgtggcggtagagaattgcaaatacgataaggaagatctggggttccgccatgctgaagggactgacatgatg

SEQ ID NO: 673086 - DNA, 75 bp, synthetic construct
  source 1..75: mol_type = other DNA
accgttgtgtacagcatctttctaccatagaaaccacgctgcaacagtgtgaactgtggcatatgacgaagctgg

SEQ ID NO: 673087 - DNA, 75 bp, synthetic construct
  source 1..75: mol_type = other DNA
tggagcagttaaacaaattgcctgcccgctggccactggagcagggatatcgccagctacgccagcttgatgccc

SEQ ID NO: 673088 - DNA, 75 bp, synthetic construct
  source 1..75: mol_type = other DNA
gaaagatctcaaaatggcagaagaagccgattatggattaatggtttgggatacgaagagcacgggtactctgag

SEQ ID NO: 673089 - DNA, 75 bp, synthetic construct
  source 1..75: mol_type = other DNA
cgcagcggctggtatgtctggctcaggcgtcgtcacagtgcctgtggcggtctcagcccggaacaatttgaaaac

SEQ ID NO: 673090 - DNA, 75 bp, synthetic construct
  source 1..75: mol_type = other DNA
tgtgcgcattaagcccgcagccaggctgggcagagcgcgatatggcagaactgtggcaatgctgcatggctgtca

SEQ ID NO: 673091 - DNA, 75 bp, synthetic construct
  source 1..75: mol_type = other DNA
cggtaatcattcaggctacacgactcgacacatcagtccttccacacaatatcttctcgcagtcatatctgcttt

SEQ ID NO: 673092 - DNA, 75 bp, synthetic construct
  source 1..75: mol_type = other DNA
tggactgcagccacaggtacgccacttcttggctcattcaacgctaaccagtcatacacggtcggcactacgtac

SEQ ID NO: 673093 - DNA, 75 bp, synthetic construct
  source 1..75: mol_type = other DNA
ttcgcgatctgcttgcaaataccggtgtcagtggtgctcaaattgtcggcatcggcatttcggcacaaggtaagg

SEQ ID NO: 673094 - DNA, 75 bp, synthetic construct
  source 1..75: mol_type = other DNA
tcgaagacgaatttacccttaatgcggtgatgggcacctgggcggtgaccagcggcataacccgcggtttacgtg

SEQ ID NO: 673095 - DNA, 75 bp, synthetic construct
  source 1..75: mol_type = other DNA
gccgggatcgaagacgaatttaccctcaatgcggtgatggggacctgggcggtgaccagcggcataacccgcggt

SEQ ID NO: 673096 - DNA, 75 bp, synthetic construct
  source 1..75: mol_type = other DNA
tgaagcggtcgctcaataccagtttgactttggtctgcgtccatcgctgggttatgtcttatcgaaagggaaaga

SEQ ID NO: 673097 - DNA, 75 bp, synthetic construct
  source 1..75: mol_type = other DNA
gcaaaaaacgcgtctcgcttttgccgggttgaaatataaagatttgggttctttcgattatggtcgtaacctggg

SEQ ID NO: 673098 - DNA, 75 bp, synthetic construct
  source 1..75: mol_type = other DNA
tggtgatgggcattgtggcatctgtatccgtacaggccgcagaaatatataacaaagacggtaataaactggatg

SEQ ID NO: 673099 - DNA, 75 bp, synthetic construct
  source 1..75: mol_type = other DNA
gcatctggtcactgttgaccaaagactggatggcgtagaaagcgatgtatctgacattaagagtgattacgtatc

SEQ ID NO: 673100 - DNA, 75 bp, synthetic construct
  source 1..75: mol_type = other DNA
aaatggcagtacgttaaccatccagtcaaatggggcggcgtttactgccacaaccatcaagataatcgcggagca

SEQ ID NO: 673101 - DNA, 75 bp, synthetic construct
  source 1..75: mol_type = other DNA
tgcgaatactgcggcaattgcagcgctggatgtcagactaaccacggctgagggagaaatagtcaccttacagga

SEQ ID NO: 673102 - DNA, 75 bp, synthetic construct
  source 1..75: mol_type = other DNA
acacaatctggcgtatattcaggcacagcttgatgaacatggcataaatgctcagattcaggcgcggcagttgta

SEQ ID NO: 673103 - DNA, 75 bp, synthetic construct
  source 1..75: mol_type = other DNA
tccaggacgggattggccggatttactttatggaacggatcgctgctcaggggacagttgttacggcaacatgca

SEQ ID NO: 673104 - DNA, 75 bp, synthetic construct
  source 1..75: mol_type = other DNA
acctccatacccttcctatgtaatgcagtggcaaaaagcaactccgacgagggtttattttagcgttgagctgga

SEQ ID NO: 673105 - DNA, 75 bp, synthetic construct
  source 1..75: mol_type = other DNA
gcttacgtatggtcaaacagaactgcagaaacagtaaataaaggaacaacgaatttccctattctggcgcattct

SEQ ID NO: 673106 - DNA, 75 bp, synthetic construct
  source 1..75: mol_type = other DNA
tcacgatcgcgaagaagtgacggtgcatgtccgtcgtatatgggctgctgttggtggtcgtcgcgacgagcgata

SEQ ID NO: 673107 - DNA, 75 bp, synthetic construct
  source 1..75: mol_type = other DNA
ccgccagtggtttttggtaggagaactcctccaacatttgccgccagaagaccgcattacgcctattgttggcat

SEQ ID NO: 673108 - DNA, 75 bp, synthetic construct
  source 1..75: mol_type = other DNA
ctcgagcgcacaccgggtaacgcggacgaaaactgcatgacctttgtgtcgggtatggggcgacggctggatatg

SEQ ID NO: 673109 - DNA, 75 bp, synthetic construct
  source 1..75: mol_type = other DNA
tcagggagtgaatgcggttattggtagtatcagtaatctgttcaaaggtgatgacgaaccgcccgcggcggaata

SEQ ID NO: 673110 - DNA, 75 bp, synthetic construct
  source 1..75: mol_type = other DNA
ccgttatgatgcggaacaccggatggtggaagtgacgacagcgcgggggacataccggtatgtgtacgatgcgct

SEQ ID NO: 673111 - DNA, 75 bp, synthetic construct
  source 1..75: mol_type = other DNA
aaaaagaagccgttggtcgtcgtctggactttatgatgcaggaattcaacgcgagtcgaacactcttgcgtcgaa

SEQ ID NO: 673112 - DNA, 75 bp, synthetic construct
  source 1..75: mol_type = other DNA
agctaaagtgcgcgcccatatgccggaaattctgcaatggcagcgtgaacgtctggtcgcgaagctggaagatgc

SEQ ID NO: 673113 - DNA, 75 bp, synthetic construct
  source 1..75: mol_type = other DNA
gtctggactggcggatggctgaacgtgtggtatgtgtgacagacggggcgggccggacacgctttcatcagtggg

SEQ ID NO: 673114 - DNA, 75 bp, synthetic construct
  source 1..75: mol_type = other DNA
atgagaaatatacttatctacggacgagataactgctcatactgcaaacgtgcggtcgagctggcgaagaaacta

SEQ ID NO: 673115 - DNA, 75 bp, synthetic construct
  source 1..75: mol_type = other DNA
atcaaccaactggatagcgataataagctgaatattaataatgatgatactgtcgcggttgggatgacgtatcag

SEQ ID NO: 673116 - DNA, 75 bp, synthetic construct
  source 1..75: mol_type = other DNA
agggcgggactcgtacaacctgaataaatacatctggcgttttatcgccctgagcacggcacaaccgcgtgtgat

SEQ ID NO: 673117 - DNA, 75 bp, synthetic construct
  source 1..75: mol_type = other DNA
ctaaccaccaacgatagcgaaagtatcgaggtagctatgttaaatcataccacacacccgcaagggcgggactcg

SEQ ID NO: 673118 - DNA, 75 bp, synthetic construct
  source 1..75: mol_type = other DNA
gattgcccatcacccttagggcttttatcacgtttgattgttgacaagtggtcacctattgaattagcctttcta

SEQ ID NO: 673119 - DNA, 75 bp, synthetic construct
  source 1..75: mol_type = other DNA
ttcgactttggtctgcgtccatccctgggttacgtattatcaaaagggaaagatattgaaggcatcggtgatgag

SEQ ID NO: 673120 - DNA, 75 bp, synthetic construct
  source 1..75: mol_type = other DNA
atcaaccaactggacagcgataacaaattaaatattaataatgatgatattgtcgcggttgggatgacctatcag

SEQ ID NO: 673121 - DNA, 75 bp, synthetic construct
  source 1..75: mol_type = other DNA
ggccggtaatcacgatcttgaaaccaacgattcagtatatagcgccaacgcagcagcatcgctgagttctatcgg

SEQ ID NO: 673122 - DNA, 75 bp, synthetic construct
  source 1..75: mol_type = other DNA
atactgacggcggatttgatctgagcaaattggatattttgtgtcaggaaatcctcaccgaagcggagagttcgg

SEQ ID NO: 673123 - DNA, 75 bp, synthetic construct
  source 1..75: mol_type = other DNA
attggtaaaccggtagagactatcccccaggtattgatcgatggccaaccgattggcggatacacagaacttgca

SEQ ID NO: 673124 - DNA, 75 bp, synthetic construct
  source 1..75: mol_type = other DNA
cggtcaccatgcgggcaatccaaaaagccatcgcgctgattgaactcaagtttaccccacagggcgaatcccatt

SEQ ID NO: 673125 - DNA, 75 bp, synthetic construct
  source 1..75: mol_type = other DNA
caaagcgatgaaagctgctggctgtaagcacatgctggtagctggtgataccttccatgttcgcggtgctatatc

SEQ ID NO: 673126 - DNA, 75 bp, synthetic construct
  source 1..75: mol_type = other DNA
atgacattgccatacggggtaatatcagatccccattatcatcgttgggatgcttttgcgacaacaaacgctgac

SEQ ID NO: 673127 - DNA, 75 bp, synthetic construct
  source 1..75: mol_type = other DNA
gatgcggctggcgcaggagagcaggccggaagggagcagcagcctgtatatttacagtgccccggggagttatga

SEQ ID NO: 673128 - DNA, 75 bp, synthetic construct
  source 1..75: mol_type = other DNA
atgattgccattctaaacaaagctaaagggagggttggtgtgaatgctcaggctgtcatcatggttttccttggt

SEQ ID NO: 673129 - DNA, 75 bp, synthetic construct
  source 1..75: mol_type = other DNA
atctccgaagcgttacttcgcgatctgatcaacgattcgtggaatctggtggttgatggtctggctaaacgcgat

SEQ ID NO: 673130 - DNA, 75 bp, synthetic construct
  source 1..75: mol_type = other DNA
cgaagcgttacttcgcgatctgatcaacgattcatggaatttagtggttgatggcttagccaaacgcgatcaaaa

SEQ ID NO: 673131 - DNA, 75 bp, synthetic construct
  source 1..75: mol_type = other DNA
attttgtttgccgtgttgcattcagccattacacggttttcacccgcgcggcacatagatatgaaatacgcgcaa

SEQ ID NO: 673132 - DNA, 75 bp, synthetic construct
  source 1..75: mol_type = other DNA
atgaccagcccttaccgtattcaggagggcagctttgccctgcctgacgcttttcttgaccgcaccgtcaatatc

SEQ ID NO: 673133 - DNA, 75 bp, synthetic construct
  source 1..75: mol_type = other DNA
ggttatctattctctgttttttgtcttgttctttcccttctttacctatggatgagagcaaagaacaaaaattag

SEQ ID NO: 673134 - DNA, 75 bp, synthetic construct
  source 1..75: mol_type = other DNA
aatgaaaaagatctcgctgaactggatctttcctgctggcgcgtcgctggtattggcgcagaacccatctccgca

SEQ ID NO: 673135 - DNA, 75 bp, synthetic construct
  source 1..75: mol_type = other DNA
gcattaaattacgccctggcgaccgctgcgtctcctggctgcctttctaccatgatatgggactggtcggctttc

SEQ ID NO: 673136 - DNA, 75 bp, synthetic construct
  source 1..75: mol_type = other DNA
gctacggactggcagaaaatgcgctggctgtcagcttctctgatgaagcctgcggggttgtggttaacgaagtgg

SEQ ID NO: 673137 - DNA, 75 bp, synthetic construct
  source 1..75: mol_type = other DNA
atggataagcaatctctgcacgaaacggcgaaacgcatcgccctcgaactgccttttgttgaactttgctggcca

SEQ ID NO: 673138 - DNA, 75 bp, synthetic construct
  source 1..75: mol_type = other DNA
tccgttcgaatggttggtattcctctgtcggtactcacctgccttgcggatatcagtaccgcgttgagtcgcctg

SEQ ID NO: 673139 - DNA, 75 bp, synthetic construct
  source 1..75: mol_type = other DNA
cgcgccgtatcgactttcgtcaactgcggcaaagcgttgccggaacatggtattgaaatccgcaatgaagcaggt

SEQ ID NO: 673140 - DNA, 75 bp, synthetic construct
  source 1..75: mol_type = other DNA
atatccaaacttcctcacggatttaatgaattagaacacataaaaaaactggtcaaaacatatgacccaagggaa

SEQ ID NO: 673141 - DNA, 75 bp, synthetic construct
  source 1..75: mol_type = other DNA
ggagctggcgattacagaacccggaacatgccgatagcggcatagtgctgatctggaatgatgcggtttacggct

SEQ ID NO: 673142 - DNA, 75 bp, synthetic construct
  source 1..75: mol_type = other DNA
gggccactttccgctggactggcagcgcgtgtacagcagtcgtgacgaacgcacggaaggcatgtttggtcaggg

SEQ ID NO: 673143 - DNA, 75 bp, synthetic construct
  source 1..75: mol_type = other DNA
cggacggtatgctggaaaccgcctttcagggagtgaatgcggttattggcagcatcagtaatctgttcaaaggcg

SEQ ID NO: 673144 - DNA, 75 bp, synthetic construct
  source 1..75: mol_type = other DNA
cgacgcagacgaaaccggcgcgccggagataatccgcttcagttacgacagagcgggccggatgctgagcgagga

SEQ ID NO: 673145 - DNA, 75 bp, synthetic construct
  source 1..75: mol_type = other DNA
agaacctgcgctaccagggacagtacctcgacagggaaacggggctgcactacaatctgcacaggtactatgatc

SEQ ID NO: 673146 - DNA, 75 bp, synthetic construct
  source 1..75: mol_type = other DNA
tgtacatgacgcgcaatgaagacatcttcattccgttgcaagtgcgcgtagcaaaagcccagaaacagcgcgctg

SEQ ID NO: 673147 - DNA, 75 bp, synthetic construct
  source 1..75: mol_type = other DNA
gaaatgacggcaggcgttcttatgctctcatcgacaggtgaggtgctgacagacaaaaaactgcggataacaggc

SEQ ID NO: 673148 - DNA, 75 bp, synthetic construct
  source 1..75: mol_type = other DNA
ggttttgcatttgcgggagcttatgcaaactctgatcgtactgattaccagtctggtgatggtaaaggcgaaaga

SEQ ID NO: 673149 - DNA, 75 bp, synthetic construct
  source 1..75: mol_type = other DNA
ctgcattacgtcagatcgacaagcggaatgttataatagaacttcgccctggagctgacaaagttgaagtacgta

SEQ ID NO: 673150 - DNA, 75 bp, synthetic construct
  source 1..75: mol_type = other DNA
cgaaggcggaacaggaagaagcacagcgtcaggaggaggccagaacgttccgggatgtggccggggaatatctgg

SEQ ID NO: 673151 - DNA, 75 bp, synthetic construct
  source 1..75: mol_type = other DNA
agcggccatctccagcagataaacctggaccgggaggtcatcagcgagttcacacgtgacgccctgcaccgggag

SEQ ID NO: 673152 - DNA, 75 bp, synthetic construct
  source 1..75: mol_type = other DNA
tcagggcggcaaatggcgctatgtgtatgacctgcaggggcatatcacggagacgcacgacccgctggggcgggt

SEQ ID NO: 673153 - DNA, 75 bp, synthetic construct
  source 1..75: mol_type = other DNA
cggggctccaagatgcgaacaccacatcttgtgccactcagcaaacaggctgtagccatactggcagaactacag

SEQ ID NO: 673154 - DNA, 75 bp, synthetic construct
  source 1..75: mol_type = other DNA
tacgccgctctgagtagcgctggaatgaatttttatgacagacgttgccaacttgaagatcaactggaatatcag

SEQ ID NO: 673155 - DNA, 75 bp, synthetic construct
  source 1..75: mol_type = other DNA
ggagcacatgacccgcgtaaaccaatcagtgaaaataccgtaaataaggccctcagagtgatggggtatgacaca

SEQ ID NO: 673156 - DNA, 75 bp, synthetic construct
  source 1..75: mol_type = other DNA
ccaccgaatgggggctggtttcactggttatcaatttgtccaatatgatgtttatcgtaactgtctccctactgg

SEQ ID NO: 673157 - DNA, 75 bp, synthetic construct
  source 1..75: mol_type = other DNA
tcggttcgccgttctccattccggaaatgttctccgcacgtctcggtattgccacgatggcgatatgcccaatta

SEQ ID NO: 673158 - DNA, 75 bp, synthetic construct
  source 1..75: mol_type = other DNA
aaaatccgtaaaggcgttgaactgcaaccattcacctggcaacaaaaaacgcttaaaaacgctttatctcacggt

SEQ ID NO: 673159 - DNA, 75 bp, synthetic construct
  source 1..75: mol_type = other DNA
aaaacttcctcgttgagaaaatgcgcaccctcggcaccgcagcctgcccgccgtaccatatcgcatttgtgattg

SEQ ID NO: 673160 - DNA, 75 bp, synthetic construct
  source 1..75: mol_type = other DNA
caacccaggatatctgtgggcatggattcaggacgatggcatgtagcgcgttaatagaatcaggattgtggtccc

SEQ ID NO: 673161 - DNA, 75 bp, synthetic construct
  source 1..75: mol_type = other DNA
tcataaagcagaacatctggaagaacgtcgactgatgctacagtggtgggccgattttctggatgcaaacagaga

SEQ ID NO: 673162 - DNA, 75 bp, synthetic construct
  source 1..75: mol_type = other DNA
aggccagtacattccggaagaactgcgccaggccggtgaaggcgaagcggtgaaagttgaccttaaccgcccgat

SEQ ID NO: 673163 - DNA, 75 bp, synthetic construct
  source 1..75: mol_type = other DNA
gttcagggcgatggcgtgcagtgcgttaatagaatcaggtttgtggtcccgtgatgcagttgaacgtcagggtaa

SEQ ID NO: 673164 - DNA, 75 bp, synthetic construct
  source 1..75: mol_type = other DNA
cgggagcacatgacccgcgtaaaccaatcagtgaaaatgtaatgaacgcatcccacacaattaaacacggagcag

SEQ ID NO: 673165 - DNA, 75 bp, synthetic construct
  source 1..75: mol_type = other DNA
gggctggtgaaaatggtctgatctttacgggagcacatgacccgcgtaaaccaatcagtgaaaataccgtaaata

SEQ ID NO: 673166 - DNA, 75 bp, synthetic construct
  source 1..75: mol_type = other DNA
tgctgcagtggtgggctgattatctggatgcgaatagaatggcggctatcactccatttgactatgcaaagatta

SEQ ID NO: 673167 - DNA, 75 bp, synthetic construct
  source 1..75: mol_type = other DNA
cgccctgctctggatctttcacgcctgcctgaacttctgtcgcgtattgacggttataaaggtcagcctgtcacc

SEQ ID NO: 673168 - DNA, 75 bp, synthetic construct
  source 1..75: mol_type = other DNA
ccagcatcgccctgctctggatctttcacgcctgcctgaacttctgtcgcgtattgacggttataaaggccagcc

SEQ ID NO: 673169 - DNA, 75 bp, synthetic construct
  source 1..75: mol_type = other DNA
agatgagccatcaggagcgtaatggtgtacgtgctgcgtatatccataaagcagaacatctggaagaacggcgac

SEQ ID NO: 673170 - DNA, 75 bp, synthetic construct
  source 1..75: mol_type = other DNA
ggccgattttctggatgcaaacagagaaagatttatcagtccatttgaatatgcaaagattaataatccattaaa

SEQ ID NO: 673171 - DNA, 75 bp, synthetic construct
  source 1..75: mol_type = other DNA
aaataccgtaaataaggccctcagagtgatggggtatgacacaaccaaggaagtctgtggccatggattccgggc

SEQ ID NO: 673172 - DNA, 75 bp, synthetic construct
  source 1..75: mol_type = other DNA
gttatgccgtacagtctggcatcatcagatataatcctgctctggatatggctggcgcattgacctctgtaaaac

SEQ ID NO: 673173 - DNA, 75 bp, synthetic construct
  source 1..75: mol_type = other DNA
gggccgattttctggatgcaaacagagaaagatttatcagtccatttgaatatgcaaagattaataatccattaa

SEQ ID NO: 673174 - DNA, 75 bp, synthetic construct
  source 1..75: mol_type = other DNA
gagctaaaaaagtagtccctgatttacaactctcttttgaacatattgcacgacgctggcatgccagtaataaac

SEQ ID NO: 673175 - DNA, 75 bp, synthetic construct
  source 1..75: mol_type = other DNA
cagcctgtcacccgactggcagttatgctgaatttactggtttttattcgttccagtgaactcagatatgcccgc

SEQ ID NO: 673176 - DNA, 75 bp, synthetic construct
  source 1..75: mol_type = other DNA
gctacagtggtgggcagattttctgaatgcgaacagagagaaatgtatcagtccgtttgattatgcaaagatcaa

SEQ ID NO: 673177 - DNA, 75 bp, synthetic construct
  source 1..75: mol_type = other DNA
gaacttcagacatgggctggtgaaaatggtctgatctttacgggagcacatgacccgcgtaaaccaatcagtgaa

SEQ ID NO: 673178 - DNA, 75 bp, synthetic construct
  source 1..75: mol_type = other DNA
aacttcagacatgggctggtgaaaatggtctgatctttacgggagcacatgacccacgtaaaccaatcagtgaaa

SEQ ID NO: 673179 - DNA, 75 bp, synthetic construct
  source 1..75: mol_type = other DNA
gcattgaccacggtaaaacgccagcatcgcccagctcttgatctttcccgcctgcctgaacttgtgtcgcgtatt

SEQ ID NO: 673180 - DNA, 75 bp, synthetic construct
  source 1..75: mol_type = other DNA
gctgcgtatatccataaagcagaacatctggaagaacggcgactgatgctacagtggtgggcagattttctggat

SEQ ID NO: 673181 - DNA, 75 bp, synthetic construct
  source 1..75: mol_type = other DNA
atggtagaaagaaccgctgttttccctgctggccgacattcactatatgctgagcatcgttattctgcggctatt

SEQ ID NO: 673182 - DNA, 75 bp, synthetic construct
  source 1..75: mol_type = other DNA
gcattgaccacggtaaaacgccagcatcgccccgctcttgatctttctcgcctgcctgaacttttgtcgcgtatt

SEQ ID NO: 673183 - DNA, 75 bp, synthetic construct
  source 1..75: mol_type = other DNA
gcattgaccacggtaaaacgccagcatcgccccgctcttgatctttcacgcctgcctgaacttgtgtcgcgtatt

SEQ ID NO: 673184 - DNA, 75 bp, synthetic construct
  source 1..75: mol_type = other DNA
gcattgaccacggtaaaacgccagcatcgcccagctcttgatctttcgcgcctgcctgaacttctgtcgcgtatt

SEQ ID NO: 673185 - DNA, 75 bp, synthetic construct
  source 1..75: mol_type = other DNA
cacctgctcaggcgcataaatttgccagcaattaccattgttttatggttcgtcgttttgaccgcactaatgcgg

SEQ ID NO: 673186 - DNA, 75 bp, synthetic construct
  source 1..75: mol_type = other DNA
atggttaagaatgctaatcgctccgggggatcattagggggggcacgtccgaaagccagtgttgttgatgaagct

SEQ ID NO: 673187 - DNA, 75 bp, synthetic construct
  source 1..75: mol_type = other DNA
agagctcgtacgaaagtgcgagcttttttttcgcattttatctgtctgtacggcagtgaacgcgttcgcaaaggt

SEQ ID NO: 673188 - DNA, 75 bp, synthetic construct
  source 1..75: mol_type = other DNA
cgtgtgatgggctatgatacgaagactgaaatttgtggacacggttttagaacgatggtgtgtagctcattagtt

SEQ ID NO: 673189 - DNA, 75 bp, synthetic construct
  source 1..75: mol_type = other DNA
cgccccgctcttgatctttcacgtcttcctgaacttttgtcgcgtattgacagttataaggggcagcctgtcacc

SEQ ID NO: 673190 - DNA, 75 bp, synthetic construct
  source 1..75: mol_type = other DNA
atgacattattgctaattttagagggattgtcagtcagtggcgaatcattgccgagcgtctgagattacctggtc

SEQ ID NO: 673191 - DNA, 75 bp, synthetic construct
  source 1..75: mol_type = other DNA
gcattgaccacggtaaaacgccagcatcgccccgctcttgatctttcgcgcctgcctgaacttatgtcgcgtatt

SEQ ID NO: 673192 - DNA, 75 bp, synthetic construct
  source 1..75: mol_type = other DNA
gctgcaatggtgggcagattttctggatgcaaacagggaggagtgtatcagtccgtttgaatatgcaaaagttaa

SEQ ID NO: 673193 - DNA, 75 bp, synthetic construct
  source 1..75: mol_type = other DNA
ctttcatgctccgcccggcacaccagcaacaggttgcttctattcttcacgaccctgaagccagtgaaaacgata

SEQ ID NO: 673194 - DNA, 75 bp, synthetic construct
  source 1..75: mol_type = other DNA
gtgcagccacactcaatcagggaacacgcctgtgctcccatgacgatacgcaaaaaatttacgcttacctttccc

SEQ ID NO: 673195 - DNA, 75 bp, synthetic construct
  source 1..75: mol_type = other DNA
cttccgaacaatggcctgtagttcattaatcgaatcaggtttgtggtctcgtgatgctgttgaacgtcagatgag

SEQ ID NO: 673196 - DNA, 75 bp, synthetic construct
  source 1..75: mol_type = other DNA
tgaggtttgtggtcatggcttccgcacaatggcctgtagttcattgatcgaatcaggtttgtggtctcgtgatgc

SEQ ID NO: 673197 - DNA, 75 bp, synthetic construct
  source 1..75: mol_type = other DNA
acaccacatcttgtgccactcagcaaacaggttgtagccatactggcagaacttcagacatgggctggtgaaaat

SEQ ID NO: 673198 - DNA, 75 bp, synthetic construct
  source 1..75: mol_type = other DNA
ctcgccgttatgctgaatttactggtttttattcgttccagtgaactcagataggcccgttggtctgaaattgat

SEQ ID NO: 673199 - DNA, 75 bp, synthetic construct
  source 1..75: mol_type = other DNA
gcattgaccacggtaaaacgccagcatcgcccggctcttgatctttcccgcctgcctgaacttatgtcgcgtatt

SEQ ID NO: 673200 - DNA, 75 bp, synthetic construct
  source 1..75: mol_type = other DNA
gcattgaccacggtaaaacgccagcatcgcccggctcttgatctttcacgcctgcctgaacttctgtcgcgtatt

SEQ ID NO: 673201 - DNA, 75 bp, synthetic construct
  source 1..75: mol_type = other DNA
ggccaaacgggttgtcgtttcccttggtccacaaggagcgctgggtgttgatagtgaaaactgcattcaggtggt

SEQ ID NO: 673202 - DNA, 75 bp, synthetic construct
  source 1..75: mol_type = other DNA
ctggccgttatgctgaatttactggtttttattcgttccagtgaactcagatacgcccgttggtctgaaattgat

SEQ ID NO: 673203 - DNA, 75 bp, synthetic construct
  source 1..75: mol_type = other DNA
ctcgcggttatgctgaatttactggtttttattcgttccagtgaactcagatacgcccgttggtctgaaattgat

SEQ ID NO: 673204 - DNA, 75 bp, synthetic construct
  source 1..75: mol_type = other DNA
tatcaatgagcgcgaacaaataatgtaccaggcggtacattacgagttagttgccagtgccctggcggtacagac

SEQ ID NO: 673205 - DNA, 75 bp, synthetic construct
  source 1..75: mol_type = other DNA
ggcgcgaatcggctgtgaatgcggcgcgaatgtctcgacattttcctgcttcaagctatttgggccagagggtgt

SEQ ID NO: 673206 - DNA, 75 bp, synthetic construct
  source 1..75: mol_type = other DNA
tcacctgtctgttgccggtaaaccagctgctgaccgcactgccggtggatgtattaggtagtctgggggaattaa

SEQ ID NO: 673207 - DNA, 75 bp, synthetic construct
  source 1..75: mol_type = other DNA
acatttgtaaatccgggggttatacctgatctggttgtgccggctgtatctgttcgagaaagaatcaatgctttt

SEQ ID NO: 673208 - DNA, 75 bp, synthetic construct
  source 1..75: mol_type = other DNA
tgacttaattggctacaccccgtggggctgcattgacctggtttctgccggaacaggggaaatgaaaaagtgtag

SEQ ID NO: 673209 - DNA, 75 bp, synthetic construct
  source 1..75: mol_type = other DNA
catctatcctctgacgtgtgcacccaacgatatgatgatggccacgaaagcgatgcatcgtcgttactggtttac

SEQ ID NO: 673210 - DNA, 75 bp, synthetic construct
  source 1..75: mol_type = other DNA
gatccttgcacataatcacccttcgggttgtgctgaacccagtaaagcggataaactcattaccgaacggataat

SEQ ID NO: 673211 - DNA, 75 bp, synthetic construct
  source 1..75: mol_type = other DNA
aatttcggctctctttatggctttttaacctctgaatatgaacaatttagtggcgttcatggaattggcgtggcg

SEQ ID NO: 673212 - DNA, 75 bp, synthetic construct
  source 1..75: mol_type = other DNA
gttgtcagttcatggatttacgcgtgctcgaccatatcgtgattgggcgtggagagtatgtttcttttgccgaac

SEQ ID NO: 673213 - DNA, 75 bp, synthetic construct
  source 1..75: mol_type = other DNA
gtttgaagaacgcacgtcgcggattatcaaaaacttaccgtatatcgccatcgtaggggcgctgattgccgcagt

SEQ ID NO: 673214 - DNA, 75 bp, synthetic construct
  source 1..75: mol_type = other DNA
cttttttggaaaatgtggacgctcaaagaagcttacatcaaatatcgaggtaaaggcctatctttaggactggat

SEQ ID NO: 673215 - DNA, 75 bp, synthetic construct
  source 1..75: mol_type = other DNA
atgctgaatttgcaacactgtcagcaatattcacagataaaattgaatcactggcagcagaagccgagatggaag

SEQ ID NO: 673216 - DNA, 75 bp, synthetic construct
  source 1..75: mol_type = other DNA
ttgttgctgatggtcgaataccgacagaaaatatagcggaagcagtacagttaaactatgaaagaactaccggaa

SEQ ID NO: 673217 - DNA, 75 bp, synthetic construct
  source 1..75: mol_type = other DNA
gcctgacggagaactcactgctgatgaatctgctgaaccagttacaggaagacgggcacgacgtatcgggcgcgg

SEQ ID NO: 673218 - DNA, 75 bp, synthetic construct
  source 1..75: mol_type = other DNA
atggaggcgatcaagctggaagacaaaaaagaatacagtgccccactgaagcccggctaccgcagcctgattcac

SEQ ID NO: 673219 - DNA, 75 bp, synthetic construct
  source 1..75: mol_type = other DNA
caagaaaagttagcacagactgcacgagatctatcagagcttgaagggcgagcagcaccattatggcaatacgaa

SEQ ID NO: 673220 - DNA, 75 bp, synthetic construct
  source 1..75: mol_type = other DNA
catcgaaaccacgctgcaacagtgtgaactgtggcatatgacgagactggagctgctggccgggcagtttcgcaa

SEQ ID NO: 673221 - DNA, 75 bp, synthetic construct
  source 1..75: mol_type = other DNA
gccagttcgtcatgggcggcgatccttgtacttataaggaatccggtgaactgcaggctgaaatgagtaaactga

SEQ ID NO: 673222 - DNA, 75 bp, synthetic construct
  source 1..75: mol_type = other DNA
gctttagaattagttaatttaaaaagaaatgttatgatcgaaagaggtttactgcaggcgcaaaaattttcatgg

SEQ ID NO: 673223 - DNA, 75 bp, synthetic construct
  source 1..75: mol_type = other DNA
tgttccgtgtcagtggtggcgcattatagggagttattccggcctgacaagaggaaatttaaaataattttctga

SEQ ID NO: 673224 - DNA, 75 bp, synthetic construct
  source 1..75: mol_type = other DNA
aggtggtaataaaactgcttattttttaagtggtggagatgccgaagttgtttgttgggaatgtgtaagagatag

SEQ ID NO: 673225 - DNA, 75 bp, synthetic construct
  source 1..75: mol_type = other DNA
ttattttattggtaatgttattgtcatgttcagtaagtgcagttgattttgtatatcgagtggactcccgctccc

SEQ ID NO: 673226 - DNA, 75 bp, synthetic construct
  source 1..75: mol_type = other DNA
cagtaaacgaagcaaattatcaagctcagatgacaataagcaacgctaatagcgaagctatagcaatcaccaaag

SEQ ID NO: 673227 - DNA, 75 bp, synthetic construct
  source 1..75: mol_type = other DNA
gccaccatcaatcgcattattgttgcgccggaacgcttacaggaaccgggctaccgcgggcgtcgctggtgggag

SEQ ID NO: 673228 - DNA, 75 bp, synthetic construct
  source 1..75: mol_type = other DNA
cctgacgcgcgaagcggaagagattgacccccatctattacccgtctggaaaggcgagcagcgccgttttctgga

SEQ ID NO: 673229 - DNA, 75 bp, synthetic construct
  source 1..75: mol_type = other DNA
atgtgtatctaccttaacttaatgatttttaccaaaatcattaggggattcatcagtgcacagctgttgatgccg

SEQ ID NO: 673230 - DNA, 75 bp, synthetic construct
  source 1..75: mol_type = other DNA
agatataatcctgctctggatatggctggcgcattgactacggtaaaacgccagcatcgccccgctcttgatctt

SEQ ID NO: 673231 - DNA, 75 bp, synthetic construct
  source 1..75: mol_type = other DNA
cagcctgttacccgacttgctgttatgctgaatttactggtttttattcgctccagtgaactcagatatgcccgc

SEQ ID NO: 673232 - DNA, 75 bp, synthetic construct
  source 1..75: mol_type = other DNA
ggtttgtggtcccgcgatgctgttgaacgtcagatgagccatcaggaacgtaacggtgtacgcgctgcttacatt

SEQ ID NO: 673233 - DNA, 75 bp, synthetic construct
  source 1..75: mol_type = other DNA
ggtgggccgattttctggatgcaaacagagaaagatttatcagtccatttgaatatgcaaagattaataatccat

SEQ ID NO: 673234 - DNA, 75 bp, synthetic construct
  source 1..75: mol_type = other DNA
atatccataaagccgaacatctggaagaacgtcgacttatgctacagtggtgggcagattttctggatgcgaaca

SEQ ID NO: 673235 - DNA, 75 bp, synthetic construct
  source 1..75: mol_type = other DNA
tgggcaggtgaaaatggtctgatatttacgggtgcacatgacccgcgtaaaccaatcagtgaaaatactgtaaat

SEQ ID NO: 673236 - DNA, 75 bp, synthetic construct
  source 1..75: mol_type = other DNA
catactggcagaacttcagacatgggctggtgaaaatggtctgatctttacgggagcacatgacccgcgtaaacc

SEQ ID NO: 673237 - DNA, 75 bp, synthetic construct
  source 1..75: mol_type = other DNA
tccatgtggactattccagccgaacgcgaacctctgccaggcgtaaaattctcacaccggggatccaagatgcga

SEQ ID NO: 673238 - DNA, 75 bp, synthetic construct
  source 1..75: mol_type = other DNA
agatgagaactccgcatcttgttcccctcagcaagcaggctgtagctatacttacagaacttcagacatgggctg

SEQ ID NO: 673239 - DNA, 75 bp, synthetic construct
  source 1..75: mol_type = other DNA
gggctccaagatgcgaacaccacatcttgtgccactcagcaaacaggctgtagccatactgacagaactacagac

SEQ ID NO: 673240 - DNA, 75 bp, synthetic construct
  source 1..75: mol_type = other DNA
cgactggcagttatgctgaatttactggtttttattcgttccagtgaactcagatatgcccgctggtcggaaatt

SEQ ID NO: 673241 - DNA, 75 bp, synthetic construct
  source 1..75: mol_type = other DNA
aatcagtgaaaatactgtaaataaagccctgagggtgatggggtatgacacaatccaggaagtctgtggccatgg

SEQ ID NO: 673242 - DNA, 75 bp, synthetic construct
  source 1..75: mol_type = other DNA
gccttgagcggtaaaggcgaggttatatttcccagcgatcatgatcctaaaaaagttatgagtgaaaatactgta

SEQ ID NO: 673243 - DNA, 75 bp, synthetic construct
  source 1..75: mol_type = other DNA
tgtggaacgccagatgagccatcaggagcgtaatggtgtacgtgctgcgtatatccataaagccgaacatctgga

SEQ ID NO: 673244 - DNA, 75 bp, synthetic construct
  source 1..75: mol_type = other DNA
tgcgaacaccacatcttgtgccactcagccaacaggctgtagccatactggcagaacttcagacatgggcaggtg

SEQ ID NO: 673245 - DNA, 75 bp, synthetic construct
  source 1..75: mol_type = other DNA
tggtgcattgaccacggtaaaacgccagcatcgccccgctctgaatctttcacgcctgcctgaacttctgtcgcg

SEQ ID NO: 673246 - DNA, 75 bp, synthetic construct
  source 1..75: mol_type = other DNA
gtagctcgtgttccgcgcattgaacgcgcgcgccacggtgatgcaggcggaatgcgtggagctgccttcctacat

SEQ ID NO: 673247 - DNA, 75 bp, synthetic construct
  source 1..75: mol_type = other DNA
gatcagcgttttggctgtaaaggttctgtcggcatcggtattccgggaatgccggaaacagaagatggcacgctg

SEQ ID NO: 673248 - DNA, 75 bp, synthetic construct
  source 1..75: mol_type = other DNA
tcggaggggattgacccttgcgaacagaaaagagctaaaaaagtagtccctgatttacaactctcttttgaaggc

SEQ ID NO: 673249 - DNA, 75 bp, synthetic construct
  source 1..75: mol_type = other DNA
aaccaatcagtgaaaatactgtaaataaggccctgagggtgatggggtatgacacaacccaggaagtctgtggcc

SEQ ID NO: 673250 - DNA, 75 bp, synthetic construct
  source 1..75: mol_type = other DNA
gcattgaccacggtaaaacgccagcatcgccctgctctggatctttcacgcctgcctgaacttatgtcgcgtatt

SEQ ID NO: 673251 - DNA, 75 bp, synthetic construct
  source 1..75: mol_type = other DNA
gcattgaccacggtaaaacgccagcatcgccctgctctcgatctttcgcgcctgcctgaacttgtgtcgcgtatt

SEQ ID NO: 673252 - DNA, 75 bp, synthetic construct
  source 1..75: mol_type = other DNA
cggctggcagttatgctgaatttactggtttttattcgctccagtgaactcagatatgcccgctggtctgaaatt

SEQ ID NO: 673253 - DNA, 75 bp, synthetic construct
  source 1..75: mol_type = other DNA
ctcgctgttatgctgaatttactggtttttattcgttccagtgaactcagataagcccggtggtctgaaattgat

SEQ ID NO: 673254 - DNA, 75 bp, synthetic construct
  source 1..75: mol_type = other DNA
cttgcggttatgctgaatttactggtttttattcgttccagtgaactcagataagcccgctggtctgaaattgat

SEQ ID NO: 673255 - DNA, 75 bp, synthetic construct
  source 1..75: mol_type = other DNA
ccggataacaggcaaaacaaaggcgaccgcaaaagggtcgccagtgggaacaagggaaaacaaaagcatcaccaa

SEQ ID NO: 673256 - DNA, 75 bp, synthetic construct
  source 1..75: mol_type = other DNA
gacacattcgcgctacgttctcagcaaaaagccgctgccgcaatggaagccgggcgctttgcagacgaaattact

SEQ ID NO: 673257 - DNA, 75 bp, synthetic construct
  source 1..75: mol_type = other DNA
gtcttggagacggactggtttatgacgtaatcctgcgcgatggtctgatgtgcgccacccatggttatcatatgg

SEQ ID NO: 673258 - DNA, 75 bp, synthetic construct
  source 1..75: mol_type = other DNA
ggcacgcgataaaacgctggggctggcaacactgtgcattggtggcggccagggaattgcgatggtgattgaacg

SEQ ID NO: 673259 - DNA, 75 bp, synthetic construct
  source 1..75: mol_type = other DNA
tcgtggtgcgttagcgggtcattccgccgtggaacttggcagcctggtcgtcaaagcgttaatagaacgtaccgg

SEQ ID NO: 673260 - DNA, 75 bp, synthetic construct
  source 1..75: mol_type = other DNA
aaggaaccttaaattaattgctgaaagtatttctttaaaagatacctcagatgaagatggcagcgactttatctt

SEQ ID NO: 673261 - DNA, 75 bp, synthetic construct
  source 1..75: mol_type = other DNA
aatgggatagtagcagcattttcatttcttattatcaaaaactcttccactgcaaaagcaaaagaagaagctaga

SEQ ID NO: 673262 - DNA, 75 bp, synthetic construct
  source 1..75: mol_type = other DNA
gaaggtgtttgcactggatgtggctgcacggcaccgggtgcagtttgcgatgcctgagtccgatgcagtgtctat

SEQ ID NO: 673263 - DNA, 75 bp, synthetic construct
  source 1..75: mol_type = other DNA
gtgacggacagaacggtcaggacctggattggggaggcggttgccgccgctgccgctgatggtgtgacgttctct

SEQ ID NO: 673264 - DNA, 75 bp, synthetic construct
  source 1..75: mol_type = other DNA
aaaaacgccgagctggtggaagagagcgcgcaggtgtcagcgatggttaaacaccgcgccagccgactggaagac

SEQ ID NO: 673265 - DNA, 75 bp, synthetic construct
  source 1..75: mol_type = other DNA
gtctgatctccgcagcctttatctctcgctggttcggcggcctgatgctcggcgctatgggtgaccgctacgggc

SEQ ID NO: 673266 - DNA, 75 bp, synthetic construct
  source 1..75: mol_type = other DNA
tgacggtgtgacgttatctgtcccggtcacgccacatacgttccgccattcctatgcgatgcacatgctgtatgt

SEQ ID NO: 673267 - DNA, 75 bp, synthetic construct
  source 1..75: mol_type = other DNA
gcggcggtactggcgcagcagagcatcaagcatctggagtgcgtcgcttatccggagctgggtatggaagctatc

SEQ ID NO: 673268 - DNA, 75 bp, synthetic construct
  source 1..75: mol_type = other DNA
catttgatagtctcggttctgtgacagcgggtaatgcatcatccataaacgatggggcagctgcagtaatgatga

SEQ ID NO: 673269 - DNA, 75 bp, synthetic construct
  source 1..75: mol_type = other DNA
cgatatccatctttcccgccatgccgctgaactgaaaagcgttttttgccaaccgttgggcgatcgctaccgtga

SEQ ID NO: 673270 - DNA, 75 bp, synthetic construct
  source 1..75: mol_type = other DNA
accgctgttcagcaccgatttttatcgcgaaaagtggctggtagaggttgatggtagccaaattgaaatcgccct

SEQ ID NO: 673271 - DNA, 75 bp, synthetic construct
  source 1..75: mol_type = other DNA
ccgtgaccagttgccacgcctgacgcgtgatattgactcaatactgttgctggcgggttactatgatcctgtcgt

SEQ ID NO: 673272 - DNA, 75 bp, synthetic construct
  source 1..75: mol_type = other DNA
tggaactggagctgcttagcggcgacacgcgcgcggtgctgaaactggcgaaccaactggtatcgcaaaccggat

SEQ ID NO: 673273 - DNA, 75 bp, synthetic construct
  source 1..75: mol_type = other DNA
catgaaagtcgcagggagagtgactggcggcttacaccagcgcccggaatataatgtggcgttgagcgaaccgac

SEQ ID NO: 673274 - DNA, 75 bp, synthetic construct
  source 1..75: mol_type = other DNA
gtggatacgcggcaatgaggcagcgaaagagcaggtgctggcagcaatcggcctggttcgccatactctgatgct

SEQ ID NO: 673275 - DNA, 75 bp, synthetic construct
  source 1..75: mol_type = other DNA
aatgaagtaccgccatcggttaatgtggcaattaataagcaacaaggactttcatgcacaatcaccttcggtaaa

SEQ ID NO: 673276 - DNA, 75 bp, synthetic construct
  source 1..75: mol_type = other DNA
ttaatactgacccagctggttatggcgggtctggcagactatcagttcggttgttacagacgccttcagtcctga

SEQ ID NO: 673277 - DNA, 75 bp, synthetic construct
  source 1..75: mol_type = other DNA
ggattctggaaaagctgaagatcacgccggagccgcgtgatgaatcaatccgtctggataaaccggttatgctcg

SEQ ID NO: 673278 - DNA, 75 bp, synthetic construct
  source 1..75: mol_type = other DNA
catgaaagtcgcaggaagagtgacaggcggcttacaccagcgcccggaatataacgtggcgttgagcgaaccgac

SEQ ID NO: 673279 - DNA, 75 bp, synthetic construct
  source 1..75: mol_type = other DNA
ttagatgccaaagcgcagggcaaaatcagcgactgtagattcaattggtcaacgcaacagttatgtgaaaacatg

SEQ ID NO: 673280 - DNA, 75 bp, synthetic construct
  source 1..75: mol_type = other DNA
gaagtctggccgaacggtgagttaccagccgatctcgcgtcccgcgtgaagccactgttcagcaccgatttttat

SEQ ID NO: 673281 - DNA, 75 bp, synthetic construct
  source 1..75: mol_type = other DNA
agctaattgatgccagtgcagataaggtgcaatccggttcgcaacaggtacacgccgccgggcggacgatggacg

SEQ ID NO: 673282 - DNA, 75 bp, synthetic construct
  source 1..75: mol_type = other DNA
ctccttatttggctcgttgggaaaaactggataattttattaatcgcccagtgaaacttatcattggtgataaag

SEQ ID NO: 673283 - DNA, 75 bp, synthetic construct
  source 1..75: mol_type = other DNA
ctggttatcggtatcgtgatggcggaagtattacgcaagctgggtgcagataaagttcgtgttaaatggcctaat

SEQ ID NO: 673284 - DNA, 75 bp, synthetic construct
  source 1..75: mol_type = other DNA
tcgccggggtcggaaatggttttcgccttttggcgcaaacttatatttgtcgatgttctggcgtctggaacaagg

SEQ ID NO: 673285 - DNA, 75 bp, synthetic construct
  source 1..75: mol_type = other DNA
gctgggcgtggtcgccggtattggcgcgtggaactacccgattcagattgccctgtggaaatccgccccggcgct

SEQ ID NO: 673286 - DNA, 75 bp, synthetic construct
  source 1..75: mol_type = other DNA
tggacgtggctgcccggcaccgggtgcagtttgcgatgccggaatctgatgcggttgcgatgctgaaacaattat

SEQ ID NO: 673287 - DNA, 75 bp, synthetic construct
  source 1..75: mol_type = other DNA
ttattgcttgagcaggatggaataataaaaccctggatgggcggtgaaatatccctgcgtagtgcagaaaaataa

SEQ ID NO: 673288 - DNA, 75 bp, synthetic construct
  source 1..75: mol_type = other DNA
ccagcctgcgtcgtcaggggctgcgggcgaaagccagccggaagttcagcccggtcagctaccgtgcacatggcc

SEQ ID NO: 673289 - DNA, 75 bp, synthetic construct
  source 1..75: mol_type = other DNA
tcccgttttgtaggaacgcttgcagaaccgcaactcccaataaacgcaaacccaaaactccaacggataatcgct

SEQ ID NO: 673290 - DNA, 75 bp, synthetic construct
  source 1..75: mol_type = other DNA
tggatatgggatttagcgacgcaattgatgacgtcatccgttttgcgcctgcttctcgccagacgcttctgtttt

SEQ ID NO: 673291 - DNA, 75 bp, synthetic construct
  source 1..75: mol_type = other DNA
ataagtccatcagctcaacggaggtctacacgaaggtgtttgcactggatgtggctgcacggcaccgggtgcagt

SEQ ID NO: 673292 - DNA, 75 bp, synthetic construct
  source 1..75: mol_type = other DNA
gcgattgcgggcattatcgtggcggcggatattcgcggtgccgatgccaacaacgccggcttatggctggagctg

SEQ ID NO: 673293 - DNA, 75 bp, synthetic construct
  source 1..75: mol_type = other DNA
atttacttaacgttgcgtttattgcccaggcgggcggtgcgatttttgataacctcgcattaatcttcgccatcg

SEQ ID NO: 673294 - DNA, 75 bp, synthetic construct
  source 1..75: mol_type = other DNA
gctgggcgtggtcgccggaattggcgcatggaattacccgattcagattgctttgtggaaatccgcaccggcgct

SEQ ID NO: 673295 - DNA, 75 bp, synthetic construct
  source 1..75: mol_type = other DNA
atgtcttctcatccgtatgtcacccagcaaaataccccgctggcggacgataccactctgatgtccactaccgat

SEQ ID NO: 673296 - DNA, 75 bp, synthetic construct
  source 1..75: mol_type = other DNA
tggatgtggctgcccggcaccgggtgcagttttcgatgcctgagtcagatgcggtcacaatgctgaaaaacagac

SEQ ID NO: 673297 - DNA, 75 bp, synthetic construct
  source 1..75: mol_type = other DNA
aggtttttgcgctggatgtggctgcccggcaccgggtgcagtttgcgatgccggagtctgatgcggttgcgatgc

SEQ ID NO: 673298 - DNA, 75 bp, synthetic construct
  source 1..75: mol_type = other DNA
ggctggctgggtaaactgccttcattaccgcttcgctggcgggtgcgtggagtgatgaccctgatgtttatcgtg

SEQ ID NO: 673299 - DNA, 75 bp, synthetic construct
  source 1..75: mol_type = other DNA
atgtctcaagccaggtgtccagcgtcagaaacggcagcgagacgctggcgaaaggcacagatgaactgaatgagc

SEQ ID NO: 673300 - DNA, 75 bp, synthetic construct
  source 1..75: mol_type = other DNA
aaaatcgccgcaaaaatggcgaccattattgggtgcgggccaatgcggtaccgatggtgcgcgagggaaaaatca

SEQ ID NO: 673301 - DNA, 75 bp, synthetic construct
  source 1..75: mol_type = other DNA
gcgtgaggatgtcgatcgcgccgtgaagagtgcccaacaagggcaaaaaatctgggcggcgatgaccgccatgga

SEQ ID NO: 673302 - DNA, 75 bp, synthetic construct
  source 1..75: mol_type = other DNA
gctgggcgtggtggcggggattggcgcatggaactacccgatccagattgccctgtggaaatccgccccggcgct

SEQ ID NO: 673303 - DNA, 75 bp, synthetic construct
  source 1..75: mol_type = other DNA
agatcttcggtccggtgatgtcgcttctcacttatgaatctgaggacgaagtgattcgccgcgccaatgataccg

SEQ ID NO: 673304 - DNA, 75 bp, synthetic construct
  source 1..75: mol_type = other DNA
atgccggtataccgctgaaagttctgcaaagcctgatgggacataagtccatcagttcaacggaagtctacacga

SEQ ID NO: 673305 - DNA, 75 bp, synthetic construct
  source 1..75: mol_type = other DNA
cacgaaggtgtttgcactggatgtggctgcacggcaccgggtgcagttttcgatgcctgagtccgatgcggtcac

SEQ ID NO: 673306 - DNA, 75 bp, synthetic construct
  source 1..75: mol_type = other DNA
ccggcattggtcgcgagaacggcgtgatgacgctccagagttacacccaggtcaagtccatccaggttgagatgg

SEQ ID NO: 673307 - DNA, 75 bp, synthetic construct
  source 1..75: mol_type = other DNA
gaaagaagaagtggtgtcacgggcaccggtacgcaggggaaaactgcgccgcaatgtggtggtcctttcccggcg

SEQ ID NO: 673308 - DNA, 75 bp, synthetic construct
  source 1..75: mol_type = other DNA
cgttcctgcatatgcggtggatgaagtgattcttggtcaggtgttgactgcaggggcagggcagaatccggcaag

SEQ ID NO: 673309 - DNA, 75 bp, synthetic construct
  source 1..75: mol_type = other DNA
cgttacggacacctatcggctgctttcgtggtgcgttagcgggtcattccgccgtggaacttggcaacctggtcg

SEQ ID NO: 673310 - DNA, 75 bp, synthetic construct
  source 1..75: mol_type = other DNA
ctgttcggttcacccattgatatcctcaatcgtgccgcacccgttgcactgctggcgattggtatgacgctggtg

SEQ ID NO: 673311 - DNA, 75 bp, synthetic construct
  source 1..75: mol_type = other DNA
atgcttacctacgtgttgagcgggctgtgtgcggcgattgcgggcattatcgtggcggcggatattcgcggtgcc

SEQ ID NO: 673312 - DNA, 75 bp, synthetic construct
  source 1..75: mol_type = other DNA
tctggctttccgccggagatgaaccaggtcgtaaaagcggtggtggtgctttgtgtgctgattgttcagtcgcaa

SEQ ID NO: 673313 - DNA, 75 bp, synthetic construct
  source 1..75: mol_type = other DNA
ggtgaaacgtaatgcccgcaaagggctggcaacgctttgtatcggcgggggccagggcgtggcattgaccattga

SEQ ID NO: 673314 - DNA, 75 bp, synthetic construct
  source 1..75: mol_type = other DNA
cctgttccgtggccctcagccacacccccaacgggatggctgaaatgtaacggtgcagcattttcttctgaaatg

SEQ ID NO: 673315 - DNA, 75 bp, synthetic construct
  source 1..75: mol_type = other DNA
cctgttccgtggccctcagccacacccccaacagggtggctgaaatgtaacggtgcagcattttcttctgaaatg

SEQ ID NO: 673316 - DNA, 75 bp, synthetic construct
  source 1..75: mol_type = other DNA
ccggggcagggcagaatccagcacggcaatcggctattaaaggtggtcttcccaacagcgtttcggcaattacca

SEQ ID NO: 673317 - DNA, 75 bp, synthetic construct
  source 1..75: mol_type = other DNA
ccggtcagaacgcaaagcaacgggcagttattgatcgttgataccgatgaacagccgcgtactgatgccagtgca

SEQ ID NO: 673318 - DNA, 75 bp, synthetic construct
  source 1..75: mol_type = other DNA
cccaacagcgtttcggcaattaccattaatgatgtttgtggttccggactaaaagctttgcatctcgccactcag

SEQ ID NO: 673319 - DNA, 75 bp, synthetic construct
  source 1..75: mol_type = other DNA
gcgatgggactactgatgctggcggtggtggttatcggcatattactcgcgcatcgtacccgttttggtaatcag

SEQ ID NO: 673320 - DNA, 75 bp, synthetic construct
  source 1..75: mol_type = other DNA
cctggttgctggaaaaactcggcattgtcagtaaagaggccgcaaaggcaaaactgccggaaagcgtgacgcgtc

SEQ ID NO: 673321 - DNA, 75 bp, synthetic construct
  source 1..75: mol_type = other DNA
cgcggctgaagcgactgggggaagctcagcgcaggatgaatgtagcgcgtgccaggtatgcccgttcgctggagg

SEQ ID NO: 673322 - DNA, 75 bp, synthetic construct
  source 1..75: mol_type = other DNA
tcaaagcggcggtaggtcccgtcagtgcagcgttcgaaccgcttaagcctgtgttccagtggattggcgacaaag

SEQ ID NO: 673323 - DNA, 75 bp, synthetic construct
  source 1..75: mol_type = other DNA
agcaacctgcgacggtgaatgcagacgggaaagtgatgataccatcgggtggttttccttcatggggatatggct

SEQ ID NO: 673324 - DNA, 75 bp, synthetic construct
  source 1..75: mol_type = other DNA
agcaacctgcgacggtgaatgcagacggtaaagtgatgattccatcgggtggttttccttcatggggatatggct

SEQ ID NO: 673325 - DNA, 75 bp, synthetic construct
  source 1..75: mol_type = other DNA
agcaacctgcgacggtgaatgcagacggaaaagtgatgatgccatcgggtggttttccttcatggggatatggct

SEQ ID NO: 673326 - DNA, 75 bp, synthetic construct
  source 1..75: mol_type = other DNA
tcaaagccgctgcagcgcccatcagcgccgcctttgagccgctcaggcccatgttccagtggattggtgacaggg

SEQ ID NO: 673327 - DNA, 75 bp, synthetic construct
  source 1..75: mol_type = other DNA
tcgctgggtggagcagaaccccgtgctggctggcacgctgatgaaagtggcggcggctacggcggctgtcactgt

SEQ ID NO: 673328 - DNA, 75 bp, synthetic construct
  source 1..75: mol_type = other DNA
tttgggcgtacccagctttttaaaggcgtacttagttcagggccatttagtcaacatgggcaagaagtattatct

SEQ ID NO: 673329 - DNA, 75 bp, synthetic construct
  source 1..75: mol_type = other DNA
aggtcattcttaatgcggttgacaagctcacccgcccatttcgatctgcacaggccagttcaagagaactggctg

SEQ ID NO: 673330 - DNA, 75 bp, synthetic construct
  source 1..75: mol_type = other DNA
agacgggcgcgcagaacgctttcagtagcctgggggaaacgctgcgccagccgctgatggatatcatgagcatgg

SEQ ID NO: 673331 - DNA, 75 bp, synthetic construct
  source 1..75: mol_type = other DNA
gtgatgcacccgctggagtctcttaaatccggtgtgtcatggctactggaaaagctcggtattgtcagtaaggag

SEQ ID NO: 673332 - DNA, 75 bp, synthetic construct
  source 1..75: mol_type = other DNA
cctgttccgtggccctcagccacaccaccaaccggctggctgaaatgtaacggtgcagcattttcttctgaaatg

SEQ ID NO: 673333 - DNA, 75 bp, synthetic construct
  source 1..75: mol_type = other DNA
cgccagtgggctggtggagcgcgtgaaggcgagcacaatgggcgatcgcgaagcagaactggcgacgctcgagtt

SEQ ID NO: 673334 - DNA, 75 bp, synthetic construct
  source 1..75: mol_type = other DNA
gttttacggtaccgaaaacacaggctggtaccaatcgggtaattcaccttatcaagcctgcaatcgacgctctca

SEQ ID NO: 673335 - DNA, 75 bp, synthetic construct
  source 1..75: mol_type = other DNA
ggcagcctgagttcacagataaaacactctccaggaaacccggggcggttcaagtcacgatgactcttttggata

SEQ ID NO: 673336 - DNA, 75 bp, synthetic construct
  source 1..75: mol_type = other DNA
cagcctatgaattatttatggaaaagcgtttcggtaaaacagtcgatcgtcggagagcaaaaaacggcgataacg

SEQ ID NO: 673337 - DNA, 75 bp, synthetic construct
  source 1..75: mol_type = other DNA
tctggatcccgagcgtgatcgcataattgagattgccacgctggtgaccgatgccaacctgaatattctggcaga

SEQ ID NO: 673338 - DNA, 75 bp, synthetic construct
  source 1..75: mol_type = other DNA
taaatacatgccggagctggaagcctacttccactaccgttatctcgatgtcagcaccctgaaagaagctggcgc

SEQ ID NO: 673339 - DNA, 75 bp, synthetic construct
  source 1..75: mol_type = other DNA
tgattggttcggcgctgatggcccatgacgatttgaacgccgccgtgcgccgggtgttgctgggtgagaataaag

SEQ ID NO: 673340 - DNA, 75 bp, synthetic construct
  source 1..75: mol_type = other DNA
gaaaacgttgccatctggaaagcattaagcgtcggtgaaaccctgcccgcccgcgagcttcagcacgttgataaa

SEQ ID NO: 673341 - DNA, 75 bp, synthetic construct
  source 1..75: mol_type = other DNA
atggcgagattactggggcgtagcggcagtagtaaggattatcagttgagttattccaacaacctgcgacggata

SEQ ID NO: 673342 - DNA, 75 bp, synthetic construct
  source 1..75: mol_type = other DNA
atggtaatgaagatcagcaatatatcgacgcactgcgtgacgtgctgcccgcaaacgttgccatctggaaagcat

SEQ ID NO: 673343 - DNA, 75 bp, synthetic construct
  source 1..75: mol_type = other DNA
tcgcagacaaggcgatttgggtggaaacccgcaaagaacagcaaccgctggccagttttcagaatgtggttcagc

SEQ ID NO: 673344 - DNA, 75 bp, synthetic construct
  source 1..75: mol_type = other DNA
cgttgaacaggcgcaggaagtgatggctgcggcaccgttgcaatatgttggcgtgttccgcaatcacgatattgc

SEQ ID NO: 673345 - DNA, 75 bp, synthetic construct
  source 1..75: mol_type = other DNA
aggattcctcgctggatgacctgcaatggtggggcgatttcacccccgatctgggctacgtcattcccaataccc

SEQ ID NO: 673346 - DNA, 75 bp, synthetic construct
  source 1..75: mol_type = other DNA
gcccgtggttttaccggccgcgataaaatcattaaattcgaaggttgttaccacggccacgccgactgtctgtta

SEQ ID NO: 673347 - DNA, 75 bp, synthetic construct
  source 1..75: mol_type = other DNA
accttaacctgtacttataacgatctggcctctgtacgcgccgcgtttgagcaatacccgcaagagattgcctgt

SEQ ID NO: 673348 - DNA, 75 bp, synthetic construct
  source 1..75: mol_type = other DNA
acatgaactgtgttcctccgctgccagagttcctgccgggtctgcgcgcgctgtgtgacgagtttggcgcgttgc

SEQ ID NO: 673349 - DNA, 75 bp, synthetic construct
  source 1..75: mol_type = other DNA
ttgtcaaaaaccttggtttgggggaaggctcagcgctgcccgttggtgtgcccgttccgtggccctcagccacac

SEQ ID NO: 673350 - DNA, 75 bp, synthetic construct
  source 1..75: mol_type = other DNA
gtttgtgcgcccggcatttgatgtgcgcagtgaacaggcggcacaggtggcgattgctcggatgaaccgggccat

SEQ ID NO: 673351 - DNA, 75 bp, synthetic construct
  source 1..75: mol_type = other DNA
acatgaactgcgttccgccgttgccggagtttctgccgggtctgcgcgcgctgtgtgacgagtttggcgcgttgc

SEQ ID NO: 673352 - DNA, 75 bp, synthetic construct
  source 1..75: mol_type = other DNA
aacgaatacatggcatgggatatgactctcggttggatcgtctggcaacaacgagctggcattcatttttcaaca

SEQ ID NO: 673353 - DNA, 75 bp, synthetic construct
  source 1..75: mol_type = other DNA
gctacgtcattcccaatacccgcgacattatgaccgcgctgaaggtgcaaaacttaaccggaaacttccgctata

SEQ ID NO: 673354 - DNA, 75 bp, synthetic construct
  source 1..75: mol_type = other DNA
ttcgttatagcgtcaccgccacacctgccggacatcatgacgaaagcaaagcctggctacattttggcaagtacg

SEQ ID NO: 673355 - DNA, 75 bp, synthetic construct
  source 1..75: mol_type = other DNA
gagctgacaacacgtctggcagaaggtctgctggaagcggcagaagaagcgggaattccgctggtcgttaaccac

SEQ ID NO: 673356 - DNA, 75 bp, synthetic construct
  source 1..75: mol_type = other DNA
gctttggtgcgccgaccgaaatggaagtaaaaatggcggagctggtgaccgaactcgtgccgacgatggatatgg

SEQ ID NO: 673357 - DNA, 75 bp, synthetic construct
  source 1..75: mol_type = other DNA
ctctggaagtagaaccagatgaacgcgaagcttatgaattattcatggaaaagcgtttcggtgacttagtagatc

SEQ ID NO: 673358 - DNA, 75 bp, synthetic construct
  source 1..75: mol_type = other DNA
tagcctcgatacatgatggtaaaaccggagagctgccatatgagcacatagccaagattggattactgctcagaa

SEQ ID NO: 673359 - DNA, 75 bp, synthetic construct
  source 1..75: mol_type = other DNA
aggggccagaaaaacggctagtaccggtatagccaaagctgcaactgaagcaactaccgagaaagtagctatcgc

SEQ ID NO: 673360 - DNA, 75 bp, synthetic construct
  source 1..75: mol_type = other DNA
aagggttgcatctggaaaaattagagacactgaatgtattcggtgtacgtgccgattacatggcaaccttggtaa

SEQ ID NO: 673361 - DNA, 75 bp, synthetic construct
  source 1..75: mol_type = other DNA
tttatcgtggctatgccgcccataaagcggtcatcgactacagctttcacggtgtgattcagcatattaatcacg

SEQ ID NO: 673362 - DNA, 75 bp, synthetic construct
  source 1..75: mol_type = other DNA
ccgcatgcagttactgttttccagtggcgtgatgacgggacgtataacaccggaacgctttgttgaattaaccag

SEQ ID NO: 673363 - DNA, 75 bp, synthetic construct
  source 1..75: mol_type = other DNA
ggcgcgctgaccaccgtgcacccggaaaatgatgcggctatcgccagcaagcgggcggaatttatcgccgcaggg

SEQ ID NO: 673364 - DNA, 75 bp, synthetic construct
  source 1..75: mol_type = other DNA
acgaagtcttgtcaccagtgatgttcccggttctgcatcaattgctggggcagacgctgatcaccaccgatggca

SEQ ID NO: 673365 - DNA, 75 bp, synthetic construct
  source 1..75: mol_type = other DNA
cagttactacaacatgcgcgagaaagtcgttgagcatccgcatattcttgatatcgcccagcaggcgatgcgcga

SEQ ID NO: 673366 - DNA, 75 bp, synthetic construct
  source 1..75: mol_type = other DNA
cgaagaggtggggcttatcaatgtgaccttaagtgagaaaggaacgctaatggcgacgttaccggctaacgttcc

SEQ ID NO: 673367 - DNA, 75 bp, synthetic construct
  source 1..75: mol_type = other DNA
aacgggcaaaaactttagtttccagaaggcggaaccgatcgccgatatcactacggctatacagcaaaagcgcaa

SEQ ID NO: 673368 - DNA, 75 bp, synthetic construct
  source 1..75: mol_type = other DNA
taggggtatcccccaacgataaaatagacgttagcaaccctgaagttatgacgcaccttgttcgcgctattgcga

SEQ ID NO: 673369 - DNA, 75 bp, synthetic construct
  source 1..75: mol_type = other DNA
gggggttgatggttcagggaaagccgacgatggagctgtaaccgatgttgccggggtaggggctggtggtccact

SEQ ID NO: 673370 - DNA, 75 bp, synthetic construct
  source 1..75: mol_type = other DNA
cgcccggttcagatggtgacgtagtgattatagatccacatcagagccagcaaattcagcatcgccatctccacg

SEQ ID NO: 673371 - DNA, 75 bp, synthetic construct
  source 1..75: mol_type = other DNA
agggcgacagatgctgccggaagatttgcaggtggcactccgggaaatctcctgtgatgcgggacgtaacgaggt

SEQ ID NO: 673372 - DNA, 75 bp, synthetic construct
  source 1..75: mol_type = other DNA
gacggcacctttacaggcaaagccgggcgaggtcgtttcctgcgacgcaaaccgtttgtccctcccgtgctctaa

SEQ ID NO: 673373 - DNA, 75 bp, synthetic construct
  source 1..75: mol_type = other DNA
caaattcagcatcgccatctccacgacaacgccgactactcgccatgggagggttttacctgtcagggcgcgatt

SEQ ID NO: 673374 - DNA, 75 bp, synthetic construct
  source 1..75: mol_type = other DNA
aatgcggtcggggagaacacagagtccatccgtgcccgtcaggatgtggccaccgtgaaggaatatctggggaac

SEQ ID NO: 673375 - DNA, 75 bp, synthetic construct
  source 1..75: mol_type = other DNA
agatctctgctcgcatgatgatcaccgggggggatccgaaggaagagatggcactcaaacgggcggacagggcga

SEQ ID NO: 673376 - DNA, 75 bp, synthetic construct
  source 1..75: mol_type = other DNA
aagtgaaaccggcaatatcagcagagacgaccgcctcagcagaatgcgcgcagcattccggagatggtgatgccg

SEQ ID NO: 673377 - DNA, 75 bp, synthetic construct
  source 1..75: mol_type = other DNA
actcgcgttctacaactcgtcctctgtctgggtgccaacatggaaaaccgatgataccttgacgaaggatgctac

SEQ ID NO: 673378 - DNA, 75 bp, synthetic construct
  source 1..75: mol_type = other DNA
gagcgattggggctataggtggcggctgggcgtcaggagttttcagacatgccagctccggtaaatcgtggttca

SEQ ID NO: 673379 - DNA, 75 bp, synthetic construct
  source 1..75: mol_type = other DNA
tgatgcgaaacctgcggtcattggccgttgtggtgctcgcaactttgccatgcgttgcttttgcacaatggcggg

SEQ ID NO: 673380 - DNA, 75 bp, synthetic construct
  source 1..75: mol_type = other DNA
cgcaatgcccgccaggctgtttggcctgtggccgcaaaaaggattattagcgcccggttccgatggcgacgtggt

SEQ ID NO: 673381 - DNA, 75 bp, synthetic construct
  source 1..75: mol_type = other DNA
ggcgcgctgaccaccgtgcacccggaaaatgatgcagctatcgccagcaagcgggcggagtttatcgccgcaggg

SEQ ID NO: 673382 - DNA, 75 bp, synthetic construct
  source 1..75: mol_type = other DNA
taacgtggcaacgcgcaaaacggccaaggggcaaaccacaagctacagctatgacgcgctgaaccggatcatcga

SEQ ID NO: 673383 - DNA, 75 bp, synthetic construct
  source 1..75: mol_type = other DNA
gtaccgacggcgcgcagttgtcgtttatgggattaccgtgcccgaacctgttcactggcggttacaactatcatg

SEQ ID NO: 673384 - DNA, 75 bp, synthetic construct
  source 1..75: mol_type = other DNA
ccggctgcatgtgtcagcatggggaatgccttacagcgaacgttactgtttccgaccggcagaaatcccgcgtcc

SEQ ID NO: 673385 - DNA, 75 bp, synthetic construct
  source 1..75: mol_type = other DNA
acgacccgttcatcaagtcagcacgcgtcgggcaatttgatccgcaaaccgtgcggatggtttttgaattaaagc

SEQ ID NO: 673386 - DNA, 75 bp, synthetic construct
  source 1..75: mol_type = other DNA
cgaaacggcgtttatcagtaacgttgaggaagagcgtaaactgaaaacggcgactttccagcaggaagttgcgga

SEQ ID NO: 673387 - DNA, 75 bp, synthetic construct
  source 1..75: mol_type = other DNA
aggccaaaaacctggggataataactggagaactggaggagatggcgttcaatcccttgcatctcttgtatcaat

SEQ ID NO: 673388 - DNA, 75 bp, synthetic construct
  source 1..75: mol_type = other DNA
actgatgagtggggagtcctgcgagcaggtaggggactatttgtcagtgcggatgcccaggcgaaagcgcagggt

SEQ ID NO: 673389 - DNA, 75 bp, synthetic construct
  source 1..75: mol_type = other DNA
gtcaacttagcctgaaatccggggaaggggcagtggatgttcaggcgcaaaacggcagcatgcggttgtttgctg

SEQ ID NO: 673390 - DNA, 75 bp, synthetic construct
  source 1..75: mol_type = other DNA
tttatcagtaacgttgaggaagaacgtaaactgaaaacggcaaccttccagcaggaagttgcggaatcaatcctc

SEQ ID NO: 673391 - DNA, 75 bp, synthetic construct
  source 1..75: mol_type = other DNA
tcgctgaccattgccgacagcctgaagtttggtaaggctgtattgaataagctgggcaaaatcaacaagctgcat

SEQ ID NO: 673392 - DNA, 75 bp, synthetic construct
  source 1..75: mol_type = other DNA
cccggaacgcgtggtggtggatatcgaagatgtaaacctgaactcggtactcaaggggatggcggcacaaattcg

SEQ ID NO: 673393 - DNA, 75 bp, synthetic construct
  source 1..75: mol_type = other DNA
agtggcgaccgctatgtcgaccacaccatgtttgatatggttcagtcgctgaccattgccgacagcctgaagttt

SEQ ID NO: 673394 - DNA, 75 bp, synthetic construct
  source 1..75: mol_type = other DNA
agcccgccaccctttccgctgttgcacgtggataccacctggaagttccgggcgatgtacgcactgcgtgatcgc

SEQ ID NO: 673395 - DNA, 75 bp, synthetic construct
  source 1..75: mol_type = other DNA
gtaggcggggattcgttcgccctggtgaaactgaaaaacaacaaaattggggtttttcaggcataaaaaaagcgg

SEQ ID NO: 673396 - DNA, 75 bp, synthetic construct
  source 1..75: mol_type = other DNA
aaacgtatcacgcttatcggtggcggaagttatctgcgacttggggcagggaagatcgagtatggtacgacggcg

SEQ ID NO: 673397 - DNA, 75 bp, synthetic construct
  source 1..75: mol_type = other DNA
tgccgccacaactccctactgtaaccgatctcgcacgaagcggaataagacaaccattaactactgacactataa

SEQ ID NO: 673398 - DNA, 75 bp, synthetic construct
  source 1..75: mol_type = other DNA
gtatcccagaaaaacaacgaagatatagccagaaaaaaagaatggcagaaagcacgtaaggctgacgccaaacta

SEQ ID NO: 673399 - DNA, 75 bp, synthetic construct
  source 1..75: mol_type = other DNA
ccagtgaagagtctttaacaaatgcagctggtgtcggtgctggtgggccgttctggatggcggctcgtggcatgt

SEQ ID NO: 673400 - DNA, 75 bp, synthetic construct
  source 1..75: mol_type = other DNA
gtgggcaaagggctgcaccctgattgctacattgaactggtgattgaagacagttactacaacatgcgcgagaaa

SEQ ID NO: 673401 - DNA, 75 bp, synthetic construct
  source 1..75: mol_type = other DNA
acgatacagaaatcattgatctacttccgggagatcaagtatccccttctactccgaaaactccacagcaggagc

SEQ ID NO: 673402 - DNA, 75 bp, synthetic construct
  source 1..75: mol_type = other DNA
gagacaaaatcagcacaagcagtagaagagcaaacaaaaattcttcagaccaatgacaacaaaatcattgatggt

SEQ ID NO: 673403 - DNA, 75 bp, synthetic construct
  source 1..75: mol_type = other DNA
tgatcgttttcgacgatgcggatctcgatctcgccgccgatatcgccatgatggcgaatttcttcagctccggtc

SEQ ID NO: 673404 - DNA, 75 bp, synthetic construct
  source 1..75: mol_type = other DNA
gagccggaaaccgaatctggtgcgttttacgcccggcttcaccacgagcgggagcttaacaggtcggcccgcatt

SEQ ID NO: 673405 - DNA, 75 bp, synthetic construct
  source 1..75: mol_type = other DNA
ggcccctgtaggggcaacggctgcgccgcttgctttgggggctgctacgggcgtgatgacccaggtctgggggag

SEQ ID NO: 673406 - DNA, 75 bp, synthetic construct
  source 1..75: mol_type = other DNA
aacgaaagtaatgcagattagccagctctccccttgccacaccgtggagtcaatggttcgcgctttacgcacggg

SEQ ID NO: 673407 - DNA, 75 bp, synthetic construct
  source 1..75: mol_type = other DNA
ttggttggcagatgatttgactgaagaagagcatgctgaacttgttgatgcggcaaatgaaggtaacgctatggg

SEQ ID NO: 673408 - DNA, 75 bp, synthetic construct
  source 1..75: mol_type = other DNA
gctggagtgtggcgacggtgatgcggtgacatctgccacttctgtgacggggcgagacagcatgatggtgatgca

SEQ ID NO: 673409 - DNA, 75 bp, synthetic construct
  source 1..75: mol_type = other DNA
gcaacggatccgcgaacaggccgaacgcggggaaaccatgacggaggaagtcaggagagtggggggattgcccgg

SEQ ID NO: 673410 - DNA, 75 bp, synthetic construct
  source 1..75: mol_type = other DNA
accaccagtgaacgtcagggccgcgtgattgaccgcgaccaggcggggtctatggagctgaaaaaaacgtcaggg

SEQ ID NO: 673411 - DNA, 75 bp, synthetic construct
  source 1..75: mol_type = other DNA
aacaaaggcgaaagcatccgcgttttcccgctttctaactggaccgaacaggacatctggcaatacatctggctg

SEQ ID NO: 673412 - DNA, 75 bp, synthetic construct
  source 1..75: mol_type = other DNA
ctgagcgttaccgggaggtggcgcatgcatggtcactgggcgtgaagaaatatccggccgtggtctttgatgatc

SEQ ID NO: 673413 - DNA, 75 bp, synthetic construct
  source 1..75: mol_type = other DNA
ggccaggccggaaatgcgcgggaagtgtcaacgtctgcttatacgctgtttaacggttcagggaaattgcagggg

SEQ ID NO: 673414 - DNA, 75 bp, synthetic construct
  source 1..75: mol_type = other DNA
gtcgtgctggctgatgagcaacttaaagatattggcaatctgcaaattgtgcccgacgggcgcaaatcagcgcgg

SEQ ID NO: 673415 - DNA, 75 bp, synthetic construct
  source 1..75: mol_type = other DNA
ggccccaatcatcggcgcgttgatcgctcaacgtctggatctgggtactgcgctggcatcgctctcgttcagtct

SEQ ID NO: 673416 - DNA, 75 bp, synthetic construct
  source 1..75: mol_type = other DNA
gtggcggttctcgggttgttatgtgccgctatctttatcagttttatggttcagagtacgggtaaacgctggccg

SEQ ID NO: 673417 - DNA, 75 bp, synthetic construct
  source 1..75: mol_type = other DNA
tcctcatcgcgtacctctgcggctccatttccagtgccattctggtttgccgcctgtgtgggctgcccgatccgc

SEQ ID NO: 673418 - DNA, 75 bp, synthetic construct
  source 1..75: mol_type = other DNA
tacggttttgatgccgcctttggtggtgcacgccgtgacgaagaaaaatcccgtgctaaagagcgtatctactct

SEQ ID NO: 673419 - DNA, 75 bp, synthetic construct
  source 1..75: mol_type = other DNA
gaacgtcaggggcgcgtgattgaccgcgaccaggcaggttctatggagctgaaaaaacgtcaggggtatttttaa

SEQ ID NO: 673420 - DNA, 75 bp, synthetic construct
  source 1..75: mol_type = other DNA
aaagagaaacacgggggtaaagcaccggtacgcacaatggtggatattctttaccgtggtgaacatcgcatcgcc

SEQ ID NO: 673421 - DNA, 75 bp, synthetic construct
  source 1..75: mol_type = other DNA
aaagtcccggctgtggtgtttgatgatcgcgatgtggtgtacggcaccacggatgttgacgtggccacttccctg

SEQ ID NO: 673422 - DNA, 75 bp, synthetic construct
  source 1..75: mol_type = other DNA
atgcaaggtataacaataaacatcaacgttaatgccccttacgtatctctgaagaaatacgccgagataacaggc

SEQ ID NO: 673423 - DNA, 75 bp, synthetic construct
  source 1..75: mol_type = other DNA
aggcggtgttaaacgctatgccactggtaaaacctgacctggtacgtacaccgtggcatgagttctggcggcgtt

SEQ ID NO: 673424 - DNA, 75 bp, synthetic construct
  source 1..75: mol_type = other DNA
tctcggcctcggtgcgcagccgccgacaccagagtggggagcaatgctcaatgaggctcgagcggatatggttat

SEQ ID NO: 673425 - DNA, 75 bp, synthetic construct
  source 1..75: mol_type = other DNA
tatgtcgcagtgcgtcagagtgtcgctcataaggcatggaagcagttacagggcgggaagattaaaggaaaaacg

SEQ ID NO: 673426 - DNA, 75 bp, synthetic construct
  source 1..75: mol_type = other DNA
aatcgctgtgcatccggcgcatgtctatgtcgcagtgcgtcagagtgtcgctcataaggcatggaagcagttaca

SEQ ID NO: 673427 - DNA, 75 bp, synthetic construct
  source 1..75: mol_type = other DNA
gtgatggatgaagccgaccgcatgttggatatgggatttagtgatgccattgatgatgtgatccgttttgcacct

SEQ ID NO: 673428 - DNA, 75 bp, synthetic construct
  source 1..75: mol_type = other DNA
tgttgttctatggcaaattaatatattccctgactatccatttctttcgtgtggaaaaagaaaattattatcatc

SEQ ID NO: 673429 - DNA, 75 bp, synthetic construct
  source 1..75: mol_type = other DNA
tgaaaacgcgttacgctcggtggcggttggaagaaaaaattatctcttcttcggctcagacaagggaggagaaag

SEQ ID NO: 673430 - DNA, 75 bp, synthetic construct
  source 1..75: mol_type = other DNA
gcagtcgttgtacgactggatagagttgcagaggaaaacgctgtcgaaacatgcggagatggcgaaggcgttcga

SEQ ID NO: 673431 - DNA, 75 bp, synthetic construct
  source 1..75: mol_type = other DNA
atgcgaatatttaactggcgacgtcaggcggtgttaaacgccatgccattggttaaacctgaccaggtacgtaca

SEQ ID NO: 673432 - DNA, 75 bp, synthetic construct
  source 1..75: mol_type = other DNA
ttatctccgccgccagtctgtcgtttctcggtctgggagcgcagccgccgaccccggagtggggagcgatgctca

SEQ ID NO: 673433 - DNA, 75 bp, synthetic construct
  source 1..75: mol_type = other DNA
ttggcgtcgattcactggggcgcgacattttcagccgtgtcctggtgggggcgcaaatctcgctggcggctggcg

SEQ ID NO: 673434 - DNA, 75 bp, synthetic construct
  source 1..75: mol_type = other DNA
cgtcatggttcggaacaacggcaactgaaaaagcaaaaacagacatcattattgtacttcaggccagaaaaatca

SEQ ID NO: 673435 - DNA, 75 bp, synthetic construct
  source 1..75: mol_type = other DNA
ggtatgaggcccagatggcgctgacgatggtgagtcttattaactccatcaacaatattgccgagcgggatcagt

SEQ ID NO: 673436 - DNA, 75 bp, synthetic construct
  source 1..75: mol_type = other DNA
ggcggaatccctggggatgtttaccgaaccgggcagttttgaacatgagctgtttaatcagcccggggaactgtg

SEQ ID NO: 673437 - DNA, 75 bp, synthetic construct
  source 1..75: mol_type = other DNA
gggggccagagcctcttatgcggtggggcggcagatgctgccggcggatttgcaggaggcattgtatgccctgtc

SEQ ID NO: 673438 - DNA, 75 bp, synthetic construct
  source 1..75: mol_type = other DNA
cctgagggactttttactgactcgctgattaccggccagccgtggcgcgggcagcagcgccgtaccaggatggtt

SEQ ID NO: 673439 - DNA, 75 bp, synthetic construct
  source 1..75: mol_type = other DNA
cgcagaatatgggtgaatcgctgggcgtatttatgcagggcttcctgggcgagttgtttaaccgcccggggcaga

SEQ ID NO: 673440 - DNA, 75 bp, synthetic construct
  source 1..75: mol_type = other DNA
tggggatgacggaaaaagaggagaaacagcaacggcgcgtcctgatggagcgccacggatgcagtgaactggacg

SEQ ID NO: 673441 - DNA, 75 bp, synthetic construct
  source 1..75: mol_type = other DNA
gccgccggaggaagtgaataacattgcccgctttaaagccctgacagaggagcagaaagcggtgctgctgtcagc

SEQ ID NO: 673442 - DNA, 75 bp, synthetic construct
  source 1..75: mol_type = other DNA
gggcgggatattctgtttgcggtggatgaggcgcacattgtgacggtgaatccgttgctgtccccgtacatgacc

SEQ ID NO: 673443 - DNA, 75 bp, synthetic construct
  source 1..75: mol_type = other DNA
actcgttcgggctgctggccgattattttgagagtctcgggctttcggtgaacaaaatcagcgtgaaaccgggct

SEQ ID NO: 673444 - DNA, 75 bp, synthetic construct
  source 1..75: mol_type = other DNA
gggcctccctgtcattgctgttgcgtgccgggtcggtgggggagctgaacaaaaagcgtgtggatctgacggcca

SEQ ID NO: 673445 - DNA, 75 bp, synthetic construct
  source 1..75: mol_type = other DNA
ctggatgaggagcaatgcctgctgcttgatgacggggtgtcggtcggggcggtgtatgccgttgagccggcgccg

SEQ ID NO: 673446 - DNA, 75 bp, synthetic construct
  source 1..75: mol_type = other DNA
tgactatccagaagacgccgataatgaacagcgcgatctgctgggcgagatggagatcacggcccggttgatgat

SEQ ID NO: 673447 - DNA, 75 bp, synthetic construct
  source 1..75: mol_type = other DNA
gccgtgttcgccaggatgtgaagacggtaaaagagtatctgggcaaccggcacaagctgtaccgggcggggatca

SEQ ID NO: 673448 - DNA, 75 bp, synthetic construct
  source 1..75: mol_type = other DNA
accgctgttcagcaccgatttttatcgcgaaaaatggctggtggcggtcgatggcagccagattgaaatcgccct

SEQ ID NO: 673449 - DNA, 75 bp, synthetic construct
  source 1..75: mol_type = other DNA
aaagcagagtgagcagctgaagctcgacaacgaaatgctgacgctggatatcgtcgccagcgatctgctgactct

SEQ ID NO: 673450 - DNA, 75 bp, synthetic construct
  source 1..75: mol_type = other DNA
acgtgttaagcgcggagtttgtggtgcgcaatgaacacggcctgcatgctcgtccaggtaccatgctggtcaata

SEQ ID NO: 673451 - DNA, 75 bp, synthetic construct
  source 1..75: mol_type = other DNA
gtatctcctggaccgcatcggagagcttaaatctggcgatgcctgtgttgcagaataccagcatgctggccgtgg

SEQ ID NO: 673452 - DNA, 75 bp, synthetic construct
  source 1..75: mol_type = other DNA
atgaaggataacaccgtgccactgaaattgatcgccctgttagcgaatggcgaatttcactctggcgagcagttg

SEQ ID NO: 673453 - DNA, 75 bp, synthetic construct
  source 1..75: mol_type = other DNA
cgggaacctacaaaatgctctgataattgctggtctgggcgttttgtgtgcagttatctttatttcatttatggt

SEQ ID NO: 673454 - DNA, 75 bp, synthetic construct
  source 1..75: mol_type = other DNA
aacgtctgcaaaaaatgatgcctgcccatatcaaacccgccttcaaaacgggtgaagagcttctggcgtggcaga

SEQ ID NO: 673455 - DNA, 75 bp, synthetic construct
  source 1..75: mol_type = other DNA
cggaaaaaggggtttatgtcacaataaaactcgatccaaggttgaatgcatttatcgaagagaaaacgaaaacat

SEQ ID NO: 673456 - DNA, 75 bp, synthetic construct
  source 1..75: mol_type = other DNA
tgaacccgattcatgcgctctatctggcaaatccggaaagtgccagcccgtcagcccgtcttctcgccgttggct

SEQ ID NO: 673457 - DNA, 75 bp, synthetic construct
  source 1..75: mol_type = other DNA
tgacccacgtactgagcgatgattccgttgctgaacaactgaagtcagcaacaacagcagaagaacttcgcgcat

SEQ ID NO: 673458 - DNA, 75 bp, synthetic construct
  source 1..75: mol_type = other DNA
catgctggcgcgcgaacagcaaacctcaacgttcctcggcaatggtattgctattccccacggcactaccgacac

SEQ ID NO: 673459 - DNA, 75 bp, synthetic construct
  source 1..75: mol_type = other DNA
gatggaccgtatgcgcctgggtaacagtttgtgggtgatcttcaactgggatagctaccgtagccgggtaacagg

SEQ ID NO: 673460 - DNA, 75 bp, synthetic construct
  source 1..75: mol_type = other DNA
tcatattttatccgtaactttaaaagttattttggtataacgccaaaacagttttcattgaaagtgaaaaggaaa

SEQ ID NO: 673461 - DNA, 75 bp, synthetic construct
  source 1..75: mol_type = other DNA
gaaccattgttactgaatccacataaagttgattctatgcgaagtagaatttttaattgcacggcggataagaca

SEQ ID NO: 673462 - DNA, 75 bp, synthetic construct
  source 1..75: mol_type = other DNA
ctaaagacaatcatagaggccgatctcgcaaaatcgtggaagctggcagatcttgcaggcattttgcatatgtcg

SEQ ID NO: 673463 - DNA, 75 bp, synthetic construct
  source 1..75: mol_type = other DNA
gatgccggcgtagggcaatggatcgacctgatggcgcgcatggaaggccctatcgctactgcgatggggattatt

SEQ ID NO: 673464 - DNA, 75 bp, synthetic construct
  source 1..75: mol_type = other DNA
tggcaccgttaaccttgatatgcggagtctgtggctaaatttcgagattaccctggcaatcgacgataaaggttt

SEQ ID NO: 673465 - DNA, 75 bp, synthetic construct
  source 1..75: mol_type = other DNA
tggtgccggatttattcacattaatggcgaggatgataaactgctccattcggctaagcgtttgttattagaacc

SEQ ID NO: 673466 - DNA, 75 bp, synthetic construct
  source 1..75: mol_type = other DNA
gcagccgtgcggggaagtgactccacaggaacagaaagaggcagagacccggctgatgatgctgaatgaccgacg

SEQ ID NO: 673467 - DNA, 75 bp, synthetic construct
  source 1..75: mol_type = other DNA
atcgccatcagagaactggcgtttggcgctggtacattacgcgcggcagtggcgtcttatgtgcagtctccgcgc

SEQ ID NO: 673468 - DNA, 75 bp, synthetic construct
  source 1..75: mol_type = other DNA
cagcaggaggcagaaacacggctgatggtgctgaatgagaagcacaagcgccagcgccgggcagcaaagggggat

SEQ ID NO: 673469 - DNA, 75 bp, synthetic construct
  source 1..75: mol_type = other DNA
ttacggcaggatgttggggactatttggcttgatggttatgacatcaacgcttcaatggtagacagtggttatgc

SEQ ID NO: 673470 - DNA, 75 bp, synthetic construct
  source 1..75: mol_type = other DNA
aaatgcatgccgggtgcgtcaaatgcagcaatgcgcaaaataacagaaacaatcaaaaagtggcgtatacatcgc

SEQ ID NO: 673471 - DNA, 75 bp, synthetic construct
  source 1..75: mol_type = other DNA
atggtagtgtccgctattgccagtacacctcagctgaccattaaccgtaaaccgcagggtattttcagtaagtca

SEQ ID NO: 673472 - DNA, 75 bp, synthetic construct
  source 1..75: mol_type = other DNA
cttcatgcgatttgcacggcggcgcagcgcggggtggatgtcagtattatccttccgcgaaaaaatgactcgatg

SEQ ID NO: 673473 - DNA, 75 bp, synthetic construct
  source 1..75: mol_type = other DNA
ctcgaaacacgacacgccctggaaggtatcgccgcttattacgccgcgctgcgtagtaccgatgaagacaaggaa

SEQ ID NO: 673474 - DNA, 75 bp, synthetic construct
  source 1..75: mol_type = other DNA
cggcactgactcttccgcaaatggttaagctggcagaaaccaatcaactggtttgtcacttccgttttgacagcc

SEQ ID NO: 673475 - DNA, 75 bp, synthetic construct
  source 1..75: mol_type = other DNA
gacgggaagcaaggatgattactattactcaacgcaggccatgagtgaaaactacgcggcgatgtctttgcaagt

SEQ ID NO: 673476 - DNA, 75 bp, synthetic construct
  source 1..75: mol_type = other DNA
gaggggaatataaccctctgaaatatcctgaaatagtagcacagttaaaatcactgacatccttactcagtagga

SEQ ID NO: 673477 - DNA, 75 bp, synthetic construct
  source 1..75: mol_type = other DNA
aatacatcccgccgataacttaccgcgacgttgatgatttcatggctgaacatgacgacgaggacgatgattatg

SEQ ID NO: 673478 - DNA, 75 bp, synthetic construct
  source 1..75: mol_type = other DNA
gatattttcattaataaatatcagaataaatacaaggtgcaaactttattcaattgggctgactttaaaggtata

SEQ ID NO: 673479 - DNA, 75 bp, synthetic construct
  source 1..75: mol_type = other DNA
ccgcatggatctgcgccagcaccgcaagatgatcatgatcgataattacattgcctataccggtagcatgaatat

SEQ ID NO: 673480 - DNA, 75 bp, synthetic construct
  source 1..75: mol_type = other DNA
gatgcaggtgtaggacaatggattgacctgatggcgcgcatggaaggtcctattgctactgcaatggggattatt

SEQ ID NO: 673481 - DNA, 75 bp, synthetic construct
  source 1..75: mol_type = other DNA
ttggtcggctgggcaagtcgcgcgttctttactgaactgctggccgcaggggttaaaatttaccagtttgaaggt

SEQ ID NO: 673482 - DNA, 75 bp, synthetic construct
  source 1..75: mol_type = other DNA
gcgccggcaacttggttcgggggcgaatatattgttgaaagaacaattctccgttgagtctgcggcacagacgat

SEQ ID NO: 673483 - DNA, 75 bp, synthetic construct
  source 1..75: mol_type = other DNA
ccggatagaagaagaaactttcgatggtgtggtttattactcaccgtctattttttgggggcatttagttaagaa

SEQ ID NO: 673484 - DNA, 75 bp, synthetic construct
  source 1..75: mol_type = other DNA
tatttattcctgcgactgggagattgaaaccggaaaacgtattctgccgccaccaccagatgtcaatattatgcc

SEQ ID NO: 673485 - DNA, 75 bp, synthetic construct
  source 1..75: mol_type = other DNA
gcggatggaacgcgacggtttagtgttgcgattaaagccgatcaatgatcagcggaagctctatatctcgctaac

SEQ ID NO: 673486 - DNA, 75 bp, synthetic construct
  source 1..75: mol_type = other DNA
aggcaaccatcgctgctgggggcatgtatatggcttatatgccacaggatataaagacaaatatttcagatgtta

SEQ ID NO: 673487 - DNA, 75 bp, synthetic construct
  source 1..75: mol_type = other DNA
gatatgaataaaaatttactggtatccaaggctgcatgtggaagcatcacgcttacagaccccaaggccaaagct

SEQ ID NO: 673488 - DNA, 75 bp, synthetic construct
  source 1..75: mol_type = other DNA
gcgatgggtaatcagatcaggaatgcgcaaatcaacaaagaccgtgaacagcaacgtgagcttcaacaacagcaa

SEQ ID NO: 673489 - DNA, 75 bp, synthetic construct
  source 1..75: mol_type = other DNA
gatctgcattccgcacccatatgagtaatgcaggaccgcttgatcagcaggatgaatatcaatcccttgaaagtg

SEQ ID NO: 673490 - DNA, 75 bp, synthetic construct
  source 1..75: mol_type = other DNA
tgcgtaggctggatgatcctgtgccttgaagcaatggtcgcagcaccattatgggtaataacacatttacatcca

SEQ ID NO: 673491 - DNA, 75 bp, synthetic construct
  source 1..75: mol_type = other DNA
ctggctgaacagtatgtggccgataataatattgatattcagaccggaataaacagcgcaacggcctcatatgta

SEQ ID NO: 673492 - DNA, 75 bp, synthetic construct
  source 1..75: mol_type = other DNA
gtgcattgcgtgacgatgatgtctacctgacggtaatgcctgcgtttcatatcgattgccagtgtactgcggcga

SEQ ID NO: 673493 - DNA, 75 bp, synthetic construct
  source 1..75: mol_type = other DNA
cgggcttttgctacgaagcggagatccgcgacgatcacaatcgtcccctcccggctggtgagctcggtgaaatct

SEQ ID NO: 673494 - DNA, 75 bp, synthetic construct
  source 1..75: mol_type = other DNA
cgcggtggcgagaatgtctcctgcgtggagctggaaaatatcatcgccacccatccaaaaattcaggatatcgtg

SEQ ID NO: 673495 - DNA, 75 bp, synthetic construct
  source 1..75: mol_type = other DNA
ggtgacacaacggctgaagtttcttgtcgccctgcgccccagcgtaacctcacctaccgttgccgcccgccaggc

SEQ ID NO: 673496 - DNA, 75 bp, synthetic construct
  source 1..75: mol_type = other DNA
ggcaggtgagatcggtgaaatctgtattaaaggcgtaccagggaaaaccatcttcaaagagtattttctcaaccc

SEQ ID NO: 673497 - DNA, 75 bp, synthetic construct
  source 1..75: mol_type = other DNA
acgtcaaccggtatagttatcttgagttaaatcaggaaattaaccgcacggcaaacctgttttatacgctgggaa

SEQ ID NO: 673498 - DNA, 75 bp, synthetic construct
  source 1..75: mol_type = other DNA
atcgacgacggcctctagatacgcgaatggtattgatgcgcaaaaccgaacagaagccaataccactggtaaggg

SEQ ID NO: 673499 - DNA, 75 bp, synthetic construct
  source 1..75: mol_type = other DNA
ctggataagttgtcatgtattgacgactggctgtgccggttttcctcaataatgtatcaccgttttgataaagaa

SEQ ID NO: 673500 - DNA, 75 bp, synthetic construct
  source 1..75: mol_type = other DNA
gctgattgccgttacgttgtttattttcggctactccatgtggacgaccattatctgcacggcgattctggtttc

SEQ ID NO: 673501 - DNA, 75 bp, synthetic construct
  source 1..75: mol_type = other DNA
ttcggctactccatgtggacgaccattatctgcacggcgattctggtttcgctctactggggcattacctccaac

SEQ ID NO: 673502 - DNA, 75 bp, synthetic construct
  source 1..75: mol_type = other DNA
cggagaattacagcattttggtggcgatagtatcgccaacaaactgcgcggcacggtaaattgtatcgggccatt

SEQ ID NO: 673503 - DNA, 75 bp, synthetic construct
  source 1..75: mol_type = other DNA
tagtgaggaacagttggcaaatttcgcccgattgctcacccataatgaaaaaggcaaaactcgcctctccagcgt

SEQ ID NO: 673504 - DNA, 75 bp, synthetic construct
  source 1..75: mol_type = other DNA
tccgtccataataatgatattaaagactctgccaataacacatcaggaataaccgtgtcggttacagccagtaaa

SEQ ID NO: 673505 - DNA, 75 bp, synthetic construct
  source 1..75: mol_type = other DNA
ctctctggccttagctggcgcttgattggcgttgcggtggtgctggtagcagcattcattccaattctgtggttc

SEQ ID NO: 673506 - DNA, 75 bp, synthetic construct
  source 1..75: mol_type = other DNA
tcatggtggtgatggcgcaaattcctccacgcgtttatgaaggctgggccccctatctctatatcatctgtatta

SEQ ID NO: 673507 - DNA, 75 bp, synthetic construct
  source 1..75: mol_type = other DNA
aaaagcaccctcgcgcggctattggtcggtttagaatcgccctcacagggcaatattagctggcgcggagaaccg

SEQ ID NO: 673508 - DNA, 75 bp, synthetic construct
  source 1..75: mol_type = other DNA
tccaccagaacaaattcttcgatctcttaataatactgaacgagagattctttacctctatttcattaagcggag

SEQ ID NO: 673509 - DNA, 75 bp, synthetic construct
  source 1..75: mol_type = other DNA
attatagaataagaatgataaaaattaaatttggcgctgaaacgacacggaagcttccaattctttttagatgtt

SEQ ID NO: 673510 - DNA, 75 bp, synthetic construct
  source 1..75: mol_type = other DNA
cattctgggataaggtccatcttgatcccaccatgctgcttatcttactggcattgctggtctacagcgctctgg

SEQ ID NO: 673511 - DNA, 75 bp, synthetic construct
  source 1..75: mol_type = other DNA
ggtacgggtaaaaccggtgggctggaaatcagcatccgtggaatgcccgccagttacacgctgatactgattgat

SEQ ID NO: 673512 - DNA, 75 bp, synthetic construct
  source 1..75: mol_type = other DNA
acaggccgttcctgcgaagatgcgtggctggtggcggcatcgatgatgccggtgacgcaacggcttaagttcctc

SEQ ID NO: 673513 - DNA, 75 bp, synthetic construct
  source 1..75: mol_type = other DNA
gaaagacggggttgtccttgccagcacaggtgaaactttccggcagaaaagctggtcggtatttgcggaggatga

SEQ ID NO: 673514 - DNA, 75 bp, synthetic construct
  source 1..75: mol_type = other DNA
actgggtagtctgacagggggatatgaccatactctgcgctatgagcgaaacaaaatttcagctggctatgatca

SEQ ID NO: 673515 - DNA, 75 bp, synthetic construct
  source 1..75: mol_type = other DNA
gaggatttgcgatccagccagtatcatgatctgggggaggcactgagatccgtagagggggtggatgttgaaagc

SEQ ID NO: 673516 - DNA, 75 bp, synthetic construct
  source 1..75: mol_type = other DNA
cggtgattacttccagacgggatcatcaacaacgggatatgtgatacctgagcgaaattactggatgtcgctgaa

SEQ ID NO: 673517 - DNA, 75 bp, synthetic construct
  source 1..75: mol_type = other DNA
gtttggcgactggcgtagttttgatggttttcgccataccgtggaacattcggtttatgtccatcccgatcatca

SEQ ID NO: 673518 - DNA, 75 bp, synthetic construct
  source 1..75: mol_type = other DNA
gatgcccttcgctacgaccgccagactatttttggccttgtccgtgaacgtccgatcgacattcacaaagaccct

SEQ ID NO: 673519 - DNA, 75 bp, synthetic construct
  source 1..75: mol_type = other DNA
ccctgaaaagcggcgaaaccgtcgccctgctggggcgcagcggctgcgggaaaagtaccctcgcgcggttgctgg

SEQ ID NO: 673520 - DNA, 75 bp, synthetic construct
  source 1..75: mol_type = other DNA
agaagaaagtgtatgatgagaaaggagaatacctgaaagcctggactgtggtggatgctggtatgtcgtggaagg

SEQ ID NO: 673521 - DNA, 75 bp, synthetic construct
  source 1..75: mol_type = other DNA
ctctgtggtcagaggatgtgacgctgtctctgaattatacctggacgcagagtgaacaacgggatggggataata

SEQ ID NO: 673522 - DNA, 75 bp, synthetic construct
  source 1..75: mol_type = other DNA
aacaaatggggaaacagcagccagttcaatttctggagtagtggtcctctaaatgaaaaactgagcctgcaggta

SEQ ID NO: 673523 - DNA, 75 bp, synthetic construct
  source 1..75: mol_type = other DNA
tgccggtgattacttccagacgggagcatcgacaacgggctatgtgatacctgagcgaaattactggatgtcact

SEQ ID NO: 673524 - DNA, 75 bp, synthetic construct
  source 1..75: mol_type = other DNA
tctggtgtcgatgtttgtcggctggctggagcgcaaacgctcaccgctcgatccggtggtgcgatcgcttgtcag

SEQ ID NO: 673525 - DNA, 75 bp, synthetic construct
  source 1..75: mol_type = other DNA
ccaatagccttagtaaaggctgcaattaaacacaaggaaagtggtgatacatcggatgatgatgaattttgggtt

SEQ ID NO: 673526 - DNA, 75 bp, synthetic construct
  source 1..75: mol_type = other DNA
tcatatccgaaaaattgcaacgctcactattgatgcaaaagcccggttccagcctgcccggggttacaccattgt

SEQ ID NO: 673527 - DNA, 75 bp, synthetic construct
  source 1..75: mol_type = other DNA
ggcattgatcggcctgcaaaatctgtcagcccgttttaattctgccatggacattcccgctcaggggctgtgccg

SEQ ID NO: 673528 - DNA, 75 bp, synthetic construct
  source 1..75: mol_type = other DNA
ttagcgatgaagaacggctggcgctggagtacgccgaagccgcaagcgtcacaccgccaacggtcgatgatgccc

SEQ ID NO: 673529 - DNA, 75 bp, synthetic construct
  source 1..75: mol_type = other DNA
ggagtacgccgaagccgcaagcgtcacaccgccaacagtcgatgatgccctgcgtacccgactggctgcgcattt

SEQ ID NO: 673530 - DNA, 75 bp, synthetic construct
  source 1..75: mol_type = other DNA
gtgctaatcagatgcgcccgatggtggtgcagtcgtcggaagatttctatctggcgaaagcgcgcacactgggga

SEQ ID NO: 673531 - DNA, 75 bp, synthetic construct
  source 1..75: mol_type = other DNA
caccagtgatttgctggatgaatgggcgaaaggaaacgttcgtcagcaacgagcggcgcaatatggtcgtgctct

SEQ ID NO: 673532 - DNA, 75 bp, synthetic construct
  source 1..75: mol_type = other DNA
caatgtcacaggttttatgactgacttctccaacaagattgtctcttattccataaatgataacaccaatagcta

SEQ ID NO: 673533 - DNA, 75 bp, synthetic construct
  source 1..75: mol_type = other DNA
gcactggatgacgcccgtcaccaggcaaaatacgtttcagcaatctggcaaaaactgatcccgaatccggttgat

SEQ ID NO: 673534 - DNA, 75 bp, synthetic construct
  source 1..75: mol_type = other DNA
gggcggcgcaatatggtcgcgctttacaggcgatggaagccaataaattcgatgaagcgcggaaaacactgcaac

SEQ ID NO: 673535 - DNA, 75 bp, synthetic construct
  source 1..75: mol_type = other DNA
gtacgctggcgggaacgcgtcaggggatgatcagcttcactcaacaaaacgaacaggaagcagaccgtattggta

SEQ ID NO: 673536 - DNA, 75 bp, synthetic construct
  source 1..75: mol_type = other DNA
aaatattagctggcgtggcgaatcgttggcaaagctcaatcgcgcccagcgtaaagcgttccgccgcgatattca

SEQ ID NO: 673537 - DNA, 75 bp, synthetic construct
  source 1..75: mol_type = other DNA
cctcctgaatttcgccccaggatcgtggtttgccgacctgagaaaaaaactcaaccttgggaagctggctaccgg

SEQ ID NO: 673538 - DNA, 75 bp, synthetic construct
  source 1..75: mol_type = other DNA
cagggcagcactgatgcaagcggcaacgtagacgtcacgatgaccaaaaacgcctatacggatgttgtgacggat

SEQ ID NO: 673539 - DNA, 75 bp, synthetic construct
  source 1..75: mol_type = other DNA
gaaatcaacctgctgtgtgatatgggatgtgatatttatgcaccgggcaccaccggtacactgaacgatcataac

SEQ ID NO: 673540 - DNA, 75 bp, synthetic construct
  source 1..75: mol_type = other DNA
tgttcattatcttgctgaaaaagagcgcgctgataagttgcaggcgactttggatatggtgagcgagactcaagg

SEQ ID NO: 673541 - DNA, 75 bp, synthetic construct
  source 1..75: mol_type = other DNA
attggttgtctggagattcagggggccagtctaggtggtgcgttactgtggcacttcgccctgatgtggattctg

SEQ ID NO: 673542 - DNA, 75 bp, synthetic construct
  source 1..75: mol_type = other DNA
tctcctgaatttcgctcccggctcgtggtttgccgacctgagaaaaaaactcaaccttgggaaactggctaccgg

SEQ ID NO: 673543 - DNA, 75 bp, synthetic construct
  source 1..75: mol_type = other DNA
atttagccgtgagtttaaacgttacttcggtgtgacgccgggggaagatgcggcaagaatgcgggcgatgcaggg

SEQ ID NO: 673544 - DNA, 75 bp, synthetic construct
  source 1..75: mol_type = other DNA
aacctgagcgtcgagcaactggcggcagaagccaacatgagcgtatcggcgttccaccataattttaagtctgtc

SEQ ID NO: 673545 - DNA, 75 bp, synthetic construct
  source 1..75: mol_type = other DNA
tcaataagcatatctttccttatataggtacttatccgctttctatgtgtgaaactcgccactggctggaatgtt

SEQ ID NO: 673546 - DNA, 75 bp, synthetic construct
  source 1..75: mol_type = other DNA
tggttcagatattgcatctctgcgtaaaggatttagtgatacctccataatcagcgttgatgggaactcatcagt

SEQ ID NO: 673547 - DNA, 75 bp, synthetic construct
  source 1..75: mol_type = other DNA
agatctcatggcaagcgtgatgggagtcaagaaaatatctccgggctgattgtgtctggtgataataatacaata

SEQ ID NO: 673548 - DNA, 75 bp, synthetic construct
  source 1..75: mol_type = other DNA
gttcagtcgtgagttcaaacgttactttggcgtgacgccaggggaagatgcggcaagaatgcggatgatgcaggg

SEQ ID NO: 673549 - DNA, 75 bp, synthetic construct
  source 1..75: mol_type = other DNA
tctgatgatcgaccttgaaaccatgggaaaaaatcctgatgccccgattatcgcaataggtgcaatatttttcga

SEQ ID NO: 673550 - DNA, 75 bp, synthetic construct
  source 1..75: mol_type = other DNA
atatgtatggggcaattctgtggggtgagcaattctctaatttgccagaaagcagggtcctcgagctagctcaaa

SEQ ID NO: 673551 - DNA, 75 bp, synthetic construct
  source 1..75: mol_type = other DNA
ggcttttaagtatgccaaatggcgatgatgttattttggaagctttaagcatgaagttaagtgaccagaaagacg

SEQ ID NO: 673552 - DNA, 75 bp, synthetic construct
  source 1..75: mol_type = other DNA
tagcattgaagatgctatcaatccgatgcgagaactaatccgttctactaaaaaagctattcgcataacaggatt

SEQ ID NO: 673553 - DNA, 75 bp, synthetic construct
  source 1..75: mol_type = other DNA
ttcctctgacgccggacgtgtgctacaaaacgcggtattacccgcattccccgtgcgccgtcgcaccacagaaaa

SEQ ID NO: 673554 - DNA, 75 bp, synthetic construct
  source 1..75: mol_type = other DNA
gatggtatttcaggactccatcagcgccgtgaatccgcgcaaaaccgtgcgcgagatcctgcgtgaaccgatgcg

SEQ ID NO: 673555 - DNA, 75 bp, synthetic construct
  source 1..75: mol_type = other DNA
tgagcaattctctaatttgccagaaagcagggtcctcgagctgaagtggtcaacaaaaactggccaccgcgttag

SEQ ID NO: 673556 - DNA, 75 bp, synthetic construct
  source 1..75: mol_type = other DNA
actgacccaggcgcgcaacgaactgctatcactggcagcgcaatcgccaaatcaggtcatcggcgtacgcccaaa

SEQ ID NO: 673557 - DNA, 75 bp, synthetic construct
  source 1..75: mol_type = other DNA
ttatcactggcagcgcaatcaccgaatcaagtcaccggggtacgtccgaacggactggaagatacgccgatgttc

SEQ ID NO: 673558 - DNA, 75 bp, synthetic construct
  source 1..75: mol_type = other DNA
attatgtgcagaactgcgtgatgggggatatttacctgaacacaaatacacgctggaggagcttatggcctccgc

SEQ ID NO: 673559 - DNA, 75 bp, synthetic construct
  source 1..75: mol_type = other DNA
agtagctatttatgttgatactggctatgagccagtaccgtcggctacagcaatgcttgataacctgctcgctga

SEQ ID NO: 673560 - DNA, 75 bp, synthetic construct
  source 1..75: mol_type = other DNA
gcggtgctgttcctgcgtacaccgacctctttcttaccggaagaggatcagggggtctttatgaccaccgcgcag

SEQ ID NO: 673561 - DNA, 75 bp, synthetic construct
  source 1..75: mol_type = other DNA
gatatcgcgcaggttcaggtacaaaataaactgcaactcgccatgccatcgctccccgaagcggtacagcaacaa

SEQ ID NO: 673562 - DNA, 75 bp, synthetic construct
  source 1..75: mol_type = other DNA
agagcgcacgttgttcaaagagttgatcaaaaccaacggcgttgggcctaaactggcattggcaatcctctccgg

SEQ ID NO: 673563 - DNA, 75 bp, synthetic construct
  source 1..75: mol_type = other DNA
atggtgagcaaaatcgctcgccctgacgccagcagtgaaacattaattcgcgaagccctacgcgccgcgttatga

SEQ ID NO: 673564 - DNA, 75 bp, synthetic construct
  source 1..75: mol_type = other DNA
acgaggacgagcaaggcttacgtcagcttgtggcacagcttgaaaaagtgcttgcaacgacggattacaaaaaat

SEQ ID NO: 673565 - DNA, 75 bp, synthetic construct
  source 1..75: mol_type = other DNA
tatgcgtcgcgaattgctggatcagcttaacaaacagttgggtaatcagctgatgatggccattaacctgcaaat

SEQ ID NO: 673566 - DNA, 75 bp, synthetic construct
  source 1..75: mol_type = other DNA
tggcttccgctgtgggttccctgcgtaacgacagccagctcaacacaccaaaagcgatccttatcgacctgatcc

SEQ ID NO: 673567 - DNA, 75 bp, synthetic construct
  source 1..75: mol_type = other DNA
taaaagaagagacagttcagctacggcaaaaagtcgctgaagcgccggaaaaaatgcgccaggcgaccgcggcgt

SEQ ID NO: 673568 - DNA, 75 bp, synthetic construct
  source 1..75: mol_type = other DNA
ctctgtctaacattatttatagagaattacaaacgattaaatctggtatgcatttatctggcggaattttttcat

SEQ ID NO: 673569 - DNA, 75 bp, synthetic construct
  source 1..75: mol_type = other DNA
tattaaatacgggaatggattttttcatcaagaagaagacagtcgagcaggaagtacaaaaaacaaattccgagg

SEQ ID NO: 673570 - DNA, 75 bp, synthetic construct
  source 1..75: mol_type = other DNA
gaatatatttcatatattaatgcttttttttcttagagtatctccgactgtaataaaaaaaattgcatacaatag

SEQ ID NO: 673571 - DNA, 75 bp, synthetic construct
  source 1..75: mol_type = other DNA
gcgtgcggatccctgtcgggcgtggtgtatgcggcactgcagttgcccgtaatgaagtacagcgaatcgaggatg

SEQ ID NO: 673572 - DNA, 75 bp, synthetic construct
  source 1..75: mol_type = other DNA
tcaaccttatgtctatcatgtttgatgaaagaagctgcggagtgggtgcagaaattaccaataaagatattacat

SEQ ID NO: 673573 - DNA, 75 bp, synthetic construct
  source 1..75: mol_type = other DNA
catctttctggcggtattttttcatggcacaaagctgaagccgcagggattaccaagaaacaagaagtaacgagt

SEQ ID NO: 673574 - DNA, 75 bp, synthetic construct
  source 1..75: mol_type = other DNA
ttgcctttaaccagcttgaagtgcatctgcacaacgagaagggcgatgaggtgacggaagtaaaacgcgactaca

SEQ ID NO: 673575 - DNA, 75 bp, synthetic construct
  source 1..75: mol_type = other DNA
aaggagagcaggccggagggaacaagcagcctgtatatctacagtgaccaggggagttatgaaccgctggcgcgg

SEQ ID NO: 673576 - DNA, 75 bp, synthetic construct
  source 1..75: mol_type = other DNA
cttgttctgtatgtatataaacactatcgacatattatgaccgggaacattccttacccccttgcgctctcagag

SEQ ID NO: 673577 - DNA, 75 bp, synthetic construct
  source 1..75: mol_type = other DNA
ggcattttgttttttcagcatttattgcttttgtttttgtcttgttatgccagaacacggcgtttgcgcgggcgt

SEQ ID NO: 673578 - DNA, 75 bp, synthetic construct
  source 1..75: mol_type = other DNA
ccgactgctcgccagacaaagcggcttccttgatccagtgaactatcgtaatcactttgttaccatcctcggtac

SEQ ID NO: 673579 - DNA, 75 bp, synthetic construct
  source 1..75: mol_type = other DNA
aagttggagtcattacctcccgtctttatcagcatgaccagttatcagacagcggcagcgcgaaacaaaactaac

SEQ ID NO: 673580 - DNA, 75 bp, synthetic construct
  source 1..75: mol_type = other DNA
ttttatgggacggaatgcggctggcgcaggagagcaggccggagggaacaggcagcctgtatatctacagcgacc

SEQ ID NO: 673581 - DNA, 75 bp, synthetic construct
  source 1..75: mol_type = other DNA
tgtggccaaactggaagagggccatgctaacgaagtcaacgatgaagtccgtgacgcactgttgcaagtggtaga

SEQ ID NO: 673582 - DNA, 75 bp, synthetic construct
  source 1..75: mol_type = other DNA
tcgcagcagttgcaacaaattcgcagccgtctggatggcactgaggttggtgaggcggctttacgtcccagccag

SEQ ID NO: 673583 - DNA, 75 bp, synthetic construct
  source 1..75: mol_type = other DNA
cgtgcaaaatgcgatgtataacgcttcgcagcagctgcaacaaattcgcagccgcctggatggcactgatgttgg

SEQ ID NO: 673584 - DNA, 75 bp, synthetic construct
  source 1..75: mol_type = other DNA
cagctgttgcaagaagcagtaaacagcaagcgcctgactttaaccgaaaaaacggcgcaggaagccgtctccccg

SEQ ID NO: 673585 - DNA, 75 bp, synthetic construct
  source 1..75: mol_type = other DNA
gatcagttgtgccgtgaaaacgacatcaacattgcctttaaccaacttgaagtgcatctgcacaacgagaagggc

SEQ ID NO: 673586 - DNA, 75 bp, synthetic construct
  source 1..75: mol_type = other DNA
attgaaacggtgtatctggtaatcgtctggaacttgctgtaccagacagtgctgcgtgggttaagcgtggcggca

SEQ ID NO: 673587 - DNA, 75 bp, synthetic construct
  source 1..75: mol_type = other DNA
tatataagaatgataatcctatatacttagagaaagccattaaaagtatattgaatcaaacatataaaaatatcc

SEQ ID NO: 673588 - DNA, 75 bp, synthetic construct
  source 1..75: mol_type = other DNA
ggcagctccttcaccatcgcaaccgcaccgcagacaatgatgaggcgtaccgcagcaacgcgaggaacgaacatc

SEQ ID NO: 673589 - DNA, 75 bp, synthetic construct
  source 1..75: mol_type = other DNA
caggtaataatcggaaaacatcgctatctcatccaggccaaacgctatcgcggccatattgctttacaacacgtt

SEQ ID NO: 673590 - DNA, 75 bp, synthetic construct
  source 1..75: mol_type = other DNA
cggaagtcgttgctgcggcaaccccggtgaaggacaaattcaaacatcccgcgacccgtaccttccaggcggtgc

SEQ ID NO: 673591 - DNA, 75 bp, synthetic construct
  source 1..75: mol_type = other DNA
gacacgcttcctggcgttaaaccacaacttatccgccaggcaatgggattaaacgatttgcctgaatggctgcgt

SEQ ID NO: 673592 - DNA, 75 bp, synthetic construct
  source 1..75: mol_type = other DNA
gcgcgccagtttgccgcgcaccgtctggtgctggtgggcgacgccgcgcataccattcacccgctggcggggcag

SEQ ID NO: 673593 - DNA, 75 bp, synthetic construct
  source 1..75: mol_type = other DNA
acggttgcatcgtcagggtaaagacatcgggcagtacatttatctgcgccgctatgagcgtagtcgcaagcacag

SEQ ID NO: 673594 - DNA, 75 bp, synthetic construct
  source 1..75: mol_type = other DNA
atgttccccttccccactacagaaaaccttattctatgggcttgcagcgccatcgcactgtttgccgttgtattc

SEQ ID NO: 673595 - DNA, 75 bp, synthetic construct
  source 1..75: mol_type = other DNA
gacacaaaaggaagcagcaaagtgcgcggcgggtgctggagcgcataaagacgttgccgggcttcccacaaaaaa

SEQ ID NO: 673596 - DNA, 75 bp, synthetic construct
  source 1..75: mol_type = other DNA
tatcagataatcctggctgagtcacgccatcgtctggagcaagaagaaaaactgctggaaactctgctggcttct

SEQ ID NO: 673597 - DNA, 75 bp, synthetic construct
  source 1..75: mol_type = other DNA
atttacattgatgggactttcggtcgcggtggtcactcacgtctgatcctttcgcaacttggcgaagaggggcgt

SEQ ID NO: 673598 - DNA, 75 bp, synthetic construct
  source 1..75: mol_type = other DNA
gtccgcaggttccggcaggattaccgatgaccgaagagcagctcaaaaaactgggtggccgtcagttgcgagcac

SEQ ID NO: 673599 - DNA, 75 bp, synthetic construct
  source 1..75: mol_type = other DNA
cggtgctgctggatgaagccgttaacggtctgaatattcgtcctgacggcatttacattgatgggacttttggtc

SEQ ID NO: 673600 - DNA, 75 bp, synthetic construct
  source 1..75: mol_type = other DNA
atcgcttttgataatcgcctgggcttatgtaaggtcgagagtgaacgtcaggtgttcccactgacggggcgttat

SEQ ID NO: 673601 - DNA, 75 bp, synthetic construct
  source 1..75: mol_type = other DNA
aaagctggtatcaacgcttatgtgcgatgccggcgttaatcataccattaacccataatgcgcttaacgatctgg

SEQ ID NO: 673602 - DNA, 75 bp, synthetic construct
  source 1..75: mol_type = other DNA
acagtaacctggaaaaagtggcacgttacgccatgatcttgctgatgctggcagaattcggagcgtggatatggt

SEQ ID NO: 673603 - DNA, 75 bp, synthetic construct
  source 1..75: mol_type = other DNA
acgccacgctcgccagaacggtggtcgcatgctattacgctctggttgcggattctggcgattgtttcaacctca

SEQ ID NO: 673604 - DNA, 75 bp, synthetic construct
  source 1..75: mol_type = other DNA
ttggtcagtacggcaccgaggagtacaccaatcttccggcctataacaccatcgcccaggccttcagtggttacc

SEQ ID NO: 673605 - DNA, 75 bp, synthetic construct
  source 1..75: mol_type = other DNA
ggaagcgcgtcagcaatctcctgatggctgcgtgatggtattcgccgcccgtattcgtcaggggtcacatcatgc

SEQ ID NO: 673606 - DNA, 75 bp, synthetic construct
  source 1..75: mol_type = other DNA
gtctggctgatgttctcgctgggggctggactgtggctggtacacggtggctggctgacagaatggctaagcggc

SEQ ID NO: 673607 - DNA, 75 bp, synthetic construct
  source 1..75: mol_type = other DNA
acgcttcctggcgttaagccgcaacttatccgtcaggcaatgggattaaacgatttgcctgaatggctgcgttaa

SEQ ID NO: 673608 - DNA, 75 bp, synthetic construct
  source 1..75: mol_type = other DNA
cacagcggatgcagcaggcaggcgaagacgaatttaaccgcgagttaaatatcgcttttgataatcgcctgggct

SEQ ID NO: 673609 - DNA, 75 bp, synthetic construct
  source 1..75: mol_type = other DNA
cgcggcgctgatgctggctggtatgcagggattccgcgatctgttttccggtaccaatccggcgaaaaaactgct

SEQ ID NO: 673610 - DNA, 75 bp, synthetic construct
  source 1..75: mol_type = other DNA
ctcttttgacgatcaaagcatgggctatagccatcttgggcatattgttgaaaacgcagtgattcactacgcgct

SEQ ID NO: 673611 - DNA, 75 bp, synthetic construct
  source 1..75: mol_type = other DNA
atcggacagtatatttacctgcgtcgctatgagcgtagccgcaagcacagtgcggcgctgatgctggctggtatg

SEQ ID NO: 673612 - DNA, 75 bp, synthetic construct
  source 1..75: mol_type = other DNA
ccgcagagctgattgccgaactgaaacggttgcatcgtcagggtaaagacatcgggcagtacatttacctgcgtc

SEQ ID NO: 673613 - DNA, 75 bp, synthetic construct
  source 1..75: mol_type = other DNA
ggttgtctggagattcagggggccagtctagatcctaaggctgttgtgtggctaggggacaacacattcggtata

SEQ ID NO: 673614 - DNA, 75 bp, synthetic construct
  source 1..75: mol_type = other DNA
agcaggtgcataaaggtaatcaggccgccgattttgataccttcggtaaaggggcctggacctttgaattgcgcg

SEQ ID NO: 673615 - DNA, 75 bp, synthetic construct
  source 1..75: mol_type = other DNA
atgacgacacaatccagtcctgttattactgatatgaaagtcattccggtcgccggacatgacagcatgttgctc

SEQ ID NO: 673616 - DNA, 75 bp, synthetic construct
  source 1..75: mol_type = other DNA
agcacacgtccacgactggcaggggaaaccgctggattacactccgcgtgaatccttcctgaatccagggttccg

SEQ ID NO: 673617 - DNA, 75 bp, synthetic construct
  source 1..75: mol_type = other DNA
acatccattggttcttcgctgaagttttgcctggtagcggaagggcaggctcagctttaccctcgctttgggcca

SEQ ID NO: 673618 - DNA, 75 bp, synthetic construct
  source 1..75: mol_type = other DNA
tcaggtacgcgacgcccgtccgccgctggtggtcatcagccgttcccatgcggatgctgagctgaaagagtatct

SEQ ID NO: 673619 - DNA, 75 bp, synthetic construct
  source 1..75: mol_type = other DNA
gtgcgatggctcgcgaattctccattgacgttcttgaagaaatgctcgaaaaaattcagggttgtcactaaagaa

SEQ ID NO: 673620 - DNA, 75 bp, synthetic construct
  source 1..75: mol_type = other DNA
attcgaaggtgagcgccataatgcacttgatgacgcccgttaccaggcaaaatacgtttcagctatctggcaaaa

SEQ ID NO: 673621 - DNA, 75 bp, synthetic construct
  source 1..75: mol_type = other DNA
gtacgggtgctgggcctgcggcagggaggtatcagtgaagaaacacaaaatgacagctgtgagaaaatactggcg

SEQ ID NO: 673622 - DNA, 75 bp, synthetic construct
  source 1..75: mol_type = other DNA
gcgctgaatgttccggtctgcgaactgttggggccaggcaagcaacgcgaggctattaccgtcctcggttatctg

SEQ ID NO: 673623 - DNA, 75 bp, synthetic construct
  source 1..75: mol_type = other DNA
tgtcggtgcgcgtaacgacgcaggtccgatgcagtacctgatccccggctggacctttgaccgtaaacgtcccgt

SEQ ID NO: 673624 - DNA, 75 bp, synthetic construct
  source 1..75: mol_type = other DNA
tttgattttctcatggctaacattgataaaatcaatcagtttcaaagcactgatgaaaatgcacgttacaactac

SEQ ID NO: 673625 - DNA, 75 bp, synthetic construct
  source 1..75: mol_type = other DNA
gccagctttctgttgaaaacgcaccagctactgctgttttacccggtagtggttaacgcgatcatgctggcggtt

SEQ ID NO: 673626 - DNA, 75 bp, synthetic construct
  source 1..75: mol_type = other DNA
agtgccatcttatctggaaatcagaaaagatctgccgcgtaactgttcggggaaaataatcagaaagaatcttaa

SEQ ID NO: 673627 - DNA, 75 bp, synthetic construct
  source 1..75: mol_type = other DNA
acatctcgacaactgcccggaatttatcttttgctggttcgggctggcaaaaattggcgcgattatggtgccgat

SEQ ID NO: 673628 - DNA, 75 bp, synthetic construct
  source 1..75: mol_type = other DNA
tatccggagtcagcgacgttgacgaggcgaagcgtcaatggttgcagggtatgcgtcacaccggagatacggtca

SEQ ID NO: 673629 - DNA, 75 bp, synthetic construct
  source 1..75: mol_type = other DNA
agtgctggaagccgacggctggctacataccggcgataccggatactgcgacgaagagggcttttttatttcgtc

SEQ ID NO: 673630 - DNA, 75 bp, synthetic construct
  source 1..75: mol_type = other DNA
aacgcggtggcgagaatgtctcctgcgtggagctggaaaatattatcgccgcgcacccgaaaattcaggacatcg

SEQ ID NO: 673631 - DNA, 75 bp, synthetic construct
  source 1..75: mol_type = other DNA
cagggaaaaccatcttcaaagagtattttctcaacccgaaagccactgcgaaagtgctggaagccgatggctggc

SEQ ID NO: 673632 - DNA, 75 bp, synthetic construct
  source 1..75: mol_type = other DNA
gggctataccggtgtgctgatcccaacggggcgctcctgcgaagatgcgtggctggttgccgcgtcgatgatccc

SEQ ID NO: 673633 - DNA, 75 bp, synthetic construct
  source 1..75: mol_type = other DNA
agcgagcgttacgaagcctcggcagaatttacccaggtctggcggcggttgttgcttggcgagacagtggatttc

SEQ ID NO: 673634 - DNA, 75 bp, synthetic construct
  source 1..75: mol_type = other DNA
tttttgttcaggtctggggaaatggagccaacttcgacaacgtgattttacgccgttcatacgaacgacagggta

SEQ ID NO: 673635 - DNA, 75 bp, synthetic construct
  source 1..75: mol_type = other DNA
tacccggcgtcagcgaagttgatgaggtgaagcgtcaatggttgcaggggatgcgtcacaccggtgacacggtca

SEQ ID NO: 673636 - DNA, 75 bp, synthetic construct
  source 1..75: mol_type = other DNA
ggtgctggatttacgcgtcaaccagagcgatatcactgatgcacaaataaaaaagatcattgcggtgatcgaccg

SEQ ID NO: 673637 - DNA, 75 bp, synthetic construct
  source 1..75: mol_type = other DNA
atctggaagaagcgtatcgggttggcgagttgctgttcccgcatctggatgttgccatcccggaaataccccagc

SEQ ID NO: 673638 - DNA, 75 bp, synthetic construct
  source 1..75: mol_type = other DNA
gagtgccgccgatgcgcgacgtatcgtcagccattacgagcgacgctggctgatagaggaataccacaaggcgtg

SEQ ID NO: 673639 - DNA, 75 bp, synthetic construct
  source 1..75: mol_type = other DNA
ttaaataaaatagagatgagaaaaccatcttcgaaagattcaatgttaattgtggtgcatcgggatcatcatata

SEQ ID NO: 673640 - DNA, 75 bp, synthetic construct
  source 1..75: mol_type = other DNA
atgaatctgatcccgaccgactggcaggaagaggctgcgcggcaatccaacgatggcggcagcagtcagggcttt

SEQ ID NO: 673641 - DNA, 75 bp, synthetic construct
  source 1..75: mol_type = other DNA
atgaaatcacgcagaccgtcaataagaaactggaagaccagagtgcagcgatccagcagatacagaaggttcagg

SEQ ID NO: 673642 - DNA, 75 bp, synthetic construct
  source 1..75: mol_type = other DNA
gggcttatccacgaagtctggcgacatgcgctgaacaaaatcagtcaggacaaacgaaacagtaattatattatc

SEQ ID NO: 673643 - DNA, 75 bp, synthetic construct
  source 1..75: mol_type = other DNA
ttctgccaaccgcaaacgctggccgcttttgtctgggatctctttactgcgtggcaacaagctggcgcgccagca

SEQ ID NO: 673644 - DNA, 75 bp, synthetic construct
  source 1..75: mol_type = other DNA
ccttgaatgcccgaggacgcattttcattctaaggagtggttaaaagttgttgctactgaccccagggcagtgag

SEQ ID NO: 673645 - DNA, 75 bp, synthetic construct
  source 1..75: mol_type = other DNA
tcgctggcgaatgacccaaactctacagttatcagtaagcaggaagcggatgagctcctgaagcagtacggcgta

SEQ ID NO: 673646 - DNA, 75 bp, synthetic construct
  source 1..75: mol_type = other DNA
ctgaattcaataccccaaacattgaactctcagcagttagtcaaaaatactttggtatgagtcaagccacagcag

SEQ ID NO: 673647 - DNA, 75 bp, synthetic construct
  source 1..75: mol_type = other DNA
gctgggatgaggaatccgcttcctttgtcccggtcgaacctgagccgaatacagaaattgttaactttaatcagt

SEQ ID NO: 673648 - DNA, 75 bp, synthetic construct
  source 1..75: mol_type = other DNA
agttgaataatgacaactttgccccaggaaaaacggcggatgattatgagttttcaagctctgcctcctgggtcg

SEQ ID NO: 673649 - DNA, 75 bp, synthetic construct
  source 1..75: mol_type = other DNA
ataacgagctcaacctgagtaacgccctgcttgacgatatcgctgtcgataaccctgatcttgcgaccacgttgc

SEQ ID NO: 673650 - DNA, 75 bp, synthetic construct
  source 1..75: mol_type = other DNA
tgttattgccgaacgcaaagattctctggcacgccagcagatcgcgatgtcggcaccgagcgggtgggtagccac

SEQ ID NO: 673651 - DNA, 75 bp, synthetic construct
  source 1..75: mol_type = other DNA
cccggtatcagaaatcaaaaacatccctggagaacatccgtgcccgactgcgtgagggatacagcgttgcagacc

SEQ ID NO: 673652 - DNA, 75 bp, synthetic construct
  source 1..75: mol_type = other DNA
cagacaggctatatttctgttggtaaaaatgtaccctttatcacgggtaaagttacgggtgaatctgccggggta

SEQ ID NO: 673653 - DNA, 75 bp, synthetic construct
  source 1..75: mol_type = other DNA
acggctacggcgcattctggcctgaaccaggctggggcgcaccttactacactaatgcggttagccaggtaacgc

SEQ ID NO: 673654 - DNA, 75 bp, synthetic construct
  source 1..75: mol_type = other DNA
atggaatttcgtaatctgacacctttttccgcaatggaatatgcgatggacgataaacataacaaacgtcatcac

SEQ ID NO: 673655 - DNA, 75 bp, synthetic construct
  source 1..75: mol_type = other DNA
aaacctgattgatttcgggatcatactggaaggaccgaagattgggcggagcaaaacgtaccgcctaaatcccca

SEQ ID NO: 673656 - DNA, 75 bp, synthetic construct
  source 1..75: mol_type = other DNA
tctcattcagtcgctgatgtttgaaaccagcttgtctgatggcgttgatttatcgtttgcggcaggttctgcatc

SEQ ID NO: 673657 - DNA, 75 bp, synthetic construct
  source 1..75: mol_type = other DNA
tctaatggcggtggtaatgttgtggattatccaggcaataactccctgattgtttccgcacctgacgagctgctt

SEQ ID NO: 673658 - DNA, 75 bp, synthetic construct
  source 1..75: mol_type = other DNA
atgaagttaaaacaacaaactgtgcgactttcacgtcgcacattaaccaccctgccattattggcctttgcgcta

SEQ ID NO: 673659 - DNA, 75 bp, synthetic construct
  source 1..75: mol_type = other DNA
taccgcacgccgcgtaacctcaagaaactgaacgttattgatgaaggctggcgtctgctggacttcaaaaatcac

SEQ ID NO: 673660 - DNA, 75 bp, synthetic construct
  source 1..75: mol_type = other DNA
ggcgtggaagaagtcagggccggaaatggcttcgctggaagcctggctggaagaacatgagaaatacaggagtgt

SEQ ID NO: 673661 - DNA, 75 bp, synthetic construct
  source 1..75: mol_type = other DNA
caccgttactggatacgattcgttccgcttactcgctgacgacagcgcaaaccggcttattgaccaccctgccat

SEQ ID NO: 673662 - DNA, 75 bp, synthetic construct
  source 1..75: mol_type = other DNA
ggcgaagtcaacaacatgcaaatttgagtacctcgcgcgccttacatactcggggtatctggcgttcgccgcttg

SEQ ID NO: 673663 - DNA, 75 bp, synthetic construct
  source 1..75: mol_type = other DNA
tggctttgaacggttttggctggcaaggcgcgttgctcatgctgatgtgttttcctctgctggctctttttttat

SEQ ID NO: 673664 - DNA, 75 bp, synthetic construct
  source 1..75: mol_type = other DNA
atgtcgggttcttcagacggtgaaggtgagagggttattgatcaccaagtccttgccgatttttgttgctgttca

SEQ ID NO: 673665 - DNA, 75 bp, synthetic construct
  source 1..75: mol_type = other DNA
tccatgaaggtgttccggcccgccagtccagtatgggaggcacagatgtgcgtcgcgcgctggataaagatattc

SEQ ID NO: 673666 - DNA, 75 bp, synthetic construct
  source 1..75: mol_type = other DNA
tttcgatctgtctgaagacgcctcaactgaaaccgcaatggtcttcggtgaactgtatcgccatggcgctgagtg

SEQ ID NO: 673667 - DNA, 75 bp, synthetic construct
  source 1..75: mol_type = other DNA
ctttgacctgtcagaagatgcctctactgaaaccgcaatgattttcggtgaactgtatcgccatggcgcggaatg

SEQ ID NO: 673668 - DNA, 75 bp, synthetic construct
  source 1..75: mol_type = other DNA
tctaattcatttccttcttcatattcacatgatttatttggtttggttgaagcatatagaaatccagcgtattcg

SEQ ID NO: 673669 - DNA, 75 bp, synthetic construct
  source 1..75: mol_type = other DNA
cccggtttaatattcacccgtcctgcccaggaggcctggacatgcaacgatggctctgtccactggaaaaaactc

SEQ ID NO: 673670 - DNA, 75 bp, synthetic construct
  source 1..75: mol_type = other DNA
cgggcggttattacgtttatcacgcggtggttgattactttaaagcgggtaacaccatcacggatgaacagatca

SEQ ID NO: 673671 - DNA, 75 bp, synthetic construct
  source 1..75: mol_type = other DNA
tttttgattaaatgttttagtggggatggttacgttctttattacaaaagaatagaaatcagcgcaaataaacag

SEQ ID NO: 673672 - DNA, 75 bp, synthetic construct
  source 1..75: mol_type = other DNA
ggtcagggcgttaccatgaccgtgatgtgggcgctggaagctgataccgtagaatatggtgaatacctgaccggc

SEQ ID NO: 673673 - DNA, 75 bp, synthetic construct
  source 1..75: mol_type = other DNA
ctatgtactgaatgatgccgggttgtttactgtgctggtgttggtgcaaaacctggtcggcacagtggcatcggc

SEQ ID NO: 673674 - DNA, 75 bp, synthetic construct
  source 1..75: mol_type = other DNA
gaagtttaaagctgttggccagggttttgccggtggtctgtcagcgcttgcttcccagcacggcgtcaatgtcta

SEQ ID NO: 673675 - DNA, 75 bp, synthetic construct
  source 1..75: mol_type = other DNA
agtctcgcggacttggtcgcacgtgtcgaactggttgcagccaagcagcgtgaggttgagaaagtaaccagcaga

SEQ ID NO: 673676 - DNA, 75 bp, synthetic construct
  source 1..75: mol_type = other DNA
aaaaaaatgaaggatggattttacagggagatattcataatggatattattaatctcacgttacaggaatggttt

SEQ ID NO: 673677 - DNA, 75 bp, synthetic construct
  source 1..75: mol_type = other DNA
ttatttgatttgattgaagcatatagaaatccaacgtattcgtatttacagaacaatattatcaatagatatata

SEQ ID NO: 673678 - DNA, 75 bp, synthetic construct
  source 1..75: mol_type = other DNA
cattcttactaaaacaacctttggacgaaaaatttatatcactggtggtaataaagaagcggcaatttattcagg

SEQ ID NO: 673679 - DNA, 75 bp, synthetic construct
  source 1..75: mol_type = other DNA
ccagtcctggcggttagcgggcgtgtggcggcgggcgattaacctgatgacggaaagcggcgaactgttaacgct

SEQ ID NO: 673680 - DNA, 75 bp, synthetic construct
  source 1..75: mol_type = other DNA
cgttatgcggtggattatgcggcaatgaacgaccacaggttgtggctcaagggattcgcctcgggcgtttcacgg

SEQ ID NO: 673681 - DNA, 75 bp, synthetic construct
  source 1..75: mol_type = other DNA
tctccgcacagggaaagggcttgtttttgctggataaaaacgacaagccgctcgggaatgctattttgtcctcgg

SEQ ID NO: 673682 - DNA, 75 bp, synthetic construct
  source 1..75: mol_type = other DNA
ccatgaaggatatgtgcagtccggatatgaaagtaacgttccgcccgaataaaaaggaccctcgttatgacgatc

SEQ ID NO: 673683 - DNA, 75 bp, synthetic construct
  source 1..75: mol_type = other DNA
tgatgcctttctggcgctggggaatggagaatttctctatatacctattcctatctggatattaatcatcttatt

SEQ ID NO: 673684 - DNA, 75 bp, synthetic construct
  source 1..75: mol_type = other DNA
ggatcacttttcatccgtcgttgacaggtattaacacagcgctgcagctggcgcaggctaacacggcattcatcc

SEQ ID NO: 673685 - DNA, 75 bp, synthetic construct
  source 1..75: mol_type = other DNA
tcgtatggactcctacgtggatctgctgcaatcccacggcggcagcatgatcatgctggcgaaaggtaaccgcag

SEQ ID NO: 673686 - DNA, 75 bp, synthetic construct
  source 1..75: mol_type = other DNA
cgtggttgatggtaaccacatgctggccggtcagaacctgaaattcaacgttgaagttgtggcgattcgcgaagc

SEQ ID NO: 673687 - DNA, 75 bp, synthetic construct
  source 1..75: mol_type = other DNA
ttgaacagcgcatcgatctgaatcaactgttgatccagcatcccagcgcgacttacttcgtcaaagcaagtggtg

SEQ ID NO: 673688 - DNA, 75 bp, synthetic construct
  source 1..75: mol_type = other DNA
cagaagcagaagccaagctctccagcttaaaccaccgcaagaagcaaatccgcaacagaattactcagggacgcg

SEQ ID NO: 673689 - DNA, 75 bp, synthetic construct
  source 1..75: mol_type = other DNA
ccctttgcagtaaaagaaccctgttacagcaatgccgctgtggaaaagcttccattgcccacacaggacagccgg

SEQ ID NO: 673690 - DNA, 75 bp, synthetic construct
  source 1..75: mol_type = other DNA
atcgcttcaattggtcagggcgttaccatgaccgtgatgtgggcgctggaagctgataccgtagaatacggtgaa

SEQ ID NO: 673691 - DNA, 75 bp, synthetic construct
  source 1..75: mol_type = other DNA
aagaatggcgccgattttggcaagctggcgaagaaacattccatttgcccgtcaggcaaacgcggcggtgattta

SEQ ID NO: 673692 - DNA, 75 bp, synthetic construct
  source 1..75: mol_type = other DNA
atgctaaaatcgccgcctgacaattattcactcaaggcacgatcatggcaaaaaacagcagcagcactgcatatc

SEQ ID NO: 673693 - DNA, 75 bp, synthetic construct
  source 1..75: mol_type = other DNA
ctcttgtccggtactggagccaaccggtccgctgcatacccagttcgggtatcacatcattaaggtgctttaccg

SEQ ID NO: 673694 - DNA, 75 bp, synthetic construct
  source 1..75: mol_type = other DNA
gcagcgttacccgcgcacgccgggcaacatggcggcagtgtttaaatatatcgcctcactggcggatgaactgcg

SEQ ID NO: 673695 - DNA, 75 bp, synthetic construct
  source 1..75: mol_type = other DNA
tttctgtatccataaatgcaaaagtattttgtatgcgtggttttaaatttattgatggtgaaggtgatgctgcca

SEQ ID NO: 673696 - DNA, 75 bp, synthetic construct
  source 1..75: mol_type = other DNA
ccggtgctggaaccaaccggaccgctgcatacccagttcggttaccacatcattaaggtgctataccgtaactaa

SEQ ID NO: 673697 - DNA, 75 bp, synthetic construct
  source 1..75: mol_type = other DNA
gacaagtcatgatacctaaagaaaatggcagttggctttacctgattgacctagaacacgcattacgcgtcgctg

SEQ ID NO: 673698 - DNA, 75 bp, synthetic construct
  source 1..75: mol_type = other DNA
gccacgatggcgatatgcccaattatggtttcctttagcgtggcagcgatccattcgctaatgaagctgcgctgc

SEQ ID NO: 673699 - DNA, 75 bp, synthetic construct
  source 1..75: mol_type = other DNA
ttatgaggcgctgaaaagtccatcgctgaaacagacacaacatctgacggtcatgctgcttgatatcgactattt

SEQ ID NO: 673700 - DNA, 75 bp, synthetic construct
  source 1..75: mol_type = other DNA
ggcgctactcagcgattttttccgaatgcgccgtaaggaaatcaaagcgcagaaaaaagcgcaatccgcgacaga

SEQ ID NO: 673701 - DNA, 75 bp, synthetic construct
  source 1..75: mol_type = other DNA
cgacatgatcccaccgcacatgcagaaatcatggctctgcggcagggcggtctggtgatgcaaaattatcgtctg

SEQ ID NO: 673702 - DNA, 75 bp, synthetic construct
  source 1..75: mol_type = other DNA
gtatgcgccggggcagtcagctttgagacacgctttatcttgttataatacgggttcactaaccgccggatttac

SEQ ID NO: 673703 - DNA, 75 bp, synthetic construct
  source 1..75: mol_type = other DNA
agagcttaaggaagagaaccggaggtacaaacaacagtttgtgatctggcaatacaatgcatacaaacatggaat

SEQ ID NO: 673704 - DNA, 75 bp, synthetic construct
  source 1..75: mol_type = other DNA
taaggaggacggcgtgtggatacctgacgccttcccgcgcgagaagaaacgccatcaccgcaggggcaaaaagaa

SEQ ID NO: 673705 - DNA, 75 bp, synthetic construct
  source 1..75: mol_type = other DNA
tggtgccgctggatatctggaacgaggacggcagcgtgcgcacattgtccgggcaggacagcggtaatacggaca

SEQ ID NO: 673706 - DNA, 75 bp, synthetic construct
  source 1..75: mol_type = other DNA
tggtgccactggacatctggaacgaggacggcagcgtgcgcacattatccgggcaggacagcggtaatacggata

SEQ ID NO: 673707 - DNA, 75 bp, synthetic construct
  source 1..75: mol_type = other DNA
tgtgtgctgatttcgaccttcgcggtcagcgcatcgtcgttgttctatgttcgctatgtgctgaatgacaccggt

SEQ ID NO: 673708 - DNA, 75 bp, synthetic construct
  source 1..75: mol_type = other DNA
cgcgggattgccgcttcattaacctttgtctgcctggcatttctgataggaccgagcattaagaactccagcccg

SEQ ID NO: 673709 - DNA, 75 bp, synthetic construct
  source 1..75: mol_type = other DNA
gtgggcactggaagctgataccgtagaatacggtgaatacctgaccggcgtgcgaattgaagggctcacctattc

SEQ ID NO: 673710 - DNA, 75 bp, synthetic construct
  source 1..75: mol_type = other DNA
gcgttctgcgcctctctcatatccacaataacctgtggccggagggctctgaaattgaatacgacggcgagccag

SEQ ID NO: 673711 - DNA, 75 bp, synthetic construct
  source 1..75: mol_type = other DNA
gctttggacgttttgggcaggtgattggtcgtttgttgatggcaaataaaatgcgcattactgtgctggagcggg

SEQ ID NO: 673712 - DNA, 75 bp, synthetic construct
  source 1..75: mol_type = other DNA
aacatttacacgtaacagctggcaaaacccacttggaatgctgccacgatcggaattacagcgcgtaggttatag

SEQ ID NO: 673713 - DNA, 75 bp, synthetic construct
  source 1..75: mol_type = other DNA
actggctcagagccacgcccgccgcgcagacagcaagaaacaggtagccgtggtgccactggacatctggaacga

SEQ ID NO: 673714 - DNA, 75 bp, synthetic construct
  source 1..75: mol_type = other DNA
gggcgtgagttcagcggaggccggaacgggcagacaacccggctccgctttaaggaggatggcgtgtggatacct

SEQ ID NO: 673715 - DNA, 75 bp, synthetic construct
  source 1..75: mol_type = other DNA
tgattttgtccgcgatcatcgaggtgtgtatgatccggaagcccgttacctcgccggtaatccctggtatcccgt

SEQ ID NO: 673716 - DNA, 75 bp, synthetic construct
  source 1..75: mol_type = other DNA
gcaatatctgcgagtgctgttcgtcgcgggggccgctgttctggtcacccgcatgatgctgggcgataacgctga

SEQ ID NO: 673717 - DNA, 75 bp, synthetic construct
  source 1..75: mol_type = other DNA
cagatattcgcctggtggcatttatgcaatatctgcgagtgctgttcgtcgcgggggccgctgttctggtcaccc

SEQ ID NO: 673718 - DNA, 75 bp, synthetic construct
  source 1..75: mol_type = other DNA
tcccgatgctggcgggcgcagtgctccagtctggtcagctcatcaccatcgaactcccggaatggctgcttgcga

SEQ ID NO: 673719 - DNA, 75 bp, synthetic construct
  source 1..75: mol_type = other DNA
tttaccggcagcaacgatgattgcccgtgaaattatcatctccgcgttgcgcgaatggatggctgaattgggtaa

SEQ ID NO: 673720 - DNA, 75 bp, synthetic construct
  source 1..75: mol_type = other DNA
gtggcgtccgaacatttgggttgagtacgccggtattgcacttttctttgtggctgcggtactgactctgtggtc

SEQ ID NO: 673721 - DNA, 75 bp, synthetic construct
  source 1..75: mol_type = other DNA
tgatcgccgggatcatcttcagtatgcgcggggttaccctgcaactcccccgctccgcttttctcgccgcgcagg

SEQ ID NO: 673722 - DNA, 75 bp, synthetic construct
  source 1..75: mol_type = other DNA
tacattttgctaccatcgtgcctggcgcttagtgctggcatcatgctgatgctaatgaatttgaatcagggatga

SEQ ID NO: 673723 - DNA, 75 bp, synthetic construct
  source 1..75: mol_type = other DNA
atgaagaaaaaacaaatgaaattgtaaaaaacaatccgggttatgtcgttaagatttttgaagaaaagatggtta

SEQ ID NO: 673724 - DNA, 75 bp, synthetic construct
  source 1..75: mol_type = other DNA
gctggggagtgttgctgccaggattgctgattgcagggctgatgtatgcggatttatcgccggatcagtggcgga

SEQ ID NO: 673725 - DNA, 75 bp, synthetic construct
  source 1..75: mol_type = other DNA
aaacctcactggttcgattctcaccacgctggccgtcaactggccgatcgtgcttgcaattttactggtgacgtt

SEQ ID NO: 673726 - DNA, 75 bp, synthetic construct
  source 1..75: mol_type = other DNA
gcatgatgctgggcgataacgctgaagcggttaaccagcatatcgtctggttcccgccagtgagcattaatctcc

SEQ ID NO: 673727 - DNA, 75 bp, synthetic construct
  source 1..75: mol_type = other DNA
tatggcgatgcaaaccctgcgcctgttcagtattttgctgacggggccagccattgcacggtttatttcaaccta

SEQ ID NO: 673728 - DNA, 75 bp, synthetic construct
  source 1..75: mol_type = other DNA
aaatggtggcgctggcctggctgttatggcgtccgaacatttgggttgagtacgctggtattgcacttttctttg

SEQ ID NO: 673729 - DNA, 75 bp, synthetic construct
  source 1..75: mol_type = other DNA
cctgtagggttaagaagataaatggagaaggtattataacgttaagacccagaatatctttcgttaacgatgacg

SEQ ID NO: 673730 - DNA, 75 bp, synthetic construct
  source 1..75: mol_type = other DNA
gagccacgatttgaacgtgatggcctgcttattgaggggcaaagaacaaactacatgctcaattcggaaagccct

SEQ ID NO: 673731 - DNA, 75 bp, synthetic construct
  source 1..75: mol_type = other DNA
gcgcaagcgatatagttacagttccaattaagaataatctttataatcttccttttacggttctttgtgaggtac

SEQ ID NO: 673732 - DNA, 75 bp, synthetic construct
  source 1..75: mol_type = other DNA
ccatcccattctcctgcagcacccttttttatccttaccttcccgcagcactaattatcaacaacttaccatcat

SEQ ID NO: 673733 - DNA, 75 bp, synthetic construct
  source 1..75: mol_type = other DNA
acatggtgggcgggtggagtatgttacctgtgaatttctaagctgcctgtatggcagtgaaccatcaacatccac

SEQ ID NO: 673734 - DNA, 75 bp, synthetic construct
  source 1..75: mol_type = other DNA
tgcctgtacggcagtgaactcaaatactacacgtttagcccgttgttaataaagcaaaaccatcccattctcctg

SEQ ID NO: 673735 - DNA, 75 bp, synthetic construct
  source 1..75: mol_type = other DNA
agatttacgtgatatttctgttaaaggtctggtagatatcggttttgatggctacgctgtcggcggtctggctgt

SEQ ID NO: 673736 - DNA, 75 bp, synthetic construct
  source 1..75: mol_type = other DNA
tgctgtatcacaaacagttacggcattacgttttgctaccatcgtgcctggcgcttattgctggcatcatgctga

SEQ ID NO: 673737 - DNA, 75 bp, synthetic construct
  source 1..75: mol_type = other DNA
tccttgattgggttgaggataatataaatatgcctatctctcagactgatgttgttaaaaaatcagggtatagtc

SEQ ID NO: 673738 - DNA, 75 bp, synthetic construct
  source 1..75: mol_type = other DNA
atcggttttgatggctacgctgtcggcggtctggctgtgggtgagccgaaagcagatatgcaccgtattctggag

SEQ ID NO: 673739 - DNA, 75 bp, synthetic construct
  source 1..75: mol_type = other DNA
ctgcacgatttcatgcagtggaaaggcccaatccttaccgattctggcggcttccaggttttcagcctcggcgat

SEQ ID NO: 673740 - DNA, 75 bp, synthetic construct
  source 1..75: mol_type = other DNA
cctacggtaccgtaaaagggatgacgccggaagaagttgaagccactggcgcgcaaattattctcggtaacacgt

SEQ ID NO: 673741 - DNA, 75 bp, synthetic construct
  source 1..75: mol_type = other DNA
accttaacttacttaagacctttgatgcgttaatggatgagggaagcgtgactcgggctgcgcagcgactttccc

SEQ ID NO: 673742 - DNA, 75 bp, synthetic construct
  source 1..75: mol_type = other DNA
gggaaatggcgggcgatgccttcgcagaacgcaacggctgcggttttacctttggcgacggttgccacggttcgg

SEQ ID NO: 673743 - DNA, 75 bp, synthetic construct
  source 1..75: mol_type = other DNA
gcgccgccacgctcaatcagggaacacgtctgtgctctcatgacgatacacaaaaaatttacgcttatctttgcc

SEQ ID NO: 673744 - DNA, 75 bp, synthetic construct
  source 1..75: mol_type = other DNA
cagccagatgatgtgcgcaaagccgcgcaggaaatcgtaaatagtggtaaggccaaacgggttgttgtttctctt

SEQ ID NO: 673745 - DNA, 75 bp, synthetic construct
  source 1..75: mol_type = other DNA
ccaccgcagcgcatatcgaagccatgctgccgcatgtccgccaggctgacgttgatgaatttctggcaacaaacg

SEQ ID NO: 673746 - DNA, 75 bp, synthetic construct
  source 1..75: mol_type = other DNA
gaccgttttgtcattccaaccagtcatcgggaaatggcgggcgatgcctttgctgaacgcaacggctgcggtttt

SEQ ID NO: 673747 - DNA, 75 bp, synthetic construct
  source 1..75: mol_type = other DNA
tcagtgatcgaggaagccctgaaacaaggtattccacaaaatgtgattgacgctgcccagcgttcgccagtctac

SEQ ID NO: 673748 - DNA, 75 bp, synthetic construct
  source 1..75: mol_type = other DNA
aaattccggcagacaaaccgcgttacctgatgggcgttggtaaaccagaagacctggttgaaggcgtacgtcgcg

SEQ ID NO: 673749 - DNA, 75 bp, synthetic construct
  source 1..75: mol_type = other DNA
cgcagcctttacagcgcactgcaggtctgtgcctgcgaagcggacattatcgcactggtacttaatgcgaacgca

SEQ ID NO: 673750 - DNA, 75 bp, synthetic construct
  source 1..75: mol_type = other DNA
atgggatatatcacatatgttacagatcaacgacccggtgaaccagatatcctgaccgggaacacgtttgctgat

SEQ ID NO: 673751 - DNA, 75 bp, synthetic construct
  source 1..75: mol_type = other DNA
cgggtgcgccagcagctgcctgtcggagtcgggcctgacgaccggatgccgtcaggcagccgggagccgaagcgg

SEQ ID NO: 673752 - DNA, 75 bp, synthetic construct
  source 1..75: mol_type = other DNA
gtgagtaaactctcagtcagaggtgactcacatgacaaaatttgtatcaaccagcaaaaagtacgtaaacagcat

SEQ ID NO: 673753 - DNA, 75 bp, synthetic construct
  source 1..75: mol_type = other DNA
cgcattctggagcatgtgtgtccgcaaattccggcagacaaaccgcgttacctgatgggcgttggtaaaccggaa

SEQ ID NO: 673754 - DNA, 75 bp, synthetic construct
  source 1..75: mol_type = other DNA
gatggagtccgcgtcgcgtactggaaaccggtctgcgcacgtcaacattctgctgcgccggattgattaatggtg

SEQ ID NO: 673755 - DNA, 75 bp, synthetic construct
  source 1..75: mol_type = other DNA
atggtttggtgataaaaaatgactcagctaattgggtgacgatttcggatgtcaagctaataatgtcaaagtcaa

SEQ ID NO: 673756 - DNA, 75 bp, synthetic construct
  source 1..75: mol_type = other DNA
tgttttaccggccagcgggtattgctccggtaaataaagcgacatttaaaaagttactggtaaatcgcagtggca

SEQ ID NO: 673757 - DNA, 75 bp, synthetic construct
  source 1..75: mol_type = other DNA
gcaaccattaaattaccaacagtaagtacttctgctttaaacaaggcaggggatactgctggtcgcactgcattt

SEQ ID NO: 673758 - DNA, 75 bp, synthetic construct
  source 1..75: mol_type = other DNA
gctggggagtgttgctgccgggattgctgattgcagggctgatgtatgcggatttatcgccggatcaatggcgga

SEQ ID NO: 673759 - DNA, 75 bp, synthetic construct
  source 1..75: mol_type = other DNA
gaatttacccgtggcgatctggatattctggttgctaccgacgttgctgctcgtggtctgcatattccggcagtg

SEQ ID NO: 673760 - DNA, 75 bp, synthetic construct
  source 1..75: mol_type = other DNA
gcgattgccgatcgcaaggtgaatcaaccgcgtgccttaattatggcaccgacgcgtgaacttgccgtgcagatc

SEQ ID NO: 673761 - DNA, 75 bp, synthetic construct
  source 1..75: mol_type = other DNA
ctaccgaagagcatcttcagatgattttgccggatgttcgtcaggctgatattgacgaactgtatgcggtatcgc

SEQ ID NO: 673762 - DNA, 75 bp, synthetic construct
  source 1..75: mol_type = other DNA
aaagaactgatcgacgccggtaaagaactgccgcagtacatcaaagatcacccgatctactacgcaggtccggcc

SEQ ID NO: 673763 - DNA, 75 bp, synthetic construct
  source 1..75: mol_type = other DNA
atgggaagaccaagaaaaaacaaaaaagataacgcactgccgccacgtgttagatcgaatggttacagttatgta

SEQ ID NO: 673764 - DNA, 75 bp, synthetic construct
  source 1..75: mol_type = other DNA
ggaaatcaatcatggaagatgaaaccgcaaaacaggattttattaacacttacagaaagggcgttgcagggttaa

SEQ ID NO: 673765 - DNA, 75 bp, synthetic construct
  source 1..75: mol_type = other DNA
atcagtccgaacagcttcaagcccgaatggtccatgacattgctgacagattcatcggtgccggcttccgccaac

SEQ ID NO: 673766 - DNA, 75 bp, synthetic construct
  source 1..75: mol_type = other DNA
ccaccaacatcaagctggcatggactgagaacggcgaacgccgcaacgccatcagcccaaacagcttcaagtcgg

SEQ ID NO: 673767 - DNA, 75 bp, synthetic construct
  source 1..75: mol_type = other DNA
gcgggacaaatattgcggtctgcgtcttttctgacaggaaccattttactgagtggagctgctttatttttcctt

SEQ ID NO: 673768 - DNA, 75 bp, synthetic construct
  source 1..75: mol_type = other DNA
tccgcctgcgttacctggacatttttatgtcagatgagagtatactgaacaggctgttgacacatttatgggcgt

SEQ ID NO: 673769 - DNA, 75 bp, synthetic construct
  source 1..75: mol_type = other DNA
atgctctcagtgaaaatgttgatgatattaacaggatgaatactctgcttggtaaccttattgcccagcgtcctg

SEQ ID NO: 673770 - DNA, 75 bp, synthetic construct
  source 1..75: mol_type = other DNA
cattgctgaaagtactgaacaatctaaacatcgtgattatcgacgtacccgaaaaaatgccattgcgaaatgctg

SEQ ID NO: 673771 - DNA, 75 bp, synthetic construct
  source 1..75: mol_type = other DNA
caatcaaattattaataactgcctttctgacagaaaacctgtaaaatttatttatgctgtcagagatggtatttt

SEQ ID NO: 673772 - DNA, 75 bp, synthetic construct
  source 1..75: mol_type = other DNA
attaatcgttctgagtcttcgggtagtaatatttatagcatgctgttgcagtatggcagaatattgccatctttt

SEQ ID NO: 673773 - DNA, 75 bp, synthetic construct
  source 1..75: mol_type = other DNA
ccgtttttcagcatatccagagcctgccccacgggcagcagaaagaagccttactggcgtcagccgcgctgcccc

SEQ ID NO: 673774 - DNA, 75 bp, synthetic construct
  source 1..75: mol_type = other DNA
gctggggattggtattttactggttgtgaaatgcgccaaccttccagcgatggttttagctacgctacttggcgc

SEQ ID NO: 673775 - DNA, 75 bp, synthetic construct
  source 1..75: mol_type = other DNA
agtaatactatcttggatagttctttttataaaaagaaaaaaactcccattaaactcaaaagcgatacttgctta

SEQ ID NO: 673776 - DNA, 75 bp, synthetic construct
  source 1..75: mol_type = other DNA
ttccctggccaaagccgggcgtaatcgtggcacgacgattcaggacattgccgacagcctggtggacgaggccag

SEQ ID NO: 673777 - DNA, 75 bp, synthetic construct
  source 1..75: mol_type = other DNA
ctttggccgtcgactgcctgacacgctgccactgctggcattcgacaaacaacctttggataaaccgttagaaat

SEQ ID NO: 673778 - DNA, 75 bp, synthetic construct
  source 1..75: mol_type = other DNA
gcactgacccggtcagaggcggtattacagaaaagccaggagataactgaaggtgcagattcggcactgagaaac

SEQ ID NO: 673779 - DNA, 75 bp, synthetic construct
  source 1..75: mol_type = other DNA
gggttgtttaatgcacttagtggaaatgttgacgatattagcaggatgaatactctgcttagcaatcttattgcc

SEQ ID NO: 673780 - DNA, 75 bp, synthetic construct
  source 1..75: mol_type = other DNA
agggcggagcgccaccttggattttggcaatcccggccagttggacgcaggaggcgtggtcactcgtggtgccgg

SEQ ID NO: 673781 - DNA, 75 bp, synthetic construct
  source 1..75: mol_type = other DNA
acgctgatattgccgctgaccactcctgcaatgatggctgactttagcgccgtaggcggattactgctgttggca

SEQ ID NO: 673782 - DNA, 75 bp, synthetic construct
  source 1..75: mol_type = other DNA
aaatgttcccggtagtcaacatgcttccagcactgcttctggcaatgcctctttccgccgcctggaccgcctggt

SEQ ID NO: 673783 - DNA, 75 bp, synthetic construct
  source 1..75: mol_type = other DNA
accgaaggtggacgggccgcagagtgcgatagtgacggggccagcgggagaggagattttctgcgacgaacatgg

SEQ ID NO: 673784 - DNA, 75 bp, synthetic construct
  source 1..75: mol_type = other DNA
tgatcacaaccgtaacggcaggggcagcactggcacagcagcgttttgtcgtggcagataataccccctgtaaag

SEQ ID NO: 673785 - DNA, 75 bp, synthetic construct
  source 1..75: mol_type = other DNA
cgaagtggatgctgttaccggcgacagtacgccggttagcgttctgggcattattgctgttgaggccggtgctgc

SEQ ID NO: 673786 - DNA, 75 bp, synthetic construct
  source 1..75: mol_type = other DNA
atgcttaatccgttgatcctcaatattcaccgtttacttcagcgtaaaaaaatatcaattcctacagttgggcag

SEQ ID NO: 673787 - DNA, 75 bp, synthetic construct
  source 1..75: mol_type = other DNA
taccttagtaaggcttatagcgatattctggttttttgggtggagggaagacaaataacacttgatgtggcaata

SEQ ID NO: 673788 - DNA, 75 bp, synthetic construct
  source 1..75: mol_type = other DNA
aaaaatgggcaccgggcgtgatgaacacaaaattgtgattactccggcacgctatgtccgtgatgaggagtttct

SEQ ID NO: 673789 - DNA, 75 bp, synthetic construct
  source 1..75: mol_type = other DNA
ccagttaacgctggcctggggagccgcgctgatattaccgctaacgacaccggcgatgatggcggactttagcgc

SEQ ID NO: 673790 - DNA, 75 bp, synthetic construct
  source 1..75: mol_type = other DNA
atgcttaatccgttgatcctcaacatttaccgtttatttcagcgtaaaaaaacatcaattcctacagttgggcag

SEQ ID NO: 673791 - DNA, 75 bp, synthetic construct
  source 1..75: mol_type = other DNA
ccagcagggcatgttctacgtgttagcctggttgaccgtgaatgtcagaaggtgatttgtgaaccgctgggccgt

SEQ ID NO: 673792 - DNA, 75 bp, synthetic construct
  source 1..75: mol_type = other DNA
tctgatatccggtcagaacgtactggtgagctattacatatcaatgctcgtcgttttcgctataccacgggcaca

SEQ ID NO: 673793 - DNA, 75 bp, synthetic construct
  source 1..75: mol_type = other DNA
tgactctgcatttgcattgactattgaaggtgaagctatgactacaagttcaggtattagctttcccagaggatc

SEQ ID NO: 673794 - DNA, 75 bp, synthetic construct
  source 1..75: mol_type = other DNA
atgaaaagaaaatctttctctgcaaatgtgaaatggaattggttggcattgtctgtcgcactgatggccccgact

SEQ ID NO: 673795 - DNA, 75 bp, synthetic construct
  source 1..75: mol_type = other DNA
caccacaatccttgagatccgtccccggaaaaggctgaaacatgcaggtgatggtggcaacagcggcggtctgct

SEQ ID NO: 673796 - DNA, 75 bp, synthetic construct
  source 1..75: mol_type = other DNA
gcacataggcagtgtgaaccgccccgggtttcctggagagtgttttatctgtgaattcaggctgccagatcatcg

SEQ ID NO: 673797 - DNA, 75 bp, synthetic construct
  source 1..75: mol_type = other DNA
cgtccacatccggaacaaagctatcgcttctgccttggactcctgaaccttcataaaaatacagtaaagccagac

SEQ ID NO: 673798 - DNA, 75 bp, synthetic construct
  source 1..75: mol_type = other DNA
ccctaaacccaatgtatcctaatattcttgttagaaatgaagatgttagtattttggcaaccgcagtttaccttg

SEQ ID NO: 673799 - DNA, 75 bp, synthetic construct
  source 1..75: mol_type = other DNA
gtggatgctggtatgtcgtggaaggtgacggacaccctggcgctgaatgctgctgtgaataatgtgctcaacaag

SEQ ID NO: 673800 - DNA, 75 bp, synthetic construct
  source 1..75: mol_type = other DNA
aactggcagatcaccgaagaagttgcctcatggctgggagctcgctatcgcgataaaactccacgcttcacccag

SEQ ID NO: 673801 - DNA, 75 bp, synthetic construct
  source 1..75: mol_type = other DNA
actgaaaactcagcaggaaaaatcaaccccaccactgcagccattcgtcgcgaatacaagcagacatggaaaacg

SEQ ID NO: 673802 - DNA, 75 bp, synthetic construct
  source 1..75: mol_type = other DNA
gcggctatctggaatgaccaaacggtggatgctgataaccgcattgcctggtttgaagcgcggaccatagcaggt

SEQ ID NO: 673803 - DNA, 75 bp, synthetic construct
  source 1..75: mol_type = other DNA
ttgatgcagataaccgcattgcctggtttgaagcgcggaccatagcaggttatccggtgctggtgagtgaagaag

SEQ ID NO: 673804 - DNA, 75 bp, synthetic construct
  source 1..75: mol_type = other DNA
acaggtgaaactttccggcagaaaagctggtcggtatttgctgaggatgagtggcatctcacggatgcacttgcg

SEQ ID NO: 673805 - DNA, 75 bp, synthetic construct
  source 1..75: mol_type = other DNA
agagatgaaactgaaaaacgtgctggcggagagttataccgtttccgatgacggccttacttacaccgtgaaatt

SEQ ID NO: 673806 - DNA, 75 bp, synthetic construct
  source 1..75: mol_type = other DNA
ctttcggtataccacgggcacacgggctgcccgtgaaggttttggcgagttggtaatagcggaactgcttgacca

SEQ ID NO: 673807 - DNA, 75 bp, synthetic construct
  source 1..75: mol_type = other DNA
cgttgacggataatgaacttcaagcgtttaacgaggcggttgtacgagcttatgaaaagagcttaattaccatcg

SEQ ID NO: 673808 - DNA, 75 bp, synthetic construct
  source 1..75: mol_type = other DNA
aaatcacatgcccaagatattgtcaatcaggatggttcaccattgcaaaagttggttgtgaaccgccccggaaat

SEQ ID NO: 673809 - DNA, 75 bp, synthetic construct
  source 1..75: mol_type = other DNA
tggcttccaattggcaccatacgctcaggcctttgtcggggtacttgtcgattcagagagggacgcgcatcgagg

SEQ ID NO: 673810 - DNA, 75 bp, synthetic construct
  source 1..75: mol_type = other DNA
agcagttaatgagggggctgttcgagcttatgaaaagagcttaattacgatagccgagttggctatgacactctg

SEQ ID NO: 673811 - DNA, 75 bp, synthetic construct
  source 1..75: mol_type = other DNA
cattatcgcggttgcagatgtaatcatgcgttgtgcaaaacgtcgaggagagtttagtcagcagggagcaataac

SEQ ID NO: 673812 - DNA, 75 bp, synthetic construct
  source 1..75: mol_type = other DNA
tctcaggtttatcagggcgtggttgaaaacctggccagcgagcaggccgcccgtatggtggcgatgaaagccgcg

SEQ ID NO: 673813 - DNA, 75 bp, synthetic construct
  source 1..75: mol_type = other DNA
ggcgtgcggatgttctatacgggctggtcggcttcgacgggtgaagctgactgggcgttatcgccgctgtttgcc

SEQ ID NO: 673814 - DNA, 75 bp, synthetic construct
  source 1..75: mol_type = other DNA
gcggagagttataccgtttccgatgacggccttacatacaccgtgaaattgcgggaaggaattaaattccaggat

SEQ ID NO: 673815 - DNA, 75 bp, synthetic construct
  source 1..75: mol_type = other DNA
atagtagcatcaagaatgatgtttatttcaccgttgcacaacagtgtttttcccaggccatccactggctgacgc

SEQ ID NO: 673816 - DNA, 75 bp, synthetic construct
  source 1..75: mol_type = other DNA
taccaatacccatctggtagaacagatcccacgctacctgagtgagatggtaagctacgaatgccgtttaattgg

SEQ ID NO: 673817 - DNA, 75 bp, synthetic construct
  source 1..75: mol_type = other DNA
ttcaactccgtgggcggcaatgttgttgcccaggtcacaggcatgggggataacccttccctgtccgaactgatc

SEQ ID NO: 673818 - DNA, 75 bp, synthetic construct
  source 1..75: mol_type = other DNA
atgacaccgaatgacggagtgtcccgtctgcataactccggacaggacagcacatatattgccggcgcggagtta

SEQ ID NO: 673819 - DNA, 75 bp, synthetic construct
  source 1..75: mol_type = other DNA
cccggatctcgtgccaagccaaaatattactggccgcgagttaataacctgcgtcgcttacacgatgacaaatag

SEQ ID NO: 673820 - DNA, 75 bp, synthetic construct
  source 1..75: mol_type = other DNA
ctggaggccagcgatattccgtatcgtcatgaccgccagttgctgcatagcgcgctggaaaaggcattacaggct

SEQ ID NO: 673821 - DNA, 75 bp, synthetic construct
  source 1..75: mol_type = other DNA
gaaagctgaaatggcggatatgccggtagtgacagcggaaatgctgaaacctgacgatatgcagcagacttatgc

SEQ ID NO: 673822 - DNA, 75 bp, synthetic construct
  source 1..75: mol_type = other DNA
agcactgatgttgatgaagaatcacggaacaatggagcttgttgtccctccggagctggcttacggtgatgaggg

SEQ ID NO: 673823 - DNA, 75 bp, synthetic construct
  source 1..75: mol_type = other DNA
gccggatactgcaaacgacgggaggtgttgcactgttattgtggggtggctgtgccggagccggagaaaattcag

SEQ ID NO: 673824 - DNA, 75 bp, synthetic construct
  source 1..75: mol_type = other DNA
ggtctatatcggcaatctgggacgtgaacttagcctaccagcggcgaatctgaaactggaaaataagctggcgat

SEQ ID NO: 673825 - DNA, 75 bp, synthetic construct
  source 1..75: mol_type = other DNA
caaccagctgataacggaaccgagcgtcgcctccgcgatgtttgaataccgttttggtggcaatggcgaactttc

SEQ ID NO: 673826 - DNA, 75 bp, synthetic construct
  source 1..75: mol_type = other DNA
ccgctatcccgtactcagaacgctacggctaccgtccggcgctaatcccccgcccggtcatggccggaacgctcc

SEQ ID NO: 673827 - DNA, 75 bp, synthetic construct
  source 1..75: mol_type = other DNA
caacagggtagtgattcaggacgtactggaagccagtgatgtcccctatcgtcatgaccgccagttgttacataa

SEQ ID NO: 673828 - DNA, 75 bp, synthetic construct
  source 1..75: mol_type = other DNA
caaaagtggatgtctcggcggtgaaagagcggattgtgatccaggaggtactggaggccagcgatattccgtatc

SEQ ID NO: 673829 - DNA, 75 bp, synthetic construct
  source 1..75: mol_type = other DNA
tcaagctggaaaataagctggcgattatggagcagtatgttgggaaaaaggtgattgatgcggtgattgttgggc

SEQ ID NO: 673830 - DNA, 75 bp, synthetic construct
  source 1..75: mol_type = other DNA
aacgacgaaattaacgcctttgctttctttggcggcaacgtggtgctgcactctgccctgttccgttattccgat

SEQ ID NO: 673831 - DNA, 75 bp, synthetic construct
  source 1..75: mol_type = other DNA
ggcgagttgaaattggtgacaagaaatacaccaaatcgcagatcgtcgagatgtatcgggagaagccactggctg

SEQ ID NO: 673832 - DNA, 75 bp, synthetic construct
  source 1..75: mol_type = other DNA
gaaatcattgcggctttgcaggcaatcgacgaccggagagcaaaagacacccccaccgagtcagtagaagagtaa

SEQ ID NO: 673833 - DNA, 75 bp, synthetic construct
  source 1..75: mol_type = other DNA
tcctcgatcatgaaaacagttttgacgttggcctggctgtagccaatggcctgaacgcagatgaggatgacggtc

SEQ ID NO: 673834 - DNA, 75 bp, synthetic construct
  source 1..75: mol_type = other DNA
gccacgatggcgatatgcccaattatggtttcctttagcgtggcagcgatcaattcgctaatgaagcaagttgcg

SEQ ID NO: 673835 - DNA, 75 bp, synthetic construct
  source 1..75: mol_type = other DNA
atgtatcgggagaagccattagcagaaatcattgctgcgttacagacgatagatgaccgacgagagaagacatca

SEQ ID NO: 673836 - DNA, 75 bp, synthetic construct
  source 1..75: mol_type = other DNA
agtcgcgcctccgtttggcaaatgctcatggaaattctacttcgacccgactcgcgggctggacgtcgtcgagtc

SEQ ID NO: 673837 - DNA, 75 bp, synthetic construct
  source 1..75: mol_type = other DNA
tttcgcatgccaattcggttaagacaccgtttcatttctttttgatcaataacgacgaaattaacgcctttgctt

SEQ ID NO: 673838 - DNA, 75 bp, synthetic construct
  source 1..75: mol_type = other DNA
tggttgcaaccctcattgctgctatgaccatcggtcaggtagccccggcgtttgccgatagcgcagacaccttgc

SEQ ID NO: 673839 - DNA, 75 bp, synthetic construct
  source 1..75: mol_type = other DNA
accgttactggcggcagaacctggcaacgcatggtatctcgatctggctaccgatatcgatcttgggcaaaacaa

SEQ ID NO: 673840 - DNA, 75 bp, synthetic construct
  source 1..75: mol_type = other DNA
gcagcgttacccgcgcacaccgggcaacatggcggcagtatttaaatatatcgcctcactggcggatgaactgcg

SEQ ID NO: 673841 - DNA, 75 bp, synthetic construct
  source 1..75: mol_type = other DNA
gtgcagtcgcagagatggagcgggaaaatatgattgaaagaacgcgtgcaggattggcggtggcaagggctaacg

SEQ ID NO: 673842 - DNA, 75 bp, synthetic construct
  source 1..75: mol_type = other DNA
cacgctttccattggtcaggaaatgcagatgggcgactattacgttcgccagctacgcggtagcgcaccattaat

SEQ ID NO: 673843 - DNA, 75 bp, synthetic construct
  source 1..75: mol_type = other DNA
tttttagtgctgggcgctattgagtattttgttctacgctttatctggcgacgctggttctcgctggcggattaa

SEQ ID NO: 673844 - DNA, 75 bp, synthetic construct
  source 1..75: mol_type = other DNA
ttcagggatttgccgtcggcggagaatggggaggcgcagcattgctgtccgttgaaagcgcgccgaaaaataaaa

SEQ ID NO: 673845 - DNA, 75 bp, synthetic construct
  source 1..75: mol_type = other DNA
cattactgcagcactggtatttaatcgagagtttttcccacaagtgagcccggcaatgggaactctcgcagcatt

SEQ ID NO: 673846 - DNA, 75 bp, synthetic construct
  source 1..75: mol_type = other DNA
aaaataaaaaagccttttacagtagcggtgtacaagttggctacggtgtaggtttactgctttcaactggactgg

SEQ ID NO: 673847 - DNA, 75 bp, synthetic construct
  source 1..75: mol_type = other DNA
agccactgacagcgctgatggatcattatctagatactgatgctctggcagacgggctaccgctgtatgtgtcgc

SEQ ID NO: 673848 - DNA, 75 bp, synthetic construct
  source 1..75: mol_type = other DNA
ccaacgattgggtttgtgaaagcgttttgatcgcggttactgggctcaaacccggaaccatcctccgtgccagaa

SEQ ID NO: 673849 - DNA, 75 bp, synthetic construct
  source 1..75: mol_type = other DNA
ataaatctgataactatgagaaattaccaagaaaaccaggattgttatgttttttacccttgcaatttatgactc

SEQ ID NO: 673850 - DNA, 75 bp, synthetic construct
  source 1..75: mol_type = other DNA
gcacagcctggtggtgaagggggacctggcgaggaaggtgagtggcgcgctggggataaaggtggacggggaaat

SEQ ID NO: 673851 - DNA, 75 bp, synthetic construct
  source 1..75: mol_type = other DNA
tggtcatccattcagggggcgtggacatcgtcgggccgaaaatcagtctcaatagcggcggtagtccggggacgc

SEQ ID NO: 673852 - DNA, 75 bp, synthetic construct
  source 1..75: mol_type = other DNA
aaaaagaaagagtggcaatcctgaaaaattcagttgcaagctcgacagcttataaaatggcatctcccggagttc

SEQ ID NO: 673853 - DNA, 75 bp, synthetic construct
  source 1..75: mol_type = other DNA
gctgcactcatcacttactttgccgggaactggcatagcgtcgccatttatttgctggctggatgtctgatttct

SEQ ID NO: 673854 - DNA, 75 bp, synthetic construct
  source 1..75: mol_type = other DNA
ttggccctgccgttaacagtttcggcggcaacgcagtgcggaccattccgctttgatgctggtaatgatggcctc

SEQ ID NO: 673855 - DNA, 75 bp, synthetic construct
  source 1..75: mol_type = other DNA
aacaaagaaggcagcgccatgctgaaaatcttcctcggcagggatgaccatcgtcagctcctgagcgaacaagtc

SEQ ID NO: 673856 - DNA, 75 bp, synthetic construct
  source 1..75: mol_type = other DNA
acttctttttactacggcttcccatggtggattgtaggtgcaggtgttgatgatgttgccagaagtttatttttt

SEQ ID NO: 673857 - DNA, 75 bp, synthetic construct
  source 1..75: mol_type = other DNA
ttagttcccatggatgtaacggatgctgggatgatacttcactgaattttgatcataaagattttctgtggtgtc

SEQ ID NO: 673858 - DNA, 75 bp, synthetic construct
  source 1..75: mol_type = other DNA
agcgggctctcctggctggcatgggcaactcatatccctgttgtactaataagtggttttacgcttcctgtcagt

SEQ ID NO: 673859 - DNA, 75 bp, synthetic construct
  source 1..75: mol_type = other DNA
cgggtgctgtgtattgaccgggatgctcattacggtcaggggtttgtctggaatcacattccctggggagccgaa

SEQ ID NO: 673860 - DNA, 75 bp, synthetic construct
  source 1..75: mol_type = other DNA
gcgatacgtggaaaccgggttatgaaagcctgtgggtgcgccagtcgcgcccgtatgcaggtgacacgtatggcc

SEQ ID NO: 673861 - DNA, 75 bp, synthetic construct
  source 1..75: mol_type = other DNA
taccagatggtacaacaaaagacggcattacaagcgatgatggtcgatcagaaatatttttttctgataaggatg

SEQ ID NO: 673862 - DNA, 75 bp, synthetic construct
  source 1..75: mol_type = other DNA
atgacgatagaaacattctcctggggtattaaggtctccagccagcccacagagggaagcaaagacaccgtcagg

SEQ ID NO: 673863 - DNA, 75 bp, synthetic construct
  source 1..75: mol_type = other DNA
ggatgtcgacattctgaagatcgataaatctttcgttgatgcgctggaatataaaaatgtcacgccgcatatcat

SEQ ID NO: 673864 - DNA, 75 bp, synthetic construct
  source 1..75: mol_type = other DNA
gcaccgacgatgtggaacgttgtaaaaccttctttgaccagggaactgaaatctttcccggggctgaccagaagc

SEQ ID NO: 673865 - DNA, 75 bp, synthetic construct
  source 1..75: mol_type = other DNA
ggcacacattaaatcactggatatctggtttaagggtgatgttgtggaacgttatgattttcgtcagactgcaag

SEQ ID NO: 673866 - DNA, 75 bp, synthetic construct
  source 1..75: mol_type = other DNA
tgatggttggtgcaatgggaatgatcgggattggcatgaaaaaatgaagagctatatctgcgatttcttacgtaa

SEQ ID NO: 673867 - DNA, 75 bp, synthetic construct
  source 1..75: mol_type = other DNA
atgactgtatgtcttattgataaacgtcgacgtgggcaacaaataccatctgttgaaatgccgaatcacacatgg

SEQ ID NO: 673868 - DNA, 75 bp, synthetic construct
  source 1..75: mol_type = other DNA
tcacagcgttattagtatatctacaaataatagcgttatttagtatcattgctagtaatatattatttcttaatg

SEQ ID NO: 673869 - DNA, 75 bp, synthetic construct
  source 1..75: mol_type = other DNA
tctggcgcggaatttaacccacagaaaaatacgttgctggtgttgtcacatgagtcacgcgccctacaggaagtg

SEQ ID NO: 673870 - DNA, 75 bp, synthetic construct
  source 1..75: mol_type = other DNA
cacactttctggttttttaaagagaaaaacccgattgaagtctacaaagttaacgggctgttaagtagcaatgaa

SEQ ID NO: 673871 - DNA, 75 bp, synthetic construct
  source 1..75: mol_type = other DNA
gcgatgctcgaaaaaatgaaggacgaaattctcgggttaccggaagaagagaaacgcgctctggcagcacttcat

SEQ ID NO: 673872 - DNA, 75 bp, synthetic construct
  source 1..75: mol_type = other DNA
ataggttcccgattaaccctgggcgaaaccgattttagctctaacatttttgatggtttctcctataccggtgcg

SEQ ID NO: 673873 - DNA, 75 bp, synthetic construct
  source 1..75: mol_type = other DNA
ttcacagcgcatctcacgcgcatattaacgagagcctttcagtaagcgagcctgagaaatgccgttataggtggc

SEQ ID NO: 673874 - DNA, 75 bp, synthetic construct
  source 1..75: mol_type = other DNA
acactcacgcgcatattaacgagagcctttcagtaagcgagcctgagaaatgccgttataggtggcgacctctct

SEQ ID NO: 673875 - DNA, 75 bp, synthetic construct
  source 1..75: mol_type = other DNA
atattctcagtggtaaggagatcaagctcgataatcagtatttttctgaagaaagtattatgtcggatattaaaa

SEQ ID NO: 673876 - DNA, 75 bp, synthetic construct
  source 1..75: mol_type = other DNA
ctacatttattctttcttacaggctgccagaatcgattaatggtggatattatgttctgaatgatgccaacagtg

SEQ ID NO: 673877 - DNA, 75 bp, synthetic construct
  source 1..75: mol_type = other DNA
caactggtcgcggaagggaaaagccagaccatgaacagccgtcacctgaccggtgatgcggtggatgttgtggct

SEQ ID NO: 673878 - DNA, 75 bp, synthetic construct
  source 1..75: mol_type = other DNA
ttattgttgatccagagattgagcccgctcctggtgaatttgttgttgccaaaaacggcggagatcaggcgacat

SEQ ID NO: 673879 - DNA, 75 bp, synthetic construct
  source 1..75: mol_type = other DNA
gagctgaatacccccatcgaatggggcggggactggcggacgcttaaagacggcccacattttcaattgaagcga

SEQ ID NO: 673880 - DNA, 75 bp, synthetic construct
  source 1..75: mol_type = other DNA
atatttgaatctcgagaagatattatcaagaaaatattatctttttctctcgatgaagttttaccattcttaatg

SEQ ID NO: 673881 - DNA, 75 bp, synthetic construct
  source 1..75: mol_type = other DNA
tgattgcgcagaggtcgggcgatataatttttaccagttccatcgcgggcgtcgttccggttatctgggaaccga

SEQ ID NO: 673882 - DNA, 75 bp, synthetic construct
  source 1..75: mol_type = other DNA
cacaggtttgtaggcctgataagacgcgtaagcgtcgcatcaggcaatggtgctcggatgccggatgcggcgtga

SEQ ID NO: 673883 - DNA, 75 bp, synthetic construct
  source 1..75: mol_type = other DNA
aaccctacgacagcggaaggtgttggcctgtttaatgaactacagcaggcattgattaaagccgctattgagctt

SEQ ID NO: 673884 - DNA, 75 bp, synthetic construct
  source 1..75: mol_type = other DNA
ggcttccagtggtctacttccagatcctacctgaaattgagcggaatgacggtgcaaggcgcgaaaaaactggcg

SEQ ID NO: 673885 - DNA, 75 bp, synthetic construct
  source 1..75: mol_type = other DNA
cttcacgcttaacggacagactctgatgagtctgatggttttctgtacagcctgttccgtggatggtgtccagac

SEQ ID NO: 673886 - DNA, 75 bp, synthetic construct
  source 1..75: mol_type = other DNA
attgacttcggggaggttgatgttgatgatttaacaaaaataaaaggtagcgccacatttaaatttatagattgt

SEQ ID NO: 673887 - DNA, 75 bp, synthetic construct
  source 1..75: mol_type = other DNA
ttacatatctggctctttttcctgcaagtgtatatgcaaaagaggagttatcacaatcagtggattttacgttga

SEQ ID NO: 673888 - DNA, 75 bp, synthetic construct
  source 1..75: mol_type = other DNA
gaggcagggcaggcaccagtatggtttttgctgggagatgccgggttgccgagtatcagcgatcgtctgactggc

SEQ ID NO: 673889 - DNA, 75 bp, synthetic construct
  source 1..75: mol_type = other DNA
accttggctcatatgcaacatgtgatggtgcaaaatatgcgtatgctctagcaaaatatcaagtagaaatatatg

SEQ ID NO: 673890 - DNA, 75 bp, synthetic construct
  source 1..75: mol_type = other DNA
cgccaggtttcacaatatggcatccgcgttggcgcggtgttgccgggtccggtggttaccgccctgctcgacgac

SEQ ID NO: 673891 - DNA, 75 bp, synthetic construct
  source 1..75: mol_type = other DNA
ctgacgtggctgaaaaacagcgggaatatatcgaatccattctatctcgcccaaccaaccagccgcaggacataa

SEQ ID NO: 673892 - DNA, 75 bp, synthetic construct
  source 1..75: mol_type = other DNA
tgccaggaattacctgaagaacgacgggcttaccgccctgggtgagttgaagctgacagggccgcagaaatgggt

SEQ ID NO: 673893 - DNA, 75 bp, synthetic construct
  source 1..75: mol_type = other DNA
gagtatcagcgatcgtctgacaggttatttgaatgcgttggaaaaaaagggattacccatcgcgattgggtgcgg

SEQ ID NO: 673894 - DNA, 75 bp, synthetic construct
  source 1..75: mol_type = other DNA
aacgctgccgaatatgcacgacaggctggggcatcaaaagatacagccggggagcatgcagagaaagcaaaaaaa

SEQ ID NO: 673895 - DNA, 75 bp, synthetic construct
  source 1..75: mol_type = other DNA
agggatgatgtttgataagaaagctcgcttgttaattgcttattcaggtcatgggcgttttggcactcaaaatgg

SEQ ID NO: 673896 - DNA, 75 bp, synthetic construct
  source 1..75: mol_type = other DNA
ataatttatattatattatatcgtatcaaactatccatactcaggaaaaatttaatttttattaaatcaatagta

SEQ ID NO: 673897 - DNA, 75 bp, synthetic construct
  source 1..75: mol_type = other DNA
atataataaagatgatgtacgttattcacagattatttcatctgtgaatttcttttggatgcaacatttaaaagg

SEQ ID NO: 673898 - DNA, 75 bp, synthetic construct
  source 1..75: mol_type = other DNA
ctctgttagtaaaattgctgaacggatttttgaagaaagatgagataaaaaaaagactatattctttcgtgaaaa

SEQ ID NO: 673899 - DNA, 75 bp, synthetic construct
  source 1..75: mol_type = other DNA
cttaacaaaaaaagaaaatatgaagttaaacgtgaagttacagcttttcttgaccctaataatttccctgcaagc

SEQ ID NO: 673900 - DNA, 75 bp, synthetic construct
  source 1..75: mol_type = other DNA
ttatccttgcctttgcttttttactgtctggttgcgatggtgataatggtgaattagccggaacatatatagaaa

SEQ ID NO: 673901 - DNA, 75 bp, synthetic construct
  source 1..75: mol_type = other DNA
gagctgaatactcccattgaatggggcggggactggagttctctgaaagacggaccacatttccagctgaagcga

SEQ ID NO: 673902 - DNA, 75 bp, synthetic construct
  source 1..75: mol_type = other DNA
gcaccaatattactattaatgatggtgacagaattactggagataccgccgatccatcaggaaacctctatggtg

SEQ ID NO: 673903 - DNA, 75 bp, synthetic construct
  source 1..75: mol_type = other DNA
gtaaaaagattgatagcttcggtgactggtcgccacagactgaacatccagctatcactatccagcgcaaagaac

SEQ ID NO: 673904 - DNA, 75 bp, synthetic construct
  source 1..75: mol_type = other DNA
tggtctgagtgatgtctatgccacctggtttgcttttgtcggtctcaagcagaccatggcgggcgtgacgattgg

SEQ ID NO: 673905 - DNA, 75 bp, synthetic construct
  source 1..75: mol_type = other DNA
gcctgtatgaatcacagctctacaactggcgcagtaaacagcaaaatcagcagacgtcttctgaacgtgaactgg

SEQ ID NO: 673906 - DNA, 75 bp, synthetic construct
  source 1..75: mol_type = other DNA
gatcacctataaccagaactttgccgctgcgggtgtctcgatctatctcaactactcccatcgtacttactggga

SEQ ID NO: 673907 - DNA, 75 bp, synthetic construct
  source 1..75: mol_type = other DNA
gtgtcggatttcatcttttttgtgaaccagatgatatcgagtttatggaaaagtacgtaactgaagaacttaaag

SEQ ID NO: 673908 - DNA, 75 bp, synthetic construct
  source 1..75: mol_type = other DNA
tgcgtgaagcggcagagcaggcaatgcctgacaactggggatttgacgcggaccttttccatgagctggtaacac

SEQ ID NO: 673909 - DNA, 75 bp, synthetic construct
  source 1..75: mol_type = other DNA
tttgttcgccagagcccgggggtgcagggggccgcggcgattggccgccccctgcgcgctccctgcaccattcaa

SEQ ID NO: 673910 - DNA, 75 bp, synthetic construct
  source 1..75: mol_type = other DNA
tggaatattacctattgtaatggatgttgcggattggatgctgaaaaattcagtagaagcggttttaactaataa

SEQ ID NO: 673911 - DNA, 75 bp, synthetic construct
  source 1..75: mol_type = other DNA
atgttcaagggcgatattgatctgttcaatcatgtgattgggaaacggatattgcggattgtggttctgcgggtc

SEQ ID NO: 673912 - DNA, 75 bp, synthetic construct
  source 1..75: mol_type = other DNA
tgcaaatgaaatgtttgattttcataatgagcctataacagtaaaatttgcaggagtgacgtttcataactgtca

SEQ ID NO: 673913 - DNA, 75 bp, synthetic construct
  source 1..75: mol_type = other DNA
atgacagttacgcaattagtgaaaagagtcacggcagagaagaaacccgtcttcatattgtttgcgatgtccctg

SEQ ID NO: 673914 - DNA, 75 bp, synthetic construct
  source 1..75: mol_type = other DNA
agaatgacttatccggcgtgccggattgtttcagctacagtcttgcgacgcgaatacggcggatggactgctatg

SEQ ID NO: 673915 - DNA, 75 bp, synthetic construct
  source 1..75: mol_type = other DNA
ttggataaaggataacagaaaagaggaatttcagtcattacggacgtggttgcagaaaagttatacttttgctca

SEQ ID NO: 673916 - DNA, 75 bp, synthetic construct
  source 1..75: mol_type = other DNA
cttctggatatgcacgtttccataataatgatgtatttaactatgggctacgaggtggggttgcattacattctg

SEQ ID NO: 673917 - DNA, 75 bp, synthetic construct
  source 1..75: mol_type = other DNA
gaggatttagaagaagacaaagaggatagaattacatctatcgtagagaaaatatattttaatctgcgtaggagg

SEQ ID NO: 673918 - DNA, 75 bp, synthetic construct
  source 1..75: mol_type = other DNA
tgggcttttttatcgggcttgtatatggcagcggtaaaaaatatgtaaaaaataaaagcgcgaattattattgtg

SEQ ID NO: 673919 - DNA, 75 bp, synthetic construct
  source 1..75: mol_type = other DNA
agcgttgtcctcgcggcggcctttacccggtcaaaacagcgttacggtgcaccacgcctgacggatgaactgcgt

SEQ ID NO: 673920 - DNA, 75 bp, synthetic construct
  source 1..75: mol_type = other DNA
tgcacggctgggtctacgacattgaaagcggcagcatcgcagcttttgacggcgcaacccgccagtttgtgccac

SEQ ID NO: 673921 - DNA, 75 bp, synthetic construct
  source 1..75: mol_type = other DNA
agggtgctgccggtggttggggtgctgttaaatccgtagcgaatgcagtacgtaagcagatggatatacgccagg

SEQ ID NO: 673922 - DNA, 75 bp, synthetic construct
  source 1..75: mol_type = other DNA
caataagacaatcggaagggctaactcaagcaaaattcagtgaaatcagcggtatagcgttaggaacgctaaaga

SEQ ID NO: 673923 - DNA, 75 bp, synthetic construct
  source 1..75: mol_type = other DNA
tcaatagcccttgccctaatggtactgagaaagtatcagcttatcatactcatggtgcagatagtcatggagaat

SEQ ID NO: 673924 - DNA, 75 bp, synthetic construct
  source 1..75: mol_type = other DNA
gggcagccaacgacaaagccattgcacagatgttggcatcaaaaaagtctggcccccccgccgccaggctgggcg

SEQ ID NO: 673925 - DNA, 75 bp, synthetic construct
  source 1..75: mol_type = other DNA
ttattcgcaacgcgggcaatatcgtcccttcctatgggccggaacccggtggcgtttctgcttcggtggagtatg

SEQ ID NO: 673926 - DNA, 75 bp, synthetic construct
  source 1..75: mol_type = other DNA
taacaatcaggcgcatgctgacaggataagtccggcgctgggagaattgcaccgggctgcgagtgaaggtgactg

SEQ ID NO: 673927 - DNA, 75 bp, synthetic construct
  source 1..75: mol_type = other DNA
cagttcatcggtagtgcgccggtaagtgtgtggcgggaactgcgtcgctttaacaaccaggtgcatgctgaccgg

SEQ ID NO: 673928 - DNA, 75 bp, synthetic construct
  source 1..75: mol_type = other DNA
ggtgccatttatgccatggttgcgggtcttgttgaacatttccgtatggagccaccggactggaaacgttttatt

SEQ ID NO: 673929 - DNA, 75 bp, synthetic construct
  source 1..75: mol_type = other DNA
ctcaagtttaacctgacagaaatgtctttcgttgagatgatggacctgacaaaaggaaatcattctctgaccagt

SEQ ID NO: 673930 - DNA, 75 bp, synthetic construct
  source 1..75: mol_type = other DNA
ggtggctggcgggacgtaagcacggtcgcaggcttatggcagatacagacgttgaggatgaagaaaccggggaaa

SEQ ID NO: 673931 - DNA, 75 bp, synthetic construct
  source 1..75: mol_type = other DNA
tttatatgccggggtgtgatacaccaccggtagtgacgcgttcacgtaactggagaatcagccggaacgttacaa

SEQ ID NO: 673932 - DNA, 75 bp, synthetic construct
  source 1..75: mol_type = other DNA
ttacgcccaggtggcggtctactctgatcatttcagccatgtctcggtgatgcgcaaagtgctgttacgcatgac

SEQ ID NO: 673933 - DNA, 75 bp, synthetic construct
  source 1..75: mol_type = other DNA
aacagtcgattcgtaaaagtgattatgccatccgactcggtggcgatgaattctgcatcattcttgtcgattcga

SEQ ID NO: 673934 - DNA, 75 bp, synthetic construct
  source 1..75: mol_type = other DNA
gaggagcattattggattctctatgatgccaatacatggttatgtgccttagcagaatgtcagccatcgttatgt

SEQ ID NO: 673935 - DNA, 75 bp, synthetic construct
  source 1..75: mol_type = other DNA
cgattgaaaataggagtgtttcgccttcacaatacctttgtaaatgaccgtacatatcagttacgtgatcagaat

SEQ ID NO: 673936 - DNA, 75 bp, synthetic construct
  source 1..75: mol_type = other DNA
agacggtggcagtgtggtgttcctgccggtgctggtgcagatgctcgaccggctggaaagtgaaatcctggctga

SEQ ID NO: 673937 - DNA, 75 bp, synthetic construct
  source 1..75: mol_type = other DNA
aagctggcggcggcgggtgtaactgatgcgaattattaccccgaagggatgcacagccatatgcgggagaactgg

SEQ ID NO: 673938 - DNA, 75 bp, synthetic construct
  source 1..75: mol_type = other DNA
tgtatgtcaattttagatcagtctcacaaagctctgatcgtgagacaatgatttttgaaggatatgagactgcta

SEQ ID NO: 673939 - DNA, 75 bp, synthetic construct
  source 1..75: mol_type = other DNA
cgatcacgagctttttccctagctaaactgccagtaagcagtgaagaactcgacgacattgaacggtatctaaca

SEQ ID NO: 673940 - DNA, 75 bp, synthetic construct
  source 1..75: mol_type = other DNA
tatggttaaaaaaggagtgcactgcctttaattcacttgctatttatttctatgcacagcaatcccgtaaaaatg

SEQ ID NO: 673941 - DNA, 75 bp, synthetic construct
  source 1..75: mol_type = other DNA
tgagtgaggaaagccgccgctggctggcatcgtgcggcctgactgtggagcagatgcaaaaccagatggacccgg

SEQ ID NO: 673942 - DNA, 75 bp, synthetic construct
  source 1..75: mol_type = other DNA
cgatgctttccccgaggggctcccgctggtggatggagacctggcggtttacatcaatggcccgccgcaggtacg

SEQ ID NO: 673943 - DNA, 75 bp, synthetic construct
  source 1..75: mol_type = other DNA
ctggggcaacctgattaactttatggccaactggcgcgcgctaaaacaggtacttcaacacggcgatccacgtcg

SEQ ID NO: 673944 - DNA, 75 bp, synthetic construct
  source 1..75: mol_type = other DNA
gaagcaaatcgtgttcgctcttatctgatggcagcattcaattatgggttgaaggctgacaacgatccggcaaac

SEQ ID NO: 673945 - DNA, 75 bp, synthetic construct
  source 1..75: mol_type = other DNA
cagcagtatttcagatgcggagaagcgtcgtgcagagttgatgacgcgtgtcaaaggtctggaagatttggcccg

SEQ ID NO: 673946 - DNA, 75 bp, synthetic construct
  source 1..75: mol_type = other DNA
tcggtgttttttttctttgctgttattgttgtgttaattataattttttccctctctttaaagaaagatgaagta

SEQ ID NO: 673947 - DNA, 75 bp, synthetic construct
  source 1..75: mol_type = other DNA
agaagtatcagtccgttgtgtgcaattccgttctgcatgatgaagagattcagctgccttttcgcaggccattaa

SEQ ID NO: 673948 - DNA, 75 bp, synthetic construct
  source 1..75: mol_type = other DNA
tcaacgtgaaataccgttatgaattcacggaccatctgggcggcatagcctcgctgagttacgcctctgcgaaaa

SEQ ID NO: 673949 - DNA, 75 bp, synthetic construct
  source 1..75: mol_type = other DNA
cctgtcgatgatatcgtggttgatgaagacaataagattgtcaccaccccagcatatatgctggcgcagaacatt

SEQ ID NO: 673950 - DNA, 75 bp, synthetic construct
  source 1..75: mol_type = other DNA
caccgaggcctcctatgccgctgttctgttagtgggagcttcgcaggtcgccgctggagaaatgactgccggggt

SEQ ID NO: 673951 - DNA, 75 bp, synthetic construct
  source 1..75: mol_type = other DNA
tactggcgacagaaggcactgagaacctcggggcctcttcggtcctccctgtcaccggtgcactgcatcttgatg

SEQ ID NO: 673952 - DNA, 75 bp, synthetic construct
  source 1..75: mol_type = other DNA
cggtacctggctgatataagcgattttgaaaaacaggatgtgcttgattggtggagtgagcagaagtttgatctt

SEQ ID NO: 673953 - DNA, 75 bp, synthetic construct
  source 1..75: mol_type = other DNA
acactgccaccggcgcagccggggaagggtgtaacgaaaaaagcagccttcattactccagggattcagaaggct

SEQ ID NO: 673954 - DNA, 75 bp, synthetic construct
  source 1..75: mol_type = other DNA
gcagtagagcgcgccgaagggattcaagagcatactgcaaaagcgtatacaggggtattaaaaggcgcgtctgat

SEQ ID NO: 673955 - DNA, 75 bp, synthetic construct
  source 1..75: mol_type = other DNA
tgttgcaatattcgcaccacaacttgacaaacttctgcagaagtatcagaaagttgggagtaaaataggaagaac

SEQ ID NO: 673956 - DNA, 75 bp, synthetic construct
  source 1..75: mol_type = other DNA
aaactgtgttaacaatgagtttttatagtttttacgttgtgtccgtaacaactgtactaagtagttttaattcaa

SEQ ID NO: 673957 - DNA, 75 bp, synthetic construct
  source 1..75: mol_type = other DNA
gcaaaaggtggcgctggtagccatggatgagccagaacttgcagatgcatttatcaacatccttgatacagaaat

SEQ ID NO: 673958 - DNA, 75 bp, synthetic construct
  source 1..75: mol_type = other DNA
tatcgattcatagtgatgaatttcacccatacggaaacgtaatttctgcaataaatgtagatcctctgcttaaat

SEQ ID NO: 673959 - DNA, 75 bp, synthetic construct
  source 1..75: mol_type = other DNA
ttgaaaactatgaaggtatcatcagtgatggtatctttgaggatgttttttatatggactatgttgaagagattg

SEQ ID NO: 673960 - DNA, 75 bp, synthetic construct
  source 1..75: mol_type = other DNA
gacgggcacgacgtatcgggcgcggcggcggagctgaccaccatgttctgctacatcgtcggtgtgagcaaatgc

SEQ ID NO: 673961 - DNA, 75 bp, synthetic construct
  source 1..75: mol_type = other DNA
ccacgatgaactatgttgatcgcaaggttatcagccttgatgcttccgtgctcttcgatatgccaagcccaacta

SEQ ID NO: 673962 - DNA, 75 bp, synthetic construct
  source 1..75: mol_type = other DNA
ctggcaccgcttggcgatctggtcggtgttaaccgtcaggttaccgtgctggcattccagtttggtgatggcttc

SEQ ID NO: 673963 - DNA, 75 bp, synthetic construct
  source 1..75: mol_type = other DNA
gcgggcgatgagttttggcattgatgttcgccgtttgcgcctgggttccctgctgcgcatcagcctgctggcggc

SEQ ID NO: 673964 - DNA, 75 bp, synthetic construct
  source 1..75: mol_type = other DNA
cgtccggggcgactaacggcatgcgggttatcgtttgggacatccgtttgccctatgcgctgatggcgctcctgg

SEQ ID NO: 673965 - DNA, 75 bp, synthetic construct
  source 1..75: mol_type = other DNA
ctgatgctgccggggaaaggcgtaacgaaaaaacagcctccgttaccggacagcaagcaggctgaatgtagttta

SEQ ID NO: 673966 - DNA, 75 bp, synthetic construct
  source 1..75: mol_type = other DNA
ctgatgctgccggggaaaggcgtaacgaaaaaacagcctccgttaccggatagcaaggaggctgaatgaagttta

SEQ ID NO: 673967 - DNA, 75 bp, synthetic construct
  source 1..75: mol_type = other DNA
ctgatgctgccggggaaaggcgtaacgaaaaaacagcctccgttaccggaaagcaagtaggctgaatgcagttta

SEQ ID NO: 673968 - DNA, 75 bp, synthetic construct
  source 1..75: mol_type = other DNA
tatatatgatttttacaggaccacagataaaataaatgaaacactggttattaataaatataaggtcagtctatt

SEQ ID NO: 673969 - DNA, 75 bp, synthetic construct
  source 1..75: mol_type = other DNA
atggtttttcccctgaggatagtttttgtcatagaatttttctccctagaaatattgagtattacaaatacgccc

SEQ ID NO: 673970 - DNA, 75 bp, synthetic construct
  source 1..75: mol_type = other DNA
gattaatgcgcgacgtcgtgaaatggggcagaaaccgctcaccaccgcgcagattgttgatgaaatctgcgattt

SEQ ID NO: 673971 - DNA, 75 bp, synthetic construct
  source 1..75: mol_type = other DNA
agaaattatgcgtggcagtctcctttcggtccataatagcagaacaaaagaaggagccagaaatgacggtcagat

SEQ ID NO: 673972 - DNA, 75 bp, synthetic construct
  source 1..75: mol_type = other DNA
cttatgacaagagtcgccgcaggggagcgattcatgtcattagtgcgttctcaacaatgcacagtctggtcatcg

SEQ ID NO: 673973 - DNA, 75 bp, synthetic construct
  source 1..75: mol_type = other DNA
aataaagggctgattgataaaaataacaatttttttatccaacttatcgatcaggccttacgatcaacggatgat

SEQ ID NO: 673974 - DNA, 75 bp, synthetic construct
  source 1..75: mol_type = other DNA
gtgcgcctgcttggtgaagctcgctttaagccgggcagcgttgaatttgctggccgagaatggatgcttggagcg

SEQ ID NO: 673975 - DNA, 75 bp, synthetic construct
  source 1..75: mol_type = other DNA
catctggtggcgctaataaatctggcaagtcacattctgttgaatgctgtgacagtgccttaccgagagagcgaa

SEQ ID NO: 673976 - DNA, 75 bp, synthetic construct
  source 1..75: mol_type = other DNA
tcggttcacgtataaaacccggtggggaaagtttcactcagcttgggcgagtattaaataaatttgaaaatctcg

SEQ ID NO: 673977 - DNA, 75 bp, synthetic construct
  source 1..75: mol_type = other DNA
gttgtgaagagtatctgggcaggctgagaatcacagtcacaattccgctatcgctggatttctctgccatacctg

SEQ ID NO: 673978 - DNA, 75 bp, synthetic construct
  source 1..75: mol_type = other DNA
ttacctgtttaaagagtacagttaccagaacttcatctttttcgtgcataccgacgcgattattcagaaaacccg

SEQ ID NO: 673979 - DNA, 75 bp, synthetic construct
  source 1..75: mol_type = other DNA
ctatctatttaaagagttcgggtatcagaacttcatctttttcgtacataccgacgcgattatccagaaaacgcg

SEQ ID NO: 673980 - DNA, 75 bp, synthetic construct
  source 1..75: mol_type = other DNA
gagatgttgcctgttaatcttactcaggaaacacttttcagctccaaatctcaggataaacatgcgcttttcccc

SEQ ID NO: 673981 - DNA, 75 bp, synthetic construct
  source 1..75: mol_type = other DNA
cataaagttttttgcagacagcaaaatggatgagtttattaaagatttagaggaaaaactgaatgatggtcttcc

SEQ ID NO: 673982 - DNA, 75 bp, synthetic construct
  source 1..75: mol_type = other DNA
tttatgttctgcgtaacgatgaacagtcaacgcgctttaaacttactgagtttggtggtgtacgtggctttatgc

SEQ ID NO: 673983 - DNA, 75 bp, synthetic construct
  source 1..75: mol_type = other DNA
ccatgtgaactggggtcacagcttcaagccagagaacctgtgccgtatgacccgatttgatggatacctgtcaga

SEQ ID NO: 673984 - DNA, 75 bp, synthetic construct
  source 1..75: mol_type = other DNA
gaacaatccatttatattaaaaatggattttcagaatttttttaataaaattaaaccggaaattttttttgataa

SEQ ID NO: 673985 - DNA, 75 bp, synthetic construct
  source 1..75: mol_type = other DNA
ttcataaatattctttgggactcttatcttccgaagaaataaataaaaccaaagggatgattgcgtttgcaaatt

SEQ ID NO: 673986 - DNA, 75 bp, synthetic construct
  source 1..75: mol_type = other DNA
ctaaaaaacgtacagagatttatagtatctttgctacagccaaagctgcctgttcatcataaggcaatggcatat

SEQ ID NO: 673987 - DNA, 75 bp, synthetic construct
  source 1..75: mol_type = other DNA
gggtgactacacctggaaaggccgtaactatcaggtaaacgggacgggcgacgtgcttatcgacgtgcctaaacc

SEQ ID NO: 673988 - DNA, 75 bp, synthetic construct
  source 1..75: mol_type = other DNA
cgaaggtggagaagtttacttaggtgtttttgaacctgctgtaggaacgctaaacattggtgcagctcacggtga

SEQ ID NO: 673989 - DNA, 75 bp, synthetic construct
  source 1..75: mol_type = other DNA
acaattttttgttttggaagccagggcaaaaaagaagtattacacatatattgagcgtaggagcaccgagttctc

SEQ ID NO: 673990 - DNA, 75 bp, synthetic construct
  source 1..75: mol_type = other DNA
aatcctgcttagtagtactgatcgggagtcaaacggctaatcgcccatgggtcaagtatgagatcgaaagagcct

SEQ ID NO: 673991 - DNA, 75 bp, synthetic construct
  source 1..75: mol_type = other DNA
tggattaatcagagcttaaatggcaaatcctgcttagtagtactgatcgggagtcaaacggctaatcgcccatgg

SEQ ID NO: 673992 - DNA, 75 bp, synthetic construct
  source 1..75: mol_type = other DNA
gggactggcctctgtacgagaaaatcgcgcaggcatttaagcaggctgccgcagagctgggaactgccatcgaat

SEQ ID NO: 673993 - DNA, 75 bp, synthetic construct
  source 1..75: mol_type = other DNA
ataaactttatggagtgtcaataatatcattctatatattccttcattttccagtgctatcttttagaattagtg

SEQ ID NO: 673994 - DNA, 75 bp, synthetic construct
  source 1..75: mol_type = other DNA
gggtattatctcacaacaccttctttatatactgagccgttatctaaaataatattcagattgtctttccaatta

SEQ ID NO: 673995 - DNA, 75 bp, synthetic construct
  source 1..75: mol_type = other DNA
atatttacgtactgcgtaacgacgagcagtcaacgcgctttaagctcacggagttcggcggcgtgcgtgggttta

SEQ ID NO: 673996 - DNA, 75 bp, synthetic construct
  source 1..75: mol_type = other DNA
atgtcgggtaaattcagattcagtcgtcgcagtgaaaaaaatctggagggcgttaaaccacagctggttgctgtc

SEQ ID NO: 673997 - DNA, 75 bp, synthetic construct
  source 1..75: mol_type = other DNA
ctgttacagcaccccgatgaccagacgcgtgaatcaatggcgcagtcctggcctgctcaacacatgcatttgctt

SEQ ID NO: 673998 - DNA, 75 bp, synthetic construct
  source 1..75: mol_type = other DNA
tgggacgagaatattcaaaaatcctattcactggtgacgcctaatctttatgatcatagtgaaatcgaaaccgat

SEQ ID NO: 673999 - DNA, 75 bp, synthetic construct
  source 1..75: mol_type = other DNA
ccggcactgccccttctgagtccccctcctccggacgtccgctcacccaggcggaggcagagcaccaggcctctg

SEQ ID NO: 674000 - DNA, 75 bp, synthetic construct
  source 1..75: mol_type = other DNA
accaaagaacctggttgattgggttgggattaaaaatttcattatgttgtttaaatttaaaatttggtctgatac

SEQ ID NO: 674001 - DNA, 75 bp, synthetic construct
  source 1..75: mol_type = other DNA
agggtgatcgcgtcaggccgcgaagtactgactcggggattaatggcaggtgatgatgtactgacccgggaatga

SEQ ID NO: 674002 - DNA, 75 bp, synthetic construct
  source 1..75: mol_type = other DNA
gtcgcagcgaaaagaatctggagggcgttaaaccacagctggttgctgtcgttcgccgtgcgctggcgctgacgg

SEQ ID NO: 674003 - DNA, 75 bp, synthetic construct
  source 1..75: mol_type = other DNA
ggcgcggtggattatttctgccagaatggacacggtttaatttctaaaaaacgcgttgaatttaccactgcttaa

SEQ ID NO: 674004 - DNA, 75 bp, synthetic construct
  source 1..75: mol_type = other DNA
atggaactcaactgcccagtctgccaaagccctctcgaacacaatggcgagacggctcactgcacaacttgcgat

SEQ ID NO: 674005 - DNA, 75 bp, synthetic construct
  source 1..75: mol_type = other DNA
aacgatttccggcgattatgatgattatctgtcaggtaatggtcatctgattgtattaggtaatgttattgtcga

SEQ ID NO: 674006 - DNA, 75 bp, synthetic construct
  source 1..75: mol_type = other DNA
aaaaaattaatgtctgtacccgtcgagagcgtacagctggagcaggccagacaggataatctttctcctgatatt

SEQ ID NO: 674007 - DNA, 75 bp, synthetic construct
  source 1..75: mol_type = other DNA
agtgttaaaagcttgtggtgctgtggactatttctgccaacatgggcacggtttaatatctaaaaaacgcgttga

SEQ ID NO: 674008 - DNA, 75 bp, synthetic construct
  source 1..75: mol_type = other DNA
ctggtttaagcatatcgttctgccgtctgtgctcggtggggtgggcagtgtcggaagtctttacaaagacgccaa

SEQ ID NO: 674009 - DNA, 75 bp, synthetic construct
  source 1..75: mol_type = other DNA
ttaacaccgcactgttgtatgcgggcaataacctctcgctgtttgccagcaccatccggaaccatcacggcgata

SEQ ID NO: 674010 - DNA, 75 bp, synthetic construct
  source 1..75: mol_type = other DNA
gattgagggggccacgttcgggctggataacgttgatccggctgtttttattgatgctgaggtggataccttcga

SEQ ID NO: 674011 - DNA, 75 bp, synthetic construct
  source 1..75: mol_type = other DNA
atactagctttctttatttctctcttttttgcatttattttagtgtaagttttagcccggtcaatccaacttata

SEQ ID NO: 674012 - DNA, 75 bp, synthetic construct
  source 1..75: mol_type = other DNA
tgaaacgggataaaaacattgccagtgtgtttgctagtaagcgtacagcgagggccgtattgacggggatgtgtt

SEQ ID NO: 674013 - DNA, 75 bp, synthetic construct
  source 1..75: mol_type = other DNA
cgtaataagcgatccaacttcctggcctgttgcggtaatgggaggtaaggcctttatcaccaatgcagtcaataa

SEQ ID NO: 674014 - DNA, 75 bp, synthetic construct
  source 1..75: mol_type = other DNA
ctgtatccgggcgtgaagcagtcagacctcagtgaagagcagaagcagacgataagtacgctggcaactgtgtca

SEQ ID NO: 674015 - DNA, 75 bp, synthetic construct
  source 1..75: mol_type = other DNA
aacccaactttgcaagaaaaatatgcgaaaaaaatcagccttggcgctgtttatgcttcggctcggcactgcaaa

SEQ ID NO: 674016 - DNA, 75 bp, synthetic construct
  source 1..75: mol_type = other DNA
gttccagggcggacgtgagatcgcccgccaggcaggcgccatgggctcgcaggacatcgtgcgctgggcctctgc

SEQ ID NO: 674017 - DNA, 75 bp, synthetic construct
  source 1..75: mol_type = other DNA
agcccttgttcacgggcgagcccatcgagttgaccacggcgacgttctcgcgccacgtggagcgcagcgatctgc

SEQ ID NO: 674018 - DNA, 75 bp, synthetic construct
  source 1..75: mol_type = other DNA
tttatttgggcaatttgcgcgacgatttttaccttcagttttggctttattctggctttagcactggctaaaaaa

SEQ ID NO: 674019 - DNA, 75 bp, synthetic construct
  source 1..75: mol_type = other DNA
tgttggcttattcgccactatttacatccttaatattaaagatgcgcggaactcatcttattgccatctgacttt

SEQ ID NO: 674020 - DNA, 75 bp, synthetic construct
  source 1..75: mol_type = other DNA
cgaaaaaaatcagccttggcgctgtttatgcttcggctcggcactgcaaatcacacggatgacaccatcacgctt

SEQ ID NO: 674021 - DNA, 75 bp, synthetic construct
  source 1..75: mol_type = other DNA
tcacgttcaactaccagttgcagcatgaccagcagatttacgggcccctgcaggcctccgttcgtctgagcggtc

SEQ ID NO: 674022 - DNA, 75 bp, synthetic construct
  source 1..75: mol_type = other DNA
gacggtcacctgggcccgcgcatcttccggtaaggacccggtctccggtacccgggatgacaaccgcgtctggct

SEQ ID NO: 674023 - DNA, 75 bp, synthetic construct
  source 1..75: mol_type = other DNA
aaggaaaatctggcatcggtgtattaggtattactaatagcacaatattaactcacacatcaaatatatttgact

SEQ ID NO: 674024 - DNA, 75 bp, synthetic construct
  source 1..75: mol_type = other DNA
cctacatcagcttctcaggctgtaacgctgtatagtgatgctgtcaatgtcatgaacggactgttctctgatgtt

SEQ ID NO: 674025 - DNA, 75 bp, synthetic construct
  source 1..75: mol_type = other DNA
cgctgcatctgataaaattgctaatatcacgttcaatggcaagaccttaattcaagctgccgcaggaagatcttt

SEQ ID NO: 674026 - DNA, 75 bp, synthetic construct
  source 1..75: mol_type = other DNA
ggtaaggttggttctttgactggacttgattctaatattcctgttggcgataccacagtttctattgttgcacca

SEQ ID NO: 674027 - DNA, 75 bp, synthetic construct
  source 1..75: mol_type = other DNA
ttcatcataaattcaacctttactgcgcagtaaaaaggatgcgattttatagatacttaaaaataataaatcctt

SEQ ID NO: 674028 - DNA, 75 bp, synthetic construct
  source 1..75: mol_type = other DNA
ttgttgcatcatataactcaaaagattacatactagagacattagagtcatgcattaaccaacaatatcaaaata

SEQ ID NO: 674029 - DNA, 75 bp, synthetic construct
  source 1..75: mol_type = other DNA
ctgaaagagtatcctctgaaaaatataatggaagatataactggtttaaatggaagtgtgataaatgatgcctag

SEQ ID NO: 674030 - DNA, 75 bp, synthetic construct
  source 1..75: mol_type = other DNA
ttcattaatcgaagatgctttcgatttagcaaaagccttcttaagttcattaacatatggaatgacaaaaagttc

SEQ ID NO: 674031 - DNA, 75 bp, synthetic construct
  source 1..75: mol_type = other DNA
agatataagaagaaagcagttggcacaaaatccgaatgatacaaatgaaatgattcaagcattgagaacagggaa

SEQ ID NO: 674032 - DNA, 75 bp, synthetic construct
  source 1..75: mol_type = other DNA
ttggatattctgtaaatgttagtactcgatatccatcctcatggacaagaactatatgccaaatgccaccatcat

SEQ ID NO: 674033 - DNA, 75 bp, synthetic construct
  source 1..75: mol_type = other DNA
gatcgcagcggacaccgcgctaaattcacccgcaccggaaaaatgttattagagaaagggcgggaagttctgcat

SEQ ID NO: 674034 - DNA, 75 bp, synthetic construct
  source 1..75: mol_type = other DNA
tcttgcggggatgaagctgggcggaacaccgctggtcgagtacacgcgggaccggctgcaccgtgagacggtgcg

SEQ ID NO: 674035 - DNA, 75 bp, synthetic construct
  source 1..75: mol_type = other DNA
acggcgtggcagggggagtatgacgaatggggaaacctgctgggcgaaaccagcgcgcagcaactgcaacagccg

SEQ ID NO: 674036 - DNA, 75 bp, synthetic construct
  source 1..75: mol_type = other DNA
cggccggtccccgttctgtttcctcttcttcttcagctttccccgacacgctgcccgccggtacagaatacggtg

SEQ ID NO: 674037 - DNA, 75 bp, synthetic construct
  source 1..75: mol_type = other DNA
tcgaaaccttcagaatatgatattgcttacgagattaagtcaaacccatttatctattatgaaggaaactttaat

SEQ ID NO: 674038 - DNA, 75 bp, synthetic construct
  source 1..75: mol_type = other DNA
acgacccgctgggacggcgaatggcaaaacgggtctggcggcgggagcgtgacctgacggggtggatgtcgctgt

SEQ ID NO: 674039 - DNA, 75 bp, synthetic construct
  source 1..75: mol_type = other DNA
ggctggactaccgctttgagtacggagagcgccgggtaatcatcacggacagcctgaaccggcgggaggtgctgt

SEQ ID NO: 674040 - DNA, 75 bp, synthetic construct
  source 1..75: mol_type = other DNA
atgatcgtgatgccaaccacctatagcccaatgacggttgctcgttcttttcgcgtggtggaagagatcgagctt

SEQ ID NO: 674041 - DNA, 75 bp, synthetic construct
  source 1..75: mol_type = other DNA
aaacgagctggtgattggcgtggacgacaccttccctttttctctgcttgcgccactcattgaggctttttatca

SEQ ID NO: 674042 - DNA, 75 bp, synthetic construct
  source 1..75: mol_type = other DNA
tgccgaagtgacaaactccgccatcgagctgaaagtgttgattgagcagatgcgcgagcagattcagaatatcga

SEQ ID NO: 674043 - DNA, 75 bp, synthetic construct
  source 1..75: mol_type = other DNA
gctctgaatgggatataaaaggaattatgccagtactgacaagaggcgattcacatatgatcgtgatgccaacca

SEQ ID NO: 674044 - DNA, 75 bp, synthetic construct
  source 1..75: mol_type = other DNA
taaaaaagagttcggcagcgatattattgccgttgaacgctggtgggaagactcggatctggtacaagtggaagg

SEQ ID NO: 674045 - DNA, 75 bp, synthetic construct
  source 1..75: mol_type = other DNA
caggaaaagtgatgaagcatttgaatccgtgtatcaattaattgaacggtcctgccaatcatgggcagagcggtt

SEQ ID NO: 674046 - DNA, 75 bp, synthetic construct
  source 1..75: mol_type = other DNA
cagaatatccggcggtgctgatatgcatatccgtgcaggacgactggataatgaggcatcgtttattctcgccgg

SEQ ID NO: 674047 - DNA, 75 bp, synthetic construct
  source 1..75: mol_type = other DNA
tcactgccgggaacagtctgatgctttccgccggtcgtgatgtgaacagccaggctgccggtattacggctgaaa

SEQ ID NO: 674048 - DNA, 75 bp, synthetic construct
  source 1..75: mol_type = other DNA
caatattgatgatgagggacgaatagactgttggccggaaggcttctttgaccaatgggataaggagttggatca

SEQ ID NO: 674049 - DNA, 75 bp, synthetic construct
  source 1..75: mol_type = other DNA
tggggcacctgtacattacaggactgtagtggcaaccgcagccagtcggactccggtgccagcgtggcggtcggc

SEQ ID NO: 674050 - DNA, 75 bp, synthetic construct
  source 1..75: mol_type = other DNA
cattcttggtctgacggaagtggatattgctgccggtgacaaagcggcagcacgtagccagctggcgaaactgcc

SEQ ID NO: 674051 - DNA, 75 bp, synthetic construct
  source 1..75: mol_type = other DNA
ctggatgccgcgaatgatattctgttgagtggcgccgcaaacacacaaaaaacaacgggcaggaacagcagcagt

SEQ ID NO: 674052 - DNA, 75 bp, synthetic construct
  source 1..75: mol_type = other DNA
acatcgcggcagcagacccgcatacccagtacgcaccgaaagccagcccgacattcaccggcacaccaacagcgc

SEQ ID NO: 674053 - DNA, 75 bp, synthetic construct
  source 1..75: mol_type = other DNA
acaactgctccgaaaaaggatggcgaaggggaaggaaaaacagccacgtcatccgttgcacgtaacggacgtaaa

SEQ ID NO: 674054 - DNA, 75 bp, synthetic construct
  source 1..75: mol_type = other DNA
gaaaaaatcaggaaagccagaactggcgcggcctggcggggagtggcagcaaaaatcacttttgcacacttttgc

SEQ ID NO: 674055 - DNA, 75 bp, synthetic construct
  source 1..75: mol_type = other DNA
cgggtggcgactatcgcattgtcgttgcatgtcatgacattcctgagtttacaagtggatatcagaatccacgga

SEQ ID NO: 674056 - DNA, 75 bp, synthetic construct
  source 1..75: mol_type = other DNA
ttcgtgccggtattgaccgctatctggagccatcccggtcccaaccccgggcttcatctgtcagcggcaattatc

SEQ ID NO: 674057 - DNA, 75 bp, synthetic construct
  source 1..75: mol_type = other DNA
aggaggggatcgaccgttatctcacgccctcccgggcgcaaccacgtaacggcagtgccgtgaccggtgaatacc

SEQ ID NO: 674058 - DNA, 75 bp, synthetic construct
  source 1..75: mol_type = other DNA
tgatctggcattacgacaaagatctgagtggctactcactcggtcagggcggttactacagtccgcaggaatacc

SEQ ID NO: 674059 - DNA, 75 bp, synthetic construct
  source 1..75: mol_type = other DNA
gatgaaaaatcaaatctttactgtagttcaagacatccgctcttccacagcgacggggagcctgacaacgcgcgg

SEQ ID NO: 674060 - DNA, 75 bp, synthetic construct
  source 1..75: mol_type = other DNA
ggtgaaccagatgcaccggcacctgcgcggcgagttcaacgttggcatcatcaataacctggtgacccagccgat

SEQ ID NO: 674061 - DNA, 75 bp, synthetic construct
  source 1..75: mol_type = other DNA
ggtggggtgaagaggaaaagaaagaaggttgcgttaaacacatgttatatagaagaagtgcttgcatcctgctca

SEQ ID NO: 674062 - DNA, 75 bp, synthetic construct
  source 1..75: mol_type = other DNA
caagaaaagccaagaagcatttgaattggtttataagttaattgaacaagctggtaatctctgggctgaaaagtt

SEQ ID NO: 674063 - DNA, 75 bp, synthetic construct
  source 1..75: mol_type = other DNA
gtgcactggagcatgctcggtgataaccaaaaattgttccgctggcgctgccgtgccgccacctacgccaactgg

SEQ ID NO: 674064 - DNA, 75 bp, synthetic construct
  source 1..75: mol_type = other DNA
acaaaggcatgatgcgcgtcattgcgcctgacagactgagcttttcaacccggatcgccattgtgacgcgcaaag

SEQ ID NO: 674065 - DNA, 75 bp, synthetic construct
  source 1..75: mol_type = other DNA
tctgagcgtgaccgtcaactgggttttgaacatttttgggatggattgggcgaagacaaattgggggagaccatt

SEQ ID NO: 674066 - DNA, 75 bp, synthetic construct
  source 1..75: mol_type = other DNA
atggcgggatcctgtttgccgcgtgggggaaatcggcccagctaccgatgcaagcgtggctaccggatgcaatgt

SEQ ID NO: 674067 - DNA, 75 bp, synthetic construct
  source 1..75: mol_type = other DNA
acctattatgctcaaagaatgtgatcctccgggatttctcattgggaaactgtatgccgattttaaaaatgaaaa

SEQ ID NO: 674068 - DNA, 75 bp, synthetic construct
  source 1..75: mol_type = other DNA
tatatcggcgtattgacgcaatcgcttacagcatcagtaaatagatgtctaattaatgccttgcataatggcaat

SEQ ID NO: 674069 - DNA, 75 bp, synthetic construct
  source 1..75: mol_type = other DNA
aggaggatggagagccgctggttcgtaagagatttatcaatatcttagacgtgcttgagagcgatgttgatcatg

SEQ ID NO: 674070 - DNA, 75 bp, synthetic construct
  source 1..75: mol_type = other DNA
gtttttcgtagttgaggagccggaagcgcacctgcatccgcacgtacagcgtctggtgtaccgttatttcctggg

SEQ ID NO: 674071 - DNA, 75 bp, synthetic construct
  source 1..75: mol_type = other DNA
acttctcacagaaattattagttgtgctttactagcatattttacattcaaagatagactaattcagctcaatcc

SEQ ID NO: 674072 - DNA, 75 bp, synthetic construct
  source 1..75: mol_type = other DNA
aagttggcagcattaccccacatttatgtcaatttcacactgaataatgtcaaattaaccttaccaacatgtttt

SEQ ID NO: 674073 - DNA, 75 bp, synthetic construct
  source 1..75: mol_type = other DNA
cactcttaccgttactgtttacccctgtgacaaaagcccggacaccagaaatgcctattctggaaaaccgggctg

SEQ ID NO: 674074 - DNA, 75 bp, synthetic construct
  source 1..75: mol_type = other DNA
ttctgattaaccttgccgggaacctgacggctaaagcccgccagtacggcgctaacatgagcgagtttgccagcc

SEQ ID NO: 674075 - DNA, 75 bp, synthetic construct
  source 1..75: mol_type = other DNA
cggcctggccggtggtctagtgggcaactcgggggcttcagcggtagccggagcacagtcaggcaagacaacgat

SEQ ID NO: 674076 - DNA, 75 bp, synthetic construct
  source 1..75: mol_type = other DNA
gttaaaatcagcgttgtccagccgtcaaatatctttctcaatctggaaaaaggcattgaagagcgttacggcatt

SEQ ID NO: 674077 - DNA, 75 bp, synthetic construct
  source 1..75: mol_type = other DNA
aggcgccatgcagggtggttatattgatgttttgatcactgatttccccaccgccagaatgctgattgcggatta

SEQ ID NO: 674078 - DNA, 75 bp, synthetic construct
  source 1..75: mol_type = other DNA
gtgagacggcttattttttgagagccaagctgggcgatgtcagggcatgggatgatttattagcggatatgcggc

SEQ ID NO: 674079 - DNA, 75 bp, synthetic construct
  source 1..75: mol_type = other DNA
ttactcccaaattatatgaattaagccttaatctttctatcgggatagctctcataaattatctaggacctgtag

SEQ ID NO: 674080 - DNA, 75 bp, synthetic construct
  source 1..75: mol_type = other DNA
acataacgaaccttccctggaggcagaacgcgatgcgttgcggaaggaagtcgcccgactgaatcaggaaatacg

SEQ ID NO: 674081 - DNA, 75 bp, synthetic construct
  source 1..75: mol_type = other DNA
aatatcatacacataatcatagggcaatataaattctggaatgactctcgaaagttacggaaatcaaataataaa

SEQ ID NO: 674082 - DNA, 75 bp, synthetic construct
  source 1..75: mol_type = other DNA
tggcttgctgacgattggttcttattccaaaatatggggattagggtttatcatccacaaattccgctagtgtat

SEQ ID NO: 674083 - DNA, 75 bp, synthetic construct
  source 1..75: mol_type = other DNA
tttatctatttagtgaagtatgtgagttcgtcgaaaaagtctcacgcctttgccctccccccgccaagccgcaca

SEQ ID NO: 674084 - DNA, 75 bp, synthetic construct
  source 1..75: mol_type = other DNA
cgggaataacggtgaacttcaccatgccacaggacgtggcggcaaactttacccttgaaaataacggtattgcca

SEQ ID NO: 674085 - DNA, 75 bp, synthetic construct
  source 1..75: mol_type = other DNA
tgtccgccagggtgatgaactggatgtcccggcacaagttagtgaaaaaaatttaaccccgccgccgggtaatag

SEQ ID NO: 674086 - DNA, 75 bp, synthetic construct
  source 1..75: mol_type = other DNA
gttgataataatggctttccggtgaaaggtgtgactgtgagctttaccagcagaacaaaatctgccgaaatgacg

SEQ ID NO: 674087 - DNA, 75 bp, synthetic construct
  source 1..75: mol_type = other DNA
atcattgggaatggcgtggatgagacgacgctgacagcaacagtgaaagatccttttgataacgtagtaaaagat

SEQ ID NO: 674088 - DNA, 75 bp, synthetic construct
  source 1..75: mol_type = other DNA
ctgcagcaaccaggtcggtaatggctacacccttccccgcgcggaccttttaagcaatgggcacatgcggcgcga

SEQ ID NO: 674089 - DNA, 75 bp, synthetic construct
  source 1..75: mol_type = other DNA
gtggcggacaaaacctcggctcaggttgtcctgcagatgtcaaaagatgagatcacaggtaatggcgtcgataac

SEQ ID NO: 674090 - DNA, 75 bp, synthetic construct
  source 1..75: mol_type = other DNA
gtaaaagatccttttgataacgtggttaaaaatctgtcagtagtcttccgcacctcccccgcagacacgcaactg

SEQ ID NO: 674091 - DNA, 75 bp, synthetic construct
  source 1..75: mol_type = other DNA
aaatcaccttctctgtgccaaacgacgtcgcaagtcggttctcgattagcaacggcggaaaaggcatgacggata

SEQ ID NO: 674092 - DNA, 75 bp, synthetic construct
  source 1..75: mol_type = other DNA
tgatcaaagtactgctgccctgaccctcagtgtgccttcaggtgatatcaccgtcaccaacacagctccgcaata

SEQ ID NO: 674093 - DNA, 75 bp, synthetic construct
  source 1..75: mol_type = other DNA
acccttgaaaataacggtattgccatcactcagaagcgcatgtcaccctcaaaggtaaaaaagcgggcacacata

SEQ ID NO: 674094 - DNA, 75 bp, synthetic construct
  source 1..75: mol_type = other DNA
ggatgttaatggtctggcgacttttgatctgaaaagtagtaagcaggaagacaacacggttgaagtcacccttga

SEQ ID NO: 674095 - DNA, 75 bp, synthetic construct
  source 1..75: mol_type = other DNA
gcaatgacagcgtcacaatgaccgcgaccgtccgggatgcaaaaggcaacctgctcaatgacgtcatggtcactt

SEQ ID NO: 674096 - DNA, 75 bp, synthetic construct
  source 1..75: mol_type = other DNA
tgtctggctggttaacaccacggtgacactgccggacggcagcacgcagacggttcaggtacctcaggtgtatgc

SEQ ID NO: 674097 - DNA, 75 bp, synthetic construct
  source 1..75: mol_type = other DNA
aaaaacagagattcctgaatggctttctccttttgaaaatgaatacaaaagtccctggaattgtgagaaaccaga

SEQ ID NO: 674098 - DNA, 75 bp, synthetic construct
  source 1..75: mol_type = other DNA
caggtaacgggctatggcagccgtggcgaacgctggattattgatcgttacaacatcacgcagtcattgcgcggt

SEQ ID NO: 674099 - DNA, 75 bp, synthetic construct
  source 1..75: mol_type = other DNA
cacgtggccaatggagaacttacctgcgttgcccggaaaccatgggtgggaacgatgctgttctacccggggaat

SEQ ID NO: 674100 - DNA, 75 bp, synthetic construct
  source 1..75: mol_type = other DNA
atggttgccacaggattcgattttttttttcccggcgctcacgccacgttgcataccgtgtttcatctgtcgtcc

SEQ ID NO: 674101 - DNA, 75 bp, synthetic construct
  source 1..75: mol_type = other DNA
ctgacgggaaatggcgcaagccgggaaaagggaataacgaagcatttgaccttttttgttatgcccatgccgtcg

SEQ ID NO: 674102 - DNA, 75 bp, synthetic construct
  source 1..75: mol_type = other DNA
gaccgtcgcgcagatgcgcgcggtgaggtgccggtctatctgttgcagacagatctgcttaaggatcagctcagt

SEQ ID NO: 674103 - DNA, 75 bp, synthetic construct
  source 1..75: mol_type = other DNA
gctggatatgcaggccggtgatgtggaaaacgtcagtgtcagcggagagcgccatgttactgataaagggacatc

SEQ ID NO: 674104 - DNA, 75 bp, synthetic construct
  source 1..75: mol_type = other DNA
gttgttagtgattggaaaaaagaagacacattgtggtatttgaagaaaacatgccagtatataaagaagaaaaat

SEQ ID NO: 674105 - DNA, 75 bp, synthetic construct
  source 1..75: mol_type = other DNA
aaaattacttaattgaaagaatgtgtgaaacacatgctttagatatgaataattctgccttggtgaaccctgagg

SEQ ID NO: 674106 - DNA, 75 bp, synthetic construct
  source 1..75: mol_type = other DNA
tgcatcaacacttttagagagaattacattttatgcgaaaaaaaatagagatgagcttgataaaatctcctgcaa

SEQ ID NO: 674107 - DNA, 75 bp, synthetic construct
  source 1..75: mol_type = other DNA
gataacgtctttaataccgtcgaacgcaaaacggtggggacaaaactcaaagtcactccgcaggtcaatgaaggc

SEQ ID NO: 674108 - DNA, 75 bp, synthetic construct
  source 1..75: mol_type = other DNA
ctggtaggctcggaagatttgccggtgctgaatgagaacacgttcaacagtcacgcccctgcgccatcgtcacgg

SEQ ID NO: 674109 - DNA, 75 bp, synthetic construct
  source 1..75: mol_type = other DNA
cctgctccgccagatgatggatgcgggtagcgtcggtaatgttgtgcattatgaaccctccaacgttcttattct

SEQ ID NO: 674110 - DNA, 75 bp, synthetic construct
  source 1..75: mol_type = other DNA
gaggcgtttgacctgctggtttatgcggatgcgcttgccgttctgcatggttacgaaaagatccgctggccctcc

SEQ ID NO: 674111 - DNA, 75 bp, synthetic construct
  source 1..75: mol_type = other DNA
ctacgcctgagactcgttttgaaattggcgttatcactggcgataaaaactttattgaggatgccattaatcaga

SEQ ID NO: 674112 - DNA, 75 bp, synthetic construct
  source 1..75: mol_type = other DNA
tgtacagacaggacaggccggaaatgtggatgcggcagtagccgctactgaccggataccgcttcgcccggtggt

SEQ ID NO: 674113 - DNA, 75 bp, synthetic construct
  source 1..75: mol_type = other DNA
accactggagcgattggtcacatcacccggcaacgcggttgaattttgcaaatcagtttgatctcaatatgacag

SEQ ID NO: 674114 - DNA, 75 bp, synthetic construct
  source 1..75: mol_type = other DNA
gactaatgcagcaattggtatcagcgtaaactcagctgctcagcttgctggaaaagatcctttcagttatgtgga

SEQ ID NO: 674115 - DNA, 75 bp, synthetic construct
  source 1..75: mol_type = other DNA
aaaaaacatcttgtttatcatgaaaatgctcataaaaaattcatttttaatggctttatttttttactagagata

SEQ ID NO: 674116 - DNA, 75 bp, synthetic construct
  source 1..75: mol_type = other DNA
ttatttatgaagattatgacttagctatgttatacataaaacacattcgacttcgtttacttcttaacaaatctt

SEQ ID NO: 674117 - DNA, 75 bp, synthetic construct
  source 1..75: mol_type = other DNA
gctgattgcccctgagcagaaacgcgaactgaataaccaggggatctggctgcgggaaggcgaacgggcagcggc

SEQ ID NO: 674118 - DNA, 75 bp, synthetic construct
  source 1..75: mol_type = other DNA
agtaatggtggcacacttagccaactggactggaaaattcaaaatacgcccattgttaaaatgggcgtaacctgg

SEQ ID NO: 674119 - DNA, 75 bp, synthetic construct
  source 1..75: mol_type = other DNA
tttatttttcttcagcatggtatcattcataatgatcaatctacattatttagaccagactggaagaaaattgat

SEQ ID NO: 674120 - DNA, 75 bp, synthetic construct
  source 1..75: mol_type = other DNA
tatgtcataatttattttcagacgtattcttttatgagcaaagaatgtggttatggttgaccaagcaagcacata

SEQ ID NO: 674121 - DNA, 75 bp, synthetic construct
  source 1..75: mol_type = other DNA
aaaccttcaacaatatctacatggccagtggtgatggcacagtccgactgaatgcagaaaaagcgctgtctgacg

SEQ ID NO: 674122 - DNA, 75 bp, synthetic construct
  source 1..75: mol_type = other DNA
gtatgttcaccatgataatgagtatactgcgacctttgccggacttggcacccgtgattacggctctcattcctg

SEQ ID NO: 674123 - DNA, 75 bp, synthetic construct
  source 1..75: mol_type = other DNA
cattaaagataaagcaaaagcgttattctcaaattatgtatacctgcttaacacaaaaacaaccatagagaaagg

SEQ ID NO: 674124 - DNA, 75 bp, synthetic construct
  source 1..75: mol_type = other DNA
ctgaacggtgcggtgattgcgtccacggcaacggcagataaaaacaggctggataccggcacactgggcttcagt

SEQ ID NO: 674125 - DNA, 75 bp, synthetic construct
  source 1..75: mol_type = other DNA
caaatgtggctgctcatgctgtggtgaatgctgcactggcggtggcacagggtaataacgcccttgccggtgccg

SEQ ID NO: 674126 - DNA, 75 bp, synthetic construct
  source 1..75: mol_type = other DNA
aaacgtatgggtgacctgcgtgacatcaacggcgaagccggtgcatgggcacgcatcatgagcggtaccggctct

SEQ ID NO: 674127 - DNA, 75 bp, synthetic construct
  source 1..75: mol_type = other DNA
tcggtgcgaatccgcatgatctggcacgtcccaatatcaccgcggccaccacacttgccagcgccgcaaatatcg

SEQ ID NO: 674128 - DNA, 75 bp, synthetic construct
  source 1..75: mol_type = other DNA
tattcaaaagcaaacgcagattaacggcgccgataattcacgtagatatatacggggcgtttttgcgggcggaac

SEQ ID NO: 674129 - DNA, 75 bp, synthetic construct
  source 1..75: mol_type = other DNA
atatccgaaactaacatgggtgagtgctggcccctggaactgcgaagattacatagcttatccagaagaatggat

SEQ ID NO: 674130 - DNA, 75 bp, synthetic construct
  source 1..75: mol_type = other DNA
ttactgacagcgcaaacaataagaaattccatacgctgacggtcgatgagctggcaaccagcaacagcgcctatg

SEQ ID NO: 674131 - DNA, 75 bp, synthetic construct
  source 1..75: mol_type = other DNA
ggcgtctctgaccatgagatgaactggaagcaatatctttgtgccattctcggcctgaacatgctggggctggcg

SEQ ID NO: 674132 - DNA, 75 bp, synthetic construct
  source 1..75: mol_type = other DNA
cgcagacgaaggcgagtacatcagcaatgatgaaatggaaaagcgaatgaaggcgctgaaacaacgggccacgcg

SEQ ID NO: 674133 - DNA, 75 bp, synthetic construct
  source 1..75: mol_type = other DNA
gatcctaagtacgatccaacatggataaaatatgctgaagtaaatcgtaacgatatcattcgagaaggcatgaaa

SEQ ID NO: 674134 - DNA, 75 bp, synthetic construct
  source 1..75: mol_type = other DNA
agcaacgcgcaggtcacgctgaatatccctgctcaacaggtggtgacgaataacagtgacagcgtgcagcttacg

SEQ ID NO: 674135 - DNA, 75 bp, synthetic construct
  source 1..75: mol_type = other DNA
gtcttctaataccgcaggtggaggccgacaatacattgtttccctggaaaacggggcgcatggttctgttcaaac

SEQ ID NO: 674136 - DNA, 75 bp, synthetic construct
  source 1..75: mol_type = other DNA
gcccgatgccagcaacgcgcaggtcaccctgaacatccctgctcaacaggtggtgacgaataacagtgacagcgt

SEQ ID NO: 674137 - DNA, 75 bp, synthetic construct
  source 1..75: mol_type = other DNA
cgcagggtatagccgaggtcaccatgacgcccgaaagaaacggttcgtatatggtgaaagcatccctggcgaatg

SEQ ID NO: 674138 - DNA, 75 bp, synthetic construct
  source 1..75: mol_type = other DNA
gctggtgctctcgacgcgtcacgaaggtgttcaggacatcaccctttctgactggaaagataatggtgacggaag

SEQ ID NO: 674139 - DNA, 75 bp, synthetic construct
  source 1..75: mol_type = other DNA
tgaactggacaacgattatgaagcacgcccggccaatggctgggatgtacgcgcagaaggctggttacccgcctg

SEQ ID NO: 674140 - DNA, 75 bp, synthetic construct
  source 1..75: mol_type = other DNA
gcgtattatcagttgaataatgacaactttgccccaggaaaaacggcggctgattatgagttttcaagctctgcc

SEQ ID NO: 674141 - DNA, 75 bp, synthetic construct
  source 1..75: mol_type = other DNA
atcaagctggtctgagtaccacaatacaattcactcgcgcagaagacaaaataatgagcggtacagtgtcagtca

SEQ ID NO: 674142 - DNA, 75 bp, synthetic construct
  source 1..75: mol_type = other DNA
tgtagatccggcaaacgcagccattgcaggctgggtgaatgtgttcagcatgggtaatggcctggcggggactgt

SEQ ID NO: 674143 - DNA, 75 bp, synthetic construct
  source 1..75: mol_type = other DNA
cgaacttcacgctgagcgatggcggtaaagcggttactgatactgaaggcaaagcgaaagtcacgctgaaaggta

SEQ ID NO: 674144 - DNA, 75 bp, synthetic construct
  source 1..75: mol_type = other DNA
tttctctggcaacaggtgagcaaagtgtatatgaaaagcttgggtttgctcatgcgacatgttataaaaacctct

SEQ ID NO: 674145 - DNA, 75 bp, synthetic construct
  source 1..75: mol_type = other DNA
gaagccggtgactttgattgccgatgctggtaccgctcaaatggctggttttaccgcatcatcaagctcattcac

SEQ ID NO: 674146 - DNA, 75 bp, synthetic construct
  source 1..75: mol_type = other DNA
ccgttgacggcaacgagctacgcgaagaaactcgctatcttaatgttgactactccgccgtgacgggtttacttg

SEQ ID NO: 674147 - DNA, 75 bp, synthetic construct
  source 1..75: mol_type = other DNA
tttctggctggtaaaggtaaactgacgcagacgtggcacattaagctcagtggtctacggagtctataccagtac

SEQ ID NO: 674148 - DNA, 75 bp, synthetic construct
  source 1..75: mol_type = other DNA
atgacaaatttttataaggtctttctggctgtattcattctggtttgctgcaatatcagtcaggcggcagtttca

SEQ ID NO: 674149 - DNA, 75 bp, synthetic construct
  source 1..75: mol_type = other DNA
tcaatggtttattgcggtgataacctgaagggtgagattgaggctatttataatagtcttgagaggcgtcaggtt

SEQ ID NO: 674150 - DNA, 75 bp, synthetic construct
  source 1..75: mol_type = other DNA
caagttgacggaacaagtgactatctcaaggatggagaatggcctattgataatgggattattgaagtctacgcc

SEQ ID NO: 674151 - DNA, 75 bp, synthetic construct
  source 1..75: mol_type = other DNA
tttctgccgaagggctggcgcatggcaaaccgcatccggagatttttctcaccgccgcattgatgacaggtcaag

SEQ ID NO: 674152 - DNA, 75 bp, synthetic construct
  source 1..75: mol_type = other DNA
aataatgacaactttgccccaggaaaaacggcggctgattatgagttttcaagctctgcctcctgggtcgatgtt

SEQ ID NO: 674153 - DNA, 75 bp, synthetic construct
  source 1..75: mol_type = other DNA
acgacctgagcaaactaggcaatgaaaacaagagctgggattactggggaagtgcctcggcaggcattaccggag

SEQ ID NO: 674154 - DNA, 75 bp, synthetic construct
  source 1..75: mol_type = other DNA
gcaacagagatacgaaaatcgtcaatattgcgcccgatgccagcaacgcgcaggtcaccctgaacatccctgcac

SEQ ID NO: 674155 - DNA, 75 bp, synthetic construct
  source 1..75: mol_type = other DNA
caggatgtaaatcagatccaactgtatcatggtgctccttatatctttacatttggggatgtggacagacacaat

SEQ ID NO: 674156 - DNA, 75 bp, synthetic construct
  source 1..75: mol_type = other DNA
gggagtctcttactgatagatgagcccgaaactcatttacatcctaacttcatagcgctaataatgctgctttac

SEQ ID NO: 674157 - DNA, 75 bp, synthetic construct
  source 1..75: mol_type = other DNA
gtcgcgaatgccgaaatcacgctggcagcctcgaaggatccggtgattgccgacaataacgatctcacgacacta

SEQ ID NO: 674158 - DNA, 75 bp, synthetic construct
  source 1..75: mol_type = other DNA
gagcaagcctggcgtggcaacctgcgctacctggacacattaaaccgacttgatgaggtattgcctcgcaaactg

SEQ ID NO: 674159 - DNA, 75 bp, synthetic construct
  source 1..75: mol_type = other DNA
atgtcgcaactttgattatgagggggttcgcaagatattgctaaatgcacctaccgcgtttaatcctactgatga

SEQ ID NO: 674160 - DNA, 75 bp, synthetic construct
  source 1..75: mol_type = other DNA
gagctggcgcgtcccgatttgctctctggggacccaacgcatgggcaactggcgcaggcgtttaatcagctacaa

SEQ ID NO: 674161 - DNA, 75 bp, synthetic construct
  source 1..75: mol_type = other DNA
tgatttccaatattgctcttgcagcagccatcgcttttttgtctccgttaaagactgctgttccttttgttattc

SEQ ID NO: 674162 - DNA, 75 bp, synthetic construct
  source 1..75: mol_type = other DNA
caacagcaggcacccggatcagcactctggaaaatcaggtaagcgaactggttgcacttgtccggcagttaacag

SEQ ID NO: 674163 - DNA, 75 bp, synthetic construct
  source 1..75: mol_type = other DNA
tactattttaaatatgctcactcctcctgttaggaatggtatccccagcactacatggatagcaaaaaatcttga

SEQ ID NO: 674164 - DNA, 75 bp, synthetic construct
  source 1..75: mol_type = other DNA
tcaggatatggcgcatcttgaaaggttaatcaaggcatttagcgttgagaccatctaccatgcggctgcttataa

SEQ ID NO: 674165 - DNA, 75 bp, synthetic construct
  source 1..75: mol_type = other DNA
tcaggaaaaaataaaacgtcttttaaaagaaaaaatctattttaagctaccaccttctttaagagctttattata

SEQ ID NO: 674166 - DNA, 75 bp, synthetic construct
  source 1..75: mol_type = other DNA
ctatttcatctattactaacaaagaggaagtattggattatttatctgttaaaactggattgaattttaagcgct

SEQ ID NO: 674167 - DNA, 75 bp, synthetic construct
  source 1..75: mol_type = other DNA
ttattttgacaaaaaatgagtcattacatatcaaaaggtgtcttgattccttacggaatatagctgataaaatag

SEQ ID NO: 674168 - DNA, 75 bp, synthetic construct
  source 1..75: mol_type = other DNA
tcgcaatattggcgatgtcaatggtgtaattaaaagaaattacttaagacctaaccatgcttcgttgaatataaa

SEQ ID NO: 674169 - DNA, 75 bp, synthetic construct
  source 1..75: mol_type = other DNA
ctggcgtcgttacgatccacccgtggtgggaaagccaccagtaacgtgattggcagcgccattctcgtcaggcgc

SEQ ID NO: 674170 - DNA, 75 bp, synthetic construct
  source 1..75: mol_type = other DNA
ggtttaatcaattgcaaccggaaatgttgaaaaagtgggatgcagcgactccctatgccagtcatcaatggctat

SEQ ID NO: 674171 - DNA, 75 bp, synthetic construct
  source 1..75: mol_type = other DNA
tttcatatttaaaaccaagcagcaataaatggaaagcattaaacgacgactcatatctttattggcgagaccttc

SEQ ID NO: 674172 - DNA, 75 bp, synthetic construct
  source 1..75: mol_type = other DNA
agggcgtattccagttatttaaactccacggttctgtaagttggataagaaaggatgggcaaatatatgaatcca

SEQ ID NO: 674173 - DNA, 75 bp, synthetic construct
  source 1..75: mol_type = other DNA
tctcactatcaggttatgacattcacttcataaatgcatctttcagtgattttgttaaattagttcccaatctta

SEQ ID NO: 674174 - DNA, 75 bp, synthetic construct
  source 1..75: mol_type = other DNA
tagtggagcaagctgcacctgatgaattttttgcgcatcctaaatcagagcgtacgagggcatttttatcgcagg

SEQ ID NO: 674175 - DNA, 75 bp, synthetic construct
  source 1..75: mol_type = other DNA
atggagtattcaacttattcaaattacatggttctgttagctggataagaaaagacggacaaatatacgaaaatc

SEQ ID NO: 674176 - DNA, 75 bp, synthetic construct
  source 1..75: mol_type = other DNA
ttcctagaaaatggaagtagcgatctatcctcatatgtaagtctactccaaaaaatggggaggcggagagtaaga

SEQ ID NO: 674177 - DNA, 75 bp, synthetic construct
  source 1..75: mol_type = other DNA
ggattgcggagaataacaaccgtcgttctcatcgcgtaatctctggatatcgacccataacgggcaatgataaaa

SEQ ID NO: 674178 - DNA, 75 bp, synthetic construct
  source 1..75: mol_type = other DNA
gcgcagtacgtcgggtaaatccctttacagacgcgctggtttatcgttcccgcgggagtacacagcaggcagatt

SEQ ID NO: 674179 - DNA, 75 bp, synthetic construct
  source 1..75: mol_type = other DNA
aaattgttacctctcgcggtgaatataaatgtcacatttgcgctggcgaaattttaaagggtgaaatccatcgta

SEQ ID NO: 674180 - DNA, 75 bp, synthetic construct
  source 1..75: mol_type = other DNA
ggacggacggctgacgggagaacagcgcccggacggtctgatacggatgtttgtgctgaatgcgggcgggtatcc

SEQ ID NO: 674181 - DNA, 75 bp, synthetic construct
  source 1..75: mol_type = other DNA
ttcagatattatgcgccggagtgcgggaggttcgtaagccaggatccgatttcgatccggggtggtctgaatctt

SEQ ID NO: 674182 - DNA, 75 bp, synthetic construct
  source 1..75: mol_type = other DNA
agtgttcacggtgatgtttcccttcaggcaggtaaccggctgagcgccaacagtgctgacctgattgccggcagg

SEQ ID NO: 674183 - DNA, 75 bp, synthetic construct
  source 1..75: mol_type = other DNA
tatccagtaaagactgataaaagcgtaagttttattattctacttttgttggtatcaggatggttgctctatcgc

SEQ ID NO: 674184 - DNA, 75 bp, synthetic construct
  source 1..75: mol_type = other DNA
ccaacgagaacggcagccggagtgaatttacctacgatgtgctggaccgcctgacggagcagcgcggctttgatg

SEQ ID NO: 674185 - DNA, 75 bp, synthetic construct
  source 1..75: mol_type = other DNA
gtggaaaccgatattaatgccagcaaaacccggcagcagctcaacgatgtcgcggggaaaatgaaaattattgag

SEQ ID NO: 674186 - DNA, 75 bp, synthetic construct
  source 1..75: mol_type = other DNA
cataacgtcattatgtggagatggctgatcgcaacagtattcatgctggaaatgagagaggaaaacggcactgtc

SEQ ID NO: 674187 - DNA, 75 bp, synthetic construct
  source 1..75: mol_type = other DNA
attatagaacaacaccctcttttaaatatggaaatgattaaggaaatacgtttattctgttgctgtagtggtttt

SEQ ID NO: 674188 - DNA, 75 bp, synthetic construct
  source 1..75: mol_type = other DNA
catcaaaacttaatttgcttgttgtaattattagtttgccaataatcttatctacatatgcttttggttcaatga

SEQ ID NO: 674189 - DNA, 75 bp, synthetic construct
  source 1..75: mol_type = other DNA
tctgacactttttaattatttatttaataaagggattgtatttaaattacatcttaaaacagtaggtaaagcatt

SEQ ID NO: 674190 - DNA, 75 bp, synthetic construct
  source 1..75: mol_type = other DNA
tatggtccaattattgcttctggtaaactaggcctagctgattttggttttttaggaggcgttaatcactatgtt

SEQ ID NO: 674191 - DNA, 75 bp, synthetic construct
  source 1..75: mol_type = other DNA
tcccctaaagaattggaacatgacaacgcagtaataagagccctgcaaaaactacaaattcaagaagtttgtaac

SEQ ID NO: 674192 - DNA, 75 bp, synthetic construct
  source 1..75: mol_type = other DNA
agagtcgcctttagaatttagcattaaaagattacttagaatatatcctccatacatattttcttttgcaatact

SEQ ID NO: 674193 - DNA, 75 bp, synthetic construct
  source 1..75: mol_type = other DNA
cgcttgctgaacttcacaacagctttatagctgaactggatgaaaacggctggcctgaaatgccgctggcgcact

SEQ ID NO: 674194 - DNA, 75 bp, synthetic construct
  source 1..75: mol_type = other DNA
cgggaagtgccgacttattacacgccgaagccacaccgcacggcgtcaatatcatgacccgcaatgatgccgggg

SEQ ID NO: 674195 - DNA, 75 bp, synthetic construct
  source 1..75: mol_type = other DNA
gtatatgtgatttttatagagttactggaagaatagaagaaactctggttattaataattataaggtcaagatgt

SEQ ID NO: 674196 - DNA, 75 bp, synthetic construct
  source 1..75: mol_type = other DNA
gcgtcaatggtgaatacgaagaagaggacccgatagaagcgcgtcacgcactgggccatcaacgtaggggggcag

SEQ ID NO: 674197 - DNA, 75 bp, synthetic construct
  source 1..75: mol_type = other DNA
cctgaataaatctcagtcttctcttagctctgctattgagcgtctctcttctggcctgcgtattaacagtgctaa

SEQ ID NO: 674198 - DNA, 75 bp, synthetic construct
  source 1..75: mol_type = other DNA
atctgaagcagattgatgctaaaactcttggccttgatggttttagcgttaaaaataacgatacagttaccacta

SEQ ID NO: 674199 - DNA, 75 bp, synthetic construct
  source 1..75: mol_type = other DNA
accggtactaactctgattctgacctgtcttcaatacaggacgaaatcaaatcccgtctcgatgaaattgaccgc

SEQ ID NO: 674200 - DNA, 75 bp, synthetic construct
  source 1..75: mol_type = other DNA
tccggcgggcgtgaaaaactacagcaaaaccaagccgatgaagtttgaagagtttcaggcggagatcgactggtg

SEQ ID NO: 674201 - DNA, 75 bp, synthetic construct
  source 1..75: mol_type = other DNA
gcacggcaaccttttgcggcgttactgctccctgaacgcccggatattgccaatgctatggcgctacgttactca

SEQ ID NO: 674202 - DNA, 75 bp, synthetic construct
  source 1..75: mol_type = other DNA
tttcagttgaagggagtattggtaaagacggctttggcggctctttcagagttggtggaggaattggtgcgagta

SEQ ID NO: 674203 - DNA, 75 bp, synthetic construct
  source 1..75: mol_type = other DNA
gcgtgaactgtctgttcaggcagctaatggttcaaactctgattccgatttggattctattcaggctgaaattac

SEQ ID NO: 674204 - DNA, 75 bp, synthetic construct
  source 1..75: mol_type = other DNA
ccgacagacagcgtgggataagcgcaccaacaagctgctcaagcgctgctggaaacagattaagggcgctgacaa

SEQ ID NO: 674205 - DNA, 75 bp, synthetic construct
  source 1..75: mol_type = other DNA
agaaagagaaaatcgagaacatgtccaagctggctgatgtcgtccagaaaacaactggcatgtatggcggtgaag

SEQ ID NO: 674206 - DNA, 75 bp, synthetic construct
  source 1..75: mol_type = other DNA
attccattactcaaattaccggtgccgccggggtaaaacctgttggtgttgatttcactgctgttgcgaaagatc

SEQ ID NO: 674207 - DNA, 75 bp, synthetic construct
  source 1..75: mol_type = other DNA
ggcgaaaggttgtgaggcccgtggtgactgtggtcagatcgtgaaagaaatggaagatctgagtctcaagcagcg

SEQ ID NO: 674208 - DNA, 75 bp, synthetic construct
  source 1..75: mol_type = other DNA
agcaatttaacagctgacccgcttaaggctcttgatgatgcaattgcatctgttgataaattccgctcttctctc

SEQ ID NO: 674209 - DNA, 75 bp, synthetic construct
  source 1..75: mol_type = other DNA
tccggatgtcagccgatttaaaaatgctcgttttttatttgagagaataccgggtcagcctcttttttatgcttc

SEQ ID NO: 674210 - DNA, 75 bp, synthetic construct
  source 1..75: mol_type = other DNA
ggctgcatatggcgtcgggcgcggtgacagcggtgacggggccggacggcaggacggtgcggtatggctataaca

SEQ ID NO: 674211 - DNA, 75 bp, synthetic construct
  source 1..75: mol_type = other DNA
agacggcccgtagcttcggcggggcgggcagtacagcggggtacgaacaggccacggcgtacaccctcacagggc

SEQ ID NO: 674212 - DNA, 75 bp, synthetic construct
  source 1..75: mol_type = other DNA
agacctcgcgcagcggtgagacaacgcggtacagctatgatgacccggcgagtgagctgccgacagggatacagg

SEQ ID NO: 674213 - DNA, 75 bp, synthetic construct
  source 1..75: mol_type = other DNA
cactcatcctgttggggaactcatttctgacacctcctgtacaggccatagggttcgactattacaatgatcacg

SEQ ID NO: 674214 - DNA, 75 bp, synthetic construct
  source 1..75: mol_type = other DNA
atcggtgtggggcccggagggcttggtttcagtctgtcagccagtgtgaatcagggtaagggcagtgaaaaaggt

SEQ ID NO: 674215 - DNA, 75 bp, synthetic construct
  source 1..75: mol_type = other DNA
ggcgagccactggtcgagagccgctacctctacgacccgctgggacggcgaatggcgaaacgggtatggcggcgg

SEQ ID NO: 674216 - DNA, 75 bp, synthetic construct
  source 1..75: mol_type = other DNA
gacaacagaatggtgcgcagaatacgatgaatggggtaaccagctgaatgaagagaacccgcaccagctgcagca

SEQ ID NO: 674217 - DNA, 75 bp, synthetic construct
  source 1..75: mol_type = other DNA
tccagcgactgggcgtcctgaccgctggcgcatcactggttccgctggctcaggcgcaatttcccttttcgcctg

SEQ ID NO: 674218 - DNA, 75 bp, synthetic construct
  source 1..75: mol_type = other DNA
ctacaaaaagctgagaagaaaaaaaacattgtctggcgttatgaaaatttttcactggagtggcagtccgccatt

SEQ ID NO: 674219 - DNA, 75 bp, synthetic construct
  source 1..75: mol_type = other DNA
ataaagaccggacaactgcgccgcacctggccgttcgccgcagtgttgatcatcggtttgcctttactggcgcaa

SEQ ID NO: 674220 - DNA, 75 bp, synthetic construct
  source 1..75: mol_type = other DNA
tttctggcttctatgattcactgatggcgaaactggtcatttgggcaccagaccgcgaccaggcgctggcgcgtg

SEQ ID NO: 674221 - DNA, 75 bp, synthetic construct
  source 1..75: mol_type = other DNA
tacattaaattaatgtcatcactatcagatcatgtcactgttcttacgccactctggccgcatttatgtacatta

SEQ ID NO: 674222 - DNA, 75 bp, synthetic construct
  source 1..75: mol_type = other DNA
tcagccccccaacatgcagtatggatattgttaatagccagccccaacagcattgcggtcaggtatcgcaaagcg

SEQ ID NO: 674223 - DNA, 75 bp, synthetic construct
  source 1..75: mol_type = other DNA
gcccgtcaaaggtgtaacgacagaagtggttgttgcaggtagcgatagcaaacgtcgaatcgtgttaaatcgcta

SEQ ID NO: 674224 - DNA, 75 bp, synthetic construct
  source 1..75: mol_type = other DNA
acacccctcagttacagcgggagggacgtggcttagcgataacgcatcgcctttttcattaagtaaaaatggggc

SEQ ID NO: 674225 - DNA, 75 bp, synthetic construct
  source 1..75: mol_type = other DNA
cggtgctgagatctattaccaatgaaatgattctcctgcagtataatctttcagttgaacattttaatctgaata

SEQ ID NO: 674226 - DNA, 75 bp, synthetic construct
  source 1..75: mol_type = other DNA
aggtcttgcttttataaagcggttggttgaacgtcatcggggggctattttctttattgccacgcatgactccat

SEQ ID NO: 674227 - DNA, 75 bp, synthetic construct
  source 1..75: mol_type = other DNA
catgatatagtcgaactcccagacgtttttattcttgagaataatggcgatgaatttcttgtctatgaaaggatt

SEQ ID NO: 674228 - DNA, 75 bp, synthetic construct
  source 1..75: mol_type = other DNA
aggggcgcatgactctccgttaccgtggctaccggactgaggtcatcctgaaggagcttggtctagacccggaag

SEQ ID NO: 674229 - DNA, 75 bp, synthetic construct
  source 1..75: mol_type = other DNA
aatggacactggataacgaaattacatgctggcgggaatacccagaatgactttggcgcttctgtgggggttggt

SEQ ID NO: 674230 - DNA, 75 bp, synthetic construct
  source 1..75: mol_type = other DNA
ttcttgaagtagctatttttttggtattgctttctttaggatatttatcgtggatgagtgtccggaaaaatgtag

SEQ ID NO: 674231 - DNA, 75 bp, synthetic construct
  source 1..75: mol_type = other DNA
aggggcgcatgactctccgttaccgtggctaccggactgaagtcctcctcagagagcttggtctagacccggaag

SEQ ID NO: 674232 - DNA, 75 bp, synthetic construct
  source 1..75: mol_type = other DNA
gagcttggtctagacccggaagatgagacccgccagcaccaatcccgagacgagctgatagcgcaactggtcgct

SEQ ID NO: 674233 - DNA, 75 bp, synthetic construct
  source 1..75: mol_type = other DNA
ctaccggactgaagtcctcctccgagagcttggtctagacccggaagatgagacccgccagcaccaatcacgaga

SEQ ID NO: 674234 - DNA, 75 bp, synthetic construct
  source 1..75: mol_type = other DNA
ctgttgagaataatgcgctgtctgagcttgtgccgcctcgcgtacagcaggatacttctctggcaatagatctag

SEQ ID NO: 674235 - DNA, 75 bp, synthetic construct
  source 1..75: mol_type = other DNA
tattcagggatatttcttttcccgccccttccgccgaagaattccaggctggatgagcagcgtgttaccgctgaa

SEQ ID NO: 674236 - DNA, 75 bp, synthetic construct
  source 1..75: mol_type = other DNA
atgaagctaaccgatgcggaaaatgccgccgatggcatttttttccccgcccttgaacaaaatatgatgggcgcg

SEQ ID NO: 674237 - DNA, 75 bp, synthetic construct
  source 1..75: mol_type = other DNA
tatttcttctcacgtcctttgcccgctgaggagatccctggctggatgtctactacgctaccgcttcaaatcgac

SEQ ID NO: 674238 - DNA, 75 bp, synthetic construct
  source 1..75: mol_type = other DNA
atgaaatggtttgcggctattgctgttgtgggtgctttagcgggttgcgcgcgtactgcgccaattgatcaggtt

SEQ ID NO: 674239 - DNA, 75 bp, synthetic construct
  source 1..75: mol_type = other DNA
tggtagtgtggttgatgagtttaggactgaagtaagctatggtgagagacaatcagcacataagtttgtatatgc

SEQ ID NO: 674240 - DNA, 75 bp, synthetic construct
  source 1..75: mol_type = other DNA
aaaaatggaaaaagatgttcctcaacaatacttgctactgttgttgctctctctgttcccacatttgcctttgct

SEQ ID NO: 674241 - DNA, 75 bp, synthetic construct
  source 1..75: mol_type = other DNA
gaataagtcgtgggactatctgggaagcgcgacctcatttacaacaggtatgatggctcccgatcgtggtgtcct

SEQ ID NO: 674242 - DNA, 75 bp, synthetic construct
  source 1..75: mol_type = other DNA
ttactccactacaaagcagctgatggtcgcgccacgacggagtggtttggtgagtcaatgctggaagcaacagaa

SEQ ID NO: 674243 - DNA, 75 bp, synthetic construct
  source 1..75: mol_type = other DNA
gtggagatgcgcatcagtgatgaatggggtgaggttaaagcccgcgcgcagtatgcggatggcgaaaaccagtac

SEQ ID NO: 674244 - DNA, 75 bp, synthetic construct
  source 1..75: mol_type = other DNA
cttaagcattggtatcagttacgacgttggcaaaaaccgtgactacctgctttctaccgcccacaatgcgatgga

SEQ ID NO: 674245 - DNA, 75 bp, synthetic construct
  source 1..75: mol_type = other DNA
catgatacggagatcttcagacgtattcagatcctgcgcgatatgggagtgggtttatctgtcgatgattttggt

SEQ ID NO: 674246 - DNA, 75 bp, synthetic construct
  source 1..75: mol_type = other DNA
cgtgatggcgcgcctgcggggatcctgcaaattaaaacctcgtcaggagcagaaaccagcgcctttatcgaacgc

SEQ ID NO: 674247 - DNA, 75 bp, synthetic construct
  source 1..75: mol_type = other DNA
ctgaatctgggctgtctggttgaggtgtggccagacaggcggaatctggacaccttttacttctggccacgggga

SEQ ID NO: 674248 - DNA, 75 bp, synthetic construct
  source 1..75: mol_type = other DNA
tgaccaacctttcagaagatgaattgcttgatttatattcaatgtataaaagtgcaaacatagcacatcaactat

SEQ ID NO: 674249 - DNA, 75 bp, synthetic construct
  source 1..75: mol_type = other DNA
cccactcattgatgagttaaggcatcagaacactcatcatgttattctcttgacacttgatgttgcaaaaaaata

SEQ ID NO: 674250 - DNA, 75 bp, synthetic construct
  source 1..75: mol_type = other DNA
aagtaaggtagtaccacatcagaccgatagtgttcacgattggttagaaggggtcaattcaccatcccatatcct

SEQ ID NO: 674251 - DNA, 75 bp, synthetic construct
  source 1..75: mol_type = other DNA
atgatactttggtctttgaaaaaagaaaccgatatccgtcgcggaaggcattgtgttttcctgaggcatgttcac

SEQ ID NO: 674252 - DNA, 75 bp, synthetic construct
  source 1..75: mol_type = other DNA
atgatactttggtctatgaaaaaagaaaccgatatccgccgaggaaggcattgtgttttcctgaggcatgttcac

SEQ ID NO: 674253 - DNA, 75 bp, synthetic construct
  source 1..75: mol_type = other DNA
atgatactttggtctatgaaaaaagaaaccgatatccgacgcggaaggcattgtgttttcctgaggcatgttcac

SEQ ID NO: 674254 - DNA, 75 bp, synthetic construct
  source 1..75: mol_type = other DNA
ccgatcccagctccacccggaagatttctaccttgatcttgctgggttgctgggtgaactgatgacctttaccga

SEQ ID NO: 674255 - DNA, 75 bp, synthetic construct
  source 1..75: mol_type = other DNA
atgctcctgccgccgctgtcgttgagtatcagtccttcatcgcgtatctgtaagcggataccggaagtcaaacgg

SEQ ID NO: 674256 - DNA, 75 bp, synthetic construct
  source 1..75: mol_type = other DNA
tatgaccatgtacgcaagagctcataactggtacattttgccaggcgttccagatccaacatttgttgcatttga

SEQ ID NO: 674257 - DNA, 75 bp, synthetic construct
  source 1..75: mol_type = other DNA
gccaaaaagccgtatcaaattcgccttctgacgggtgcgtcaatcagcgccgccgctgacgatgtactttctgac

SEQ ID NO: 674258 - DNA, 75 bp, synthetic construct
  source 1..75: mol_type = other DNA
atgttcactaacattgaaaatattttaaaatcgaaacgcatctctggtgaagctttttttgttgctgatgttcaa

SEQ ID NO: 674259 - DNA, 75 bp, synthetic construct
  source 1..75: mol_type = other DNA
aggctgcaaatgtggctgctcatgctgtggtgaatgctgcactggcggtggcacagggtaataacgcccttgccg

SEQ ID NO: 674260 - DNA, 75 bp, synthetic construct
  source 1..75: mol_type = other DNA
atgatactttggtctctgaaaaaagaaaccgatatccgccgcggaaggcattgtgttttcctgaggcatgttcac

SEQ ID NO: 674261 - DNA, 75 bp, synthetic construct
  source 1..75: mol_type = other DNA
tctacttttggtgatagtaatgtatatttttctctttcacaggatgtgtttgctgcatataaatataaaaataat

SEQ ID NO: 674262 - DNA, 75 bp, synthetic construct
  source 1..75: mol_type = other DNA
agggtgtcctgacggcacaacgctccgccatggataccatgctccgtgacctggacagcgcagcacaggaatttg

SEQ ID NO: 674263 - DNA, 75 bp, synthetic construct
  source 1..75: mol_type = other DNA
atgaaacatgactttatatccgcagacaggcttttacgtgcgctcagtaatggggagtttgaaccgtatctccag

SEQ ID NO: 674264 - DNA, 75 bp, synthetic construct
  source 1..75: mol_type = other DNA
gtgatatatccgacaacagaggcattgtatgccgggctgttcagcagcgcgcctgtgtttctgtttctgtttatc

SEQ ID NO: 674265 - DNA, 75 bp, synthetic construct
  source 1..75: mol_type = other DNA
ttgacgacagaggaaacctgcggctcagaaaggggatgtggtgtgccctgtttttgctggcacacccgtggtggc

SEQ ID NO: 674266 - DNA, 75 bp, synthetic construct
  source 1..75: mol_type = other DNA
tctactttcggggatagtgatatatatttctctctttcacaggatatattttctgcatataaatataaaaataat

SEQ ID NO: 674267 - DNA, 75 bp, synthetic construct
  source 1..75: mol_type = other DNA
tgttcgtgcgctgaccgtgggcgtggcgtaccagacgacggtaggtggcattatgaacacttcggtggctctgat

SEQ ID NO: 674268 - DNA, 75 bp, synthetic construct
  source 1..75: mol_type = other DNA
atgatactttggtctgtgaaaaaagaaaccgatatccggcgcggaaggcattgtgttttcctgaggcatgttcac

SEQ ID NO: 674269 - DNA, 75 bp, synthetic construct
  source 1..75: mol_type = other DNA
atgatactttggtctgtgaaaaaagaaaccgatatccgccggggaaggcattgtgttttcctgaggcatgttcac

SEQ ID NO: 674270 - DNA, 75 bp, synthetic construct
  source 1..75: mol_type = other DNA
agcggccaggatcagaagtggtggcctgctgctgccggtattgctgcatatggaagcaaccacgctgggtttact

SEQ ID NO: 674271 - DNA, 75 bp, synthetic construct
  source 1..75: mol_type = other DNA
tttcgaaaaaatccacatcttttgcttatgctgccggggtaatgttcaatccggcaagtaatattacaattaatg

SEQ ID NO: 674272 - DNA, 75 bp, synthetic construct
  source 1..75: mol_type = other DNA
gcgtattctcccggcgctggggattcaggtgctgaaaaaaccgtcatcagccctgtccggtctgtggcgggagtg

SEQ ID NO: 674273 - DNA, 75 bp, synthetic construct
  source 1..75: mol_type = other DNA
atgtcatttggttcctacagtctcgtctcgcttgcagaggctcgcgacaaacgcgatacagcacgcaagcaggta

SEQ ID NO: 674274 - DNA, 75 bp, synthetic construct
  source 1..75: mol_type = other DNA
ggcaggaatgatcctcgcaagccgatcagcaaggaaagcatcaatcaggtcattgagttattagggtataaaggc

SEQ ID NO: 674275 - DNA, 75 bp, synthetic construct
  source 1..75: mol_type = other DNA
acatcggtaagcgccctattgctgatattaagccaatggaactactggaagcgctacgtaagatggagaaacgcg

SEQ ID NO: 674276 - DNA, 75 bp, synthetic construct
  source 1..75: mol_type = other DNA
gtattcgccgttgggaagtcaaatttaagcctatttgtgattcgaaagttagtcctcacatgcgtaagagttttt

SEQ ID NO: 674277 - DNA, 75 bp, synthetic construct
  source 1..75: mol_type = other DNA
aaagctatcaacagaaaactctttcgaatcagtaagccgtgagtggcattcaactaaagccgatcgttggacggt

SEQ ID NO: 674278 - DNA, 75 bp, synthetic construct
  source 1..75: mol_type = other DNA
tgagcgaagccagcatcaatatggtgctcaaacgtatcggttacgatggcagagcaaccggtcatggttttcgcc

SEQ ID NO: 674279 - DNA, 75 bp, synthetic construct
  source 1..75: mol_type = other DNA
gtataagctatctgatggtggaggcctctaccttgaagtaactaccaacggctcacgttactggcgtttaaagta

SEQ ID NO: 674280 - DNA, 75 bp, synthetic construct
  source 1..75: mol_type = other DNA
tagccattatccttatatatttattggacgtaacaatcgtactaaaccaatttctaaagaaagtatatcacaagt

SEQ ID NO: 674281 - DNA, 75 bp, synthetic construct
  source 1..75: mol_type = other DNA
acaggaaatgcgctttgccacttgggaagaagttgatttagaaaaagggatatgggaaatacctgcagaacgtat

SEQ ID NO: 674282 - DNA, 75 bp, synthetic construct
  source 1..75: mol_type = other DNA
ctcgcttttggcgtctaccccgatgtttctctggcagacgcccgtgaaaaacgtgatgcggcgaagaagattctg

SEQ ID NO: 674283 - DNA, 75 bp, synthetic construct
  source 1..75: mol_type = other DNA
gattgagttgttgggatataaaggaaggctgacggggcatggtttccgccacacgatgagcaccattcttcatga

SEQ ID NO: 674284 - DNA, 75 bp, synthetic construct
  source 1..75: mol_type = other DNA
ctgaatacaatccagcacccgatctcgccacagccctcgcaacaccaaagaaaacacattttccattcctgacag

SEQ ID NO: 674285 - DNA, 75 bp, synthetic construct
  source 1..75: mol_type = other DNA
tatctggatggtcgccgtgaaatgatgcaatggtacgctgattacattgattcgctttccagccacgagagtcag

SEQ ID NO: 674286 - DNA, 75 bp, synthetic construct
  source 1..75: mol_type = other DNA
gcatcggtagagttatcataggtgatgatgttgaaatcggttgtaacaacaccattgaccgagggacacttggag

SEQ ID NO: 674287 - DNA, 75 bp, synthetic construct
  source 1..75: mol_type = other DNA
tgccaaaaatacgcgagaatacaacaaaaatctcgctgtccttaataaactaactaaacaacatggtgtatataa

SEQ ID NO: 674288 - DNA, 75 bp, synthetic construct
  source 1..75: mol_type = other DNA
tgcaacgtctgcataaagcgggatatcgtctggtaatgttaaccggcgataacccaaccaccgccaatgcgatcg

SEQ ID NO: 674289 - DNA, 75 bp, synthetic construct
  source 1..75: mol_type = other DNA
tcttatcaggcctacaccgctgtgaagtgctccaccccgtaggttggataaggcggttacgccgcatccgacatc

SEQ ID NO: 674290 - DNA, 75 bp, synthetic construct
  source 1..75: mol_type = other DNA
tgatattttgaattatagatcactcatttcatattcaaagataaaagacttaattgttttgagggcgtttttaaa

SEQ ID NO: 674291 - DNA, 75 bp, synthetic construct
  source 1..75: mol_type = other DNA
atggcagagcagacgacatcatcggactgtaacccgacccgggggggggatcatccggcgaaaaaaacgatcgtc

SEQ ID NO: 674292 - DNA, 75 bp, synthetic construct
  source 1..75: mol_type = other DNA
ctttctattggcgtatcccccgatgtaacgctagccgacgctcgtgaaaaacgcagcgaagccagaaaaatcctc

SEQ ID NO: 674293 - DNA, 75 bp, synthetic construct
  source 1..75: mol_type = other DNA
gtcatggcattaacgatatcaaagtgaaaaccgcaaaacccaaagacaaaccctataagcttgctgatggcggcg

SEQ ID NO: 674294 - DNA, 75 bp, synthetic construct
  source 1..75: mol_type = other DNA
ggcaggaatgatcctcgcaagccgatcagtaaagaaagcattaaccaagtcattgagttgctggggtataaaggc

SEQ ID NO: 674295 - DNA, 75 bp, synthetic construct
  source 1..75: mol_type = other DNA
cttcggtttcgccaacgacccatccactctggtccgttgcttcattatcggcacccgattgtacatcgagtacga

SEQ ID NO: 674296 - DNA, 75 bp, synthetic construct
  source 1..75: mol_type = other DNA
accgcgccgatccccctgatggcggagcgattattacctgcgtcaactactgcgataacgcattcttccctgacg

SEQ ID NO: 674297 - DNA, 75 bp, synthetic construct
  source 1..75: mol_type = other DNA
atggcgctaaccgatgttaaagtgaaaaccgcgaagccaaaagaaaagccctataagctggctgatggcggtggt

SEQ ID NO: 674298 - DNA, 75 bp, synthetic construct
  source 1..75: mol_type = other DNA
aacgcgcaaaaccacaagacaaaccatatacaatgaatgatgggcaaggcttgtcattactcatcaatccagacg

SEQ ID NO: 674299 - DNA, 75 bp, synthetic construct
  source 1..75: mol_type = other DNA
ctgaaagtcactgaggcgatctccacgggcctgaaattatccggtgccagtacagcagaagccagttcggtgatc

SEQ ID NO: 674300 - DNA, 75 bp, synthetic construct
  source 1..75: mol_type = other DNA
aaactggctgctgcccaggcgtcacttacccgtaatattgcggccagaacagcggcacagacaacgctgaataat

SEQ ID NO: 674301 - DNA, 75 bp, synthetic construct
  source 1..75: mol_type = other DNA
gggcggcggatggctcgctgggtgtgcgagcggtgggcagtatgaacggcagtgcaggtctggtgtattccccgg

SEQ ID NO: 674302 - DNA, 75 bp, synthetic construct
  source 1..75: mol_type = other DNA
cgtgagctgctgtcggtggcaccacagaaagatgaagacaagcgtgacccgttgttatctgccgatgatgagcgc

SEQ ID NO: 674303 - DNA, 75 bp, synthetic construct
  source 1..75: mol_type = other DNA
gtgcgacgggcgcgcctttacaaaagaacaatatcctgttctggccagagcctacccgaccctccgtcttcccga

SEQ ID NO: 674304 - DNA, 75 bp, synthetic construct
  source 1..75: mol_type = other DNA
tgacaccgtggcaaccgctgccggtgctctggttgccgtcggggtagcccgatattttggcaatatggcgtcgtc

SEQ ID NO: 674305 - DNA, 75 bp, synthetic construct
  source 1..75: mol_type = other DNA
cgatgaatggagctctgttaatgccaggctaaagcaggcttcccagtcgtcagatgatttcacggagtcccagcg

SEQ ID NO: 674306 - DNA, 75 bp, synthetic construct
  source 1..75: mol_type = other DNA
gggaaaatgaaggatgaattgtttatagactatatcgatgttgaatggtgtctcagagctaggagtttaggatac

SEQ ID NO: 674307 - DNA, 75 bp, synthetic construct
  source 1..75: mol_type = other DNA
ccaagatagtgtattgcagtcaggttttattagtgcgctactcgaaacgtatactaatttagtaactcagaatat

SEQ ID NO: 674308 - DNA, 75 bp, synthetic construct
  source 1..75: mol_type = other DNA
cgacgtgccctggcagaactgaacagccagttgacggaaatccgcgcttcggctgtcggaatggctggcgcattt

SEQ ID NO: 674309 - DNA, 75 bp, synthetic construct
  source 1..75: mol_type = other DNA
ccactcaaaatgccatatccaagcgccgggcaatgattacagcaaatgcggcactggtacagtcaaacagagccg

SEQ ID NO: 674310 - DNA, 75 bp, synthetic construct
  source 1..75: mol_type = other DNA
ctgccacgacgaaagtcgaaaatgctttcatggcatgggtaggtggcgctaatgaagccactggtgcgacaagta

SEQ ID NO: 674311 - DNA, 75 bp, synthetic construct
  source 1..75: mol_type = other DNA
cgacactagctacatcgatgtcagaggataataaatcaccacaagaagttaccgccgcattatctaaacatgcga

SEQ ID NO: 674312 - DNA, 75 bp, synthetic construct
  source 1..75: mol_type = other DNA
agaactcaatacgagggatctataatcatgctcttcatatagaaaatagaagaataatgttacaatggtatgctg

SEQ ID NO: 674313 - DNA, 75 bp, synthetic construct
  source 1..75: mol_type = other DNA
aacgcaaagctttaagactcgctcaaaagctatcaacagaaaattctttcgaagcaatatgtcgagaatggcata

SEQ ID NO: 674314 - DNA, 75 bp, synthetic construct
  source 1..75: mol_type = other DNA
gttcttaaacgcatagaaaaacgtggagcgttggagaaaaccagaaaagtacgtcaacgatgcggagaggtgttt

SEQ ID NO: 674315 - DNA, 75 bp, synthetic construct
  source 1..75: mol_type = other DNA
acacgatgtcaacgattttgcatgaatatggatttgagtctacatggattgaaatgcaacttgctcactgcgata

SEQ ID NO: 674316 - DNA, 75 bp, synthetic construct
  source 1..75: mol_type = other DNA
gaaaatgcgtaggccacacattgttcctttatctactcaggtagctcacctcttcaaacaactcaaacctattac

SEQ ID NO: 674317 - DNA, 75 bp, synthetic construct
  source 1..75: mol_type = other DNA
ataaaatctccgctgtgtttgtgccggtggtggtagtcattgcgctggtcagtgcggcaatctggtatttctttg

SEQ ID NO: 674318 - DNA, 75 bp, synthetic construct
  source 1..75: mol_type = other DNA
gcaggggtttaactccgcgtggattgaaacgcagcttgcacacgtcgataagaacgcgattcgcgggacgtataa

SEQ ID NO: 674319 - DNA, 75 bp, synthetic construct
  source 1..75: mol_type = other DNA
tcaagcatgaggatccaaccgcatcagtagcaggctcgatttttggttcagtgctgggaggaacaacgtcaaata

SEQ ID NO: 674320 - DNA, 75 bp, synthetic construct
  source 1..75: mol_type = other DNA
accgggcgaaacatatagttatacagatacgttgattgcaataggtacaggttctctgacacaaggtaaaggtgt

SEQ ID NO: 674321 - DNA, 75 bp, synthetic construct
  source 1..75: mol_type = other DNA
acatttgaacaggatgtttttcctttcattggtaaacggccaatagctgaaattaaacccctagaactgcttgaa

SEQ ID NO: 674322 - DNA, 75 bp, synthetic construct
  source 1..75: mol_type = other DNA
atggctctaaccgatatacaaatcaaacgcgcaaaaccacaagacaaaccatatacaatgaatgatgggcaaggc

SEQ ID NO: 674323 - DNA, 75 bp, synthetic construct
  source 1..75: mol_type = other DNA
agatctggccggatacaccggtagtattatcaccaaaacagccacacagatcatcatgttaaccggcgtgcgtac

SEQ ID NO: 674324 - DNA, 75 bp, synthetic construct
  source 1..75: mol_type = other DNA
ggggcagggtgctgttcggcatgacacggcatcttatggataacgtggccgggcaatgtggcgcaacatggcagt

SEQ ID NO: 674325 - DNA, 75 bp, synthetic construct
  source 1..75: mol_type = other DNA
cagatctggcctttgccaccagcataacctcgcagacgctggcggccggttatacggtcgcagacgtgaaccgcg

SEQ ID NO: 674326 - DNA, 75 bp, synthetic construct
  source 1..75: mol_type = other DNA
ctctcggcagatacggtgaaccgcatcaccgggcaggagttttctaaggtgcggctaattgccggttacgacggt

SEQ ID NO: 674327 - DNA, 75 bp, synthetic construct
  source 1..75: mol_type = other DNA
tgagcaaaccggccagacgcgcgggcaaaattacggagtcatttttgatggggagattcgttttacgataaccgg

SEQ ID NO: 674328 - DNA, 75 bp, synthetic construct
  source 1..75: mol_type = other DNA
gcaagtgctggggagttatctcgaaggaccgtacttcacgccgcagaataaaggcgcgcatccgccgggtaatgc

SEQ ID NO: 674329 - DNA, 75 bp, synthetic construct
  source 1..75: mol_type = other DNA
aggggccaggcgtggtacatggatatgatgtgcgaagcgcgcggtgcgcaggatatgccatccagcactgctttg

SEQ ID NO: 674330 - DNA, 75 bp, synthetic construct
  source 1..75: mol_type = other DNA
gggcgtaacgaccaagccggaagacgcaaacgaaacctactgctatctgctcgacagaatgttttcggcattttt

SEQ ID NO: 674331 - DNA, 75 bp, synthetic construct
  source 1..75: mol_type = other DNA
cttgcaagcaactatgaaaacactgatacgggtgagcgatgctatctgattggagtattcgatcagcagatcgct

SEQ ID NO: 674332 - DNA, 75 bp, synthetic construct
  source 1..75: mol_type = other DNA
gaacctggatatcgatatcccgtatgcgacggacccggcaggaaaccggctgccggacccggaactgcacccgga

SEQ ID NO: 674333 - DNA, 75 bp, synthetic construct
  source 1..75: mol_type = other DNA
aagggcgtatcactgaccagaacaacaacggaaacatcacaattgaaggcacgactgcgcagcctgccagtattg

SEQ ID NO: 674334 - DNA, 75 bp, synthetic construct
  source 1..75: mol_type = other DNA
atgtctcttaactggatgcgccattttgagttgcagctgttggaccagaacgggcagggcgtttctctgtcagat

SEQ ID NO: 674335 - DNA, 75 bp, synthetic construct
  source 1..75: mol_type = other DNA
gtatttccccgaggtcgcgttgtttatcaaaacacatcaaggttgatgaatcatatcgcagggcagtgtaaagct

SEQ ID NO: 674336 - DNA, 75 bp, synthetic construct
  source 1..75: mol_type = other DNA
aagaagcgtttgtcagcgcgttcgtcagtacgaccattcagaaaggctacaccactgaagacgtctataaccttc

SEQ ID NO: 674337 - DNA, 75 bp, synthetic construct
  source 1..75: mol_type = other DNA
ccaccccaaacaattactgcatggaataccctaaacgcaccagcactgcaaataaaaacaacttctccgttgagg

SEQ ID NO: 674338 - DNA, 75 bp, synthetic construct
  source 1..75: mol_type = other DNA
cagaacctgctcggcgcgtttatctacaacagtatcggtattccggtcgccgccggtattttgtggccgttcacc

SEQ ID NO: 674339 - DNA, 75 bp, synthetic construct
  source 1..75: mol_type = other DNA
acaggcacggtaaccacagaaaaataacatcagaaaaaaacattccggacacatcacaaacaggaagggtaacgg

SEQ ID NO: 674340 - DNA, 75 bp, synthetic construct
  source 1..75: mol_type = other DNA
tggaagggctaaaaatccttttttccgacaaaaataatgaatttgtaaaaaaactctatgatcccttgataaata

SEQ ID NO: 674341 - DNA, 75 bp, synthetic construct
  source 1..75: mol_type = other DNA
agaccatgaacagccgccacctgaccggtgatgcggtggatgttgttgcctggggtggcagccaggtgtcatggg

SEQ ID NO: 674342 - DNA, 75 bp, synthetic construct
  source 1..75: mol_type = other DNA
agcaaagaaaagtgtgtacgatgggcgtcattatcaggatgtcgggtaaccacggaaggttattcaaaaaggaaa

SEQ ID NO: 674343 - DNA, 75 bp, synthetic construct
  source 1..75: mol_type = other DNA
ttgctgacaacgtgcgcgttgttcatgccggatgcggcgtgagcgccttatcaggcctacaaagtcatgcaaatt

SEQ ID NO: 674344 - DNA, 75 bp, synthetic construct
  source 1..75: mol_type = other DNA
ctgaaagaagaagtggtgtcacgggcaccggtacgcaggggaaaactgcgccgcaatgtggtggtcctttcccgg

SEQ ID NO: 674345 - DNA, 75 bp, synthetic construct
  source 1..75: mol_type = other DNA
ttgctgggtaatcaggcgttgttaaatgagcaacaggttgataccaaagctatcgaagcggagattactgctcag

SEQ ID NO: 674346 - DNA, 75 bp, synthetic construct
  source 1..75: mol_type = other DNA
agacagcttcgctggctccgttcacgacagcccgccccgccagggggacgcccggaaaagccataagcaggagag

SEQ ID NO: 674347 - DNA, 75 bp, synthetic construct
  source 1..75: mol_type = other DNA
ataccggcatcccgcacagtttcagcaatacgtcggcaggtatttgccgaattatcagcgcccatacacccacca

SEQ ID NO: 674348 - DNA, 75 bp, synthetic construct
  source 1..75: mol_type = other DNA
gtgagcgccttatcaggcctacaaagtcatgcaaattcaatatattgcagaattaacgtagatactgttatggcc

SEQ ID NO: 674349 - DNA, 75 bp, synthetic construct
  source 1..75: mol_type = other DNA
acggcgaatggcgaaacgggtatggcggcgggagcgtgacctgacggggtggatgtcgctgtcgcgtaaaccgga

SEQ ID NO: 674350 - DNA, 75 bp, synthetic construct
  source 1..75: mol_type = other DNA
tggtgctcagctggccggagcgggtgccggaggcggacgaggtgctgccgccggagccgcccgcataccgggtgc

SEQ ID NO: 674351 - DNA, 75 bp, synthetic construct
  source 1..75: mol_type = other DNA
acggggaattgcaactggcttcaggaaatgtatgcttagaagcaataggtgatgaagtgagctatactgaattac

SEQ ID NO: 674352 - DNA, 75 bp, synthetic construct
  source 1..75: mol_type = other DNA
cgattaccgcaaaatacgtccgtgtgaaggaggaagctttgttgccaggggaagttcagggccaggcaatatttg

SEQ ID NO: 674353 - DNA, 75 bp, synthetic construct
  source 1..75: mol_type = other DNA
aacatctggcacacatattccaacttttagaaactttattcctaacggttttaataaaaggccatcgggtgatga

SEQ ID NO: 674354 - DNA, 75 bp, synthetic construct
  source 1..75: mol_type = other DNA
caattatatagcgcatgattgtgatctcaacgatactctggttctttgccagcttacccatcaccacaatggata

SEQ ID NO: 674355 - DNA, 75 bp, synthetic construct
  source 1..75: mol_type = other DNA
gtcaacaattaccgttaagcgaagcggtattaactcgtctgttaaaagaccgctggccgcgtattcgacaagcaa

SEQ ID NO: 674356 - DNA, 75 bp, synthetic construct
  source 1..75: mol_type = other DNA
gagcgttaagcgtatgggtgatgacgatgttgaccgcgagctgcgtgagcacttcacccgccccggtagtcgttg

SEQ ID NO: 674357 - DNA, 75 bp, synthetic construct
  source 1..75: mol_type = other DNA
tggtggtcgtcatcctgggtgcgatcgctggcgcgttcggcatcggccatgcacgcggaacaagcaaggcagaag

SEQ ID NO: 674358 - DNA, 75 bp, synthetic construct
  source 1..75: mol_type = other DNA
tggtggtcgtcatcctgggtgctattgctggcgcgttcggcattggtcatgctcgcggggccagtaaggcgaaag

SEQ ID NO: 674359 - DNA, 75 bp, synthetic construct
  source 1..75: mol_type = other DNA
tggacagcaactcaaccaattacactggacttaacaagggattcaacaatagtaagttttaatcccaacctgcaa

SEQ ID NO: 674360 - DNA, 75 bp, synthetic construct
  source 1..75: mol_type = other DNA
attaatgattttcttgtattaaaacgtcatttattcactgattgtactttcacaatcattatatataatggcaat

SEQ ID NO: 674361 - DNA, 75 bp, synthetic construct
  source 1..75: mol_type = other DNA
tgccgaccgcctgctcggcaaccgcactgcagtaattgccggcgcgctgttaatgacccttggccatgtggtact

SEQ ID NO: 674362 - DNA, 75 bp, synthetic construct
  source 1..75: mol_type = other DNA
caatcaattagaaccacagaaaatattgagcggtttgatattcactcatttaatgaacttgtgaattatattcaa

SEQ ID NO: 674363 - DNA, 75 bp, synthetic construct
  source 1..75: mol_type = other DNA
gttacaggttacacaactggcatgaggatcacgtctggtgctaatgatgtaacaaatacccatgtatggggtctt

SEQ ID NO: 674364 - DNA, 75 bp, synthetic construct
  source 1..75: mol_type = other DNA
taactgatgatacagtagcaaatcaaactgctcttgactggtctgctgataacaaaagaactgttctttttgttg

SEQ ID NO: 674365 - DNA, 75 bp, synthetic construct
  source 1..75: mol_type = other DNA
aaaacaaaaggatatataaatttttcctttatttttctgatggcttattaagcatgtcatttaaaaatttacaat

SEQ ID NO: 674366 - DNA, 75 bp, synthetic construct
  source 1..75: mol_type = other DNA
aaaacaaaaggatgtataagttttttctttatttttctgatggcttattaagtatgtcatttaaaaatttacaat

SEQ ID NO: 674367 - DNA, 75 bp, synthetic construct
  source 1..75: mol_type = other DNA
tgctggacgaaacgttctcggtatcagagacggaatcatcagcgaccaggcagcattgagaatgcttcaggaata

SEQ ID NO: 674368 - DNA, 75 bp, synthetic construct
  source 1..75: mol_type = other DNA
agcgtctttcagctttaggtatcagtagtgataaattatcaacgcctggatttattgctggtttgcaatgtcaaa

SEQ ID NO: 674369 - DNA, 75 bp, synthetic construct
  source 1..75: mol_type = other DNA
ccagatgctttcatcaaaatgcgatgagttaatcttcgttttatataatgttcaggcttcgacgcgtgataccac

SEQ ID NO: 674370 - DNA, 75 bp, synthetic construct
  source 1..75: mol_type = other DNA
agctgatctcgatcgtcttcagcctgctgatcattgatgcattcaatccgctcgatcacaaggtcttccagaccg

SEQ ID NO: 674371 - DNA, 75 bp, synthetic construct
  source 1..75: mol_type = other DNA
ttccgactgctcagccgatagtcattaacgcgggtgggtatcctgtttacaacgggcagatatcaaagttcgtta

SEQ ID NO: 674372 - DNA, 75 bp, synthetic construct
  source 1..75: mol_type = other DNA
ttggacgtgtagttataacatgcaatataactaataattcttcaggagatacattttacattcaactacctcctt

SEQ ID NO: 674373 - DNA, 75 bp, synthetic construct
  source 1..75: mol_type = other DNA
attattcagtctgagatcaactatataaagcatgtgtataaaattgagctgaccggtcttgctcttattgataat

SEQ ID NO: 674374 - DNA, 75 bp, synthetic construct
  source 1..75: mol_type = other DNA
acagtggtgaccgggcttatctgaatggtgccctgaaccactcacagtccggcggaaccagtggttctgtatcag

SEQ ID NO: 674375 - DNA, 75 bp, synthetic construct
  source 1..75: mol_type = other DNA
tatcacactggctgaatggtcgccgtgagccaaatcttgaagacattgcgcggattatgcgggcgcttggtcgtc

SEQ ID NO: 674376 - DNA, 75 bp, synthetic construct
  source 1..75: mol_type = other DNA
tatccgcatcccgtatgccacagacccggcaggtaaccgcctgcccgacccggagctgcacccggacagcaccct

SEQ ID NO: 674377 - DNA, 75 bp, synthetic construct
  source 1..75: mol_type = other DNA
gcgttgctgcacagccgctatcctggcctcgctctggcgttcgttttgatggtgttaacctgccggatgatgcta

SEQ ID NO: 674378 - DNA, 75 bp, synthetic construct
  source 1..75: mol_type = other DNA
aaagctggaagcagaaggtctggtaacacaactgaatggtttctggtccgtgccggaagagaaaacaccggaggt

SEQ ID NO: 674379 - DNA, 75 bp, synthetic construct
  source 1..75: mol_type = other DNA
tgatttttcacgtcttgtttggtggccggcatccttattctggtgtgccgcttatctctgatgcgggtaatgcgc

SEQ ID NO: 674380 - DNA, 75 bp, synthetic construct
  source 1..75: mol_type = other DNA
gccagccgccctggtttggccatttcattgatgagacagaagagaaacgcgttatcttgctggcgaacttgctgc

SEQ ID NO: 674381 - DNA, 75 bp, synthetic construct
  source 1..75: mol_type = other DNA
ttactaccttatctgctcaaaaagacagcggaggcgtatactttctctgaagggatactatctgcatttttcctg

SEQ ID NO: 674382 - DNA, 75 bp, synthetic construct
  source 1..75: mol_type = other DNA
cgcatgctgcaaccggggatatcagttttcagacgatcaatgattacggtgcattaactccgcgtattaaggcaa

SEQ ID NO: 674383 - DNA, 75 bp, synthetic construct
  source 1..75: mol_type = other DNA
gataacaccagaacaaatcgaaatacgtgagctgaggaaaaagctacaacgcattgaaatggagaatgaaatatt

SEQ ID NO: 674384 - DNA, 75 bp, synthetic construct
  source 1..75: mol_type = other DNA
aacatagcgattgatacgtgtaaaaagcaaagtggtcaaagtggtcaaagtggtcaatgtgtcattactgatatt

SEQ ID NO: 674385 - DNA, 75 bp, synthetic construct
  source 1..75: mol_type = other DNA
atttactggtcagaataagtcctggattcagactgtatactctgccggctccagcggtacgattgatgcgcttta

SEQ ID NO: 674386 - DNA, 75 bp, synthetic construct
  source 1..75: mol_type = other DNA
ctactccatcattcccctggttctattcctcgctgcgcgggcttgtggtgggcggcaaccaggtccggatcgaaa

SEQ ID NO: 674387 - DNA, 75 bp, synthetic construct
  source 1..75: mol_type = other DNA
atgcgatggtgccgatgggcggcctgctgtgcatgaaagacgacagcttctttgatgtgtacaccgagtgcagaa

SEQ ID NO: 674388 - DNA, 75 bp, synthetic construct
  source 1..75: mol_type = other DNA
tacgacacgttacgactagcgttatttgttcagatgacagttactggctggttgccaaaggtgaatcaatgaacg

SEQ ID NO: 674389 - DNA, 75 bp, synthetic construct
  source 1..75: mol_type = other DNA
actggtataacaatcgactattgctggaaagtctgggccatatccctccgtcagaagcagaaaaagcttattatg

SEQ ID NO: 674390 - DNA, 75 bp, synthetic construct
  source 1..75: mol_type = other DNA
ccgctggagattgtcgaaccgggcgttccgttcctgttcctgctcggcaatgacgaaagtcgccacaccaccgaa

SEQ ID NO: 674391 - DNA, 75 bp, synthetic construct
  source 1..75: mol_type = other DNA
gactacggtaaaacggaagaggtaatcaaagcgctggagctgggccgggcctgcggcgcactcactgcggcgttc

SEQ ID NO: 674392 - DNA, 75 bp, synthetic construct
  source 1..75: mol_type = other DNA
atgttggatattgataaaagcaccgtggactttctggtcaccgaaaatatggttcaggaagtggaaaaagttctc

SEQ ID NO: 674393 - DNA, 75 bp, synthetic construct
  source 1..75: mol_type = other DNA
aacctctccccgcgagacaagttcgcgtggcaactgctgcgcctgcacgcccgcgacgacggcagcggcgtcttc

SEQ ID NO: 674394 - DNA, 75 bp, synthetic construct
  source 1..75: mol_type = other DNA
tgtgactaaagatttcatctgcgggataatactcgtttcactaatgctaagctcactattttgctacatatcaat

SEQ ID NO: 674395 - DNA, 75 bp, synthetic construct
  source 1..75: mol_type = other DNA
tggtgaagactatgagaaggtgcgatcggttgccttcacacgtttctacggcgaggacgacgaagatggtcttgt

SEQ ID NO: 674396 - DNA, 75 bp, synthetic construct
  source 1..75: mol_type = other DNA
tccattataatgataagggttctctgtatgtatcgctggcctacacgcggcggcttaaggaagccggattactgg

SEQ ID NO: 674397 - DNA, 75 bp, synthetic construct
  source 1..75: mol_type = other DNA
ggaaagtctgggccatatccctccgtcagaagcagaaaaagcttattatgcttccatcggaaatgatgagctggc

SEQ ID NO: 674398 - DNA, 75 bp, synthetic construct
  source 1..75: mol_type = other DNA
atggctgagagcatcaatggtctatacaaagcggaggtaatacaccgtaagagctggaaaaaccgtgcagaagtg

SEQ ID NO: 674399 - DNA, 75 bp, synthetic construct
  source 1..75: mol_type = other DNA
ggagtggcctgttcggtgtgtccgggagggattacctatgctaactatccctcatcagggaaagatcacggtgtg

SEQ ID NO: 674400 - DNA, 75 bp, synthetic construct
  source 1..75: mol_type = other DNA
ttgttggatgattatagtataatttcctatatgaatgatcaagaatcgtcgtttgaaatcaaagataataatccg

SEQ ID NO: 674401 - DNA, 75 bp, synthetic construct
  source 1..75: mol_type = other DNA
cgaacatgtgtcgatgctgtagatgatgaagttagtgattctgaagctttcagaaaacacaatctggaatatgaa

SEQ ID NO: 674402 - DNA, 75 bp, synthetic construct
  source 1..75: mol_type = other DNA
aaataaccaagatgttaatggagggataacagccagtgcagtagtcagtgaatttggtggcaccatctttatgaa

SEQ ID NO: 674403 - DNA, 75 bp, synthetic construct
  source 1..75: mol_type = other DNA
taaagataaatttaagtccgcggctgagaaatggaggtctgaggcaataaataatcttttcgcagaacttacaga

SEQ ID NO: 674404 - DNA, 75 bp, synthetic construct
  source 1..75: mol_type = other DNA
cagccacaggcacaggctatctggatgggcgtcgatcataatgcgcacaccgaagccaatggctcacgtattgag

SEQ ID NO: 674405 - DNA, 75 bp, synthetic construct
  source 1..75: mol_type = other DNA
tgacgcgcagcacccgggccggatggtggcgcaccgttatgcaggaaggccggagatgcgctaccgctacgacga

SEQ ID NO: 674406 - DNA, 75 bp, synthetic construct
  source 1..75: mol_type = other DNA
tgttgctcttggcctttccatatccaaagctcagggaggggatatttggggagatagtaatattggcgcaggttc

SEQ ID NO: 674407 - DNA, 75 bp, synthetic construct
  source 1..75: mol_type = other DNA
tgatgtagtcttaggcgtttcactatctcggacccaaggcggggatatctggggggataataatatttttgccgg

SEQ ID NO: 674408 - DNA, 75 bp, synthetic construct
  source 1..75: mol_type = other DNA
tgacacagaactaaccttgtcatcaaaaacatttgtatcaatgtcaaaaacgatctgtttttgtcttttttctat

SEQ ID NO: 674409 - DNA, 75 bp, synthetic construct
  source 1..75: mol_type = other DNA
ttgagctaaaaactataaaaactttcactgcgcgaaatgccacaaccaagtatgctataaccaaagtaaaacgaa

SEQ ID NO: 674410 - DNA, 75 bp, synthetic construct
  source 1..75: mol_type = other DNA
gctcaccgacttggcttctttttggggatgaagataaacaaccaggcgaaccgatcccggataatcagccagcca

SEQ ID NO: 674411 - DNA, 75 bp, synthetic construct
  source 1..75: mol_type = other DNA
tgcctataaattcgggcgattacctaatacactgcggcctcgctatggttggcaacggtgctcgagaggagcttg

SEQ ID NO: 674412 - DNA, 75 bp, synthetic construct
  source 1..75: mol_type = other DNA
atctgactggacttccacagtcagggaaattacaggtttcatggggcaaagataaaaactcaaactgtattgtcg

SEQ ID NO: 674413 - DNA, 75 bp, synthetic construct
  source 1..75: mol_type = other DNA
aggcgcattacagaaatggtggtctgttctaccgttcttcaagagacggttatggttttgaggaagactgggcag

SEQ ID NO: 674414 - DNA, 75 bp, synthetic construct
  source 1..75: mol_type = other DNA
ttgcctgtgaagaccaccccgttcctggtgccatggggaatgatgcatatggtctgatgtggcaggttccgacaa

SEQ ID NO: 674415 - DNA, 75 bp, synthetic construct
  source 1..75: mol_type = other DNA
tgaaggcaaaatagcgtcaatgcgagacgttacgcgcggtgggctgtccgctgttttacacgaacatgcgcgcgc

SEQ ID NO: 674416 - DNA, 75 bp, synthetic construct
  source 1..75: mol_type = other DNA
tcttctacgatgcagaggataacgaattagcacagcataaaattgatgccaaaacattaagcatctccataggtt

SEQ ID NO: 674417 - DNA, 75 bp, synthetic construct
  source 1..75: mol_type = other DNA
agaaggtgcagtaatcagtgccaccagcgacccggagtattactttgttgtggttctggcagggcagtcaaacgg

SEQ ID NO: 674418 - DNA, 75 bp, synthetic construct
  source 1..75: mol_type = other DNA
tatggttttgaggaagactgggcagaagtttatacctcgaaaaatcttccaccagaaagctacccagtcggcgca

SEQ ID NO: 674419 - DNA, 75 bp, synthetic construct
  source 1..75: mol_type = other DNA
gaccattccggttgctgcaatggcagacaatattgtttgtcatggcggctggagcattgagcgacacgttaccgg

SEQ ID NO: 674420 - DNA, 75 bp, synthetic construct
  source 1..75: mol_type = other DNA
cgatacgccgccgatgctggcggtgagtgatgccgcggtcgtggggcgttctgttggcaccagcctgctggttgc

SEQ ID NO: 674421 - DNA, 75 bp, synthetic construct
  source 1..75: mol_type = other DNA
gtggaagccgtacgtgcgctacgaaccagtctgcatttcgctatgatggagactgagaataacattctgatgatc

SEQ ID NO: 674422 - DNA, 75 bp, synthetic construct
  source 1..75: mol_type = other DNA
atgaagaggtcgttgtactggatcatggcaccggggcgaaattaagccgcgagttggttgaaaaaattgctagca

SEQ ID NO: 674423 - DNA, 75 bp, synthetic construct
  source 1..75: mol_type = other DNA
atgatgcctttgtcatttctgcgcatctcacgcgcatctcacaacacagaacctttcaggatgacccttgaggat

SEQ ID NO: 674424 - DNA, 75 bp, synthetic construct
  source 1..75: mol_type = other DNA
agggtgcatcaggtggcgagccggatatcaaactttggggtactgacgtaatgggaattgattgcatcttacagg

SEQ ID NO: 674425 - DNA, 75 bp, synthetic construct
  source 1..75: mol_type = other DNA
ccgcacacctgcaacccgaaattccatctgcattatggcgacctgagtgatacctccaacctgacgcgcattttg

SEQ ID NO: 674426 - DNA, 75 bp, synthetic construct
  source 1..75: mol_type = other DNA
acgtgtggaccacatctaccaggatccgcattcaggcaatcccaaatttcatctgcactatggtgatttgacgga

SEQ ID NO: 674427 - DNA, 75 bp, synthetic construct
  source 1..75: mol_type = other DNA
gctgaagggggagaagctttggccgtaaaagtagatgtgtcctgccgtgagcaggtaatttccgccgtcgatcag

SEQ ID NO: 674428 - DNA, 75 bp, synthetic construct
  source 1..75: mol_type = other DNA
taaaggctcaggaagtcagcgttaacttggacggtcagtcagtcaccctgcgcatcgtacagcgctctacagggc

SEQ ID NO: 674429 - DNA, 75 bp, synthetic construct
  source 1..75: mol_type = other DNA
aaggcaaggggattattattatctcctctgaaatgcctgagttgttagggataacagaccgtattctggtcatga

SEQ ID NO: 674430 - DNA, 75 bp, synthetic construct
  source 1..75: mol_type = other DNA
agaaacaacgagacggagaacgcgagtccgcgtctgcagataacctttttgtttctcgtgaagaatacctgtcgg

SEQ ID NO: 674431 - DNA, 75 bp, synthetic construct
  source 1..75: mol_type = other DNA
gaaatatgatgcattgcttgaaaaagatattgccagtgataaggaggttattgctgcctgtagtaatggtaatgc

SEQ ID NO: 674432 - DNA, 75 bp, synthetic construct
  source 1..75: mol_type = other DNA
ttaatgaagtagtcggaggtattgggctgggtttcggacaggaagccggttcattactgggtcagggaattggtg

SEQ ID NO: 674433 - DNA, 75 bp, synthetic construct
  source 1..75: mol_type = other DNA
aacccgtatcacgcccagtatatcctgcgccgccgcgacgattacctggagctgttcgaccgtgatgccctgagc

SEQ ID NO: 674434 - DNA, 75 bp, synthetic construct
  source 1..75: mol_type = other DNA
gaactggtgcgtggcgttgaacgcagctgcttcgaacgcggttatagtctcgtcctttgcaataccgaaggcgat

SEQ ID NO: 674435 - DNA, 75 bp, synthetic construct
  source 1..75: mol_type = other DNA
tgctggcggttgacgggaaagcggtagccctgctggcagtacgcgatccgttgcgtagtgatagcgtggcggcgc

SEQ ID NO: 674436 - DNA, 75 bp, synthetic construct
  source 1..75: mol_type = other DNA
gcggcttcgacattacagtgggcagacatacccaactggatggtgcggtgattgcctccactgccacaccggata

SEQ ID NO: 674437 - DNA, 75 bp, synthetic construct
  source 1..75: mol_type = other DNA
tgccataactgcaacaagatagtccgctacccctatctcggatttaaaggtgagcttttcttcgctgataccaaa

SEQ ID NO: 674438 - DNA, 75 bp, synthetic construct
  source 1..75: mol_type = other DNA
ctcatggcgtcagacctctgccgggtatcgccgttcggtaaccttttacggattcagtgaaaaacctgagatagc

SEQ ID NO: 674439 - DNA, 75 bp, synthetic construct
  source 1..75: mol_type = other DNA
gactgctgaatcttgtcaggaaactgctgaagctgggccgcagcaacagtaatgcccatgaggcaggactggccc

SEQ ID NO: 674440 - DNA, 75 bp, synthetic construct
  source 1..75: mol_type = other DNA
tgcctcactgcatcatggtgtggggggagatgcccgccggatggtgccggggctgatgatacgggaggcgtcatg

SEQ ID NO: 674441 - DNA, 75 bp, synthetic construct
  source 1..75: mol_type = other DNA
aggttataaaattgcagcaataggtcccagcttttatgaccctgagaataataaaatttatccggccactttata

SEQ ID NO: 674442 - DNA, 75 bp, synthetic construct
  source 1..75: mol_type = other DNA
ggatcattagcactttattggagcagtggcttagttcgttgcgtaatacagtaacagaattaaaagtggttttgc

SEQ ID NO: 674443 - DNA, 75 bp, synthetic construct
  source 1..75: mol_type = other DNA
gtgattatggaaaaagtaaaatttatttagagcagtttgtcatttcatgtgcatatttgaaatgcaaaagattcc

SEQ ID NO: 674444 - DNA, 75 bp, synthetic construct
  source 1..75: mol_type = other DNA
gtagctggaaagcgtctgacgatcaaaaagagtggacgttcaccctgaaggacaatgctaaatttgccgatggca

SEQ ID NO: 674445 - DNA, 75 bp, synthetic construct
  source 1..75: mol_type = other DNA
ccctcatttaaggttgccactatcaatttaggggatagacaaaaaggacgggtacgggcgagaaatacaattgat

SEQ ID NO: 674446 - DNA, 75 bp, synthetic construct
  source 1..75: mol_type = other DNA
gggaagatattacatcttcatttaatgcattgagagataatcctacagctatttctggtattcacctttcaaatg

SEQ ID NO: 674447 - DNA, 75 bp, synthetic construct
  source 1..75: mol_type = other DNA
gctgggttctgggcgttcgtcaggtggtgatgccattcagtgtgacagaagaggaaagccggctgatgcgtctct

SEQ ID NO: 674448 - DNA, 75 bp, synthetic construct
  source 1..75: mol_type = other DNA
ttaaccgcattcagtttcgtgagaaattcaccgggcagctactggtcaatgtggataaaggtcgcgtggtgtgta

SEQ ID NO: 674449 - DNA, 75 bp, synthetic construct
  source 1..75: mol_type = other DNA
cgttccaggcgcgttattatgcaatcggcgaggcaaccccgggtgctgctaatgcggatgcgaccttcaaggttc

SEQ ID NO: 674450 - DNA, 75 bp, synthetic construct
  source 1..75: mol_type = other DNA
aaaagatcgcagcggatgaccttgacggtgccgaacgccccacttggaggctctttgcccaggagtatctggtcg

SEQ ID NO: 674451 - DNA, 75 bp, synthetic construct
  source 1..75: mol_type = other DNA
aatcgatagtcaaaagccctggtccttgtatttaggtaggttgcaactattactatctgagactgaattacagga

SEQ ID NO: 674452 - DNA, 75 bp, synthetic construct
  source 1..75: mol_type = other DNA
tttgggagaagtattagttatcggcttgcagcacctgtagcgctcatggcgaatgccattcaatcgggtcgggct

SEQ ID NO: 674453 - DNA, 75 bp, synthetic construct
  source 1..75: mol_type = other DNA
ggatctgaatgatgttgcatgttgcgtggtctgcgaccactcgtttattcatggcacgggggctgcagcattact

SEQ ID NO: 674454 - DNA, 75 bp, synthetic construct
  source 1..75: mol_type = other DNA
tggtctttacaaagcggaggtaatacaccgtaagagctggaaaaaccgtgcagaagtggaactggccacactcac

SEQ ID NO: 674455 - DNA, 75 bp, synthetic construct
  source 1..75: mol_type = other DNA
actggtataacaatcgacgattgctggaaaggctgggccatatcccaccggcagaagcagaaaaagcttattatg

SEQ ID NO: 674456 - DNA, 75 bp, synthetic construct
  source 1..75: mol_type = other DNA
aaaaaaaatactggcaggataaaatcaagaaaatctccaaattcagagtaataaaaatgcaagatctcgatgatg

SEQ ID NO: 674457 - DNA, 75 bp, synthetic construct
  source 1..75: mol_type = other DNA
cgtatctgacccggaatcgtttgtgcgaggtccggctgaaagatggaaacagggaggttacggcaagtctggctt

SEQ ID NO: 674458 - DNA, 75 bp, synthetic construct
  source 1..75: mol_type = other DNA
tgttcgtgccgatggagtggctctgctactacctgtctatttacaaagatcacaacccggatgaacgccgctatt

SEQ ID NO: 674459 - DNA, 75 bp, synthetic construct
  source 1..75: mol_type = other DNA
tgagagcggagagttccgccatggcccgctggagattgtcgaaccgggcgttccgttcctgttcctgctcggcaa

SEQ ID NO: 674460 - DNA, 75 bp, synthetic construct
  source 1..75: mol_type = other DNA
cgtggagtattacaggaaccatgagcaggcggcacaggcgctggaaagcggcacctggacgcagcggacgtgtgc

SEQ ID NO: 674461 - DNA, 75 bp, synthetic construct
  source 1..75: mol_type = other DNA
attcttcactagaggatttttttgaaccaaaagttttgcaaatgaagtataatggaaaaagcttcgataaaagca

SEQ ID NO: 674462 - DNA, 75 bp, synthetic construct
  source 1..75: mol_type = other DNA
ttgattctttgtttttggattaccctcagttagttagagaggaaaaaaacacaaagaatagagtgttaaaagtta

SEQ ID NO: 674463 - DNA, 75 bp, synthetic construct
  source 1..75: mol_type = other DNA
tggagcaggcgttatgggcccgtcgaccgtccggcacagtccatcacagtgataaaggttctcagtatgtatcgc

SEQ ID NO: 674464 - DNA, 75 bp, synthetic construct
  source 1..75: mol_type = other DNA
ggggtaaaagattttgaagaaaaacacggcagccagctgttgttgctgattcgttttttaatgcacgcgagaaat

SEQ ID NO: 674465 - DNA, 75 bp, synthetic construct
  source 1..75: mol_type = other DNA
atgcatcaacaagctatgggaaagaggtcaagttcagttctcaattatccacttgtggataaagtgcagattttt

SEQ ID NO: 674466 - DNA, 75 bp, synthetic construct
  source 1..75: mol_type = other DNA
agggtgtgtatggtatgattgattacatattggaggcaattgataaaggtgttaactatatcaatgaaggtaact

SEQ ID NO: 674467 - DNA, 75 bp, synthetic construct
  source 1..75: mol_type = other DNA
tcatgcggtccacgaattgccgattgaacgcaaggtgctgcactgctcttgcggcaagcgcaccactatcagcgc

SEQ ID NO: 674468 - DNA, 75 bp, synthetic construct
  source 1..75: mol_type = other DNA
aaggcgttgtacgaccgagccacccgtaagctgcggatgatcgggaatagcttgcttgtgccgacgagaagcatt

SEQ ID NO: 674469 - DNA, 75 bp, synthetic construct
  source 1..75: mol_type = other DNA
ctaaaaaaatcgtcacaggaaacagcacgttcagtaattatattggagctatgctggaggacgatttggttgtat

SEQ ID NO: 674470 - DNA, 75 bp, synthetic construct
  source 1..75: mol_type = other DNA
ataccacgctgtcgcggattattcgtatggtgcgccaggcccagagcagcaagcctgaaatcggccaactggcgg

SEQ ID NO: 674471 - DNA, 75 bp, synthetic construct
  source 1..75: mol_type = other DNA
acaaagcggaggtaatacaccgtaagagctggaaaaaccggacagaagtggaactggccacactaacgtgggtgg

SEQ ID NO: 674472 - DNA, 75 bp, synthetic construct
  source 1..75: mol_type = other DNA
cgtaaaaccacagctggttgctgtcgttcgccgtgcgctggagctgacggaggttgatttcggtattacggaagg

SEQ ID NO: 674473 - DNA, 75 bp, synthetic construct
  source 1..75: mol_type = other DNA
gggacgctgaccgaagggaagccgcaggttgtcgcagtgaaaacatttgctgatgttgacgaagcgcaggcgctg

SEQ ID NO: 674474 - DNA, 75 bp, synthetic construct
  source 1..75: mol_type = other DNA
ctttacaaagcggaggtaatacaccgtaagagctggaaaaaccgtgcagaagtagaactggtcacactcacgtgg

SEQ ID NO: 674475 - DNA, 75 bp, synthetic construct
  source 1..75: mol_type = other DNA
ataccacgctatcacggatcattcgcatggtgcgccaggcccagagcagcaagccagaaatcggtcagctggcgg

SEQ ID NO: 674476 - DNA, 75 bp, synthetic construct
  source 1..75: mol_type = other DNA
aattgccggctgtcaggcaaactatattcgtgatgtacaaggagggactgttgcgccatcatcctcttctgaact

SEQ ID NO: 674477 - DNA, 75 bp, synthetic construct
  source 1..75: mol_type = other DNA
tatctgtttatgcagtcatttgtatatgaaagcaatcttcaagatggagactgtaaagaagcaagtgttattgca

SEQ ID NO: 674478 - DNA, 75 bp, synthetic construct
  source 1..75: mol_type = other DNA
taatatgaagaataattacaaaaaggcactagccgatttacaatccttattagttaatctgcataacattatgcc

SEQ ID NO: 674479 - DNA, 75 bp, synthetic construct
  source 1..75: mol_type = other DNA
tgataaagcgcatgagctatatctgtttgatcaggatttacggctgttggtttttaagttgattcaaaaaatcga

SEQ ID NO: 674480 - DNA, 75 bp, synthetic construct
  source 1..75: mol_type = other DNA
atagatgaggcgatccgggttcttaataatgaaatagagagctttaagttaaactatgaaccaggaaatatactt

SEQ ID NO: 674481 - DNA, 75 bp, synthetic construct
  source 1..75: mol_type = other DNA
agcccgtgaaattgcttcattctttgacattgaacaatatttactgggggtcattgatagaaatggtaattatat

SEQ ID NO: 674482 - DNA, 75 bp, synthetic construct
  source 1..75: mol_type = other DNA
ttttttaacggtgaaaaactttaaggcagaagaaaaaataaaccaggagaagtatacagaaaaaccagcagatgt

SEQ ID NO: 674483 - DNA, 75 bp, synthetic construct
  source 1..75: mol_type = other DNA
tgatatgacagtgaaggttaataaccaactggctaatggacagtctgctaaccagataaccctgaccgtcgtgga

SEQ ID NO: 674484 - DNA, 75 bp, synthetic construct
  source 1..75: mol_type = other DNA
gcgttatcttcaaaccagtcgaaagtctctgtcgcagaagatcacgtaaaagccggcgaaagcacaaccgtgacg

SEQ ID NO: 674485 - DNA, 75 bp, synthetic construct
  source 1..75: mol_type = other DNA
gcgttatcttcaggccagtcgacagtgtctgtagccgcagatcgcgtaaaagcaggcgaaagcacaaccgtgacg

SEQ ID NO: 674486 - DNA, 75 bp, synthetic construct
  source 1..75: mol_type = other DNA
tgctggcttatgtcacgaacagggcaatcatgaaacgcctggacgatgtttgcggcaaagcaggatggcgcaatg

SEQ ID NO: 674487 - DNA, 75 bp, synthetic construct
  source 1..75: mol_type = other DNA
cagcgcaactggggatttggcctgtgttttttatatctgcgcaacgtaaaaggcttccgatttaaccacaaaagg

SEQ ID NO: 674488 - DNA, 75 bp, synthetic construct
  source 1..75: mol_type = other DNA
aaggccagtttttaccccagaacaggatcagcatacgtttcgcctggggatgagtgactgggtcgaacgctggct

SEQ ID NO: 674489 - DNA, 75 bp, synthetic construct
  source 1..75: mol_type = other DNA
gagattatgatccaagaaaatatttcggagaaagtgaaaataaacttaatctggataaaaatcttttagatgtta

SEQ ID NO: 674490 - DNA, 75 bp, synthetic construct
  source 1..75: mol_type = other DNA
tctggtattaccgcgcccgctgaaagaggctttaaaacgtgcccatgctgagctttatcgtggcgggcatacact

SEQ ID NO: 674491 - DNA, 75 bp, synthetic construct
  source 1..75: mol_type = other DNA
attaatgccattaatgacgataacgatgaaatatattactccttggtggagaatgcctctgatagtgaggatgta

SEQ ID NO: 674492 - DNA, 75 bp, synthetic construct
  source 1..75: mol_type = other DNA
atgaaaaagcaaagtgaaattaacgtaaaaaaattagcatcatggagattttcatttaaaaacattgggtgtatc

SEQ ID NO: 674493 - DNA, 75 bp, synthetic construct
  source 1..75: mol_type = other DNA
ggatgttgaaaatacagttcccaaatgataatgaaaagcttagcgtatatttaaaaaataaaatcccctttgaaa

SEQ ID NO: 674494 - DNA, 75 bp, synthetic construct
  source 1..75: mol_type = other DNA
gggtatgactaccgccgggatgatgagtttatgatgtggggatcggcagatctcctgtggaaaattacctacgag

SEQ ID NO: 674495 - DNA, 75 bp, synthetic construct
  source 1..75: mol_type = other DNA
tgcgagtctgccggaagcgcagatggaagaggctttcgccacgcttctgacctgtttgcgccatcactgccctca

SEQ ID NO: 674496 - DNA, 75 bp, synthetic construct
  source 1..75: mol_type = other DNA
atgccgggtaatccgataaaaatcagcggctgcgcggacccgcatgttatgccgggagcggcaacgctcgaccag

SEQ ID NO: 674497 - DNA, 75 bp, synthetic construct
  source 1..75: mol_type = other DNA
ccgctgagtttggtgtgtcggtgcgcacgctgcggcgtgattttcgcgagcggctgatgtatctggacctggagt

SEQ ID NO: 674498 - DNA, 75 bp, synthetic construct
  source 1..75: mol_type = other DNA
cccaccgcagcgggatggccggtcttttccctggctttgaccgtcgtctggtaaacgcactgctgatgtgcgatg

SEQ ID NO: 674499 - DNA, 75 bp, synthetic construct
  source 1..75: mol_type = other DNA
tatcatacaaatgacgctgctagattctgtttttccaagagtagacgggtttataaatttgactctaagtcagtt

SEQ ID NO: 674500 - DNA, 75 bp, synthetic construct
  source 1..75: mol_type = other DNA
agaattgaagaacaagttaaaatctgtgcagaatttctttaccaccctgtctaacacggttaaacaagcgaataa

SEQ ID NO: 674501 - DNA, 75 bp, synthetic construct
  source 1..75: mol_type = other DNA
cttacttatggatagccaggataagtattttgaagcaacccaaacagtgtatgaatggtgtggtgttgcgacgca

SEQ ID NO: 674502 - DNA, 75 bp, synthetic construct
  source 1..75: mol_type = other DNA
gacggcgaccgttgaggataaaaatggtaaccctgttccagggagcctggtgacctttaatctgccccggggtgt

SEQ ID NO: 674503 - DNA, 75 bp, synthetic construct
  source 1..75: mol_type = other DNA
cgtgataggtaaaaatcatgaggcggcaggggatagacaaggtcagccagctaaagaaagaatcatggatcttaa

SEQ ID NO: 674504 - DNA, 75 bp, synthetic construct
  source 1..75: mol_type = other DNA
ggataagaatggttcacccatctgcggcatcacgaataaagcatcatcttatggcgtaccgccagataaaccagg

SEQ ID NO: 674505 - DNA, 75 bp, synthetic construct
  source 1..75: mol_type = other DNA
attggctcagactggggtcaactgtttgactgtgcctggatgcgagtttatggtaaacgtccagcagataaattt

SEQ ID NO: 674506 - DNA, 75 bp, synthetic construct
  source 1..75: mol_type = other DNA
actccaaactgtgcgatccattggcctggtgcaagacggcacactctattgctccagcatttttggttatcgcaa

SEQ ID NO: 674507 - DNA, 75 bp, synthetic construct
  source 1..75: mol_type = other DNA
aactgataatttaagaaaggagtcatatcctctgaaaagaaaatgtcccacaggtacagatagagttgctgctta

SEQ ID NO: 674508 - DNA, 75 bp, synthetic construct
  source 1..75: mol_type = other DNA
gctgacggagaagacggaccgcatcccggcgggtgtgatacggacggacgacgagcggacccaccactaccacta

SEQ ID NO: 674509 - DNA, 75 bp, synthetic construct
  source 1..75: mol_type = other DNA
ggtacgggaaaaatcgctctctgccagccaaaaattatggctggagttacctggcaaccgcccacaacatgccgc

SEQ ID NO: 674510 - DNA, 75 bp, synthetic construct
  source 1..75: mol_type = other DNA
tgatgccagcactggcagcaggctgttcaatcgtgattaagccttcggaaaccacgccactgactatgttgcgcg

SEQ ID NO: 674511 - DNA, 75 bp, synthetic construct
  source 1..75: mol_type = other DNA
actgctgatgccaacgaagcggatgtagataacgcagtcatgtctgcctggcgggccttcgtctcgcgtcgctgg

SEQ ID NO: 674512 - DNA, 75 bp, synthetic construct
  source 1..75: mol_type = other DNA
tctaacatacaggccatacgggatgccgggtatgattcggtacaatttgactgtgatgcggagctggtggatgga

SEQ ID NO: 674513 - DNA, 75 bp, synthetic construct
  source 1..75: mol_type = other DNA
caattggcagaagccaatcatccgcaaacaggtgactggttgtacgacgacccaatcgatcttgccagggcgatt

SEQ ID NO: 674514 - DNA, 75 bp, synthetic construct
  source 1..75: mol_type = other DNA
gcacgccgccatgcttcaggccgaacctgtaagtaatagtgatgagttaccgctggactatctgcaaggacacaa

SEQ ID NO: 674515 - DNA, 75 bp, synthetic construct
  source 1..75: mol_type = other DNA
ttcaccgccgttgccctggattcaggtgcagtccgggcgttacatgcaggtcagtaattacccggctcccggaga

SEQ ID NO: 674516 - DNA, 75 bp, synthetic construct
  source 1..75: mol_type = other DNA
caaaaggctggaagattgataatattggtggcctttccgacaaaattttcagtggtggaacgccgaataccagta

SEQ ID NO: 674517 - DNA, 75 bp, synthetic construct
  source 1..75: mol_type = other DNA
acaaacgtcactaaacactattgatacctatattaatcaatcagtagtatgtattcggccaattaaaccatctta

SEQ ID NO: 674518 - DNA, 75 bp, synthetic construct
  source 1..75: mol_type = other DNA
cagcagaatatctatcaccgttggttgaaaggtgaaacgaaaacgcaaagagaaaaaaattcagaagctgatccc

SEQ ID NO: 674519 - DNA, 75 bp, synthetic construct
  source 1..75: mol_type = other DNA
agccagtcacgggcatgaaagatcagatcaagactgaactaactttcaaaccggctggaaatattgtgactcgtt

SEQ ID NO: 674520 - DNA, 75 bp, synthetic construct
  source 1..75: mol_type = other DNA
ccgtcccaaaaaacatattaattctaattatattttatcagtattaatggatcaaaaattcatcgaatatactgt

SEQ ID NO: 674521 - DNA, 75 bp, synthetic construct
  source 1..75: mol_type = other DNA
atgaattgcaaagagcagtcactggccctaaccgcactccgcgacaccctgctcccgaaactcatctccggtgag

SEQ ID NO: 674522 - DNA, 75 bp, synthetic construct
  source 1..75: mol_type = other DNA
tattaaggatttcaggtttaatccttgattctttacaatatgtacagaatgatgagaatttcagaaagcgtcgtc

SEQ ID NO: 674523 - DNA, 75 bp, synthetic construct
  source 1..75: mol_type = other DNA
cattacggaacgatgagtcaaatccggcttgtttataacggccacaatcaccgtggcgacagtgggggaagtacc

SEQ ID NO: 674524 - DNA, 75 bp, synthetic construct
  source 1..75: mol_type = other DNA
ggtggagatcaccgacaccctgactgtacagggtacagtaaaactaaatgctggcgcggtgattaaggaagatct

SEQ ID NO: 674525 - DNA, 75 bp, synthetic construct
  source 1..75: mol_type = other DNA
ctttctctacttaccctaatcctcatatcaattttgtgcaggctttcgcagttgagatggtgattaccgctattc

SEQ ID NO: 674526 - DNA, 75 bp, synthetic construct
  source 1..75: mol_type = other DNA
cgataccctggaacgccgtgcattactggcggcgcaggaagcgttgagtacggcaattgatgcgcatgatgatgc

SEQ ID NO: 674527 - DNA, 75 bp, synthetic construct
  source 1..75: mol_type = other DNA
gggtgaagattgatgggtatattcgcctaaatggcccagacattgagcagttagaaagtgagtgcgagacgcata

SEQ ID NO: 674528 - DNA, 75 bp, synthetic construct
  source 1..75: mol_type = other DNA
gcagacggtggagaacccggagacgggggagatgctgtgggagcatgagacgaagcacgcgtacagtgaacaggg

SEQ ID NO: 674529 - DNA, 75 bp, synthetic construct
  source 1..75: mol_type = other DNA
atggaggttttcccattcatccttagagatcacgcaggggtcggcccatttgagcttcagataggaacgtttgaa

SEQ ID NO: 674530 - DNA, 75 bp, synthetic construct
  source 1..75: mol_type = other DNA
atgatttttagggatagcttgagagtattaccttatggtcgagtagataatgatttcttccagatagaagaaaga

SEQ ID NO: 674531 - DNA, 75 bp, synthetic construct
  source 1..75: mol_type = other DNA
agaactggcggacggcagcgtcacgcgcagcgggtatgacccggtggggcggcttacggcgcagacggacgcggc

SEQ ID NO: 674532 - DNA, 75 bp, synthetic construct
  source 1..75: mol_type = other DNA
cggacgggctggagagccgccgggcgtatgatgagcgggacaggctggtatcggagacatcgcgcagtggggacg

SEQ ID NO: 674533 - DNA, 75 bp, synthetic construct
  source 1..75: mol_type = other DNA
atacggaaatatttatcactgacagtgagctgacgataaaagtcaggctattgcatcaaagtatagatatgattg

SEQ ID NO: 674534 - DNA, 75 bp, synthetic construct
  source 1..75: mol_type = other DNA
attcatcaaatgataaagacgtcattgcaattgatggaaaaacgctccggcactcttatgacaagagtcgccgca

SEQ ID NO: 674535 - DNA, 75 bp, synthetic construct
  source 1..75: mol_type = other DNA
cgtggtgttaatccggacaccggtaacagcgataacaccatgaaggcggataacccgcgcaatgctttctactgg

SEQ ID NO: 674536 - DNA, 75 bp, synthetic construct
  source 1..75: mol_type = other DNA
gcgcgctaggcttagatttgaaattttgcgtaacgaatcaggaattccatcttcagggtgaggataaagatctgg

SEQ ID NO: 674537 - DNA, 75 bp, synthetic construct
  source 1..75: mol_type = other DNA
tattggttataacagcatcaacttttcatgtgtctgcagtaataattttaccgacaatctttttaatctctttta

SEQ ID NO: 674538 - DNA, 75 bp, synthetic construct
  source 1..75: mol_type = other DNA
tcaatggattgactgaatctcgtgatattgaagttaaaataaaacaggatatcggtatcgatattgcaaccttca

SEQ ID NO: 674539 - DNA, 75 bp, synthetic construct
  source 1..75: mol_type = other DNA
ttaggggattcatcagcgcttagcgttcttccctactttctgttattgccgcagtttattagcgggcagatcaat

SEQ ID NO: 674540 - DNA, 75 bp, synthetic construct
  source 1..75: mol_type = other DNA
cgaaactgcagatggagcattagatctttataataaatatctcgatcaggtcatcccctggcagacctttgatga

SEQ ID NO: 674541 - DNA, 75 bp, synthetic construct
  source 1..75: mol_type = other DNA
tgggcgacagggtgcaggctatctgcaatgcggcctctgtcattgcgtactgggacgatggcgtgctgacgttta

SEQ ID NO: 674542 - DNA, 75 bp, synthetic construct
  source 1..75: mol_type = other DNA
cgaagtacggcttcaccgcggcaatacccgacattcagctcaacatatggaacggagacactgtacagctcccgt

SEQ ID NO: 674543 - DNA, 75 bp, synthetic construct
  source 1..75: mol_type = other DNA
gacgaatacggcgcgcgtctacaaagcaaaaccggacatctacggacaaatccgttcgttcccggacctgattca

SEQ ID NO: 674544 - DNA, 75 bp, synthetic construct
  source 1..75: mol_type = other DNA
ggtattaaaagcgtgtggtgcggtggattatttctgccagcatggtcacggtttaatttctaaaacccgtattga

SEQ ID NO: 674545 - DNA, 75 bp, synthetic construct
  source 1..75: mol_type = other DNA
tctggcgcctaagccggcaatcgcaaataccggtggtaacactgtcgactcgccaaacaatagcctgaccggtca

SEQ ID NO: 674546 - DNA, 75 bp, synthetic construct
  source 1..75: mol_type = other DNA
cgcgctacctcatagcaacggtggaggagctgaacagccagctatggacggtcaacagcatcaagccgaacacag

SEQ ID NO: 674547 - DNA, 75 bp, synthetic construct
  source 1..75: mol_type = other DNA
agcagcatcgacctctacgggctgtactcgatcgccgaaagcctgcctgatgagcgactgggctacttcgactac

SEQ ID NO: 674548 - DNA, 75 bp, synthetic construct
  source 1..75: mol_type = other DNA
acttggtgctggaataatatgtggcgatagaggttatgggctatttatagatggtattcgagtggttaacgaatc

SEQ ID NO: 674549 - DNA, 75 bp, synthetic construct
  source 1..75: mol_type = other DNA
cttacaggtagtactagccttggtggattcgctgtaacaggcctcaataatcaggtgcagacagagctatgtgaa

SEQ ID NO: 674550 - DNA, 75 bp, synthetic construct
  source 1..75: mol_type = other DNA
cgatctggacacgcagacggtagattacacgctgcgtccgtcgcgttcattcgctgatgcagtggctcacacatg

SEQ ID NO: 674551 - DNA, 75 bp, synthetic construct
  source 1..75: mol_type = other DNA
tccgaagaagcagaccaactggaaggtggtgctttggaaaattgatgacgactacaacatgatccctggcactca

SEQ ID NO: 674552 - DNA, 75 bp, synthetic construct
  source 1..75: mol_type = other DNA
tcggcgaccgcgtgcaggcgatctgcaatgcggcatctgtcattgcgtactgggacgacggcgtgctgacgttta

SEQ ID NO: 674553 - DNA, 75 bp, synthetic construct
  source 1..75: mol_type = other DNA
ctgcgtcgggagagatcaaccgcaagctaaggaatgctgctgaggcgatcgcccgcatccgggcgcagtatgagc

SEQ ID NO: 674554 - DNA, 75 bp, synthetic construct
  source 1..75: mol_type = other DNA
ggcgataatatcggggatctgtttgaggaatacctgcataaggccggggaatataaacaaaatggcaagcagagt

SEQ ID NO: 674555 - DNA, 75 bp, synthetic construct
  source 1..75: mol_type = other DNA
tgctgacggtattgcagatatgacccgaacgaaccccgcgtttaaaggaaacaatgcgctctgggatgaaccgtg

SEQ ID NO: 674556 - DNA, 75 bp, synthetic construct
  source 1..75: mol_type = other DNA
tattgagcagttcaataaaatcgttgagcgcgcactcagcctggatgatgagtccagggcatcgtttgccctgga

SEQ ID NO: 674557 - DNA, 75 bp, synthetic construct
  source 1..75: mol_type = other DNA
ccgtgatagaccatggtacggatatctatggccgtatgttaggtaccatctggttagatggatatgatatcaatg

SEQ ID NO: 674558 - DNA, 75 bp, synthetic construct
  source 1..75: mol_type = other DNA
cggactgagtgataaggcgcagttcgaaaaaattatcgacagggcgctgtctctggaagatgaatcaaaggcatc

SEQ ID NO: 674559 - DNA, 75 bp, synthetic construct
  source 1..75: mol_type = other DNA
tgatcaaacgctcaggaaaaagttttcaggaactgctggctgagcaggataaatataacctggtgacaaaagagg

SEQ ID NO: 674560 - DNA, 75 bp, synthetic construct
  source 1..75: mol_type = other DNA
tatgataatcatttttataattgtgattttagctcctctgatatgacatacaagcgaaatggaattcgcaaagat

SEQ ID NO: 674561 - DNA, 75 bp, synthetic construct
  source 1..75: mol_type = other DNA
tcttatttaattaagctgggtaatttcaatcttgatgatgatggaaaaaaatataaacttaatagtgaagctata

SEQ ID NO: 674562 - DNA, 75 bp, synthetic construct
  source 1..75: mol_type = other DNA
atgatttagtcgatactaaggatcaattgattaaagaggatttttacttaaataataaagacaataaagataaaa

SEQ ID NO: 674563 - DNA, 75 bp, synthetic construct
  source 1..75: mol_type = other DNA
aattaatatcgctgcacagactctttatttctctctgcacgttattactgattaccgttatcggcaccgctgttt

SEQ ID NO: 674564 - DNA, 75 bp, synthetic construct
  source 1..75: mol_type = other DNA
tttcacttccactttaattttaatgatttgcgggatatttacaaagactataataataatcatgaagatgataat

SEQ ID NO: 674565 - DNA, 75 bp, synthetic construct
  source 1..75: mol_type = other DNA
tcacgattatagacgtgaatataaatatgataatcatttttattattgtgattttagctcctctgatatgacatg

SEQ ID NO: 674566 - DNA, 75 bp, synthetic construct
  source 1..75: mol_type = other DNA
catggttatggttaatacaattttaacaccgactcttaagagtgtccattatttgccagcaagtcgttcgggttt

SEQ ID NO: 674567 - DNA, 75 bp, synthetic construct
  source 1..75: mol_type = other DNA
actgaagaagttgctactaaaaaagtactgctgaacaaattactgacaacgcaattattgaatgagccagaataa

SEQ ID NO: 674568 - DNA, 75 bp, synthetic construct
  source 1..75: mol_type = other DNA
tgcgcaaaaaatccggatgagttggtcgcaaagggcaatatgcgctgggtcgcccagatcttcggggatatcgag

SEQ ID NO: 674569 - DNA, 75 bp, synthetic construct
  source 1..75: mol_type = other DNA
cctatatgatgaggtaattattattaataaaatcccccccaaaaaaattgatactaaaggagttgctactgaaga

SEQ ID NO: 674570 - DNA, 75 bp, synthetic construct
  source 1..75: mol_type = other DNA
ttcatgcacatattaccgagaataacctcgagaagtttttccattcacccgcaacaaatatcaaagactatgacg

SEQ ID NO: 674571 - DNA, 75 bp, synthetic construct
  source 1..75: mol_type = other DNA
tgagctgttaaccgagtctgagttatcccgtttatacaacgtcagactacgccgtctaatggtgcaaacgggaga

SEQ ID NO: 674572 - DNA, 75 bp, synthetic construct
  source 1..75: mol_type = other DNA
caatataaatgactggttaaacgaagaattaaactaccttgaatgtgagtgggatcatcattacgccaaatcaca

SEQ ID NO: 674573 - DNA, 75 bp, synthetic construct
  source 1..75: mol_type = other DNA
ggttacggtgagttatatctgaaagggcaggttccgtcggtctggcagggttcactgccggtaagtattgagtac

SEQ ID NO: 674574 - DNA, 75 bp, synthetic construct
  source 1..75: mol_type = other DNA
cgctggatgcgcaaaaagcaacgccgccgaagctcgaagataaatcaccggacagcccggaaatgaaagatttcc

SEQ ID NO: 674575 - DNA, 75 bp, synthetic construct
  source 1..75: mol_type = other DNA
atgtctaatacctcggcaaatgaaattgaaccgcgcttaccgcttattttcgaaaatgaagctaatgggattctt

SEQ ID NO: 674576 - DNA, 75 bp, synthetic construct
  source 1..75: mol_type = other DNA
tgttttatggcacggactgcacctgcgtggtcagcggcagtataaagagctatgagtggcggtttaactacactt

SEQ ID NO: 674577 - DNA, 75 bp, synthetic construct
  source 1..75: mol_type = other DNA
tccgggtcaccatcggcgaatacggtggcgatggttttctgaacggcacggtctgtacctgtacagtttacggag

SEQ ID NO: 674578 - DNA, 75 bp, synthetic construct
  source 1..75: mol_type = other DNA
aactgtggctggaggcaggcggacagccggtgccactgaacggtacggcgttctgtcagggcaacgcactggacc

SEQ ID NO: 674579 - DNA, 75 bp, synthetic construct
  source 1..75: mol_type = other DNA
actttcccgctgtagtttcgggaatacaggagcaacgcgtggccgatacagacgatgggtacacccgtctggcaa

SEQ ID NO: 674580 - DNA, 75 bp, synthetic construct
  source 1..75: mol_type = other DNA
acaaagcggtcagcgaatgggtgaaattacccaaatcaggtaacgaaaataaagtttacctgaaagaggtaaatt

SEQ ID NO: 674581 - DNA, 75 bp, synthetic construct
  source 1..75: mol_type = other DNA
atttccctgtgcctgtcgtggcactacaggagctgcgcgtggcagatctcgacgatggttatacgcgtatcgcca

SEQ ID NO: 674582 - DNA, 75 bp, synthetic construct
  source 1..75: mol_type = other DNA
gtcacaatggtggaaatatgacattaaatatttaaaagacataaatttccaagaaccagaggcggcagcagagca

SEQ ID NO: 674583 - DNA, 75 bp, synthetic construct
  source 1..75: mol_type = other DNA
atagaacaaaagcccgatttgatattactgggcggcgattacgtattatttgatatgtcgctgaatttttcggcg

SEQ ID NO: 674584 - DNA, 75 bp, synthetic construct
  source 1..75: mol_type = other DNA
tttgttaaccgcactggcgcaaaatgggcattagtgattgccggaaccattatgtcgttacgcattgccggttct

SEQ ID NO: 674585 - DNA, 75 bp, synthetic construct
  source 1..75: mol_type = other DNA
gaacgggaggctgaaagagaagctatgagggccgaaagcgaacggcgcaagcagctggcaaaggaacgtcccaaa

SEQ ID NO: 674586 - DNA, 75 bp, synthetic construct
  source 1..75: mol_type = other DNA
ttccccgagagaaagctggatctcgccatcaatattgatggaagaccagccgactggcctgagcagttgccatgg

SEQ ID NO: 674587 - DNA, 75 bp, synthetic construct
  source 1..75: mol_type = other DNA
gcaggcgctttcgcgtcataacgatatcgatgccatcgcctttaccggctccacgcgtacgggtaaacaactgct

SEQ ID NO: 674588 - DNA, 75 bp, synthetic construct
  source 1..75: mol_type = other DNA
ttgatatggcgtttgcgatattaacaaaggtcagttcagccgcatcaatttggtcgccaatgatatccaccatta

SEQ ID NO: 674589 - DNA, 75 bp, synthetic construct
  source 1..75: mol_type = other DNA
aggtggttcaggtggaggattaggcggcggggaagataccggttccgtagatacttctggaggacaaccatcagg

SEQ ID NO: 674590 - DNA, 75 bp, synthetic construct
  source 1..75: mol_type = other DNA
gattatgcaaattggctcttctgggggctggtattaataagtatggtttggacatttggtatgttggcgatgcaa

SEQ ID NO: 674591 - DNA, 75 bp, synthetic construct
  source 1..75: mol_type = other DNA
aatgttagaaaaaatctctttaggtataaaaatgattcctgaaaataaatatagattagaatatgataggcttat

SEQ ID NO: 674592 - DNA, 75 bp, synthetic construct
  source 1..75: mol_type = other DNA
gcccagggaagtattctggtgctttgaccatgaacagtggagattcgcatgtcataagtgcaagtataaaagatg

SEQ ID NO: 674593 - DNA, 75 bp, synthetic construct
  source 1..75: mol_type = other DNA
gtaaccttgatcgcgaggaatacacggaaataatttcgcgcaaacaatacgaagaggctcttgaagcatccaata

SEQ ID NO: 674594 - DNA, 75 bp, synthetic construct
  source 1..75: mol_type = other DNA
tatcagagattattgcacgcatcgaaatgtatggatacggcgctggatacacggcagatgaggtattggagcttg

SEQ ID NO: 674595 - DNA, 75 bp, synthetic construct
  source 1..75: mol_type = other DNA
aacacttatttatttcttgttgtggttaggggtttattcaataccaaaaattgtttttgttaataggaaagcttg

SEQ ID NO: 674596 - DNA, 75 bp, synthetic construct
  source 1..75: mol_type = other DNA
ggagggagcatttcagtgattaacgagtttttctcatacaataaaggggactgtcagcaaggtatggatcttctt

SEQ ID NO: 674597 - DNA, 75 bp, synthetic construct
  source 1..75: mol_type = other DNA
cggtggcactgaaagaacagcacccggaaatgactcaatatcatattattcaaaactggctgtggctgggggcgg

SEQ ID NO: 674598 - DNA, 75 bp, synthetic construct
  source 1..75: mol_type = other DNA
cgacagcggcaaggctctggcagagcatcttgaatgggccacgtcctgctactacggttcgccgttccgggagtg

SEQ ID NO: 674599 - DNA, 75 bp, synthetic construct
  source 1..75: mol_type = other DNA
taacgatcaactcactggctacggtcaatgggaatacaatattcaggcaaacaacactgaatcttcaaaaaacca

SEQ ID NO: 674600 - DNA, 75 bp, synthetic construct
  source 1..75: mol_type = other DNA
aaccatttctcgcacggggtttatcacatggttatctcagcaagatactacagccagtgacgaccaacccaaaat

SEQ ID NO: 674601 - DNA, 75 bp, synthetic construct
  source 1..75: mol_type = other DNA
ttaaagctgacctgagtcagtcggcgttagtcatttcattaccccaggcttaccttgaatataccgacaccgact

SEQ ID NO: 674602 - DNA, 75 bp, synthetic construct
  source 1..75: mol_type = other DNA
gctgactggcagactaactatcaacatactcgcagtaatgatgacgatgaattcagcggcgatgaaactcaaaaa

SEQ ID NO: 674603 - DNA, 75 bp, synthetic construct
  source 1..75: mol_type = other DNA
ggttcaactaaataaacagccattggcggaagagtacgatatttactggtatgctggtgaagatgacgttagcaa

SEQ ID NO: 674604 - DNA, 75 bp, synthetic construct
  source 1..75: mol_type = other DNA
attcgtctcgccgggctggcgaaagaagcaggtctgccggatggcgtgttgaacgtggtgacgggttttggtcat

SEQ ID NO: 674605 - DNA, 75 bp, synthetic construct
  source 1..75: mol_type = other DNA
atttccgaataccagatttggcccattactggaggagtttgaagaagtgcatgacgcatacggcactgatgaaat

SEQ ID NO: 674606 - DNA, 75 bp, synthetic construct
  source 1..75: mol_type = other DNA
ggttgattctgatattgactggttcaccgctgtagatgatttacaggaacaaggttctgcacatctgggaactca

SEQ ID NO: 674607 - DNA, 75 bp, synthetic construct
  source 1..75: mol_type = other DNA
atggtgccaacacatttcgccaaaccgtggcttaatgaggggaagtgggtagcattagaactggaaaaccccttt

SEQ ID NO: 674608 - DNA, 75 bp, synthetic construct
  source 1..75: mol_type = other DNA
tgatgtatgccagtaacgcgcaggatgcgatcccgacgcttatcgatcagggcgataatgatcagtttcttgccg

SEQ ID NO: 674609 - DNA, 75 bp, synthetic construct
  source 1..75: mol_type = other DNA
ttgctgggatcaggacgtaccgaaaccgccgaagtgatcttcggtatcaaacctgctgacagcggcacggcgttg

SEQ ID NO: 674610 - DNA, 75 bp, synthetic construct
  source 1..75: mol_type = other DNA
ttcttgctcacatcaaattcaattactctcaaaccatgttatggaagtactgaatctccattcaactaagaaacg

SEQ ID NO: 674611 - DNA, 75 bp, synthetic construct
  source 1..75: mol_type = other DNA
ggcgtgaacgccttatccggcctacgggtgagcgcggttttgtcggcatgataagacgcatctgcgtcgcatcag

SEQ ID NO: 674612 - DNA, 75 bp, synthetic construct
  source 1..75: mol_type = other DNA
agagaatatcccgaaatcaatgtcgaactggtggtggataacggttttgtcgatattgttgacggtcgttttgat

SEQ ID NO: 674613 - DNA, 75 bp, synthetic construct
  source 1..75: mol_type = other DNA
agataataatacgggggacggagtttctatttgaggctaccggtcctgtagatattaaaggaaaagatattcatc

SEQ ID NO: 674614 - DNA, 75 bp, synthetic construct
  source 1..75: mol_type = other DNA
atgattgtcaaggaggattaataatttatgtgaaaagcaacaatgcattagatgtcgtagagaaatggaaaaaaa

SEQ ID NO: 674615 - DNA, 75 bp, synthetic construct
  source 1..75: mol_type = other DNA
gctcaggagatgctggatagaggtttagacagagagttagtcatgatggtgacccgactttcaccagacgatctt

SEQ ID NO: 674616 - DNA, 75 bp, synthetic construct
  source 1..75: mol_type = other DNA
gagggcaacctcgatcagcgtctggcatatcgcgaggccgtagagggattgtgccaggaggcggccaaccggata

SEQ ID NO: 674617 - DNA, 75 bp, synthetic construct
  source 1..75: mol_type = other DNA
ttgaaggcccggctgattttaatgaccgggtagacgaactttttttttcccaccagcttccggtagctatttaca

SEQ ID NO: 674618 - DNA, 75 bp, synthetic construct
  source 1..75: mol_type = other DNA
ccacctgtggaaatgaggctccggagtatctgaaagagtgcccacattgtggtgaggtaaaatgtaatcactgcg

SEQ ID NO: 674619 - DNA, 75 bp, synthetic construct
  source 1..75: mol_type = other DNA
tagtcttgtatatgcttttttttataaagtgattaaccctcgaggaaaagttattttaaagtgcgatggttctga

SEQ ID NO: 674620 - DNA, 75 bp, synthetic construct
  source 1..75: mol_type = other DNA
ctaaaggtaaaaaaagtaggttatatgcattaaataataacgactggcgtttaatcataagaaaaattgaagagc

SEQ ID NO: 674621 - DNA, 75 bp, synthetic construct
  source 1..75: mol_type = other DNA
cagggtcaggtgtgcatcgccggaacgcgtttgttactggaagagagcatcgccgatgaattcttagccctgtta

SEQ ID NO: 674622 - DNA, 75 bp, synthetic construct
  source 1..75: mol_type = other DNA
tggaagcttggcccggcgctggcagcagggaacagcgttgtcctgaaaccgtctgaaaaatcaccgctcagtgcg

SEQ ID NO: 674623 - DNA, 75 bp, synthetic construct
  source 1..75: mol_type = other DNA
cgatcgacaaagtgtatggcgaagtggcgaccaccagtagccatgagctggcgatgatcgtgcgtgaaccggtcg

SEQ ID NO: 674624 - DNA, 75 bp, synthetic construct
  source 1..75: mol_type = other DNA
atggctgtagtgcagataacggcggcgcaggttaaacagcagttggctgcgcttggctataccaccgttcctgac

SEQ ID NO: 674625 - DNA, 75 bp, synthetic construct
  source 1..75: mol_type = other DNA
cgatggtttcgcaggatcgtcagttagtttcattacccgatttctcacattatgaactgtatgacaaaccggaag

SEQ ID NO: 674626 - DNA, 75 bp, synthetic construct
  source 1..75: mol_type = other DNA
cgacatgcctgaacatgaatctgtgatacatcgaattcagagtatacattatcagcaaactatttttacgcatta

SEQ ID NO: 674627 - DNA, 75 bp, synthetic construct
  source 1..75: mol_type = other DNA
ttgttcaaaattaaagaattagaatgtggtgctaaaaatactaaagtttcattcagagttatttggcatattaca

SEQ ID NO: 674628 - DNA, 75 bp, synthetic construct
  source 1..75: mol_type = other DNA
gcagccaggtgtcatgggactgggctctgtacgagaaaatcgcgcaggcatttaagcaggctgccgcagagctgg

SEQ ID NO: 674629 - DNA, 75 bp, synthetic construct
  source 1..75: mol_type = other DNA
gtgaaaataatcttgatggcgttaaacgagaactggttgctgtggttcgtcgtgcgctggagctgacggaggttg

SEQ ID NO: 674630 - DNA, 75 bp, synthetic construct
  source 1..75: mol_type = other DNA
ttctgtcgataccgaagagattattgaggcgctggacgaagagatccgtaacagcgatgcattcaaagtcctgaa

SEQ ID NO: 674631 - DNA, 75 bp, synthetic construct
  source 1..75: mol_type = other DNA
gccgccagcgtttcagacgtgctgttggtcgcgctgcttagctggattatccctttctgtgctgtcgttgcatcc

SEQ ID NO: 674632 - DNA, 75 bp, synthetic construct
  source 1..75: mol_type = other DNA
acaagttgccggtgctttctgcgctgcggcattagtttacgggctttactacaatttattcctcgacttcgaaca

SEQ ID NO: 674633 - DNA, 75 bp, synthetic construct
  source 1..75: mol_type = other DNA
ctaagttccagccaaaatatgccagtctggattgatattccaccggcgacacgtgaagagttgattgctgctgcc

SEQ ID NO: 674634 - DNA, 75 bp, synthetic construct
  source 1..75: mol_type = other DNA
atatcgcaagtactgctctggccggcgatacagaaacccgcgtaaacatcagtgatgtgattattgatgatattt

SEQ ID NO: 674635 - DNA, 75 bp, synthetic construct
  source 1..75: mol_type = other DNA
cagctcaccattgattatggtttgaccgatgtcgtttctgaacgttttgatgcaggcgtccgtctggggggggga

SEQ ID NO: 674636 - DNA, 75 bp, synthetic construct
  source 1..75: mol_type = other DNA
atggaagaaaatgatgtttttcttgagaatgaagttaagcaccaaaacatgaaaaataaacaatgtttcggtgtg

SEQ ID NO: 674637 - DNA, 75 bp, synthetic construct
  source 1..75: mol_type = other DNA
gcaggctctataaggactctcaggcagtacatctttggcttcacttaatcctcaaggctaatcacgaatctactg

SEQ ID NO: 674638 - DNA, 75 bp, synthetic construct
  source 1..75: mol_type = other DNA
atgggcgtcgttaagttagctgattacaggcataaccctgtacaacatcaggaggcatccagtatggggtatgtc

SEQ ID NO: 674639 - DNA, 75 bp, synthetic construct
  source 1..75: mol_type = other DNA
ctgccgattacgccgaagcattaaaacagccggttgatgccccctcccccgctaaagtgttgcccgaaaactggt

SEQ ID NO: 674640 - DNA, 75 bp, synthetic construct
  source 1..75: mol_type = other DNA
gaaatttcgcgccagcggtcagcccgtgtttctggtgcgagttggctggtctgccgattacgccgaagcattaaa

SEQ ID NO: 674641 - DNA, 75 bp, synthetic construct
  source 1..75: mol_type = other DNA
acaggtgtaactccacatgagttacgccctgatttgtacctcaaccctacggatgggttaccagctcaggaagcg

SEQ ID NO: 674642 - DNA, 75 bp, synthetic construct
  source 1..75: mol_type = other DNA
aggatatttctgacgaagatataagtgctgtagtggatgtacttaagtccgagttcttgactcaaggaccatatg

SEQ ID NO: 674643 - DNA, 75 bp, synthetic construct
  source 1..75: mol_type = other DNA
gcgtgtttgaagatgaaggaagaaatcagagcgcaactgatactctctcgtcgccagtaccagaaactgatgcag

SEQ ID NO: 674644 - DNA, 75 bp, synthetic construct
  source 1..75: mol_type = other DNA
aatacaacaggaagttcagcggctcgatgaactgaataaacaattgaaagttaaattgacgacgctttcagcaat

SEQ ID NO: 674645 - DNA, 75 bp, synthetic construct
  source 1..75: mol_type = other DNA
gtttacggctctaaaaacatcgtacctaatacatccgaaataaagatattacccagccattatgctaaaaatctt

SEQ ID NO: 674646 - DNA, 75 bp, synthetic construct
  source 1..75: mol_type = other DNA
ttcaatcgtgattaagccttcggaaaccacgccactgacgatgttgcgcgtggcggaactggccagcgaggctgg

SEQ ID NO: 674647 - DNA, 75 bp, synthetic construct
  source 1..75: mol_type = other DNA
attcatggattgaaaacagcagcggtgtaaaagaaaagtcattcatcattacaccgccactgtttgttagggaag

SEQ ID NO: 674648 - DNA, 75 bp, synthetic construct
  source 1..75: mol_type = other DNA
gtttcttatgctgtagccaattcaggcatgtatttcagagtgatttcactctctgatatttattctaaattggtt

SEQ ID NO: 674649 - DNA, 75 bp, synthetic construct
  source 1..75: mol_type = other DNA
gtgtattgcgatccgccttatgacggtacgttttccggttatcacactgacggcttcactgaagatgaccagtat

SEQ ID NO: 674650 - DNA, 75 bp, synthetic construct
  source 1..75: mol_type = other DNA
ttaatttatgacgggcaacaatgtgcgcatattccggcattttcggcagtcgctgtagatacaacaggtgcgggt

SEQ ID NO: 674651 - DNA, 75 bp, synthetic construct
  source 1..75: mol_type = other DNA
tcgcgctttgctgatattactatattgagcttccatcctgttaaaattattacaactgcagaaggtggtatggct

SEQ ID NO: 674652 - DNA, 75 bp, synthetic construct
  source 1..75: mol_type = other DNA
aatgccccgatggtctcatggtttatcttgccgctacctatgagggaaaagtatgggcggggtggtttttaaatg

SEQ ID NO: 674653 - DNA, 75 bp, synthetic construct
  source 1..75: mol_type = other DNA
atgttcatggtcatacggcaataataaaattattaccgatactggctgtggaactattcatcttgcaggttgcgt

SEQ ID NO: 674654 - DNA, 75 bp, synthetic construct
  source 1..75: mol_type = other DNA
agatgccggtgccagcattattgagccgcttgcagtttctactgaatatggcatgagcctgcaaaatcgcgaatc

SEQ ID NO: 674655 - DNA, 75 bp, synthetic construct
  source 1..75: mol_type = other DNA
aggagaaattatggtaggcagagggaagctacttggcggtagaaactctctggcgtttgaaacaggactcaaacc

SEQ ID NO: 674656 - DNA, 75 bp, synthetic construct
  source 1..75: mol_type = other DNA
gatgaaaactatcagtcggcggccatcggtgtcgggcgtgacctgtcagtctttggcgcgatggcctttgacgtc

SEQ ID NO: 674657 - DNA, 75 bp, synthetic construct
  source 1..75: mol_type = other DNA
taacgcatcagttcaacagaccgctataccatcttatgttatttcaatgttatatatctctcataggattaatga

SEQ ID NO: 674658 - DNA, 75 bp, synthetic construct
  source 1..75: mol_type = other DNA
acgatttcaccatcttcaaattcggcgacagtgaaatccgcgtcatcaacaagtgcggtgagccgtggtttgtgg

SEQ ID NO: 674659 - DNA, 75 bp, synthetic construct
  source 1..75: mol_type = other DNA
atgggggcaggcattgctgaagttgccgccagtcatggacatcaggttttactgtatgacatttctgctgaagcg

SEQ ID NO: 674660 - DNA, 75 bp, synthetic construct
  source 1..75: mol_type = other DNA
gaaaactgaccgctgaaacctgtgaacgcacattgaaacgcctgatcccggtgaccgatattcacgcgctggcag

SEQ ID NO: 674661 - DNA, 75 bp, synthetic construct
  source 1..75: mol_type = other DNA
aaacgcaaatcaatgatcaaatgattggttttggtcactgggaatatgattttaaaggctataacgatgaagcca

SEQ ID NO: 674662 - DNA, 75 bp, synthetic construct
  source 1..75: mol_type = other DNA
tgatatcaatgagccagatggaccaacgaatctttccgcatggatgagacttaagaataaagaattacctccttc

SEQ ID NO: 674663 - DNA, 75 bp, synthetic construct
  source 1..75: mol_type = other DNA
agaagatggcattaataagatcacagaaatcgagcaaatgattaagcaatggcatcagttactgccgcgtttatt

SEQ ID NO: 674664 - DNA, 75 bp, synthetic construct
  source 1..75: mol_type = other DNA
tttcggtgaaaaattcacaatgcttgtgcaattgttatatatttcatttattccatatgtgattttttttcacca

SEQ ID NO: 674665 - DNA, 75 bp, synthetic construct
  source 1..75: mol_type = other DNA
tttcggtattacggaaggcctgcgcacgaaagaacgccagaaacagctggttgcagaaggcaagagccagaccat

SEQ ID NO: 674666 - DNA, 75 bp, synthetic construct
  source 1..75: mol_type = other DNA
ccggagaggatgttgttcctgcctcagaactggctgccgctataaaaaataaaagagttacagctcttgctgggt

SEQ ID NO: 674667 - DNA, 75 bp, synthetic construct
  source 1..75: mol_type = other DNA
ggaaaaacatcagccagctttcttcatgcgtagaaatgaaactattgaattgattaatgaaatttttaattctgc

SEQ ID NO: 674668 - DNA, 75 bp, synthetic construct
  source 1..75: mol_type = other DNA
ctggcattccaggcaattttgcatgggatggaacgaatgccacatttacccgtgatgcatctggtgatgcggtta

SEQ ID NO: 674669 - DNA, 75 bp, synthetic construct
  source 1..75: mol_type = other DNA
acgccgctgaacgggattatttcatcctcagagaacggttgatgacaatgcagaagcagctggaaggggcacagg

SEQ ID NO: 674670 - DNA, 75 bp, synthetic construct
  source 1..75: mol_type = other DNA
tcagccatgaacaactgacccggtttgcggaacaacgcatccggaaatgcaatctggacagccagggcgtgactt

SEQ ID NO: 674671 - DNA, 75 bp, synthetic construct
  source 1..75: mol_type = other DNA
tcaaattatgtatacctgctgaacacaaaagcaaccatagagaacggtgctgatgtgacaactcaaagtggtatg

SEQ ID NO: 674672 - DNA, 75 bp, synthetic construct
  source 1..75: mol_type = other DNA
gtgatggttttggcttccgccagaatattgtgcgtggaagctcacaaggagaaacgctgtttacaggagggatca

SEQ ID NO: 674673 - DNA, 75 bp, synthetic construct
  source 1..75: mol_type = other DNA
gaaaaaggattaacgatttaatcgaagccaattaccagttaagacgccagctagtcataacaaatcgacaccttt

SEQ ID NO: 674674 - DNA, 75 bp, synthetic construct
  source 1..75: mol_type = other DNA
cgcgctggctattgaagtaattaacaatggtggcactcttgagcccaccggtagaaaaatgccatctaagaagta

SEQ ID NO: 674675 - DNA, 75 bp, synthetic construct
  source 1..75: mol_type = other DNA
cgtattaccgcagtcctgatgatagcgcgctggctattgaagtaattaacaatggtggcactcttgagcccaccg

SEQ ID NO: 674676 - DNA, 75 bp, synthetic construct
  source 1..75: mol_type = other DNA
ccgacgctgttattgatgaagcccgccaaaacctgatccctctcagccggcaatacatgacgctggcagcggcgc

SEQ ID NO: 674677 - DNA, 75 bp, synthetic construct
  source 1..75: mol_type = other DNA
actggagccgggttgaacctctggtggcggatgacggcgaggtgttctatcgcattacaccggaccggaactgcg

SEQ ID NO: 674678 - DNA, 75 bp, synthetic construct
  source 1..75: mol_type = other DNA
cattgtcaatctctatcctttgacagatttctataggttagagaagtgtatggacaaccttcttgaatacggttc

SEQ ID NO: 674679 - DNA, 75 bp, synthetic construct
  source 1..75: mol_type = other DNA
ctatatcttggcacatctttatatgtttgctggcaagaaatgggcaaacccgatttcgataagctatatatatcc

SEQ ID NO: 674680 - DNA, 75 bp, synthetic construct
  source 1..75: mol_type = other DNA
gtaagcaggaagacaacacggttgaagtcacccttgaaaatggcgtgaaacaaacgttaatcgtcagttttgtcg

SEQ ID NO: 674681 - DNA, 75 bp, synthetic construct
  source 1..75: mol_type = other DNA
gtttaagaactagtcttcattttgcaatgatggagtcgaaaaataacatattaatgatctctggagctagtccta

SEQ ID NO: 674682 - DNA, 75 bp, synthetic construct
  source 1..75: mol_type = other DNA
aaacacctactgaatcggatgatatcgatttaggtaaaattgtcggtgagttaatagatcatcgcaagctaattt

SEQ ID NO: 674683 - DNA, 75 bp, synthetic construct
  source 1..75: mol_type = other DNA
cgcgagtgttcctgtttcagaatggttaacaaagaatcataacagaaataaaaattggagaaaagaaactactaa

SEQ ID NO: 674684 - DNA, 75 bp, synthetic construct
  source 1..75: mol_type = other DNA
tatactgaatggtgttattaaaaaagcaagtagctattatggctatggctataatcattacgggtattcatacac

SEQ ID NO: 674685 - DNA, 75 bp, synthetic construct
  source 1..75: mol_type = other DNA
tggtgtagttaaaaaggctagtagctattatggttacggatataaccattatggttattcatacgataatcagaa

SEQ ID NO: 674686 - DNA, 75 bp, synthetic construct
  source 1..75: mol_type = other DNA
cttcaccacaagattctgacgaaattgatctgggaagaataataggtgaaatacttgatcatcgtaaattaataa

SEQ ID NO: 674687 - DNA, 75 bp, synthetic construct
  source 1..75: mol_type = other DNA
gcgatcgataatcgtgattttactttaaaagtggatgaaataaacgctgatgaaggatccagctttacgatccaa

SEQ ID NO: 674688 - DNA, 75 bp, synthetic construct
  source 1..75: mol_type = other DNA
tcaacaccgatttatcaagcggatgctctagttcaagtcgaacaaaagcagggaaatgctttattagatagttta

SEQ ID NO: 674689 - DNA, 75 bp, synthetic construct
  source 1..75: mol_type = other DNA
agctttgcgagtcttggattcaatgaaagccatcagtgggcacagagagtgggttttccccagtatcaaagctcc

SEQ ID NO: 674690 - DNA, 75 bp, synthetic construct
  source 1..75: mol_type = other DNA
gaatggagtggtcaaaaaagccagtaactattacgggtatggatacgggtactacgattattcctataaaaaata

SEQ ID NO: 674691 - DNA, 75 bp, synthetic construct
  source 1..75: mol_type = other DNA
gatttatccatggaggctaaatctgtattggatcagattgtcaacgttgataatcagttaaatgaaattactttc

SEQ ID NO: 674692 - DNA, 75 bp, synthetic construct
  source 1..75: mol_type = other DNA
tgtcgttagaaaagctagtagctattacggatatggatataatcattacggttattcctatgacgacataaaaaa

SEQ ID NO: 674693 - DNA, 75 bp, synthetic construct
  source 1..75: mol_type = other DNA
cacgaactgcccgaaatgcttgctcaggatgcactgctttcccgtttttcttacagcaactctgagaacggggag

SEQ ID NO: 674694 - DNA, 75 bp, synthetic construct
  source 1..75: mol_type = other DNA
ctgggtttatgtgaaaggtgtttttaatcaggggctggataaccgccgtgcgcgggagatggcctggtgcttaca

SEQ ID NO: 674695 - DNA, 75 bp, synthetic construct
  source 1..75: mol_type = other DNA
tggtaacgaggaaagacctctgcgaggtacggatccgaaccggccagacggaggtcgctgtcttcgtagactacg

SEQ ID NO: 674696 - DNA, 75 bp, synthetic construct
  source 1..75: mol_type = other DNA
cttacgtgccggaaggcaaggagaagcagtctatgaagcagcaaaaggcgatgttaattcgccctgatcgtcatc

SEQ ID NO: 674697 - DNA, 75 bp, synthetic construct
  source 1..75: mol_type = other DNA
ctgttgattttggcgccctggcagcaggtgcacagatgacagaagggacggtcaacgttagcaaaacgctggatc

SEQ ID NO: 674698 - DNA, 75 bp, synthetic construct
  source 1..75: mol_type = other DNA
ggcgcgaatagtggtgaaaatgatccaatggtaacaacagattacaatgatacggtttatgttggttattaccag

SEQ ID NO: 674699 - DNA, 75 bp, synthetic construct
  source 1..75: mol_type = other DNA
aagatgtgtgaagcaacagccgccacaaaaggtgtatgacgcggtggtgtcgtttgccttcaacgtggggacggg

SEQ ID NO: 674700 - DNA, 75 bp, synthetic construct
  source 1..75: mol_type = other DNA
aagcgccacgccggatgtgctgcggcaaatcaaaacgccagaggaggtggagaaaatccgcctcgcctgtggtat

SEQ ID NO: 674701 - DNA, 75 bp, synthetic construct
  source 1..75: mol_type = other DNA
ttcaacatcgtgctatctatatggttttttatttcaagcctgaatattcttgacgataaaaaacgcgaccgcctt

SEQ ID NO: 674702 - DNA, 75 bp, synthetic construct
  source 1..75: mol_type = other DNA
gaacagtatcttcggcaaccttcacctgcagagcgatcctgacggcctgcttttcaactcctcatggcagacaga

SEQ ID NO: 674703 - DNA, 75 bp, synthetic construct
  source 1..75: mol_type = other DNA
tctgaatcagccactcggcctgttcttcagtgcattggtcatgctggtaccagtcatatttgaatgcgtgagagc

SEQ ID NO: 674704 - DNA, 75 bp, synthetic construct
  source 1..75: mol_type = other DNA
atgctggaaccagtcagatttgaaagtgcgggaacgccgcccgtgcctgctggcaggggcggcagagttatccga

SEQ ID NO: 674705 - DNA, 75 bp, synthetic construct
  source 1..75: mol_type = other DNA
agaaaatccgcctcgcctgtggtattagacgtcaactagttttgccgactcgcgccaactatactggccgccccc

SEQ ID NO: 674706 - DNA, 75 bp, synthetic construct
  source 1..75: mol_type = other DNA
cgtcaatccggttggaaacacgtatgctaattgaatggcaattgttgacatgggttcgtccgggtgaagccgttc

SEQ ID NO: 674707 - DNA, 75 bp, synthetic construct
  source 1..75: mol_type = other DNA
aaaactatgacattgtagttttggatactccaccgattctcgcagtaacagatcctgctgtaattggacactatg

SEQ ID NO: 674708 - DNA, 75 bp, synthetic construct
  source 1..75: mol_type = other DNA
attgctcagacaggaaagaaagttatctttattgatactgatatgaggaaaggatatacgcacaaattatttaat

SEQ ID NO: 674709 - DNA, 75 bp, synthetic construct
  source 1..75: mol_type = other DNA
caattgaggtaaaagatctgtacttgcctgataataaaagtggtgaaaatcctgaggtaatcttaactgtaattg

SEQ ID NO: 674710 - DNA, 75 bp, synthetic construct
  source 1..75: mol_type = other DNA
ccatcaaaggggttaaacgctataaacagagccagctactggcagtggggaatccaaccgatctggcgattgaag

SEQ ID NO: 674711 - DNA, 75 bp, synthetic construct
  source 1..75: mol_type = other DNA
ggtagtcttctggaaaaagatggtattgcattattagttgataaaattgaagccactccagggacaactttttct

SEQ ID NO: 674712 - DNA, 75 bp, synthetic construct
  source 1..75: mol_type = other DNA
atagtactgattggtatagtgtttggtggaatagtatctatcgggctggttttattacgtgtattcttgcgtaaa

SEQ ID NO: 674713 - DNA, 75 bp, synthetic construct
  source 1..75: mol_type = other DNA
tattcttaatggtgttattaagaaagctagcagttattatggatatgggtataaccactatggttataactacgg

SEQ ID NO: 674714 - DNA, 75 bp, synthetic construct
  source 1..75: mol_type = other DNA
atttttctcgccgcaccagcaaccgagcggctggatacctcacagattgctgacctgcgtgattactccgaccgg

SEQ ID NO: 674715 - DNA, 75 bp, synthetic construct
  source 1..75: mol_type = other DNA
tggggtcaaaccagatgttattggatatgctggaagatggtgaccttgatgctattctaatctccaccaacgaag

SEQ ID NO: 674716 - DNA, 75 bp, synthetic construct
  source 1..75: mol_type = other DNA
actgaatggtattgtgaaaaaagcaagtagctattatagctatggctaccatcagtatggatactcctatacaga

SEQ ID NO: 674717 - DNA, 75 bp, synthetic construct
  source 1..75: mol_type = other DNA
tgccattcaaaaagttaagaacgcagattttgattatgtttcgcgcggacaagttcctcctaaccccacagaatt

SEQ ID NO: 674718 - DNA, 75 bp, synthetic construct
  source 1..75: mol_type = other DNA
tcatgatgttacttaacaggcaacaagaactgaatatagcgaaatcaagtgcaataggtaatgttagaattattg

SEQ ID NO: 674719 - DNA, 75 bp, synthetic construct
  source 1..75: mol_type = other DNA
tgcataacaaaccagagcgaccgaagcgtgaacacaagggcaaaatcgcggtggcagaaagcgatatgcgctggt

SEQ ID NO: 674720 - DNA, 75 bp, synthetic construct
  source 1..75: mol_type = other DNA
atatgcaattattgaaccgacagcaagaattaaatatatccaaatcaagtgctataggtaatgttaggattattg

SEQ ID NO: 674721 - DNA, 75 bp, synthetic construct
  source 1..75: mol_type = other DNA
acatgcaattgctaaaccgtcagcaagagttaaatatcgcaaaatctagtgcaataggtaacgttagaatcattg

SEQ ID NO: 674722 - DNA, 75 bp, synthetic construct
  source 1..75: mol_type = other DNA
accccgatatatcacgcagatgctttagtccaagttgaacagaaacaagcgaatgcaatattaagtaatttaagt

SEQ ID NO: 674723 - DNA, 75 bp, synthetic construct
  source 1..75: mol_type = other DNA
tgagcaacgaggagtcctcgaaaccttacggcgaatcatttcccgattaaatgaaatatttcgctgggccgcgac

SEQ ID NO: 674724 - DNA, 75 bp, synthetic construct
  source 1..75: mol_type = other DNA
gttgtaatcattggtttagttctcggatttatgatatctgtaggacttgtacttataagagtatttctgagaaga

SEQ ID NO: 674725 - DNA, 75 bp, synthetic construct
  source 1..75: mol_type = other DNA
agcattaatggagaagagaaaaacattacaagatgaaaaagctaaactaaataaacgagtttcagcaatgccgaa

SEQ ID NO: 674726 - DNA, 75 bp, synthetic construct
  source 1..75: mol_type = other DNA
attacaatcaagaatgatccttggtaagacagtaactgatcttgatttgcaaactgtagtaaagcaaaaatattt

SEQ ID NO: 674727 - DNA, 75 bp, synthetic construct
  source 1..75: mol_type = other DNA
gttcaaataaaagagccaaatatatcattgttaataaataaaattgatgctcaacctggtgaaagtttcaagatt

SEQ ID NO: 674728 - DNA, 75 bp, synthetic construct
  source 1..75: mol_type = other DNA
gctcaaacagggaagaaggtattatttattgataccgatatgagaaaaggatatacacataaattatttaatgaa

SEQ ID NO: 674729 - DNA, 75 bp, synthetic construct
  source 1..75: mol_type = other DNA
attattagaaaaaagaaaaacgttacaagatgagaagaataaattaaataaacgggtttctgcaatgccttctac

SEQ ID NO: 674730 - DNA, 75 bp, synthetic construct
  source 1..75: mol_type = other DNA
aattgtagatcaaggtaaggatacggggatattgtccatttccttgacaggtgataataaagagctaattagcaa

SEQ ID NO: 674731 - DNA, 75 bp, synthetic construct
  source 1..75: mol_type = other DNA
tgcaagtgtccctgtatcagagcggttaactaaaaatgttggtaaaaataaacggcgcaaaaatgaatcagatgc

SEQ ID NO: 674732 - DNA, 75 bp, synthetic construct
  source 1..75: mol_type = other DNA
tttatacggtttctctgaatcatgtcactacaacagatgtaacagttacagttacattgggtagcggagctgggc

SEQ ID NO: 674733 - DNA, 75 bp, synthetic construct
  source 1..75: mol_type = other DNA
ctattacctttgagtctgttgcccgagagtggcatgcaactaacaagaaatggtctgaggaacacagtcgacggg

SEQ ID NO: 674734 - DNA, 75 bp, synthetic construct
  source 1..75: mol_type = other DNA
tggtgccattgtctcatcaggctctggcaatcctcaaacaggttcacaagcttagtggcgagcgcgattttgttt

SEQ ID NO: 674735 - DNA, 75 bp, synthetic construct
  source 1..75: mol_type = other DNA
ttggtgatcacgattcgcacaagcccatgagtgagaatacagtaaatagtgcgttacgggtcatggggtatgtag

SEQ ID NO: 674736 - DNA, 75 bp, synthetic construct
  source 1..75: mol_type = other DNA
cagcatcgtgctgctctggaacttaaccgcattcctgaattgcttcaacgcatctatcactattctggcaggccg

SEQ ID NO: 674737 - DNA, 75 bp, synthetic construct
  source 1..75: mol_type = other DNA
tctcgctggtcgatgccagaggtcgccgggatgaagcccgtaagttgttagctaacggcgtcgatcctagtgaga

SEQ ID NO: 674738 - DNA, 75 bp, synthetic construct
  source 1..75: mol_type = other DNA
aattaaaggcgtgcgttattcgtaccgaggcatgaagatgaaagaggaacatatcgttccgcttagtcggcaggc

SEQ ID NO: 674739 - DNA, 75 bp, synthetic construct
  source 1..75: mol_type = other DNA
attggtggagcacagcataacgggaaaattggccttcatggtgatactggaaaagtaacctatgatggtgcaaca

SEQ ID NO: 674740 - DNA, 75 bp, synthetic construct
  source 1..75: mol_type = other DNA
caacaaaataatggtggcggccgatactgtttctattctgttgcgataacaaaacaacacgcaatagaaatggtt

SEQ ID NO: 674741 - DNA, 75 bp, synthetic construct
  source 1..75: mol_type = other DNA
acctcgacgaacgcacacagatgatgcagtggtggtcggattatctcgacgcctgtcggcagaagtttattgcgc

SEQ ID NO: 674742 - DNA, 75 bp, synthetic construct
  source 1..75: mol_type = other DNA
ttcctccggaacgaaaacctattgaaggggttaagtattcccatcgtggatccaaaatgcgaacagaacatctgg

SEQ ID NO: 674743 - DNA, 75 bp, synthetic construct
  source 1..75: mol_type = other DNA
acacgaaaaaggatatctgtggccacggctttcgggcgatggcatgcagtgcgctgatggaatcgggtttatggg

SEQ ID NO: 674744 - DNA, 75 bp, synthetic construct
  source 1..75: mol_type = other DNA
catgagtgagaatacagtaaatagtgcgttacgggtcatggggtatgtagactggccccctgaatctccagacaa

SEQ ID NO: 674745 - DNA, 75 bp, synthetic construct
  source 1..75: mol_type = other DNA
caacccaggaagtctgtggccatggattccgggcgatggcgtgcagtgaaccgccccgggtttcctggagagtat

SEQ ID NO: 674746 - DNA, 75 bp, synthetic construct
  source 1..75: mol_type = other DNA
actgagtctggcgatgatattgttacgatcaaacgtactggtgtaacaaatgccggacagatttatcttggttca

SEQ ID NO: 674747 - DNA, 75 bp, synthetic construct
  source 1..75: mol_type = other DNA
tggggtatgacacaacccaggatgtctgtggtcatggattccgggcgatggcatgtagtgcgttaatagaatcag

SEQ ID NO: 674748 - DNA, 75 bp, synthetic construct
  source 1..75: mol_type = other DNA
gggcagcctgtatcacttcgatatgacgcaggagccggtgttgtccgtgacgggcatgcaccggccgcagattac

SEQ ID NO: 674749 - DNA, 75 bp, synthetic construct
  source 1..75: mol_type = other DNA
acgtccattcaacgctgtaagcaggagcggcagaccgctctcgatgagagcgcagaagcggagcaggactggcgc

SEQ ID NO: 674750 - DNA, 75 bp, synthetic construct
  source 1..75: mol_type = other DNA
gagcatacttatacgctttacagcagtgtaagtggcgcaaatgtgtatattgataataatattattgatgcgaat

SEQ ID NO: 674751 - DNA, 75 bp, synthetic construct
  source 1..75: mol_type = other DNA
gccacacgtggcctcgatgtgctgggtaaccgctacacggcgatggttgccggttttgcgggtagcgccatgatg

SEQ ID NO: 674752 - DNA, 75 bp, synthetic construct
  source 1..75: mol_type = other DNA
ggaaggtgacgcccgcgtgaaaagtgtcagagtggatcaacccggcgtcagactcagtgcgcaggctggcgtcac

SEQ ID NO: 674753 - DNA, 75 bp, synthetic construct
  source 1..75: mol_type = other DNA
tactgataaatcttacgggaaatcttaccgctaaagcacgacagtacggcgcaaatatgtcgcagttcgcccgta

SEQ ID NO: 674754 - DNA, 75 bp, synthetic construct
  source 1..75: mol_type = other DNA
gaacggcgactgatgctacagtggtgggccgattttctggatgcaaacagagaaagatttatcagtccatttgaa

SEQ ID NO: 674755 - DNA, 75 bp, synthetic construct
  source 1..75: mol_type = other DNA
ttgagcatacttatacgttatacagcagtgtaagtggcgcaaatgtgtatattgataacaatattattgatgcga

SEQ ID NO: 674756 - DNA, 75 bp, synthetic construct
  source 1..75: mol_type = other DNA
acactctcaagccaaaccgccttgaagcggaaaccctgagtgggattgcgctgtcagggcgtgaagatgtggcaa

SEQ ID NO: 674757 - DNA, 75 bp, synthetic construct
  source 1..75: mol_type = other DNA
ttggacttatttaatactaaaaattacaaactatttatagagtttatcactttaatcagagattacatcaatgat

SEQ ID NO: 674758 - DNA, 75 bp, synthetic construct
  source 1..75: mol_type = other DNA
ccgggcagaccgcgatttactccgccggtgagcatctggagctctgctgtggtaaggcaaggctggtgctgacga

SEQ ID NO: 674759 - DNA, 75 bp, synthetic construct
  source 1..75: mol_type = other DNA
ttattacaatgaggcaataagagaggaaccgatagactttctggacagatcgttttcctccagttcatggccttt

SEQ ID NO: 674760 - DNA, 75 bp, synthetic construct
  source 1..75: mol_type = other DNA
aactacgatagactcgtaaagcttagtctgaatagtaatgctcttgagtcaataaatttccctcaaggcagaaat

SEQ ID NO: 674761 - DNA, 75 bp, synthetic construct
  source 1..75: mol_type = other DNA
ggacttcttcaaatccctcaatgcaggtgaactgaagaaagccgctccggctgatccgagtgctccgttggtcaa

SEQ ID NO: 674762 - DNA, 75 bp, synthetic construct
  source 1..75: mol_type = other DNA
ccagtcgccgtttcgccagatggtcacccccggggggatataccatgtcggtggcgatgaccaactgtgggcatc

SEQ ID NO: 674763 - DNA, 75 bp, synthetic construct
  source 1..75: mol_type = other DNA
cgctggggagatccgcaggaactgattggtgctgcggtgttcctttcttcaaaagcctctgatttcgtaaacggc

SEQ ID NO: 674764 - DNA, 75 bp, synthetic construct
  source 1..75: mol_type = other DNA
ggtgaaggcagccaggtaaattccgaaaccttctttatgggggtttatagcagttacggtggtaatcaatttctg

SEQ ID NO: 674765 - DNA, 75 bp, synthetic construct
  source 1..75: mol_type = other DNA
aacttctcctgtgcagtacaccctgggggggaatctgactaacagcggtacgctgatggcggggatgtcaggcca

SEQ ID NO: 674766 - DNA, 75 bp, synthetic construct
  source 1..75: mol_type = other DNA
taataacggtcaactagtaatgaatacggtactgaatggcgatgactcagtaaccgataaattggttgtcgaggg

SEQ ID NO: 674767 - DNA, 75 bp, synthetic construct
  source 1..75: mol_type = other DNA
aaacactacaaaactggaatatttaaacttaagcaataacaatttactgccaaccaatgacattgatcaactaat

SEQ ID NO: 674768 - DNA, 75 bp, synthetic construct
  source 1..75: mol_type = other DNA
ctggcgataccgcgtgtgggtcaggaggtgattgtggacttcctcaacggcgatccggaccagccgatcattatg

SEQ ID NO: 674769 - DNA, 75 bp, synthetic construct
  source 1..75: mol_type = other DNA
catgccgaaaaaataggtaacaaccaggcgatcaccgttaccaataaccagatccagaacattggcgttaatcag

SEQ ID NO: 674770 - DNA, 75 bp, synthetic construct
  source 1..75: mol_type = other DNA
tgaatgttaagacgatcccttcggtagataaaaatgcattgacggcaggaatgttttgcaactggcgattttatc

SEQ ID NO: 674771 - DNA, 75 bp, synthetic construct
  source 1..75: mol_type = other DNA
ggatttctgttattgccacttcgttggttcatggcgtgattattacattttctcatttacttttttcataaaatt

SEQ ID NO: 674772 - DNA, 75 bp, synthetic construct
  source 1..75: mol_type = other DNA
gaagtccatccaaaccgaaccaacggtggacatcagaccattgtatgaaagcgcccgtaaggttgcgacattcac

SEQ ID NO: 674773 - DNA, 75 bp, synthetic construct
  source 1..75: mol_type = other DNA
cttgcagtacattacgctcgttattcagggggcttatggaacccacaatggcagtcagttgtatttagaacactt

SEQ ID NO: 674774 - DNA, 75 bp, synthetic construct
  source 1..75: mol_type = other DNA
acgattttcaagttatttggatttcaattgaagaagctttgaaaaaacattgggaacataacgataataaaaata

SEQ ID NO: 674775 - DNA, 75 bp, synthetic construct
  source 1..75: mol_type = other DNA
cccgtggtgcaggcaccgggctttctggtggcgcgctgccgctgggaaaaaggtgtgttgttggtgatggcgcgc

SEQ ID NO: 674776 - DNA, 75 bp, synthetic construct
  source 1..75: mol_type = other DNA
ggtgtgttgttggtgatggcgcgctttaaagagatcctcgacattaaccccgttggtcgccgcgcgcgtgcagcc

SEQ ID NO: 674777 - DNA, 75 bp, synthetic construct
  source 1..75: mol_type = other DNA
acagcagacacccggatcagcactctggaaaatcaggtaagcgaactggttgcacttgtccggcagttaacagga

SEQ ID NO: 674778 - DNA, 75 bp, synthetic construct
  source 1..75: mol_type = other DNA
cattaaccacatctagtccggtaaaatctggcggagggcgaattgatgtccttggaagcacgtcagactatagca

SEQ ID NO: 674779 - DNA, 75 bp, synthetic construct
  source 1..75: mol_type = other DNA
cgcgcatgaagttatttctccgtccaattcaactacaagaattacccgcagaagcgccggatacactcaagtttt

SEQ ID NO: 674780 - DNA, 75 bp, synthetic construct
  source 1..75: mol_type = other DNA
ggacagaccaaacattattcgagctacgctcagctgaccgaaaaacataatggcgcgttagccgataatctgata

SEQ ID NO: 674781 - DNA, 75 bp, synthetic construct
  source 1..75: mol_type = other DNA
gaattataggctctgtagtattgttcaaaaccactacattaggttattatgctgtagctataagttatgtgatta

SEQ ID NO: 674782 - DNA, 75 bp, synthetic construct
  source 1..75: mol_type = other DNA
caaaaccagatggacccggtgtacacgccggcgcgaaaatccacctgtaccactgcgaccatcgcggcctgccgc

SEQ ID NO: 674783 - DNA, 75 bp, synthetic construct
  source 1..75: mol_type = other DNA
aagaacaccaaagtgataacagaatctgctggtatgctcggagagggattaggcgacctggctaaacaggtgacg

SEQ ID NO: 674784 - DNA, 75 bp, synthetic construct
  source 1..75: mol_type = other DNA
atatgggaaatggaatgcagtgtcatttttccatgaaaggtttacaggctaacaccaataaagttcaggagattc

SEQ ID NO: 674785 - DNA, 75 bp, synthetic construct
  source 1..75: mol_type = other DNA
ggccggatggtcagccggacaaaacaccgtgacggctaccgcccggaaacagagcggttccggtgggacagccgg

SEQ ID NO: 674786 - DNA, 75 bp, synthetic construct
  source 1..75: mol_type = other DNA
actggcggaaagtgggttaaacaagacacggcgttcaagtccagttattccgacgtggattattcagtgccagcg

SEQ ID NO: 674787 - DNA, 75 bp, synthetic construct
  source 1..75: mol_type = other DNA
agaagaagctagacaagaagccaaaacacaacaagaagctaccgttaaagctgttcctgaacagcttccccctac

SEQ ID NO: 674788 - DNA, 75 bp, synthetic construct
  source 1..75: mol_type = other DNA
tgaattttgcagtgaagccctgaagcttgctgaacgcatcggtgttactgccgcagcccgtgaactcagcctgta

SEQ ID NO: 674789 - DNA, 75 bp, synthetic construct
  source 1..75: mol_type = other DNA
cagcgcaccgcttccttatcttcccctgacacaccccgccctctctcagcctcagcgttccccgacacactgccc

SEQ ID NO: 674790 - DNA, 75 bp, synthetic construct
  source 1..75: mol_type = other DNA
ataattttagtaccatcagatttacacggaaatgtaccacatattggatctgcatcagatatgcgaaactcaaga

SEQ ID NO: 674791 - DNA, 75 bp, synthetic construct
  source 1..75: mol_type = other DNA
acaacgatcgataaagaattgaatcaagggattggcgatacggatattcgtgccggaatgatcggtgaaataagt

SEQ ID NO: 674792 - DNA, 75 bp, synthetic construct
  source 1..75: mol_type = other DNA
acgacggttggtatttgcttgaaggtgctgacccagggagccaggaggcgttagcaaatgcggaacctgactccc

SEQ ID NO: 674793 - DNA, 75 bp, synthetic construct
  source 1..75: mol_type = other DNA
ttgcatttggttcctccgcccaggcgactgcaggagatacattagctattggtgtaggggctacatctaatgcag

SEQ ID NO: 674794 - DNA, 75 bp, synthetic construct
  source 1..75: mol_type = other DNA
gcaaaattcacgattgataaagttaaattgagtgttaaatctaacactggcaatgaaacattagaagtgaattcc

SEQ ID NO: 674795 - DNA, 75 bp, synthetic construct
  source 1..75: mol_type = other DNA
gtgcaaccagaccgagatgtgttgattactgatcaggctaaacaggttttggttcaccttaaccaggtcacgaac

SEQ ID NO: 674796 - DNA, 75 bp, synthetic construct
  source 1..75: mol_type = other DNA
aatgggacttgttgtcgattatctgggatgcggggccacatttatcgtactgatactgtcgctgtttttgccatc

SEQ ID NO: 674797 - DNA, 75 bp, synthetic construct
  source 1..75: mol_type = other DNA
aattttgatacggtattttattacaaaagggaaaatctaagctctggagagcgactagcttactggattgaataa

SEQ ID NO: 674798 - DNA, 75 bp, synthetic construct
  source 1..75: mol_type = other DNA
atataaagcaccataattggaaagaaagttggttggatttttcagtttttctttatgaacataatcgcttgatta

SEQ ID NO: 674799 - DNA, 75 bp, synthetic construct
  source 1..75: mol_type = other DNA
tctgaatcggatgcgtccctgctgtcccggcttgcaggtatgtatggtgccaccagtaaaccgacgaacggctac

SEQ ID NO: 674800 - DNA, 75 bp, synthetic construct
  source 1..75: mol_type = other DNA
cagatgtgaccgcactgaaaacccgtgccttcagcgatgtcacgctgggggacctggtgaaaaccatcgccactg

SEQ ID NO: 674801 - DNA, 75 bp, synthetic construct
  source 1..75: mol_type = other DNA
ctgatgctgccctcttatcccgcattgcaggtatgtacggcgccaccagtaaaccgaccaatggctactggttat

SEQ ID NO: 674802 - DNA, 75 bp, synthetic construct
  source 1..75: mol_type = other DNA
tcagccataccagtgacggccaccgagtgtcggtccactacggctatgacgataaaggccgcctgacgggcgaac

SEQ ID NO: 674803 - DNA, 75 bp, synthetic construct
  source 1..75: mol_type = other DNA
agagctatctgcaaagcgccacccgctgggaccagaagggacgacccaagcgcgctgactggggcgctaaaaggc

SEQ ID NO: 674804 - DNA, 75 bp, synthetic construct
  source 1..75: mol_type = other DNA
aagtgacacactccatcaggtcaaaacgaaccgctgtcattaggtcaaaatgcactgatgatcctacagagaata

SEQ ID NO: 674805 - DNA, 75 bp, synthetic construct
  source 1..75: mol_type = other DNA
aaaaatggacgcctcaaggctttcgaaaccaccaccagccatattccacacctcgccaacttttaccagtgctga

SEQ ID NO: 674806 - DNA, 75 bp, synthetic construct
  source 1..75: mol_type = other DNA
aaagtctcaggctatgaccgttaaagaagcatttgattactgggagcaacattattgtattcccgaaggtctgaa

SEQ ID NO: 674807 - DNA, 75 bp, synthetic construct
  source 1..75: mol_type = other DNA
acatgtacgtacgtaactcctattatcatttccgttacatacgtacaatatcagtaggtacagtaaaaagcaaag

SEQ ID NO: 674808 - DNA, 75 bp, synthetic construct
  source 1..75: mol_type = other DNA
tgcgactcaggtgagcaaaaacctgctcccgcgtcttgaaactgccctacgcaccacccgacgctggtcgctggc

SEQ ID NO: 674809 - DNA, 75 bp, synthetic construct
  source 1..75: mol_type = other DNA
gtacaaggattatcaaaaattaataaagatgggactgtagaagttactaccaaggatggcactagtacatatcgt

SEQ ID NO: 674810 - DNA, 75 bp, synthetic construct
  source 1..75: mol_type = other DNA
aaaaaaaactatgaggctggcgtagcggctggactggatccgctgatgacgccggagccgtcgataggttcactt

SEQ ID NO: 674811 - DNA, 75 bp, synthetic construct
  source 1..75: mol_type = other DNA
tttgccgggaagaaccggtctgataatgagccgtttgcggtaggggatccggttaccgtgttgtctgaggccgga

SEQ ID NO: 674812 - DNA, 75 bp, synthetic construct
  source 1..75: mol_type = other DNA
atgaataatgatatggcgctgatacagctgcaccatatatcccaacgggcgaaatcccgctccttacgtgataac

SEQ ID NO: 674813 - DNA, 75 bp, synthetic construct
  source 1..75: mol_type = other DNA
tggagaatggtatatgggaagaaaagcaaggcatcttgcaaataaagaaatcattaaagtattggctgaacgcta

SEQ ID NO: 674814 - DNA, 75 bp, synthetic construct
  source 1..75: mol_type = other DNA
acgggggggatgtgggaggtcaataagaatgtctataccaccattggtgttgcgggctgtagtggtcaagtaata

SEQ ID NO: 674815 - DNA, 75 bp, synthetic construct
  source 1..75: mol_type = other DNA
ataacgattcctcaattgaatttcaaattggtaatcaaggaactggggaggcgactattcgcgagggtggactga

SEQ ID NO: 674816 - DNA, 75 bp, synthetic construct
  source 1..75: mol_type = other DNA
taataaaaaataacgattcctcaattgaatttcaaattggtaatcaagggatgggggaagcgactattcgcgagg

SEQ ID NO: 674817 - DNA, 75 bp, synthetic construct
  source 1..75: mol_type = other DNA
gtgccggatgcattactctccaactgggttgacgcgtgctgccagttaatgacgccgctgaatgatgccctgtac

SEQ ID NO: 674818 - DNA, 75 bp, synthetic construct
  source 1..75: mol_type = other DNA
ccaataactttgaactgaccgtcaccaataaagccgatctctatacccgcgcgacgttccatctacaacgttgca

SEQ ID NO: 674819 - DNA, 75 bp, synthetic construct
  source 1..75: mol_type = other DNA
gtaaatccgctaccgttgggcaacttatgggaatgcgatacaaaggctgggagtcaggctatgaggacgcatttg

SEQ ID NO: 674820 - DNA, 75 bp, synthetic construct
  source 1..75: mol_type = other DNA
aagaaacggatctggtttctggtgatggcgagaaaaaagctaaaggtttcctggcttttccgcgcactgaggata

SEQ ID NO: 674821 - DNA, 75 bp, synthetic construct
  source 1..75: mol_type = other DNA
atcttactgtatatctcgatgtcggtacgctggaaaccagtggtatgcgcgaagactttcctgaagtctatattt

SEQ ID NO: 674822 - DNA, 75 bp, synthetic construct
  source 1..75: mol_type = other DNA
ccgccagtctgccggggctggttatcagcaaccaccctttctttcccgatattgatacgcaacatctgcgtgcga

SEQ ID NO: 674823 - DNA, 75 bp, synthetic construct
  source 1..75: mol_type = other DNA
tcatggcctgctggcaatgaccaacgctgatgtgaatagcgatcccactaatgaacagtggaatctcaatggtcg

SEQ ID NO: 674824 - DNA, 75 bp, synthetic construct
  source 1..75: mol_type = other DNA
agcaggatgagcgtcaggtgcagattagcgcaggcgatattacgttactcgatgcctcacgcccctgttcgcttt

SEQ ID NO: 674825 - DNA, 75 bp, synthetic construct
  source 1..75: mol_type = other DNA
cgctgacttacccatggtgcaactcagtcatcgcctgttacaggagagcatgaataacccggcactttctgaaac

SEQ ID NO: 674826 - DNA, 75 bp, synthetic construct
  source 1..75: mol_type = other DNA
tcagtacgtagtttgtaccgaatgtttgccgataaaggtttggtggtcgcgcaatatattcgtaaccgtcgtctc

SEQ ID NO: 674827 - DNA, 75 bp, synthetic construct
  source 1..75: mol_type = other DNA
atgaatacttttattactaagtactatggtaaaactaaacagtgctttgcgtgtttcgcgaaggatgaacgtggt

SEQ ID NO: 674828 - DNA, 75 bp, synthetic construct
  source 1..75: mol_type = other DNA
aaagcggccccggtttgggggttgaccttttgccgtcgccaaccggcgacgcttggagttctgtcaataactcta

SEQ ID NO: 674829 - DNA, 75 bp, synthetic construct
  source 1..75: mol_type = other DNA
gtgaatagcgatcccactaatgaacagtggaatctcaatggtcgtattctgttaggttttgatggtatgcgaaaa

SEQ ID NO: 674830 - DNA, 75 bp, synthetic construct
  source 1..75: mol_type = other DNA
tcggtttctgatatctttaggcatggcttgtcttagagttttctttgatatagtgagaaaacggtataaagtgaa

SEQ ID NO: 674831 - DNA, 75 bp, synthetic construct
  source 1..75: mol_type = other DNA
aacgaaaaggcgaggttctggctgaacgtgctgacagaactgagaaattaggggctggaagacattctcatctcc

SEQ ID NO: 674832 - DNA, 75 bp, synthetic construct
  source 1..75: mol_type = other DNA
gatgtggcggcaatagttttatcgctcaacgatgttacatgcggaaaactcgatgaaatcgatgccacgggttaa

SEQ ID NO: 674833 - DNA, 75 bp, synthetic construct
  source 1..75: mol_type = other DNA
ttgcgatatgttcgaacaccgtatgatattggctgaagaatattttgaactgctgctggtgatacagttgaatgg

SEQ ID NO: 674834 - DNA, 75 bp, synthetic construct
  source 1..75: mol_type = other DNA
gcccgacaaatgggcaaaaaaatctgcgttttgtttatcgactgggaggcgcaattctcttgcaccattaactat

SEQ ID NO: 674835 - DNA, 75 bp, synthetic construct
  source 1..75: mol_type = other DNA
ccaccggtcttattaactgtattgcgttttcagcacaggcagttgactctacgattacagtaacgggtaatgttt

SEQ ID NO: 674836 - DNA, 75 bp, synthetic construct
  source 1..75: mol_type = other DNA
catcgtgaacatgtttttcccagtagaaatgaccctaaagaacaaatgaatagccaaactgctaatgcagcttta

SEQ ID NO: 674837 - DNA, 75 bp, synthetic construct
  source 1..75: mol_type = other DNA
tggagaaagatgtattccctgccgttggtgaactcccagttcagcaaatcaaagcccgaacgttggttgaagcgc

SEQ ID NO: 674838 - DNA, 75 bp, synthetic construct
  source 1..75: mol_type = other DNA
attgaagcagctttagctcacagtgataaaaatgaagttcgtaaagcctataatcgttcaacctacctggttcaa

SEQ ID NO: 674839 - DNA, 75 bp, synthetic construct
  source 1..75: mol_type = other DNA
cgatatcatgcatcaggccaataataattacaatgcggtcgataaaaaggtgcaatcgctggagaaaaaagtcaa

SEQ ID NO: 674840 - DNA, 75 bp, synthetic construct
  source 1..75: mol_type = other DNA
gatattacaacacgattgcataataaccttgaaagcaccctgcttcgacacgaaatggcacataataagtttcgt

SEQ ID NO: 674841 - DNA, 75 bp, synthetic construct
  source 1..75: mol_type = other DNA
atgagtctcgataaagcatgcggtatttatcacggcatgcgaattgagcttaaagaaccaaatggtaaagccccg

SEQ ID NO: 674842 - DNA, 75 bp, synthetic construct
  source 1..75: mol_type = other DNA
cctttaatcttaaagcccgtgcagtgagtaaaggccaggttactccgggaaatatcagctctgttataactgtca

SEQ ID NO: 674843 - DNA, 75 bp, synthetic construct
  source 1..75: mol_type = other DNA
atgatatcagagcggtatttattcaggctggcgtggatgccggtgaatttgatgccgccagaaacagctttatgg

SEQ ID NO: 674844 - DNA, 75 bp, synthetic construct
  source 1..75: mol_type = other DNA
cctccggcacctaactggcctgcgccaacgccgccggtacaaaatgaacaatcaagacctctgcctgatgtggct

SEQ ID NO: 674845 - DNA, 75 bp, synthetic construct
  source 1..75: mol_type = other DNA
agatcgatctcgataaaaagctctggacaattcctgcagagcggatgaaggctaagcgtgagcatattgttcccc

SEQ ID NO: 674846 - DNA, 75 bp, synthetic construct
  source 1..75: mol_type = other DNA
agaaaaacgaggtgtccttgaaacacttcgccgcgtcatatcccgcctgaatgaaattttccgctatgcagcaac

SEQ ID NO: 674847 - DNA, 75 bp, synthetic construct
  source 1..75: mol_type = other DNA
tcgtcgataaatatcaaaacaccaatattgaaggtatttacgcggtgggcgataacacgggtgcagtggagctga

SEQ ID NO: 674848 - DNA, 75 bp, synthetic construct
  source 1..75: mol_type = other DNA
ctacgtcgcatcatttcccgcctgaatgaaatttttcgctatgctgccacagaagaactcattgagttcaaccca

SEQ ID NO: 674849 - DNA, 75 bp, synthetic construct
  source 1..75: mol_type = other DNA
ataggctgtccactatttatccacaaagggcgtaatctgttaccgctgcaggctgcgtggacgttgctggaatat

SEQ ID NO: 674850 - DNA, 75 bp, synthetic construct
  source 1..75: mol_type = other DNA
atgtattacaccgctgcactcgtagctttagcatttgccttttcaccagtactgacagagttagttaaagtgatg

SEQ ID NO: 674851 - DNA, 75 bp, synthetic construct
  source 1..75: mol_type = other DNA
atggcaaaaatcgctaagaaactcactgacactgaaatcaaaagcaccaagccagccgataaagaaatcaacttg

SEQ ID NO: 674852 - DNA, 75 bp, synthetic construct
  source 1..75: mol_type = other DNA
ccccagcgaactgggcagactaatgttggcactacaaaacgcctctatccgcaaggaaacacgctgccttatcga

SEQ ID NO: 674853 - DNA, 75 bp, synthetic construct
  source 1..75: mol_type = other DNA
caccgagaattcatttttcccagcagatgtgacccgaagaagtcaatgaacagtcaaacggcgaatgctgctttg

SEQ ID NO: 674854 - DNA, 75 bp, synthetic construct
  source 1..75: mol_type = other DNA
acaacaaaacagcgaacaatgatggggcttggtgccttccctgccttatcgcttggtgatgcccgaaggttaagg

SEQ ID NO: 674855 - DNA, 75 bp, synthetic construct
  source 1..75: mol_type = other DNA
agtccataacaacgaaaaagccaatgcactaaaagatgcgactgaaaacacgctacaggctgttgcaagaaagtg

SEQ ID NO: 674856 - DNA, 75 bp, synthetic construct
  source 1..75: mol_type = other DNA
cagcctatcagcggtcatcgtgaatgggtatttcccagcataaaaacacccttgacccacatgcatgagcagaca

SEQ ID NO: 674857 - DNA, 75 bp, synthetic construct
  source 1..75: mol_type = other DNA
acaaaaaaatcgaaagcgctgcgtacggcctctgagctgatggtcggcctgaccgccctgctgttcctgtttgtt

SEQ ID NO: 674858 - DNA, 75 bp, synthetic construct
  source 1..75: mol_type = other DNA
ctccatcttgtaatgaattttatttaaaagcctggagtgaatgggaaaagaacggtaccccaggcgagcaacgca

SEQ ID NO: 674859 - DNA, 75 bp, synthetic construct
  source 1..75: mol_type = other DNA
aaaagataaaagaaacttattctgtatctagacagtattatagttttcctatccaagtaattgcgcgaataattg

SEQ ID NO: 674860 - DNA, 75 bp, synthetic construct
  source 1..75: mol_type = other DNA
atatggcgctttgcgatgtcattatccagtcgctggctggtgaactagatgaaactgcagagcaacaaacctatc

SEQ ID NO: 674861 - DNA, 75 bp, synthetic construct
  source 1..75: mol_type = other DNA
ttactggcggccagcggcggcgcgccgtttatgctaatgggggaatgggatggtcagcagctgacgccctgtagc

SEQ ID NO: 674862 - DNA, 75 bp, synthetic construct
  source 1..75: mol_type = other DNA
attcattttatgtcccttgagttgtgtggaagagtaatggggttatgccatcctatgatggcaacgtatcgccca

SEQ ID NO: 674863 - DNA, 75 bp, synthetic construct
  source 1..75: mol_type = other DNA
ccgataagtatgatctcatcaataaaacgtcccgtgtttctcctgacagtggccgtttttatgaaccggacacag

SEQ ID NO: 674864 - DNA, 75 bp, synthetic construct
  source 1..75: mol_type = other DNA
gaatcagatttggacttttgttttttttctcattcaattctatagcatatgctggatattttggcccaagagaac

SEQ ID NO: 674865 - DNA, 75 bp, synthetic construct
  source 1..75: mol_type = other DNA
tcaatataatgtaaaaagaagcagcgaatttttttcggattgcgacgataatacccatgataatatagttatatt

SEQ ID NO: 674866 - DNA, 75 bp, synthetic construct
  source 1..75: mol_type = other DNA
tgggtgtcagatattactcccctgtcgacgggcgaacgcgtgaatttaaagtggatgtggagtccacagacaagc

SEQ ID NO: 674867 - DNA, 75 bp, synthetic construct
  source 1..75: mol_type = other DNA
taccggaggcagggatgcccctgtaatgaccatcacaccggacatggtgtcagactgggattaccgggagggtga

SEQ ID NO: 674868 - DNA, 75 bp, synthetic construct
  source 1..75: mol_type = other DNA
aaatgatgaggtgaatgcgatacgcaataacggcacaactgacggaaaatggcaggcaagtgcgattattgacaa

SEQ ID NO: 674869 - DNA, 75 bp, synthetic construct
  source 1..75: mol_type = other DNA
caactggcggcagttccttccagcgccgacccttctcgtacgactgtcgcttacgttgatgggacggcaggcaat

SEQ ID NO: 674870 - DNA, 75 bp, synthetic construct
  source 1..75: mol_type = other DNA
acgaaagatggaaaaagatataagcggtttcttaacaatgagaacataaatttagaatgggctgaaataaaagat

SEQ ID NO: 674871 - DNA, 75 bp, synthetic construct
  source 1..75: mol_type = other DNA
gcaatgaaagatgcctatcagcgagatggggagtatccagcttatagttctcctcttgacctaacggcagataat

SEQ ID NO: 674872 - DNA, 75 bp, synthetic construct
  source 1..75: mol_type = other DNA
tgagttcccacaggtttctaatcatgtctatctaaacagattagcagaaaaacttgctgaatctaaaacactaaa

SEQ ID NO: 674873 - DNA, 75 bp, synthetic construct
  source 1..75: mol_type = other DNA
aacaattcattctccctggtgagcaaaaagcacgtttccggaataagtggtccatggagtcagttaccaacggga

SEQ ID NO: 674874 - DNA, 75 bp, synthetic construct
  source 1..75: mol_type = other DNA
aaaagggcactgcttttttgtggagctcaccaaccgcagtggcaaacgggaatactggggaaacggcctggaaga

SEQ ID NO: 674875 - DNA, 75 bp, synthetic construct
  source 1..75: mol_type = other DNA
agcgggcgaacgattcgtctcactgatggcgacagtacgccagccgggcgttacaggaactgggggcgggtaaac

SEQ ID NO: 674876 - DNA, 75 bp, synthetic construct
  source 1..75: mol_type = other DNA
aaatatcaagcttacgacattatcagaaaatttaaataataagcggtttatcgaactgctatctcgtttacatgt

SEQ ID NO: 674877 - DNA, 75 bp, synthetic construct
  source 1..75: mol_type = other DNA
ctgagctagatgaaatactcaatgcttacggtattcgtgcattctcagtatcgaattatgctgtatcaggctcct

SEQ ID NO: 674878 - DNA, 75 bp, synthetic construct
  source 1..75: mol_type = other DNA
gtaattctggctcagcgtgcatttgattctcgagcagtaacagaattggttagtaatacaaatacaatccgtgtg

SEQ ID NO: 674879 - DNA, 75 bp, synthetic construct
  source 1..75: mol_type = other DNA
tcctctaaatttaactggtgatactattaagacaacatcggagaaaattgcagcagcacagcttgttaaacttgg

SEQ ID NO: 674880 - DNA, 75 bp, synthetic construct
  source 1..75: mol_type = other DNA
gtattggtggtgcaaaaacctccaactcaaatgtgaataagggctttgttatcgaattaaatggtcttagtcagg

SEQ ID NO: 674881 - DNA, 75 bp, synthetic construct
  source 1..75: mol_type = other DNA
cggcggtgttcttcaggtggtggccggtgctgttctggctgttgtgggatatgtgttcagctggaccggtattgg

SEQ ID NO: 674882 - DNA, 75 bp, synthetic construct
  source 1..75: mol_type = other DNA
gaattggcggagcgcttacctctgcaggttcaaaagtactaaaaggctttgctctagagcttaacggactcagtc

SEQ ID NO: 674883 - DNA, 75 bp, synthetic construct
  source 1..75: mol_type = other DNA
gtattggctccgctgatacatctgcaactggtggtactgataagggatttgtaatagagttgaatggcttaagcc

SEQ ID NO: 674884 - DNA, 75 bp, synthetic construct
  source 1..75: mol_type = other DNA
gaacgcgctgtttctgtatcagacggtggtgaggactgagctgcaacgcactgagccattcactgagccgttcag

SEQ ID NO: 674885 - DNA, 75 bp, synthetic construct
  source 1..75: mol_type = other DNA
ctggttctgctggtggtggcaacgggcgtggtcactattttgctgacggcggtagtaccgaaaatcatcgaacag

SEQ ID NO: 674886 - DNA, 75 bp, synthetic construct
  source 1..75: mol_type = other DNA
tttacgctctcaggtgacgatggcgctgaaaaaatatcgcccacaggccgcgatacccggctgctcgcagaattg

SEQ ID NO: 674887 - DNA, 75 bp, synthetic construct
  source 1..75: mol_type = other DNA
atatccgtcaggggcgatgctcatctctgacgatggggagagaatattcattaatacaacagaaggaaatttatc

SEQ ID NO: 674888 - DNA, 75 bp, synthetic construct
  source 1..75: mol_type = other DNA
tgaaaggtatggcgactaatgcagcaattggtatcagcgtaaactcagctgctcagcttgctggaaaagatcctt

SEQ ID NO: 674889 - DNA, 75 bp, synthetic construct
  source 1..75: mol_type = other DNA
atggaatcgctctcagaaggaaccacagcaggctaccagcaaatccacgacggcattattcacctggtcgatagc

SEQ ID NO: 674890 - DNA, 75 bp, synthetic construct
  source 1..75: mol_type = other DNA
agacgcgcctgaaaactatatcattagccacttaaaaaactttaaaggtgtattttatgaatggaatgatgatta

SEQ ID NO: 674891 - DNA, 75 bp, synthetic construct
  source 1..75: mol_type = other DNA
tgctggggtgatcacgcgcaatactacgctgtttgacccaggctggtggcagctgcctgggtcggaaaaacgtta

SEQ ID NO: 674892 - DNA, 75 bp, synthetic construct
  source 1..75: mol_type = other DNA
atttatcatggtttggtttcttttaacttgatagcaaaaataaaagctaaaggtaatctcttcggtggaattagt

SEQ ID NO: 674893 - DNA, 75 bp, synthetic construct
  source 1..75: mol_type = other DNA
ctctccaaaaagaagagggtggtttatataatttacgtggattggattttaaggggtgtgatcctacccacgtaa

SEQ ID NO: 674894 - DNA, 75 bp, synthetic construct
  source 1..75: mol_type = other DNA
atgttattggcgttgtaaatgatgagactgtagacggcagccaaagagtagatgaacgaggtacaacaaataatg

SEQ ID NO: 674895 - DNA, 75 bp, synthetic construct
  source 1..75: mol_type = other DNA
ttattaattttgctttttgttttccgttaatggcgaagacgttatttttaggtgattcattaacggctgtttatg

SEQ ID NO: 674896 - DNA, 75 bp, synthetic construct
  source 1..75: mol_type = other DNA
atggcggcgtactattacgtgtgggcacccgcccaggtaagccagggtaagatcaatacatcggctacgctgaat

SEQ ID NO: 674897 - DNA, 75 bp, synthetic construct
  source 1..75: mol_type = other DNA
ggtaaaggcatcatcgtctcaactcccatcaatatgggcggtgctgcaatcggtagtagtatcaagggagaagat

SEQ ID NO: 674898 - DNA, 75 bp, synthetic construct
  source 1..75: mol_type = other DNA
ataatcaaattaattaaaacgatgaaacatagcagtaacaataaagtatcaatagataattatgaccaaattgaa

SEQ ID NO: 674899 - DNA, 75 bp, synthetic construct
  source 1..75: mol_type = other DNA
gccgaaaggatggagtattgttagaactgaagatattgcattaaaaataggaatgggaccatttggttccaatat

SEQ ID NO: 674900 - DNA, 75 bp, synthetic construct
  source 1..75: mol_type = other DNA
ttcattctggagatattttattctcgaatatcagaacatattttaaaaaactatggcttgcagatcgaactggtg

SEQ ID NO: 674901 - DNA, 75 bp, synthetic construct
  source 1..75: mol_type = other DNA
gaaaggcatttctatcgacagagtgaattattaattcccgatgtactggcgaatgttaatttttcccaggctgat

SEQ ID NO: 674902 - DNA, 75 bp, synthetic construct
  source 1..75: mol_type = other DNA
gccctatgcacatcatcctaaattaataagcacattagcgcttgcccgcgccacgctatacaaacatttacggga

SEQ ID NO: 674903 - DNA, 75 bp, synthetic construct
  source 1..75: mol_type = other DNA
actcaatgtcctcacaatacctcgtcttcaaaaacaatttcccaatgaatcacatacggaaaaccaacctacctg

SEQ ID NO: 674904 - DNA, 75 bp, synthetic construct
  source 1..75: mol_type = other DNA
catctccagcatgtcgatgaccattggcggtaaacacagcgattataccgacacgctgctggtgaatgaatcctc

SEQ ID NO: 674905 - DNA, 75 bp, synthetic construct
  source 1..75: mol_type = other DNA
tgttattaacgacgctgttcaatgcatcgtgggcattggctgtcgaaatttcggttaattttaccgcgacaatca

SEQ ID NO: 674906 - DNA, 75 bp, synthetic construct
  source 1..75: mol_type = other DNA
tcatgatgtcaggtttgactggtgtaggtacagccgggaaaggatattacgctaaccagttgttgggtgccggta

SEQ ID NO: 674907 - DNA, 75 bp, synthetic construct
  source 1..75: mol_type = other DNA
caagtttctttaattcctgaagattctgaatatgacagatatataatttcccaacgtcaatttttcttacgcgta

SEQ ID NO: 674908 - DNA, 75 bp, synthetic construct
  source 1..75: mol_type = other DNA
aattaacaccattgggaattccgcagacaccgtctgcagaattcccatcggcaaagatttggcagacgctgtctg

SEQ ID NO: 674909 - DNA, 75 bp, synthetic construct
  source 1..75: mol_type = other DNA
ttccagcctgtcgatgaccctcaatggtgcagtcagcagctatacagattcgttaatcggtaatgaccagacagt

SEQ ID NO: 674910 - DNA, 75 bp, synthetic construct
  source 1..75: mol_type = other DNA
tgatattggtatgcgcatgttacagccgcgcgaactgtaccgggcgcagggcttcccggactggtacatcatcga

SEQ ID NO: 674911 - DNA, 75 bp, synthetic construct
  source 1..75: mol_type = other DNA
agaaacgggaaactgtatgcagaaaatcccacgccgtattatatcaattttaaaagccttgaagtcggcggtaaa

SEQ ID NO: 674912 - DNA, 75 bp, synthetic construct
  source 1..75: mol_type = other DNA
cggaagccattaccttcgatccgcagcaaactgcgctgatcgtggtggatatgcaaaatgcctatgccacgccag

SEQ ID NO: 674913 - DNA, 75 bp, synthetic construct
  source 1..75: mol_type = other DNA
gtaccgttattcattatgatttctggggctttgcttattaaagaaagtacaaatatgaattcgtcattaaaacga

SEQ ID NO: 674914 - DNA, 75 bp, synthetic construct
  source 1..75: mol_type = other DNA
ctcatcagcgaagacggcaatatagcgtggaacgcggagtatgatgagtggggcaacatgctgaacgaggagaac

SEQ ID NO: 674915 - DNA, 75 bp, synthetic construct
  source 1..75: mol_type = other DNA
gatgcgcactatgtttaccactacgatgaatacggcagactgacggagaagacggaccgcatcccggcgggtgtg

SEQ ID NO: 674916 - DNA, 75 bp, synthetic construct
  source 1..75: mol_type = other DNA
aaacaatggcatcatatgcgcgagattttcggatacctggcactctgattcccggaaaggtcaataaaagatatt

SEQ ID NO: 674917 - DNA, 75 bp, synthetic construct
  source 1..75: mol_type = other DNA
taaaggtgtggcgttcgcagaaggttttagcgcgctcctactggaaagcgctcatcaccgccgggcgcgtcaaca

SEQ ID NO: 674918 - DNA, 75 bp, synthetic construct
  source 1..75: mol_type = other DNA
cctactccatgctgagggacggtaaggtgtgcgatgcatgcctgaccgggacggtattcaacgcttttcgttacc

SEQ ID NO: 674919 - DNA, 75 bp, synthetic construct
  source 1..75: mol_type = other DNA
acaccagtatatacagagtattttgaagctggctttattggtgagttagccgaagggcaggatattaaaactgtt

SEQ ID NO: 674920 - DNA, 75 bp, synthetic construct
  source 1..75: mol_type = other DNA
aacgcattagtgtgtgcctctaaagatgaaacattgatatcttccttaaaactaaatagaggacgtttttttgaa

SEQ ID NO: 674921 - DNA, 75 bp, synthetic construct
  source 1..75: mol_type = other DNA
ccggcacaagtttgtaggcatgataagacgcgtcagcgtcgcatcaggcatctgcgcacaattgccggatgcggt

SEQ ID NO: 674922 - DNA, 75 bp, synthetic construct
  source 1..75: mol_type = other DNA
ataagaacttataacggaagtcttgcaaatatggtatggtggaaaagcgaaagtacattaaaaaattatgcaata

SEQ ID NO: 674923 - DNA, 75 bp, synthetic construct
  source 1..75: mol_type = other DNA
ggagtcggggctgtactataaccggaaccggtactatgatccgttgcaggggaggtatatcacccaggacccgat

SEQ ID NO: 674924 - DNA, 75 bp, synthetic construct
  source 1..75: mol_type = other DNA
cggcgtgccggtgacctggccagcgccgacccatggggatccgaaaacgccagcagtgcagggcggcaaactggc

SEQ ID NO: 674925 - DNA, 75 bp, synthetic construct
  source 1..75: mol_type = other DNA
ctgcataagccgctgggcacggtcgtcgctggcggtggtaagttcgggttggtggcagcgaatctggttaagcac

SEQ ID NO: 674926 - DNA, 75 bp, synthetic construct
  source 1..75: mol_type = other DNA
gtgtatcgcatagtggatatcggcatgcgcatgctgcagccagcggaactgtaccgtgcgcagggcttcccggag

SEQ ID NO: 674927 - DNA, 75 bp, synthetic construct
  source 1..75: mol_type = other DNA
tcgatcaccatgctgtggttgcttctcacctggttaaattgcgcggaacctgccgggatggacaacgcaccgacg

SEQ ID NO: 674928 - DNA, 75 bp, synthetic construct
  source 1..75: mol_type = other DNA
atgcggtagttgcctctcatctggtgaaactgcgtggaacatgccgcgacgggcaacgccttgatgtgccaatgc

SEQ ID NO: 674929 - DNA, 75 bp, synthetic construct
  source 1..75: mol_type = other DNA
accatcaccgctggtggtggcggtaaatctcaactggtaacgcctacgctgattcagatgggttatggcgaacga

SEQ ID NO: 674930 - DNA, 75 bp, synthetic construct
  source 1..75: mol_type = other DNA
ctggcgagcatctcccgcgccggttccgacaactcgctctcaagcgacctggaatccctgcgcacccaggcgcgc

SEQ ID NO: 674931 - DNA, 75 bp, synthetic construct
  source 1..75: mol_type = other DNA
cgccctgtcgcgcggcatcctggatatctcccagcaggatatgctgccgaagttgatgaccgatgccggctaccg

SEQ ID NO: 674932 - DNA, 75 bp, synthetic construct
  source 1..75: mol_type = other DNA
aatcttactatcgactttatgtataaccaaaaaaataaaacaggaactgttgcgttgagtggaacctggcaacaa

SEQ ID NO: 674933 - DNA, 75 bp, synthetic construct
  source 1..75: mol_type = other DNA
tttttttttttttttttcttcatttctttttttttttttttttttattttttttttttttttttttatttttttt

SEQ ID NO: 674934 - DNA, 75 bp, synthetic construct
  source 1..75: mol_type = other DNA
atgacgcatatgcagcgtctgtttgattacctgactgataccggaaacttaccgcgtattaataccgttgaatct

SEQ ID NO: 674935 - DNA, 75 bp, synthetic construct
  source 1..75: mol_type = other DNA
tcacccagagcgccgacgcggtagtttcccgccatccggtcagcgtcaccctgggccgcctgccagcgggcgtca

SEQ ID NO: 674936 - DNA, 75 bp, synthetic construct
  source 1..75: mol_type = other DNA
gacattaacggcagcaattatgagcagtttgtgccatatgccattacctgtgataccactgttcgtgaccctcaa

SEQ ID NO: 674937 - DNA, 75 bp, synthetic construct
  source 1..75: mol_type = other DNA
cattgaagtggattttagcgatctcatcatcgacagcattaacggggattatggtcgtaaagaagtggattacga

SEQ ID NO: 674938 - DNA, 75 bp, synthetic construct
  source 1..75: mol_type = other DNA
gcacacaaagcgattttgatgatgccgcagtaagcagcaatatcactggattagggaaggtgcgaacaagtccct

SEQ ID NO: 674939 - DNA, 75 bp, synthetic construct
  source 1..75: mol_type = other DNA
cgaattgcgatgggtatggcctactggcgaggagctgctcttccgcttcggcaaagaggcggacgactactggga

SEQ ID NO: 674940 - DNA, 75 bp, synthetic construct
  source 1..75: mol_type = other DNA
ggcgaggaacttctcttccgcttcggcaaagaggcagacgactactgggatttccacgggcaggaattcccgttt

SEQ ID NO: 674941 - DNA, 75 bp, synthetic construct
  source 1..75: mol_type = other DNA
tatcatgaggtaaaaaatgttaacaagggagttggcctggtgggagataatggtatcgtcctggtaattagaagt

SEQ ID NO: 674942 - DNA, 75 bp, synthetic construct
  source 1..75: mol_type = other DNA
atacgctttacagcagtgtaagtggagcaaatgtgtatattgataacaatatcattgatgcgaatggtgtaattt

SEQ ID NO: 674943 - DNA, 75 bp, synthetic construct
  source 1..75: mol_type = other DNA
cgagctggagtttcgcgatgtgcttatcgacagtattgatggcaactacgcccgccaggaggtgccgtacaccat

SEQ ID NO: 674944 - DNA, 75 bp, synthetic construct
  source 1..75: mol_type = other DNA
atgaaacgactcgcacttttgctgatttgtggtgcctgcgggggcgttcaggcctcaccggatatcacctttcac

SEQ ID NO: 674945 - DNA, 75 bp, synthetic construct
  source 1..75: mol_type = other DNA
tggaagctgtgccggtaaaatcggctgatgcggtgttgagtgataccacgttttcggcctgggcaacattacggg

SEQ ID NO: 674946 - DNA, 75 bp, synthetic construct
  source 1..75: mol_type = other DNA
gatcccgagtggattatgacgctcacctggacggggacgccgaccgcctacaataacgcggctatcgaaacagac

SEQ ID NO: 674947 - DNA, 75 bp, synthetic construct
  source 1..75: mol_type = other DNA
cattgaagtggaatttcgcgatcttatcatcgacagcatcaacggggattatggtcgcagggaagtgaactatga

SEQ ID NO: 674948 - DNA, 75 bp, synthetic construct
  source 1..75: mol_type = other DNA
aacccgtttggcatcggccacacctgggtgaagaaacgcttcatcgagccagcgccccgcggcaccatcattcgt

SEQ ID NO: 674949 - DNA, 75 bp, synthetic construct
  source 1..75: mol_type = other DNA
ccggtatcttgaaggtgaagcaaagtcgcttggatataacgaaatcaggctagaaacccgtaaagctaatacccg

SEQ ID NO: 674950 - DNA, 75 bp, synthetic construct
  source 1..75: mol_type = other DNA
aggtagagcaaaaattattagttaagcaagaaaatgaacggcttacactggttaacaaacagcttgcgccaaaag

SEQ ID NO: 674951 - DNA, 75 bp, synthetic construct
  source 1..75: mol_type = other DNA
tcgatagcgaagtattaatgatttcatcgcgtgaaatagcagaagcaacaggcaaggatcattcttctgtggttg

SEQ ID NO: 674952 - DNA, 75 bp, synthetic construct
  source 1..75: mol_type = other DNA
aacaaagaaaaaaactgcgaatatgattatttactgcatcctgccatctctgtttcaaaaatcattggtggatgt

SEQ ID NO: 674953 - DNA, 75 bp, synthetic construct
  source 1..75: mol_type = other DNA
acagattgatattcgcggtatgggtccggaaaacacgctgattttgattgacggcaaaccggtaagcagccgtaa

SEQ ID NO: 674954 - DNA, 75 bp, synthetic construct
  source 1..75: mol_type = other DNA
acgcctccagcattatctcaatgaaaataagccgctgtttaccacggacgcacaagagaaaagttggctctatct

SEQ ID NO: 674955 - DNA, 75 bp, synthetic construct
  source 1..75: mol_type = other DNA
aagttactgagattgagaggctggtgaaagcaagtgatgcgtactacgaatatggatcgaatgaaattgagaaga

SEQ ID NO: 674956 - DNA, 75 bp, synthetic construct
  source 1..75: mol_type = other DNA
ctgttaagatgaatagtcttgaaattgcagaattaacgggaagtgatcacaaggatattaaacggagtatttaca

SEQ ID NO: 674957 - DNA, 75 bp, synthetic construct
  source 1..75: mol_type = other DNA
cacacagcaggaagatcacgattgggatggcacgcgctatgccgtcctacattcaccgccgaagaaagtcggcaa

SEQ ID NO: 674958 - DNA, 75 bp, synthetic construct
  source 1..75: mol_type = other DNA
acggccagagaattttcattacttggtaaactggaatctgccgatgatttacaagggatggcactggaagaggtg

SEQ ID NO: 674959 - DNA, 75 bp, synthetic construct
  source 1..75: mol_type = other DNA
aacgccgaattgctgtccgacgagagcactcgtgagtttattgaaaaatttggaatcaagaagccaagcctgcgt

SEQ ID NO: 674960 - DNA, 75 bp, synthetic construct
  source 1..75: mol_type = other DNA
catcagatggtgaacgtttatcggaagcctgaacgttactacgaggtacgtagtgatgattctgcgattgatatt

SEQ ID NO: 674961 - DNA, 75 bp, synthetic construct
  source 1..75: mol_type = other DNA
gggcacgctcattgctgcgatgaaaaatgcggcgggaatggtgagcgatccggcactgaaaaaagtgttacgcga

SEQ ID NO: 674962 - DNA, 75 bp, synthetic construct
  source 1..75: mol_type = other DNA
gcgcgcagtctggtctggccgaagctaaaatcgttcctcagagaatatcccgaaatcaatgtcgaactggtggtg

SEQ ID NO: 674963 - DNA, 75 bp, synthetic construct
  source 1..75: mol_type = other DNA
gcaatcgtggcatttattgagttttttatctatctatgcacctctgatgaagactttgcccgcaaatatggctaa

SEQ ID NO: 674964 - DNA, 75 bp, synthetic construct
  source 1..75: mol_type = other DNA
ttatttttgttgaaggtgaaacagagtatgccttgtttcaaaagatgaagcaaaaaggtttgattaaattcaaaa

SEQ ID NO: 674965 - DNA, 75 bp, synthetic construct
  source 1..75: mol_type = other DNA
taacccagacaggcgattacacgcggcgttcgtttatttatggcagcgttatttgcctgctggtggcgctggttc

SEQ ID NO: 674966 - DNA, 75 bp, synthetic construct
  source 1..75: mol_type = other DNA
ttactatggctgtactattgttggctgcgggatgtatggctggttacatttacggcggtatcccgtggtctacct

SEQ ID NO: 674967 - DNA, 75 bp, synthetic construct
  source 1..75: mol_type = other DNA
ggctttagatatccaccaagtgttgaattttatggcactgatacagttttttcgcacatatatcgccagcgtcaa

SEQ ID NO: 674968 - DNA, 75 bp, synthetic construct
  source 1..75: mol_type = other DNA
tgttattgttaaaaataacattaaatttattgccggattacatcatcaggatattgtctggacaacagaattcat

SEQ ID NO: 674969 - DNA, 75 bp, synthetic construct
  source 1..75: mol_type = other DNA
attttattatttttacaggcacaggagattcagccttatttatggtttacaagaatatatatgcatcgcttaaag

SEQ ID NO: 674970 - DNA, 75 bp, synthetic construct
  source 1..75: mol_type = other DNA
agcatacttaacgctggcaccaagaatgataggttgttcgggccccaatgcgaatctggctgcatttgctaatgc

SEQ ID NO: 674971 - DNA, 75 bp, synthetic construct
  source 1..75: mol_type = other DNA
tccagcgtgagcttctatcaagccaagaaaagaaacattcgaacaacgtcaagccaatttttatagccaacaaga

SEQ ID NO: 674972 - DNA, 75 bp, synthetic construct
  source 1..75: mol_type = other DNA
tactattcaaaacgccgtgctggtcaaaaccggtgaaacggtggtcctgggcggattgctggatgatttttctaa

SEQ ID NO: 674973 - DNA, 75 bp, synthetic construct
  source 1..75: mol_type = other DNA
gcttcacaggacgggccggatgtgcagcaggcggtgacacaggccattgccggattaagtgaacgcaaagtgcag

SEQ ID NO: 674974 - DNA, 75 bp, synthetic construct
  source 1..75: mol_type = other DNA
gtggcggaataggctctctcttgagaagaggagattcagtacgagctcagcatttggagtggcagatgaataacc

SEQ ID NO: 674975 - DNA, 75 bp, synthetic construct
  source 1..75: mol_type = other DNA
cagaaaggccccacgtacagcccggagtgccaatccggtacctggggcgctcctaaaattcaattcacaacgcag

SEQ ID NO: 674976 - DNA, 75 bp, synthetic construct
  source 1..75: mol_type = other DNA
ttccaagaaacaagtagctgcaaacccaaattttacaattcgacagaactggactcttattacacgatcaggaac

SEQ ID NO: 674977 - DNA, 75 bp, synthetic construct
  source 1..75: mol_type = other DNA
ccggtaacatgggattgaaccgccccgggtttcctggagagtgttttatctgtgaactcaggctgccagatcatt

SEQ ID NO: 674978 - DNA, 75 bp, synthetic construct
  source 1..75: mol_type = other DNA
aataactcttgacgaacctatggggagtgaagatgttaactggcatgcatctttgccaattattgtaacctatgc

SEQ ID NO: 674979 - DNA, 75 bp, synthetic construct
  source 1..75: mol_type = other DNA
tggtaataaaacaccactgatacggtgggataattatctatccttttttatttcagatgatgcacttcaaaacca

SEQ ID NO: 674980 - DNA, 75 bp, synthetic construct
  source 1..75: mol_type = other DNA
tacccggtacgtgagctgctgggtatcagccaggcagatgagcgcctgatttataacacggtgctgggccggatt

SEQ ID NO: 674981 - DNA, 75 bp, synthetic construct
  source 1..75: mol_type = other DNA
gacggtgcgggaagtctgggtacatttacggcaacggcaacaactgttaaagcaactgcgttagatggtattgag

SEQ ID NO: 674982 - DNA, 75 bp, synthetic construct
  source 1..75: mol_type = other DNA
tacagaaaacaaaaaatggcataccctatgttgccggtattggagcggggattgaggatactgatggccagcccc

SEQ ID NO: 674983 - DNA, 75 bp, synthetic construct
  source 1..75: mol_type = other DNA
taccttcctccaatctattagtacgagatatatctcggcttcagtccgcagccaggcaagccggtactgttaatg

SEQ ID NO: 674984 - DNA, 75 bp, synthetic construct
  source 1..75: mol_type = other DNA
tctggatatccagccggagttcccgccgtggcagagaatgatcctggggggaataacgatagccagctatcttct

SEQ ID NO: 674985 - DNA, 75 bp, synthetic construct
  source 1..75: mol_type = other DNA
ttggtttaagtctgggcgctgcttactctaactctgaccgtaccgacaatcaggttcacaaaggtactcataaca

SEQ ID NO: 674986 - DNA, 75 bp, synthetic construct
  source 1..75: mol_type = other DNA
tatctggaaattttccgggaaaaaataggaaaaaagcatctggcaaaggagctatgggaaaagatagacaacaga

SEQ ID NO: 674987 - DNA, 75 bp, synthetic construct
  source 1..75: mol_type = other DNA
aaaaaggctatgaggatgcgcaaaaagcattcgcagataacgcgaataaagaggcgctgcttcttgatgccagac

SEQ ID NO: 674988 - DNA, 75 bp, synthetic construct
  source 1..75: mol_type = other DNA
gatgcaggacctaaaggtgacaccggaccagccggtcccgcaggtgaaaaaggtgagccgggagaacgagggcct

SEQ ID NO: 674989 - DNA, 75 bp, synthetic construct
  source 1..75: mol_type = other DNA
cgttagatcgtctggaggcacttactggttatctttacgagatacagtactctgccgacggttggcaaacgtcgg

SEQ ID NO: 674990 - DNA, 75 bp, synthetic construct
  source 1..75: mol_type = other DNA
tataataaataaccgtcaatacggtgctccgttaacgcttacgtctgttatggtactttctgattgttattcatg

SEQ ID NO: 674991 - DNA, 75 bp, synthetic construct
  source 1..75: mol_type = other DNA
gaaacaattgaaatactgagaaatcttcctgataaatttagtagaacatctatgtcaaaaaacactatagacgcg

SEQ ID NO: 674992 - DNA, 75 bp, synthetic construct
  source 1..75: mol_type = other DNA
cagcttgcggcgcactccggcctgagcgacaccgaccgcaataccccctacgcgctgtggcttgcctccgttgcc

SEQ ID NO: 674993 - DNA, 75 bp, synthetic construct
  source 1..75: mol_type = other DNA
aaactcaccattcctgcaccttattccataaccaatatgcgtgaatatcttctgggcgacagagcagggttttaa

SEQ ID NO: 674994 - DNA, 75 bp, synthetic construct
  source 1..75: mol_type = other DNA
ctgtgggattatttgcacaggatgcgttaaaggctcaaccagagttagttacatctgatacagatatcatatctg

SEQ ID NO: 674995 - DNA, 75 bp, synthetic construct
  source 1..75: mol_type = other DNA
gtgaacatcaacccggatggtggaaaggtattaacagcagatgaagttgcaccatcgccaataaaggaaaatgag

SEQ ID NO: 674996 - DNA, 75 bp, synthetic construct
  source 1..75: mol_type = other DNA
cagaaggcagaagaggttgctgcaggtggtggcgttcccggcccgaagggagacaagggcgatacgggtccggca

SEQ ID NO: 674997 - DNA, 75 bp, synthetic construct
  source 1..75: mol_type = other DNA
cctcagttccgggctcatggatggtgtgtaatgaaattacgtcgacaaatgacaatgaaggcatcgggctgttcc

SEQ ID NO: 674998 - DNA, 75 bp, synthetic construct
  source 1..75: mol_type = other DNA
cagggaccaaagggggatactggtccgagaggtgagccggggccggcaggagcaaagggagagcgcggtgagacc

SEQ ID NO: 674999 - DNA, 75 bp, synthetic construct
  source 1..75: mol_type = other DNA
aaaacttgggatacgtaatgatgttacattctggctggatttatcgttgtcaccttatgtgaagattaaattcga

SEQ ID NO: 675000 - DNA, 75 bp, synthetic construct
  source 1..75: mol_type = other DNA
agaactggaaacgctggagagagtggctgagcggatcgataacatctctgtatttggcggtctggatcaggttct

SEQ ID NO: 675001 - DNA, 75 bp, synthetic construct
  source 1..75: mol_type = other DNA
cccgggaaagggggaacgttgggggtctattaaatctttagagaagcttttaagttcaaaatatgataacgactt

SEQ ID NO: 675002 - DNA, 75 bp, synthetic construct
  source 1..75: mol_type = other DNA
ttcttgcagagcctgctgatactaaagctcctgagaaatacctccctattgcattagattatataaataaatcaa

SEQ ID NO: 675003 - DNA, 75 bp, synthetic construct
  source 1..75: mol_type = other DNA
ttgaattcctagctaaatgtagcgaccgtgatcttgatgatttagttaacctattgatttatgataacgatggca

SEQ ID NO: 675004 - DNA, 75 bp, synthetic construct
  source 1..75: mol_type = other DNA
acaggtgaaatcgcgcatgttgccatttggtatggagattgcctcattaggggtgaaagatatcgtcctgcctgg

SEQ ID NO: 675005 - DNA, 75 bp, synthetic construct
  source 1..75: mol_type = other DNA
gccgctttcagcctgattgggtggaaagatattgcgtggtggccgacttgtcggagactgaagccggggcgttgt

SEQ ID NO: 675006 - DNA, 75 bp, synthetic construct
  source 1..75: mol_type = other DNA
caataaagaatcatctgaaataaagtttctgacctttttaaaagaagaacttgatgacattccaaatttgcatgc

SEQ ID NO: 675007 - DNA, 75 bp, synthetic construct
  source 1..75: mol_type = other DNA
ttattgtatttttatctgtctctgatttgatgagccctgcagatcaagaaatacataaccgatgtctaagattta

SEQ ID NO: 675008 - DNA, 75 bp, synthetic construct
  source 1..75: mol_type = other DNA
gattctattcattagaggaatcactgaaaattctaatatcagaaatgtgtgagcatgatgcttatttatctgcat

SEQ ID NO: 675009 - DNA, 75 bp, synthetic construct
  source 1..75: mol_type = other DNA
ccgatgctcatctacctggttctcaaattgaagaggcattttcattaattgatattgatcgcaattccccatttg

SEQ ID NO: 675010 - DNA, 75 bp, synthetic construct
  source 1..75: mol_type = other DNA
atgtaagaagtaatatagaagggcataatatcactgctcatatatgggtgtatccgtcactgacagaggttgaat

SEQ ID NO: 675011 - DNA, 75 bp, synthetic construct
  source 1..75: mol_type = other DNA
acataaaaactaatataatagagcatgatgttatagttcatatatggatatatacgcctctgacaaaagttgaat

SEQ ID NO: 675012 - DNA, 75 bp, synthetic construct
  source 1..75: mol_type = other DNA
ggcagcctgagttcacagataaaacactctccaggaaacccggggcggttcaggtgaccaaataccgaattacct

SEQ ID NO: 675013 - DNA, 75 bp, synthetic construct
  source 1..75: mol_type = other DNA
tccagtgatccgacgctgatcccggacagcactggcgataaagcgaccattccggcagataatgtgaaggataac

SEQ ID NO: 675014 - DNA, 75 bp, synthetic construct
  source 1..75: mol_type = other DNA
tgaaattttaggcggatacggcagtgataatattacggtaactaaaaatctgaccggtaatatttctgtcggtga

SEQ ID NO: 675015 - DNA, 75 bp, synthetic construct
  source 1..75: mol_type = other DNA
cttcgttatgacgccagcagcgtcagcatgggaattgtcgggcgaagcaaaacagccgatctggttgactgctct

SEQ ID NO: 675016 - DNA, 75 bp, synthetic construct
  source 1..75: mol_type = other DNA
cagatgaccatcgggatgtttgtagcctttggcgctttccgggaacagttctctgctcgtgtcacctctctgacc

SEQ ID NO: 675017 - DNA, 75 bp, synthetic construct
  source 1..75: mol_type = other DNA
tgctggcctgatgttctttatattgctcagggccgcggtgagtatgctgcgtgcatggtcctcactggttatgag

SEQ ID NO: 675018 - DNA, 75 bp, synthetic construct
  source 1..75: mol_type = other DNA
cagatgacaataggaatgtttgtggcatttggttcttttcgtgggcagttttcggatcgggttgcttcgctgacc

SEQ ID NO: 675019 - DNA, 75 bp, synthetic construct
  source 1..75: mol_type = other DNA
acactgctggcctgggatcttctgtgccttggacgtccggtcatcggagaaaccttcagccacggaacactcgct

SEQ ID NO: 675020 - DNA, 75 bp, synthetic construct
  source 1..75: mol_type = other DNA
ctgaccgggttaacgaactggcagttgccatgacgaacacactatatcggtaccagacggtggtgagggctgata

SEQ ID NO: 675021 - DNA, 75 bp, synthetic construct
  source 1..75: mol_type = other DNA
gttcagtttctttttttccagccacaccatcacctttacgaaggcggagagtaatagcaaattagtgcagattga

SEQ ID NO: 675022 - DNA, 75 bp, synthetic construct
  source 1..75: mol_type = other DNA
gctttgccactccagcagagcggaaaaaacctgctcagaatagtcagtgaactggctgcgccatttggcatcacc

SEQ ID NO: 675023 - DNA, 75 bp, synthetic construct
  source 1..75: mol_type = other DNA
tgcttatcggggatgagcccgtgctcaccggatatgtggaggcactaccgcttcgttatgacgccagcagcgtca

SEQ ID NO: 675024 - DNA, 75 bp, synthetic construct
  source 1..75: mol_type = other DNA
gcggcaaatgagccaccaggagcgtaacagcgtgcgggcagcctatgtgcataaagcggagcatctggaggccag

SEQ ID NO: 675025 - DNA, 75 bp, synthetic construct
  source 1..75: mol_type = other DNA
ttgctcaaaatattcagtctgtcagtagtgattgaatccatcagtctggtgatgcccgtaggtacacaactggtc

SEQ ID NO: 675026 - DNA, 75 bp, synthetic construct
  source 1..75: mol_type = other DNA
tcccacattttatgtggtgataatatttgcttttgtcattggttttacctctgctggaggtgttgtgcaaattgg

SEQ ID NO: 675027 - DNA, 75 bp, synthetic construct
  source 1..75: mol_type = other DNA
gcatttgcgccgtataacaatccacaggtggctgtcgccatgattctggaaaacggcggtgcgggcccggcagtc

SEQ ID NO: 675028 - DNA, 75 bp, synthetic construct
  source 1..75: mol_type = other DNA
ggtatgcggtgtgcgtggattttcccgatgagcggcagattaagcgctggagcgatgagcgcaaagccgctgcgc

SEQ ID NO: 675029 - DNA, 75 bp, synthetic construct
  source 1..75: mol_type = other DNA
gatgcgtgttgctgtaaatatgttatgttcccggcatggatatggacaggctgtagcagaaaaatgcggttattc

SEQ ID NO: 675030 - DNA, 75 bp, synthetic construct
  source 1..75: mol_type = other DNA
tgggcggcgaaagaagcgttagttaaagcgattggttgtggttttcgtgatggcgtacgtttccaggatattgaa

SEQ ID NO: 675031 - DNA, 75 bp, synthetic construct
  source 1..75: mol_type = other DNA
gactacgaagcggatggtaatggcatcgtactgttaccggagcgcgtgatattcaacaaagagaatatcggcaaa

SEQ ID NO: 675032 - DNA, 75 bp, synthetic construct
  source 1..75: mol_type = other DNA
aggtggtggataacagtgatgcagacggcggtgcatgggccatgacagggtacagtcatggtggatatgacgact

SEQ ID NO: 675033 - DNA, 75 bp, synthetic construct
  source 1..75: mol_type = other DNA
tcctttaatggttttatatggtctggaaatggtaagccctcattatctctatttgacagccttcctggtgacagt

SEQ ID NO: 675034 - DNA, 75 bp, synthetic construct
  source 1..75: mol_type = other DNA
tcagccaactgaacatgacggttaaagcaggagaaagcgtggcgataaccggtccgtccggggccggaaaaacca

SEQ ID NO: 675035 - DNA, 75 bp, synthetic construct
  source 1..75: mol_type = other DNA
gttatcatcctggcgagcgtttcccggaaggcaaatatccgaaccgttctactcatgacaccggtcttggacaat

SEQ ID NO: 675036 - DNA, 75 bp, synthetic construct
  source 1..75: mol_type = other DNA
acatgatattaacggagtgcatgattcaacggcatcggttaacgcttgtatatcaaaatttggtggtgttagagc

SEQ ID NO: 675037 - DNA, 75 bp, synthetic construct
  source 1..75: mol_type = other DNA
ggcgatatgattcacaatgcaggtactcctgcatcaggaacaaactgggcatggtatggtcttggaaacaataca

SEQ ID NO: 675038 - DNA, 75 bp, synthetic construct
  source 1..75: mol_type = other DNA
attccgggtctgaaaactctgttgcgttaggaaacggagcaatagtaggtaacgatgctacagatagtattgcaa

SEQ ID NO: 675039 - DNA, 75 bp, synthetic construct
  source 1..75: mol_type = other DNA
ccggcagtgaatacctggtgggacgtcatctggccggtggtgttgtggggctgagggggcaactgttcagtacgg

SEQ ID NO: 675040 - DNA, 75 bp, synthetic construct
  source 1..75: mol_type = other DNA
ggcggtcagcaccacgcagggcgggctgacgcgcagcatggaatacgatgctgccggacgtgtcatcagtctgac

SEQ ID NO: 675041 - DNA, 75 bp, synthetic construct
  source 1..75: mol_type = other DNA
atgagcacagaaacaattgaaatattcaataatagtgatgaatgggcaaatcaactaaaacacctattatcgaaa

SEQ ID NO: 675042 - DNA, 75 bp, synthetic construct
  source 1..75: mol_type = other DNA
attacgtagaagagcgcatatctctcgacaagcgcatcatagccaggccagctgccacgtactttatgcgagcgg

SEQ ID NO: 675043 - DNA, 75 bp, synthetic construct
  source 1..75: mol_type = other DNA
tgctgattcagtttctataggtactgataatatagtatcaggctctcgttcgggggcatttggccataataactt

SEQ ID NO: 675044 - DNA, 75 bp, synthetic construct
  source 1..75: mol_type = other DNA
tgcatcgggcatgctataaaatcgataacgtggaaaaaatcaaaaaaacagtcgtgaaaatcgacatgagtttat

SEQ ID NO: 675045 - DNA, 75 bp, synthetic construct
  source 1..75: mol_type = other DNA
ttaacaatcctcatgtggcgatgaatattcacatgccgggctggcttcgtcgcggtgatgaagtactcgacattg

SEQ ID NO: 675046 - DNA, 75 bp, synthetic construct
  source 1..75: mol_type = other DNA
acccacgtcatcggctatgtgtcgaaaatcaacgataaagacgtcgaacgcctgaataatgacggcaaactggcc

SEQ ID NO: 675047 - DNA, 75 bp, synthetic construct
  source 1..75: mol_type = other DNA
aactggatatcattaataccgcctttaaagttatcgaaaccatacatcccaaactggcctgtagccggtgtgagg

SEQ ID NO: 675048 - DNA, 75 bp, synthetic construct
  source 1..75: mol_type = other DNA
tcacctttttgctatgcatttacggttgcaacacaatgaaagagataatcttgtccatgaactgatgtccggatt

SEQ ID NO: 675049 - DNA, 75 bp, synthetic construct
  source 1..75: mol_type = other DNA
tctgaagcagcggacagaaaaagccgccaggacggcaggaagaatgccagccggtcagcagactcaccggctggt

SEQ ID NO: 675050 - DNA, 75 bp, synthetic construct
  source 1..75: mol_type = other DNA
tcaataatagtgatgaatgggcaaatcaactaaaacacgcattatcgaaaggagaaaatctggcattactacatg

SEQ ID NO: 675051 - DNA, 75 bp, synthetic construct
  source 1..75: mol_type = other DNA
tggtcgggagacatcacttacgtacatgcagatgaaggctggctatatctggctgtggtcattgacctgtggtca

SEQ ID NO: 675052 - DNA, 75 bp, synthetic construct
  source 1..75: mol_type = other DNA
acagataacgatatcaaactacaaaccgccgctcgtgacagctaccgctttaaactgatggcaaccttaactgac

SEQ ID NO: 675053 - DNA, 75 bp, synthetic construct
  source 1..75: mol_type = other DNA
tatgccgctgcggttaataaccttattccattagcgggaattaaacagggcttatacaacgacttacccgacttg

SEQ ID NO: 675054 - DNA, 75 bp, synthetic construct
  source 1..75: mol_type = other DNA
gttcaatacaagtgattatgagattgttcccgcaaatgaaatttgtcattacttcattgccgacatacaggggca

SEQ ID NO: 675055 - DNA, 75 bp, synthetic construct
  source 1..75: mol_type = other DNA
aagtggctgtcgccatgattctggagaacggtggtgcgggtccggcggttggtacactgatgcgccagatcctcg

SEQ ID NO: 675056 - DNA, 75 bp, synthetic construct
  source 1..75: mol_type = other DNA
ataccagtggagcaagttttagtgctgccaaattagctgaccgtttacaaaatacaactttccagacaaagacta

SEQ ID NO: 675057 - DNA, 75 bp, synthetic construct
  source 1..75: mol_type = other DNA
gctacaattgctgcaccgctgccacaatgggcgaacgccccagcggtaacgccagttgcccaattatctttacag

SEQ ID NO: 675058 - DNA, 75 bp, synthetic construct
  source 1..75: mol_type = other DNA
atgacgggaaaagaagcaattattcattacctggggacgcacaagagcttctgtgcgccggacgttgctgcgaca

SEQ ID NO: 675059 - DNA, 75 bp, synthetic construct
  source 1..75: mol_type = other DNA
ttcggtctgaaagcgaacgaaacctataatgcgcacaaaattgccgagcgtttacgtgaccacaaactgatgacc

SEQ ID NO: 675060 - DNA, 75 bp, synthetic construct
  source 1..75: mol_type = other DNA
gtgctggcggcagaaaacttacgccagtcagcacagtacggcgtggaaaaaacgaaagcgcaatactggccaacg

SEQ ID NO: 675061 - DNA, 75 bp, synthetic construct
  source 1..75: mol_type = other DNA
tgagcaggcgaaattagatgttatgcaacgggcgtcggtggcgtatgccaactggactggggcacggggtcgtga

SEQ ID NO: 675062 - DNA, 75 bp, synthetic construct
  source 1..75: mol_type = other DNA
ggcgcagataggtattggcgaagcgcaaattgatgaagccaaaagtgcctggtatccgcacgttggattaaccgg

SEQ ID NO: 675063 - DNA, 75 bp, synthetic construct
  source 1..75: mol_type = other DNA
aatggtcgcatcattcctggtcgtgatattggtggcggtaacgttagcataaacgcgcctataaccgtttaccca

SEQ ID NO: 675064 - DNA, 75 bp, synthetic construct
  source 1..75: mol_type = other DNA
taccaaactgagtcgaaaacaagtacaaaagcagtatgctctgcatatcatccctagactaatcgcacttgacat

SEQ ID NO: 675065 - DNA, 75 bp, synthetic construct
  source 1..75: mol_type = other DNA
tacaaaacctcgaaattttaatacaataccttcgctgtccgggagaggagttaagaaatataattatttcaattg

SEQ ID NO: 675066 - DNA, 75 bp, synthetic construct
  source 1..75: mol_type = other DNA
tatatcagcaatgttatgcagactactgtatgagccagaaccccatgattttatccatcatgataccatgattaa

SEQ ID NO: 675067 - DNA, 75 bp, synthetic construct
  source 1..75: mol_type = other DNA
tctgaccgtgcctttgtggtggtattcgaccatgacgatcgttccggtacaaaagatggactctatatttttgac

SEQ ID NO: 675068 - DNA, 75 bp, synthetic construct
  source 1..75: mol_type = other DNA
gcagaatctggcggtggactccgcttctgaccgtgcctttgtggtggtattcgaccatgacgatcgttccggtac

SEQ ID NO: 675069 - DNA, 75 bp, synthetic construct
  source 1..75: mol_type = other DNA
ttaaaaaccgcacattattcactgaccgtactccttaaccttgaacgtctattctctgttgttaatataatctcg

SEQ ID NO: 675070 - DNA, 75 bp, synthetic construct
  source 1..75: mol_type = other DNA
ttgactttttccaagtcgacagatagaggcctttatcgatatataaaaagaatagcttcatcagtactcgataac

SEQ ID NO: 675071 - DNA, 75 bp, synthetic construct
  source 1..75: mol_type = other DNA
ctcttctgatatctgctctgactccggcagtgtcacaggccttcggtaaccgtgatacctgggccagcggctggg

SEQ ID NO: 675072 - DNA, 75 bp, synthetic construct
  source 1..75: mol_type = other DNA
attacgtgggtaggatcacttcgcgaagcgcctgaaatgaagtatgtctttattgaaaaacatcaggcggatttc

SEQ ID NO: 675073 - DNA, 75 bp, synthetic construct
  source 1..75: mol_type = other DNA
gataatataaaaaaagcccattactccctgaccgtactccttaatgtcgaacgaaaactccctgtcattaacatc

SEQ ID NO: 675074 - DNA, 75 bp, synthetic construct
  source 1..75: mol_type = other DNA
tccccagattaatcgcacttgacatatataaaacgtacaaagacgaaaacaaaaactgtttttatcaccatatac

SEQ ID NO: 675075 - DNA, 75 bp, synthetic construct
  source 1..75: mol_type = other DNA
caggatttagctttcattctgaaaaataaaaaagttctgacccgaagtgaactgaatgatagccttatcggcata

SEQ ID NO: 675076 - DNA, 75 bp, synthetic construct
  source 1..75: mol_type = other DNA
gttgagcacacatcctatgactcactctgatactcgtgaatattatttgaaatttttctcaagtcaagcatgtat

SEQ ID NO: 675077 - DNA, 75 bp, synthetic construct
  source 1..75: mol_type = other DNA
gtgacctgggaactgtagccagagaactggacgaactggggatctccggtaactcattaaccgaggtgctcaata

SEQ ID NO: 675078 - DNA, 75 bp, synthetic construct
  source 1..75: mol_type = other DNA
caaatgctgttggacctgggggctactaaagagcagttgcaccaggaagagatcgcgcatgaacagcagattctt

SEQ ID NO: 675079 - DNA, 75 bp, synthetic construct
  source 1..75: mol_type = other DNA
gacggtggtgatacacctgttccaccagatgacggtggtgatacacctgttcctccagatgacggtggcgataca

SEQ ID NO: 675080 - DNA, 75 bp, synthetic construct
  source 1..75: mol_type = other DNA
agcaatagccactggcgaaatgatggttaaacagttgcaagttaagcaggagcaactaaaaggcaacgcaaacgc

SEQ ID NO: 675081 - DNA, 75 bp, synthetic construct
  source 1..75: mol_type = other DNA
gagcttggtcgtgttgagttagaaaaatacattgatgcgctactccgctacagcaacgaggtgctaacagcagaa

SEQ ID NO: 675082 - DNA, 75 bp, synthetic construct
  source 1..75: mol_type = other DNA
actatgaggtggacgcccgcacgggtaagctactgatggcacaagaagaagcgaatcaggcttttgatgccattg

SEQ ID NO: 675083 - DNA, 75 bp, synthetic construct
  source 1..75: mol_type = other DNA
ctttatatgatgttagtgtaaagcttgacgataataatattcttaatgtgtcatattacgataactatgcaataa

SEQ ID NO: 675084 - DNA, 75 bp, synthetic construct
  source 1..75: mol_type = other DNA
gtattgatacaagcctgctgtcatctttaagtggggcatcatttggtcgggattttatcgtccctgtagagcaag

SEQ ID NO: 675085 - DNA, 75 bp, synthetic construct
  source 1..75: mol_type = other DNA
tctgatactcgtgaatattatttgaaatttttctcaagtcaagcatgtattaactattttaaatatattttgaac

SEQ ID NO: 675086 - DNA, 75 bp, synthetic construct
  source 1..75: mol_type = other DNA
tagttttattggcattgcagggatgttcatcatttgatgataagttttcaattgagaaaagtctgtcgccagaag

SEQ ID NO: 675087 - DNA, 75 bp, synthetic construct
  source 1..75: mol_type = other DNA
cgtggtgcgatgatcttcggtggtgaatataatcgcgaaaatagtgataacactatcgcgatgattgtgggtatt

SEQ ID NO: 675088 - DNA, 75 bp, synthetic construct
  source 1..75: mol_type = other DNA
atataaggaagataacagtcgacagtttgtactaacctataagatttttactattgataagaagaaagttcgtaa

SEQ ID NO: 675089 - DNA, 75 bp, synthetic construct
  source 1..75: mol_type = other DNA
gtggtcgggttggctatgacatgcaaaacagtagccacagcaccacacaccgcatgtcgtggaacgatacgctgg

SEQ ID NO: 675090 - DNA, 75 bp, synthetic construct
  source 1..75: mol_type = other DNA
tgccatgggaactacgcggctacgccccacaaattagcggtattgcacagaccaatgccacggtgacgatcagtc

SEQ ID NO: 675091 - DNA, 75 bp, synthetic construct
  source 1..75: mol_type = other DNA
attacaacctgtttgccagcaactaccgtccacaaggcagtagcagcaacaccaacctgaacgcttatggtactg

SEQ ID NO: 675092 - DNA, 75 bp, synthetic construct
  source 1..75: mol_type = other DNA
ggtgaaacggatttcagttccaatattttcgacggcttttcttataccggcgcggcactggcaagtgacgatcgg

SEQ ID NO: 675093 - DNA, 75 bp, synthetic construct
  source 1..75: mol_type = other DNA
attctgccgcaataggtattgggcaaaatatgctgtggcttggtgcgctgtcgtttgatgtcacgtgggccagta

SEQ ID NO: 675094 - DNA, 75 bp, synthetic construct
  source 1..75: mol_type = other DNA
atcagtaatgggcaaaaaatcaactggcaaaaaaagggtgacaaaaccattccatgcatcaatgattcactggtc

SEQ ID NO: 675095 - DNA, 75 bp, synthetic construct
  source 1..75: mol_type = other DNA
cctcccgcacaggatatccacacaggcaacgtatctgccgtgtcacgccgcttgcattctctttgtggctggcgt

SEQ ID NO: 675096 - DNA, 75 bp, synthetic construct
  source 1..75: mol_type = other DNA
tgctgccgtcagcagtgatacaaatagctgacctgataggcttcccggcgaccgagcagcttctttctgcttttg

SEQ ID NO: 675097 - DNA, 75 bp, synthetic construct
  source 1..75: mol_type = other DNA
taatgaagagaacccgtattacctgcaccagccataccgtctgccggggcagcagcatgatgaggaatcagggct

SEQ ID NO: 675098 - DNA, 75 bp, synthetic construct
  source 1..75: mol_type = other DNA
ttcagtagcattgaaagaattctatgaaagagtaaaaaaaatatccgagttagatatttcatcgaaacctattat

SEQ ID NO: 675099 - DNA, 75 bp, synthetic construct
  source 1..75: mol_type = other DNA
agaaaatggcaggtcagatgggtaacgaacgtgtaaccgttcagagccttgacgtagtacgcgttgacgctgagc

SEQ ID NO: 675100 - DNA, 75 bp, synthetic construct
  source 1..75: mol_type = other DNA
aaatcaacccttaaaactgaaaaaatcactcgcggattattttcaaacgatgaaatggtgatgctgccaacttac

SEQ ID NO: 675101 - DNA, 75 bp, synthetic construct
  source 1..75: mol_type = other DNA
aaaggaaaaaggtgtcattgttcccggtgaatattttgttagcattgcagcaaataataaccaaatcagtaatgg

SEQ ID NO: 675102 - DNA, 75 bp, synthetic construct
  source 1..75: mol_type = other DNA
ttcatttgagtcattacgtatggtgtccatatatgagtcttttatttatgcggttaaggtaggtggatctatagg

SEQ ID NO: 675103 - DNA, 75 bp, synthetic construct
  source 1..75: mol_type = other DNA
gcggacgcaacgttatcattatgacctgaccggaaaactcacgcagagtgaagatgaggggcttgtcaccctctg

SEQ ID NO: 675104 - DNA, 75 bp, synthetic construct
  source 1..75: mol_type = other DNA
gacatcaccacaccggacgggcgggagacgaaattttactataacgacgggaaccagctgacggcggtggtgtcc

SEQ ID NO: 675105 - DNA, 75 bp, synthetic construct
  source 1..75: mol_type = other DNA
aacatgaccaacccgttttacggcattgcggggttacgcggcgtggcggaagaaaagctcaaggatcctgctcgt

SEQ ID NO: 675106 - DNA, 75 bp, synthetic construct
  source 1..75: mol_type = other DNA
tggctgccgggcaatcgcccttcccggctaaagcgccgtggtatccgtttgtcgccggtcagcttaccgaactcc

SEQ ID NO: 675107 - DNA, 75 bp, synthetic construct
  source 1..75: mol_type = other DNA
ttgacgcacgttctaccgcctgcgcccgtggtgcaaccttactcgaaggtctgtacagcccgctacgtattctgg

SEQ ID NO: 675108 - DNA, 75 bp, synthetic construct
  source 1..75: mol_type = other DNA
cgcacctatctttttcgtccattaccgcaattaggctctaaattaaccctcggcgaaaccgatttcagttccaat

SEQ ID NO: 675109 - DNA, 75 bp, synthetic construct
  source 1..75: mol_type = other DNA
cagctacgccaactatctggatcacaaatacaacgacagcgatgcgcaggacgaaaaacagacgatcagcttatc

SEQ ID NO: 675110 - DNA, 75 bp, synthetic construct
  source 1..75: mol_type = other DNA
cacgatttcgctcgccgcttatcgtttctccgatcgtcattttcacagctacgccaactatctggatcacaaata

SEQ ID NO: 675111 - DNA, 75 bp, synthetic construct
  source 1..75: mol_type = other DNA
acggctacgacgataagggccgcctgacgggcgaacgccagacggtggagaacccggagacgggggaactgctgt

SEQ ID NO: 675112 - DNA, 75 bp, synthetic construct
  source 1..75: mol_type = other DNA
tcatccgtatcgagacagagaacggcgaacgggagaaaatgcagcgccgcagcctggcggagaagttacagtcgg

SEQ ID NO: 675113 - DNA, 75 bp, synthetic construct
  source 1..75: mol_type = other DNA
tgaatacggcagactgacggagaagacggaccgcatcccggcgggtgtgatacggacggacgacgagcggaccca

SEQ ID NO: 675114 - DNA, 75 bp, synthetic construct
  source 1..75: mol_type = other DNA
gcaactggccagacaggtggagccggaatacacaccggcgcgaaaagttcatttttaccactgcgaccaccgggg

SEQ ID NO: 675115 - DNA, 75 bp, synthetic construct
  source 1..75: mol_type = other DNA
actttatttttaattgcggcgattgttattcgaccctttgccgggcaatgggtgggtaaatattcgaataaaact

SEQ ID NO: 675116 - DNA, 75 bp, synthetic construct
  source 1..75: mol_type = other DNA
gatacagtaaaattgatgaaaattaaagcaagaagaatagtttctgagcaggtaaagcaagaagaaaaaatggct

SEQ ID NO: 675117 - DNA, 75 bp, synthetic construct
  source 1..75: mol_type = other DNA
cattgggcaaggggtgacgaatgcgattaacggcattatgaacgtcaatcaggctgtggaatatatcaatgcacg

SEQ ID NO: 675118 - DNA, 75 bp, synthetic construct
  source 1..75: mol_type = other DNA
acgcggtcatcgaccaggccccgttgccgcaggttgcacgttgcgcgctccggacagtcacacacaccgtggccc

SEQ ID NO: 675119 - DNA, 75 bp, synthetic construct
  source 1..75: mol_type = other DNA
ccggaaacggcgccggattacctccggcaggtgctcaataaacagacgccatatacctatctgatggatattgcc

SEQ ID NO: 675120 - DNA, 75 bp, synthetic construct
  source 1..75: mol_type = other DNA
ttattcgcccctttgccgggcaatgggtgggtaaatattcgaataaaactattctggggctctcttctctggcct

SEQ ID NO: 675121 - DNA, 75 bp, synthetic construct
  source 1..75: mol_type = other DNA
tacaagaactaattctccaaacaaccgatttgatctatacaaaaagagatgattatcccttaagtgatgaaaggg

SEQ ID NO: 675122 - DNA, 75 bp, synthetic construct
  source 1..75: mol_type = other DNA
atgcagttagtttgtaccatcgataataaatatatagataaatttatggctatcctgctttcaggaattttacat

SEQ ID NO: 675123 - DNA, 75 bp, synthetic construct
  source 1..75: mol_type = other DNA
tagatgaatctgaactacttgtttttagaccttttatttccaggcttttgcacaaaaatagttgtgataaagagt

SEQ ID NO: 675124 - DNA, 75 bp, synthetic construct
  source 1..75: mol_type = other DNA
gtgaatgggactgcatgggcaattccctttgatgccagtatgcagcttctgttttatcgacgagatctgtttgaa

SEQ ID NO: 675125 - DNA, 75 bp, synthetic construct
  source 1..75: mol_type = other DNA
ccggacgttgtggccgtgatgcacgaatggcgcaatatgaaggaaagccagacttattcgtcctgcgagcagtgg

SEQ ID NO: 675126 - DNA, 75 bp, synthetic construct
  source 1..75: mol_type = other DNA
ttatgatagttatgttgagattttagctactggttttagctgtatacgatgccaggcaatagatggtgttaaata

SEQ ID NO: 675127 - DNA, 75 bp, synthetic construct
  source 1..75: mol_type = other DNA
atgattctaggtaatgattacgttgatttagctcctctgttctctgcgcatagcactagaaactatctgctttct

SEQ ID NO: 675128 - DNA, 75 bp, synthetic construct
  source 1..75: mol_type = other DNA
aacggaagagagcgttctggtattcagcattgagatgccgaaggagcaactgattctgcgcatgctttccatgct

SEQ ID NO: 675129 - DNA, 75 bp, synthetic construct
  source 1..75: mol_type = other DNA
cgccggagctggagaaccgcacacaggaaattgcggaaatttcccgttccctgaaagcgctggggaaggagctgg

SEQ ID NO: 675130 - DNA, 75 bp, synthetic construct
  source 1..75: mol_type = other DNA
ctggacgtactgggcggttttgcttatctggccgagctcagcaagaacacaccttctgcggccaacatcatggcc

SEQ ID NO: 675131 - DNA, 75 bp, synthetic construct
  source 1..75: mol_type = other DNA
gcgcgggcggcctgccgtacggcggcgagttgattctggcgctcgaccctcagcgtttcctgggagcagaggccg

SEQ ID NO: 675132 - DNA, 75 bp, synthetic construct
  source 1..75: mol_type = other DNA
ggctggtgggttacgcctgtacgccaagccacgcgtgggtggccccggcgggcggcacccagccgctgttcggca

SEQ ID NO: 675133 - DNA, 75 bp, synthetic construct
  source 1..75: mol_type = other DNA
atgtctgaactggcggtgaatggccagcctctggacctgattacactgtcagagcacctggaacatcagggcagg

SEQ ID NO: 675134 - DNA, 75 bp, synthetic construct
  source 1..75: mol_type = other DNA
ggcgcgactgaatattacagctatgcatttagcccagcacgtaacgacgctgtaaacgtagttactgagaatagc

SEQ ID NO: 675135 - DNA, 75 bp, synthetic construct
  source 1..75: mol_type = other DNA
cgctgatccttgcacagatgccagatgatgctgacatggtggcggttccggtattcagtaaaggcacaaatgctt

SEQ ID NO: 675136 - DNA, 75 bp, synthetic construct
  source 1..75: mol_type = other DNA
aagtttgctaaaggctctaacgtatatcagaacatctacggggctgcttccagcacctttgaactgattaatgcc

SEQ ID NO: 675137 - DNA, 75 bp, synthetic construct
  source 1..75: mol_type = other DNA
aaaaagatgtagaaatgctttttgatgatcttaaaagaaattatgagatcccttccagttcgagctctattaagt

SEQ ID NO: 675138 - DNA, 75 bp, synthetic construct
  source 1..75: mol_type = other DNA
aggtagtccaggacttctggctgagaacgcgtatcgtcccgcagccagtagtaattatcgatgcgcgtatcgcca

SEQ ID NO: 675139 - DNA, 75 bp, synthetic construct
  source 1..75: mol_type = other DNA
aaatgcgaacagaccaactttgacacggtgctgacctacgcgaagctggacctgtggatcaggcaacgccgcgca

SEQ ID NO: 675140 - DNA, 75 bp, synthetic construct
  source 1..75: mol_type = other DNA
catgaccgacaccatcagcgataagattgatgcactggagaatgccgtttcggggatggggattgtgcaggatat

SEQ ID NO: 675141 - DNA, 75 bp, synthetic construct
  source 1..75: mol_type = other DNA
ctgcgctggagcagaaaagcggctcagcaatgaatcagctgtttaacacgctttcagacggctggacggtgattt

SEQ ID NO: 675142 - DNA, 75 bp, synthetic construct
  source 1..75: mol_type = other DNA
aagcgtctggaatgcagtgcccgcactgatgcagatgctgtgcgaataccacagcggcgatcggatgagttatcc

SEQ ID NO: 675143 - DNA, 75 bp, synthetic construct
  source 1..75: mol_type = other DNA
cgctggcgattgtcagcaatcttggctttttacgcctatcgatcctctgctcggtaaatttatcgccgccggatt

SEQ ID NO: 675144 - DNA, 75 bp, synthetic construct
  source 1..75: mol_type = other DNA
gatcatacagtatttcaccagtgaaaataataggtataagtcacaaaaaattatattctctgcaattatttcatg

SEQ ID NO: 675145 - DNA, 75 bp, synthetic construct
  source 1..75: mol_type = other DNA
tgacagaagatttaaccacgcggagcgtgcatcttcccggtgcttttcaggtcatggttcgcaccaccgaaccgg

SEQ ID NO: 675146 - DNA, 75 bp, synthetic construct
  source 1..75: mol_type = other DNA
ctcatctaagacaggggtgctaggacgagttgctgcgtggctaggtagcacgaaactgatagtacatactgtcca

SEQ ID NO: 675147 - DNA, 75 bp, synthetic construct
  source 1..75: mol_type = other DNA
caaagttctggctgaatgtactgacggaactgaaaaatcgcggcctgaacgatatccttatcgcctgcgtggacg

SEQ ID NO: 675148 - DNA, 75 bp, synthetic construct
  source 1..75: mol_type = other DNA
actgcgtcaggcagcactgacgccacaggaaactgcgctgatcagtcctatccgtgaattgacctatcgccaact

SEQ ID NO: 675149 - DNA, 75 bp, synthetic construct
  source 1..75: mol_type = other DNA
ataaattgccgaaagaggaatttgaaaaaaccttatcatcatcttgtttcttattgctgccttccagagaagaag

SEQ ID NO: 675150 - DNA, 75 bp, synthetic construct
  source 1..75: mol_type = other DNA
aaatttgagttttatgtgaaaagtgaattatcttcggctaagtcaattttcgatgatataaaaaacaaatatata

SEQ ID NO: 675151 - DNA, 75 bp, synthetic construct
  source 1..75: mol_type = other DNA
tctgatgagtttccttctatgtgtccggcagatggaagagtccgtgggattacgcacaataaaatattgtgggat

SEQ ID NO: 675152 - DNA, 75 bp, synthetic construct
  source 1..75: mol_type = other DNA
ccaactttgactcccgctacgtgcgtgacgttcggctgggaactcagtcactgactggcggcttgtctcgtgatt

SEQ ID NO: 675153 - DNA, 75 bp, synthetic construct
  source 1..75: mol_type = other DNA
aaagaaggagtaacatattataatgtcaatagcaatgagtggtatctgttgcttgatacgtataccttcttgata

SEQ ID NO: 675154 - DNA, 75 bp, synthetic construct
  source 1..75: mol_type = other DNA
gttttgcaattaacagtagtaccggcatgtggattcatatgcgtgaccagaatgttattttgggacgcaatgcgg

SEQ ID NO: 675155 - DNA, 75 bp, synthetic construct
  source 1..75: mol_type = other DNA
cagctgcagcagctcatccgcctgccgggtcagcagtatgatgaggagtcaggcctgtattacaaccgccaccgc

SEQ ID NO: 675156 - DNA, 75 bp, synthetic construct
  source 1..75: mol_type = other DNA
gcaattttgactcacgctatgtgagagatgtccgacttggcacacgtgttgttcaattgatggcgcgtggtggtc

SEQ ID NO: 675157 - DNA, 75 bp, synthetic construct
  source 1..75: mol_type = other DNA
atgtttcaggggagacactttcagaccgttttgctattaacagcagtaatggtatgtggattcagatgcgcgata

SEQ ID NO: 675158 - DNA, 75 bp, synthetic construct
  source 1..75: mol_type = other DNA
tgcgcgctgacttaagccagtccgcactccttatcagtttgccgcaggcttatcttgaatacagcgatgtcgact

SEQ ID NO: 675159 - DNA, 75 bp, synthetic construct
  source 1..75: mol_type = other DNA
ttacccttgctgccaagcaacttcaaatcagtgaaggaacgctgcgcaatctgtactacaaagtgaaggacttca

SEQ ID NO: 675160 - DNA, 75 bp, synthetic construct
  source 1..75: mol_type = other DNA
gtattaaatccgtggtgtataacccggttgacgtggtgcgtattgattccgttgccggtgttgcaactcatatcg

SEQ ID NO: 675161 - DNA, 75 bp, synthetic construct
  source 1..75: mol_type = other DNA
aatattggttccaatggtacatggtatcaacaacgtttttatgatactactggtaatatatattctcgttatcaa

SEQ ID NO: 675162 - DNA, 75 bp, synthetic construct
  source 1..75: mol_type = other DNA
cgcaaggttggcgtgcagtgtctggtcaatgggttaacagtccacagggcggtgcaacttcaactaatgcttatg

SEQ ID NO: 675163 - DNA, 75 bp, synthetic construct
  source 1..75: mol_type = other DNA
ttgaaagaagaagtatcagtactaaatactaagttggaagatcaacagaaacaaattgatgaattaatagcagtt

SEQ ID NO: 675164 - DNA, 75 bp, synthetic construct
  source 1..75: mol_type = other DNA
tatcaaaaaaacacggaatggatattaaaacaatataagaaattatatactctgtttttacttatgattatagca

SEQ ID NO: 675165 - DNA, 75 bp, synthetic construct
  source 1..75: mol_type = other DNA
aagagacctggaaacgggatgtcgccttatagctactgggatatcctggaaaaaatatcaacaaaagaatatttg

SEQ ID NO: 675166 - DNA, 75 bp, synthetic construct
  source 1..75: mol_type = other DNA
tctgcatctgggattgaagcagacaaactaatcgagactctgattcatgaagaaatggaaaatatccagcctcaa

SEQ ID NO: 675167 - DNA, 75 bp, synthetic construct
  source 1..75: mol_type = other DNA
ctgccttgaaacatgagtttactttgtttaatacaggcgactattctaaagtagatgacgtcaccatagagtatt

SEQ ID NO: 675168 - DNA, 75 bp, synthetic construct
  source 1..75: mol_type = other DNA
gcgcccataaagcctgtcgccagtggttccacccggtacgcgacgggcaggtagtttgctcattcgagtgcgcca

SEQ ID NO: 675169 - DNA, 75 bp, synthetic construct
  source 1..75: mol_type = other DNA
aggggcgcaaaaagggctatcgattccagatggatttaaacgacggggataatgttgatatcagtatcagcctgc

SEQ ID NO: 675170 - DNA, 75 bp, synthetic construct
  source 1..75: mol_type = other DNA
atttctttccacggcctttgattcagaaagccttgatttcctggtgaatgatcttggaatcaaacgcttgaaatt

SEQ ID NO: 675171 - DNA, 75 bp, synthetic construct
  source 1..75: mol_type = other DNA
cacaaccgaatatagccatctctttttgtgagcaaaatctttccgggcagttagtagtgtggccaaaagtcgata

SEQ ID NO: 675172 - DNA, 75 bp, synthetic construct
  source 1..75: mol_type = other DNA
cccccccccccccacagtttgaaccagcagactccagtttgtatgcaatgcaaattcagcgctatcaacaggctg

SEQ ID NO: 675173 - DNA, 75 bp, synthetic construct
  source 1..75: mol_type = other DNA
aatgcctgggaaaaaccgctccaaatctggaatgcgaacgtcgccgcgcaccgccatgcgattactggcgagcgc

SEQ ID NO: 675174 - DNA, 75 bp, synthetic construct
  source 1..75: mol_type = other DNA
aagatacgttaacgctgaatggtcggacatttaatcgcccgaaactttttagtgaattaccaaatgcgggggatt

SEQ ID NO: 675175 - DNA, 75 bp, synthetic construct
  source 1..75: mol_type = other DNA
aacgataataaagggtactggactaataatccgacttccactactcagtggatgaatatgattacaggagcatta

SEQ ID NO: 675176 - DNA, 75 bp, synthetic construct
  source 1..75: mol_type = other DNA
tcggatatggtttcagttgttggtttcaaccatggaagtggcagtagaggtacttttaacgcattcaaagggaaa

SEQ ID NO: 675177 - DNA, 75 bp, synthetic construct
  source 1..75: mol_type = other DNA
agaaaatggcaggtcagctgggtaacgagcgtgtaaccgttcagagcctggacgtagtacgtgttgacgctgagc

SEQ ID NO: 675178 - DNA, 75 bp, synthetic construct
  source 1..75: mol_type = other DNA
gtgttcagccgcatggtcgttggtatgtatgtcggattcgaggggccttcctgggtcagtgccatggtggcattg

SEQ ID NO: 675179 - DNA, 75 bp, synthetic construct
  source 1..75: mol_type = other DNA
gggtgaacgcaggcgtggtagaagcccccatttcgggtgttttactgagctggcatgtcgaagaaagccagcagg

SEQ ID NO: 675180 - DNA, 75 bp, synthetic construct
  source 1..75: mol_type = other DNA
gatgacgcagacattaaacaaaaagcattagaattaaaagatgttgttgtcattgacagacctgatgaactttct

SEQ ID NO: 675181 - DNA, 75 bp, synthetic construct
  source 1..75: mol_type = other DNA
actccgggcaaagtattcaaaggcaagaaaatggcaggtcagctgggtaacgagcgtgtaaccgttcagagcctg

SEQ ID NO: 675182 - DNA, 75 bp, synthetic construct
  source 1..75: mol_type = other DNA
ggtgatcccactgcggggcgagaagcaggaagattatgccttcccagatctcagtgacctgatattcaaggagga

SEQ ID NO: 675183 - DNA, 75 bp, synthetic construct
  source 1..75: mol_type = other DNA
tagcgataccaacgcggcggcggaagctttggtagagagaggcaatcttctgaagcagatcgagtccatcgttgc

SEQ ID NO: 675184 - DNA, 75 bp, synthetic construct
  source 1..75: mol_type = other DNA
cagtttttgcctgaaaacggggaaagcgttatgcctgcccgccaccgatccgctaaccacttatccagtacacgt

SEQ ID NO: 675185 - DNA, 75 bp, synthetic construct
  source 1..75: mol_type = other DNA
tgccaaaacagatatcggcaaaacgaagttaaatctgcttgcccggctggatgaagtgacactggatctccttgc

SEQ ID NO: 675186 - DNA, 75 bp, synthetic construct
  source 1..75: mol_type = other DNA
tcattgaacatatgattgcctgtgcgctggctggtaaatacagtccggggctgaatgctgccagttatgaagttt

SEQ ID NO: 675187 - DNA, 75 bp, synthetic construct
  source 1..75: mol_type = other DNA
ttggcaagcccaggatgactcagcgtgaccgatggcataaacggccagcaacggcagcgtactgggcttacaaag

SEQ ID NO: 675188 - DNA, 75 bp, synthetic construct
  source 1..75: mol_type = other DNA
cctcgttgatagatgaaatccttaagatcaacattaaagggataagggttgtggaacattcggcctccattcatc

SEQ ID NO: 675189 - DNA, 75 bp, synthetic construct
  source 1..75: mol_type = other DNA
gatccgctcaccacttatccagtacacgttgaaggtggtgacatcttcatcgacttaccggaggcgcagccatga

SEQ ID NO: 675190 - DNA, 75 bp, synthetic construct
  source 1..75: mol_type = other DNA
tgcacgccaccgccatcggcaaggtgttgattgcctggctgggcgaggccgagctgaacgccctgctgtgtactg

SEQ ID NO: 675191 - DNA, 75 bp, synthetic construct
  source 1..75: mol_type = other DNA
cggacataagcgaatatttcattaatgacgtatttcagcccttgcgatacgagcgggatgttgaaagagccatca

SEQ ID NO: 675192 - DNA, 75 bp, synthetic construct
  source 1..75: mol_type = other DNA
tacgcgaacgctattcacctgcgccagtaccgaaatgccctatttgcggcgaggaaatgtcaattcagcgaatat

SEQ ID NO: 675193 - DNA, 75 bp, synthetic construct
  source 1..75: mol_type = other DNA
gaaaaaccagatggaggcggaatacatcccggagaggacacttcatctttaccactgcgaccaccgggggctgcc

SEQ ID NO: 675194 - DNA, 75 bp, synthetic construct
  source 1..75: mol_type = other DNA
gcaccctcagcatgtggccggataaccgtatcgcccgtgacgcgcactatctttaccggtatgaccgtcacggca

SEQ ID NO: 675195 - DNA, 75 bp, synthetic construct
  source 1..75: mol_type = other DNA
gtgggacttattggactgtgggtattcctgctttcatccatcattggttatccagccatgtacctgtttcaacga

SEQ ID NO: 675196 - DNA, 75 bp, synthetic construct
  source 1..75: mol_type = other DNA
gcattgagtaagaacaggaatgagtttaaacgcggtttatctggcgttagcgtagctttattgcgtgaggctatg

SEQ ID NO: 675197 - DNA, 75 bp, synthetic construct
  source 1..75: mol_type = other DNA
caaatcgaggcgatgaataaactggctgattactacatgaagcccatcgatttacaaaatgaaataacgtcctga

SEQ ID NO: 675198 - DNA, 75 bp, synthetic construct
  source 1..75: mol_type = other DNA
atgcttacggataccaggttaaggactattgccaacaagccatatgacggcccaagcgagatagctgatcgtgac

SEQ ID NO: 675199 - DNA, 75 bp, synthetic construct
  source 1..75: mol_type = other DNA
atggccaataagaagctgaatgccacaataaccattggcggagccgtttccggcagcctccgtggtgcgtttggt

SEQ ID NO: 675200 - DNA, 75 bp, synthetic construct
  source 1..75: mol_type = other DNA
tccggcatcctggtgtccatcttcgggcaggaacacgttggttctatctccaaactggcagccaacatggacaag

SEQ ID NO: 675201 - DNA, 75 bp, synthetic construct
  source 1..75: mol_type = other DNA
ctgctggcaaggcgtgggattggttcaccaaactggccgaaccggtgagctacagcggcgaagaactgaaaaagg

SEQ ID NO: 675202 - DNA, 75 bp, synthetic construct
  source 1..75: mol_type = other DNA
atatggcgtcgggaaagctgacttcagtgatactgccggacggcaggacggtacggtatggttacaacaaccagt

SEQ ID NO: 675203 - DNA, 75 bp, synthetic construct
  source 1..75: mol_type = other DNA
ccatgactcatctttggcaatgatagaaaatctggatgctattagttcagaaaccgttcctttaattttattatt

SEQ ID NO: 675204 - DNA, 75 bp, synthetic construct
  source 1..75: mol_type = other DNA
ggaagtggcgctggaaagccatcaactggttacggttgggcggctggtggcaaacggtttgggaggaagcgctgt

SEQ ID NO: 675205 - DNA, 75 bp, synthetic construct
  source 1..75: mol_type = other DNA
cgactggcaaatcggcaacgcgtgagttggcgggatttgctgacgctcgattttatcaccctccagcgaccgtca

SEQ ID NO: 675206 - DNA, 75 bp, synthetic construct
  source 1..75: mol_type = other DNA
ggctgatgctggggaaattatcacaagttttggtgagtttgttattggggacagccttattgttggttttgttat

SEQ ID NO: 675207 - DNA, 75 bp, synthetic construct
  source 1..75: mol_type = other DNA
gtttttttatgtctggcatttatacttgggatttacttttattttaaatttgagaagaaagatacagagaacacg

SEQ ID NO: 675208 - DNA, 75 bp, synthetic construct
  source 1..75: mol_type = other DNA
gagaattgagaaatgcaaaaaaaaatttcgttcttttggtatcagtagatatacgtaggtttgttaaaagactta

SEQ ID NO: 675209 - DNA, 75 bp, synthetic construct
  source 1..75: mol_type = other DNA
agatgtaagcgcgctcgagcagttgggcgacatcatgtttgaccccgacgataaagggcgggaccggctcaatga

SEQ ID NO: 675210 - DNA, 75 bp, synthetic construct
  source 1..75: mol_type = other DNA
gacagccagcaccgcctggtgttctacacgcggatacagcacggcgagccacaggtggagagccgctacctctat

SEQ ID NO: 675211 - DNA, 75 bp, synthetic construct
  source 1..75: mol_type = other DNA
gagacacagtatgatgcgtggggaaaggccgtcagcaccacgcagggcggactgacgcgcagcatggagtatgac

SEQ ID NO: 675212 - DNA, 75 bp, synthetic construct
  source 1..75: mol_type = other DNA
ccgtcatttgcggccaacgttttgcctccggtgctgaaaaccttccgcgattgttattcagggattaacgtcact

SEQ ID NO: 675213 - DNA, 75 bp, synthetic construct
  source 1..75: mol_type = other DNA
tctgaactttgcccatgccagtgaacggctgaatatgtcgcagcctgcgctaagtcttgccattaaaggactgga

SEQ ID NO: 675214 - DNA, 75 bp, synthetic construct
  source 1..75: mol_type = other DNA
gaagcttttcttcaggatgtcactgaaagagagaaagtccttgaaacagtggctgaagaggctggcggcaaactt

SEQ ID NO: 675215 - DNA, 75 bp, synthetic construct
  source 1..75: mol_type = other DNA
aaactcctcaatactgaagtatcatcatttatcaagaataatattcttgctgaattaaagttaagtaatgaaact

SEQ ID NO: 675216 - DNA, 75 bp, synthetic construct
  source 1..75: mol_type = other DNA
gcatttggttagcaaaaaaatgcctggatagtaaaagttttcagaaagaaataacaatcagttttgagaattcgc

SEQ ID NO: 675217 - DNA, 75 bp, synthetic construct
  source 1..75: mol_type = other DNA
caacgctgggtaacaataatgccagcgatgcgcaaccagtcaccttcgtggcggataaggacagcgcggttgtcg

SEQ ID NO: 675218 - DNA, 75 bp, synthetic construct
  source 1..75: mol_type = other DNA
gaatgataattacggcaatggtgtacccctgcatcaggtaaccctcagcgtttcgccgagtgaaggcgtgaccct

SEQ ID NO: 675219 - DNA, 75 bp, synthetic construct
  source 1..75: mol_type = other DNA
ccccggcagccttcagggaaaaatatcatcagatggctgtgcttaaaaaaagaacaaatggtagtgtccgctatt

SEQ ID NO: 675220 - DNA, 75 bp, synthetic construct
  source 1..75: mol_type = other DNA
gatcctgatactcagcaggtgacattttcgctgacgttgtttgttcgtctgggaggtgaaactaccgaacggacg

SEQ ID NO: 675221 - DNA, 75 bp, synthetic construct
  source 1..75: mol_type = other DNA
aagaaaggctgtattgacgccattatacctgcttataacgaaggcccgtgtctggcgcagtcactggataatctg

SEQ ID NO: 675222 - DNA, 75 bp, synthetic construct
  source 1..75: mol_type = other DNA
tgaataccgcagtcagcatcgacaacgtgaaaccaggagtcactacagactggaaagaaaccgcagatggcgtct

SEQ ID NO: 675223 - DNA, 75 bp, synthetic construct
  source 1..75: mol_type = other DNA
accgctggtggaatgcaaacagtagatataacgctggtggcaggcccggcagacgcctcgcagtccgtccttaag

SEQ ID NO: 675224 - DNA, 75 bp, synthetic construct
  source 1..75: mol_type = other DNA
cgctacaaaagccggggtttatcaagtgacggcaaccctcgaaaatggcgattcgatgcaacaaacagtgaccta

SEQ ID NO: 675225 - DNA, 75 bp, synthetic construct
  source 1..75: mol_type = other DNA
ctgtatattgaggtgaaggataattacggcaacggtgtcccccagcaggaggtaaccctcagcgtttcaccaagt

SEQ ID NO: 675226 - DNA, 75 bp, synthetic construct
  source 1..75: mol_type = other DNA
aaacatcgaaagcggaaatcattgggaatggcgtggatgagacgactctgacagcaacagtgaaagatccttttg

SEQ ID NO: 675227 - DNA, 75 bp, synthetic construct
  source 1..75: mol_type = other DNA
atagccaacactgaggtaacatttactctgccggaagatgtgagggcgaacttcacgctgagcgatggcggtaaa

SEQ ID NO: 675228 - DNA, 75 bp, synthetic construct
  source 1..75: mol_type = other DNA
ctggtggatgccgcctggtttgtccgtgccacactggaagcgcatggtacgagcgtcggaaatgagagtccctct

SEQ ID NO: 675229 - DNA, 75 bp, synthetic construct
  source 1..75: mol_type = other DNA
acggcagcagaaacgggacacagtacgatgcgtggggaaacggccgtccgtaccacgcagggcgggctgacccgt

SEQ ID NO: 675230 - DNA, 75 bp, synthetic construct
  source 1..75: mol_type = other DNA
tggtgattacggcattgctgaccagccagaatgatccacaacgtcaggtaaggatgaaagcgtctcctgagttgg

SEQ ID NO: 675231 - DNA, 75 bp, synthetic construct
  source 1..75: mol_type = other DNA
tacgggcgtggcatgtacgagcatcctgatctggcgcttcgcattcacaacgcagggttatcgacctgggcgttt

SEQ ID NO: 675232 - DNA, 75 bp, synthetic construct
  source 1..75: mol_type = other DNA
acacaggcctctgaacatacagaactcttcaaccaccccccctctccacccggaaggagtgacaagcagtaatga

SEQ ID NO: 675233 - DNA, 75 bp, synthetic construct
  source 1..75: mol_type = other DNA
attctgcctttggaccatggtcggcaaagaataagaaactccatcaattacgacaaaacattgagcacagacttg

SEQ ID NO: 675234 - DNA, 75 bp, synthetic construct
  source 1..75: mol_type = other DNA
agttacagatgcaaatacaataaactacgtaacagaaaccaacgcagatacaattgataaaaatcatgcgatcta

SEQ ID NO: 675235 - DNA, 75 bp, synthetic construct
  source 1..75: mol_type = other DNA
tgtcgacgcttatagatgaacataccttcggcgaagttaaagcgttcagaaagcaatatatgcaggcagatagcg

SEQ ID NO: 675236 - DNA, 75 bp, synthetic construct
  source 1..75: mol_type = other DNA
gtctgctcggctggaatagccaggcgctgaacaatcagtcaggtcttattcaggggaaaggcatcagcattaata

SEQ ID NO: 675237 - DNA, 75 bp, synthetic construct
  source 1..75: mol_type = other DNA
tgcttgtgggtactttatatctcggatatgtttttgatgtgcatcacattatgtcgattcttgaatacatccttg

SEQ ID NO: 675238 - DNA, 75 bp, synthetic construct
  source 1..75: mol_type = other DNA
gaaagattaacgatatgactgtcctgtacagggatgataagcatatcgcttacaccgggcagcgcggcgttatgc

SEQ ID NO: 675239 - DNA, 75 bp, synthetic construct
  source 1..75: mol_type = other DNA
cgtgtggtgtacagatggtaccgatgtcgaaatgcttcgcgcgccgtgggaagaaatgcagcccgggaatgttta

SEQ ID NO: 675240 - DNA, 75 bp, synthetic construct
  source 1..75: mol_type = other DNA
gatgaaatcaatctcaagatgcagaagacgcaagaacagttgcttgagcattttgatgaagatattcacgatatc

SEQ ID NO: 675241 - DNA, 75 bp, synthetic construct
  source 1..75: mol_type = other DNA
taatgataaatctaaagacaggtgggagaaatggttgtctgaatacccaccggaaaaaatataccaggtccggag

SEQ ID NO: 675242 - DNA, 75 bp, synthetic construct
  source 1..75: mol_type = other DNA
cagaaatcacgactgaaactgttcactcaggcaatcagtggcgcaccttacaccgcgctggctgttccactggcg

SEQ ID NO: 675243 - DNA, 75 bp, synthetic construct
  source 1..75: mol_type = other DNA
atcaaagggctgacgatgagcggctttggcccggtgacgcagatctatatcggcggcaaaaacaaacgggtcatg

SEQ ID NO: 675244 - DNA, 75 bp, synthetic construct
  source 1..75: mol_type = other DNA
atgaagaaaaatttactgataacttcagtgttggcaatggcaaccgtatcaggttctgttttggctgctgttaca

SEQ ID NO: 675245 - DNA, 75 bp, synthetic construct
  source 1..75: mol_type = other DNA
atgagttttttatcatttttacggaagataaataataaagaaaaaggggtttttatcagtgaggagcattggtta

SEQ ID NO: 675246 - DNA, 75 bp, synthetic construct
  source 1..75: mol_type = other DNA
agcgacagccaatgagcttatcaggctggaaaatgccgataagcgtagcgatgcgctggtatctaaattcaccaa

SEQ ID NO: 675247 - DNA, 75 bp, synthetic construct
  source 1..75: mol_type = other DNA
aagcgattgtcgggcggaattagtaaaaattttaccaatgctttcagatatagggacaaggctatttgctcgggg

SEQ ID NO: 675248 - DNA, 75 bp, synthetic construct
  source 1..75: mol_type = other DNA
cccaaagatgtcgctcatatagatgggggattctcattaactttcaaagaccctaaacaactggtgatttttaat

SEQ ID NO: 675249 - DNA, 75 bp, synthetic construct
  source 1..75: mol_type = other DNA
cattggaacgaagttaatgctcaggatgatgggataatcagacgcgaaacccaattcccggaagacgcatcccaa

SEQ ID NO: 675250 - DNA, 75 bp, synthetic construct
  source 1..75: mol_type = other DNA
aaatatctctcgataccgcaaaatttccgagtgaataatattcaactggataatacccaccttgcttataaattg

SEQ ID NO: 675251 - DNA, 75 bp, synthetic construct
  source 1..75: mol_type = other DNA
cacgctaattacgccatcttacgccagggatttcataaccagattatcggtgccaacatcaccaactgtaagttc

SEQ ID NO: 675252 - DNA, 75 bp, synthetic construct
  source 1..75: mol_type = other DNA
gctacaccccagacttcaacacccagcgttggagccgcgatctcccgctgctgccccaggatttcttcgccaatc

SEQ ID NO: 675253 - DNA, 75 bp, synthetic construct
  source 1..75: mol_type = other DNA
aggttctgttttggctgctgttacaaatggccaactcacatttaattggcagggagtggttccttccgctcccgt

SEQ ID NO: 675254 - DNA, 75 bp, synthetic construct
  source 1..75: mol_type = other DNA
agttatcagcaactggctaacgccatcggcaaaccgaaagcggtacgggccgttgccagcgcctgtgccgccaac

SEQ ID NO: 675255 - DNA, 75 bp, synthetic construct
  source 1..75: mol_type = other DNA
aacactctcgccctcagtgcgagttacctaaatcagtgataacagctccctcatcgccctctagctctgagccac

SEQ ID NO: 675256 - DNA, 75 bp, synthetic construct
  source 1..75: mol_type = other DNA
tgttatcacttaacccattactggcctgctgccgcagatattcccgtggcgagcgataacccagtgcactatgcg

SEQ ID NO: 675257 - DNA, 75 bp, synthetic construct
  source 1..75: mol_type = other DNA
atggctatgattgacccgcgcacacctagcggtaagttgactctacgttaccgaggtcttcccacgtctattcta

SEQ ID NO: 675258 - DNA, 75 bp, synthetic construct
  source 1..75: mol_type = other DNA
atggctatgattgacccgcgcacacctgagggccgcatgattctccgttaccgtggctaccggactggggtcatc

SEQ ID NO: 675259 - DNA, 75 bp, synthetic construct
  source 1..75: mol_type = other DNA
tgtacgacctggtggaaattcgcgatcgcgccctgggtatcatcattggtaccgtggtgtccgcggtgatttaca

SEQ ID NO: 675260 - DNA, 75 bp, synthetic construct
  source 1..75: mol_type = other DNA
cctgcgcatgcacatctcccgtcatccgctgtttgtcgccggccgccgtaaggcaggccgtaaatatggcttccg

SEQ ID NO: 675261 - DNA, 75 bp, synthetic construct
  source 1..75: mol_type = other DNA
tgatacagaaacttattcaggggtttcagaaggtattacatatactatacaatatgttcgagatattgatattgt

SEQ ID NO: 675262 - DNA, 75 bp, synthetic construct
  source 1..75: mol_type = other DNA
tttgcacgttatatcgctacagaagataccatagcggttggtagtgcaaatggtactgtgaactttacgttagcg

SEQ ID NO: 675263 - DNA, 75 bp, synthetic construct
  source 1..75: mol_type = other DNA
accgacccatcctggactaataccgccaatgctcttggcaacacgcctctcgggagctctgtatcggaagcaata

SEQ ID NO: 675264 - DNA, 75 bp, synthetic construct
  source 1..75: mol_type = other DNA
aacgctgctgggggctggtgctcgtgatggcgggggtctgtgtgattacgtttattatctcgcatctgatccccg

SEQ ID NO: 675265 - DNA, 75 bp, synthetic construct
  source 1..75: mol_type = other DNA
tgattacgtttattatctcgcatctgatccccggcgatccggcgcggttactggcgggtgaccgcgccagcgatg

SEQ ID NO: 675266 - DNA, 75 bp, synthetic construct
  source 1..75: mol_type = other DNA
gtgtctgtgcttgagaaatttgctaagcagccaactagattgagtgacttagaaaaagactattattcaacccaa

SEQ ID NO: 675267 - DNA, 75 bp, synthetic construct
  source 1..75: mol_type = other DNA
caatccgggaggttgccaggattcgtgccgatttcgatgattttgacggtgacaggcgaggtatcggtgattgtc

SEQ ID NO: 675268 - DNA, 75 bp, synthetic construct
  source 1..75: mol_type = other DNA
ctaaaaatgttatgcattcagttatgagtagctatctggatcaaattaatcgtgatgttcaaggaagagatcagg

SEQ ID NO: 675269 - DNA, 75 bp, synthetic construct
  source 1..75: mol_type = other DNA
cgcgcgtcaaaaagggaagttcgagagcaacaagcttctctcaaacaaatagatgaaaaaataaaaaatacaacg

SEQ ID NO: 675270 - DNA, 75 bp, synthetic construct
  source 1..75: mol_type = other DNA
ggatcccacgccggaagcccttctgaaagagctggggcaatactccagtctgggtatcacctctgacgagggaag

SEQ ID NO: 675271 - DNA, 75 bp, synthetic construct
  source 1..75: mol_type = other DNA
aaaaacgacctggtttcatataaatcatcccattcatcgtttggctccaccagcaggtttctcgcctactccggg

SEQ ID NO: 675272 - DNA, 75 bp, synthetic construct
  source 1..75: mol_type = other DNA
acgccaatagcttaagcagcttgcctgataaggcgatggagtatctgaatcagaatgggctgataagtgtggagg

SEQ ID NO: 675273 - DNA, 75 bp, synthetic construct
  source 1..75: mol_type = other DNA
ttgcaccaatggcaagaccaactggggtattggcattgggcttgcgggcagcacctacgataacgattacccgga

SEQ ID NO: 675274 - DNA, 75 bp, synthetic construct
  source 1..75: mol_type = other DNA
caggtggatggcgcccgcatcaccaacagcaaattcagccacctgcagggcgatgcgatcgagtggaatgtggcc

SEQ ID NO: 675275 - DNA, 75 bp, synthetic construct
  source 1..75: mol_type = other DNA
atgttttaccctgctgttgactatcttgtgattattctgcttcttgcctttctcatggtgactttatttgcctgt

SEQ ID NO: 675276 - DNA, 75 bp, synthetic construct
  source 1..75: mol_type = other DNA
attgaatctatatgcgaagcaataaaaaagctgattagagattatcctagctatgaactctttgctaaacaacaa

SEQ ID NO: 675277 - DNA, 75 bp, synthetic construct
  source 1..75: mol_type = other DNA
aaatgcgggtttatatgctcgtttagctaagataatatggaagcatcgatcgatatatgtctcgcatggttggtc

SEQ ID NO: 675278 - DNA, 75 bp, synthetic construct
  source 1..75: mol_type = other DNA
gacgcagtggtaatcaatcggggccgtagcggcgtagaagtgattctgacgctgaaaaacacggtagcggctgca

SEQ ID NO: 675279 - DNA, 75 bp, synthetic construct
  source 1..75: mol_type = other DNA
ttaaggcgtgacatgatgcagggcttgcatcgttcactcagaaaaaaagctgatcttgagcctgttctggaacag

SEQ ID NO: 675280 - DNA, 75 bp, synthetic construct
  source 1..75: mol_type = other DNA
tacttcatgcgacgcgcgccgacggcaaaccgctgccctttggcaccgaagtgctggatgaacatggtgaatctg

SEQ ID NO: 675281 - DNA, 75 bp, synthetic construct
  source 1..75: mol_type = other DNA
ttcatggggcggtgtggcccactgcgatattcatctgcctgacccgctgccagccgatctgttcaatggcctgtt

SEQ ID NO: 675282 - DNA, 75 bp, synthetic construct
  source 1..75: mol_type = other DNA
ctgaacagacgcagttagcgtctgcagttgttacgccagaagaaaagacgattgctactcctgaacaggtttcag

SEQ ID NO: 675283 - DNA, 75 bp, synthetic construct
  source 1..75: mol_type = other DNA
acgattaccgaaaaaggctattgtattgacccggccaccggtgcactcgacaccagcaatccgcggattattcac

SEQ ID NO: 675284 - DNA, 75 bp, synthetic construct
  source 1..75: mol_type = other DNA
tcccacatcatgtacacgctccacgctacgatcgccagcagttgcaatcacgtatcgttcattttggctttggcg

SEQ ID NO: 675285 - DNA, 75 bp, synthetic construct
  source 1..75: mol_type = other DNA
caaattcacagcagggtttttcacctgtggttcacggcgtggcacggacgaacgccctggtgaaagttatccaga

SEQ ID NO: 675286 - DNA, 75 bp, synthetic construct
  source 1..75: mol_type = other DNA
actttatgcaatagcatgtttattccagactttcccagaatttgtttatgaatatcaaccaatgttattaacaat

SEQ ID NO: 675287 - DNA, 75 bp, synthetic construct
  source 1..75: mol_type = other DNA
aaggtttctgacatttcggctgccctgcaaaatatgttcagtggtgaggggccgtcctggctacaagctatggct

SEQ ID NO: 675288 - DNA, 75 bp, synthetic construct
  source 1..75: mol_type = other DNA
gagatgctcgtattttaagaatggatcttacattgatcaccagaccgattgatattaatgatcttgtacctggca

SEQ ID NO: 675289 - DNA, 75 bp, synthetic construct
  source 1..75: mol_type = other DNA
ctggaagcccaatcaacagggttaccatgcgtagtatctaacattaatggaaataaatcattagttacgaataaa

SEQ ID NO: 675290 - DNA, 75 bp, synthetic construct
  source 1..75: mol_type = other DNA
aatggcgagattactgggaacgtagcgggacagggaaaaattaccaactaagctatacgaactcatgggaacgtc

SEQ ID NO: 675291 - DNA, 75 bp, synthetic construct
  source 1..75: mol_type = other DNA
tatcgtccatacacactcctctaaaactggtattctagggcggatagctgcgcggctggcaggagttccttgtgt

SEQ ID NO: 675292 - DNA, 75 bp, synthetic construct
  source 1..75: mol_type = other DNA
ttaaatttatctcagaagaagaacctgagttaattgacgagataaatgaatatatcgaggacgctataaaggtat

SEQ ID NO: 675293 - DNA, 75 bp, synthetic construct
  source 1..75: mol_type = other DNA
tagaaaggaaaatagaaatttcagatgttttacttaaagagattcgcaactatatgctaaatgaaagacgtaagt

SEQ ID NO: 675294 - DNA, 75 bp, synthetic construct
  source 1..75: mol_type = other DNA
agatacttaaacagcaacaaggaagtataaatgaattcgtcgataagattagagagagaagaccaaaactaagaa

SEQ ID NO: 675295 - DNA, 75 bp, synthetic construct
  source 1..75: mol_type = other DNA
aactgcacagatatataacaaaagatttattcaggataaatcacataaagtcgcaataaaactacaggaagatat

SEQ ID NO: 675296 - DNA, 75 bp, synthetic construct
  source 1..75: mol_type = other DNA
tgctggccgccctgcgtaataacccagggctgaacaacgctaagctggcaggacttatcggtatggacaccaaaa

SEQ ID NO: 675297 - DNA, 75 bp, synthetic construct
  source 1..75: mol_type = other DNA
tgcagcgtacagaggcaaacgtgatctgccaggagtgccgcaacagcgcggcgatgaagcgaattttgatggttt

SEQ ID NO: 675298 - DNA, 75 bp, synthetic construct
  source 1..75: mol_type = other DNA
ttaatatataaagtaaatataattaatgctagggaaggtgcgaataagcgggggaattcttctcggctgactcag

SEQ ID NO: 675299 - DNA, 75 bp, synthetic construct
  source 1..75: mol_type = other DNA
cctgttcagtctgccaccagtgagtttcgcagctccggtggtggaagttttccacagtcaacggaggctgccatc

SEQ ID NO: 675300 - DNA, 75 bp, synthetic construct
  source 1..75: mol_type = other DNA
aatttcataccgggtacttaccacatctatgacgactctctgcgtggttattacatcacccttgatggtctgatg

SEQ ID NO: 675301 - DNA, 75 bp, synthetic construct
  source 1..75: mol_type = other DNA
gtggtgaaactgtcagtattgtgtatgtagactggccccctgaatctccagacaaccaatatcacttatttaagt

SEQ ID NO: 675302 - DNA, 75 bp, synthetic construct
  source 1..75: mol_type = other DNA
atacctaaaaaatctggtaaagagtatggtgttcttgttcatgggaataggatgttggcatttttggtttttaga

SEQ ID NO: 675303 - DNA, 75 bp, synthetic construct
  source 1..75: mol_type = other DNA
gcaaatgtgacaaaaactaataaccgtcaaaatagaatcgaaagcagagactttgtttccttagatgatgagcaa

SEQ ID NO: 675304 - DNA, 75 bp, synthetic construct
  source 1..75: mol_type = other DNA
ggcatgatgagttaaaaaataaaatattaagccttgaggggtttgtattgttaagaagtgaagttaacacatttt

SEQ ID NO: 675305 - DNA, 75 bp, synthetic construct
  source 1..75: mol_type = other DNA
aaagacgcacagggccgtgaaacgcggtatgaatacaacgccgcaggcgacctgactgccgttatcaccccggac

SEQ ID NO: 675306 - DNA, 75 bp, synthetic construct
  source 1..75: mol_type = other DNA
taaacctgtatgggttgatattgaaccatcaactctggctatgaatattaaatcaatagaaagtaacataacaaa

SEQ ID NO: 675307 - DNA, 75 bp, synthetic construct
  source 1..75: mol_type = other DNA
cccgggtatcaacggcgggcgcgtctacttcggcgttcgcacctctcaatccagcaagcgctacatggtcgaggt

SEQ ID NO: 675308 - DNA, 75 bp, synthetic construct
  source 1..75: mol_type = other DNA
gcccagtatctcgatggtcgccgtgaaatgatgcagtggtacgcagattatattgattcgctttataagcaagag

SEQ ID NO: 675309 - DNA, 75 bp, synthetic construct
  source 1..75: mol_type = other DNA
tgcataatttatctgttgcaattatcgcatgtctgtcttcagcagcatatgctgaggactattttgacccggatc

SEQ ID NO: 675310 - DNA, 75 bp, synthetic construct
  source 1..75: mol_type = other DNA
ccgttaccttcaataaagctttacatttcctataataaatcttctttaaataatttggtgttctcccgatttatt

SEQ ID NO: 675311 - DNA, 75 bp, synthetic construct
  source 1..75: mol_type = other DNA
tttatgaatcgcaaaatctcatttcgtggttcctctttgctgacaatcattaatagcattgcagttacagattta

SEQ ID NO: 675312 - DNA, 75 bp, synthetic construct
  source 1..75: mol_type = other DNA
gtaataacggtgatggagcgagtgctaaggttggagagataacaatcacacctgacaactcgaaaccaggtcgtt

SEQ ID NO: 675313 - DNA, 75 bp, synthetic construct
  source 1..75: mol_type = other DNA
ccaaatatcgtccaggtggcaacgaatattctggtgaccatgaatctggtgggcatggggctgggcgtcactttg

SEQ ID NO: 675314 - DNA, 75 bp, synthetic construct
  source 1..75: mol_type = other DNA
tagcacatgaaaaagagatcaccgccgcgcaactggatggcgtgaatttcgtcagtaccgatccggcgtattccg

SEQ ID NO: 675315 - DNA, 75 bp, synthetic construct
  source 1..75: mol_type = other DNA
aatatttccagatggagaaaatattttaatatataaagtaaatataattaatgctagttcaaaaaaagatgtttt

SEQ ID NO: 675316 - DNA, 75 bp, synthetic construct
  source 1..75: mol_type = other DNA
tggctgaccagccactcgccggggcactgttgcaaagttagcgatgaggcagccttttgtcttattcaaaggcct

SEQ ID NO: 675317 - DNA, 75 bp, synthetic construct
  source 1..75: mol_type = other DNA
aagccacgctgcgtaaatggcacgaagagttgcaggctaaacgcggcaatcgtgccagtctgcggcgtagcacaa

SEQ ID NO: 675318 - DNA, 75 bp, synthetic construct
  source 1..75: mol_type = other DNA
actaatatgggtatgggtaaatcctggtcctcatctacggcagctaataactggacaggtacacaaactgtaact

SEQ ID NO: 675319 - DNA, 75 bp, synthetic construct
  source 1..75: mol_type = other DNA
agcagagtcttgagcaactatctcgaatctcgtcagagttcgaaccatcaagccagaagcgcaggaaaatgtcta

SEQ ID NO: 675320 - DNA, 75 bp, synthetic construct
  source 1..75: mol_type = other DNA
atgagaaaagtaaaaacagacaacagtgatttaatcgaatatttagacacggtaaaagaactaaaaaatcatatt

SEQ ID NO: 675321 - DNA, 75 bp, synthetic construct
  source 1..75: mol_type = other DNA
ctcctgagttgttagttgaaaagttaaccaatgacgatctggagttctctgatgggttcgtgcctgatggcaacg

SEQ ID NO: 675322 - DNA, 75 bp, synthetic construct
  source 1..75: mol_type = other DNA
ccctggcctggggcatgttaaaagcgacagcaagggttatcgttgggtcgctgccaactataccacgcaactagc

SEQ ID NO: 675323 - DNA, 75 bp, synthetic construct
  source 1..75: mol_type = other DNA
cagcgttccatagaacaaagtcttgagcaactctctcatatctcgtcagagttcaagccatcaagccaaatgcgc

SEQ ID NO: 675324 - DNA, 75 bp, synthetic construct
  source 1..75: mol_type = other DNA
gattagacaggaagagaaaatcactactcgaaaaatttattgaagaactcaaccctgtcagtcacgcatcagccc

SEQ ID NO: 675325 - DNA, 75 bp, synthetic construct
  source 1..75: mol_type = other DNA
tttcatcgccgaactgaccggccggggtcaggatgtggcggaaggtcgcgccagcgttccgggtgtgaagaaacc

SEQ ID NO: 675326 - DNA, 75 bp, synthetic construct
  source 1..75: mol_type = other DNA
tctgtggtcctacggttcctgttattaatccggacaccggtgagatacgccgcgtggcaatcttcgtggccgtaa

SEQ ID NO: 675327 - DNA, 75 bp, synthetic construct
  source 1..75: mol_type = other DNA
tctctcagtctacttcccctcgcccgtacttctgagaccactcaatcctccttgccgctttgcctgccgattcag

SEQ ID NO: 675328 - DNA, 75 bp, synthetic construct
  source 1..75: mol_type = other DNA
aaattcgagcgtgcggccttgcatgatggcagcgttctttatgattcagaaaacgataaattgatacttaccgag

SEQ ID NO: 675329 - DNA, 75 bp, synthetic construct
  source 1..75: mol_type = other DNA
aagcaaaggggctgctaagaaagttagcagaacatcctttacttactgctattgccggtggcgctataggtctgc

SEQ ID NO: 675330 - DNA, 75 bp, synthetic construct
  source 1..75: mol_type = other DNA
agcgtctggtcattctgcgctcactggtggagtgcggagacagtgcaaacgaatccattctacagacctgcctcc

SEQ ID NO: 675331 - DNA, 75 bp, synthetic construct
  source 1..75: mol_type = other DNA
catcttacagaaacattagattttcgttctgaaaatataaaaaaacaaatgggtgaagctgcgataagtgtttta

SEQ ID NO: 675332 - DNA, 75 bp, synthetic construct
  source 1..75: mol_type = other DNA
agcgaatattagttgaagcactcagccccggcgttaagcctcattatctcttctccagccagtatcaggcactgg

SEQ ID NO: 675333 - DNA, 75 bp, synthetic construct
  source 1..75: mol_type = other DNA
gtcgttaagcagtctcttcaacaaaaacatacatgaaatcgttactctgatgattcaggctccgctgcaaaatat

SEQ ID NO: 675334 - DNA, 75 bp, synthetic construct
  source 1..75: mol_type = other DNA
gaggagactggagagctgcggtgctatccgtatttttaatcagcttgtcggttatcatttatctgccatttgttt

SEQ ID NO: 675335 - DNA, 75 bp, synthetic construct
  source 1..75: mol_type = other DNA
cacctggagttaatggcgcttcagttgggagtttgcctggcgttaggaccgataccagaggttacactcttgtga

SEQ ID NO: 675336 - DNA, 75 bp, synthetic construct
  source 1..75: mol_type = other DNA
gtaatcgaagttgaagcaaaccgcgttactcaggtaaaagacctggctaacgatggctaccgtgctattcaggtg

SEQ ID NO: 675337 - DNA, 75 bp, synthetic construct
  source 1..75: mol_type = other DNA
attcggttgtcggcagtggacggcgcatttacggcagatgtggaagacgctctggacgacgagtccgtcacagag

SEQ ID NO: 675338 - DNA, 75 bp, synthetic construct
  source 1..75: mol_type = other DNA
gggcgtgcagggcgctgatgcgccagtcgtggcgcagaacggtccttcgcgtgatgtgaagctgacctttgcgca

SEQ ID NO: 675339 - DNA, 75 bp, synthetic construct
  source 1..75: mol_type = other DNA
gttgaccgcctctttccaaagcgcgaacgtttcatctatctggctaaacagtatagttcggggcgttactggcga

SEQ ID NO: 675340 - DNA, 75 bp, synthetic construct
  source 1..75: mol_type = other DNA
tagttggttatgaggggctttatgcggtaactcgtgatggtagagtttactctcactcaaggataataaatacat

SEQ ID NO: 675341 - DNA, 75 bp, synthetic construct
  source 1..75: mol_type = other DNA
cgaacggcagcattgagtttggtatgcgcagcgatgaagtggtgacgaaggcgatgctcaatctcgaatacacgc

SEQ ID NO: 675342 - DNA, 75 bp, synthetic construct
  source 1..75: mol_type = other DNA
atggggatgagtgcgttcccctctttcatgacgcaggcgacgccagcaatgcaaccactgatcaatgctgagcca

SEQ ID NO: 675343 - DNA, 75 bp, synthetic construct
  source 1..75: mol_type = other DNA
cgatgaagtggtgacgaaggcgatgctcaacctcgaatacacgccatcgccatcgttactgcctgtccagtcgca

SEQ ID NO: 675344 - DNA, 75 bp, synthetic construct
  source 1..75: mol_type = other DNA
atgcgggtgcgtgagcggttgcggggaaaacgtgttacggaaaggatgatcggaaatcttatcaggctgacaagg

SEQ ID NO: 675345 - DNA, 75 bp, synthetic construct
  source 1..75: mol_type = other DNA
tgttgtgaacaggatcatgaggcactgataaccattatgggaataaaaaaatcaccagaaaatataaatttgcta

SEQ ID NO: 675346 - DNA, 75 bp, synthetic construct
  source 1..75: mol_type = other DNA
aaagccatgatggctttgaacttcatccaaaaccaacgaatggaacattttatagagtaaggaaacacaatgggt

SEQ ID NO: 675347 - DNA, 75 bp, synthetic construct
  source 1..75: mol_type = other DNA
gcactcatgagaaggtgctgatgatcgatggccgttacatcgttctcggaagctggaactggctatctcatggtt

SEQ ID NO: 675348 - DNA, 75 bp, synthetic construct
  source 1..75: mol_type = other DNA
tatttatatagtgcaggaaactatgtttggcagatttgtgcaattattgcggcaggtatcattgcgccggttatg

SEQ ID NO: 675349 - DNA, 75 bp, synthetic construct
  source 1..75: mol_type = other DNA
tatagcgacaatatatgtcacttctaagttattgggtattacacctgcaaaacataaatacgcctcgcttgatgg

SEQ ID NO: 675350 - DNA, 75 bp, synthetic construct
  source 1..75: mol_type = other DNA
gctgtctctgccggattatacagcatgggtgaaacggcagcggtgctgtggatgcgggaaaccggcagatgatcc

SEQ ID NO: 675351 - DNA, 75 bp, synthetic construct
  source 1..75: mol_type = other DNA
agaggaacggcagccagctactgtgggtgttacggacactggacagagctgcgggtattggcgctttggctggag

SEQ ID NO: 675352 - DNA, 75 bp, synthetic construct
  source 1..75: mol_type = other DNA
aatataaagaaattagagcaaagatacatcatatattttgcggtaagtcttctgagatagaacacgttaggggat

SEQ ID NO: 675353 - DNA, 75 bp, synthetic construct
  source 1..75: mol_type = other DNA
agcgtacaggaaggtatagcaggtctaaaggctgaaggatggaatcatacaggggagatagttgaacagtactgt

SEQ ID NO: 675354 - DNA, 75 bp, synthetic construct
  source 1..75: mol_type = other DNA
caagagagaaagagcttaaagccagcattgatcgtaatcgtgaggctcaggtccgtagcgttgagcaggttaacc

SEQ ID NO: 675355 - DNA, 75 bp, synthetic construct
  source 1..75: mol_type = other DNA
atgcagtacgtcgggaaaaaacggatgagcaggaaagagcagtactgaaactggcaactgacagtgacccggtta

SEQ ID NO: 675356 - DNA, 75 bp, synthetic construct
  source 1..75: mol_type = other DNA
ttttaactgttttactcaaacatcgcgacgagttgaactcctgttaccagacgtatctgaatgaaaaggcaaccg

SEQ ID NO: 675357 - DNA, 75 bp, synthetic construct
  source 1..75: mol_type = other DNA
ggattgaggcacacaatagccctggttctcttgcgtattgtgaacaacgcgaccgctttgaaatgcaattgcaac

SEQ ID NO: 675358 - DNA, 75 bp, synthetic construct
  source 1..75: mol_type = other DNA
cattccatgtgatgcacgcgagctcgctgaacgaacaggtgagcttattgctcaatttccggcggaggacgctgg

SEQ ID NO: 675359 - DNA, 75 bp, synthetic construct
  source 1..75: mol_type = other DNA
aatcttatcgagtagccatgctgtatcaaaaggcgtattgactggtccagatcaattacatataagttatgtaca

SEQ ID NO: 675360 - DNA, 75 bp, synthetic construct
  source 1..75: mol_type = other DNA
atgcaaaaattcggattatctatccagaatgcccagcttcatctgtttgccttcctgtttgccgttgcggcaggt

SEQ ID NO: 675361 - DNA, 75 bp, synthetic construct
  source 1..75: mol_type = other DNA
gcgaaaatgcgcgccgggctgcctttgcaggcggtcgggctaatcggtcaggacagcgatggcgattacattatg

SEQ ID NO: 675362 - DNA, 75 bp, synthetic construct
  source 1..75: mol_type = other DNA
gcacccatcactaccattacgacagcctgcaccgcctggtccattacatccgtatccaatatgaggagccgctgg

SEQ ID NO: 675363 - DNA, 75 bp, synthetic construct
  source 1..75: mol_type = other DNA
catagatttgatagttgaagcatttagtcatatgaaggataaaaagctagttgttattggtgatggacctgagat

SEQ ID NO: 675364 - DNA, 75 bp, synthetic construct
  source 1..75: mol_type = other DNA
gtggaaagtagcgggctatcgtaagcttgatgaactcaagggtcacaaaccctggcacctggcactgtgcgatga

SEQ ID NO: 675365 - DNA, 75 bp, synthetic construct
  source 1..75: mol_type = other DNA
tttcagcatttcagtctttcttccctgccccatcgccagttagcggctctggctgatgcgggagaaatactgtca

SEQ ID NO: 675366 - DNA, 75 bp, synthetic construct
  source 1..75: mol_type = other DNA
aaatatttaaaaataatttgtcaaaatatgttgaagataaatggaccgagtttaatctttctaaaagaatccagt

SEQ ID NO: 675367 - DNA, 75 bp, synthetic construct
  source 1..75: mol_type = other DNA
tgttatttcaagtagtcatgccgttgcaaaaggcgtattgacgggaccagatcagttgcatattagttacgtaca

SEQ ID NO: 675368 - DNA, 75 bp, synthetic construct
  source 1..75: mol_type = other DNA
tttatgaataaacgagcaaaaacaacttttattcaaaaattacctaaggcaaaaagtaactaccagcgatactta

SEQ ID NO: 675369 - DNA, 75 bp, synthetic construct
  source 1..75: mol_type = other DNA
ggttgtcatttattttaagtgtggattcaaaaagccatagaagattaataacttatattagcaaattagaaaaaa

SEQ ID NO: 675370 - DNA, 75 bp, synthetic construct
  source 1..75: mol_type = other DNA
atgcggcttaatattgccgacttcaaaggttttaaagcctcccttttatccgtgatcgcggatatcgcagcgttt

SEQ ID NO: 675371 - DNA, 75 bp, synthetic construct
  source 1..75: mol_type = other DNA
ggatgattacggcgcattacggatgaatactctgaactgtaacggacaatgtcgtttacaggcggtggaggcgaa

SEQ ID NO: 675372 - DNA, 75 bp, synthetic construct
  source 1..75: mol_type = other DNA
ttaaagccggaatgcgtgaatttaccgccaatgtcagcggtaacgatctggttcgcgttaccggttatatggtgc

SEQ ID NO: 675373 - DNA, 75 bp, synthetic construct
  source 1..75: mol_type = other DNA
gcaggatatagaattggccgcgctttgcaacacaactatgagcacatcaccgttctagttgttggcccttgcaaa

SEQ ID NO: 675374 - DNA, 75 bp, synthetic construct
  source 1..75: mol_type = other DNA
caacagaatccaggtaggtttatcagcagtttcgatactaatcgaagcagcaaaaaatagtgggacaatgacgca

SEQ ID NO: 675375 - DNA, 75 bp, synthetic construct
  source 1..75: mol_type = other DNA
ggtttagagagcgctaagcctaaacaaaatgctagattagcaaatgaaattttatctaacggtggggcttggatt

SEQ ID NO: 675376 - DNA, 75 bp, synthetic construct
  source 1..75: mol_type = other DNA
aaaagtaataaaaaaatattctaagaatagtttcgatgcgccaaaaaactcctcaaaaaatatctttgaaagata

SEQ ID NO: 675377 - DNA, 75 bp, synthetic construct
  source 1..75: mol_type = other DNA
tgatttatcaggacttaatttagctactcaaccaccagggctgcaaaacttcacctctatcaatcttgataataa

SEQ ID NO: 675378 - DNA, 75 bp, synthetic construct
  source 1..75: mol_type = other DNA
tgtcctggaatatttctgaaaactggagtaactccagccggaattatcagcgggatgagaatttttctgccggcg

SEQ ID NO: 675379 - DNA, 75 bp, synthetic construct
  source 1..75: mol_type = other DNA
tgcccgtgctgtcattggtctgaatatacttaccttgatgaataatgatatggcgctgatacagctgcatcatgt

SEQ ID NO: 675380 - DNA, 75 bp, synthetic construct
  source 1..75: mol_type = other DNA
acaagaaagtcagaatgttagtgtaaaaaataataatgcgaatggctggcaactgaccattatcgatgatcacgg

SEQ ID NO: 675381 - DNA, 75 bp, synthetic construct
  source 1..75: mol_type = other DNA
ccgatcgccattgccgatatggatcaatcgcagttatcgaacaggatcgttaacagcttctatcgcccgtggttt

SEQ ID NO: 675382 - DNA, 75 bp, synthetic construct
  source 1..75: mol_type = other DNA
tttcaaaaaaattcgactcaaaacaatgttacttaaaaatactaaaagcgtttaacgagaaagttatcaatgagt

SEQ ID NO: 675383 - DNA, 75 bp, synthetic construct
  source 1..75: mol_type = other DNA
gtggggaatacaagtgatttagatgcgaaaattaaagaaggtcaaagcgttgtcactattccgcttaatcagcca

SEQ ID NO: 675384 - DNA, 75 bp, synthetic construct
  source 1..75: mol_type = other DNA
tgttaaattcgatccggtcagtataacaggaaatataagagacaagagaataaggtatcgttctttggttaattc

SEQ ID NO: 675385 - DNA, 75 bp, synthetic construct
  source 1..75: mol_type = other DNA
gatgagaaaatcagcaatactgaattgactattatgggactggacatagagtcaaagaatctggaacacttatta

SEQ ID NO: 675386 - DNA, 75 bp, synthetic construct
  source 1..75: mol_type = other DNA
atttactccgccggtgagcatctggagctctgctgtggtaaggcaaggctggtgctgacgaaggacggacaaatt

SEQ ID NO: 675387 - DNA, 75 bp, synthetic construct
  source 1..75: mol_type = other DNA
aaatcttctgtgatgaacatggccgcgtgcgggtgaaatttaactgggaccgttataacccgtcaaaccaggaca

SEQ ID NO: 675388 - DNA, 75 bp, synthetic construct
  source 1..75: mol_type = other DNA
acggggcatccgcaggcgaacctgaaccgggaatggcaggtggtggcaagtgaactgcacggcgaacagccacag

SEQ ID NO: 675389 - DNA, 75 bp, synthetic construct
  source 1..75: mol_type = other DNA
ggtaaagacccgtgaaggtggtggttatatttacgtagtgattgaacatcagagccgtgaggatattcatatggc

SEQ ID NO: 675390 - DNA, 75 bp, synthetic construct
  source 1..75: mol_type = other DNA
cataagtttcgcagacgaagattacatcgaatatcgtggcatcagtagtaacaaccgtgtcacacttgatccact

SEQ ID NO: 675391 - DNA, 75 bp, synthetic construct
  source 1..75: mol_type = other DNA
aatccatgaatgagaatctaaaatggatgatagttggggatgggggattccttgaaagtttgaaagaaattgcat

SEQ ID NO: 675392 - DNA, 75 bp, synthetic construct
  source 1..75: mol_type = other DNA
attgaagaaggtgaaataaaacaaaatatcaccttgtttaaagtattaaatcatgagtataactccaagaacctt

SEQ ID NO: 675393 - DNA, 75 bp, synthetic construct
  source 1..75: mol_type = other DNA
atgagaagaaaacgcgaagaaatcgcatcgccagaagctacgcagcgtctacgcggaatctgggatgcaaaaaaa

SEQ ID NO: 675394 - DNA, 75 bp, synthetic construct
  source 1..75: mol_type = other DNA
ggatggttaacaagcaacaagctgatttactggatctttttgatatcctccccgaatcagaaaaagcaaaactaa

SEQ ID NO: 675395 - DNA, 75 bp, synthetic construct
  source 1..75: mol_type = other DNA
aaactgcatatcaatttctgaagtgcaggacatgtttttaaattatttggccaaaagaaacttgaatgttgatga

SEQ ID NO: 675396 - DNA, 75 bp, synthetic construct
  source 1..75: mol_type = other DNA
taggtacatggtcctggggcacaggctttgccggcggcgacaccgtctttggtaatcatctttctgatactcaga

SEQ ID NO: 675397 - DNA, 75 bp, synthetic construct
  source 1..75: mol_type = other DNA
gttgcacagatagccatcgcatgggctattgcgaaaggaacccttccactcattggtgtgactaaagtccatcat

SEQ ID NO: 675398 - DNA, 75 bp, synthetic construct
  source 1..75: mol_type = other DNA
atggtgtttttgttgccgactgggttgtatttactggcgttatcttttgttgcgtttgggtttttgtttaattcg

SEQ ID NO: 675399 - DNA, 75 bp, synthetic construct
  source 1..75: mol_type = other DNA
ctgccgtcctgctgtttctggtagtggcggtggatttcaccggacggctgatgtcggtactggctgatggtgtac

SEQ ID NO: 675400 - DNA, 75 bp, synthetic construct
  source 1..75: mol_type = other DNA
gtgtttatggcaggcgttggtctgagcgccggtagcggtattaataacggcctgggcgcgattggcggtcaaatg

SEQ ID NO: 675401 - DNA, 75 bp, synthetic construct
  source 1..75: mol_type = other DNA
ggcaataaagcgccgactcagtccctgctggggcaaatcgccactgcaattggaccgctggataaaccctttact

SEQ ID NO: 675402 - DNA, 75 bp, synthetic construct
  source 1..75: mol_type = other DNA
tgctggggcaaatcgccactgcagcagggccgctggataaaccttttacgcgtaccgatctgcataagcaggcct

SEQ ID NO: 675403 - DNA, 75 bp, synthetic construct
  source 1..75: mol_type = other DNA
tcgtttttccgcgggtttgcaaaaagcagccgtcgccaccggctatattctggccgctgtggtggggtattcacg

SEQ ID NO: 675404 - DNA, 75 bp, synthetic construct
  source 1..75: mol_type = other DNA
aagtcattctccagagaggagattaatttttctgagtttcgtcgcgtgcttgtctctttggaacgtattccttcg

SEQ ID NO: 675405 - DNA, 75 bp, synthetic construct
  source 1..75: mol_type = other DNA
gatacaacctgttcagttatgttaatacccgatatctttactttcaatatattgcaatctagaacggaagaagta

SEQ ID NO: 675406 - DNA, 75 bp, synthetic construct
  source 1..75: mol_type = other DNA
agttacaaccatatgacattgtttatgttactactgctcctattgttcgttggaatcgcgtgatttcccagttgg

SEQ ID NO: 675407 - DNA, 75 bp, synthetic construct
  source 1..75: mol_type = other DNA
gtcaaagcgttcccttgtatggatgagtgcttgtcatattatgtgcttgctgttgttactctggcaggtgcagcc

SEQ ID NO: 675408 - DNA, 75 bp, synthetic construct
  source 1..75: mol_type = other DNA
caaacagcttgaaagtattgcccgaagtcgtggtctccacccaaaaaaactgctgaatgaaatgattgagcaggc

SEQ ID NO: 675409 - DNA, 75 bp, synthetic construct
  source 1..75: mol_type = other DNA
caaacaccttgaaagtattgcccgcagtcgtggtctccgcccaaaaaaactgctgaatgaaatgattgagcaggc

SEQ ID NO: 675410 - DNA, 75 bp, synthetic construct
  source 1..75: mol_type = other DNA
caaacatcttgaaagtattgcccgaagtcgtggtctcctcccaaaaaaactgctgaatgaaatgattgagcaggc

SEQ ID NO: 675411 - DNA, 75 bp, synthetic construct
  source 1..75: mol_type = other DNA
cccccaaaaaaactgctgaatgaaatgattgagcaggcgtaccaggactcagtggtgaacagccggaataaacca

SEQ ID NO: 675412 - DNA, 75 bp, synthetic construct
  source 1..75: mol_type = other DNA
caaacagcttgaaagtattgcccggagtcgtggtctccgcccaaaaaaactgctgaatgaaatgattgagcaggc

SEQ ID NO: 675413 - DNA, 75 bp, synthetic construct
  source 1..75: mol_type = other DNA
caaacagcttgaaagtattgcccgcagtcgtggtctccccccaaaaaaactgctgaatgaaatgattgagcaggc

SEQ ID NO: 675414 - DNA, 75 bp, synthetic construct
  source 1..75: mol_type = other DNA
ccgtgtaaggcgcggtttattgcgtcgatgatggatgatgtgtatgaggtggaaacagaaaaaactgagaacaag

SEQ ID NO: 675415 - DNA, 75 bp, synthetic construct
  source 1..75: mol_type = other DNA
gaaaccgggcgaggggttgtcagtacagatgcattaccaccgttcggaacactgggtagtggtagcgggaacggc

SEQ ID NO: 675416 - DNA, 75 bp, synthetic construct
  source 1..75: mol_type = other DNA
gcgcacgtacaaattgccggactacctgatcgacatgaaccggacgatggagaaatcaactatccgtggctgttc

SEQ ID NO: 675417 - DNA, 75 bp, synthetic construct
  source 1..75: mol_type = other DNA
caaacaacttgaaagtattgcccgaagtcgtggtctccgcccaaaaaaactgctgaatgaaatgattgagcaggc

SEQ ID NO: 675418 - DNA, 75 bp, synthetic construct
  source 1..75: mol_type = other DNA
gtgcttgcccgcctgggggattttggtatcaaagcaactgcctatgttaatcataaaggaaccgaactgataaaa

SEQ ID NO: 675419 - DNA, 75 bp, synthetic construct
  source 1..75: mol_type = other DNA
aagttctgcaatcgtggggttgtcaggattttaagcggaaatgggttgacatcacgcaatctgcaccagggcagt

SEQ ID NO: 675420 - DNA, 75 bp, synthetic construct
  source 1..75: mol_type = other DNA
gtgtaatagtggagtctgatgctctcgctaaagaaagtccggaaccggtcaggcaactggagctctggatggtac

SEQ ID NO: 675421 - DNA, 75 bp, synthetic construct
  source 1..75: mol_type = other DNA
cagccgttgcgaacgcccgtttgccccgcaaaaaaccgtcgcactggctgcagaactgttggcacagcaacaaaa

SEQ ID NO: 675422 - DNA, 75 bp, synthetic construct
  source 1..75: mol_type = other DNA
ctgcggtgcctgcgcctgtgcttgtccggcaaatgcgctgactatccagaccgacgaccagcaaaatacgcgcac

SEQ ID NO: 675423 - DNA, 75 bp, synthetic construct
  source 1..75: mol_type = other DNA
cgggcgcaagcgagcgtctgcccggaatgcaaacaacacgcgacgctgattaacgacaacacagatgtaccgctg

SEQ ID NO: 675424 - DNA, 75 bp, synthetic construct
  source 1..75: mol_type = other DNA
cttcagagaatactacagagagtaaaaacactattggcgcatccgctgacgcgtctgcaccagcgcgttctgccc

SEQ ID NO: 675425 - DNA, 75 bp, synthetic construct
  source 1..75: mol_type = other DNA
acatttaatagtcggtatatttataccgcccgcgataatcgcaagagctggcataacgtgacgggggtaatggtg

SEQ ID NO: 675426 - DNA, 75 bp, synthetic construct
  source 1..75: mol_type = other DNA
tcaactgcttggcgctcagtatatgagcaaataccgagatctagaattgcagcgaaaaatggaaaatccctataa

SEQ ID NO: 675427 - DNA, 75 bp, synthetic construct
  source 1..75: mol_type = other DNA
ggaattaagggggttgcgtatgcgcttgctggttatcgtccagaagttcaggctgtcattgacgagttcaaagcg

SEQ ID NO: 675428 - DNA, 75 bp, synthetic construct
  source 1..75: mol_type = other DNA
agacggcgtttctatcccagtcaccgtaatcgaagttgaagcaaaccgcgttactcaggttaaagacctggctaa

SEQ ID NO: 675429 - DNA, 75 bp, synthetic construct
  source 1..75: mol_type = other DNA
gcggaaatgggctatgtattttcggccttcgcctggctttatacgctatgccagatccccggcggttggttttta

SEQ ID NO: 675430 - DNA, 75 bp, synthetic construct
  source 1..75: mol_type = other DNA
taactttgaactgaccgtcaccaataaagccgatctctatacccgcgcgacgttccatctacaacgttgcagccg

SEQ ID NO: 675431 - DNA, 75 bp, synthetic construct
  source 1..75: mol_type = other DNA
ctaccgtatagattgtgagcgccttaatgaacttatcaatgaaaacaatcagttttcccgaaatggggaaacccg

SEQ ID NO: 675432 - DNA, 75 bp, synthetic construct
  source 1..75: mol_type = other DNA
acttcactcactgacaaggaactaccccaacttaaagatattgaccttatgactaaagcgggtcgtgtcgagtgt

SEQ ID NO: 675433 - DNA, 75 bp, synthetic construct
  source 1..75: mol_type = other DNA
acagtcagcagctcccggaggtgggcggggcaaaagcctcccgatctcgggattcagtgaacaggactacggctc

SEQ ID NO: 675434 - DNA, 75 bp, synthetic construct
  source 1..75: mol_type = other DNA
cggtagaactgagagatgaaaatgacaaacctgttaaggagcaaaaacagcaactgaataacgcagtcagcatcg

SEQ ID NO: 675435 - DNA, 75 bp, synthetic construct
  source 1..75: mol_type = other DNA
attctgttgtttactatgttgttgcgtctggcacttaacgtggcttcaacccgtatcattttgatggaagggcat

SEQ ID NO: 675436 - DNA, 75 bp, synthetic construct
  source 1..75: mol_type = other DNA
cgctgaaaattattgaggcagccgatgaggttattagtgcgcttgccggaactaacgaggatgttcaccctggta

SEQ ID NO: 675437 - DNA, 75 bp, synthetic construct
  source 1..75: mol_type = other DNA
gacctgtcgaatgctcatgctatcattgcgcatttggaaagttttgtgaataaacaggaatatcttatatgtgaa

SEQ ID NO: 675438 - DNA, 75 bp, synthetic construct
  source 1..75: mol_type = other DNA
ttatattttcagtcccgataatgtctccgtccataataatgatgttaaagactctgccaataacatatcaggaat

SEQ ID NO: 675439 - DNA, 75 bp, synthetic construct
  source 1..75: mol_type = other DNA
atcacttttaaatactcatggtggtgtgtccaggtgcattatggagtgccgacagcttgctggtgaggtttgtca

SEQ ID NO: 675440 - DNA, 75 bp, synthetic construct
  source 1..75: mol_type = other DNA
attgatatgtacatctacggtttgaatgattttagtgcgtttggtcaatccaggtggtatggtgataataatgat

SEQ ID NO: 675441 - DNA, 75 bp, synthetic construct
  source 1..75: mol_type = other DNA
ttaagctaatttcgctaaatgaaaaatctaaaacaacgcaagctagcacaagggctatacagattaattcacagc

SEQ ID NO: 675442 - DNA, 75 bp, synthetic construct
  source 1..75: mol_type = other DNA
atttcccttgtgagttatgctttgaaaattttggtgagttagtggaaatgcaagttgaaattattctttatttac

SEQ ID NO: 675443 - DNA, 75 bp, synthetic construct
  source 1..75: mol_type = other DNA
tggatgggcagctgaccctttgggaacgattaatatcaatttgcacggtaacgttgttgatttctcctgtaccgt

SEQ ID NO: 675444 - DNA, 75 bp, synthetic construct
  source 1..75: mol_type = other DNA
tgcgctccgtaaccatttgaattcagctaaacaatcaatgattcgatccattaatgagaacacgcgttatgctca

SEQ ID NO: 675445 - DNA, 75 bp, synthetic construct
  source 1..75: mol_type = other DNA
gttctttcaactcactgatgacagataaaaaatttcagttgaatttgtctgggtatccggcttcctccattgagt

SEQ ID NO: 675446 - DNA, 75 bp, synthetic construct
  source 1..75: mol_type = other DNA
ggtacgcagaatacgatgaatggggtaacctgctgaatgaagagaacccgcatcagctgcagcagcttatccgcc

SEQ ID NO: 675447 - DNA, 75 bp, synthetic construct
  source 1..75: mol_type = other DNA
tcgccggtacactcgcagcaaaagagcgccatcgtcaacgcatgaccgcgcaagagtaccactggcgcaaaccat

SEQ ID NO: 675448 - DNA, 75 bp, synthetic construct
  source 1..75: mol_type = other DNA
tggcctgtacgctagcggccaaagaacggcaccgctggcgcatgacagcacccgaataccgatggcgcaagcctg

SEQ ID NO: 675449 - DNA, 75 bp, synthetic construct
  source 1..75: mol_type = other DNA
gtggcgcagtaggttggctaatttcagaaagtggtgtagtcccgcccaaggacgtactgaccgtttttcttagag

SEQ ID NO: 675450 - DNA, 75 bp, synthetic construct
  source 1..75: mol_type = other DNA
gctgatagccgcagttagcgccaatgttaaagctattgatgaacggcagccttttgccggcagctggcggcggta

SEQ ID NO: 675451 - DNA, 75 bp, synthetic construct
  source 1..75: mol_type = other DNA
cgttttccactctcgatttacagccagaaaatgctctatgagctggcttcggatactggtgcattcctgcgcgtc

SEQ ID NO: 675452 - DNA, 75 bp, synthetic construct
  source 1..75: mol_type = other DNA
tgattcggatacagtaaaactagcggagaaaattgcagcgttaacagaagaagatgctggattgctggaagctct

SEQ ID NO: 675453 - DNA, 75 bp, synthetic construct
  source 1..75: mol_type = other DNA
taattttacagaagtcagtttactacgcggaagcgaatgggaatatgactactcatataccacgcccgagcgcca

SEQ ID NO: 675454 - DNA, 75 bp, synthetic construct
  source 1..75: mol_type = other DNA
ccgtacacatcaagcaaaagaacggccctaagtgctgcgtgggtgatatttcggtttacgacgactcaaagcccg

SEQ ID NO: 675455 - DNA, 75 bp, synthetic construct
  source 1..75: mol_type = other DNA
gcggcgcgatgttcacgccagtgctgctgtttcccttcgccaggattgtggtgggtcttgccatctgtaaccagg

SEQ ID NO: 675456 - DNA, 75 bp, synthetic construct
  source 1..75: mol_type = other DNA
ggaaaaccggcggcgcgtcagggcgacatgacgcagtatggcggtagcattgtccagggttcagccggggtgcgc

SEQ ID NO: 675457 - DNA, 75 bp, synthetic construct
  source 1..75: mol_type = other DNA
gatatggatgcggcgagaaagtgggaagagcaggcgcagcaactgcaaaatttgttgacttctcaggtcattggt

SEQ ID NO: 675458 - DNA, 75 bp, synthetic construct
  source 1..75: mol_type = other DNA
aggacgacgtggtatggcgtgaatatctggaaactatcgtcaaagagcgcagcgactggaacgatctctatcgcg

SEQ ID NO: 675459 - DNA, 75 bp, synthetic construct
  source 1..75: mol_type = other DNA
tttactgcccgactggtgggaatggatgaacgccagcgccgggaaaatatcgatctgtatggcgcagcggcattt

SEQ ID NO: 675460 - DNA, 75 bp, synthetic construct
  source 1..75: mol_type = other DNA
atataaaatgccctgaaggttcagagagagtaggcgattatcacactcacggtttttactctgacgataaaggaa

SEQ ID NO: 675461 - DNA, 75 bp, synthetic construct
  source 1..75: mol_type = other DNA
ccattcaatagcccttgccctaatggtactgagaaagtatcagcttatcatactcatggtgcagatagtcatgga

SEQ ID NO: 675462 - DNA, 75 bp, synthetic construct
  source 1..75: mol_type = other DNA
gaatgatcgataacggtcatgccgcgcggttggcagggttttatcactgctggtttcgttattctccatgtgaat

SEQ ID NO: 675463 - DNA, 75 bp, synthetic construct
  source 1..75: mol_type = other DNA
agaattaaaatcaaaacatgacccgctggtttttaataatgcatacaatattgaaaagtattttgagattagtta

SEQ ID NO: 675464 - DNA, 75 bp, synthetic construct
  source 1..75: mol_type = other DNA
gggctgtacagagcaaaattactgttgctgcagatcttgccgattatgtgctgggcggtgtgcagcattatgtct

SEQ ID NO: 675465 - DNA, 75 bp, synthetic construct
  source 1..75: mol_type = other DNA
atgctgccgatttatggaggaagccaatgggggggaggctatagtgatgaattgcctgattttttttctaagccg

SEQ ID NO: 675466 - DNA, 75 bp, synthetic construct
  source 1..75: mol_type = other DNA
cgaaaaattaccaccttaagtcaaaattaaattattatcctataactcaggctgcatttttaggtgagactgagg

SEQ ID NO: 675467 - DNA, 75 bp, synthetic construct
  source 1..75: mol_type = other DNA
tagaagagctgacgcgtattcctgctgatgttcaggacacgctgatcacgatcctgtcggaaaaaacgctgccta

SEQ ID NO: 675468 - DNA, 75 bp, synthetic construct
  source 1..75: mol_type = other DNA
atgagtaaagtctttatttgcgccgctattccggacgaacaggcaataaaggaagaaggtgccgtcgctgtagcc

SEQ ID NO: 675469 - DNA, 75 bp, synthetic construct
  source 1..75: mol_type = other DNA
aggggatgatatcattgctttagctaaagagcttaacctgccctttactgctaaaaactcccctgaagagttaga

SEQ ID NO: 675470 - DNA, 75 bp, synthetic construct
  source 1..75: mol_type = other DNA
aggcggagcctgcgcacctgctggaagtgaggctcaatcgggaggtgacggtgccccgggaatagttattgttga

SEQ ID NO: 675471 - DNA, 75 bp, synthetic construct
  source 1..75: mol_type = other DNA
ggatcattctggctgtaaagccagataatttctggttagtggattcgccagaaatggatgtagggacaatccgct

SEQ ID NO: 675472 - DNA, 75 bp, synthetic construct
  source 1..75: mol_type = other DNA
cgcgcttcggggcgatgtggctcctgtgctgccctggtattttcgttcgccccttccatccacttacgcggatta

SEQ ID NO: 675473 - DNA, 75 bp, synthetic construct
  source 1..75: mol_type = other DNA
aagacattcggaacatgcgacagtggttcctagacttgcgtgagcaaggttcgtttatcttcaatctgaatccac

SEQ ID NO: 675474 - DNA, 75 bp, synthetic construct
  source 1..75: mol_type = other DNA
cgatattggccgtagaaacagtgactgacattaccgctggtaatgtggttggcatgaatcctttcatccattata

SEQ ID NO: 675475 - DNA, 75 bp, synthetic construct
  source 1..75: mol_type = other DNA
taatacaggaagtaacacaggaagtaagtcaggaattcgcccagcgtcttctgagtaaaggaatgtctcgggaag

SEQ ID NO: 675476 - DNA, 75 bp, synthetic construct
  source 1..75: mol_type = other DNA
ataaactaccttaaaaatgtaataaaactgtcagacgatgacattggtaattatcagaaaacaattaacgacaat

SEQ ID NO: 675477 - DNA, 75 bp, synthetic construct
  source 1..75: mol_type = other DNA
gaacaaaacagctttattttcatggccaaaaacacaaaagtgtccgcaaacataaaaaagattgatcatagagcc

SEQ ID NO: 675478 - DNA, 75 bp, synthetic construct
  source 1..75: mol_type = other DNA
ccgggctgtcgcatgcgctggggtttatcagtagcaaggatgccgggaagctacgccgcattcagggtgataagg

SEQ ID NO: 675479 - DNA, 75 bp, synthetic construct
  source 1..75: mol_type = other DNA
gggcgctgcatgggatgggctgaaaaaccgttcgaaaaactctctgtttaagggattgctttccgatggttcggt

SEQ ID NO: 675480 - DNA, 75 bp, synthetic construct
  source 1..75: mol_type = other DNA
tctacctttgcgaatgatgccgacggaagaactgcaatggcgagacagctgatgttgtatggtgacagggggaat

SEQ ID NO: 675481 - DNA, 75 bp, synthetic construct
  source 1..75: mol_type = other DNA
gctacgtgtactgttaggatacacaaccaacgctctgaggagtagcaatccactgatggcatttgcagcgcttct

SEQ ID NO: 675482 - DNA, 75 bp, synthetic construct
  source 1..75: mol_type = other DNA
cattgcgccgtctttatattagcgccagcgtatcagttccgacaaaacaatctcaatccatcccaataactttag

SEQ ID NO: 675483 - DNA, 75 bp, synthetic construct
  source 1..75: mol_type = other DNA
cggtccctcaaagaggcgatggccgatcagaaaatgaagctggaaatcaccctggtcaatgataagggggagaag

SEQ ID NO: 675484 - DNA, 75 bp, synthetic construct
  source 1..75: mol_type = other DNA
atggataattcagaatatctcaaaataaatacagaaaatttcagcatcaatattttaaaaaatgttaatgatgtt

SEQ ID NO: 675485 - DNA, 75 bp, synthetic construct
  source 1..75: mol_type = other DNA
accgataacaaccagatgcgttacggcctggttaaaggtgacggctttattgaggtttgggcattccagggtgcg

SEQ ID NO: 675486 - DNA, 75 bp, synthetic construct
  source 1..75: mol_type = other DNA
gcagacacccggatcagcactctggaaaatcaggtaagcgaactggttgcacttgtccggcagttaacaggaagc

SEQ ID NO: 675487 - DNA, 75 bp, synthetic construct
  source 1..75: mol_type = other DNA
tacaagagctaagggcgaaaggtgggtgtttctggaggtcaggaaaaccaacaggtagcgaatcaacaattttca

SEQ ID NO: 675488 - DNA, 75 bp, synthetic construct
  source 1..75: mol_type = other DNA
cggaaaacattgacggccagacggttaatcttaacaacctgaccatcatcaagtcagatgccggggcagttaaat

SEQ ID NO: 675489 - DNA, 75 bp, synthetic construct
  source 1..75: mol_type = other DNA
gtctggtgatcttgatatattgaaagaaacgccatctatcaggctaaaatcagcaaaaggaaccgctcatctgtg

SEQ ID NO: 675490 - DNA, 75 bp, synthetic construct
  source 1..75: mol_type = other DNA
ggcggagggcgaattgatgtccttggaagcacgtcagactatagcaaaatggattgctttgtacgtgggtttgat

SEQ ID NO: 675491 - DNA, 75 bp, synthetic construct
  source 1..75: mol_type = other DNA
gtcagatgccggggcagttaaatactatatttgtccatcctctgcaggtggtgcaaatatcaccaacaagcctga

SEQ ID NO: 675492 - DNA, 75 bp, synthetic construct
  source 1..75: mol_type = other DNA
aatagtccacctctgcatccgcgtgagcttgtgcatcatcagtgtatcggatggcgtccttccccggaggttgct

SEQ ID NO: 675493 - DNA, 75 bp, synthetic construct
  source 1..75: mol_type = other DNA
atgcggacaacacgttccgtaaacctgactgaagcgggagaacgactgcgtacatccctgtcattacctttatcc

SEQ ID NO: 675494 - DNA, 75 bp, synthetic construct
  source 1..75: mol_type = other DNA
ccgcaaaattaatggatacacgtacacgctcaaggagaatggggcacattgcgccggggttatagcacaggaagt

SEQ ID NO: 675495 - DNA, 75 bp, synthetic construct
  source 1..75: mol_type = other DNA
tactcgtaaaactacgggttcagattatgcgatcatgcaaacgctgattggcagcgacacaaaacgcatatacgt

SEQ ID NO: 675496 - DNA, 75 bp, synthetic construct
  source 1..75: mol_type = other DNA
cacgctcagggaaaacgggatgccttatgctggcgttattgcacaggaagtaatggaggcgataccagaagctgt

SEQ ID NO: 675497 - DNA, 75 bp, synthetic construct
  source 1..75: mol_type = other DNA
ccggcaggttcccctgacaacggcgctgaagcgtatcctgccgccgggctggcagcagcacctgatgcccggagt

SEQ ID NO: 675498 - DNA, 75 bp, synthetic construct
  source 1..75: mol_type = other DNA
ctttcacaaccaacaccgtcaccacgccccgcgtcatcatcagcccgcacagcacagcagcaccttcccggtgtg

SEQ ID NO: 675499 - DNA, 75 bp, synthetic construct
  source 1..75: mol_type = other DNA
tagactatattaaagaaaatcaacctgtaaatcgttatactatatgttcctgtcttgatatcagtttggaaacat

SEQ ID NO: 675500 - DNA, 75 bp, synthetic construct
  source 1..75: mol_type = other DNA
aatgttcctgatggcgactcattctgggaatttggtgttaatgaaaaattgcttgataaagctaactttgattac

SEQ ID NO: 675501 - DNA, 75 bp, synthetic construct
  source 1..75: mol_type = other DNA
accaccaaaggccgaagatctgtttgtacctgacaatggtattaaaacgtcttatagctcgtggttacgtaatgg

SEQ ID NO: 675502 - DNA, 75 bp, synthetic construct
  source 1..75: mol_type = other DNA
ccaaaagggtggacggactggacgcagggttttgagtacggcagcgcgttattgcagtttgacgctacaggcgag

SEQ ID NO: 675503 - DNA, 75 bp, synthetic construct
  source 1..75: mol_type = other DNA
aatttaatccttccaaattgaatagtaccttcgggaactactgtgtagagatagcctatccaagtattttctttg

SEQ ID NO: 675504 - DNA, 75 bp, synthetic construct
  source 1..75: mol_type = other DNA
gccgaaatcgaaaaggcctacaacacactcgagcgcaacccgatgccgctgggccatccgaaagtggacggcaag

SEQ ID NO: 675505 - DNA, 75 bp, synthetic construct
  source 1..75: mol_type = other DNA
gtgctgcttgatgagcctggtgcaggtacgccggaggagggcgttggcatctttgttaactcagaaggtgatgag

SEQ ID NO: 675506 - DNA, 75 bp, synthetic construct
  source 1..75: mol_type = other DNA
ggacggcagcacaggccggacgtgatgacgggaatcactcgaccgcagcaatggcggagcagtggcctttaaggg

SEQ ID NO: 675507 - DNA, 75 bp, synthetic construct
  source 1..75: mol_type = other DNA
gcgggcatctgttcgtgacgtaccacggcaaggggctgaaccggggaacgctgacgcagatcggcggggaaacca

SEQ ID NO: 675508 - DNA, 75 bp, synthetic construct
  source 1..75: mol_type = other DNA
gctaccgcaaggccgacgggaacacgctggcggtgggcgggcagcttaaccgcttaagcacagtgaagaacttct

SEQ ID NO: 675509 - DNA, 75 bp, synthetic construct
  source 1..75: mol_type = other DNA
aagcatcctcggcacgattttgcaggaaaacggggtgaccgaatggagtccgctgttcagcgagccgcatccttc

SEQ ID NO: 675510 - DNA, 75 bp, synthetic construct
  source 1..75: mol_type = other DNA
aaaacctccatgcattaaaagaaaagcgtttaaatggaatgcctaaaacaacccccaaaagtgaccaggttatta

SEQ ID NO: 675511 - DNA, 75 bp, synthetic construct
  source 1..75: mol_type = other DNA
aaatgcgaaaatatggcgtacgaggtttacgttatgatgcggcaaaacactcaaaacatgaacaaatagaaagat

SEQ ID NO: 675512 - DNA, 75 bp, synthetic construct
  source 1..75: mol_type = other DNA
gcatatatggccgctctcccgttcagcagacctttagtttacagggatggccaggtattaaaatcaacgactgaa

SEQ ID NO: 675513 - DNA, 75 bp, synthetic construct
  source 1..75: mol_type = other DNA
ggaaaccagcatccagacggcgcgggcgctcgatacccgcctgccgctggcagaacaactggtggcgctgcatac

SEQ ID NO: 675514 - DNA, 75 bp, synthetic construct
  source 1..75: mol_type = other DNA
caaagattggctgtacaccggagactctgcgtgtctggggacgccagcatgagcgggataccgggagcggtgatg

SEQ ID NO: 675515 - DNA, 75 bp, synthetic construct
  source 1..75: mol_type = other DNA
gtgtctggggacgcctgcatgagagggataccgggagcggtgatggtgggctcaccagcgctgaacgtcagcgtc

SEQ ID NO: 675516 - DNA, 75 bp, synthetic construct
  source 1..75: mol_type = other DNA
ggatgagaataagcttgttactgcaaaaaatattactgatgctataaatcagtctggttggaaagttaaagcagg

SEQ ID NO: 675517 - DNA, 75 bp, synthetic construct
  source 1..75: mol_type = other DNA
aagcatcctcggcacgattttgcaggaaaacggggtgaccgagtggagtccgctgttcagcgagccacatccttc

SEQ ID NO: 675518 - DNA, 75 bp, synthetic construct
  source 1..75: mol_type = other DNA
aagcatcctcggcacgattttgcaggaaaacggggtgaccgattggagtccgctgttcagcgagcctcatccttc

SEQ ID NO: 675519 - DNA, 75 bp, synthetic construct
  source 1..75: mol_type = other DNA
gcatcacaagaaaattgaagctctggtagttagcctcctggagttcgtcgtatacacaggtcggcttaatcgccg

SEQ ID NO: 675520 - DNA, 75 bp, synthetic construct
  source 1..75: mol_type = other DNA
acgttggttaaccacgtactgacccccaaccaccacccatcatctggcgaaggggtttttctccagcctgaacct

SEQ ID NO: 675521 - DNA, 75 bp, synthetic construct
  source 1..75: mol_type = other DNA
acgcacagtgccagacctctactggcctgaatggtgcattccgccaggtcaataacaacgaatctttcagcgaaa

SEQ ID NO: 675522 - DNA, 75 bp, synthetic construct
  source 1..75: mol_type = other DNA
gaaaaagattatcaaccccaatggtcatccagatgattatgttgactgcagctttattgatcatgattgtgggga

SEQ ID NO: 675523 - DNA, 75 bp, synthetic construct
  source 1..75: mol_type = other DNA
ttgttatcaaccatagctatatacgtcctgggttcgtcatggtcatttcccaggttgtttttgcctacttaattg

SEQ ID NO: 675524 - DNA, 75 bp, synthetic construct
  source 1..75: mol_type = other DNA
tatttattgttctggcctgtattggaatcggcggaaaatacggcggaatggggcttggtgctggaggtgggttag

SEQ ID NO: 675525 - DNA, 75 bp, synthetic construct
  source 1..75: mol_type = other DNA
tttgacctgccggatgagccaacaggcaatgacgcgccttcatggctgactgagccgacgccacagattaacggg

SEQ ID NO: 675526 - DNA, 75 bp, synthetic construct
  source 1..75: mol_type = other DNA
gtccacgaaacgaagttttacatggcacaatcggcagaagcaatgctggaagcaggtaaacgactgattattctt

SEQ ID NO: 675527 - DNA, 75 bp, synthetic construct
  source 1..75: mol_type = other DNA
ttgatcgcatgtcagtacgtgaattgcgtcaggccctgcgcgaagcgcgcgaaaccaacgcagcacaacagcgcg

SEQ ID NO: 675528 - DNA, 75 bp, synthetic construct
  source 1..75: mol_type = other DNA
tcgtaatggggaactgatacagaccttaaatactgactccataggcacctgtatcatttttacgcctcaatggaa

SEQ ID NO: 675529 - DNA, 75 bp, synthetic construct
  source 1..75: mol_type = other DNA
tttcagcaataaaattatatcgtgatgggaaaccgatacagaccttatatactgcttctatcggcacttgtagca

SEQ ID NO: 675530 - DNA, 75 bp, synthetic construct
  source 1..75: mol_type = other DNA
cgctacgtcattgaacatatccaggactggccggcaaaccgggtacgcgatctgttgccctggaaagttgatctg

SEQ ID NO: 675531 - DNA, 75 bp, synthetic construct
  source 1..75: mol_type = other DNA
cacagacagtgaggaacctgttcaggaagccccgagaaaacgtttaatcctttctgaaaaagcaatatcactcgg

SEQ ID NO: 675532 - DNA, 75 bp, synthetic construct
  source 1..75: mol_type = other DNA
ttgcggcttggaaccccttttattgttacaggaggcctgggcttgtctgctaccggtccggacgggagggacacc

SEQ ID NO: 675533 - DNA, 75 bp, synthetic construct
  source 1..75: mol_type = other DNA
caatgtggaaccagaaaaatggctgcattacgtcattgaacatatccaagactggccgacaaaccgggtacgcga

SEQ ID NO: 675534 - DNA, 75 bp, synthetic construct
  source 1..75: mol_type = other DNA
tttgacctgccggaggagccaacaggcaatgtcgcgccttcatggctgactgagccgacgccacagattaacggg

SEQ ID NO: 675535 - DNA, 75 bp, synthetic construct
  source 1..75: mol_type = other DNA
tgaacccatcattccagatggtcaattctgaaaacgaccagtggaaagactacgaccttaacgcaggtatggaag

SEQ ID NO: 675536 - DNA, 75 bp, synthetic construct
  source 1..75: mol_type = other DNA
cgttttggtcaggtgacggcggtgcaccgcgaggaaggcctgagccagtaccacgcatacgacagccgtggacag

SEQ ID NO: 675537 - DNA, 75 bp, synthetic construct
  source 1..75: mol_type = other DNA
gatttatctgtaaccatcggatccattagttctactaagggagtgggagctgttgctgtaggggcaacttctgaa

SEQ ID NO: 675538 - DNA, 75 bp, synthetic construct
  source 1..75: mol_type = other DNA
cggcttgctcaacaaaaccaaattcttcttcaccaatgcctccaacttctctttcgacgacatctcccgcgctat

SEQ ID NO: 675539 - DNA, 75 bp, synthetic construct
  source 1..75: mol_type = other DNA
cggtgaatgagtaccacgtcggggcctggctgcaaaacgtgagccacaatgacggcaaggtgacaggcgacatgt

SEQ ID NO: 675540 - DNA, 75 bp, synthetic construct
  source 1..75: mol_type = other DNA
atgaatgacggtctttcttttgagggtgatgacggaaaggttattcataaaaaactgaatgaaaaactgaccatc

SEQ ID NO: 675541 - DNA, 75 bp, synthetic construct
  source 1..75: mol_type = other DNA
ttttgtgatatgcccgttttactggcaccaggagtcggtattcatcgagcaggttaaacaggcggtctcgcccga

SEQ ID NO: 675542 - DNA, 75 bp, synthetic construct
  source 1..75: mol_type = other DNA
tactgaacttggacgtgcaaccggcgcgctggatcaggcgcgtgcgctggcaattggttcgaatggttatatctg

SEQ ID NO: 675543 - DNA, 75 bp, synthetic construct
  source 1..75: mol_type = other DNA
tttgacctgccggaggagccaacaggctatgacgcgccttcatggctgactgagccgacgccacagattaacggg

SEQ ID NO: 675544 - DNA, 75 bp, synthetic construct
  source 1..75: mol_type = other DNA
tcagccaccgggcctgacgggctggaattgcgccgggaatatgatgaatccggccgtctgattcaggaaaccgcc

SEQ ID NO: 675545 - DNA, 75 bp, synthetic construct
  source 1..75: mol_type = other DNA
acatatagtcattatgaattaaataatgaaccttttagagcgcaaatggaaataataagagtaaaacttgatgaa

SEQ ID NO: 675546 - DNA, 75 bp, synthetic construct
  source 1..75: mol_type = other DNA
ggattaggggtagatcagcatcaaaaaattgataattataccatggggctaaattcctggaagatagctcctaac

SEQ ID NO: 675547 - DNA, 75 bp, synthetic construct
  source 1..75: mol_type = other DNA
attgctaacctcttctgcaatattatttgttgaaacatggttaagcattatcgccccaggtttagataaaacaac

SEQ ID NO: 675548 - DNA, 75 bp, synthetic construct
  source 1..75: mol_type = other DNA
tgaccgcgctgcaacaggtcatgccacggggtaaggcatggccgcgtgataacgacgcggatttaaaccgctttt

SEQ ID NO: 675549 - DNA, 75 bp, synthetic construct
  source 1..75: mol_type = other DNA
aatacttggtccaaattatgcagatacatttaagaaagcattagatgatccaaaatcatggaaaaaattaacaac

SEQ ID NO: 675550 - DNA, 75 bp, synthetic construct
  source 1..75: mol_type = other DNA
agctccttccttccccgacacgctgcccgccggtacagagtacggtgccgatatccactggcaccaatacgttac

SEQ ID NO: 675551 - DNA, 75 bp, synthetic construct
  source 1..75: mol_type = other DNA
tcgatgaaagacggcgtgctggaagtgcggcttgtcaaggccgagcaagccaagccgaagcagattgaaatttca

SEQ ID NO: 675552 - DNA, 75 bp, synthetic construct
  source 1..75: mol_type = other DNA
aacaacccagtatttttagcttggggatttacattcgcatattttgtatttttttgttgggtgttattacgagga

SEQ ID NO: 675553 - DNA, 75 bp, synthetic construct
  source 1..75: mol_type = other DNA
agtcagaagtggagcttctgcttgcagaggcaggcagaagcagtaccccggagcgtgacagttgtctgctttatc

SEQ ID NO: 675554 - DNA, 75 bp, synthetic construct
  source 1..75: mol_type = other DNA
gcgttaccggtgaatgccacaaccggccgccattacagcggagtgaatatacccttgctgtggatgtctgctgaa

SEQ ID NO: 675555 - DNA, 75 bp, synthetic construct
  source 1..75: mol_type = other DNA
ccctgaccgggaagccttatacgggcgtgaatgtcctgttgttgtggctgactgcggatgaagccggatacgcca

SEQ ID NO: 675556 - DNA, 75 bp, synthetic construct
  source 1..75: mol_type = other DNA
gtaaaaacaaaacaggtccagcttttgattccgtcccaaccaggcaagatatagacagagttctaaatgacagaa

SEQ ID NO: 675557 - DNA, 75 bp, synthetic construct
  source 1..75: mol_type = other DNA
aaagaaatttagatatatcagaagtcgtatcgaaaaaattcaaaaagatgagtcgtttacaaatagacttgagcc

SEQ ID NO: 675558 - DNA, 75 bp, synthetic construct
  source 1..75: mol_type = other DNA
agatttaacgaaccgtgcctgcatcaggcggactttttatccctgctttgttagctccctaaccttgtacagagg

SEQ ID NO: 675559 - DNA, 75 bp, synthetic construct
  source 1..75: mol_type = other DNA
ccagcgttcacaccaccgcagcgaatctggatatccgcatcccgtatgccacagacccggcaggtaaccgcctgc

SEQ ID NO: 675560 - DNA, 75 bp, synthetic construct
  source 1..75: mol_type = other DNA
gtgaatggaagccttgttgtagccaaactgactgacgcgaacgaagcaacattcaaaaaactggttattgatggc

SEQ ID NO: 675561 - DNA, 75 bp, synthetic construct
  source 1..75: mol_type = other DNA
gactgaaggggggatggaacctgtatggatatcaattgaatccgatatcagacatcgaccccctgggtttatcta

SEQ ID NO: 675562 - DNA, 75 bp, synthetic construct
  source 1..75: mol_type = other DNA
tgctgatactgaaaagcttgttactgcgaaatacattgctgatgccataaatcagtctggctggaaaattcaagc

SEQ ID NO: 675563 - DNA, 75 bp, synthetic construct
  source 1..75: mol_type = other DNA
atccacctgtaccactgcgaccatcgcggcctgccgctggcgctcatcagcacggaaggggcaacagcgtggtgc

SEQ ID NO: 675564 - DNA, 75 bp, synthetic construct
  source 1..75: mol_type = other DNA
ctgtattacaaccgccaccgctattatgacccgctgcaggggcggtatatcactcaggatccgattgggctgaag

SEQ ID NO: 675565 - DNA, 75 bp, synthetic construct
  source 1..75: mol_type = other DNA
gacagttatcaccgagtttgagtataggatatcgtactactggtcattatatgatttctcagggtagtgtaatta

SEQ ID NO: 675566 - DNA, 75 bp, synthetic construct
  source 1..75: mol_type = other DNA
agagcatttcttacgtctggtatgcccactttctcagggaaagtgcgcagcatatttctttcagatgtatctaaa

SEQ ID NO: 675567 - DNA, 75 bp, synthetic construct
  source 1..75: mol_type = other DNA
aacacatgtttcagtaaaattttactcgaagtacgaatgttttcagccagaaacttactggaacagaaatactca

SEQ ID NO: 675568 - DNA, 75 bp, synthetic construct
  source 1..75: mol_type = other DNA
caactttttcaggaaaagtacgaaacatattactgtcagatatatcacgacaatggaagttacgcgatatatctg

SEQ ID NO: 675569 - DNA, 75 bp, synthetic construct
  source 1..75: mol_type = other DNA
cggcaaccggagcgagacacagtacgatgcgtggggaaaggcggtcagcaccacgcagggcgggctgacgcgcag

SEQ ID NO: 675570 - DNA, 75 bp, synthetic construct
  source 1..75: mol_type = other DNA
gcgtgtgccggatgtgttttatctgtatctgaaacagacggggagcagtaagcgtcgtctcagcaccgtctggca

SEQ ID NO: 675571 - DNA, 75 bp, synthetic construct
  source 1..75: mol_type = other DNA
catatttctttcagatgtatctaaacattggaaactaagagacttaactgattatctatacatagtgagagttta

SEQ ID NO: 675572 - DNA, 75 bp, synthetic construct
  source 1..75: mol_type = other DNA
aaagactctaatttatcagagttgatagcatggctagcaacagttcttatgccgtcagagttgaccgaatcagct

SEQ ID NO: 675573 - DNA, 75 bp, synthetic construct
  source 1..75: mol_type = other DNA
cccggaaaaaccggccgagggctggctgatcaaccatgcagccgttgagcgcatggtctcccgggttgtggcgct

SEQ ID NO: 675574 - DNA, 75 bp, synthetic construct
  source 1..75: mol_type = other DNA
ttcgtgtacctgcacttgtcaagaagttaggcattgggcgttcaacggtatacgactggcttgaccctagttctg

SEQ ID NO: 675575 - DNA, 75 bp, synthetic construct
  source 1..75: mol_type = other DNA
acgtaatttaagaaatcataaagaacggctatcttcagtcctaacgaatgctttatcaaatacaacggatttgaa

SEQ ID NO: 675576 - DNA, 75 bp, synthetic construct
  source 1..75: mol_type = other DNA
ggcgctcggtctgaccgtggctgacggtgacgaatttacgccggaactgggcacggcggcgctgtctgcccttac

SEQ ID NO: 675577 - DNA, 75 bp, synthetic construct
  source 1..75: mol_type = other DNA
gtcgggtaaaggcccgtgacggtcgcccggaaaaaccggcggaaggctggctgattaaccgtgcgaccgttgagc

SEQ ID NO: 675578 - DNA, 75 bp, synthetic construct
  source 1..75: mol_type = other DNA
atccggcaccggctgccggttttgtgatggcctcaccggagaattttcgcttcagtgaagagcgaggtttcgagg

SEQ ID NO: 675579 - DNA, 75 bp, synthetic construct
  source 1..75: mol_type = other DNA
agcagcgaagagaggcagcgcgtgagcgtattcagtctgcaactcccgaacagcgccaggtgtttaaggaaaaag

SEQ ID NO: 675580 - DNA, 75 bp, synthetic construct
  source 1..75: mol_type = other DNA
taggtagcgtaggcggtgcgatgcacggtctggcaaatatttccggcattattggtccattggtaaccggtttta

SEQ ID NO: 675581 - DNA, 75 bp, synthetic construct
  source 1..75: mol_type = other DNA
tggagccagacacgtcagaaaaatatcgccagcaagcaatggagattatgctgtctgcccaaaatacccggaagt

SEQ ID NO: 675582 - DNA, 75 bp, synthetic construct
  source 1..75: mol_type = other DNA
ccgccacaagcgatttatcacccagcaagaggtcagctggacgaaaaacaaaatataacgaccgcatcgccgaac

SEQ ID NO: 675583 - DNA, 75 bp, synthetic construct
  source 1..75: mol_type = other DNA
aggtgctggacaaggccgaatccgaagggcgcatcttcaaaagtgaacgcggctatctggaacaactgggcggcc

SEQ ID NO: 675584 - DNA, 75 bp, synthetic construct
  source 1..75: mol_type = other DNA
ctgaagacggccctgatggttgacggaaagaaagtggcactcagtgccagacaacagggtgaggatgtggtgata

SEQ ID NO: 675585 - DNA, 75 bp, synthetic construct
  source 1..75: mol_type = other DNA
ggtgattcggtcgaaattattggtaaaggcccattaaaaacccaggtggttgacgataagctagagataacagca

SEQ ID NO: 675586 - DNA, 75 bp, synthetic construct
  source 1..75: mol_type = other DNA
gcgcaagctggcacaggtggcgtatggagtgctgaagtcaggcgtgccgttcgatgcgtcacggcataatccggt

SEQ ID NO: 675587 - DNA, 75 bp, synthetic construct
  source 1..75: mol_type = other DNA
atgaagatatcaaaatccgaacttccaataatatttgattcatcgaatttggaaaaagaaattgaattgtgggtg

SEQ ID NO: 675588 - DNA, 75 bp, synthetic construct
  source 1..75: mol_type = other DNA
ggcaaactacttattattgccaaatggttttaaaaaagagtatgcaaaaaattctgtgatagtatgcttattgca

SEQ ID NO: 675589 - DNA, 75 bp, synthetic construct
  source 1..75: mol_type = other DNA
ctgttcgctggaaatggcccgtgaacgtctgctgaatgaaatgggtgaaccgccccgggtttcctggagagtgtt

SEQ ID NO: 675590 - DNA, 75 bp, synthetic construct
  source 1..75: mol_type = other DNA
aacgcagtgttcatgcattacgtgagacgtttgaccttgaggccgctccatcgggtaacgatgcccccgcctggc

SEQ ID NO: 675591 - DNA, 75 bp, synthetic construct
  source 1..75: mol_type = other DNA
atcgtgctactggttatcattttcatcttgccaggatcgcacgtaatcacgttattcgggggctttatctgctga

SEQ ID NO: 675592 - DNA, 75 bp, synthetic construct
  source 1..75: mol_type = other DNA
gatggtgctatgggttatggttcttcattcttggaagaggcgtttggtggactttatagaacaaataatatagat

SEQ ID NO: 675593 - DNA, 75 bp, synthetic construct
  source 1..75: mol_type = other DNA
tgtagagcagtcactgattgtagacatggattctgagaaaccgagctgtaatgcttatgagtttggttttgtgtt

SEQ ID NO: 675594 - DNA, 75 bp, synthetic construct
  source 1..75: mol_type = other DNA
ctacaaggtcgacgtatattccctgcgtcaggtctcgtgatgtatggcgaatatcttccgcaagcggtttgtgct

SEQ ID NO: 675595 - DNA, 75 bp, synthetic construct
  source 1..75: mol_type = other DNA
cagattgctacaaccgcttatgtaagagctgccatatccgcattggttggttcatcaccagaagctcttgatacc

SEQ ID NO: 675596 - DNA, 75 bp, synthetic construct
  source 1..75: mol_type = other DNA
tctatatggctaaggaaggtgcgaataagcaggtcatttcttcccaagctgactcgctgattaaaatttcgcgga

SEQ ID NO: 675597 - DNA, 75 bp, synthetic construct
  source 1..75: mol_type = other DNA
ggctggccgtacgtggaaggcggcaagcacgcgcagctgaccgtgaaaggcccgcaagtagccgagcagcctgca

SEQ ID NO: 675598 - DNA, 75 bp, synthetic construct
  source 1..75: mol_type = other DNA
gtggcgatacaccagttccaccagacgacggtggtgatacacctgttcctccagatgacggtggcgacgtcactc

SEQ ID NO: 675599 - DNA, 75 bp, synthetic construct
  source 1..75: mol_type = other DNA
tggtaaatcagttaaatgctttacattaaaaccaacgcaagatgttctcagtgcaaaaaagatggttataaaata

SEQ ID NO: 675600 - DNA, 75 bp, synthetic construct
  source 1..75: mol_type = other DNA
tgatgaagacagcaaccttgagagcctgtgccggtcgtgtcacgcagcgaagaccgcgcgcgagcggctcaagtg

SEQ ID NO: 675601 - DNA, 75 bp, synthetic construct
  source 1..75: mol_type = other DNA
ccttcccatttctggcaggcggctgaccagtttgaacgtgcgaacggttcgacctatagggaacttgaaattgca

SEQ ID NO: 675602 - DNA, 75 bp, synthetic construct
  source 1..75: mol_type = other DNA
ataaaaataaaaaattttacgcgttgatttttctctttatattaatagacataatgcagtcattgttaataaatt

SEQ ID NO: 675603 - DNA, 75 bp, synthetic construct
  source 1..75: mol_type = other DNA
ttgttgtaagttgtttgttactgttacaagttgtgttaatttatacattaaacccttttgatgcttttaatcgat

SEQ ID NO: 675604 - DNA, 75 bp, synthetic construct
  source 1..75: mol_type = other DNA
ttctaatgaatagtggtaatatggaaatccaagagatgaatactggtgtgcctggaaataaagttatgaaaaaat

SEQ ID NO: 675605 - DNA, 75 bp, synthetic construct
  source 1..75: mol_type = other DNA
tcgacgaagacaaaggcacgctgcaaattcgcaatgccacctttacctacagcaaaaacagtgatggaagttaca

SEQ ID NO: 675606 - DNA, 75 bp, synthetic construct
  source 1..75: mol_type = other DNA
agtcagcgcagggacaccttctccattcagccagagctgaaacggcatacgctgctggcggatgcaatttacttt

SEQ ID NO: 675607 - DNA, 75 bp, synthetic construct
  source 1..75: mol_type = other DNA
aaagttaatttaagaaaaaagattccatacttttttttaatgctgccagttttatatgtaattattatggcttat

SEQ ID NO: 675608 - DNA, 75 bp, synthetic construct
  source 1..75: mol_type = other DNA
cgatgatgattcgaatcttgaaagcctgtgctggccctgtcacagaacgaaaaccgggcgtgaacgtttcaaatg

SEQ ID NO: 675609 - DNA, 75 bp, synthetic construct
  source 1..75: mol_type = other DNA
gatatgctcaaagcttattatcatatccataaacaccatcaaaataaatatagatgcataggtattttagatgca

SEQ ID NO: 675610 - DNA, 75 bp, synthetic construct
  source 1..75: mol_type = other DNA
agctaatttaaatgaaatgcttacaccagaaaaagttaatgagttaattcaatcagaaatgaaactctctgataa

SEQ ID NO: 675611 - DNA, 75 bp, synthetic construct
  source 1..75: mol_type = other DNA
gcagatggtgaaagaggcagtgagccatattcctgttccgcgcgacggtcgtgactacgatccggatgttctgca

SEQ ID NO: 675612 - DNA, 75 bp, synthetic construct
  source 1..75: mol_type = other DNA
gaactacaggcggcgcgctcagctgcatggttctacacctctaaaggctgcatgatctacggtgctgacctgctc

SEQ ID NO: 675613 - DNA, 75 bp, synthetic construct
  source 1..75: mol_type = other DNA
tgtgcgctggtttcaaccagtagatgcagcgatgaaagaattcggcattacagcacccgcggatcaggccatgtt

SEQ ID NO: 675614 - DNA, 75 bp, synthetic construct
  source 1..75: mol_type = other DNA
tgtcagtacaccagaattgctaacgcaggagcgacatgcggcccgttcggcggcgtggtacttcacgttacgcgg

SEQ ID NO: 675615 - DNA, 75 bp, synthetic construct
  source 1..75: mol_type = other DNA
aaaaaatctcatggtttctttttcaaaagaaagcattggattcagccggttttatacatgttacttgtaacgatg

SEQ ID NO: 675616 - DNA, 75 bp, synthetic construct
  source 1..75: mol_type = other DNA
aaaagaaatgggaaggaatgcgagagaattgatagttagaaactattcatgggaacgagttagttatccttttta

SEQ ID NO: 675617 - DNA, 75 bp, synthetic construct
  source 1..75: mol_type = other DNA
gcccttacgactacacactgtattgcaggaagtgggtaaaaccaaatctgacttgtacgccacaggatgattccc

SEQ ID NO: 675618 - DNA, 75 bp, synthetic construct
  source 1..75: mol_type = other DNA
atgaaaataatacaaaaaaaatcattcaaattttcacaatatagaatacagaattctggagggtggtgctacggg

SEQ ID NO: 675619 - DNA, 75 bp, synthetic construct
  source 1..75: mol_type = other DNA
agatatgttgtttaatgtatggtcgaggatctctcaccattatcctgattgggaattacttgttgctggtcctga

SEQ ID NO: 675620 - DNA, 75 bp, synthetic construct
  source 1..75: mol_type = other DNA
caacatggtgtggatgtacctgatttgatagataaagttccagatagtttttatgataaatataaattatcgcat

SEQ ID NO: 675621 - DNA, 75 bp, synthetic construct
  source 1..75: mol_type = other DNA
gctgaaattaaaagagaaataataagaaaacatgaaacagggcagttttctcaattaaatagtaaattatcctca

SEQ ID NO: 675622 - DNA, 75 bp, synthetic construct
  source 1..75: mol_type = other DNA
taaaacaacaaccaatcaatttatcaatcaacttggaggggacatttataaataccacgctgaaaaactgggtga

SEQ ID NO: 675623 - DNA, 75 bp, synthetic construct
  source 1..75: mol_type = other DNA
agatatggaaacaattggggacaataaacgatatcctatatatttagtttgtcatgatgcagggcaaaagagagg

SEQ ID NO: 675624 - DNA, 75 bp, synthetic construct
  source 1..75: mol_type = other DNA
atgacagataaaacgaccgatattaaaatggctttagaaaacatgatcagatttcgtgacactatagagagattg

SEQ ID NO: 675625 - DNA, 75 bp, synthetic construct
  source 1..75: mol_type = other DNA
gcgtatcaaaagatcttagttttacggctgatgatgcagctctgctgttacggtttaatgaagcaaaagggatta

SEQ ID NO: 675626 - DNA, 75 bp, synthetic construct
  source 1..75: mol_type = other DNA
agtaatattgatgcgtttttaaaaagagaggtcgatataaagttggctcttcagttgggttctgaagtagctgga

SEQ ID NO: 675627 - DNA, 75 bp, synthetic construct
  source 1..75: mol_type = other DNA
cggcaactgttatccggttgataaagttactcgcatggacaataacgaaatcccggcaggacttaaaacagcacc

SEQ ID NO: 675628 - DNA, 75 bp, synthetic construct
  source 1..75: mol_type = other DNA
ccagtgctggttggtatccggtgctggacaatgcaatagctacaggtagttccacgagtggctatacaaactata

SEQ ID NO: 675629 - DNA, 75 bp, synthetic construct
  source 1..75: mol_type = other DNA
aatgatataataaaaacagttaatactattcccgagcaatttgatatattagggtataattatattcgcggtgga

SEQ ID NO: 675630 - DNA, 75 bp, synthetic construct
  source 1..75: mol_type = other DNA
gaattattatcagtaaaatacctgttatgcaagcagggttaaaagaggtcatgaggactcacttccctgaatatg

SEQ ID NO: 675631 - DNA, 75 bp, synthetic construct
  source 1..75: mol_type = other DNA
attgaagcccgtggtcgcattgtcgaaatcgacaagggcgaggccaaacagggtgaagataccgaacatacctat

SEQ ID NO: 675632 - DNA, 75 bp, synthetic construct
  source 1..75: mol_type = other DNA
aatgccgggtgcggtggatgtggacctggggcttgatgacagtgcgctggacacagaattttccattggtggtac

SEQ ID NO: 675633 - DNA, 75 bp, synthetic construct
  source 1..75: mol_type = other DNA
actataactttattgcaacactgaaatctattcacggtcagacaataacggctggtaaggtccgtgcaactgcaa

SEQ ID NO: 675634 - DNA, 75 bp, synthetic construct
  source 1..75: mol_type = other DNA
tacacatcaaggagcgcaaaaggaggatgaatcaacatataacaacatcttaaaaaaaggcctgacattgcgtca

SEQ ID NO: 675635 - DNA, 75 bp, synthetic construct
  source 1..75: mol_type = other DNA
tttaacaaagcgatgagccttactgttgtcgctgttgcgttgatattccgcacaaaatccatcgccgtcgaccag

SEQ ID NO: 675636 - DNA, 75 bp, synthetic construct
  source 1..75: mol_type = other DNA
acctttgaaggccgcgagcaactgagtaccccgttccgctacgacattcagtttaccagcagcgataaagccatc

SEQ ID NO: 675637 - DNA, 75 bp, synthetic construct
  source 1..75: mol_type = other DNA
aatagtagcatagacagttattctcttattcttaaagaaaactcacttctcagtcaggaagttaaaaattgggcg

SEQ ID NO: 675638 - DNA, 75 bp, synthetic construct
  source 1..75: mol_type = other DNA
cagtctcagcgacttctgtcagtctgcagttagtggatgagagcggacatcgtattccacgttacggaaagagat

SEQ ID NO: 675639 - DNA, 75 bp, synthetic construct
  source 1..75: mol_type = other DNA
atcagcaaatcgcttgagaaattaaaggttttaaaagaagggaaccggataaaacttattaacaacagtcccctg

SEQ ID NO: 675640 - DNA, 75 bp, synthetic construct
  source 1..75: mol_type = other DNA
tgaagggtattgccgatgaacggcggcggcgcggcgaaacggaagtcaatcttcgcgtagggatccgtactggcg

SEQ ID NO: 675641 - DNA, 75 bp, synthetic construct
  source 1..75: mol_type = other DNA
taaatttctacataatgaaatcaaccttgttaaagaagcattgagcgcaagaccctcagaattcattgatgatac

SEQ ID NO: 675642 - DNA, 75 bp, synthetic construct
  source 1..75: mol_type = other DNA
aaaagaaatcaacttccaatttgcaatcacccatacacacaatgaaatcaaaatatcagacgccaaaagtgttga

SEQ ID NO: 675643 - DNA, 75 bp, synthetic construct
  source 1..75: mol_type = other DNA
tgctgaaagagcttggccatgtgacaaggctcgggatttataaaagactaatcaaagccggacctcagggcgtgg

SEQ ID NO: 675644 - DNA, 75 bp, synthetic construct
  source 1..75: mol_type = other DNA
cagtggtggtctgattatcttgatgcaaataatgacgggtatgtctcggcttaccagtatgcccgacggctgaaa

SEQ ID NO: 675645 - DNA, 75 bp, synthetic construct
  source 1..75: mol_type = other DNA
ttcgttatcgatagcgctgctgccactgccggtaaaattaccgctgtcgcagaatacaccctgagctacctctaa

SEQ ID NO: 675646 - DNA, 75 bp, synthetic construct
  source 1..75: mol_type = other DNA
tgagattcctgcctccacgctcagccatcatctttcagcgctgatatccgctggactcataagccaggaacggca

SEQ ID NO: 675647 - DNA, 75 bp, synthetic construct
  source 1..75: mol_type = other DNA
tatgcttccctggaaaacagacaggcaacagttcgattacgtaaaagcgaagtgaaccgccccgggaatcctgga

SEQ ID NO: 675648 - DNA, 75 bp, synthetic construct
  source 1..75: mol_type = other DNA
aagcgtgaggttgaactggtggcgctgagcggtgcccgtatcgtgcacggtttccgcggagatataatgggtgag

SEQ ID NO: 675649 - DNA, 75 bp, synthetic construct
  source 1..75: mol_type = other DNA
cgatgatttgatgactaacggtcagtattacgccttccagaagctgggtgagtattacaatatgggtaatacctt

SEQ ID NO: 675650 - DNA, 75 bp, synthetic construct
  source 1..75: mol_type = other DNA
tcaacggcgattgccatgcaggcgatgaatgaacgcaatctgatggtgacgcaaatgggccgcagtgcctttgcg

SEQ ID NO: 675651 - DNA, 75 bp, synthetic construct
  source 1..75: mol_type = other DNA
atgattgcaggtgattacggtgtcatatggcgaaatgatggagcaaatacttacttgctcatgactgataaaggc

SEQ ID NO: 675652 - DNA, 75 bp, synthetic construct
  source 1..75: mol_type = other DNA
gtagcttcgtcgaactctgctcaaactcacttaggtgcaacgaattctgctggcgcgcatacccactcagtatca

SEQ ID NO: 675653 - DNA, 75 bp, synthetic construct
  source 1..75: mol_type = other DNA
atacctgatgagccatatgccgtggctaccgtttttgctgatcctgctgcccgccaacatcatgacgatggtgat

SEQ ID NO: 675654 - DNA, 75 bp, synthetic construct
  source 1..75: mol_type = other DNA
aatatttccacaattaatgggttttctattttttgcacgcaaaacatcctgtggtctaattttcgctgggcaatg

SEQ ID NO: 675655 - DNA, 75 bp, synthetic construct
  source 1..75: mol_type = other DNA
aaagacgagtgacgacagagcggttatttctggcgatccccccagaaattggggagttaattatgaactataccg

SEQ ID NO: 675656 - DNA, 75 bp, synthetic construct
  source 1..75: mol_type = other DNA
tggtgttttacctttaccgcttttgcctgcctgacagggattttcccgaaaatggaagccttcaccgcagagtgg

SEQ ID NO: 675657 - DNA, 75 bp, synthetic construct
  source 1..75: mol_type = other DNA
aaaagtcgtagttctagttcatgagtctcccggtactttaccctttgataaatcagaagcagatcctgaattgcg

SEQ ID NO: 675658 - DNA, 75 bp, synthetic construct
  source 1..75: mol_type = other DNA
ggcaaaactttattccttatatctttagttttgtaatatattattttttaggtggaataaagaaagtacactttg

SEQ ID NO: 675659 - DNA, 75 bp, synthetic construct
  source 1..75: mol_type = other DNA
aatcagggaaaatacacagcaataggcgggctggtcagtaaaattgatattgagttttataacgatggaaccttc

SEQ ID NO: 675660 - DNA, 75 bp, synthetic construct
  source 1..75: mol_type = other DNA
gctcaatacattaccaagtgaattcgcagagggagaccataaacgccaatggattagtaattattctcaaaaaaa

SEQ ID NO: 675661 - DNA, 75 bp, synthetic construct
  source 1..75: mol_type = other DNA
caaaactacaccagcaagtactggatcttgtctattccgataagcccctcacatacgatgaaaaagaattcatcc

SEQ ID NO: 675662 - DNA, 75 bp, synthetic construct
  source 1..75: mol_type = other DNA
ggttcagcaggatttcagtacagtggagtacattgctacgaacgtcgggattctgcgaagtacaagaaattcgtg

SEQ ID NO: 675663 - DNA, 75 bp, synthetic construct
  source 1..75: mol_type = other DNA
gcaggattttactattcggcatggtgtttctgctgttatctggttgtgataataatcgggaagaattaaaactgg

SEQ ID NO: 675664 - DNA, 75 bp, synthetic construct
  source 1..75: mol_type = other DNA
attagaggaaaatgtaaatttagatccttcatctagcaaagatgaatttttcgagtctataggtattgaggatgc

SEQ ID NO: 675665 - DNA, 75 bp, synthetic construct
  source 1..75: mol_type = other DNA
ctggaaagacgttcgcaccgtcactctctgggtgaaggagacgctggagacgtttgattttgagcgagacaggct

SEQ ID NO: 675666 - DNA, 75 bp, synthetic construct
  source 1..75: mol_type = other DNA
tatcctgaggtttactatgtcccggtagctcccgctgtatatcgccataattctggcatgttgggagccacgatg

SEQ ID NO: 675667 - DNA, 75 bp, synthetic construct
  source 1..75: mol_type = other DNA
ttagtatctctgctagtaataccactaaagatccaggccttactaattctcagattatcaggatggttaacttgg

SEQ ID NO: 675668 - DNA, 75 bp, synthetic construct
  source 1..75: mol_type = other DNA
gggacgcacgaagtggcaaccatccagccgcatcagttccggtgaacgggccaaacgccaggcggtgaagcgcgg

SEQ ID NO: 675669 - DNA, 75 bp, synthetic construct
  source 1..75: mol_type = other DNA
actcaagatgataaagagttcatcttcaataactacaaaggcgatggtatcggtgcaactggtgctttctttact

SEQ ID NO: 675670 - DNA, 75 bp, synthetic construct
  source 1..75: mol_type = other DNA
tctgcggttacgatctacgactcgatggtgcgctggttggtattgaagccgcccatattcactggaaaacctatg

SEQ ID NO: 675671 - DNA, 75 bp, synthetic construct
  source 1..75: mol_type = other DNA
aattctgctcagaaagaactggcaggccacagtacgaaagatatttttttacgtgcggctaagggggatccggaa

SEQ ID NO: 675672 - DNA, 75 bp, synthetic construct
  source 1..75: mol_type = other DNA
atgtacagcgcaaaaggcacccaggcctacgcacaaattggcgtcgaaagcgccgtaatgagtgccagccaacag

SEQ ID NO: 675673 - DNA, 75 bp, synthetic construct
  source 1..75: mol_type = other DNA
catgctgccgtatatccggggtgacgaggtatgggcggtgtgccgcgtttacctccagagcattgttgaagaaat

SEQ ID NO: 675674 - DNA, 75 bp, synthetic construct
  source 1..75: mol_type = other DNA
gtagggtggctgctgtccgaggttatggaatgggttaaaagccgggatcgcattaattcaggtaaggcagtgtaa

SEQ ID NO: 675675 - DNA, 75 bp, synthetic construct
  source 1..75: mol_type = other DNA
ttgatcgcaaactttgcagaagatacgcataaagatcaaaaacttactattttagcaagtagtataaaatcatca

SEQ ID NO: 675676 - DNA, 75 bp, synthetic construct
  source 1..75: mol_type = other DNA
gtacgccggtgaccatcgacgttttcgccaacgataaattcagcaacggcgataaagcgattaccggcaagacca

SEQ ID NO: 675677 - DNA, 75 bp, synthetic construct
  source 1..75: mol_type = other DNA
gcgacgtggattccaccgataaccacctcagctttatcgttgacgacagcaagctcacccacggttacctgacgc

SEQ ID NO: 675678 - DNA, 75 bp, synthetic construct
  source 1..75: mol_type = other DNA
cgaagccactctataaacagcttgaagcctccctcaaagaggctattttgtgtggcgaatatcaacctggacagc

SEQ ID NO: 675679 - DNA, 75 bp, synthetic construct
  source 1..75: mol_type = other DNA
taatgtctctgataacgcattatcatgatgtcacattaatggctataaatatttcatcgataatagcaggtgcga

SEQ ID NO: 675680 - DNA, 75 bp, synthetic construct
  source 1..75: mol_type = other DNA
aagcattaattatattgcttgaagcatttttagggaaacgcaaaggtcaggaggaagcacataataaattcttaa

SEQ ID NO: 675681 - DNA, 75 bp, synthetic construct
  source 1..75: mol_type = other DNA
gcattctcatatatctgttgtttttagtaagtctcacataaaattattacacagaataaaaacaaactcgttaat

SEQ ID NO: 675682 - DNA, 75 bp, synthetic construct
  source 1..75: mol_type = other DNA
tcaaagacttagtgactatttacaaggccgctacatttgcaggtaccctatctgaagcatcactcattctttcaa

SEQ ID NO: 675683 - DNA, 75 bp, synthetic construct
  source 1..75: mol_type = other DNA
ctggaacatagcgatgtcgtggtgctgtggagtgctaatccactcaatacgctgaaaattgcgtggaatgcatcc

SEQ ID NO: 675684 - DNA, 75 bp, synthetic construct
  source 1..75: mol_type = other DNA
ctcgcggcgatgcgcctgcttattgcgctggtttccggtacgcgtgaaagcgtactgcagccgatggattttctc

SEQ ID NO: 675685 - DNA, 75 bp, synthetic construct
  source 1..75: mol_type = other DNA
gctgaccatcaacgccgacggcagctatacctttgttccggtcgccgactggaacggcagcgtgccgcaggtcac

SEQ ID NO: 675686 - DNA, 75 bp, synthetic construct
  source 1..75: mol_type = other DNA
tctcggattttaatcgtttgcgttttgaattaattggccattatcagaatagctgtgaaatctcaaccagcaata

SEQ ID NO: 675687 - DNA, 75 bp, synthetic construct
  source 1..75: mol_type = other DNA
atcagaaacggttgtggttatgcctgaaaatcctggtacaacgcaagttgaaacattattaaatacccttggact

SEQ ID NO: 675688 - DNA, 75 bp, synthetic construct
  source 1..75: mol_type = other DNA
agctattgtcgcttcgtggtttggtgcgcaatctggctggcgtggtcaccgatttccggttttctataaccagtt

SEQ ID NO: 675689 - DNA, 75 bp, synthetic construct
  source 1..75: mol_type = other DNA
tgcccgggcgctggatgcttttattgaagggatgagtctgcattttgtcaccgaccgtaagccgctatcgcatga

SEQ ID NO: 675690 - DNA, 75 bp, synthetic construct
  source 1..75: mol_type = other DNA
ggagattttgaggatggtggagcgagtggcagggctggagataaatttcaggcaacaaaaaacccatcaaccttg

SEQ ID NO: 675691 - DNA, 75 bp, synthetic construct
  source 1..75: mol_type = other DNA
ttttaaactcccatttacacaaatcgcaccagcgccaggaaacatagtcctgaatggagttaacccacaggggca

SEQ ID NO: 675692 - DNA, 75 bp, synthetic construct
  source 1..75: mol_type = other DNA
ttcgctaaatctgccgccagatctctacctgatgcgtagtaccggtattgatatggatattaattaccgctacac

SEQ ID NO: 675693 - DNA, 75 bp, synthetic construct
  source 1..75: mol_type = other DNA
gaaatatcagcaagactctggtcacagcactgtgctggcgatgtttcggatacaaggcactgatagtcagaggtg

SEQ ID NO: 675694 - DNA, 75 bp, synthetic construct
  source 1..75: mol_type = other DNA
gtcaccgacggcgcgcacggtacggttagcatcagcaacggccaggtggtttacaccccgaccagcggctacgtc

SEQ ID NO: 675695 - DNA, 75 bp, synthetic construct
  source 1..75: mol_type = other DNA
ggcaaaagtttcagtcacagcgaagtgcgcaatgcagctatccttgggttggcttatgtaacgggtgcacgccca

SEQ ID NO: 675696 - DNA, 75 bp, synthetic construct
  source 1..75: mol_type = other DNA
gctccgattatttatcgaaaaagaggatattgataatgctactttttattccgtgttattcggattaaaaatact

SEQ ID NO: 675697 - DNA, 75 bp, synthetic construct
  source 1..75: mol_type = other DNA
ttataaccctgaccgtgggcgagactatgaagattcgcgcgacgacggctggcagcgtgaagtgagcgacgatcg

SEQ ID NO: 675698 - DNA, 75 bp, synthetic construct
  source 1..75: mol_type = other DNA
ttgtacaatgccgcatatatggaatttcttcttttctaagagatttaagaaattagacatatcctatttgctcac

SEQ ID NO: 675699 - DNA, 75 bp, synthetic construct
  source 1..75: mol_type = other DNA
ctgattcaggcagaaaaggccgcagagaaagcacaggaagccagaacaaaggtcatgaacctgatacaggcagag

SEQ ID NO: 675700 - DNA, 75 bp, synthetic construct
  source 1..75: mol_type = other DNA
ccgtgcaaggccattctatggctgtttacgatgcatatggtacgcagcagttctattttccgaatgtgcttaagt

SEQ ID NO: 675701 - DNA, 75 bp, synthetic construct
  source 1..75: mol_type = other DNA
ccgggatgctgcaaaaaactggaagcggcctggcaacaacagcagaccagcagtacgcctgccgcgacggtaacg

SEQ ID NO: 675702 - DNA, 75 bp, synthetic construct
  source 1..75: mol_type = other DNA
cccagagcatcagaagctgaaagaggtaagcgagggtatagcttcgctgttccgcctcatgccggagcaggtagg

SEQ ID NO: 675703 - DNA, 75 bp, synthetic construct
  source 1..75: mol_type = other DNA
tgacactggtcgtgaaacgtcattctataccctgatgccgcaacagagcatgcatattaagactacgtcaagttc

SEQ ID NO: 675704 - DNA, 75 bp, synthetic construct
  source 1..75: mol_type = other DNA
gctgatagagcacgttggcattatggcattattgcgcagcaggtgcgggatgcatttattgccgccgggattgat

SEQ ID NO: 675705 - DNA, 75 bp, synthetic construct
  source 1..75: mol_type = other DNA
atgctaagaaaactgttttgcatctatgctctggcaatgggaataacgttactgccagcgacagctgctacaccg

SEQ ID NO: 675706 - DNA, 75 bp, synthetic construct
  source 1..75: mol_type = other DNA
tacccacaatgcccgttcccgcgcttaatcaccggcacatcgccggtgtcattgagcgcgccggggaaggtgtta

SEQ ID NO: 675707 - DNA, 75 bp, synthetic construct
  source 1..75: mol_type = other DNA
agatattgccaccatcgccgatacctatcatgcgctggcgcagcacgccagaagaactggctgcacggattgcgc

SEQ ID NO: 675708 - DNA, 75 bp, synthetic construct
  source 1..75: mol_type = other DNA
cgctgaaaaatgaaataaaaaatgatgccatcaaaattaaaggtggagatggtaagacgctgacgaagagtcttg

SEQ ID NO: 675709 - DNA, 75 bp, synthetic construct
  source 1..75: mol_type = other DNA
atgaccgacactggctgatggttgcgaaccaggtcaggcagcgccgacagggcaacaacagccacatcgactggc

SEQ ID NO: 675710 - DNA, 75 bp, synthetic construct
  source 1..75: mol_type = other DNA
atatttactatgttggtcatttgccatggcatgagcggttgcagtataccctggcgaatcatcctgttttactgg

SEQ ID NO: 675711 - DNA, 75 bp, synthetic construct
  source 1..75: mol_type = other DNA
gtaagcgagggcatagcgtcattgtttcgcctcatgccggagcaggtaggaccgctgatgacgatggttacatcg

SEQ ID NO: 675712 - DNA, 75 bp, synthetic construct
  source 1..75: mol_type = other DNA
ctggtttggtcaggatacgctgatgccgctatgggagacacagggtagttttgatatagggcaccaatcactggg

SEQ ID NO: 675713 - DNA, 75 bp, synthetic construct
  source 1..75: mol_type = other DNA
tggttaaccaccctcagccataccagtgaaggccaccgcgtgtcggtccactacggctatgacgataaaggccgc

SEQ ID NO: 675714 - DNA, 75 bp, synthetic construct
  source 1..75: mol_type = other DNA
gtgagcaccctctgcatcagccagttccgctacagcgcacaaatccgtccttcctccgtggtgaccaaagactac

SEQ ID NO: 675715 - DNA, 75 bp, synthetic construct
  source 1..75: mol_type = other DNA
ctggtggagagctcgccgggacgtgacatctgcgacagcaaatggcgacgtaagtcgcctcatgaagcgccaccg

SEQ ID NO: 675716 - DNA, 75 bp, synthetic construct
  source 1..75: mol_type = other DNA
atgaacattgattacgtggtggaggactacgccgccggttgtctggtggaaaaaattaaggtcggtgatttctcc

SEQ ID NO: 675717 - DNA, 75 bp, synthetic construct
  source 1..75: mol_type = other DNA
cgctgttcagcgagccgcatccttcccgtgagttttgtgtccagtacggtgagactgattacgatttactgtgcc

SEQ ID NO: 675718 - DNA, 75 bp, synthetic construct
  source 1..75: mol_type = other DNA
ggcgacagattgcctgatgagcgtctcaccacttctgttgactgcgactacagtgctcggaaagatgatattgcg

SEQ ID NO: 675719 - DNA, 75 bp, synthetic construct
  source 1..75: mol_type = other DNA
tcgcaatatttatttttatctatagatacaaaaaaaacaaaccacaaatcgatgcttttattgctaaagaaaaag

SEQ ID NO: 675720 - DNA, 75 bp, synthetic construct
  source 1..75: mol_type = other DNA
ctagttatcttatccttgctggggagtgctgcgatatacttatatctgaataagaaactctggctaacgaataat

SEQ ID NO: 675721 - DNA, 75 bp, synthetic construct
  source 1..75: mol_type = other DNA
attatagcctcctgaaatggtcaaatgatcatgttattaaccaatctgttgcaataattccagcacttccgaaag

SEQ ID NO: 675722 - DNA, 75 bp, synthetic construct
  source 1..75: mol_type = other DNA
gtgaagaaatttattcgggaactaccggaaattactttcagcggaaaaatcgctctcgagcgagggctggatgtt

SEQ ID NO: 675723 - DNA, 75 bp, synthetic construct
  source 1..75: mol_type = other DNA
caagcaagccctgttactgatagagtccaagctaccggcaacaccagaacctgtcacgcagccgatggtgaaaaa

SEQ ID NO: 675724 - DNA, 75 bp, synthetic construct
  source 1..75: mol_type = other DNA
ctcctgaaaatacaccagaagaaattgaacgactacagcaattcaaagaaaagttattatcttttggtcacgaat

SEQ ID NO: 675725 - DNA, 75 bp, synthetic construct
  source 1..75: mol_type = other DNA
gtgccggaactgaacgacagtatcagcgcgacaccgaaagccagcatgaagaataaatcctggttcaggatgcaa

SEQ ID NO: 675726 - DNA, 75 bp, synthetic construct
  source 1..75: mol_type = other DNA
taaggtcagggccggggcggaatataagtacgtcaccctgaaggaccgcggagagccgattgcgctggcgaccta

SEQ ID NO: 675727 - DNA, 75 bp, synthetic construct
  source 1..75: mol_type = other DNA
gtgattggtggttgggggatctctgctcagcaatttgtctccgactgtaaagcggcgggcgtctttgaggctggt

SEQ ID NO: 675728 - DNA, 75 bp, synthetic construct
  source 1..75: mol_type = other DNA
cgacgagatcgaccagatattgcagccaggtattactacaaagcgttttgtggagtcctggctattttgccagta

SEQ ID NO: 675729 - DNA, 75 bp, synthetic construct
  source 1..75: mol_type = other DNA
attaatgagctagtaaactcatttcctgataacattgaactaatctctgagttcgagagtcaatgtaaaattatg

SEQ ID NO: 675730 - DNA, 75 bp, synthetic construct
  source 1..75: mol_type = other DNA
cagcagcagcgatttttctcatattctggctggtggcgctgaaaaatcagtactgaaaggctggcaggacagcgg

SEQ ID NO: 675731 - DNA, 75 bp, synthetic construct
  source 1..75: mol_type = other DNA
tgcttgcactcctgataggctgtgcggttattcctgccacccatgcctattctgtgaccgtagtggccagccagc

SEQ ID NO: 675732 - DNA, 75 bp, synthetic construct
  source 1..75: mol_type = other DNA
tggcacgcgccggatatgccgaagcagaaaaagataatgcttataacggttttacactgcgcgagctggcgcgtg

SEQ ID NO: 675733 - DNA, 75 bp, synthetic construct
  source 1..75: mol_type = other DNA
ctggtctgggccgtgttgaccagtaatccgaaaatgtcggatggcaaaccgctgttccatgcagatcatggcaac

SEQ ID NO: 675734 - DNA, 75 bp, synthetic construct
  source 1..75: mol_type = other DNA
ggtgcgtgaaggggcggaatataaatacgtcaccaccggagataaacaggccactattgcactggcgacctatgg

SEQ ID NO: 675735 - DNA, 75 bp, synthetic construct
  source 1..75: mol_type = other DNA
tgatgcggctggccgggttatttccggcgtgaaagacggggtgaatgaccaggacgccgttaacgtttcacaact

SEQ ID NO: 675736 - DNA, 75 bp, synthetic construct
  source 1..75: mol_type = other DNA
aaaagtattgaaatagggacgacgcaatttacagcaaaagatgaattaaaagggattaattttgaccatgggtct

SEQ ID NO: 675737 - DNA, 75 bp, synthetic construct
  source 1..75: mol_type = other DNA
cgctgaaagcggagaacattattggtgatctggtgaaatgtgcaggggtggcttttccggtggatggtagttacc

SEQ ID NO: 675738 - DNA, 75 bp, synthetic construct
  source 1..75: mol_type = other DNA
tgagtccgcatactatacgccacacaacagccactcatctgcttcgagcaggtgtggacattaatactatcagag

SEQ ID NO: 675739 - DNA, 75 bp, synthetic construct
  source 1..75: mol_type = other DNA
gacgcgccgtgatgatgcgcaacgctaaaactggcgccgcctggaaggtttcacgtgactacctgaaagaaacct

SEQ ID NO: 675740 - DNA, 72 bp, synthetic construct
  source 1..72: mol_type = other DNA
atgccactgctggataagctgcgtgagcagtacggggtcggaccggtatgcagcgaactgcatattgccccg

SEQ ID NO: 675741 - DNA, 75 bp, synthetic construct
  source 1..75: mol_type = other DNA
tcgaagatgagattttttattggcaatgttgtgttgttcccacaccagaaaaccttgaccctaaaaatgtcaaca

SEQ ID NO: 675742 - DNA, 75 bp, synthetic construct
  source 1..75: mol_type = other DNA
atattagttaatagttttatcgaaccagttattggtactaaaaactctgaaattatgatggacattcatgatttc

SEQ ID NO: 675743 - DNA, 75 bp, synthetic construct
  source 1..75: mol_type = other DNA
ccatgacgttaacgacagttgtacaaagagttacctatccattattaagtaatgtgaataatgctaagggaaata

SEQ ID NO: 675744 - DNA, 75 bp, synthetic construct
  source 1..75: mol_type = other DNA
gttaagccatccgatatcccgaccctgaaagactacaccgcccgcctggtggatcagaaatggctgcgactcgcg

SEQ ID NO: 675745 - DNA, 75 bp, synthetic construct
  source 1..75: mol_type = other DNA
tatggagggaaccaggctgcgctggaagcaactggcggaatactggctagccttatacttccagggaagaaaatt

SEQ ID NO: 675746 - DNA, 75 bp, synthetic construct
  source 1..75: mol_type = other DNA
ggtggtgattaactccgaagcattgaaaacctttgcggcgagcgtagaaggtggcaagcgcctgagtattccggt

SEQ ID NO: 675747 - DNA, 75 bp, synthetic construct
  source 1..75: mol_type = other DNA
aacttatggtgcccacttttacgatgtaacgctggaaagtttcaacgaaaatctttcgttgcatcttggaagttc

SEQ ID NO: 675748 - DNA, 75 bp, synthetic construct
  source 1..75: mol_type = other DNA
gagcttgagccacagactaagccaggcacagttcgttctggagcttctcaggtctggcgctttgtgaatgaaatg

SEQ ID NO: 675749 - DNA, 75 bp, synthetic construct
  source 1..75: mol_type = other DNA
gcaggcggatgacggaagcaaggtgaacacgtctctcgggaagcatatcacggttggtggtgacgggcagaatat

SEQ ID NO: 675750 - DNA, 75 bp, synthetic construct
  source 1..75: mol_type = other DNA
cggttctcagactcagtctaaaactcttgagatcgacttcaagggagagaccgttagtaaatggactttctcctc

SEQ ID NO: 675751 - DNA, 75 bp, synthetic construct
  source 1..75: mol_type = other DNA
ctggaaatcgaatttaaaggcgaaacggtcagtaagtggacgttctctgaaaacaacagcaagatgaaaaccggc

SEQ ID NO: 675752 - DNA, 75 bp, synthetic construct
  source 1..75: mol_type = other DNA
ttactgtactgaatacagaagatattcatttcttttctgattcatctgagaagaaaacaggtcgattttatttaa

SEQ ID NO: 675753 - DNA, 75 bp, synthetic construct
  source 1..75: mol_type = other DNA
ggaatggcaaaataacttattctgtttccggtgagtctgagttcgctaaaaaattccagggggaagctttgcctt

SEQ ID NO: 675754 - DNA, 75 bp, synthetic construct
  source 1..75: mol_type = other DNA
tatggccgggacggcgaattgtgctgacggggcatccgcaggcgaacctgaaccgggaatggcaggtggtggcga

SEQ ID NO: 675755 - DNA, 75 bp, synthetic construct
  source 1..75: mol_type = other DNA
tggacttcctcaacggcgatccggaccagccgatcattttggggcgcacctaccaccaggaaaaccgcacacccg

SEQ ID NO: 675756 - DNA, 75 bp, synthetic construct
  source 1..75: mol_type = other DNA
cagcgagcaaggcgatggtgtggaccattatcgttcatcagggatcgttgcgtcgctggaggcggggtatcagtg

SEQ ID NO: 675757 - DNA, 75 bp, synthetic construct
  source 1..75: mol_type = other DNA
aagtcccttttcttaaagatattgagtttgcgtgtggtactgggaaagtgattagcgaagatcataatggattaa

SEQ ID NO: 675758 - DNA, 75 bp, synthetic construct
  source 1..75: mol_type = other DNA
atgtcaaccggattacgtttcacactggaagtggacggcctgccaccggatgcttttgcggtggtttcctttcat

SEQ ID NO: 675759 - DNA, 75 bp, synthetic construct
  source 1..75: mol_type = other DNA
gcatcttttccggcggttcttatggtgcctcggcccagacggcaacggctgttgtcaacatgcaaaataccgata

SEQ ID NO: 675760 - DNA, 75 bp, synthetic construct
  source 1..75: mol_type = other DNA
ctggtttagttttagcgtttagcgcatcggcggcgcagtatgaagatggtaaacagtacactaccctggaaaaac

SEQ ID NO: 675761 - DNA, 75 bp, synthetic construct
  source 1..75: mol_type = other DNA
caggtattaaaggtgaagagtacgacgcggcgtggaacagcttcgtggtgaaatctctggtcgctcagcaggaaa

SEQ ID NO: 675762 - DNA, 75 bp, synthetic construct
  source 1..75: mol_type = other DNA
tcaaaagggcttttggataactacctattacagtttataggcggtactcgagatcgaaatctttggggggaatct

SEQ ID NO: 675763 - DNA, 75 bp, synthetic construct
  source 1..75: mol_type = other DNA
atgattgcggttaccaacaatcagatacagacggtgggtgttaaccagatagagacggtgggcagtaaccagatc

SEQ ID NO: 675764 - DNA, 75 bp, synthetic construct
  source 1..75: mol_type = other DNA
cgtctggattccgcagtcaccaacctgaacaacaccactaccaacctgtccgaagcgcagtcccgtattcaggac

SEQ ID NO: 675765 - DNA, 75 bp, synthetic construct
  source 1..75: mol_type = other DNA
gtggagcaaggacttttaccagaaggggaaaagattacctccgttgatgttgaagactggacaccggagcgtcga

SEQ ID NO: 675766 - DNA, 75 bp, synthetic construct
  source 1..75: mol_type = other DNA
gcgataccgcgtgtgggtcaggaggtgattgtggacttcctcaacggcgatccggaccagccgattattatgggg

SEQ ID NO: 675767 - DNA, 75 bp, synthetic construct
  source 1..75: mol_type = other DNA
cgcttgcatccgtacatgaaatgatggagtcacttcaggatattggcgcagtaacaaaacaaactatgagagagt

SEQ ID NO: 675768 - DNA, 75 bp, synthetic construct
  source 1..75: mol_type = other DNA
gccagaacttccgtatcttccagaacgaggacatcaaaagcatcctcggcacgatgttgcaggaaaacggggtga

SEQ ID NO: 675769 - DNA, 75 bp, synthetic construct
  source 1..75: mol_type = other DNA
ttaaccgcatcgcggaagatgcgcactatgtctaccgccacgatgaatacggcaggctggcggagaagacggacc

SEQ ID NO: 675770 - DNA, 75 bp, synthetic construct
  source 1..75: mol_type = other DNA
ggggagcttcacgccgctcctgagaatcgaaacagagaatggcgaacaggcgaaggcgcggcaccggagcctggc

SEQ ID NO: 675771 - DNA, 75 bp, synthetic construct
  source 1..75: mol_type = other DNA
caccgatccggacgtggggtgatacggttgcggagtgcgtgattaataaattatgtccgtcgcatactgttgtcc

SEQ ID NO: 675772 - DNA, 75 bp, synthetic construct
  source 1..75: mol_type = other DNA
taggacggaaattacgttgcgagtacaatatattaagagggtttatatatgattataaaatatacaacaacgctt

SEQ ID NO: 675773 - DNA, 75 bp, synthetic construct
  source 1..75: mol_type = other DNA
aacgtgagcgcgaacaactggttccttatccgcgtttttttttgccagtctggcaggctttgttacggcaggtgt

SEQ ID NO: 675774 - DNA, 75 bp, synthetic construct
  source 1..75: mol_type = other DNA
gaggcgattgagctgctggagcagggcgataagcaggcgtttattgacagtttccgcaaggtggagcactggttc

SEQ ID NO: 675775 - DNA, 75 bp, synthetic construct
  source 1..75: mol_type = other DNA
taaccatttcgcagtaataccggcagacagaacatggcgaccacagccgctgcttaaaccgctggtggatggccc

SEQ ID NO: 675776 - DNA, 75 bp, synthetic construct
  source 1..75: mol_type = other DNA
cggtaagaagattatcgttaacaatctggtgaagcatgacagatggggctacagcctgaactggggctggcggcg

SEQ ID NO: 675777 - DNA, 75 bp, synthetic construct
  source 1..75: mol_type = other DNA
atgcaaacagaagctgaagtcttaaccgatcataacgaactaatttgctcgaccagtattgagcgcatcgtcaca

SEQ ID NO: 675778 - DNA, 75 bp, synthetic construct
  source 1..75: mol_type = other DNA
gaccttgagcgtatgctggtgctactggatggaaagccagtgcccgataaccgcgctgacgttacccgtcgtctc

SEQ ID NO: 675779 - DNA, 75 bp, synthetic construct
  source 1..75: mol_type = other DNA
gtacgtccggtcagactggaggatgggcaatcggtattagccgtacagctttatgatgtgatcagcggtggtgca

SEQ ID NO: 675780 - DNA, 75 bp, synthetic construct
  source 1..75: mol_type = other DNA
taataacgataaaacacatccatcaggctttacagtcattaataatacttcatttataaataacactgccgaagg

SEQ ID NO: 675781 - DNA, 75 bp, synthetic construct
  source 1..75: mol_type = other DNA
ctgaccttctccctgggagctggtacggcaaaagaatggggaatgcagcaatatcgctatgactgtttgctaatg

SEQ ID NO: 675782 - DNA, 75 bp, synthetic construct
  source 1..75: mol_type = other DNA
tccctgtaaatttggcagtaaaattatcgtcaacaatctggtgagatggggccggtggggatttcatcttatcac

SEQ ID NO: 675783 - DNA, 75 bp, synthetic construct
  source 1..75: mol_type = other DNA
atggttgattgtcttttggctgggttttagctggactacatccattattattgccggaatattaacgggtgtatt

SEQ ID NO: 675784 - DNA, 75 bp, synthetic construct
  source 1..75: mol_type = other DNA
gcattttctcttgcagaaaatgaaaatttgattggaaaacctttcagtgtctggtttgaagggcgtttggaggaa

SEQ ID NO: 675785 - DNA, 75 bp, synthetic construct
  source 1..75: mol_type = other DNA
gtttaccatcaggtacttccggaaggggactgcgcatatctcgtttaagcggcctgaactggtcgataaactgaa

SEQ ID NO: 675786 - DNA, 75 bp, synthetic construct
  source 1..75: mol_type = other DNA
gagatccgttttgatattgcggctggtaaaactttgatcattggcagtacgaaaaatgatggggctatcgattcc

SEQ ID NO: 675787 - DNA, 75 bp, synthetic construct
  source 1..75: mol_type = other DNA
gactggtgcggatcaggatattcagtctattgatgcgacttccagcggcactatcgatatcagcgatggcaccgt

SEQ ID NO: 675788 - DNA, 75 bp, synthetic construct
  source 1..75: mol_type = other DNA
cacgcgaattaccggcgttcactataccgatcgctatctgcaaaacccggttgcgctggcgttgttgggatcaat

SEQ ID NO: 675789 - DNA, 75 bp, synthetic construct
  source 1..75: mol_type = other DNA
taaaatttactggcaccaggcatggtgatcagcgtatggcaatcagagtcaattattgcgttgatgatgagtttg

SEQ ID NO: 675790 - DNA, 75 bp, synthetic construct
  source 1..75: mol_type = other DNA
tatgctatcaaaatttgagctgtatttttcaaataattatagagttaatcctgatgtttatttgatacacctatt

SEQ ID NO: 675791 - DNA, 75 bp, synthetic construct
  source 1..75: mol_type = other DNA
gcggcggctcgcactccggcaacgtggcggccagtgaactggcgcagcttggcctgctggatatcctctcttccg

SEQ ID NO: 675792 - DNA, 75 bp, synthetic construct
  source 1..75: mol_type = other DNA
gcaccactgatgtgataaacaaccatgccgaaaaaataggtaacaaccaggcgatcaccgttaccaataaccaga

SEQ ID NO: 675793 - DNA, 75 bp, synthetic construct
  source 1..75: mol_type = other DNA
tgccagaaagatatagcagagaagatacaaaaacagggaggtgattatttattcgcggtgaaaggaaaccagggg

SEQ ID NO: 675794 - DNA, 75 bp, synthetic construct
  source 1..75: mol_type = other DNA
aacacccgtaccgaggtgagtaccctctgcatcagccagttccgctacagcgcacaaatccgcccttcttccgtg

SEQ ID NO: 675795 - DNA, 75 bp, synthetic construct
  source 1..75: mol_type = other DNA
tgcgacacttgttccgcagtattttgttgccatacatctcggtgccgaattacccgcttttgctggcagcctggt

SEQ ID NO: 675796 - DNA, 75 bp, synthetic construct
  source 1..75: mol_type = other DNA
ttatatggggcagtctaataatacaaccattaacgggggcagacagtcaattcatgacggagggatttccacagg

SEQ ID NO: 675797 - DNA, 75 bp, synthetic construct
  source 1..75: mol_type = other DNA
atacgctatttaaagataaagatcgccccggtaaccggcctttccatgactggatgagcatagcggattttcagg

SEQ ID NO: 675798 - DNA, 75 bp, synthetic construct
  source 1..75: mol_type = other DNA
cttggcagcgtgatcgccgaatttcccaccacgttcgaagcggcggaagcctcgcgcaagcatggcatgaacgtg

SEQ ID NO: 675799 - DNA, 75 bp, synthetic construct
  source 1..75: mol_type = other DNA
acaagcagaagaacggcgtctctttgaggaaaagaacaataccttcgaaaagatcgccagtagctggtttcaaat

SEQ ID NO: 675800 - DNA, 75 bp, synthetic construct
  source 1..75: mol_type = other DNA
gcaaaggtgaagtagacccagagtggcgtattgaagccagccatacccgtgaaatggcaccacgttcggcaaagg

SEQ ID NO: 675801 - DNA, 75 bp, synthetic construct
  source 1..75: mol_type = other DNA
gctttgtcgattgggatttaatccttaagattagtagcgaatttaccattatctctgtgccagttcttctctcta

SEQ ID NO: 675802 - DNA, 75 bp, synthetic construct
  source 1..75: mol_type = other DNA
gtcagacggtgtcaaaactggaagatgagttgcaggtaaagctgttaaaccgtagcactgaaccgccccggtttt

SEQ ID NO: 675803 - DNA, 75 bp, synthetic construct
  source 1..75: mol_type = other DNA
gccgctgcctgatgtgtggataccatttaacgattcgctggatatgattacgggcttttcgccatcatataaaaa

SEQ ID NO: 675804 - DNA, 75 bp, synthetic construct
  source 1..75: mol_type = other DNA
ggttatcattcctcatgattactcttctcatcaaagcaatggtgtgagaatcagtgatatcatgctatgggcatc

SEQ ID NO: 675805 - DNA, 75 bp, synthetic construct
  source 1..75: mol_type = other DNA
gcattgcaaaacatatttccgtgcaggcaatctggccggatagcaggacagaaattattgccgtccttccacggg

SEQ ID NO: 675806 - DNA, 75 bp, synthetic construct
  source 1..75: mol_type = other DNA
gaaatcaatatcgttcgtggtcagccagtatctggtggacgtctgggggtgaagatttaccccataatgcattaa

SEQ ID NO: 675807 - DNA, 75 bp, synthetic construct
  source 1..75: mol_type = other DNA
gacgagctgggtggaggattgcgcggcatggtgtgctggtggttggcgtattgggcgccctcaactgcgtggatt

SEQ ID NO: 675808 - DNA, 75 bp, synthetic construct
  source 1..75: mol_type = other DNA
gtaatagatattgatttgaacaaaattttaaaaaatgaaaatgaaaatgaaaatgaaaatgaaaatacattcatc

SEQ ID NO: 675809 - DNA, 75 bp, synthetic construct
  source 1..75: mol_type = other DNA
cctggctcgtactgtggacattgttaatctgcaggtaccactctacccatcaacggagcatttttttaatcaaaa

SEQ ID NO: 675810 - DNA, 75 bp, synthetic construct
  source 1..75: mol_type = other DNA
gccagagagtacgcaagccaggctgcggagccgtataaatatgtcttacagccgctgcctgatgtgtggatacca

SEQ ID NO: 675811 - DNA, 75 bp, synthetic construct
  source 1..75: mol_type = other DNA
tttgttgatggtcgctacggccctatgcgtctagggcgttccccatttctggatgaactggaggcgcgaatgcga

SEQ ID NO: 675812 - DNA, 75 bp, synthetic construct
  source 1..75: mol_type = other DNA
caaacgacccgaaccgccagacaaccattgcgttccagctgtgcccggatggtttggtggatcaggctgtccatg

SEQ ID NO: 675813 - DNA, 75 bp, synthetic construct
  source 1..75: mol_type = other DNA
gacttggaaatcaactttttcagttctcatttgggtatgcgctttccaaaattaatgggacaccattatattttg

SEQ ID NO: 675814 - DNA, 75 bp, synthetic construct
  source 1..75: mol_type = other DNA
ctaggacctttatctcttacggttggtgctgtcagttcggcaactggcatgggagcaaatgctattggcgcaaca

SEQ ID NO: 675815 - DNA, 75 bp, synthetic construct
  source 1..75: mol_type = other DNA
gcgttgtgggcccgtcgtccgtctggctccatccatcacagcgataaaggcactcagtatgtgtcactggcctat

SEQ ID NO: 675816 - DNA, 75 bp, synthetic construct
  source 1..75: mol_type = other DNA
cagaaccatacgaatcgccctctgacggacttcgggggaaaaacgagtatttttagtcattctgtttacctcttt

SEQ ID NO: 675817 - DNA, 75 bp, synthetic construct
  source 1..75: mol_type = other DNA
cgtttggatgcagatagtgatcttctggttggatatgatttttacactgatgcttttgttgacacaaactggcgt

SEQ ID NO: 675818 - DNA, 75 bp, synthetic construct
  source 1..75: mol_type = other DNA
atcaaagctatggctacattcaggctggtgatacagttattgatacaacgtggtatgacggtgatgtattcactc

SEQ ID NO: 675819 - DNA, 75 bp, synthetic construct
  source 1..75: mol_type = other DNA
ccgggcactgtagacggtaactatgtgaattatagtggctttgtctactataacaacaccaatggcgacttcgat

SEQ ID NO: 675820 - DNA, 75 bp, synthetic construct
  source 1..75: mol_type = other DNA
caaaagtcagcccaaataaaacgctggccggattggtgggagggggagcaactactatgttgatagcagttattt

SEQ ID NO: 675821 - DNA, 75 bp, synthetic construct
  source 1..75: mol_type = other DNA
tgacaggtaaatcaaaagcgtatatacgcgatcagtttttacgctgtaccaataaaacaaatggaggttcacaat

SEQ ID NO: 675822 - DNA, 75 bp, synthetic construct
  source 1..75: mol_type = other DNA
ggcgtttgttcgttagagtattacaaaaaagctttaaataaaatacgcgatttggcaatgatacgtgacgtgttt

SEQ ID NO: 675823 - DNA, 75 bp, synthetic construct
  source 1..75: mol_type = other DNA
atgagcttgaaaaaatttattttcagccaggccgaccaaccggtggtcaaacggcaagaagaagttgatcatact

SEQ ID NO: 675824 - DNA, 75 bp, synthetic construct
  source 1..75: mol_type = other DNA
tgcttgttgtctttaaactgttcggtcgtacatggacgcttgaccttaaggataatgaccacgcagaaccccgtt

SEQ ID NO: 675825 - DNA, 75 bp, synthetic construct
  source 1..75: mol_type = other DNA
tcctcaaggaaaaagtttattagttgggggatatactcgaaatactaacacttatgagagtagaaaaatacctat

SEQ ID NO: 675826 - DNA, 75 bp, synthetic construct
  source 1..75: mol_type = other DNA
tagtgcaaccgcctgtatttttgcgactgaagtcgccatcaaggagagtgagcgttttaatggcattcccgcgct

SEQ ID NO: 675827 - DNA, 75 bp, synthetic construct
  source 1..75: mol_type = other DNA
atgaagatgattaagattttaggtttgattttatctatgaattcttgcttggcattggcaaccgtagaccaagaa

SEQ ID NO: 675828 - DNA, 75 bp, synthetic construct
  source 1..75: mol_type = other DNA
ttctttgactctgatacagtaagttgcatatcaaatatatcaatgctaagtcaaacactgaaagatcagctggat

SEQ ID NO: 675829 - DNA, 75 bp, synthetic construct
  source 1..75: mol_type = other DNA
agacgctggcggcgcttaatctgccgaaaccgcagcaagggccggaaaccattaatcaggttaccgagcataaga

SEQ ID NO: 675830 - DNA, 75 bp, synthetic construct
  source 1..75: mol_type = other DNA
caggtggcacaccggatgaaagttcagcgcggcccgttaccggaagaaagtggtgataacgacaacgtccgcgtg

SEQ ID NO: 675831 - DNA, 75 bp, synthetic construct
  source 1..75: mol_type = other DNA
attaccaccatgatcggtggcggtactggcccgacagcgggttctaacgccacaacctgtaccccaggaccatgg

SEQ ID NO: 675832 - DNA, 75 bp, synthetic construct
  source 1..75: mol_type = other DNA
ctatcccaatcggcgtatccacggaaattattgccgcagaaggcaggatcgttaccgcaggtggcgtcgatacgc

SEQ ID NO: 675833 - DNA, 75 bp, synthetic construct
  source 1..75: mol_type = other DNA
ataaacttgttactgcgaaaaacattgctgaagccataaaccagtctggctggaaaattaaagctgacagtgaaa

SEQ ID NO: 675834 - DNA, 75 bp, synthetic construct
  source 1..75: mol_type = other DNA
tttccggttactcaaagaatcagacagtcgctttctggctgttttctccaggatccttggacaatatgagcaagc

SEQ ID NO: 675835 - DNA, 75 bp, synthetic construct
  source 1..75: mol_type = other DNA
atgaagcagagcatcgtcaaatggctgttcgagctgaacgccaaacagcgtgaagtgctggcacgtcgattcggt

SEQ ID NO: 675836 - DNA, 75 bp, synthetic construct
  source 1..75: mol_type = other DNA
ggcctttagtttactgggatggccaagtattaaaatcaacgactgaaattaaaaattatgatgggtccacgcgtg

SEQ ID NO: 675837 - DNA, 75 bp, synthetic construct
  source 1..75: mol_type = other DNA
tcagatccccaagaagtggctcggctaacacatctgcatatcaaaaatctcggggctaacgctccagcatctcag

SEQ ID NO: 675838 - DNA, 75 bp, synthetic construct
  source 1..75: mol_type = other DNA
tatcgcgcggggtcgaaagaagccgcagaaacggtgctggatgaactggaagcgaaatgggatcagcagtatcca

SEQ ID NO: 675839 - DNA, 75 bp, synthetic construct
  source 1..75: mol_type = other DNA
ggaatgatagccatggcgccgatgggtgatatcaacggctctatccccacaccgcagccggtgcactatcgccca

SEQ ID NO: 675840 - DNA, 75 bp, synthetic construct
  source 1..75: mol_type = other DNA
ttggcgcatcgttaatggttgtcgatatggcttatcctctaatggtatatgctgttgtcctgatgggtgagtttt

SEQ ID NO: 675841 - DNA, 75 bp, synthetic construct
  source 1..75: mol_type = other DNA
atgaccaatatgaagttaaaatttgatttgcttctaaaatcttatcatctatctcatcgatttgtctataaggca

SEQ ID NO: 675842 - DNA, 75 bp, synthetic construct
  source 1..75: mol_type = other DNA
actgctgacagcgctgaccacgcgccttgcggatgatgagattcgggcgcgtatacagtcggcgacgacgcctga

SEQ ID NO: 675843 - DNA, 75 bp, synthetic construct
  source 1..75: mol_type = other DNA
ctcaggcatgccgagatgatttgcaatcacttcagtgctggtgaaaacggtcatttgttaatgcacggtattgat

SEQ ID NO: 675844 - DNA, 75 bp, synthetic construct
  source 1..75: mol_type = other DNA
cgcctgcggtcaggaagatgcgcatcgacagcaagacatcatggctatcagcttgtcgtcgtgcaggaattgaag

SEQ ID NO: 675845 - DNA, 75 bp, synthetic construct
  source 1..75: mol_type = other DNA
agctgggcaatcacagcattaaggatcgcgcaaagtttggcacgtcagaccttcaggcgccctatgagcatatca

SEQ ID NO: 675846 - DNA, 75 bp, synthetic construct
  source 1..75: mol_type = other DNA
atgttcggccctaccaccggtgataaaattcgtctggcagacactgagctgtggatcgaggtcgaagatgattta

SEQ ID NO: 675847 - DNA, 75 bp, synthetic construct
  source 1..75: mol_type = other DNA
gcattaacccacggtattgctcatgaagtcggctcgattgagtgggaaaactggcggatctggtgctctggtccc

SEQ ID NO: 675848 - DNA, 75 bp, synthetic construct
  source 1..75: mol_type = other DNA
tcgtgagaatgatggtcgtcaatctttgcatcatcagggagtcgccaccctgatagctctaacgaaagagcaagg

SEQ ID NO: 675849 - DNA, 75 bp, synthetic construct
  source 1..75: mol_type = other DNA
aaggggatgataagtttatcaccaccgactatttgcaacagtgccacagaaaattacctgaactgcgtcaactcg

SEQ ID NO: 675850 - DNA, 75 bp, synthetic construct
  source 1..75: mol_type = other DNA
gctctggacaggcccataacggttctgtttggtgagtctgccagcgggttcagcagcggagaggaagacaataaa

SEQ ID NO: 675851 - DNA, 75 bp, synthetic construct
  source 1..75: mol_type = other DNA
gaaaattcacttcattttggaatcaattgcttccaaatgctaataatttcatacgcatcattaacggcagtctca

SEQ ID NO: 675852 - DNA, 75 bp, synthetic construct
  source 1..75: mol_type = other DNA
cagcgggtggtggactggcctccgcattgaacgccagcatggcaggcggcagtaccgcagggggcatcggtggtg

SEQ ID NO: 675853 - DNA, 75 bp, synthetic construct
  source 1..75: mol_type = other DNA
tggtgtgctgctatctgacgaagaccatccctgatctgatcggcggcatgataagcggcacatcgacgggcggcg

SEQ ID NO: 675854 - DNA, 75 bp, synthetic construct
  source 1..75: mol_type = other DNA
gatgacatatatcggtgaagtcaaaaacatggttctttctgatgttaaaagtaaagaacaatatgattcaatcgt

SEQ ID NO: 675855 - DNA, 75 bp, synthetic construct
  source 1..75: mol_type = other DNA
ggggctggcagttcgttgatggtgtggtatcagcagtgccggttaactggaatgcagcagctgaaaatcaacgcg

SEQ ID NO: 675856 - DNA, 75 bp, synthetic construct
  source 1..75: mol_type = other DNA
tctgcgcttttcacaaaatgcgccactggatatgtataccgaagtcaatacgcaaaccaatctaccggcgcagat

SEQ ID NO: 675857 - DNA, 75 bp, synthetic construct
  source 1..75: mol_type = other DNA
tggcaagtggactggaaggtaaggctctttcgacattaacgaatgctgataaagagatgaaaaatgctgccagtg

SEQ ID NO: 675858 - DNA, 75 bp, synthetic construct
  source 1..75: mol_type = other DNA
tcagccgctatttgaggagttggtcgccgaatgccataaacaggagtctatggctgattccattctctcaaaagt

SEQ ID NO: 675859 - DNA, 75 bp, synthetic construct
  source 1..75: mol_type = other DNA
ggcgttatcagcaattcgtgtcgctgccatggcaaaggtaaggtgctggacaaggcagaaagcgatcgccagggc

SEQ ID NO: 675860 - DNA, 75 bp, synthetic construct
  source 1..75: mol_type = other DNA
aaacgccgggcgccgcgccgcagcatcctagcagcggagtgcagcaggcagccaagcaggccggaaaagcggcgc

SEQ ID NO: 675861 - DNA, 75 bp, synthetic construct
  source 1..75: mol_type = other DNA
gcggcggccaccatcgccacggttggcgccgcggctcctgctgctgccggtgcggcgggtgccggagggattggc

SEQ ID NO: 675862 - DNA, 75 bp, synthetic construct
  source 1..75: mol_type = other DNA
gagccgacgtgtcggagctggtagagatgctgcttgccacgccgaatatggaacaacgcactcagggcattggca

SEQ ID NO: 675863 - DNA, 75 bp, synthetic construct
  source 1..75: mol_type = other DNA
ccgtagctgcgaatcgtcataaggtctcgccggaacaggtgctgatctggtgtgaacaactgaagttcattgtag

SEQ ID NO: 675864 - DNA, 75 bp, synthetic construct
  source 1..75: mol_type = other DNA
tgccggtaccacgaagacacgtctgacttataccccggatggaaaatcaccggcagaagagctggcgaccatgaa

SEQ ID NO: 675865 - DNA, 75 bp, synthetic construct
  source 1..75: mol_type = other DNA
cccgcaacaagctgggttgctatatggcgaagcaggcgtcgcttaacaatatcccggtatctgcactggtatcgc

SEQ ID NO: 675866 - DNA, 75 bp, synthetic construct
  source 1..75: mol_type = other DNA
gaactcctgtgtggggtgatgcaggaaatgttcatcgtattgctgtgagtggtgcaggggcatttgtttcctatg

SEQ ID NO: 675867 - DNA, 75 bp, synthetic construct
  source 1..75: mol_type = other DNA
aaggacaaaaatggcgaagtgctgaatattgcgcctaaattccttttagttccggcagcactggaagatcgcgcg

SEQ ID NO: 675868 - DNA, 75 bp, synthetic construct
  source 1..75: mol_type = other DNA
atggcaatgacgagccttaccttgaacagcaggaaggttttatcgttgacggcgtggcctggaaagtccgtattg

SEQ ID NO: 675869 - DNA, 75 bp, synthetic construct
  source 1..75: mol_type = other DNA
gacaggcaatttcttacctggagatttattaggaaacctcttaatcttcccctgggctttcctttctgataatgc

SEQ ID NO: 675870 - DNA, 75 bp, synthetic construct
  source 1..75: mol_type = other DNA
acccgtctgtggctggagggctggattgccagtcaacaaggatggcgcattgatgtcctcgcccactcgctcaat

SEQ ID NO: 675871 - DNA, 75 bp, synthetic construct
  source 1..75: mol_type = other DNA
cgcccagacactcaccacacatctgtttattcctctgcgccgacggcttcagtgccaacaaccgactctccaggc

SEQ ID NO: 675872 - DNA, 75 bp, synthetic construct
  source 1..75: mol_type = other DNA
cgcgagatcaaacgctggatcgacaacggcgtgcaggttagcaaagttaagatgctgctaagtaatgataatgtt

SEQ ID NO: 675873 - DNA, 75 bp, synthetic construct
  source 1..75: mol_type = other DNA
ggtggcgctcatgccggatagctccggcatggccaatgaagtggtgatgctgcgcggccataacgtcgattacgg

SEQ ID NO: 675874 - DNA, 75 bp, synthetic construct
  source 1..75: mol_type = other DNA
tcaacatcgattggttcctgtaccgttcaaacattaatagaaataaccaaagaattacgctttgaagatggacgt

SEQ ID NO: 675875 - DNA, 75 bp, synthetic construct
  source 1..75: mol_type = other DNA
tggcggttactgttccggaaaatgactttagagcagatcatcgacgacaaatatggactatcacacgacattgct

SEQ ID NO: 675876 - DNA, 75 bp, synthetic construct
  source 1..75: mol_type = other DNA
cgtgcttaaggttctctgcgcttttgcataccaggattattcaagaagtgctgccagcactcgaaaatgtgattg

SEQ ID NO: 675877 - DNA, 75 bp, synthetic construct
  source 1..75: mol_type = other DNA
aaatcatacggtccggattctggaaagtagtgaagggatacgactaaaaccatcagacacacttgtctccgacag

SEQ ID NO: 675878 - DNA, 75 bp, synthetic construct
  source 1..75: mol_type = other DNA
tcatactccaaccgaccagttgcgtagccagaatgcaatcaaatctgacagtccgcttcgagcgagaagcggaag

SEQ ID NO: 675879 - DNA, 75 bp, synthetic construct
  source 1..75: mol_type = other DNA
gtttgatatcgatgacacggtactttttccagtccgggcttctggcgcggcaaaaaaaccttctcgccagaaagc

SEQ ID NO: 675880 - DNA, 75 bp, synthetic construct
  source 1..75: mol_type = other DNA
cagccgttttatcaaaggtgttttcagcctcgggagaggaagaaactaccgaaactgcgaccacaaaagcacagg

SEQ ID NO: 675881 - DNA, 75 bp, synthetic construct
  source 1..75: mol_type = other DNA
ttaagggggaaatccataatggtatccatacagaaaacatcacggttcaaaaccacagtaataataaagagcgtg

SEQ ID NO: 675882 - DNA, 75 bp, synthetic construct
  source 1..75: mol_type = other DNA
ctctttctttgcaaacaaatggaacagaacaattttctacaaagaaaattctcaatatgacttcacgagatcagg

SEQ ID NO: 675883 - DNA, 75 bp, synthetic construct
  source 1..75: mol_type = other DNA
cggcttcaaattactccatgaaaaacaatgtttatttcagcaattctactctgctgggtgatgttgttttcgcaa

SEQ ID NO: 675884 - DNA, 75 bp, synthetic construct
  source 1..75: mol_type = other DNA
actctcgataacggaagcaagtgggttggtcaggcaatttataacgttgctgaaacgtcagcaatgtatgatgtt

SEQ ID NO: 675885 - DNA, 75 bp, synthetic construct
  source 1..75: mol_type = other DNA
tgaaacgtcagcaatgtatgatgttgctacaaacagccttactgacctgcccccacgattagatacaacactcag

SEQ ID NO: 675886 - DNA, 75 bp, synthetic construct
  source 1..75: mol_type = other DNA
aacgatacaatttaagggggaaatccataatggtatccatacagaaaacatcacggttcaaaaccacagtaataa

SEQ ID NO: 675887 - DNA, 75 bp, synthetic construct
  source 1..75: mol_type = other DNA
gcaggaactggttcaattctttgaagccatgcgaatggcaaaaggctttagtcgtgagaacgagttaactctaaa

SEQ ID NO: 675888 - DNA, 75 bp, synthetic construct
  source 1..75: mol_type = other DNA
tgatgttacaggtaatagcctgtatccgggcgttgtaacagaagcaaatgcttggggtcgtacgattgatgatca

SEQ ID NO: 675889 - DNA, 75 bp, synthetic construct
  source 1..75: mol_type = other DNA
atttgtgcaattacagtctatatatacatatttttgcgagatgtatccccagcaaaaatagtaatatcctctatg

SEQ ID NO: 675890 - DNA, 75 bp, synthetic construct
  source 1..75: mol_type = other DNA
tcacagcccgtataaagacgtgcgtgactatattgaaaccgtgatccgctcctttgcccgccatgcgtcgaaaga

SEQ ID NO: 675891 - DNA, 75 bp, synthetic construct
  source 1..75: mol_type = other DNA
caatcagcaattgcagcaatcaacagaggtagtggtaagttatatatgagtctgtcaaacccttcaggcttgtat

SEQ ID NO: 675892 - DNA, 75 bp, synthetic construct
  source 1..75: mol_type = other DNA
tttgaagaagtgcaacgatcctggtacggactggatcgcattgtcagcgccgcagaaagtctgcgcgagtttcgc

SEQ ID NO: 675893 - DNA, 75 bp, synthetic construct
  source 1..75: mol_type = other DNA
ctttacctctcgaaaatcggcattagcagcccagatatagcactggagagactctatgagcaggcacgtaagtta

SEQ ID NO: 675894 - DNA, 75 bp, synthetic construct
  source 1..75: mol_type = other DNA
agatcaacgccgtgttttacggtaagtccgactggcttaacgtcccgaccgaactccccctgccggattctatta

SEQ ID NO: 675895 - DNA, 75 bp, synthetic construct
  source 1..75: mol_type = other DNA
gatgcatgtcgaagcgaagaagtgggcgcgcggtaaagccatcgactttctcgcctttgaggaggggtatttccg

SEQ ID NO: 675896 - DNA, 75 bp, synthetic construct
  source 1..75: mol_type = other DNA
tggggaactagctaagcagtcagttgaattaaaatctacatgtactaatgtggatgataatacacaaattgagta

SEQ ID NO: 675897 - DNA, 75 bp, synthetic construct
  source 1..75: mol_type = other DNA
tacccgtagaaatgacgctatcttcggcaaccacgtgtggcaaacatttgcgcaatacttcccgccaggacttga

SEQ ID NO: 675898 - DNA, 75 bp, synthetic construct
  source 1..75: mol_type = other DNA
tgatcaatccttctggcagattaagccaaaatacccgttcggcaatgcttcagttacgcgaagaggaatggtctg

SEQ ID NO: 675899 - DNA, 75 bp, synthetic construct
  source 1..75: mol_type = other DNA
gcggagatgacctgacgccattaaaaggacaggaatatggaggagttagaattcctgataattatgatgcatcag

SEQ ID NO: 675900 - DNA, 75 bp, synthetic construct
  source 1..75: mol_type = other DNA
ttgtatccggggctagtaagctgcgcgccaccgagaatggtagtcttgccagatcaacccattggcgcacacagg

SEQ ID NO: 675901 - DNA, 75 bp, synthetic construct
  source 1..75: mol_type = other DNA
tggctgcaatggctggctgcaagaggccatgtgatgaacctggaagagcatcaggttctggctcgtttgaaagag

SEQ ID NO: 675902 - DNA, 75 bp, synthetic construct
  source 1..75: mol_type = other DNA
gtgctgggtgaggatgatgtgccccggaccatgcagaaccagccggatgctgtgcgtatctgggctattgaggtg

SEQ ID NO: 675903 - DNA, 75 bp, synthetic construct
  source 1..75: mol_type = other DNA
aggcgtttgccctgctggaaggcgggcaactgtggaaaatccgcatgccgctgcctgccggggatgctgatgatg

SEQ ID NO: 675904 - DNA, 75 bp, synthetic construct
  source 1..75: mol_type = other DNA
gtttctcggccgggggttccgctggacccagaaacacacccagcgcctgcaggatacgctgcgcccggaagtggc

SEQ ID NO: 675905 - DNA, 75 bp, synthetic construct
  source 1..75: mol_type = other DNA
gacctggtgagtgtggccggacatatctacaaacacggtatgaatgccggattgcccggtgtcggggagagtaaa

SEQ ID NO: 675906 - DNA, 75 bp, synthetic construct
  source 1..75: mol_type = other DNA
tctgcgaagtgcggtacgttatgaccggacctatttcgataaaatcgtggcatccctgttaccgttgctggagaa

SEQ ID NO: 675907 - DNA, 75 bp, synthetic construct
  source 1..75: mol_type = other DNA
ccctgctgcgaccggcggtggagctgaacactgccgtggtggcggcaacggcggccggtgtctgtgtgacggctc

SEQ ID NO: 675908 - DNA, 75 bp, synthetic construct
  source 1..75: mol_type = other DNA
agacgatctccatacttcaggatgcggtcgacctagacatggcgacagatgaagaaagaacacagttaactacac

SEQ ID NO: 675909 - DNA, 75 bp, synthetic construct
  source 1..75: mol_type = other DNA
tttggctgggtcgcgcaatgatggctaacccgattctggcggtgattgcgctgatcgccggtgccgccatctgga

SEQ ID NO: 675910 - DNA, 75 bp, synthetic construct
  source 1..75: mol_type = other DNA
aagcaagggatcggcggtgtcggcaacgtgaagaaaatgtcctacatcaaggatattttcggcgtggaagcctcc

SEQ ID NO: 675911 - DNA, 75 bp, synthetic construct
  source 1..75: mol_type = other DNA
gctgtatgtttgatgacaaaaaattagcgcaagaggacaaaaaatcaccttgcgctaatgctctgtctcaggtca

SEQ ID NO: 675912 - DNA, 75 bp, synthetic construct
  source 1..75: mol_type = other DNA
acgatgacccagcagcatttccgcgacgagtgcgacatcaacaagattgttgagcgtgcgataagaacgggagat

SEQ ID NO: 675913 - DNA, 75 bp, synthetic construct
  source 1..75: mol_type = other DNA
atgaaactctcgaagcctaaatttcatacccgttatgacccgccaccgtcgccaggtattgagtttaaagagcct

SEQ ID NO: 675914 - DNA, 75 bp, synthetic construct
  source 1..75: mol_type = other DNA
aatgctgtatcaagcattcctgtaaagttaaattcaatcgggcctctatcgctatctcttacaaagaggtattgt

SEQ ID NO: 675915 - DNA, 75 bp, synthetic construct
  source 1..75: mol_type = other DNA
atgtatgctgacggtttcggtccggcagcaatacgcgatgtattaaaagaaaggagtatgttaatcaatgatagt

SEQ ID NO: 675916 - DNA, 75 bp, synthetic construct
  source 1..75: mol_type = other DNA
gcagcgcgggggtgagtgtcgaaatactctacacgaatgcgtggtgctatgaggaaagctataagatggcccgtg

SEQ ID NO: 675917 - DNA, 75 bp, synthetic construct
  source 1..75: mol_type = other DNA
gcgcagttgcagaaacagcaggcagaaaaggcgcaggagaaagagcagtgtttgtctctgaatgtatcccttcta

SEQ ID NO: 675918 - DNA, 75 bp, synthetic construct
  source 1..75: mol_type = other DNA
aggctatgctccattcccagcggcccctaatattaataatgcctatgtagctacagtcaaagctcgtagttttat

SEQ ID NO: 675919 - DNA, 75 bp, synthetic construct
  source 1..75: mol_type = other DNA
caaagttactttctatacataccgaaaacgaatatttctcatcgaggagtgcattactgttcagactaaatctgg

SEQ ID NO: 675920 - DNA, 75 bp, synthetic construct
  source 1..75: mol_type = other DNA
aaaaatgaagcgtttaggaaatgctattatgttagttgtgaattatattggtgttaatgagaagcaagcaatggt

SEQ ID NO: 675921 - DNA, 75 bp, synthetic construct
  source 1..75: mol_type = other DNA
cacctgagttcagcgggtgagtgggatatttctggtacctatgccgccagtgattacagttccgtcagcagcagc

SEQ ID NO: 675922 - DNA, 75 bp, synthetic construct
  source 1..75: mol_type = other DNA
cgctattgcgatgggggcagacagtcgcagtttgaacgataacgccatcgcgattgggaacaaagcgcaagccct

SEQ ID NO: 675923 - DNA, 75 bp, synthetic construct
  source 1..75: mol_type = other DNA
agtctgcagccatggtaccggcagtgtattctgccggacagtctccacaacttcctgctgtcattgattatccgg

SEQ ID NO: 675924 - DNA, 75 bp, synthetic construct
  source 1..75: mol_type = other DNA
gttcaggagcttctgtcagcagcaaaaataccttcactgttgcaaaaggtaataatgcatcagcgaagctgaatt

SEQ ID NO: 675925 - DNA, 75 bp, synthetic construct
  source 1..75: mol_type = other DNA
tagatggtggtagcactctatatacacagcaattatgggtttctgggaatgataatgacaagaccagtaatgtca

SEQ ID NO: 675926 - DNA, 75 bp, synthetic construct
  source 1..75: mol_type = other DNA
acgccagcggtcagtttcctcccctcggagcggatatccgccaggatgacagcggcattagcgtggggatggttg

SEQ ID NO: 675927 - DNA, 75 bp, synthetic construct
  source 1..75: mol_type = other DNA
gaggtaactctccttctgtcatcactggtgatgctggtatggatacattgattattactaatggtagtgtattct

SEQ ID NO: 675928 - DNA, 75 bp, synthetic construct
  source 1..75: mol_type = other DNA
tttcgccttaaaaaatgcacaaggtgtagttgttccgtgggtgccttcagttggcgacctgctggcctgtgactg

SEQ ID NO: 675929 - DNA, 75 bp, synthetic construct
  source 1..75: mol_type = other DNA
cgtcaaagtcggaaataacgttaccttcaccgttggtaaaacgaaaaaggatgataccgggcagaccgcgattta

SEQ ID NO: 675930 - DNA, 75 bp, synthetic construct
  source 1..75: mol_type = other DNA
atagcggaacgctaatattgaatggtaaagaaatcgttatcaaagatatttcagatgcaattcagcaagggatca

SEQ ID NO: 675931 - DNA, 75 bp, synthetic construct
  source 1..75: mol_type = other DNA
aagctggagaaacaattggcgggtatttagttccaggagttggaacggcaggaagcatggctattggatcactgg

SEQ ID NO: 675932 - DNA, 75 bp, synthetic construct
  source 1..75: mol_type = other DNA
aacgtctcgggtatgaggttttaagcttctcgctacaggcacattcattgagccaggaatgtattgataagttgg

SEQ ID NO: 675933 - DNA, 75 bp, synthetic construct
  source 1..75: mol_type = other DNA
aagtggtatacttgaagatattatgagtattccagatagttcacttagaaaacgtctcgggtatgaggttttaag

SEQ ID NO: 675934 - DNA, 75 bp, synthetic construct
  source 1..75: mol_type = other DNA
agacgagcgcatgcatgatttatccgatgccttctgcattgtcggcccgcagtcgcaggcgaagaaaatcggcgg

SEQ ID NO: 675935 - DNA, 75 bp, synthetic construct
  source 1..75: mol_type = other DNA
cagcgcgctgcccggtgtgaccattaatccggtggcaaccgacgatattattaacgccgccgaagcgggcgtggc

SEQ ID NO: 675936 - DNA, 75 bp, synthetic construct
  source 1..75: mol_type = other DNA
gaagatggcgacacggtaactattacgttgggtggtaatacttatacggcgacggtgggcagcaatctcacctag

SEQ ID NO: 675937 - DNA, 75 bp, synthetic construct
  source 1..75: mol_type = other DNA
gtttattcgtggctgggatgacgggcgtggagtggatgcgggacgtgccttgctaagtcttcaggatgactcttt

SEQ ID NO: 675938 - DNA, 75 bp, synthetic construct
  source 1..75: mol_type = other DNA
atcctacaaataaactaccggatctacggggtgagtttatccgtggctgggatgacggacgtggcgtggatgcgg

SEQ ID NO: 675939 - DNA, 75 bp, synthetic construct
  source 1..75: mol_type = other DNA
ggatggctcagtcgttgataagcatacgcatggtggcgttgagcctggtagcagcagtacagcaccactcggagg

SEQ ID NO: 675940 - DNA, 75 bp, synthetic construct
  source 1..75: mol_type = other DNA
gctaacctgaaggctgcacttgataagcagaacgcctggcagcagaaagcggatgcgctgacccgcgagctggct

SEQ ID NO: 675941 - DNA, 75 bp, synthetic construct
  source 1..75: mol_type = other DNA
attctgtttatatagattatgaaaccgaagatgacacctccgatggggtttaccctaatcaaggtaacggcacat

SEQ ID NO: 675942 - DNA, 75 bp, synthetic construct
  source 1..75: mol_type = other DNA
gaggttatcactcgcgaaagccttattgaaaaaatgcaaatgctagttgcgaagactgagcgaaatcggctttgt

SEQ ID NO: 675943 - DNA, 75 bp, synthetic construct
  source 1..75: mol_type = other DNA
aagcaggaacaccagcctatgaaagagcgctaaataacgctgcgaatgccatcagaccgctgtttgctactgagg

SEQ ID NO: 675944 - DNA, 75 bp, synthetic construct
  source 1..75: mol_type = other DNA
atctgacggccaagcatgatgcggtcgtggcagcgaagaccccggccgaggctgcggtgaacaacctgccggaag

SEQ ID NO: 675945 - DNA, 75 bp, synthetic construct
  source 1..75: mol_type = other DNA
gagaaaggtggcctgcaggatcgtgtggatgcactggacggtatccaggtaccggaagtgaacgatcaggacggt

SEQ ID NO: 675946 - DNA, 75 bp, synthetic construct
  source 1..75: mol_type = other DNA
cgttctggtgtcggcgtcttgatgacggcgatgtcattcaggctgaaaaagccgctgaagaggctccggctgtat

SEQ ID NO: 675947 - DNA, 75 bp, synthetic construct
  source 1..75: mol_type = other DNA
aattttcgtgtcaatgacagcggtctggcaccatatctgatcattaaagcaaaagacaagctgccactgacaaac

SEQ ID NO: 675948 - DNA, 75 bp, synthetic construct
  source 1..75: mol_type = other DNA
aataatttgttcgatggcggtgatggggtgttctatgctgacccaacagatacgacatcagaagataatgacgga

SEQ ID NO: 675949 - DNA, 75 bp, synthetic construct
  source 1..75: mol_type = other DNA
gtaacagcaagttgctcaaatattattgttgcagataacgtttaccctcctgctaacattgttaggaatttagcc

SEQ ID NO: 675950 - DNA, 75 bp, synthetic construct
  source 1..75: mol_type = other DNA
attatgcaaacgtttataataaggtgcttaataaaaacattgctaacaagctcaacaaggcaagcagtgaagcca

SEQ ID NO: 675951 - DNA, 75 bp, synthetic construct
  source 1..75: mol_type = other DNA
gcggcgacctcgccgaaacattcaaatctgagcgggacacaacaaagaaccagctccgagtcgctttgcctggca

SEQ ID NO: 675952 - DNA, 75 bp, synthetic construct
  source 1..75: mol_type = other DNA
atgaaagtaactgcaaacggtaagacatttaccttccctgatggtacgagcacggaagatattggatctgccatt

SEQ ID NO: 675953 - DNA, 75 bp, synthetic construct
  source 1..75: mol_type = other DNA
ggtgacggcggttgtgcagcctgctatccgttcggttgaaaaggataatgacggcaaccgcattaccaaaaatta

SEQ ID NO: 675954 - DNA, 75 bp, synthetic construct
  source 1..75: mol_type = other DNA
gctggcgcgcacgttaatcgcttatcacaaaggcgatgctgcgaccgttgagtcggtcgatcgcatgatgtcggc

SEQ ID NO: 675955 - DNA, 75 bp, synthetic construct
  source 1..75: mol_type = other DNA
taaaaaaaatattttccctgagctatacaatgagcaatgcaataaaatcccctcctcatcgatagatgataacca

SEQ ID NO: 675956 - DNA, 75 bp, synthetic construct
  source 1..75: mol_type = other DNA
gcaatagacaagaaaaaaagtcatcttaaccaggaaatcaaaaagcttattaaaaaaaatattttccctgagcta

SEQ ID NO: 675957 - DNA, 75 bp, synthetic construct
  source 1..75: mol_type = other DNA
acaagacaaaatgagttagtaaaagtgttttgcgagtataaaacagagttcttaattttgtttgatgactttttt

SEQ ID NO: 675958 - DNA, 75 bp, synthetic construct
  source 1..75: mol_type = other DNA
gcgatccggcaaaaatctttcaattagatgattctcacgggccggaaaaaaataaaattattttcaatgctaaat

SEQ ID NO: 675959 - DNA, 75 bp, synthetic construct
  source 1..75: mol_type = other DNA
atgacatacgatagtgaattcggatcacatgtatccctatatcgggatagaatcaaacaggttattgatgactcc

SEQ ID NO: 675960 - DNA, 75 bp, synthetic construct
  source 1..75: mol_type = other DNA
taaaaaaagcgttaaatgaacaaactcaattaactccagataaattaattccagatgattgtagttataaatcag

SEQ ID NO: 675961 - DNA, 75 bp, synthetic construct
  source 1..75: mol_type = other DNA
ttcgcgacaatgtaaagctaaataatgatgtgtataaagaacttaataagtttatgcacgattacgacaaaacat

SEQ ID NO: 675962 - DNA, 75 bp, synthetic construct
  source 1..75: mol_type = other DNA
aatgttgctatcaaatataacaatagaaaagagcaacctttcatatgggtattattttggttgtgtattatccaa

SEQ ID NO: 675963 - DNA, 75 bp, synthetic construct
  source 1..75: mol_type = other DNA
atgaccgacgaaatcgaccgcatcagtgaagtggttatgaacgaacgtcagagcgtcgttaacgcctggcagacg

SEQ ID NO: 675964 - DNA, 75 bp, synthetic construct
  source 1..75: mol_type = other DNA
atgacttttttagaagctataacttgcctaaaccatctccagtccttcatcattttttttcaatatactcatctg

SEQ ID NO: 675965 - DNA, 75 bp, synthetic construct
  source 1..75: mol_type = other DNA
tgacccggtgggctggtgtgatccgtggggtttagctggttgccctcatactaaattagtgagcagaattcagga

SEQ ID NO: 675966 - DNA, 75 bp, synthetic construct
  source 1..75: mol_type = other DNA
gacggtgaaggcaaaatcgccctccacaccggagccatggggcagaccacgcgctaccgtcacggggcatttgac

SEQ ID NO: 675967 - DNA, 75 bp, synthetic construct
  source 1..75: mol_type = other DNA
cgccgaaggaaaccttatccgccgggaggtgaacgggcagaactggcagtaccgtcataccgaagacggtctgct

SEQ ID NO: 675968 - DNA, 75 bp, synthetic construct
  source 1..75: mol_type = other DNA
gcatcacgacgagttgcatgtggacactgtggcatttgaagagaagtatggttcccaactggagctaatttttcg

SEQ ID NO: 675969 - DNA, 75 bp, synthetic construct
  source 1..75: mol_type = other DNA
ggcggtgtgccaagtactggcggtatcaacatcattggtggaaatggaggcgacggtcagtccggaaatatcggc

SEQ ID NO: 675970 - DNA, 75 bp, synthetic construct
  source 1..75: mol_type = other DNA
ggtacgtgatttaagccgtggtttaattgtggattccggaaatgacgcttgtgttgctctggctgactatattgc

SEQ ID NO: 675971 - DNA, 75 bp, synthetic construct
  source 1..75: mol_type = other DNA
atccgtacccgcaatcggcttctcatcccggtacaattcattgctcagcgggcggcgtgggacgcaacatcgccc

SEQ ID NO: 675972 - DNA, 75 bp, synthetic construct
  source 1..75: mol_type = other DNA
attttatcggtgatcaaagtactgcagccctgaccctcagtgtgccttcaggtgatatcaccgtcaccaacacag

SEQ ID NO: 675973 - DNA, 75 bp, synthetic construct
  source 1..75: mol_type = other DNA
gcgaatgtctttctgaagagattaagatatatcaagcatgctatgaaaaatttattaaatttttaaaggcaaact

SEQ ID NO: 675974 - DNA, 75 bp, synthetic construct
  source 1..75: mol_type = other DNA
ccttccgctacttcccggaggagcgcagaactgattacaccgatgccaccggagccaccaccacgctgtggttcg

SEQ ID NO: 675975 - DNA, 75 bp, synthetic construct
  source 1..75: mol_type = other DNA
tgttgatgtggtgaaaagttggcatggtcgtcgcccaatggctgtaggaacggggagtgaaagcgccatcgctga

SEQ ID NO: 675976 - DNA, 75 bp, synthetic construct
  source 1..75: mol_type = other DNA
agcaatcaagaaaaatcacgcttaatactaaggttatttgatgatgttaagttgctatttaatgaagtgcctgtc

SEQ ID NO: 675977 - DNA, 75 bp, synthetic construct
  source 1..75: mol_type = other DNA
aaaccagacggaacgaaagcgccaacagtaaggaagatgcggtatgacgcaaacacagcttggaaagcggcgctg

SEQ ID NO: 675978 - DNA, 75 bp, synthetic construct
  source 1..75: mol_type = other DNA
gaagaaaaaataaattatatatcttcccatagtgatgcgtaccactcactcttatatccagctttatgtgcattc

SEQ ID NO: 675979 - DNA, 75 bp, synthetic construct
  source 1..75: mol_type = other DNA
aactttatcgcaggttgctggagaaagaacaatggtccagaaaagaggcgacagagttgtgtagtaactggaacc

SEQ ID NO: 675980 - DNA, 75 bp, synthetic construct
  source 1..75: mol_type = other DNA
gtcaaggcgctgctatgggccatccgacaactggataaccccggtcaactgctcgactttttaaggggacgcaaa

SEQ ID NO: 675981 - DNA, 75 bp, synthetic construct
  source 1..75: mol_type = other DNA
gtcaaaccttgtctcatgcaaccagtattgattatcgcaaggtatcaagcattgttgattttcttacttttaatg

SEQ ID NO: 675982 - DNA, 75 bp, synthetic construct
  source 1..75: mol_type = other DNA
aaagcgggcaccagcacatcggatataggttttttacaaaatattctccctgtatttcaaagtactttaatatat

SEQ ID NO: 675983 - DNA, 75 bp, synthetic construct
  source 1..75: mol_type = other DNA
gacccgagcacagttaaatgtgctaatgctgtctttagtggaatggttggtggtgccattaaaggtggtcctgta

SEQ ID NO: 675984 - DNA, 75 bp, synthetic construct
  source 1..75: mol_type = other DNA
tttgaaacaaagtcgagaaggcgtgagttgcatatcgagattctttcagagcagactaaatctgatatacgtaat

SEQ ID NO: 675985 - DNA, 75 bp, synthetic construct
  source 1..75: mol_type = other DNA
cgatacaaaatatacttatgatctatcattatctggagtaaagctatttcttttgacaaaatgtttcattaatga

SEQ ID NO: 675986 - DNA, 75 bp, synthetic construct
  source 1..75: mol_type = other DNA
acagcaggctgggagccagaaaacacgctggtcattatggccggtatggtcgggagcaacgcgggatgggtcacc

SEQ ID NO: 675987 - DNA, 75 bp, synthetic construct
  source 1..75: mol_type = other DNA
atgtgttatataatatctatgcacgccgaatccctgcttttgcccctcgctaagttaatgttttataaagagttt

SEQ ID NO: 675988 - DNA, 75 bp, synthetic construct
  source 1..75: mol_type = other DNA
ctgaccaaaaatgccctgatgctgagttcagcaacctgttcaatgaagtcgctcggttaagagcggtattcaatg

SEQ ID NO: 675989 - DNA, 75 bp, synthetic construct
  source 1..75: mol_type = other DNA
ggacaagataattgttgatgcccttaatcgtatgagacctgagctaccgcagtgtgttaaagatcccgaagctac

SEQ ID NO: 675990 - DNA, 75 bp, synthetic construct
  source 1..75: mol_type = other DNA
tctccatcttccagcaatttgtcggcatcaatgtggtgttgtactacgcgccggaagtgttcaaaacgctggggg

SEQ ID NO: 675991 - DNA, 75 bp, synthetic construct
  source 1..75: mol_type = other DNA
atatgtttttgatgtgcatcacattatgtcgattcttgaatacatccttgatcataacgctaaaccggatatttg

SEQ ID NO: 675992 - DNA, 75 bp, synthetic construct
  source 1..75: mol_type = other DNA
tcagactgggtgaaaaatgtatcaactgaaagggttgatgattggactagcgaaacatggatatataaccatgat

SEQ ID NO: 675993 - DNA, 75 bp, synthetic construct
  source 1..75: mol_type = other DNA
ggcggttgcacgctgacctttccggtaaaagaaggcgatgagtgcctgctgatctttgccgaccgttgcatcgat

SEQ ID NO: 675994 - DNA, 75 bp, synthetic construct
  source 1..75: mol_type = other DNA
atgcaattagcaactgaagctgttaaatttaagtttgattcattgaatccagtaaatggcttaaagcgtatattt

SEQ ID NO: 675995 - DNA, 75 bp, synthetic construct
  source 1..75: mol_type = other DNA
taaatcactgctttttaaaactcttgatggagatatcatatctttattatcagattggggagagatgctattcct

SEQ ID NO: 675996 - DNA, 75 bp, synthetic construct
  source 1..75: mol_type = other DNA
ctggagctggaaggatttggcctgggatgtcgccggtgcaagcaccggctataccgtctggcaactgacccgtca

SEQ ID NO: 675997 - DNA, 75 bp, synthetic construct
  source 1..75: mol_type = other DNA
tttgcgcgggcgcgacattcatcaccggcttcaatggcagtggctacagcgactgcaccttcttcctttattgcc

SEQ ID NO: 675998 - DNA, 75 bp, synthetic construct
  source 1..75: mol_type = other DNA
tttacgcgcaattgcgaccatccagtggcaatgtgcagtcgggtaatgtgaatgccagtgccacctttgttctcc

SEQ ID NO: 675999 - DNA, 75 bp, synthetic construct
  source 1..75: mol_type = other DNA
ttggcggcattcatgttcaatttagtaaaaattatgctgtgcagttcggaggccgcaattccggtttttggggaa

SEQ ID NO: 676000 - DNA, 75 bp, synthetic construct
  source 1..75: mol_type = other DNA
acggacgcctttatattgcgggtaacagcgcacaggcggcagcagactcacaaactgcatcggcaaactccgcga

SEQ ID NO: 676001 - DNA, 75 bp, synthetic construct
  source 1..75: mol_type = other DNA
caggcacccggatcaccactctggaaaatcaggtaagcgaactggttgcacttgtcgggcagttaacaggaagcg

SEQ ID NO: 676002 - DNA, 75 bp, synthetic construct
  source 1..75: mol_type = other DNA
gcgacacgctggagattgaggggtatacgtaccgaactgaaacgcagactggtgacgtcatgataaaggcacatc

SEQ ID NO: 676003 - DNA, 75 bp, synthetic construct
  source 1..75: mol_type = other DNA
atgtcaggaccgccgaaaacccctacccatctgcgtttggtgaggggtaacccatcaaaacgaccgatcaacaat

SEQ ID NO: 676004 - DNA, 75 bp, synthetic construct
  source 1..75: mol_type = other DNA
cacctatgccgtctacagcgaagatgattcagatgaaggaggggagcgggaaatcagaatgataaaaccgcaccc

SEQ ID NO: 676005 - DNA, 75 bp, synthetic construct
  source 1..75: mol_type = other DNA
tccacgaaccggattggcacggaggccagtgccaatccggtacgtggagaagggcatcaggtagcactgttctga

SEQ ID NO: 676006 - DNA, 75 bp, synthetic construct
  source 1..75: mol_type = other DNA
cccatctacgtttggtgaggggtaacccatcaaaacgcccgatcaatgagaacgaaccaaagccagccgcatggg

SEQ ID NO: 676007 - DNA, 75 bp, synthetic construct
  source 1..75: mol_type = other DNA
caagcaggggaagtactggtttaagcggatggctgaagagttggacgccatcggcgtgatctcccagcttgacgg

SEQ ID NO: 676008 - DNA, 75 bp, synthetic construct
  source 1..75: mol_type = other DNA
ttaatggactacagctaacggccgtttttgcagtttttaatattatatttaaagtcgcatctataccccttgttt

SEQ ID NO: 676009 - DNA, 75 bp, synthetic construct
  source 1..75: mol_type = other DNA
ttcttcaggtacccgaaatattattatgggagacgggaatgacgttatttctgttgataattcatttggtggaaa

SEQ ID NO: 676010 - DNA, 75 bp, synthetic construct
  source 1..75: mol_type = other DNA
gggttaaatgccacggtacccgaccagcttcccgccatgctctggcgattaagggggttaaatgccacgctaagc

SEQ ID NO: 676011 - DNA, 75 bp, synthetic construct
  source 1..75: mol_type = other DNA
ttaaatgccacgggacacgaccagctttcctccatggtctggcgattaagggggttaaattccatgggacacgcc

SEQ ID NO: 676012 - DNA, 75 bp, synthetic construct
  source 1..75: mol_type = other DNA
taaggctgtgggtgggcttctggggggcttaggtttgtactcacagtgggaccgatggtttctgacagaaaaatg

SEQ ID NO: 676013 - DNA, 75 bp, synthetic construct
  source 1..75: mol_type = other DNA
gccggggcagcagtatgatgaggagtccggcctgtattacaaccgccaccgctattatgacccgctgcaggggag

SEQ ID NO: 676014 - DNA, 75 bp, synthetic construct
  source 1..75: mol_type = other DNA
tgccttaaaaaatgttacaaaaccggatgcgcatcccctttattacaccgtatctgccggtactccgggaactaa

SEQ ID NO: 676015 - DNA, 75 bp, synthetic construct
  source 1..75: mol_type = other DNA
aatttttcatatcggctatggaattttatttagagaaaaaaatcgaattcaataaaaaacacaatacaaaggaag

SEQ ID NO: 676016 - DNA, 75 bp, synthetic construct
  source 1..75: mol_type = other DNA
acgaacttctcggcgcattgggtgcgcgggttatcgatcgcctccagatggatggcggaatgtgggtgaactttg

SEQ ID NO: 676017 - DNA, 75 bp, synthetic construct
  source 1..75: mol_type = other DNA
atgcgtaaaagaatcattcttccgttgttctgtttactggtatgtaaaacggtttccgctgattgttttgagcag

SEQ ID NO: 676018 - DNA, 75 bp, synthetic construct
  source 1..75: mol_type = other DNA
ttcaatcatgctctggcgcttcagaatgagaatcatgaggccggtaataaatacatcccttacgggaaaatggct

SEQ ID NO: 676019 - DNA, 75 bp, synthetic construct
  source 1..75: mol_type = other DNA
gcgtatgggttgcacagatgcagttaaaaacgatgctatgggggcaggtatacggagaggttgtaacagacatta

SEQ ID NO: 676020 - DNA, 75 bp, synthetic construct
  source 1..75: mol_type = other DNA
tctgcggctttatctggctgccgctgcaattgccggtattgtgggcgatggtgtgtgggttaggtctgggcggcg

SEQ ID NO: 676021 - DNA, 75 bp, synthetic construct
  source 1..75: mol_type = other DNA
ctgcttggtggggtggggatcggcatcattcaggcggtgatgccttcggtgattaaacggcggtttcagcagcgc

SEQ ID NO: 676022 - DNA, 75 bp, synthetic construct
  source 1..75: mol_type = other DNA
caagacaacaaccactccggttcgcgtggtattcactccccgcgcgtggacgctgggtgtttacttcggtctgat

SEQ ID NO: 676023 - DNA, 75 bp, synthetic construct
  source 1..75: mol_type = other DNA
tcattctgaatcaggttatcgatcgtcggctgtcgtcgatgcgcccggttggcgttctgacgaatctgaaccatt

SEQ ID NO: 676024 - DNA, 75 bp, synthetic construct
  source 1..75: mol_type = other DNA
gtcgctggccggaaagcctgcaacagcaacaggcctcgacacaatggaatgaggcactcaaaacccgcgcacaga

SEQ ID NO: 676025 - DNA, 75 bp, synthetic construct
  source 1..75: mol_type = other DNA
caattgccggtattgtgggcgatggtgtgtggtttaggtctgggcggcgcatttccgctctgtttgctgctggcg

SEQ ID NO: 676026 - DNA, 75 bp, synthetic construct
  source 1..75: mol_type = other DNA
tccgggtggtaatgaaagtgacccagtcagtgtgatggcaaaagcacagaaaggtagcgtcattaattccattac

SEQ ID NO: 676027 - DNA, 75 bp, synthetic construct
  source 1..75: mol_type = other DNA
ctgaactgattcggataacgaatggttataaagggtataaatatacttacgtaacctcagacaaaattggaaacc

SEQ ID NO: 676028 - DNA, 75 bp, synthetic construct
  source 1..75: mol_type = other DNA
atcaaaatttagctgacattgataaaattctcacagaacttgcgggtgaaaatgattattatactatttatgttc

SEQ ID NO: 676029 - DNA, 75 bp, synthetic construct
  source 1..75: mol_type = other DNA
gatgtgtacatcagtagtaaaaatgccatagctgaaggagcactgaaacgcattagcgaactgtacaccatcgag

SEQ ID NO: 676030 - DNA, 75 bp, synthetic construct
  source 1..75: mol_type = other DNA
tatcctggcacctttgcaggatgccgttgatctgggtaaagcgacggacgcagaaaaagcgctttttactgcctg

SEQ ID NO: 676031 - DNA, 75 bp, synthetic construct
  source 1..75: mol_type = other DNA
gcgaaaattggtgtagggttggctgcgcaggcgggggcgggattttcggcattactggcctttagctacaaagat

SEQ ID NO: 676032 - DNA, 75 bp, synthetic construct
  source 1..75: mol_type = other DNA
atgcccgatgcttaccgaaagacattgatccgccagattgggcagcatgcgcactccgagattgttggtatgttg

SEQ ID NO: 676033 - DNA, 75 bp, synthetic construct
  source 1..75: mol_type = other DNA
tgtatagcaccggatataggtggattatctgaagtttttaaagagaatccagagttattaattaaaaatgatttt

SEQ ID NO: 676034 - DNA, 75 bp, synthetic construct
  source 1..75: mol_type = other DNA
agtcagtgaactgccgccgacacagggcaacagtgctgccgaatctgttttatcctcatcgttgtcgaagataat

SEQ ID NO: 676035 - DNA, 75 bp, synthetic construct
  source 1..75: mol_type = other DNA
cacatatcaaatatcggtaatcttgaggaatacacatttgttcccgtaccaccatccaaatgccgtacagatgcc

SEQ ID NO: 676036 - DNA, 75 bp, synthetic construct
  source 1..75: mol_type = other DNA
ttttctggacgctgcgaaaaaagtttgtcgccagtagcgacgagatgccggaacacagctctcaggtaatgtatt

SEQ ID NO: 676037 - DNA, 75 bp, synthetic construct
  source 1..75: mol_type = other DNA
aagcctgggaagaaggtacctgggtacgggaagcagcgctggcccatgcacaaaaacaacatgcccgtaaggtcg

SEQ ID NO: 676038 - DNA, 75 bp, synthetic construct
  source 1..75: mol_type = other DNA
ccgccgctgaaatcgaacttctcacttcgcgaatggtattgggccgtacggtgcaagagctgaatcttgatactg

SEQ ID NO: 676039 - DNA, 75 bp, synthetic construct
  source 1..75: mol_type = other DNA
aggcctggaatgttgctgacgggcaatggttgattttttcggatatggctaataatgccagtggtggcgcagtat

SEQ ID NO: 676040 - DNA, 75 bp, synthetic construct
  source 1..75: mol_type = other DNA
tgcctgggatgtggtcgcacccggtcagagtgggtttattgctcccgatggaacagttgataagcactatgaaga

SEQ ID NO: 676041 - DNA, 75 bp, synthetic construct
  source 1..75: mol_type = other DNA
ggccgtaagtcgctctggttaacgaagcaggatgtggaggcgcataaggagtcgcaggaagtgttgcacgttcag

SEQ ID NO: 676042 - DNA, 75 bp, synthetic construct
  source 1..75: mol_type = other DNA
cccgtagagaagaatttgagcaaggatatcgagatggctttcgttcggttcagggcaatgttttacccccaaaag

SEQ ID NO: 676043 - DNA, 75 bp, synthetic construct
  source 1..75: mol_type = other DNA
ttaaaataaacgtctcattactttatgaatatttctcagagagagatgatgttcatattgttaaatcttcagata

SEQ ID NO: 676044 - DNA, 75 bp, synthetic construct
  source 1..75: mol_type = other DNA
tgatagccacacagatgtacggtaaaccggtcagtgaactgagcgaggcagagaagcagacggtctcaacactgg

SEQ ID NO: 676045 - DNA, 75 bp, synthetic construct
  source 1..75: mol_type = other DNA
ttctgaggcacatcgcttggttcaggaggctgtagcggaatatttacaggaacggcgtcaggctaccgctacaaa

SEQ ID NO: 676046 - DNA, 75 bp, synthetic construct
  source 1..75: mol_type = other DNA
cactcaggaacgttaccccaatatcaccattgctgttgactcagacggtatcggcgcggcaacggctgatcagtt

SEQ ID NO: 676047 - DNA, 75 bp, synthetic construct
  source 1..75: mol_type = other DNA
ggcagagtaatgctgcggtggagaatgatgagattgatttaggtcgtctgctcggttacttgattgatggccgct

SEQ ID NO: 676048 - DNA, 75 bp, synthetic construct
  source 1..75: mol_type = other DNA
tcccagttctggcaaatggtcgcaatgggtgtagttgtagtcgctgccgtttacctcgatacattacgcaaaaag

SEQ ID NO: 676049 - DNA, 75 bp, synthetic construct
  source 1..75: mol_type = other DNA
atgactgagtttgatgacaatgggaaaattatatttaaccttaatgccttaagtatacaaaagcaagttactttg

SEQ ID NO: 676050 - DNA, 75 bp, synthetic construct
  source 1..75: mol_type = other DNA
cagaacactcatcatgttattctcttgacacttgatgttgcaaaaaaaatactcagcccaataacatcatttgat

SEQ ID NO: 676051 - DNA, 75 bp, synthetic construct
  source 1..75: mol_type = other DNA
ttgtcattactagttataatagattgaatctattgctattagctttagaatcagtcctttttcaaaaagctcatg

SEQ ID NO: 676052 - DNA, 75 bp, synthetic construct
  source 1..75: mol_type = other DNA
ttgttaacatcttattgtttttggttttatccagccctgcctcaaaggcagtcacagataataaactgggttttg

SEQ ID NO: 676053 - DNA, 75 bp, synthetic construct
  source 1..75: mol_type = other DNA
ggttaaatatagttgagccggacacatctccttttctttgtttaactgaaagtgcaacaccagaagagttgtgcg

SEQ ID NO: 676054 - DNA, 75 bp, synthetic construct
  source 1..75: mol_type = other DNA
acggacttcgggggaaaaacgagtatttttagtcatcctgtttacctctttctcaggaagtttagtctccaggat

SEQ ID NO: 676055 - DNA, 75 bp, synthetic construct
  source 1..75: mol_type = other DNA
atctttgtaccatccataatccaatgggagatttgcaggattttattgcattggttaaagatgctaaaaaatttg

SEQ ID NO: 676056 - DNA, 75 bp, synthetic construct
  source 1..75: mol_type = other DNA
gtgcatatggcttattaggtgtagcgcatggacgtgctgaagcgacgattctgggatactctgactcttcaagca

SEQ ID NO: 676057 - DNA, 75 bp, synthetic construct
  source 1..75: mol_type = other DNA
atgcagagttaccgcctgggctacgacttgcaaagtggcagtccacaactcaatgcacatcgccagttgtttcag

SEQ ID NO: 676058 - DNA, 75 bp, synthetic construct
  source 1..75: mol_type = other DNA
gacaagaatcgccagcttacccgttacagcgatacccgctggcatgaagattccgtgcgtaaccgctggttcagc

SEQ ID NO: 676059 - DNA, 75 bp, synthetic construct
  source 1..75: mol_type = other DNA
tcgacgtttacacaatgtgatttttctcaaaacgagtggcgaatgtgttgattttagccaaaatattcttgatac

SEQ ID NO: 676060 - DNA, 75 bp, synthetic construct
  source 1..75: mol_type = other DNA
ctctcgaaattgccgagtttcctcttggtcaatccatcaacattgcccagacttgcacacaccatgttctatcct

SEQ ID NO: 676061 - DNA, 75 bp, synthetic construct
  source 1..75: mol_type = other DNA
aagaaaagacccgcgatctccacgagaccaagcgtcgtctggaggtgttgtatcagtgcagtgttcccaggcgct

SEQ ID NO: 676062 - DNA, 75 bp, synthetic construct
  source 1..75: mol_type = other DNA
tgttcgtgctggctttacagcactacgctgaacgcaaaatgctgctggtggtggcgatttccctggctggcggta

SEQ ID NO: 676063 - DNA, 75 bp, synthetic construct
  source 1..75: mol_type = other DNA
tatgacagcgaggattatcaggaaggtatgaatgctttcctggaaaaacgtaaacctaatttcgtcggtcattaa

SEQ ID NO: 676064 - DNA, 75 bp, synthetic construct
  source 1..75: mol_type = other DNA
taggccggtttcctttgtgtccggtatttccacccctgctaacgtcaccgccatttcagagcgtggaaactcagg

SEQ ID NO: 676065 - DNA, 75 bp, synthetic construct
  source 1..75: mol_type = other DNA
cgccgcagagactgagcaggaagcccgccgcattctggcgcgggatcacgtttgcttttttgccggacgtattcg

SEQ ID NO: 676066 - DNA, 75 bp, synthetic construct
  source 1..75: mol_type = other DNA
taagacaccagccagaacaaccgcagcacccgcaatcaatacaaccacaaactacaccttgcaagactgtcactc

SEQ ID NO: 676067 - DNA, 75 bp, synthetic construct
  source 1..75: mol_type = other DNA
gcacactgaatttggccacctgaacagaggtgatatgctcacctcagaacaacacaggtgctccaatgaaaaaaa

SEQ ID NO: 676068 - DNA, 75 bp, synthetic construct
  source 1..75: mol_type = other DNA
ctacccaaaaaccgcaatttatctggattatcgccgcagttcgccgcgattgcccgacaattaccgccaaaattc

SEQ ID NO: 676069 - DNA, 75 bp, synthetic construct
  source 1..75: mol_type = other DNA
cagacgccgaaagcgtctttttttgtgtccattcactacgcacatcaaatcagcggacttacccgtactgtatca

SEQ ID NO: 676070 - DNA, 75 bp, synthetic construct
  source 1..75: mol_type = other DNA
ccttttagcggtgattctggccgtgctgttgtgccaaatcctgtggttcgcgggtatacatgggacgatgattgt

SEQ ID NO: 676071 - DNA, 75 bp, synthetic construct
  source 1..75: mol_type = other DNA
gaatgttcatggcggggtatctaatggaagtcttattgaatcgggtggatattgtagtggtcaagtaatattggc

SEQ ID NO: 676072 - DNA, 75 bp, synthetic construct
  source 1..75: mol_type = other DNA
gggaaaagggaaccacggagcccgtgcgtatcgtgtatgacggagacgtgagtacggtcagccgtgctgccggga

SEQ ID NO: 676073 - DNA, 75 bp, synthetic construct
  source 1..75: mol_type = other DNA
cacccaagtaagaacgcgccatgggtaggtacaaccatagttcaggcaaagcacaccaatgggtataaccgaaat

SEQ ID NO: 676074 - DNA, 75 bp, synthetic construct
  source 1..75: mol_type = other DNA
gaagctactcgtaatttcacggcctataaacccgtgaaaaaggaaaacctggtgttcgtatcgcgtagagcatca

SEQ ID NO: 676075 - DNA, 75 bp, synthetic construct
  source 1..75: mol_type = other DNA
gtaagtgctcaacaaaagagcagtgggcagatcttgctaaaaaatcaggcacatctccgggatacctgaatctca

SEQ ID NO: 676076 - DNA, 75 bp, synthetic construct
  source 1..75: mol_type = other DNA
cctgagccgggacgtgacgtttattgcggatgtcaggacggcgcagatcgcggacctggtggtcattaaggacgg

SEQ ID NO: 676077 - DNA, 75 bp, synthetic construct
  source 1..75: mol_type = other DNA
aacttcgcgattccagttccgctgattacgataagcttcatgaacgaatggaagcaaagggattctccagaacga

SEQ ID NO: 676078 - DNA, 75 bp, synthetic construct
  source 1..75: mol_type = other DNA
acaggtaagggttcaaatgctctcgaaagacgtccacaactacgtgcagcactggccgcgtgtaagaaacaagat

SEQ ID NO: 676079 - DNA, 75 bp, synthetic construct
  source 1..75: mol_type = other DNA
attaactttgtggcagcggatatgccgcatgctgacaaggtgatgatccagatgcacgcggtaatgtctgagcat

SEQ ID NO: 676080 - DNA, 75 bp, synthetic construct
  source 1..75: mol_type = other DNA
cacctcttgagaagtctgacgagacactggtcacaaataccaacaatggcgtttcactgacaacaatgatgaaaa

SEQ ID NO: 676081 - DNA, 75 bp, synthetic construct
  source 1..75: mol_type = other DNA
gacattacctggataaaatccattcccacagatgttaaaaaatggatggtgtatactcttaataaagaatttttt

SEQ ID NO: 676082 - DNA, 75 bp, synthetic construct
  source 1..75: mol_type = other DNA
tgggtagctcgagggagtgatttagctatgtttaacgtgccacttttagtcatcaatgatgaaaaggaagttcga

SEQ ID NO: 676083 - DNA, 75 bp, synthetic construct
  source 1..75: mol_type = other DNA
tggaggctgaagatgaattaaaaaacaatcaaattcattatgaagttgttcttgacgggaatatgaaagtaatcc

SEQ ID NO: 676084 - DNA, 75 bp, synthetic construct
  source 1..75: mol_type = other DNA
gtaataattgctttcatcaaaattatactcatgacgtattgttccccggtgcaacattcagaacccgacataatg

SEQ ID NO: 676085 - DNA, 75 bp, synthetic construct
  source 1..75: mol_type = other DNA
cgactctcagaactttgagcatctgcagaggtttaatattgcgccagaaatgctgctggatgcctgcatcaatgt

SEQ ID NO: 676086 - DNA, 75 bp, synthetic construct
  source 1..75: mol_type = other DNA
actgggatgctgtgggagcctacaatgccggcttttccagaaagccacaacagataaaacgacgctatcagtatg

SEQ ID NO: 676087 - DNA, 75 bp, synthetic construct
  source 1..75: mol_type = other DNA
atgtacaaaacaacgacagcgatactgctatgtctgatgataagtaaaacgtcagcagctgactgctttgaacag

SEQ ID NO: 676088 - DNA, 75 bp, synthetic construct
  source 1..75: mol_type = other DNA
atgcgttgtttacgtctggcggcgaccggcgatcgcaccattaacatccacagttattacaacgatcagccggtt

SEQ ID NO: 676089 - DNA, 75 bp, synthetic construct
  source 1..75: mol_type = other DNA
cggcttttccctggaatgaatcgcgggacagcgggcgtccgaatacgggacgtggaggatatccgacatgtaatg

SEQ ID NO: 676090 - DNA, 75 bp, synthetic construct
  source 1..75: mol_type = other DNA
aagatcccggagataccggttacagtggagttatttccagtcttggtgatcggactgctgctgcgccactctggt

SEQ ID NO: 676091 - DNA, 75 bp, synthetic construct
  source 1..75: mol_type = other DNA
tcaggtggattataaggaggaggtgatcaagcgtctggtgagtccggcaaacctgacgctctctcaggggggaga

SEQ ID NO: 676092 - DNA, 75 bp, synthetic construct
  source 1..75: mol_type = other DNA
gacggtcagcgtgtcggcggacaatgacgcaacggtcgcttcgacggtgattacagagccggacggcacggtgga

SEQ ID NO: 676093 - DNA, 75 bp, synthetic construct
  source 1..75: mol_type = other DNA
ggggcggacgaaggcaacaaggggatgctctcgttaccccgcatcgagaatgcattgtatggtgcgttttttgtg

SEQ ID NO: 676094 - DNA, 75 bp, synthetic construct
  source 1..75: mol_type = other DNA
gtacatatcaggcagcgcagaaagcaggtaatttagcaggggcaggtggtaatagtttctctaagggactggata

SEQ ID NO: 676095 - DNA, 75 bp, synthetic construct
  source 1..75: mol_type = other DNA
catctttttggtatttcttttatctatcagtaaatacaaaaaaattagactcggggttgtctttttttcttttat

SEQ ID NO: 676096 - DNA, 75 bp, synthetic construct
  source 1..75: mol_type = other DNA
ctattcaacaacgtcttaagcaggcttcagatgcacgagctcaggaagtcgccggtagcgaagtgctttactccg

SEQ ID NO: 676097 - DNA, 75 bp, synthetic construct
  source 1..75: mol_type = other DNA
atggtacagtgagttttgccagtaacagacgttttttgctggctgcgggtacttcgctttcatgcgttttacaaa

SEQ ID NO: 676098 - DNA, 75 bp, synthetic construct
  source 1..75: mol_type = other DNA
aaaaatcagcccaaattgggaaccaactcccgtaatggctattccacgaaaaccgtcacccctaccgacaggccg

SEQ ID NO: 676099 - DNA, 75 bp, synthetic construct
  source 1..75: mol_type = other DNA
caaggagaccattgccccggatttatccgatgaagaacttgcggatctcttttacagccacctggagagtgaaaa

SEQ ID NO: 676100 - DNA, 75 bp, synthetic construct
  source 1..75: mol_type = other DNA
aggtatgattgaggcggattccgcgcgtcatgcccgccagttgttgcgcggtaaagagcttatccccgtgcatat

SEQ ID NO: 676101 - DNA, 75 bp, synthetic construct
  source 1..75: mol_type = other DNA
actgtcttgcctgaattgcctcatagactacaagaactctttgtttccggcaacagactacaggaactaccagaa

SEQ ID NO: 676102 - DNA, 75 bp, synthetic construct
  source 1..75: mol_type = other DNA
gatgggattgagtacatcaaagcagcaatctccgccgggctgaaaattgatgacttcgctcctcgcctgtcgttc

SEQ ID NO: 676103 - DNA, 75 bp, synthetic construct
  source 1..75: mol_type = other DNA
acaaacgggatcacgaagacaaaaccgatgtactggagatcgacaatgtgatggttcgtaacgagcaaattgctt

SEQ ID NO: 676104 - DNA, 75 bp, synthetic construct
  source 1..75: mol_type = other DNA
atcgaagcgggtttgccaaaacgcatgatcgaagaagcgtctgcgcgtgagcagtcactgatcgatcagggcaaa

SEQ ID NO: 676105 - DNA, 75 bp, synthetic construct
  source 1..75: mol_type = other DNA
cactctatctgccagcgccaaaataaaaggactatccgcagccggagatccctgtgaggtacttgtctgtatggc

SEQ ID NO: 676106 - DNA, 75 bp, synthetic construct
  source 1..75: mol_type = other DNA
acctttgccgccaaaatccgaacagaaagcccgctctcagtgtcgtttatggatcctgaacatcgcaccctatgg

SEQ ID NO: 676107 - DNA, 75 bp, synthetic construct
  source 1..75: mol_type = other DNA
atttatggtccaggtacacctatgctcgacagcgtgcgcgacgtactgaatctgataagccagcatcatgattaa

SEQ ID NO: 676108 - DNA, 75 bp, synthetic construct
  source 1..75: mol_type = other DNA
taataccatcagtatcagcggttaccacatgggtgaagcgggtgccaactgcgtgcagcaggtagcatttacgct

SEQ ID NO: 676109 - DNA, 75 bp, synthetic construct
  source 1..75: mol_type = other DNA
acaaactggatcacgaagacgaaaccgatgtacttgagatcgacaacgtgatggtgcgtaacgagcaaattgctt

SEQ ID NO: 676110 - DNA, 75 bp, synthetic construct
  source 1..75: mol_type = other DNA
gcagcaggtagcatttacgctcgctgatgggattgagtacatcaaagcagcaatctctgccggactgaaaattga

SEQ ID NO: 676111 - DNA, 75 bp, synthetic construct
  source 1..75: mol_type = other DNA
ttatccgcaccaccattgaagcgttgggcgccacacttggcgggacacaatcactgcataccaacgcttttgatg

SEQ ID NO: 676112 - DNA, 75 bp, synthetic construct
  source 1..75: mol_type = other DNA
aagagcgcggcgtggcggcgatttatggtccaggtacgcctatgctcgacagcgtgcgcgacgtactgaatctaa

SEQ ID NO: 676113 - DNA, 75 bp, synthetic construct
  source 1..75: mol_type = other DNA
tcgtaacctcgccgccgggcaaaaaggactttccgttgcatttgacctggcaactcaccgtggctacgactctga

SEQ ID NO: 676114 - DNA, 75 bp, synthetic construct
  source 1..75: mol_type = other DNA
aaaggactatccgcagccggagatccttgtgaagtgcttgtctgtatggctgaaaaagtacagggagcaccacaa

SEQ ID NO: 676115 - DNA, 75 bp, synthetic construct
  source 1..75: mol_type = other DNA
tttgccgatgatttacggttcagacttgagggccctgcgaattttacagagagtaatatctacgcagccctacga

SEQ ID NO: 676116 - DNA, 75 bp, synthetic construct
  source 1..75: mol_type = other DNA
atggattatatattatatctgaatggaaaaagggtcagactaaggacgtgtaaccatgttttttctgaacgcctt

SEQ ID NO: 676117 - DNA, 75 bp, synthetic construct
  source 1..75: mol_type = other DNA
tcaaagttgaaatggaacataccgccgcaggcgaggtgggaggctttaccgattgggcggatatttttgctattt

SEQ ID NO: 676118 - DNA, 75 bp, synthetic construct
  source 1..75: mol_type = other DNA
aatcacctagtatttatggagatgctcaaagccaacatgaaaaccttgactttgacaaatcgttatggagttcaa

SEQ ID NO: 676119 - DNA, 75 bp, synthetic construct
  source 1..75: mol_type = other DNA
caactatgttgccttacaggaagggcgtaacggcatggctgtctttagcgaagggttacgtgaatttgaagtcat

SEQ ID NO: 676120 - DNA, 75 bp, synthetic construct
  source 1..75: mol_type = other DNA
ctgttactgacccgggtgggaacacgtcgtgcggcgagtgggatagccgaaggggtaaatgtcgagcaggcatac

SEQ ID NO: 676121 - DNA, 75 bp, synthetic construct
  source 1..75: mol_type = other DNA
atatattgaaggtattggcactgaaaataataaagcagactctctggtaggaatggggctaggaaataatgatac

SEQ ID NO: 676122 - DNA, 75 bp, synthetic construct
  source 1..75: mol_type = other DNA
tgcattaataataacgaacgatgccgttttgagttttatttttatcgtattaataaatatggaaaatgggaaagg

SEQ ID NO: 676123 - DNA, 75 bp, synthetic construct
  source 1..75: mol_type = other DNA
cctgcgatgcaaaacgaactgctggataagcactacctgcgtaagcatggggccaatgcctattatgggcagtag

SEQ ID NO: 676124 - DNA, 75 bp, synthetic construct
  source 1..75: mol_type = other DNA
gttattgtggcgccattcaacgctggctccgattctgccttctggtgtcctaaaaattgaatccaatattgatga

SEQ ID NO: 676125 - DNA, 75 bp, synthetic construct
  source 1..75: mol_type = other DNA
cgccaggtgtggccaaacatgtattccagctcacagcaatgaacgaatgtcgctataacttttgcctcaacagca

SEQ ID NO: 676126 - DNA, 75 bp, synthetic construct
  source 1..75: mol_type = other DNA
cgacggcatttcagtcagttgaatatttaggtaaaccttccggggaagtgcaatttttaggtatttttgacacag

SEQ ID NO: 676127 - DNA, 75 bp, synthetic construct
  source 1..75: mol_type = other DNA
ataaagatactcctatcatgcttagttcttccatccaggctgaatgtgataacgcttatggaaagagtaaagcag

SEQ ID NO: 676128 - DNA, 75 bp, synthetic construct
  source 1..75: mol_type = other DNA
tttgaaaacattcttattaaagattgcactgctcttaattgtgtaagtggcccagcttttttaaaagatgtaact

SEQ ID NO: 676129 - DNA, 75 bp, synthetic construct
  source 1..75: mol_type = other DNA
cagctggggaaatgccaggcttgcggaaagctgaaagcggagggaggttgcggcggcgaacggcagagcgaaacc

SEQ ID NO: 676130 - DNA, 75 bp, synthetic construct
  source 1..75: mol_type = other DNA
agctatccgcaacaccccgctcgcgtcagcgacgtcccggctgaactgatgggcattgacctgctgatcaactgt

SEQ ID NO: 676131 - DNA, 75 bp, synthetic construct
  source 1..75: mol_type = other DNA
cgtcattgcggcggcgaatgcgctacgcggtcaatcctgtggcaacgatacgttctcgctggcagtctacccgtc

SEQ ID NO: 676132 - DNA, 75 bp, synthetic construct
  source 1..75: mol_type = other DNA
tggactgttaacctggatgggtggcatggtgggggctgttgtttctggtgtggcttcaaaaatcactggtgctgt

SEQ ID NO: 676133 - DNA, 75 bp, synthetic construct
  source 1..75: mol_type = other DNA
cattgaattcaactaatgtaaatgtttcaggctacattgattctttggatgatttctataatgaaatggatgtga

SEQ ID NO: 676134 - DNA, 75 bp, synthetic construct
  source 1..75: mol_type = other DNA
aaaaaactatgctgacagatttaaaaatattcagcagaagagcagtacgaaattgattttcaacatcgactggta

SEQ ID NO: 676135 - DNA, 75 bp, synthetic construct
  source 1..75: mol_type = other DNA
agaaatgacctgcttattcgcaccttccttagaaacccaacaaatgagaccctatcgattatccgacttatcaaa

SEQ ID NO: 676136 - DNA, 75 bp, synthetic construct
  source 1..75: mol_type = other DNA
aaaactatgctgacagatttaaaaaatattcagcagaagagcagtacgaaattgattttcaacatcgactggtaa

SEQ ID NO: 676137 - DNA, 75 bp, synthetic construct
  source 1..75: mol_type = other DNA
tcatgccgcgtcacccaagcgatgagatcaaagaaccattgcgtaaagccattctgaaacaactcggtttgagtt

SEQ ID NO: 676138 - DNA, 75 bp, synthetic construct
  source 1..75: mol_type = other DNA
aacatacagcgctgcaaataatccgccaacaaaacttgaatatgcaatagtaccattatcaacaaacttcccaac

SEQ ID NO: 676139 - DNA, 75 bp, synthetic construct
  source 1..75: mol_type = other DNA
accagcgtttaaacccaggagatacttccattgcaaacctgcaaagttgctttaaagccggatacaatggaagtg

SEQ ID NO: 676140 - DNA, 75 bp, synthetic construct
  source 1..75: mol_type = other DNA
aagcgccaacctttgaagtgggggattacatttacatccctggcattaaagcggcgctggataatccgggtacga

SEQ ID NO: 676141 - DNA, 75 bp, synthetic construct
  source 1..75: mol_type = other DNA
gcggcgaccttgccgaaacatttaaatctgaacgggaaacaacaaagaaccagatccgtgtcgccttgcctggca

SEQ ID NO: 676142 - DNA, 75 bp, synthetic construct
  source 1..75: mol_type = other DNA
ggtgatataatatggtccgtacaaaatggaaaactgaaagcatacaaccccaccccaaactatattaatttcaaa

SEQ ID NO: 676143 - DNA, 75 bp, synthetic construct
  source 1..75: mol_type = other DNA
gatcgttgtattgatttctggtggcagagcggcgggatacaggagcctgtcgatgacagaatgcatgatttatcg

SEQ ID NO: 676144 - DNA, 75 bp, synthetic construct
  source 1..75: mol_type = other DNA
ttcctgatcaccgtggagtgtttggtgaagtattaaaaactgagaaaaatggacagttatcattcttcactgcag

SEQ ID NO: 676145 - DNA, 75 bp, synthetic construct
  source 1..75: mol_type = other DNA
atgtatatcgatgatgtaatagccaaattcatcgaacatgcaaagggaagtaatattcaaaaagaggatattacc

SEQ ID NO: 676146 - DNA, 75 bp, synthetic construct
  source 1..75: mol_type = other DNA
taataacagggattaatggatttattggaaagaacttagttgtttctttaaaagaaaacggattcgataagatat

SEQ ID NO: 676147 - DNA, 75 bp, synthetic construct
  source 1..75: mol_type = other DNA
atcaactgggggatgttaccgctgcagatggcggaagtgccaacctttgaagtgggggattacatttacatccct

SEQ ID NO: 676148 - DNA, 75 bp, synthetic construct
  source 1..75: mol_type = other DNA
aaagtcatggagttcgttggaccgggcgttagcgcgctctctaccgatttccgtaacagcgttgacgtgatgacc

SEQ ID NO: 676149 - DNA, 75 bp, synthetic construct
  source 1..75: mol_type = other DNA
ggagtacgccttcgatgtaacgccgtataaaaaccgtgtttatcagggctttgtgaaaggggcaactcagcaacc

SEQ ID NO: 676150 - DNA, 75 bp, synthetic construct
  source 1..75: mol_type = other DNA
tggttattcggccgggttatacggaacctggtatcagaatggggcaaatgcaacaggcctctttgctgaaacctg

SEQ ID NO: 676151 - DNA, 75 bp, synthetic construct
  source 1..75: mol_type = other DNA
gatatttataaataccacgctgaaaaactgggtgactttaccctgggcattatgggtggctatgcaaacgcaaaa

SEQ ID NO: 676152 - DNA, 75 bp, synthetic construct
  source 1..75: mol_type = other DNA
gggaagtgcttcttctactgttatcaatgaggggggctcccagtttgtatatgaaggagggaacgtaagcggaac

SEQ ID NO: 676153 - DNA, 75 bp, synthetic construct
  source 1..75: mol_type = other DNA
atcactggcggtgaaaagcgcaagggtaatggctattactatgcgccgacgctgctggctggcgcattacaggac

SEQ ID NO: 676154 - DNA, 75 bp, synthetic construct
  source 1..75: mol_type = other DNA
tacgggtagttatgctgccgttgtagatggcggtacaattcactttgaaggcgaactggtgaatgctgccggtga

SEQ ID NO: 676155 - DNA, 75 bp, synthetic construct
  source 1..75: mol_type = other DNA
gatggcggtacaattcactttgaaggcgaactggtgaatgctgcctgttcagtgaatactgactcggcagactag

SEQ ID NO: 676156 - DNA, 75 bp, synthetic construct
  source 1..75: mol_type = other DNA
agctgcgctttaccggctctatccagcgtgacgatactggggaagtgcaggccgtggagcttgtcgtgcgtggac

SEQ ID NO: 676157 - DNA, 75 bp, synthetic construct
  source 1..75: mol_type = other DNA
ccgatgctgacggtaagttttcaggtattgatgttgatatttgtcgtggtgttgccgctgctgtatttggtgacg

SEQ ID NO: 676158 - DNA, 75 bp, synthetic construct
  source 1..75: mol_type = other DNA
gaccttatcaacatggtggaaattgtggacggtgtagacctgatggaagcgcaccgcaacgccctcggcctctga

SEQ ID NO: 676159 - DNA, 75 bp, synthetic construct
  source 1..75: mol_type = other DNA
actttggcggatcgtcagatgtcgcccaggagctggcggcagaacaagttgatctctacctcacctggggcgaac

SEQ ID NO: 676160 - DNA, 75 bp, synthetic construct
  source 1..75: mol_type = other DNA
ggtcgtgcgttgtttaatctggtcacaggcagcgatccacaagagctggcaggcgacggcgtgttccttgatcat

SEQ ID NO: 676161 - DNA, 75 bp, synthetic construct
  source 1..75: mol_type = other DNA
gatgcagcagagttaccttcgcatgaatcgattagaatttatataaaaactaaaaaggatgatgatacaacttta

SEQ ID NO: 676162 - DNA, 75 bp, synthetic construct
  source 1..75: mol_type = other DNA
acctacagaggaaaatatccgtaacggcacttatccgtacataattgatgcttatatggtgacgcacgaaaaccc

SEQ ID NO: 676163 - DNA, 75 bp, synthetic construct
  source 1..75: mol_type = other DNA
aacccggtaaattctctctctgagcaccaggttaaagatatttttagcggcaaaactagccgctggaataaagta

SEQ ID NO: 676164 - DNA, 75 bp, synthetic construct
  source 1..75: mol_type = other DNA
ataaaacactctccaggaaacctggggcggttcaatgcggcaggtaaagcggatattgagttgatatcaaccgtt

SEQ ID NO: 676165 - DNA, 75 bp, synthetic construct
  source 1..75: mol_type = other DNA
cattaaataatggaataaatcaggtttgggaaaaaataaaaaatataccagatgaatttttaataataatttcac

SEQ ID NO: 676166 - DNA, 75 bp, synthetic construct
  source 1..75: mol_type = other DNA
gactgggggtcagtgcaggcgcggcttacggagattcgccatcactattgcgatgcgtttatggatggcaaggcg

SEQ ID NO: 676167 - DNA, 75 bp, synthetic construct
  source 1..75: mol_type = other DNA
gaatcattattcagggcaaaaacagctccctgacagcaccgactcacagtagatgttgttggtcaaacctctgcc

SEQ ID NO: 676168 - DNA, 75 bp, synthetic construct
  source 1..75: mol_type = other DNA
tggcgtgattgtcattaaggcacaggaataccgcagtcaggaactgaaccgcgaagcggcgctggcccggctggt

SEQ ID NO: 676169 - DNA, 75 bp, synthetic construct
  source 1..75: mol_type = other DNA
atgacttcaaagtgcgtactctgaagaatttcaaaggcgaattgtacagaaaatgtatgccgggtgcatcaaatg

SEQ ID NO: 676170 - DNA, 75 bp, synthetic construct
  source 1..75: mol_type = other DNA
tccacgtggattctctcgtcatggtgatttcaccatcaaagaggcacaactgcttgagcgtcatggttatgcctt

SEQ ID NO: 676171 - DNA, 75 bp, synthetic construct
  source 1..75: mol_type = other DNA
tatgccgggcgcggtagatgtggatatggggctggatgacggcgcactcgacacggaattttcaatcggcggcac

SEQ ID NO: 676172 - DNA, 75 bp, synthetic construct
  source 1..75: mol_type = other DNA
ccgcaatgaaagaacagaaaattcccggtaactgttatccggtagaaaaaattatacaccagaattttactgaaa

SEQ ID NO: 676173 - DNA, 75 bp, synthetic construct
  source 1..75: mol_type = other DNA
tattatccggtgcgccgtaagccgtctcgagggtacccatgagcaggccgcacttatggcaggaggcgcggggca

SEQ ID NO: 676174 - DNA, 75 bp, synthetic construct
  source 1..75: mol_type = other DNA
tattatccggtgcgccgtaagccgtctcgggggtacccatgagcaagccgcacttatggcaggaggcgcggggca

SEQ ID NO: 676175 - DNA, 75 bp, synthetic construct
  source 1..75: mol_type = other DNA
aagtgtgaatggcattaacgtgtgttttgaaaaaaatgaaatgataggttggattaaaaagaaatccctttgctg

SEQ ID NO: 676176 - DNA, 75 bp, synthetic construct
  source 1..75: mol_type = other DNA
aagggcggtagcgtgccatcgcaaaacatggtgggaggtatcgtcaggaggctggtgaaccgccccggttttcct

SEQ ID NO: 676177 - DNA, 75 bp, synthetic construct
  source 1..75: mol_type = other DNA
aatttggccacctgaacagaggtgatatgctcacctcagaacaacacaggtgctccaatgaaaaaaagaaatttc

SEQ ID NO: 676178 - DNA, 75 bp, synthetic construct
  source 1..75: mol_type = other DNA
taaacttaaggcagtcaggtctgtttggtatatttatagacatattgaattaattcctttttcacagtctttatt

SEQ ID NO: 676179 - DNA, 75 bp, synthetic construct
  source 1..75: mol_type = other DNA
agttgatggattctgcttccattatgtaggggcatcatcttcaggcaaatcccggtcaatgacggttgccgcttc

SEQ ID NO: 676180 - DNA, 75 bp, synthetic construct
  source 1..75: mol_type = other DNA
ctggataaaataaaatcactaacctccagtaaattaaattccattctgaatgaagtattcaaggtgtcaaaatga

SEQ ID NO: 676181 - DNA, 75 bp, synthetic construct
  source 1..75: mol_type = other DNA
catccatgtgctgtcgccttacttcacgccatcctgccagagcttcctgcgccacgactacgaatatcgccgcac

SEQ ID NO: 676182 - DNA, 75 bp, synthetic construct
  source 1..75: mol_type = other DNA
accccacagcagacccgactcaggaaaagctgcaggtctggtatatcgacgggaaaactggcgagcttgccggtg

SEQ ID NO: 676183 - DNA, 75 bp, synthetic construct
  source 1..75: mol_type = other DNA
ggggatgagtccaagcttccggcgaaaccaatctggtggcagggaaatgaatacgccgcctggccgtatcagctg

SEQ ID NO: 676184 - DNA, 75 bp, synthetic construct
  source 1..75: mol_type = other DNA
tcagcccggaaggggaaacggcgtggtgcggggagtatgacgagtgggggaaccagcttaatgaggagaacccgc

SEQ ID NO: 676185 - DNA, 75 bp, synthetic construct
  source 1..75: mol_type = other DNA
ttcatgaacaatgaactaggtgaaatcttcgaagatgaatatcagaaagaagtagatatcatccaactagaacag

SEQ ID NO: 676186 - DNA, 75 bp, synthetic construct
  source 1..75: mol_type = other DNA
tagtagtgaagatgatattaaaaagtttaaacagggtaagtttatgcccgttgtagaaacctctccagtactatc

SEQ ID NO: 676187 - DNA, 75 bp, synthetic construct
  source 1..75: mol_type = other DNA
atggacgattcgaggcactatagatgataaagttgaatcatcacgacaagagctaacaggaaacatccaaaccag

SEQ ID NO: 676188 - DNA, 75 bp, synthetic construct
  source 1..75: mol_type = other DNA
taaaagaaggcgacgagtgtctgctgatctttgccgaccgttgcatcgatttctggtggcagagcggcggcgttc

SEQ ID NO: 676189 - DNA, 75 bp, synthetic construct
  source 1..75: mol_type = other DNA
tataaataaaaatgaagaaccaacacccacaacgacaaaacctgcaaaacgcaggcgtacaggtatggggagtaa

SEQ ID NO: 676190 - DNA, 75 bp, synthetic construct
  source 1..75: mol_type = other DNA
cttttggtagtagttcggaatctgaagtgaagaagttcaaagatggtaagtttttaccagctattgaaaccagtt

SEQ ID NO: 676191 - DNA, 75 bp, synthetic construct
  source 1..75: mol_type = other DNA
gcgcagtgccgcagcctggcggagaagatacagcaggaagggagcgaggacgggcacggcgtggtatttccggct

SEQ ID NO: 676192 - DNA, 75 bp, synthetic construct
  source 1..75: mol_type = other DNA
tggaaccaaaacgacatccagttttgattatggctccaaatcaacaaattcaacgggtgaccatgcacattcgtt

SEQ ID NO: 676193 - DNA, 75 bp, synthetic construct
  source 1..75: mol_type = other DNA
gagaaccgtgtccggcgacgtcgccgcaaagccagcgatccagtttttgaacccaacggttcgtttttatctcct

SEQ ID NO: 676194 - DNA, 75 bp, synthetic construct
  source 1..75: mol_type = other DNA
agggaacacgtaataccactctcgaagcaggcgttagccattctggatgtcatgaagccaataagcgggcatcgt

SEQ ID NO: 676195 - DNA, 75 bp, synthetic construct
  source 1..75: mol_type = other DNA
atcgataatataattgctgaggattttttggcatggagtaacttgttaaacactggtcatgttggacatagaatt

SEQ ID NO: 676196 - DNA, 75 bp, synthetic construct
  source 1..75: mol_type = other DNA
tgaaatattacacatgacaggtaaaaaattgcctaaaagttgtcaagagtcaaccaatagatacattttatatcg

SEQ ID NO: 676197 - DNA, 75 bp, synthetic construct
  source 1..75: mol_type = other DNA
tggtactaagtcttcaaatgccactggtgaccataaccacaaccgaggcactatggaaattaccggtactctcgg

SEQ ID NO: 676198 - DNA, 75 bp, synthetic construct
  source 1..75: mol_type = other DNA
ggtatggaaccatacagacaccgtcgaacaggttgtcaaaagttcttaaagaaaacaaggataagttcgaagtaa

SEQ ID NO: 676199 - DNA, 75 bp, synthetic construct
  source 1..75: mol_type = other DNA
ccggcctccagggataaacttttacagcaggctctgactcaggttgcgagggacctggctgaaggagacgttaac

SEQ ID NO: 676200 - DNA, 75 bp, synthetic construct
  source 1..75: mol_type = other DNA
attggatgaatgtaatggcacgctcaccgcctgcaagcttcggtttggtgaacacaatgaacttcctttcggtgg

SEQ ID NO: 676201 - DNA, 75 bp, synthetic construct
  source 1..75: mol_type = other DNA
gacgatctgtttgcgcggtggccttacgggcctgtaataccgcacctgtatcacatgttaaagaaatatgggagc

SEQ ID NO: 676202 - DNA, 75 bp, synthetic construct
  source 1..75: mol_type = other DNA
gtgcggagatattacgtatagtgtgcccggagttcagggcgggcatggatgcttaaatgaaccgcgagtctgtct

SEQ ID NO: 676203 - DNA, 75 bp, synthetic construct
  source 1..75: mol_type = other DNA
ccttgagaacgacaaggtcagaaaggctatcaaagaacagctggacaagcttgagtcattggaaaacaaaaagcc

SEQ ID NO: 676204 - DNA, 75 bp, synthetic construct
  source 1..75: mol_type = other DNA
acgaaaaagcccgattaccagtcgggtttttttgtgcctgtcgttcgactgttcttccgttttttcccttcattt

SEQ ID NO: 676205 - DNA, 75 bp, synthetic construct
  source 1..75: mol_type = other DNA
ctctgactctggaaaaagactcacgactgacggttaatatgtggctggtgaactccggcacaattaacgttggtg

SEQ ID NO: 676206 - DNA, 75 bp, synthetic construct
  source 1..75: mol_type = other DNA
atcacccaagatgagttgacagctattgttgacgctttgtcaaacaactctcatattaaaatcagttacttagag

SEQ ID NO: 676207 - DNA, 75 bp, synthetic construct
  source 1..75: mol_type = other DNA
ctgttctggcgaccggcaagcattcgcctgattcccgaagatgctgcaccgaaggtgaagtggcaccgggaaggg

SEQ ID NO: 676208 - DNA, 75 bp, synthetic construct
  source 1..75: mol_type = other DNA
cccgctgctggtggatgtgccggtggtattcccacgcggcggaggctgtacgttgacttttccggtaaaggctgg

SEQ ID NO: 676209 - DNA, 75 bp, synthetic construct
  source 1..75: mol_type = other DNA
agatatatataaaattcagatagcatccgataattctttgtctgaagatgaaatgcttaaaaaaagtaatcaaat

SEQ ID NO: 676210 - DNA, 75 bp, synthetic construct
  source 1..75: mol_type = other DNA
tgacctgctgaacttcatttaccggaaggacggcaaggacattgtgcccgatcgcatccgttccgcgctcggact

SEQ ID NO: 676211 - DNA, 75 bp, synthetic construct
  source 1..75: mol_type = other DNA
ttcgatatttaccaagttgaaaagtttgcaacaggtagagaacgtctttatttaaattcaattccatattatgca

SEQ ID NO: 676212 - DNA, 75 bp, synthetic construct
  source 1..75: mol_type = other DNA
atagtcatattgcgattgattcgcagtatcatgcttttaaaaaaataaaaagccttacagttaaggaactgaaat

SEQ ID NO: 676213 - DNA, 75 bp, synthetic construct
  source 1..75: mol_type = other DNA
gatgttctatctccacaggagttctgtgaatctgattatgataacaagttctttaatgtcgctattggtgatagt

SEQ ID NO: 676214 - DNA, 75 bp, synthetic construct
  source 1..75: mol_type = other DNA
cgttttatgcgcaactgcgacctgtcggtggcggtgtgcagtcaggcaatgtgagtgccagcgcgacatttgtac

SEQ ID NO: 676215 - DNA, 75 bp, synthetic construct
  source 1..75: mol_type = other DNA
agtttctttcgatgttttttatggccatattatttttccctgcattcaatgcttctttgttttttaccggagtta

SEQ ID NO: 676216 - DNA, 75 bp, synthetic construct
  source 1..75: mol_type = other DNA
ggctctttaaaacaaccctttggtacaaattatttatcgcgattatgttaagcctttttttaggccagccagcat

SEQ ID NO: 676217 - DNA, 75 bp, synthetic construct
  source 1..75: mol_type = other DNA
gtgtcggcgtcggcggtccggtcggctcaggtaaaaccgcgcttctggaagccctctgcaaatccatgcgtgaca

SEQ ID NO: 676218 - DNA, 75 bp, synthetic construct
  source 1..75: mol_type = other DNA
cgcgttctatagcggcgagaagacgctgggcgtcaacaacgcgctgagcggagagaactgcgtggccgcgggcaa

SEQ ID NO: 676219 - DNA, 75 bp, synthetic construct
  source 1..75: mol_type = other DNA
ctaccgcacactgtgtgaactagcttttaaagcgataaagcaagatgatgttttatctaaaattattgttagatc

SEQ ID NO: 676220 - DNA, 75 bp, synthetic construct
  source 1..75: mol_type = other DNA
ggaacgagctgctgtgctttgctttgctgcggaaagtgtggcgacagattgccatcgtggtgcagccgggtgtgg

SEQ ID NO: 676221 - DNA, 75 bp, synthetic construct
  source 1..75: mol_type = other DNA
taccgttagcaccagaaacggttgcggaacgagctgctgtgcggaaagtgtggcgacagattgccagcgtgagca

SEQ ID NO: 676222 - DNA, 75 bp, synthetic construct
  source 1..75: mol_type = other DNA
cgcattctcactgaggccggagcactggaagcggaacgcattgtcggtgtcgaaacggggggctgccctcataca

SEQ ID NO: 676223 - DNA, 75 bp, synthetic construct
  source 1..75: mol_type = other DNA
ctggagctaccacgcgttgttctggctggcgataggaatgctgggtattgcgatgatttgcctgctgtttattaa

SEQ ID NO: 676224 - DNA, 75 bp, synthetic construct
  source 1..75: mol_type = other DNA
ccaaaggtatgtcattacctgaagatcgtgagtctgttttttggctgaatattaaaaatattcccccctctgcga

SEQ ID NO: 676225 - DNA, 75 bp, synthetic construct
  source 1..75: mol_type = other DNA
aataatgcagataaatctatttctgtatttagtaaggaagaaaaaattccttatctcatccaggcatgggtggac

SEQ ID NO: 676226 - DNA, 75 bp, synthetic construct
  source 1..75: mol_type = other DNA
ccagcgctgaatgcctgccgggtttacctactttcaactggtaaccagaaacaacatgaaatcattaaccactga

SEQ ID NO: 676227 - DNA, 75 bp, synthetic construct
  source 1..75: mol_type = other DNA
acatgaaatcattaaccacggaaaccgcactggatattctgattgcgtggctgcaggacaatatcgactgcgaat

SEQ ID NO: 676228 - DNA, 75 bp, synthetic construct
  source 1..75: mol_type = other DNA
caccgctcgcttatgagctggcaatgggatttagttttaaagtgatgtatctcaccgctgccatcgcatttgttg

SEQ ID NO: 676229 - DNA, 75 bp, synthetic construct
  source 1..75: mol_type = other DNA
tttgttattaatgcatacattaaggaaataactcttaaaaaagagcttaaaaatatagctttaattgttcctaca

SEQ ID NO: 676230 - DNA, 75 bp, synthetic construct
  source 1..75: mol_type = other DNA
tcacccgcaacaccgtcagatgaagacaactacacctttgacccgcaactctttcgcggcagcagatttagtcag

SEQ ID NO: 676231 - DNA, 75 bp, synthetic construct
  source 1..75: mol_type = other DNA
ttcgctatgggcatcatttaatggtggcatcaaccttggtgcctggcaatatcgtcagttatccaacatgacctg

SEQ ID NO: 676232 - DNA, 75 bp, synthetic construct
  source 1..75: mol_type = other DNA
cagtaacgccctatcgctacaaccgtatatctctcgatccacaaggaatggatggcgatgccgagctggtcgaca

SEQ ID NO: 676233 - DNA, 75 bp, synthetic construct
  source 1..75: mol_type = other DNA
aaggcgcagaaggtgcaaaagtctataactccagtcagctggaaattaatgacagtggctatgcgcttgttccgg

SEQ ID NO: 676234 - DNA, 75 bp, synthetic construct
  source 1..75: mol_type = other DNA
gaaacgttcgccctggtcgaagctaaaggcgcagaaggtgcaaaagtctataactccagtcagctggaaattaat

SEQ ID NO: 676235 - DNA, 75 bp, synthetic construct
  source 1..75: mol_type = other DNA
gtttttcacaaactaccgtcggattgaacgcatcgaagggccaggattactggcaggcttcaggtaacgtacaag

SEQ ID NO: 676236 - DNA, 75 bp, synthetic construct
  source 1..75: mol_type = other DNA
caccagacctggacatccgcatcccgtatgccacggacccggcgggcaaccggctgccggacccggagctgcacc

SEQ ID NO: 676237 - DNA, 75 bp, synthetic construct
  source 1..75: mol_type = other DNA
aggaagggagcgaggacgggcacggcgtggtatttccggctgaactggtgcggctgctggacagactggaggaag

SEQ ID NO: 676238 - DNA, 75 bp, synthetic construct
  source 1..75: mol_type = other DNA
cggaagctgaccgctgggcgcaggcagaagagcagaagtatgagatgctggagaatgagtactctcagagggtgg

SEQ ID NO: 676239 - DNA, 75 bp, synthetic construct
  source 1..75: mol_type = other DNA
ggctgaccacaatacagaacgacagaacccgcatccagacgatttatcagccggggagcttcacgccactcatca

SEQ ID NO: 676240 - DNA, 75 bp, synthetic construct
  source 1..75: mol_type = other DNA
ggatagacaaggtcagccagctaaagaaagaatcatggatcttaaaaataacactgtcggtattgcttgtggcga

SEQ ID NO: 676241 - DNA, 75 bp, synthetic construct
  source 1..75: mol_type = other DNA
aatacggcgtggcgcggggagtatgatgaatggggcaaccagcttaatgaggagaacccgcatcacctgcaccag

SEQ ID NO: 676242 - DNA, 75 bp, synthetic construct
  source 1..75: mol_type = other DNA
gactggctcgattctattggcgaggcgcaggcggaaaatattttcacccatgagcagttgctgcgctatttccct

SEQ ID NO: 676243 - DNA, 75 bp, synthetic construct
  source 1..75: mol_type = other DNA
aatgagcaccttcatcatatttatgatgaacttttcctttattttgatgatctctattttggttatcaattaact

SEQ ID NO: 676244 - DNA, 75 bp, synthetic construct
  source 1..75: mol_type = other DNA
tcccgacctcgtttagtgataccttgcaatatatcaaacatccccaacgatatgtaccagataataagaaaatgc

SEQ ID NO: 676245 - DNA, 75 bp, synthetic construct
  source 1..75: mol_type = other DNA
atcctgatggcgctcttcgctgctggcggtactatttatgggatggcggaagaatcactccccttctacacgtag

SEQ ID NO: 676246 - DNA, 75 bp, synthetic construct
  source 1..75: mol_type = other DNA
ggggatgataagtttatcaccaccgactatttgcaacagtgcccttgtgacagctgttatttcaaggattgtgtt

SEQ ID NO: 676247 - DNA, 75 bp, synthetic construct
  source 1..75: mol_type = other DNA
actacacgcggacacaatatgcagagccgctggtcgaaagtcgctatctttacgacccgctgggccgcagggtgg

SEQ ID NO: 676248 - DNA, 75 bp, synthetic construct
  source 1..75: mol_type = other DNA
ccgttacgtcgtatatggggtattacccgcgcagtcatggccttctccgggaacttataccgatacggttattat

SEQ ID NO: 676249 - DNA, 75 bp, synthetic construct
  source 1..75: mol_type = other DNA
aagaaactgatgagatggcctcagcttgggaaaaatggaagaataaccaattagcaccaatagccgcatcactag

SEQ ID NO: 676250 - DNA, 75 bp, synthetic construct
  source 1..75: mol_type = other DNA
caacattatctggtttgatcatctgtcaaccgacgtgatccatcaggtggtggataaattcatcgtcgagttgca

SEQ ID NO: 676251 - DNA, 75 bp, synthetic construct
  source 1..75: mol_type = other DNA
atcataatacagcaaaccaactcttagctgcaatacacaaaaaaatagaagatgaagataaggttaaattatcat

SEQ ID NO: 676252 - DNA, 75 bp, synthetic construct
  source 1..75: mol_type = other DNA
agtctcaggcgcagaaaatcagcggaatcagcaccagcgccgcgcaactgcgtactgatgatggcgctgcgtttg

SEQ ID NO: 676253 - DNA, 75 bp, synthetic construct
  source 1..75: mol_type = other DNA
aagaagttaaaagagaatacaaggagcaagaaggaaatccagaaattaagtctaaacgcagagagcgcatcagga

SEQ ID NO: 676254 - DNA, 75 bp, synthetic construct
  source 1..75: mol_type = other DNA
tgataggtggtatggctggtgatgttggtagtattctttctggtgttctaggtgaaagtaatgcggcatctaagg

SEQ ID NO: 676255 - DNA, 75 bp, synthetic construct
  source 1..75: mol_type = other DNA
actttcattatcaatcaattctttgttgccacaccaacttgctaaaacatgtactcgtaatgaaactaaactaat

SEQ ID NO: 676256 - DNA, 75 bp, synthetic construct
  source 1..75: mol_type = other DNA
gtgctaatggcatgctgggcagcagtctgctacgatattttacccaatatagtagatatgatgttttgggtactg

SEQ ID NO: 676257 - DNA, 75 bp, synthetic construct
  source 1..75: mol_type = other DNA
cacatttgagggtgaacgccataatgccctgcacgatgcgcgttaccaggcaaaatacgtttcagctatctggca

SEQ ID NO: 676258 - DNA, 75 bp, synthetic construct
  source 1..75: mol_type = other DNA
ttacgttgctgcgtggcgtgggcttactgggcaaagaagatctgcttttaaggcctgggcggccttcgggaatta

SEQ ID NO: 676259 - DNA, 75 bp, synthetic construct
  source 1..75: mol_type = other DNA
atgaataagaaacaaagaattaattatttttatgataaaactacttcttggaattatttaaataccatttttctt

SEQ ID NO: 676260 - DNA, 75 bp, synthetic construct
  source 1..75: mol_type = other DNA
aataaaaattaacgcattattgccacatgagttggctgaaatatgttgttctcatggggcaaagcttatccattt

SEQ ID NO: 676261 - DNA, 75 bp, synthetic construct
  source 1..75: mol_type = other DNA
actgggtaatcaaacgctcaactccgttcttcacaaaagagaacgtaccttcagcgttattaacacatcataata

SEQ ID NO: 676262 - DNA, 75 bp, synthetic construct
  source 1..75: mol_type = other DNA
acttggtgatgaagttcaagctaacaaacagctaaaaacactgatagagaaagattatatgaactattatagata

SEQ ID NO: 676263 - DNA, 75 bp, synthetic construct
  source 1..75: mol_type = other DNA
aagattatatgaactattatagatactcagcctggccagcagttccagaaagcgccctcttaaaatataaaaata

SEQ ID NO: 676264 - DNA, 75 bp, synthetic construct
  source 1..75: mol_type = other DNA
ggggacgtattctgaagcgagcctgtaacgctttaaacgatggtggtgtatttatccagtttcagtattccacag

SEQ ID NO: 676265 - DNA, 75 bp, synthetic construct
  source 1..75: mol_type = other DNA
actgataaaacttcaggaaatggatccccgtttgcaggttgtaaataaatttgcagaaaaaatgactggcaaata

SEQ ID NO: 676266 - DNA, 75 bp, synthetic construct
  source 1..75: mol_type = other DNA
tcagcgttattaacacatcataatacagcagcaggtgtttttgggcagttgtgcgtaatggaaggcactgtaaca

SEQ ID NO: 676267 - DNA, 75 bp, synthetic construct
  source 1..75: mol_type = other DNA
aacggcaagccaattgatgatacgcacactcatggtggtgttcagcgcggtggaagcaataccgacggagtaaac

SEQ ID NO: 676268 - DNA, 75 bp, synthetic construct
  source 1..75: mol_type = other DNA
aatgattattatagagacttagaaataaaacactcacaaccccaaaatagagcatcaggcaaaagagtaagttaa

SEQ ID NO: 676269 - DNA, 75 bp, synthetic construct
  source 1..75: mol_type = other DNA
aatgaactgagtgatggtacaaacttctgggataaaaatcgtcaattaaccacagatgaaatagcttgctatctt

SEQ ID NO: 676270 - DNA, 75 bp, synthetic construct
  source 1..75: mol_type = other DNA
ggaacggtcaggtctggcgatatcagcgtgccggaggcctggccgttattctggaagtcaggggcgctggatgga

SEQ ID NO: 676271 - DNA, 75 bp, synthetic construct
  source 1..75: mol_type = other DNA
acgaaattgattttcaacatcgactgataaacagaaattgttatttagataaatatggcgatgcactaatcaatg

SEQ ID NO: 676272 - DNA, 75 bp, synthetic construct
  source 1..75: mol_type = other DNA
attaaccacggatgaaatagattgctatcttcagaagatcgccgctaatgcaaaaaatactcaagtcaattatcc

SEQ ID NO: 676273 - DNA, 75 bp, synthetic construct
  source 1..75: mol_type = other DNA
gaagtccagttattccccataaatactggcggacactggatattagtttcgctacagaaaatagtaaataaaaaa

SEQ ID NO: 676274 - DNA, 75 bp, synthetic construct
  source 1..75: mol_type = other DNA
gtactggcggacaatttgcgctacccgattttgcataaactgaaagacaggttaaatcaaacctggtatcagatc

SEQ ID NO: 676275 - DNA, 75 bp, synthetic construct
  source 1..75: mol_type = other DNA
acgacctccggaacacttatcgaaggaaccaacagttatggtgatgctttctacatcaggaattcagaagctaaa

SEQ ID NO: 676276 - DNA, 75 bp, synthetic construct
  source 1..75: mol_type = other DNA
attggcatcctcaaagaatcttgggggaagtcagagccagagaaggaagtatgagggcgctggcccgtaaagctg

SEQ ID NO: 676277 - DNA, 75 bp, synthetic construct
  source 1..75: mol_type = other DNA
cagtatcaactcaggggcatgttgacggtacgacgataaataagtctggttatcaggacatcatgcaaggaagtc

SEQ ID NO: 676278 - DNA, 75 bp, synthetic construct
  source 1..75: mol_type = other DNA
gttaaatcaaacctggtatcagatccgtattggcgatcgactggcctatatcagcgcactggatgcccaacccga

SEQ ID NO: 676279 - DNA, 75 bp, synthetic construct
  source 1..75: mol_type = other DNA
cccaaactcaaaggaaaagattaaaatacttacagatacttctaatttaatttatgatttgttcggggttaaatc

SEQ ID NO: 676280 - DNA, 75 bp, synthetic construct
  source 1..75: mol_type = other DNA
ccattaaagacgcccacggtatggtgttgctggatgatttcgccagtgtgcagaacattattaacaacagtgaag

SEQ ID NO: 676281 - DNA, 75 bp, synthetic construct
  source 1..75: mol_type = other DNA
aaaaccgaatactgccggtggcccacgcaccagtaccatgcaagttaatcagtacaacatcggcaatgaacagga

SEQ ID NO: 676282 - DNA, 75 bp, synthetic construct
  source 1..75: mol_type = other DNA
aagcgcatatggtgccaatggatgaaacgcttaaagaatttggtgccgatgtgcagtgggacgactacgcccaga

SEQ ID NO: 676283 - DNA, 75 bp, synthetic construct
  source 1..75: mol_type = other DNA
agtgggtaactatgactacattttggctggatcttccatgaaaacggcactattggcatcgatgccggtgctacg

SEQ ID NO: 676284 - DNA, 75 bp, synthetic construct
  source 1..75: mol_type = other DNA
attgctcgtggtaaagatgcaccgtctaacgcagtgctccttaatgaaaccatcgccgactacactggcgtgccg

SEQ ID NO: 676285 - DNA, 75 bp, synthetic construct
  source 1..75: mol_type = other DNA
agcctatgcaaatcattgagcctgaaggtaaaaattacaccattactggcgatatgattcactggcgtaactggg

SEQ ID NO: 676286 - DNA, 75 bp, synthetic construct
  source 1..75: mol_type = other DNA
aaaatataaaaaattcagttattttaatgcatcgtggaacggaacgtatggaacacttggtgcaaactataacta

SEQ ID NO: 676287 - DNA, 75 bp, synthetic construct
  source 1..75: mol_type = other DNA
gatgatgagcaatgtgttaatcttgacaaggaaaatatagaatacctctttaacccaacaaatcaaatcttactg

SEQ ID NO: 676288 - DNA, 75 bp, synthetic construct
  source 1..75: mol_type = other DNA
ttctgacatccatcattaatgcaggggattcttttgcaaaagaatataaatttaactatcgatacttaggaatgg

SEQ ID NO: 676289 - DNA, 75 bp, synthetic construct
  source 1..75: mol_type = other DNA
atgatagatttctcatcagaaaaaatacatgattatatcgacataatcattgaagattatgaaaacataaaagaa

SEQ ID NO: 676290 - DNA, 75 bp, synthetic construct
  source 1..75: mol_type = other DNA
tcatcgaaaatcaataattgcttgaacagaattaaattaccagagatgatagatttctcatcagaaaaaatacat

SEQ ID NO: 676291 - DNA, 75 bp, synthetic construct
  source 1..75: mol_type = other DNA
ttttggcacaattttagcagttaaagatgaaaaaggagtggtgcaatcaacatctattgttggcgataatggtga

SEQ ID NO: 676292 - DNA, 75 bp, synthetic construct
  source 1..75: mol_type = other DNA
cacacatgtggcccgtgccgaagagtggccgattatgccgaccgaatgggtacatactctgcttaaaccatggaa

SEQ ID NO: 676293 - DNA, 75 bp, synthetic construct
  source 1..75: mol_type = other DNA
atggaaataaagctcatcgataacccggtgaaacttgcagaattccttaacaacccggtaaacacggggaatatc

SEQ ID NO: 676294 - DNA, 75 bp, synthetic construct
  source 1..75: mol_type = other DNA
atggtggatgcaaatcagtatctgaaagattatgtcagcgcggaactgggcgaaccaggtcccttctcccgggct

SEQ ID NO: 676295 - DNA, 75 bp, synthetic construct
  source 1..75: mol_type = other DNA
gtcagcttctcctgagcagcgccaggcagttcacgagaaaatgcagactaacccgcagaaccagcagcgaagaga

SEQ ID NO: 676296 - DNA, 75 bp, synthetic construct
  source 1..75: mol_type = other DNA
accgatgcggccggtcaggtggtatttgaaaccaggctgaagcccacggtcgccatcggggcgcaggccgccgct

SEQ ID NO: 676297 - DNA, 75 bp, synthetic construct
  source 1..75: mol_type = other DNA
ttatcccaccacaattcaaagggttatgtttctatgtgtgcattcttcctgctagacgaggaaagaaacgccaaa

SEQ ID NO: 676298 - DNA, 75 bp, synthetic construct
  source 1..75: mol_type = other DNA
ctaagttagcgttaaaaaaaagaacagttaaagatttggctgattatataaaaataaaatcaggaacaactcctg

SEQ ID NO: 676299 - DNA, 75 bp, synthetic construct
  source 1..75: mol_type = other DNA
cgcatataaactgaccagcacatacacccccgcaggccagttacagagccagcacctgaacagcctggtatatga

SEQ ID NO: 676300 - DNA, 75 bp, synthetic construct
  source 1..75: mol_type = other DNA
catggcttatttccatagacagccaaaagcctatgcaagaagaaacagaaaattttataaaacgtgcactgacct

SEQ ID NO: 676301 - DNA, 75 bp, synthetic construct
  source 1..75: mol_type = other DNA
cacgccgctgaccgtaggttatttcgatggtaaagatggcctgaaacaagatgcccggttgctcaaagtcatcag

SEQ ID NO: 676302 - DNA, 75 bp, synthetic construct
  source 1..75: mol_type = other DNA
ctgccaggctgaataacgagcaacggtcagcgatacgggaacggttgtctgagcgtggagcaaggagaatggaaa

SEQ ID NO: 676303 - DNA, 75 bp, synthetic construct
  source 1..75: mol_type = other DNA
gcgtttccgtggtcgtgagatggcgcaccagcaaatcggcatggaagtgcttaatcgcgtgaaagacgatttgca

SEQ ID NO: 676304 - DNA, 75 bp, synthetic construct
  source 1..75: mol_type = other DNA
ttactattcgacaggaactgaccttaatgtattgagagacccgataatgggtctgcgttcgggtgatgctgccaa

SEQ ID NO: 676305 - DNA, 75 bp, synthetic construct
  source 1..75: mol_type = other DNA
gcgccgcttacatccatcttgctgaacatctcgatgagcgtaggctaatgctacagtggtgggctgactatcttg

SEQ ID NO: 676306 - DNA, 75 bp, synthetic construct
  source 1..75: mol_type = other DNA
caaaccttctggggtattaaccagccgtctgctgtggtgaaaactggcatcagtgccaacgtcattactgagatg

SEQ ID NO: 676307 - DNA, 75 bp, synthetic construct
  source 1..75: mol_type = other DNA
cggcgaggggttccttctgtccagcctggggatctttaccagccgtccaagtgatacgcaaatcatcgcactcga

SEQ ID NO: 676308 - DNA, 75 bp, synthetic construct
  source 1..75: mol_type = other DNA
agggaaaacctgggggttcctgacacagcaaaaaacaggccgttgcaggtgagctacgcgcctctgtttgttacg

SEQ ID NO: 676309 - DNA, 75 bp, synthetic construct
  source 1..75: mol_type = other DNA
cctacaccgcgggcggcgcgataaaagttacggtaacactcaaggatagctatgaaaacctggtcggggggcaac

SEQ ID NO: 676310 - DNA, 75 bp, synthetic construct
  source 1..75: mol_type = other DNA
acggtcgctccgacggtcaccacgcagccggacggcacggtggagatcagtgtcaccagccagacggcgggcacc

SEQ ID NO: 676311 - DNA, 75 bp, synthetic construct
  source 1..75: mol_type = other DNA
gatccgctatatggcattgcagatggtgaaggctacatgctggcgacgttctccaatgttgttgaaggcgacctt

SEQ ID NO: 676312 - DNA, 75 bp, synthetic construct
  source 1..75: mol_type = other DNA
aacccatgcgactgatgctacaggctcagcacgcgcagccagcacgtcagccggacaggccgcgtcgtcggctca

SEQ ID NO: 676313 - DNA, 75 bp, synthetic construct
  source 1..75: mol_type = other DNA
ggagcgatgacgcgatagaacgtcagttgagccatacagaacgaaataatgtacgcgcggcttatattcatactt

SEQ ID NO: 676314 - DNA, 75 bp, synthetic construct
  source 1..75: mol_type = other DNA
atgccattgctcataccgttgatcgcaacggcttatggcacgcgctgacgccgcaatttttccctcgtgagctgt

SEQ ID NO: 676315 - DNA, 75 bp, synthetic construct
  source 1..75: mol_type = other DNA
gcgttattgcacaggaagtaatggaggcgatacctgaagctgtgggatcgtttactcattatggtgaagagttgc

SEQ ID NO: 676316 - DNA, 75 bp, synthetic construct
  source 1..75: mol_type = other DNA
ttgtatctcgaggtgtcggccaagggttccaaatactggcgcatgaaataccgacgcccctctgacaaaaaagag

SEQ ID NO: 676317 - DNA, 75 bp, synthetic construct
  source 1..75: mol_type = other DNA
ccggacaggccgcgtcgtcggctcagtcagcgtcttccagcgcaggaacggcatcaacaaaggctactgaagcat

SEQ ID NO: 676318 - DNA, 75 bp, synthetic construct
  source 1..75: mol_type = other DNA
ctgtcaccagccagaccgccggaatcagtgcggtcactgcaactatcaacaacagcaccgcgagccagaacgtga

SEQ ID NO: 676319 - DNA, 75 bp, synthetic construct
  source 1..75: mol_type = other DNA
ccagcatcaacaacagcagccagagccgaaacgtgacgtttactgccgatgtcaggacggcgcagatcgcggagc

SEQ ID NO: 676320 - DNA, 75 bp, synthetic construct
  source 1..75: mol_type = other DNA
cgggcaccagtacagtcaccgccagcatcaacagcagcagcctgagccggaccgtgacgtttatcgccgatgtca

SEQ ID NO: 676321 - DNA, 75 bp, synthetic construct
  source 1..75: mol_type = other DNA
cggacaacggtgcagcggtcgcttcgacgatgaccacaaagccggacggcacggtggagatcagtgtcaccagcc

SEQ ID NO: 676322 - DNA, 75 bp, synthetic construct
  source 1..75: mol_type = other DNA
ggtgaaggcagatatgagcgtacctatagggcctacaaagaaggagaaaacttaaactcatatctacatattaat

SEQ ID NO: 676323 - DNA, 75 bp, synthetic construct
  source 1..75: mol_type = other DNA
tgtgacgtttatcgccgatgtcagaacggcgaagatcgctgatctggtggtcattaaggacggctcagtggctga

SEQ ID NO: 676324 - DNA, 75 bp, synthetic construct
  source 1..75: mol_type = other DNA
gagccggaacgtgacatttatcgccgatgtcaggacagcgaagatcgctgaactggaggtcatccgggataacgc

SEQ ID NO: 676325 - DNA, 75 bp, synthetic construct
  source 1..75: mol_type = other DNA
ccgccagcatcaacaacagcagccagagccagaacgtcacctttgtacctggtgatgcatcgcagctcacttcaa

SEQ ID NO: 676326 - DNA, 75 bp, synthetic construct
  source 1..75: mol_type = other DNA
gtgatggcgtaacgtcagatcgctatgacatacagtccggttctccggcgcaagccacatcaactatcgccacgg

SEQ ID NO: 676327 - DNA, 75 bp, synthetic construct
  source 1..75: mol_type = other DNA
ccggacggtacggtggagatctcagtcaccagtcagacggcgggagtcagtacagtcactgccagcatcaacaac

SEQ ID NO: 676328 - DNA, 75 bp, synthetic construct
  source 1..75: mol_type = other DNA
tgcagtcactgccagcatcaacaacagcaccctgagccagaacgtgatgtttatcgccgatatcaggacggcgca

SEQ ID NO: 676329 - DNA, 75 bp, synthetic construct
  source 1..75: mol_type = other DNA
gatgtcaggacggcgcagatcgcggatctggtggttattaaggacggttcagaggcggacggtgcgacggcgaac

SEQ ID NO: 676330 - DNA, 75 bp, synthetic construct
  source 1..75: mol_type = other DNA
acggtgtctccgacggtcactacagagccggacggcacggtggagatcagtatcaccagccagacagccggaacc

SEQ ID NO: 676331 - DNA, 75 bp, synthetic construct
  source 1..75: mol_type = other DNA
ccgtgcggataacattaaagtcacgcgcccggaagatttggcactggccgagttttacctcacccgaaccatcca

SEQ ID NO: 676332 - DNA, 75 bp, synthetic construct
  source 1..75: mol_type = other DNA
aatatataaaatgaagtccaaaaattcattttcaaaaaatttttatatatattgtaaaaaagtatccgctttctt

SEQ ID NO: 676333 - DNA, 75 bp, synthetic construct
  source 1..75: mol_type = other DNA
acttcagaagcgttttatcgctccggcttcgagcagcggcacccggatgtgcaggcagtccacccactcaatcca

SEQ ID NO: 676334 - DNA, 75 bp, synthetic construct
  source 1..75: mol_type = other DNA
tgtcgggcgttccgccaggacagagacgcactgctggaagcgcgtaacaaatacttaagcagtgcgagagaagaa

SEQ ID NO: 676335 - DNA, 75 bp, synthetic construct
  source 1..75: mol_type = other DNA
attccgacccgaaaaaatgacgaatattgatcaatataaaaaacaggttggttattcattatttaaggactatat

SEQ ID NO: 676336 - DNA, 75 bp, synthetic construct
  source 1..75: mol_type = other DNA
gaaacagcagttgcagcgatgggaagtgcaatggtatggccgctattgccaggggcggcagccactacaagtctg

SEQ ID NO: 676337 - DNA, 75 bp, synthetic construct
  source 1..75: mol_type = other DNA
aatggtaaattactatgcatttgtaaatagaacaattattgctaaaaaacatcttctcacaaggtattatatttc

SEQ ID NO: 676338 - DNA, 75 bp, synthetic construct
  source 1..75: mol_type = other DNA
gcatttattgcaactataagtattgcattatgtatgttgagtataatatctgttattaacgaagtgacaggaaaa

SEQ ID NO: 676339 - DNA, 75 bp, synthetic construct
  source 1..75: mol_type = other DNA
ccttcagacaaggtgatgcaaggattgcagctggagctttcgaatatcaactaaaacaacaaggcaaaaactggt

SEQ ID NO: 676340 - DNA, 75 bp, synthetic construct
  source 1..75: mol_type = other DNA
aatcaaatcctgccagtgatatggctggggcgcttttaagtgttaagtctacccatcacccagcgctacccccta

SEQ ID NO: 676341 - DNA, 75 bp, synthetic construct
  source 1..75: mol_type = other DNA
atgtgacgctttacgagcaggtgtcttatgtcaataaacaggcttcggcctggcagattgcaggcaaaaatccct

SEQ ID NO: 676342 - DNA, 75 bp, synthetic construct
  source 1..75: mol_type = other DNA
actttgaaatgaacctatacgcatatttgaataaatatgatagtcggctttcagaagaaaaacttgcaattgata

SEQ ID NO: 676343 - DNA, 75 bp, synthetic construct
  source 1..75: mol_type = other DNA
aacgctgggcgcgcctttattgccctgaagtgattcttggagtgtacacccgggacgaactggacgaaccacagg

SEQ ID NO: 676344 - DNA, 75 bp, synthetic construct
  source 1..75: mol_type = other DNA
atttcgcccagaaaaaaatgaccaatttgatcaatataaaaaacaggttggttattcactatttaaggactatat

SEQ ID NO: 676345 - DNA, 75 bp, synthetic construct
  source 1..75: mol_type = other DNA
aaaaagattatcccgcttcggatctgtttgcctttttgtgggggggcagatcgcgttacggagatcgaccgactg

SEQ ID NO: 676346 - DNA, 75 bp, synthetic construct
  source 1..75: mol_type = other DNA
atgaaaaatagaaatcgtatgatcgtgaactgtgttactgcttccctgatgtgttgttggagcttgcctgcactg

SEQ ID NO: 676347 - DNA, 75 bp, synthetic construct
  source 1..75: mol_type = other DNA
acgggaaaatgggactggaaagggctattgccttttgaaatgaaccctaaggtgtataacccccagtcgggatat

SEQ ID NO: 676348 - DNA, 75 bp, synthetic construct
  source 1..75: mol_type = other DNA
ggatttccggggcggttcatctgcgccgacccgcacaataagccgatcgttcacccgaaagtcaccacctttacc

SEQ ID NO: 676349 - DNA, 75 bp, synthetic construct
  source 1..75: mol_type = other DNA
ttttcaaaaagaattagcgtacttacaaaatgtaattatttataatgattcgtctcttcgtatggattttttggt

SEQ ID NO: 676350 - DNA, 75 bp, synthetic construct
  source 1..75: mol_type = other DNA
aactcccacctgccacctggatccgcgaaatgattcgccatttccaatatgacggccaggtgatagggacattat

SEQ ID NO: 676351 - DNA, 75 bp, synthetic construct
  source 1..75: mol_type = other DNA
cgaatcgaatgattattatgtttcctgtgattgcgataaagacaatgtcagaagtggcctgtgggcattcgctgc

SEQ ID NO: 676352 - DNA, 75 bp, synthetic construct
  source 1..75: mol_type = other DNA
cgattgtgggcttactgttcatctgcgcgcatatttacctgtgcacgctgggtgacacgccagggcaaatttttc

SEQ ID NO: 676353 - DNA, 75 bp, synthetic construct
  source 1..75: mol_type = other DNA
tttacgtgagtttcagatgcagcaggaaaaagagttgctgcaactcagtttgcaacaagggaaatataaccagaa

SEQ ID NO: 676354 - DNA, 75 bp, synthetic construct
  source 1..75: mol_type = other DNA
aaagagattatcgatcgacgattacagatgcgtacaaatgatttttattcattattaaacagaaaatatttataa

SEQ ID NO: 676355 - DNA, 75 bp, synthetic construct
  source 1..75: mol_type = other DNA
ggttagttaacgtcaatctgagtctgacggcaacctcagatccaagttattcccaggcgattaagacctcacgtc

SEQ ID NO: 676356 - DNA, 75 bp, synthetic construct
  source 1..75: mol_type = other DNA
atgggcattcgccgcggattcaccgttagtctatttagggacaactggtacaaaattaatgactatcttgccgcc

SEQ ID NO: 676357 - DNA, 75 bp, synthetic construct
  source 1..75: mol_type = other DNA
acaacttgatccgactcgctttgcatctaatgtaggtgaatcgcagtctttgctcgtttcttcattggccacttc

SEQ ID NO: 676358 - DNA, 75 bp, synthetic construct
  source 1..75: mol_type = other DNA
taactggtaagggtggttttgcagatgcaattacagatgcaggtttaaaggcagatgattttgcaaaattcctca

SEQ ID NO: 676359 - DNA, 75 bp, synthetic construct
  source 1..75: mol_type = other DNA
gtgaccaccggggcctgccgctggcgcttatcagtgaagacggcaatacggcgtggagcgcggaatatgatgaat

SEQ ID NO: 676360 - DNA, 75 bp, synthetic construct
  source 1..75: mol_type = other DNA
agtaatgagaaggtccgcagcgcaatgctggggcgcttttttatccggctggctcttctgctggttctcagtatc

SEQ ID NO: 676361 - DNA, 75 bp, synthetic construct
  source 1..75: mol_type = other DNA
tgcctaaactcactgaagaagaagtagagatttttaagggaccaatgcataaagcattgcttgtagggataaatg

SEQ ID NO: 676362 - DNA, 75 bp, synthetic construct
  source 1..75: mol_type = other DNA
aaagcaggtttgtttacgcaagctctgtcagtctatgcgacacaccaggcagataaaaccaggtctgttattcag

SEQ ID NO: 676363 - DNA, 75 bp, synthetic construct
  source 1..75: mol_type = other DNA
gatcggtaccaagaaaggttgcgatcacggacagtgcggagcctgtaccgtgctggtcaatggtcgcaggcttaa

SEQ ID NO: 676364 - DNA, 75 bp, synthetic construct
  source 1..75: mol_type = other DNA
tgcaggcggcctttatcaagcatgatggcttccagtgcggctactgcacctccgggcaaatttgctcatcagtag

SEQ ID NO: 676365 - DNA, 75 bp, synthetic construct
  source 1..75: mol_type = other DNA
gagcgtcagaaatctgtgcttggtgtggcaccgtcgattcatgttatcgctcggcaactgatggataaggcactt

SEQ ID NO: 676366 - DNA, 75 bp, synthetic construct
  source 1..75: mol_type = other DNA
tgcccatggtcattcagagatactcttgacgtcagaaccatcttagcgcttggtgaaagcaaaggaattttttct

SEQ ID NO: 676367 - DNA, 75 bp, synthetic construct
  source 1..75: mol_type = other DNA
agggagatatgactcagtatggcggtcctattgtccagggttcggcaggtgttagaattggcgcgcccaccggcg

SEQ ID NO: 676368 - DNA, 75 bp, synthetic construct
  source 1..75: mol_type = other DNA
gtgcaatgtttagccattgtgttcactgcacctggaccttggcttacgcatcgggtgtctcaatcaacaaaaaga

SEQ ID NO: 676369 - DNA, 75 bp, synthetic construct
  source 1..75: mol_type = other DNA
aacggtttgcgttgattattgaggaaatcaaccaacgcaaaaataaagaaattgagacagaagaaaaaacggctt

SEQ ID NO: 676370 - DNA, 75 bp, synthetic construct
  source 1..75: mol_type = other DNA
tttcagatagatattatcagttactgaatgaaggaagaagtgaaagcgacccagaggtaaggaagctctccgctg

SEQ ID NO: 676371 - DNA, 75 bp, synthetic construct
  source 1..75: mol_type = other DNA
caccggcaaaaaaagcgtgctggattatctgttgaaaccctttaataaagcacaggaggcgttgcgcgaacgatg

SEQ ID NO: 676372 - DNA, 75 bp, synthetic construct
  source 1..75: mol_type = other DNA
gcgtcattgcccccggtggtaaactgatgaccatcgtgccgctggatgagcaactgctgattgaggcaaaaatct

SEQ ID NO: 676373 - DNA, 75 bp, synthetic construct
  source 1..75: mol_type = other DNA
cagttacgcgaaaaccccatcacctattccagagacgagatctgccaattagccggatttctacagacagcccct

SEQ ID NO: 676374 - DNA, 75 bp, synthetic construct
  source 1..75: mol_type = other DNA
atggtgcgtttgcgctcctggccatccggctcgccagaacgtcagagcctgtaaccgaacgcgtttcggaggcac

SEQ ID NO: 676375 - DNA, 75 bp, synthetic construct
  source 1..75: mol_type = other DNA
tatgggggacgtcatcggtaaacctgacgccggggattatgccagccgccttttattccatctgcactacaccgt

SEQ ID NO: 676376 - DNA, 75 bp, synthetic construct
  source 1..75: mol_type = other DNA
cctgctccaaatactaacgtgcaattaaaacatactggtgattatttgtattcattcgcaaatgaagggccaggg

SEQ ID NO: 676377 - DNA, 75 bp, synthetic construct
  source 1..75: mol_type = other DNA
tgtcaccctctggtactacgatgaatcggaccgtatcactcaccgcacggtgaacggcgaaccggcagagcagtg

SEQ ID NO: 676378 - DNA, 75 bp, synthetic construct
  source 1..75: mol_type = other DNA
tcgtttacattatcgacggttacggtaatggtgaaatgggggccggcggaaagccgatttacaagctccttgaaa

SEQ ID NO: 676379 - DNA, 75 bp, synthetic construct
  source 1..75: mol_type = other DNA
atgagagaactgaactctgattactatggaaagctgtttgatctggcctacgagactcgtcatataaccaaccgg

SEQ ID NO: 676380 - DNA, 75 bp, synthetic construct
  source 1..75: mol_type = other DNA
atgagacttacaccaatgggaataccgggcaaagccccggcacatgtgaaggcgtggacacagcaggaagatcgg

SEQ ID NO: 676381 - DNA, 75 bp, synthetic construct
  source 1..75: mol_type = other DNA
acggaccgcattttcagttaccacacggagcctatccggcatgaagctctggcccacgctgggcgtcgctttcct

SEQ ID NO: 676382 - DNA, 75 bp, synthetic construct
  source 1..75: mol_type = other DNA
tgggcgtttatgaaaacgtggtggcggtttatacccgtttttatcaggattacagcaatattctgtctgctctgg

SEQ ID NO: 676383 - DNA, 75 bp, synthetic construct
  source 1..75: mol_type = other DNA
gcagcgcggaagataatgccctgtatgtgaagattgttcggggcagcaaaaccctgcggctgtataaggtacaaa

SEQ ID NO: 676384 - DNA, 75 bp, synthetic construct
  source 1..75: mol_type = other DNA
tgtcaggacggcgcagatcgcggatctggtggtgacgcaggacggctcagtggcagacggtgcgacggcgaatac

SEQ ID NO: 676385 - DNA, 75 bp, synthetic construct
  source 1..75: mol_type = other DNA
agatcgctgatctggtggtcattaaggacggctcagtggctgacggcgcaatggcgaacatgctgcaggtaaagg

SEQ ID NO: 676386 - DNA, 75 bp, synthetic construct
  source 1..75: mol_type = other DNA
acagcaccctcagcatgtggccggataaccgtatcgcccgtgacgcgcactatctttaccggtatgaccatcacg

SEQ ID NO: 676387 - DNA, 75 bp, synthetic construct
  source 1..75: mol_type = other DNA
attttaggttttccgattactcagcaatcagaaattactttattgataatcagtttggtgatatatatacatata

SEQ ID NO: 676388 - DNA, 75 bp, synthetic construct
  source 1..75: mol_type = other DNA
tcttgttttaattattgtcagttattatgcagcaataaagtcaatttcttatattaatattttcatctttctggc

SEQ ID NO: 676389 - DNA, 75 bp, synthetic construct
  source 1..75: mol_type = other DNA
ggaacgtgacgtttatcgccgatatcaggacggcgcagatcgcgagtctggaggtgacgcaggataacgccgtgg

SEQ ID NO: 676390 - DNA, 75 bp, synthetic construct
  source 1..75: mol_type = other DNA
acggcgcaacgactgccccgacggtcatcacagggccagacgggacggtggagatcagtgtcaccagccagacgg

SEQ ID NO: 676391 - DNA, 75 bp, synthetic construct
  source 1..75: mol_type = other DNA
agacggtcagcgtgatggcaggcaacggcgcaacggttgccccgacggtgattacagagccggacggcacggtgg

SEQ ID NO: 676392 - DNA, 75 bp, synthetic construct
  source 1..75: mol_type = other DNA
acgatgaccacaaagccggacggtacggtggagatcagtgtcaccagccagacggcaggaatcagtgcggtcacc

SEQ ID NO: 676393 - DNA, 75 bp, synthetic construct
  source 1..75: mol_type = other DNA
cgggataactcagtggcagacggtgcaatggcgaatacgctgcaagtgaaggtcaccgatgcattcgggaatgcg

SEQ ID NO: 676394 - DNA, 75 bp, synthetic construct
  source 1..75: mol_type = other DNA
tgccgggcagacggtcagcgtgacagcaggcaatggcgcaacggtcgctccgacggtcaccacgcagccggacgg

SEQ ID NO: 676395 - DNA, 75 bp, synthetic construct
  source 1..75: mol_type = other DNA
gatgatgagcgcacccaccggtaccattacgacagtcagcaccggctggtgcactacacgcggacacaatatgca

SEQ ID NO: 676396 - DNA, 75 bp, synthetic construct
  source 1..75: mol_type = other DNA
ttgtctgacagaacctcaaaagggcttgcacttggttttttaggtggctttgatgtctcatatcgcggttcagtc

SEQ ID NO: 676397 - DNA, 75 bp, synthetic construct
  source 1..75: mol_type = other DNA
tgattacagcacgcattcatggtatgccggtgcagaagtgggctaccgctatcatgtcactgaggatgcctggat

SEQ ID NO: 676398 - DNA, 75 bp, synthetic construct
  source 1..75: mol_type = other DNA
tatgccgtacagaacgattatattgactcaaatccagccagtgatatggccggtgctctatcgacaaccaaagcg

SEQ ID NO: 676399 - DNA, 75 bp, synthetic construct
  source 1..75: mol_type = other DNA
ctactggtgccgcaggataacgatgagcgccttcttgaaaggcatcagtatgttggtcgtctgaaggcgctggct

SEQ ID NO: 676400 - DNA, 75 bp, synthetic construct
  source 1..75: mol_type = other DNA
tcgccgctcataccggcattagcgtgaagctgccggaaaaggaaaaccgggaaagagggacggtgccttcagagt

SEQ ID NO: 676401 - DNA, 75 bp, synthetic construct
  source 1..75: mol_type = other DNA
aatgattacagcagtcgggaaaaagagatgtataccgttacgctgaataaaaacgtggcggactggaacacctct

SEQ ID NO: 676402 - DNA, 75 bp, synthetic construct
  source 1..75: mol_type = other DNA
gaaacgctggagagagtggctgagcggatcgataacatctctgtatttggtggtctggatcaggttctgcacggg

SEQ ID NO: 676403 - DNA, 75 bp, synthetic construct
  source 1..75: mol_type = other DNA
tgtgattcgtcgacgtgaagaaacggcagcgacgcgttcgttactcaataccgctaaagtcatggaaaacaaccc

SEQ ID NO: 676404 - DNA, 75 bp, synthetic construct
  source 1..75: mol_type = other DNA
gaggtacttgctgtcggtgacatttcgttccaggccaaatgtatacaaacaatacgagacttcaaaaataagggt

SEQ ID NO: 676405 - DNA, 75 bp, synthetic construct
  source 1..75: mol_type = other DNA
ccgccatgtttgattctggtgcctatatcgacctgattggcaagtatgttcaccatgataatgagtacactgcaa

SEQ ID NO: 676406 - DNA, 75 bp, synthetic construct
  source 1..75: mol_type = other DNA
agttgtggagaaaaagcacatctacacgagatctgaatgaggcgagaagattcagaaaccatctgttattagaat

SEQ ID NO: 676407 - DNA, 75 bp, synthetic construct
  source 1..75: mol_type = other DNA
gacatcttgaacttgttcttcatactaaccccaatccaagcggttcggtaacgaagattttacgcactattttta

SEQ ID NO: 676408 - DNA, 75 bp, synthetic construct
  source 1..75: mol_type = other DNA
tttgtggaagtcgagtcgcttagtgttaatggtgcaaaattcagggcggcagatggttttcccaaaacagggttt

SEQ ID NO: 676409 - DNA, 75 bp, synthetic construct
  source 1..75: mol_type = other DNA
tgggcagacggtcagcgtgttggcggacaacggcgcaacggttgctccgacgatgaccacaaagccggacggcac

SEQ ID NO: 676410 - DNA, 75 bp, synthetic construct
  source 1..75: mol_type = other DNA
agtcagaacgtgacatttatcgccgatgtcagcacggcgaagatcgctgatctggtggtcattaaggatggttca

SEQ ID NO: 676411 - DNA, 75 bp, synthetic construct
  source 1..75: mol_type = other DNA
tgtcaccagccagacggcgggcagcagtgcggtcaccgtcagtatcaacagcagcagtcagagccgggacgtgac

SEQ ID NO: 676412 - DNA, 75 bp, synthetic construct
  source 1..75: mol_type = other DNA
gatcgcgagtctggaggtgacgcaggataacgccgtggctgacggcgcaatggcgaacacgctgcgggtgagggt

SEQ ID NO: 676413 - DNA, 75 bp, synthetic construct
  source 1..75: mol_type = other DNA
actgcaaccatcaacaacagcaccgcgagccagaacgtgatgtttatcgccgatgtcaggacggcgaagatcgcg

SEQ ID NO: 676414 - DNA, 75 bp, synthetic construct
  source 1..75: mol_type = other DNA
gcacggtaacctggttgaagggggcgagtccttactgtctggtgataacgtaacagtggaaggagccgtacgttc

SEQ ID NO: 676415 - DNA, 75 bp, synthetic construct
  source 1..75: mol_type = other DNA
ttgttcttaaagacgcccagggtaactttattactgatggtgtcgttcagcttaatgaggaaaacgtacaagtca

SEQ ID NO: 676416 - DNA, 75 bp, synthetic construct
  source 1..75: mol_type = other DNA
actgacccgtcagaaacgggaagctgggttgaatcaggtggcgtgtataccacaacccgaatggcgacgattgcc

SEQ ID NO: 676417 - DNA, 75 bp, synthetic construct
  source 1..75: mol_type = other DNA
gacggcgcagatcgctgatctggtggtcacccgggataactcagtggcagacgcttcgacggcgaatacgctgca

SEQ ID NO: 676418 - DNA, 75 bp, synthetic construct
  source 1..75: mol_type = other DNA
gttttattatctgatgaatttggtaatcctgtgaatgacggtctggaattgctgacagaggatgccgtgtactta

SEQ ID NO: 676419 - DNA, 75 bp, synthetic construct
  source 1..75: mol_type = other DNA
tcgacggtgaccacagagccggacggcacggtggagatcagtgtcaccagtcagacggcaggcaccagtgcagtc

SEQ ID NO: 676420 - DNA, 75 bp, synthetic construct
  source 1..75: mol_type = other DNA
tttagatagagattcggttgccttgtatgctgaaaataattcatcaccatttagaaaatgggagaaaataaagtc

SEQ ID NO: 676421 - DNA, 75 bp, synthetic construct
  source 1..75: mol_type = other DNA
ttaccttcactgatagtttaactgatgaaaccgatgataaacatgattttactaatacaggtgatctgaagggca

SEQ ID NO: 676422 - DNA, 75 bp, synthetic construct
  source 1..75: mol_type = other DNA
tcagataatggtaagcgtaataatatggaggagttagtatccactaatgcaatgcttacaggaggggaaggaaac

SEQ ID NO: 676423 - DNA, 75 bp, synthetic construct
  source 1..75: mol_type = other DNA
aatttgacttagccagaacatctatcctgccttttactacagagtttttctctaaggcaccaagaaaaaataatg

SEQ ID NO: 676424 - DNA, 75 bp, synthetic construct
  source 1..75: mol_type = other DNA
agatcaactggagcatacctatagtcaatattataaatatgagtttgtcataaaagataatgttgatggtaaaga

SEQ ID NO: 676425 - DNA, 75 bp, synthetic construct
  source 1..75: mol_type = other DNA
gatgtattcttgataaatctaatgttaggtcattacattggaggctcatatgcagtgctaatacaaataccagta

SEQ ID NO: 676426 - DNA, 75 bp, synthetic construct
  source 1..75: mol_type = other DNA
ttttgtatgaggcggtgcagggagacaaatcaccaatcccacaggcggttgatctgtttgctgggaaaccacagc

SEQ ID NO: 676427 - DNA, 75 bp, synthetic construct
  source 1..75: mol_type = other DNA
tttgttaatgaatttgttcttggtaattttgtttctgaaaatattattaatgataagtcaaatgaatggattggt

SEQ ID NO: 676428 - DNA, 75 bp, synthetic construct
  source 1..75: mol_type = other DNA
gatgaattccatcagtggatagcatcacatcaagaagattttgatgtgataagaataagaattcatgaaccacaa

SEQ ID NO: 676429 - DNA, 75 bp, synthetic construct
  source 1..75: mol_type = other DNA
attatggttttgtatcgataggtaatagagtttcatttagtagtagagacaatcaaattaattcacctgatatta

SEQ ID NO: 676430 - DNA, 75 bp, synthetic construct
  source 1..75: mol_type = other DNA
ctaagccacgagacaaaacttataaattgtctgatggtggtggtctttatcttgaagtatcccagaccgggtcga

SEQ ID NO: 676431 - DNA, 75 bp, synthetic construct
  source 1..75: mol_type = other DNA
ccgctctggttatttgcatcatcgtcttcctgtcatgggctgttaatcattaccgcgataacgccattacctaca

SEQ ID NO: 676432 - DNA, 75 bp, synthetic construct
  source 1..75: mol_type = other DNA
acaaagcaaagaaatcacaaatcaagttaatgagagaacagtataagaaactagaaaaagaatatgagtcgacaa

SEQ ID NO: 676433 - DNA, 75 bp, synthetic construct
  source 1..75: mol_type = other DNA
taacacaaactattttccctgttatggctgctgcccctacgcatattaatcctgcgcattcggatactgccgcgt

SEQ ID NO: 676434 - DNA, 75 bp, synthetic construct
  source 1..75: mol_type = other DNA
gcgtttgtcgttgatgtattcactactgccatcgaaaacacgaagctgatgttctcagcactatggaagttagtc

SEQ ID NO: 676435 - DNA, 75 bp, synthetic construct
  source 1..75: mol_type = other DNA
cgcactgaaagaggcgaaagcgtcgctcatggctttcataaactacgctattggcgtgtttaaaccgcttgctga

SEQ ID NO: 676436 - DNA, 75 bp, synthetic construct
  source 1..75: mol_type = other DNA
gggttaatgattgatttagatcatttagttaggtttgagacatatgtagacacatttcgtggccatcttgaaagc

SEQ ID NO: 676437 - DNA, 75 bp, synthetic construct
  source 1..75: mol_type = other DNA
ccgacagtcactacgcagccggacggcacggtggaaatcagtgtcaccagtcagaccgccggaaccagtacagtc

SEQ ID NO: 676438 - DNA, 75 bp, synthetic construct
  source 1..75: mol_type = other DNA
gttacacccccgttcccctgatctcctttagtgccgagcaacggcagggcaaacagggagaaaacgacacccgaa

SEQ ID NO: 676439 - DNA, 75 bp, synthetic construct
  source 1..75: mol_type = other DNA
cggtcactacagagccggacggcacggtggagatctctgtcaccagtcagacggcgggagtcagtgcggtcaccg

SEQ ID NO: 676440 - DNA, 75 bp, synthetic construct
  source 1..75: mol_type = other DNA
caatgctgcttatctcgcctgtcagtttggcgttgtctgcggatgaccacaataaaaataccagtctgacgcatg

SEQ ID NO: 676441 - DNA, 75 bp, synthetic construct
  source 1..75: mol_type = other DNA
atagtctgacatcttctggacagcagatcggaaagctggttaatgtaaacaatccagatcaaaatatgaattatt

SEQ ID NO: 676442 - DNA, 75 bp, synthetic construct
  source 1..75: mol_type = other DNA
aagatttattgatgttttataaagctgcgattaaaactaaatatgttgcctatagtcaaccggcagtattatatg

SEQ ID NO: 676443 - DNA, 75 bp, synthetic construct
  source 1..75: mol_type = other DNA
tggcagtcagcttctcagagaagccggcagccgttctgcagtggacagccatgaatccggcagcaagagattttc

SEQ ID NO: 676444 - DNA, 75 bp, synthetic construct
  source 1..75: mol_type = other DNA
gttatgcctgtgatgttaaatacacctcagttcccgtcagtctgactggcggcgatgatacactcagcattccac

SEQ ID NO: 676445 - DNA, 75 bp, synthetic construct
  source 1..75: mol_type = other DNA
cacgaactattgttatagctgtcagtaatgtccctaatcaggtactcagctatcagggagtggcaatgcctctgg

SEQ ID NO: 676446 - DNA, 75 bp, synthetic construct
  source 1..75: mol_type = other DNA
acgtgacatttatcgccgatgtcagcacggcgaagatcgcggatctggtggtcattaaggatggttcagaggcgg

SEQ ID NO: 676447 - DNA, 75 bp, synthetic construct
  source 1..75: mol_type = other DNA
gcggagctggtggttattaaggatggttcagaggcggacggtgcgacggcgaacacgctgcaggtgaaggtcacc

SEQ ID NO: 676448 - DNA, 75 bp, synthetic construct
  source 1..75: mol_type = other DNA
agtacggtcactgccagcatcaacaacagcagtctgagtcagaatgtgacatttatcccggatgtcagcaccgcg

SEQ ID NO: 676449 - DNA, 75 bp, synthetic construct
  source 1..75: mol_type = other DNA
atgtcaggacggcgcagatcgctgatctggtggtcattaaggacggcgtagtggcagacggcgcaatggcgaaca

SEQ ID NO: 676450 - DNA, 75 bp, synthetic construct
  source 1..75: mol_type = other DNA
caccacgcagtcggacggtacggtggagttcagtgtcaccagtcagacggcgggagttagcgcagtcacagcaac

SEQ ID NO: 676451 - DNA, 75 bp, synthetic construct
  source 1..75: mol_type = other DNA
agacggtcagcgtgttggcggataacggcgcaacggtcgctccgactgtcatcacagggcaggacggcacggtgg

SEQ ID NO: 676452 - DNA, 75 bp, synthetic construct
  source 1..75: mol_type = other DNA
gatgctaacggcaatgcgcttgccgggcagacggtcagcgtgatggcggacaacggtgcagcggtcgcttcgatg

SEQ ID NO: 676453 - DNA, 75 bp, synthetic construct
  source 1..75: mol_type = other DNA
cgttcaggaggatggtctgaaaccgccggtgtttatactgctacatggtcggcgcagatggcgggagactctcac

SEQ ID NO: 676454 - DNA, 75 bp, synthetic construct
  source 1..75: mol_type = other DNA
gtggtagctggggcggatatacctgtcagtgttttattatctgatgaatttggtaatcctgtgaatgacggtctg

SEQ ID NO: 676455 - DNA, 75 bp, synthetic construct
  source 1..75: mol_type = other DNA
ggacggcgcggcaataatcaccgtcaccagccagacggcgggcatcagtgccgtcgccgccagcatcaacaacag

SEQ ID NO: 676456 - DNA, 75 bp, synthetic construct
  source 1..75: mol_type = other DNA
atatggacagcgaacaggcggcgagtatggcgcgtggctgggtggcttcttctgcctctgcgcaggcaacggact

SEQ ID NO: 676457 - DNA, 75 bp, synthetic construct
  source 1..75: mol_type = other DNA
cctacaaagaaggagagaacttaaattcatttctgcagattaacggttggcgtgtaaacgggcaaccttcctata

SEQ ID NO: 676458 - DNA, 75 bp, synthetic construct
  source 1..75: mol_type = other DNA
tggtaacccgttggataacggtctggatttgctggataatgcagtgtacttacaaaatgtggagaagaaagaagg

SEQ ID NO: 676459 - DNA, 75 bp, synthetic construct
  source 1..75: mol_type = other DNA
aaacgaccatttacgacctggcagaattaaccggcgtttctgccagtgcggtaagcgctattttgaatggcaact

SEQ ID NO: 676460 - DNA, 75 bp, synthetic construct
  source 1..75: mol_type = other DNA
tatcagagttatgttgtcttacccgataatacaggtatatcgaacattatctatctgaaccgccccgggaatcct

SEQ ID NO: 676461 - DNA, 75 bp, synthetic construct
  source 1..75: mol_type = other DNA
gacctgacactccatatcggttttgataccgaatatgttttcaatcctgaaacacaacagaatgatattctgtca

SEQ ID NO: 676462 - DNA, 75 bp, synthetic construct
  source 1..75: mol_type = other DNA
gggtgatctgaatcttggtggtaagagcatcaaaaacatcaaagatatgacggcatcaggaacaacaacaacggg

SEQ ID NO: 676463 - DNA, 75 bp, synthetic construct
  source 1..75: mol_type = other DNA
gtgaagtgcttgcccgttgggagcaaatcaaaaccgaagagcgcgcagaaagcgcagcattcggcgctggacgat

SEQ ID NO: 676464 - DNA, 75 bp, synthetic construct
  source 1..75: mol_type = other DNA
atcgacatggtgcgtcaggatgtgcctgccatgctggagaaggtgtttgagattatagattccggtgacaccacg

SEQ ID NO: 676465 - DNA, 75 bp, synthetic construct
  source 1..75: mol_type = other DNA
ttgcggtcggaaaacgtctggacagacatcaacgatcgtgtagtggaaggcggtttctactatcgcactgccgag

SEQ ID NO: 676466 - DNA, 75 bp, synthetic construct
  source 1..75: mol_type = other DNA
gttttagcctaaaacaaccccaaaaaaagaaaatgaagacttttatttaccgccatcttttgatagcgattttaa

SEQ ID NO: 676467 - DNA, 75 bp, synthetic construct
  source 1..75: mol_type = other DNA
gactctgctggctggtgtaacgattaataactggcaaagcaaatatgaccagcttcgtaaggaaagagaggctta

SEQ ID NO: 676468 - DNA, 75 bp, synthetic construct
  source 1..75: mol_type = other DNA
gtggaaggcggtttctactatcgcactgccgagcactctgcccagcagtcgtcagaacgcctgcaaagctatgaa

SEQ ID NO: 676469 - DNA, 75 bp, synthetic construct
  source 1..75: mol_type = other DNA
ctgccctggcgctattggcgatacgattcgccgggcgattaacgaaggcgctgaaaagctcaccctgtggatgac

SEQ ID NO: 676470 - DNA, 75 bp, synthetic construct
  source 1..75: mol_type = other DNA
cactctgcccagcagtcgtcagaacgcctgcaaagctatgaaaagatgttcaagaacgggcaactaaatgttctc

SEQ ID NO: 676471 - DNA, 75 bp, synthetic construct
  source 1..75: mol_type = other DNA
tataccagattgaaaccagcgggcagaacaacggggcagcctggtatcagaaggtggtatgccagcctgccggaa

SEQ ID NO: 676472 - DNA, 75 bp, synthetic construct
  source 1..75: mol_type = other DNA
aatgctgcagtggtgggctgattatattgatgctaataagaatggatctgtcacaccatatgattttgcgcgtat

SEQ ID NO: 676473 - DNA, 75 bp, synthetic construct
  source 1..75: mol_type = other DNA
ttgatggtgggatgagcagaaacaccaagatagcgtccggctatggcggtcagtggagtgagaactctaacagct

SEQ ID NO: 676474 - DNA, 75 bp, synthetic construct
  source 1..75: mol_type = other DNA
tactggaagtgactattgttttaggtattggaacgcttatcgcttttatgaaatttcaggatatgagaaacaatc

SEQ ID NO: 676475 - DNA, 75 bp, synthetic construct
  source 1..75: mol_type = other DNA
gtggtgatggatcttatggtatttctgttgatagtcataacaaagtattatatataagcgatagcgatattaaga

SEQ ID NO: 676476 - DNA, 75 bp, synthetic construct
  source 1..75: mol_type = other DNA
cttgtgctcgccgttataggaataccgtggagcatagcggtagttggtgttatttacatcaattttgtgtgggtg

SEQ ID NO: 676477 - DNA, 75 bp, synthetic construct
  source 1..75: mol_type = other DNA
aacaaaaatcaagattaaacatatgggaaacagctatcgcaaggttgacaacccaagctgagagctcaagaatct

SEQ ID NO: 676478 - DNA, 75 bp, synthetic construct
  source 1..75: mol_type = other DNA
catgcatgcaaaacataaacccgtccctcctgaagtggccgttttaagtaaaagaattgatgtttcccccgatgg

SEQ ID NO: 676479 - DNA, 75 bp, synthetic construct
  source 1..75: mol_type = other DNA
taataatatggctttattttctgtcagaagggtatattcaatggtttgtattaagtaagcgcattataaacaaat

SEQ ID NO: 676480 - DNA, 75 bp, synthetic construct
  source 1..75: mol_type = other DNA
gtagaagcaataaccagaagtcgattccgagatttatctggtttttccgaatcggatatgtatgcagtgggcgga

SEQ ID NO: 676481 - DNA, 75 bp, synthetic construct
  source 1..75: mol_type = other DNA
gatgaacgtcgttgtagtggtagtaagaacgagcactgttatagtaattttagaaggttatatgcatgcaaataa

SEQ ID NO: 676482 - DNA, 75 bp, synthetic construct
  source 1..75: mol_type = other DNA
caaagcaggtgaatatctccatttgaatggtcaggcaacattaaatgcgaaatgtacgcctaatggtctggtggg

SEQ ID NO: 676483 - DNA, 75 bp, synthetic construct
  source 1..75: mol_type = other DNA
ccggtgctgggtgcgaaggtgctgccgggcgagacggaccttgcgctgcccggcccgctgccgtttattctttcc

SEQ ID NO: 676484 - DNA, 75 bp, synthetic construct
  source 1..75: mol_type = other DNA
ttaattatacctttgtgttatttgtggattgtgcagctcagtggggcgctggccgtgacggtgcggtgtcccccg

SEQ ID NO: 676485 - DNA, 75 bp, synthetic construct
  source 1..75: mol_type = other DNA
caacgttatggcccgtctggctcggctggagaaagaaaccagcgaagcgaagattgccgtcgcgatgaatgctcc

SEQ ID NO: 676486 - DNA, 75 bp, synthetic construct
  source 1..75: mol_type = other DNA
ctggtgatacaattaaaaattcttaatattgttaataaaaactttattgagaatatgaaaaacacatttagtcat

SEQ ID NO: 676487 - DNA, 75 bp, synthetic construct
  source 1..75: mol_type = other DNA
tggtaatgaagatcttgatggttatatcaatggcattatccaaatgattaatacgttgcctgataatgcagtgaa

SEQ ID NO: 676488 - DNA, 75 bp, synthetic construct
  source 1..75: mol_type = other DNA
cgactcataatcgcgcgggatatgctaaaaaaagcatagaaagtattctttcaattgatgttgaagaatttcaac

SEQ ID NO: 676489 - DNA, 75 bp, synthetic construct
  source 1..75: mol_type = other DNA
gttccattgtccctccccccatgacgactgaagtggctgcaaacgcagtacctaacaatctcaatataaacaatg

SEQ ID NO: 676490 - DNA, 75 bp, synthetic construct
  source 1..75: mol_type = other DNA
agcgaggggatcgtggagatgtaccgcgttgaccctagcttaaccggtccattgatggagatggtgcagatgatg

SEQ ID NO: 676491 - DNA, 75 bp, synthetic construct
  source 1..75: mol_type = other DNA
gagaattgcaattttactaaggcaacagttgataatttcatatttaaatgtcgacgtttacacaatgtgattttt

SEQ ID NO: 676492 - DNA, 75 bp, synthetic construct
  source 1..75: mol_type = other DNA
gtagttaataattttatagaacaaggctataaaattatataccttcgtaatgcttcacctagaggggcttgcttt

SEQ ID NO: 676493 - DNA, 75 bp, synthetic construct
  source 1..75: mol_type = other DNA
ataaagttgatgttgataacgataatatattgtatgaagtagttgatgagataatccctagtgaacatgtggata

SEQ ID NO: 676494 - DNA, 75 bp, synthetic construct
  source 1..75: mol_type = other DNA
ttttattaacagatttaatatgaataaatggctgattgataaaaataacaattttttatccaacttatcgatcag

SEQ ID NO: 676495 - DNA, 75 bp, synthetic construct
  source 1..75: mol_type = other DNA
gaaatgaaaaaatagaatgcgcttgtgattttatgatggctaaagatgcgcaggggtatatcgacctgtctgaat

SEQ ID NO: 676496 - DNA, 75 bp, synthetic construct
  source 1..75: mol_type = other DNA
gttgataatgtcatatttaaatgtcgacgtttacacaatgtgatttttatcaaagcgagtggcgaatatgtcgat

SEQ ID NO: 676497 - DNA, 75 bp, synthetic construct
  source 1..75: mol_type = other DNA
caaacttattgccaagatatttcagtgtagagactgtgtgggctcaggcaggcttagtaacaatccaaaaaatag

SEQ ID NO: 676498 - DNA, 75 bp, synthetic construct
  source 1..75: mol_type = other DNA
gcgatcgagggtgaagcccttgacgatgtaactgtcatcggggtcgtgacgtttactatctgcgatgtgcgccag

SEQ ID NO: 676499 - DNA, 75 bp, synthetic construct
  source 1..75: mol_type = other DNA
cctgaagccatcacaaggtagtcaggttctgatccagcacggcggcgggacggagcttgccacgctgagaggaaa

SEQ ID NO: 676500 - DNA, 75 bp, synthetic construct
  source 1..75: mol_type = other DNA
ttcagcttggcttgaaaacaactccgttaatcgctggtttttgccttaaaattttggaacaagccgtcatatcaa

SEQ ID NO: 676501 - DNA, 75 bp, synthetic construct
  source 1..75: mol_type = other DNA
aaggcgggccgccgttcccgcgcgcaggcgcgcggcgcccactgcgcacccccgtgggggacatacggcagctgt

SEQ ID NO: 676502 - DNA, 75 bp, synthetic construct
  source 1..75: mol_type = other DNA
ccggcaaggtgggtggattcccacacggcaccggcgcccggtaaggtgggcggatttccacacgacagcggcgcc

SEQ ID NO: 676503 - DNA, 75 bp, synthetic construct
  source 1..75: mol_type = other DNA
cacggcaccggcgcccggcaaggtgggcggatttccacacggcaccggcacccggcaaggtgggcggattcccac

SEQ ID NO: 676504 - DNA, 75 bp, synthetic construct
  source 1..75: mol_type = other DNA
caactgcctaatgacagagaaacgctcttctattttaacgtgcgagaaataccgccaaaaacagataaaaaaatg

SEQ ID NO: 676505 - DNA, 75 bp, synthetic construct
  source 1..75: mol_type = other DNA
agtgtctctggccaacatagtggcaatggactttaagaccttctactaccttgctgatgaagagaaaacgatacg

SEQ ID NO: 676506 - DNA, 75 bp, synthetic construct
  source 1..75: mol_type = other DNA
cattggtgatgtgtttgcttttttcttcttttgcggacgcaaaacggagacataaaagatcatctcatcgttcgc

SEQ ID NO: 676507 - DNA, 75 bp, synthetic construct
  source 1..75: mol_type = other DNA
tgtccgatttttatacttcatccactgatttaacagagttactcgttagcgctggattggatcagtctgtcatat

SEQ ID NO: 676508 - DNA, 75 bp, synthetic construct
  source 1..75: mol_type = other DNA
tctggtgaatatgcggctattagaactgcgcactggcatcgtcgtatgcaggacgcttttgaagcaatttattgc

SEQ ID NO: 676509 - DNA, 75 bp, synthetic construct
  source 1..75: mol_type = other DNA
gcgatcgagggggatgctctggacgatgtcactgtcattggtgtcgtgacatttactatctgcgatgttcgttct

SEQ ID NO: 676510 - DNA, 75 bp, synthetic construct
  source 1..75: mol_type = other DNA
ctgataataaagatattctggagaagtctccgacagatggagtagtcgccgcaccgtcaaaagcgaggtttggtg

SEQ ID NO: 676511 - DNA, 75 bp, synthetic construct
  source 1..75: mol_type = other DNA
gaactatgacgagctgctgaccgacatccgcaaaaacacccacggttggtggttacttggcgtaaatcgttactg

SEQ ID NO: 676512 - DNA, 75 bp, synthetic construct
  source 1..75: mol_type = other DNA
cggaatgttttatgacagtctgatccgtaatgcggaaaacagaagaccacccagcccgtatcccgataaatcaca

SEQ ID NO: 676513 - DNA, 75 bp, synthetic construct
  source 1..75: mol_type = other DNA
cgtgctgacaaacaaacacggtcacaccagaacgctcaagcagggcgacacgcttgccatgctgcaacagaaatc

SEQ ID NO: 676514 - DNA, 75 bp, synthetic construct
  source 1..75: mol_type = other DNA
atatatgccaatctttaaatatcggtaaagataatgacgggcataacctaaaaataagaattgataagttaactg

SEQ ID NO: 676515 - DNA, 75 bp, synthetic construct
  source 1..75: mol_type = other DNA
caacggcggtattgcccgtggggccacgccggaaagcagcggcagctatggcttcgtccgtctggagagtgacct

SEQ ID NO: 676516 - DNA, 75 bp, synthetic construct
  source 1..75: mol_type = other DNA
tattgtaatatgcaatgagcaacatcgttttatagtagctgaacagttacaacaaattaataaacttacaaaaat

SEQ ID NO: 676517 - DNA, 75 bp, synthetic construct
  source 1..75: mol_type = other DNA
aatattcagggatataccgatcttggcttattgtcgacaaacctgccgggctatatgccgctgccgtcggaaaaa

SEQ ID NO: 676518 - DNA, 75 bp, synthetic construct
  source 1..75: mol_type = other DNA
tggactttggttttgctttatgcagagttatgtttctttttttattcacaaaaaaaaattaaaataaaatatttt

SEQ ID NO: 676519 - DNA, 75 bp, synthetic construct
  source 1..75: mol_type = other DNA
gattgggatgtaatacatcctggcagggagtgggctgagaaatgtacaggtgttcattctgagccatactttatt

SEQ ID NO: 676520 - DNA, 75 bp, synthetic construct
  source 1..75: mol_type = other DNA
cacaaccacgtacgaacaaaaagcatcatcccgggtattgcagataccggtttcctgccgggaagaatcataaac

SEQ ID NO: 676521 - DNA, 75 bp, synthetic construct
  source 1..75: mol_type = other DNA
agtcgttaggcaaagtgtgttggctaggtattcattaaatgaaaatacatttgacccaatctcacaacaaagtgc

SEQ ID NO: 676522 - DNA, 75 bp, synthetic construct
  source 1..75: mol_type = other DNA
cgcaacaacttactccattacggaactgtttcgccactggaccaaacatgctctgctcaacgccatcgttcaacc

SEQ ID NO: 676523 - DNA, 75 bp, synthetic construct
  source 1..75: mol_type = other DNA
caatatcaatttcgatgagtatcagaaattcctgcgtattgaggcccggttcaggcctggcgctaaacctacaag

SEQ ID NO: 676524 - DNA, 75 bp, synthetic construct
  source 1..75: mol_type = other DNA
cacctggggacaacagttcgagaagatgggtaagacctatcagcaaccgaagctggtcatgtaccgtggaatgac

SEQ ID NO: 676525 - DNA, 75 bp, synthetic construct
  source 1..75: mol_type = other DNA
tgcacataaatagcatagagtcatttttaaaagggaactcttcatccttctttatgaaggataatctcaacttca

SEQ ID NO: 676526 - DNA, 75 bp, synthetic construct
  source 1..75: mol_type = other DNA
gatgaagctttcgatctccctcctgtgagttcattcgcaaccgttttattttcttttttaatttttatattcatt

SEQ ID NO: 676527 - DNA, 75 bp, synthetic construct
  source 1..75: mol_type = other DNA
aggtcagtcatatcgttttctgtatgccaaaacgctcaaccaattgggcactaactttcaattgatgggctatcg

SEQ ID NO: 676528 - DNA, 75 bp, synthetic construct
  source 1..75: mol_type = other DNA
cctcggcgatttcggagcaatttcgttcgatgcgacccaggcgaagagtacgctggcagaccaaagcgaacataa

SEQ ID NO: 676529 - DNA, 75 bp, synthetic construct
  source 1..75: mol_type = other DNA
aggtggtggagcaaatcctgatggaacacgggttgaaaggctgggagtatgagttcagcctcaaaaggacgtatc

SEQ ID NO: 676530 - DNA, 75 bp, synthetic construct
  source 1..75: mol_type = other DNA
cgcgtctgcatggcatgacacaccggcggttgctcgtgatttatcacacgggctttcctttgctgagcaggtagt

SEQ ID NO: 676531 - DNA, 75 bp, synthetic construct
  source 1..75: mol_type = other DNA
gcccacctttcagagatgagaaatcccttcgagcgactccgggtctactcgaaagatttgggggatgagttattg

SEQ ID NO: 676532 - DNA, 75 bp, synthetic construct
  source 1..75: mol_type = other DNA
cttttgaacgacttagggtctactcgaaagatctaggcggtgagctattggataggcgatatctttacgtactcc

SEQ ID NO: 676533 - DNA, 75 bp, synthetic construct
  source 1..75: mol_type = other DNA
agcgaccattggtgctgttctgccgggtgatttcaaaattaaagccgcgaaactgcgtggcgaaccgtctgaagg

SEQ ID NO: 676534 - DNA, 75 bp, synthetic construct
  source 1..75: mol_type = other DNA
caggtgcaacgatagcgtcagacgatcgggtcagcctgcaggatgttatacagacggctttcaacggcgaagctt

SEQ ID NO: 676535 - DNA, 75 bp, synthetic construct
  source 1..75: mol_type = other DNA
aacagcgcagcatgcccggaatgccataggcgataccggctacagatgacaagggaagtcctgcgattatgcaac

SEQ ID NO: 676536 - DNA, 75 bp, synthetic construct
  source 1..75: mol_type = other DNA
aaggtgatgcacaaacattaaaatcagcaaacacttatacaaataagcaagtgaatgcgctggagcaaaatacca

SEQ ID NO: 676537 - DNA, 75 bp, synthetic construct
  source 1..75: mol_type = other DNA
cctaattggtaatttgtcaccgcaaaatttacctagtcgtagtaaaccaatccccgccagacacagggcatggag

SEQ ID NO: 676538 - DNA, 75 bp, synthetic construct
  source 1..75: mol_type = other DNA
ctgttggactatgtaacatttttgaaaaaatagtcatcgataaagtgaacatcgtaggtattcaggttgaaattc

SEQ ID NO: 676539 - DNA, 75 bp, synthetic construct
  source 1..75: mol_type = other DNA
tttgggatcgcttgtgtccctgaagacatggttcaggagtatatagagtcaggcaagcttattcaggtgttacag

SEQ ID NO: 676540 - DNA, 75 bp, synthetic construct
  source 1..75: mol_type = other DNA
gaaaaaggaaagtttataccgaccgaagctggccttgctttaattgatgctttaccagaatcagtaactcaaccg

SEQ ID NO: 676541 - DNA, 75 bp, synthetic construct
  source 1..75: mol_type = other DNA
ccgctgacgcggggaactccgccagtgtgccagttgctactgtttcccatacggtttatccccgctgacgcgggg

SEQ ID NO: 676542 - DNA, 75 bp, synthetic construct
  source 1..75: mol_type = other DNA
gctggcgcggggaactcttaatcaggtcgtcgtactcagcgccgctggccggtttatccccgctggcgcggggaa

SEQ ID NO: 676543 - DNA, 75 bp, synthetic construct
  source 1..75: mol_type = other DNA
atgactcacagtgggcggcaatttgttccattgccccaaagattggctgtacgccggagactctgcgtgtctggg

SEQ ID NO: 676544 - DNA, 75 bp, synthetic construct
  source 1..75: mol_type = other DNA
ttaaatgaggttgtcggaaagtggaagtcactattacctattaaaattatcaatctcgaacgtaatgttggctta

SEQ ID NO: 676545 - DNA, 75 bp, synthetic construct
  source 1..75: mol_type = other DNA
agctcaaactttcctccctatggtgcagtccctgaagggtatgggcgctctttcagatgctgagggtaaaaaatt

SEQ ID NO: 676546 - DNA, 75 bp, synthetic construct
  source 1..75: mol_type = other DNA
attatctttactaccccagccgcaagcagcatccgccagcttttgcgttgttgatcgatgcgcttcgctacaccg

SEQ ID NO: 676547 - DNA, 75 bp, synthetic construct
  source 1..75: mol_type = other DNA
agattgattatgagtatattctcaggccttaacgagaaagacttattgaaacgattgcatttatatttaaaagga

SEQ ID NO: 676548 - DNA, 75 bp, synthetic construct
  source 1..75: mol_type = other DNA
gcactggcaggtaaacaaccgctggacaatacgcttaccaatttgagtggaaaggatgtagctggtcttctcgca

SEQ ID NO: 676549 - DNA, 75 bp, synthetic construct
  source 1..75: mol_type = other DNA
ttaattgtccaaattgcaacgctcaactcgttgtaacacctaaaacatatagttgcaccggttgcaagttcaaaa

SEQ ID NO: 676550 - DNA, 75 bp, synthetic construct
  source 1..75: mol_type = other DNA
caggcgcaggaaatcaccgtggcactggacagcatatcggataccggtgtgaaaggagatttcatcactcaggtt

SEQ ID NO: 676551 - DNA, 75 bp, synthetic construct
  source 1..75: mol_type = other DNA
tggatggtagctggaaaattaccgtgtctaatccacttccggaaggcagcaacacctatactgttagcgccagca

SEQ ID NO: 676552 - DNA, 75 bp, synthetic construct
  source 1..75: mol_type = other DNA
ataagataaccagcaacacaaagcctatacttgaggggacagtaataaatactgcccagaaacctgagcaaattg

SEQ ID NO: 676553 - DNA, 75 bp, synthetic construct
  source 1..75: mol_type = other DNA
tattatgattatgcaaaagaacaagcttactttgtagataaagagtctaaaaaaatcctattatcatctgatggt

SEQ ID NO: 676554 - DNA, 75 bp, synthetic construct
  source 1..75: mol_type = other DNA
aatggagtgacttatgaaagccttgaaaaagggaagtttagtgatttaagtagttttttgaaaacgatcaatctt

SEQ ID NO: 676555 - DNA, 75 bp, synthetic construct
  source 1..75: mol_type = other DNA
ggactggtcagttgccagcagccggctcaccggtataggcgaggtggtcatgagcacgctgccatcccaaatcac

SEQ ID NO: 676556 - DNA, 75 bp, synthetic construct
  source 1..75: mol_type = other DNA
tatcagatgggcactgctgattggagaacggtttatccccgctggcgcggggaacacattaaattttgcaggtag

SEQ ID NO: 676557 - DNA, 75 bp, synthetic construct
  source 1..75: mol_type = other DNA
gtgcgggcggttcagaggaattgttcgtaggcggtttatccccgctggcgcggggaacactcacggtagcgccac

SEQ ID NO: 676558 - DNA, 75 bp, synthetic construct
  source 1..75: mol_type = other DNA
ccccgctggcgcggggaactcactaaacataacctattattaattattgattttttaagtcagtcacaatctacc

SEQ ID NO: 676559 - DNA, 75 bp, synthetic construct
  source 1..75: mol_type = other DNA
aagcttaaaaatgctgatggtcataatattgatccaacggaaattgtctcctctatagacgcatctaaactcggg

SEQ ID NO: 676560 - DNA, 75 bp, synthetic construct
  source 1..75: mol_type = other DNA
cactaacccccaatgtactcagtactcttactcgccgatttatccccgctggcgcggggaacaccagcgtggcgc

SEQ ID NO: 676561 - DNA, 75 bp, synthetic construct
  source 1..75: mol_type = other DNA
ggtttatccccgctggcgcggggaacactgtaatagcctgatctctgatctccctcgcctcggtttatccccgct

SEQ ID NO: 676562 - DNA, 75 bp, synthetic construct
  source 1..75: mol_type = other DNA
tgacaccagggggctgcattgttcatttccctgctaatggacgtgacatcctggatattaacgatcctgatttcc

SEQ ID NO: 676563 - DNA, 75 bp, synthetic construct
  source 1..75: mol_type = other DNA
cgtaaaccggttatctacactgcgcgagcctggtggaaagatgccgttggtggggaaaatagttttgcccaggtt

SEQ ID NO: 676564 - DNA, 75 bp, synthetic construct
  source 1..75: mol_type = other DNA
ggaggtgacgtggtatggctgggacggagacaggctgacgacggtgcagactgacaccacacgtatccagacggt

SEQ ID NO: 676565 - DNA, 75 bp, synthetic construct
  source 1..75: mol_type = other DNA
cgtattgcatctcagaactgaattgggtgatgataattcagctacggataaagtcgttattaatggaaatacctc

SEQ ID NO: 676566 - DNA, 75 bp, synthetic construct
  source 1..75: mol_type = other DNA
ggtgggtaatgcatatgctgaacagtttattcagcacgaggaacataaacatgctgtggcaataaaagatggaga

SEQ ID NO: 676567 - DNA, 75 bp, synthetic construct
  source 1..75: mol_type = other DNA
tgataacactcatacctatctgtcgctttcagataatagtacctgggatattaaagctgactcaacggtgagcaa

SEQ ID NO: 676568 - DNA, 75 bp, synthetic construct
  source 1..75: mol_type = other DNA
aatatcgcagcgaaaatatattgttacgaaccccgatgattatgataaatattccgatatggttaaaaagtatgt

SEQ ID NO: 676569 - DNA, 75 bp, synthetic construct
  source 1..75: mol_type = other DNA
aatgctcatcagcagttgcaaccttggtaactgagccaacaattcgggatgcgttgatttctgttgttcaggctc

SEQ ID NO: 676570 - DNA, 75 bp, synthetic construct
  source 1..75: mol_type = other DNA
ttttccgcatattgcccatcttgagcgcgagctagataaacgcggtcagtatgagacctttaaagccgcgtttgc

SEQ ID NO: 676571 - DNA, 75 bp, synthetic construct
  source 1..75: mol_type = other DNA
gtgacctgacgggatggatgtcgctgtcgcgtaaaccggaggtgacgtggtacgggtgggacggcgaccggctga

SEQ ID NO: 676572 - DNA, 75 bp, synthetic construct
  source 1..75: mol_type = other DNA
cgcatcacctgcaccagccgtaccggctgccggggcagcagtatgataaggagtcggggctgtactacaaccgga

SEQ ID NO: 676573 - DNA, 75 bp, synthetic construct
  source 1..75: mol_type = other DNA
ctggacaggctggaggaagaaatccgggcagaccgcgtgagcagtgaaagccgggcgtggcttgcgcagtgcggg

SEQ ID NO: 676574 - DNA, 75 bp, synthetic construct
  source 1..75: mol_type = other DNA
tcgcgcatcagggggctggagttgtgctggagtcttccataaatggtcaggaagcaacggtagatattttatctg

SEQ ID NO: 676575 - DNA, 75 bp, synthetic construct
  source 1..75: mol_type = other DNA
tagtgcaacgcgattaatctatgaacaagggtcggatggcgcagcgataactgtgacaaatccgcaggattggcc

SEQ ID NO: 676576 - DNA, 75 bp, synthetic construct
  source 1..75: mol_type = other DNA
aagaagataaagtaactgcagcgccctttattgtcactccgccactgttcaggcttaatccaggccagcaaaata

SEQ ID NO: 676577 - DNA, 75 bp, synthetic construct
  source 1..75: mol_type = other DNA
cacagcgggtatgacgcggcaggaaggctcacggcgcagacggatgcggcgggacggcggacagagtacggtctg

SEQ ID NO: 676578 - DNA, 75 bp, synthetic construct
  source 1..75: mol_type = other DNA
tataacactatacattgggatatatatattcacatatttatacctttggttctttataggaacatataaactatt

SEQ ID NO: 676579 - DNA, 75 bp, synthetic construct
  source 1..75: mol_type = other DNA
tataacactatatattgggatatatatattcacatatttgtacttttggttctttataggaacatataaactatt

SEQ ID NO: 676580 - DNA, 75 bp, synthetic construct
  source 1..75: mol_type = other DNA
acctctgcgggcgctaaagatattaactcctttcactattctttatatatccatgatatactgtttcttgctaac

SEQ ID NO: 676581 - DNA, 75 bp, synthetic construct
  source 1..75: mol_type = other DNA
aatacttatttaaacaatcacttaggattcctgtattttcagcgatatactttggtatattttcctggcttggac

SEQ ID NO: 676582 - DNA, 75 bp, synthetic construct
  source 1..75: mol_type = other DNA
atcggctgcagatgtttttatcaataatattaaaggtcatttggccgtcgatgcaactaattcaaaaataacggg

SEQ ID NO: 676583 - DNA, 75 bp, synthetic construct
  source 1..75: mol_type = other DNA
ttcgtactcaggagaaaaacagcggtccgcacggtgacgactttgaaccttttgttgaaatgaactggatccata

SEQ ID NO: 676584 - DNA, 75 bp, synthetic construct
  source 1..75: mol_type = other DNA
ggcgatggtggacgtaacccgtgagcctggggtcatggtcaacatgggcggctttaaaatagatctcggacgaac

SEQ ID NO: 676585 - DNA, 75 bp, synthetic construct
  source 1..75: mol_type = other DNA
gggcgcaacagctcatgccaccgctttatcgttaataagacaattaggctcaaaaaaagttgtttcgattaccaa

SEQ ID NO: 676586 - DNA, 75 bp, synthetic construct
  source 1..75: mol_type = other DNA
catcgactattctccggggcagtttgcattcttaacgttcgcacacagtaaagaatctcacccttttactatcgc

SEQ ID NO: 676587 - DNA, 75 bp, synthetic construct
  source 1..75: mol_type = other DNA
tggagtggatatctcagacttggaagagtatttaataatgaacttgatgagcttttaacgttaattaaatcaagg

SEQ ID NO: 676588 - DNA, 75 bp, synthetic construct
  source 1..75: mol_type = other DNA
tggtaaaacgttgccaatttatacctcaatgcccagcaaattaaacattgagatccttggaaccggtaattctgc

SEQ ID NO: 676589 - DNA, 75 bp, synthetic construct
  source 1..75: mol_type = other DNA
cagcgcctgctggcagaagtgggcattttttacttctttacgttgcacccggatgcgcagacagaggtgatccac

SEQ ID NO: 676590 - DNA, 75 bp, synthetic construct
  source 1..75: mol_type = other DNA
aacatggagtcgcagtagtggccaaaccgcagaatggaagaatctcagcagctatttgcagcgggcggttattcc

SEQ ID NO: 676591 - DNA, 75 bp, synthetic construct
  source 1..75: mol_type = other DNA
acgacgagcggacccaccactaccactacgacagccagcaccggctggtgttctacacgcggatacagcatggcg

SEQ ID NO: 676592 - DNA, 75 bp, synthetic construct
  source 1..75: mol_type = other DNA
aataaaatactaaaaaaaataggtgttatggatgaaaaacttttcatagatttagttgattctgagtggtgtgaa

SEQ ID NO: 676593 - DNA, 75 bp, synthetic construct
  source 1..75: mol_type = other DNA
gtgacaaaggttacacatcgctgtatgcaatgctgaaaatttcagcacttagcgaggtgcgagcaagctggcgct

SEQ ID NO: 676594 - DNA, 75 bp, synthetic construct
  source 1..75: mol_type = other DNA
tgtggcgaacagcaccgggctgaaaactgactggcgcggatataccgttgttccttatgccacttcttatcggga

SEQ ID NO: 676595 - DNA, 75 bp, synthetic construct
  source 1..75: mol_type = other DNA
accaaacttatgtatcgcctggtgcttttgaaattagtgatctctattccacgtcgtcgagcggtgatttgttgg

SEQ ID NO: 676596 - DNA, 75 bp, synthetic construct
  source 1..75: mol_type = other DNA
actaacgttctgattgcagcaccaggcgcagagaatactcgtgtggcgaacagcaccgggctgaaaactgactgg

SEQ ID NO: 676597 - DNA, 75 bp, synthetic construct
  source 1..75: mol_type = other DNA
ttgggatgaagggatcaacgcgctattactgggatattcatttagcggtgctaacagcattcacagcagtacaag

SEQ ID NO: 676598 - DNA, 75 bp, synthetic construct
  source 1..75: mol_type = other DNA
aaggggcgttggttctggcggagttcaatgcccatgcgggagcaagggtattaatgaaaacatcaaagcagggta

SEQ ID NO: 676599 - DNA, 75 bp, synthetic construct
  source 1..75: mol_type = other DNA
gcgccgttgacggagattattcccgatgccagcgtgacctttgatgtgaataaactccgtctggaaatttcagta

SEQ ID NO: 676600 - DNA, 75 bp, synthetic construct
  source 1..75: mol_type = other DNA
cgcaccggacctggatatccgcatcccgtatgcctccggcgtggccggataaccgaatcaccgaagacgcgcact

SEQ ID NO: 676601 - DNA, 75 bp, synthetic construct
  source 1..75: mol_type = other DNA
cttcagagtggaacctctttttgccagacgttctgtgtcttgtaagggagacactcgtggtgttgctcatgacgt

SEQ ID NO: 676602 - DNA, 75 bp, synthetic construct
  source 1..75: mol_type = other DNA
attgttttaatggattgacgcgctacaaccaggccggtgagttcaatgtcgggtatgggaagtataagtctacgc

SEQ ID NO: 676603 - DNA, 75 bp, synthetic construct
  source 1..75: mol_type = other DNA
atatcgcagcggaaatatattgttacgaaccccgatgattatgataaatattccgatatggttaaaaagtatgta

SEQ ID NO: 676604 - DNA, 75 bp, synthetic construct
  source 1..75: mol_type = other DNA
gatggaataattaagcagtttacatataccgggcgaagcggttcggatggtcttataagaattgatatgccacat

SEQ ID NO: 676605 - DNA, 75 bp, synthetic construct
  source 1..75: mol_type = other DNA
agaggataaagataatcagcagggaactatttctactaagaatgatgtttcaaatgtaaaggcggatggtgatac

SEQ ID NO: 676606 - DNA, 75 bp, synthetic construct
  source 1..75: mol_type = other DNA
ctgagtttgtatgtggtgattttgctgcggtgattgaagctgccggagaaggagatgtcatcttttgcgatccgc

SEQ ID NO: 676607 - DNA, 75 bp, synthetic construct
  source 1..75: mol_type = other DNA
atactcttttgtttgaaaattatggagcttatgataagacggggtctatcacgatagaaaaaagtcagggggagg

SEQ ID NO: 676608 - DNA, 75 bp, synthetic construct
  source 1..75: mol_type = other DNA
atgtttaaatgtgttaagcttcacagtaatgaacttgacttatcatacctatttttgggttctgtgccgcctctt

SEQ ID NO: 676609 - DNA, 75 bp, synthetic construct
  source 1..75: mol_type = other DNA
ttgctgagtactcaggtggatgccatccgaaatatcactggtgaagtcggtattgttcaatattttgggaatact

SEQ ID NO: 676610 - DNA, 75 bp, synthetic construct
  source 1..75: mol_type = other DNA
cgatgattatgataaatattccgatatggttaaaaagtatgtaatagatggtgaggatcacctaattaaatatta

SEQ ID NO: 676611 - DNA, 75 bp, synthetic construct
  source 1..75: mol_type = other DNA
gagaatgtttaaatgtgttgagctccacaataatgaacttgacttatcatccctatttttgggttctgtaccgcc

SEQ ID NO: 676612 - DNA, 75 bp, synthetic construct
  source 1..75: mol_type = other DNA
tttttattcggcacaataagttatcagaaataccagcaataccagataccactgaggtttttgaatgtagtggaa

SEQ ID NO: 676613 - DNA, 75 bp, synthetic construct
  source 1..75: mol_type = other DNA
atggacaagaaaattaaatcattgaagccaggaattgttatcagagacataagtggtgattacgatacagagaca

SEQ ID NO: 676614 - DNA, 75 bp, synthetic construct
  source 1..75: mol_type = other DNA
acgccaggcctatgaagaggccctgcgactggcggtaaatcctgtcgaggaagcagatgatgaagaaaaagatga

SEQ ID NO: 676615 - DNA, 75 bp, synthetic construct
  source 1..75: mol_type = other DNA
gacggtggtggcgtactttggcgccctatcgatgagctatcgactgggcagcagtgtactgctgtactgcattta

SEQ ID NO: 676616 - DNA, 75 bp, synthetic construct
  source 1..75: mol_type = other DNA
aattgcgcgaatcaggataataaaaaagaatcaagggaagcttacttgtcaggaattaaaaataatagataaata

SEQ ID NO: 676617 - DNA, 75 bp, synthetic construct
  source 1..75: mol_type = other DNA
ggtatttacaatgaaaactatagttttgttaattccctattcgttgttaaatttattcggtgtttattccagttg

SEQ ID NO: 676618 - DNA, 75 bp, synthetic construct
  source 1..75: mol_type = other DNA
caaagcgcacaggagctggcgagccacgccagagcctacggtgactggctggcaaatccgctgtctccaggaggc

SEQ ID NO: 676619 - DNA, 75 bp, synthetic construct
  source 1..75: mol_type = other DNA
cagcaggatggaactataccaatagaagctggtgagtttaaagccaccagtactttccaggtgacctacccttaa

SEQ ID NO: 676620 - DNA, 75 bp, synthetic construct
  source 1..75: mol_type = other DNA
atgacattgaaacctaatgattcaaattctgtttataaagattacgacccgagaggcaaagacgatacaacagga

SEQ ID NO: 676621 - DNA, 75 bp, synthetic construct
  source 1..75: mol_type = other DNA
tcgcaggatatgaaggtaaatactccgtaactactgatggccgcgtttattctcattcgagagttgatgctcgtg

SEQ ID NO: 676622 - DNA, 75 bp, synthetic construct
  source 1..75: mol_type = other DNA
gcattttctggagcaatgtaatctggaaggggtaggctcacgacgcctcgcttgggtattggagcatgatttttc

SEQ ID NO: 676623 - DNA, 75 bp, synthetic construct
  source 1..75: mol_type = other DNA
ctggagttgtacgggcagaatgaaatttacgaaatgacccgagatgctcagagtcgtaatcgtctggtagagcga

SEQ ID NO: 676624 - DNA, 75 bp, synthetic construct
  source 1..75: mol_type = other DNA
attgtcggtgttgcggaccatggtgctgttaatgctgtagacaggattcgtcagctctttaaggaacatggtatt

SEQ ID NO: 676625 - DNA, 75 bp, synthetic construct
  source 1..75: mol_type = other DNA
ttcaatatcaatgtagagcatgaatctgctcaaccagtagaagaaaatgttattataactaggtttaatatatta

SEQ ID NO: 676626 - DNA, 75 bp, synthetic construct
  source 1..75: mol_type = other DNA
atgatattgttaaacgtattcattattttgaggataatgaatgccttaacgggtttgataatatttgcggggata

SEQ ID NO: 676627 - DNA, 75 bp, synthetic construct
  source 1..75: mol_type = other DNA
aaaattatcacaactgatgcgatgggttgccagaaagatattgcagagaagatacaaaaacgggggaggtgatta

SEQ ID NO: 676628 - DNA, 75 bp, synthetic construct
  source 1..75: mol_type = other DNA
cttttcgccgcgttaggtggctgggtgggggcattgtcgctgcccaatgttgctttaatcgcctcatgctgcggc

SEQ ID NO: 676629 - DNA, 75 bp, synthetic construct
  source 1..75: mol_type = other DNA
tgaactgatgcaggaaagtaaaagtaaaaagagattgtcgattatatggtggcgcgttacggcaacttcgtcact

SEQ ID NO: 676630 - DNA, 75 bp, synthetic construct
  source 1..75: mol_type = other DNA
tctgttgtcctggctgtgcttaatgatattattgattggtcggtgttattttttgttgctacaatcgttttttta

SEQ ID NO: 676631 - DNA, 75 bp, synthetic construct
  source 1..75: mol_type = other DNA
cccagagtggtcgcatttgaaatggtttcaatcaacgaaatcatcaattaaatactctttagatttcatacgtat

SEQ ID NO: 676632 - DNA, 75 bp, synthetic construct
  source 1..75: mol_type = other DNA
agaggttatgacggtgtacttaaagccgagggggtggccccctatgttcctgatggcgactcattctgggaattt

SEQ ID NO: 676633 - DNA, 75 bp, synthetic construct
  source 1..75: mol_type = other DNA
tccgattgggctgagtggtgggctgaatacatattcgtatccattaaatccaataaatgaaatagatcctttagg

SEQ ID NO: 676634 - DNA, 75 bp, synthetic construct
  source 1..75: mol_type = other DNA
agcaggtgcataaaggtaatcaggcagccgattttgataccttcggcaaaggtgcctggacttttgaattgcgcg

SEQ ID NO: 676635 - DNA, 75 bp, synthetic construct
  source 1..75: mol_type = other DNA
tattgcaccgttcgtgacatatgaagagattagaaaactgggtaaaggcgatcatctggtgaagctgaaaaccag

SEQ ID NO: 676636 - DNA, 75 bp, synthetic construct
  source 1..75: mol_type = other DNA
tccggtcgagggcggcatgatgatggcaattgccgtggctgggctgctggcaaatatactttctttctggttact

SEQ ID NO: 676637 - DNA, 75 bp, synthetic construct
  source 1..75: mol_type = other DNA
ttctatgcttgaagattggctcggtgtttgccctgctgtagctgcttactacgctcgctaccatcttgagctaat

SEQ ID NO: 676638 - DNA, 75 bp, synthetic construct
  source 1..75: mol_type = other DNA
accctgcggcgatgcccatcctggcaaccgtcggaggattaatcatcggcagttttttgaatgtggtgatttggc

SEQ ID NO: 676639 - DNA, 75 bp, synthetic construct
  source 1..75: mol_type = other DNA
ccacctggcctgcggatgccattgcccgggcggaagatgtggtgttgcgtctgtccgggatgagcggggctgttc

SEQ ID NO: 676640 - DNA, 75 bp, synthetic construct
  source 1..75: mol_type = other DNA
ggtcttgggaggggaaactgatgtcacggcgatcacaaagcaggatattagacaggtgatggaagtcgttgaaaa

SEQ ID NO: 676641 - DNA, 75 bp, synthetic construct
  source 1..75: mol_type = other DNA
gaaaaacattctgcacctacagcaaacagtaggccatgagaagagcggagggatcactaaacgatatttacatac

SEQ ID NO: 676642 - DNA, 75 bp, synthetic construct
  source 1..75: mol_type = other DNA
ggtggctggatctacttactccagcaagtgactgctgatccccgttctcctcgtggtggcctttctctgttctgg

SEQ ID NO: 676643 - DNA, 75 bp, synthetic construct
  source 1..75: mol_type = other DNA
atattttcctgatgatactgatgttcccatttggttcgttagccaatgagttacctttttcctcaaccggaaaat

SEQ ID NO: 676644 - DNA, 75 bp, synthetic construct
  source 1..75: mol_type = other DNA
cgaattttaccggcctgttgcagctcttccatgacacgccaggcaccgtggacatcaccgtaaggctgatgaatc

SEQ ID NO: 676645 - DNA, 75 bp, synthetic construct
  source 1..75: mol_type = other DNA
gaacgctttatggaagtgctgatgattgtcttgggtgcatccacagacgtaactacgatcaccaaacaggacatt

SEQ ID NO: 676646 - DNA, 75 bp, synthetic construct
  source 1..75: mol_type = other DNA
tatccacaagcatttgaagatttacaaatcgctgtttaaaaccttcctgacagacaataaagatattctggagaa

SEQ ID NO: 676647 - DNA, 75 bp, synthetic construct
  source 1..75: mol_type = other DNA
atgggacaccagaccatacgccacaccattaaacgtaacggggtttattacgttcgtttccgcctgcctgataat

SEQ ID NO: 676648 - DNA, 75 bp, synthetic construct
  source 1..75: mol_type = other DNA
cgctatgaatatcttctttacttctggctttggtaactcactaaccagcgctttcgacgctatcagcgccgctgt

SEQ ID NO: 676649 - DNA, 75 bp, synthetic construct
  source 1..75: mol_type = other DNA
agaaaacaaagatattttgattaaatccccaactgatggggtagtagcgacaccatctaaagcaaggtttggagc

SEQ ID NO: 676650 - DNA, 75 bp, synthetic construct
  source 1..75: mol_type = other DNA
cgtttcaaagaaacggtaattactatctacagattcggctttcgaatggtcggatgtataaaaaatcacttctca

SEQ ID NO: 676651 - DNA, 75 bp, synthetic construct
  source 1..75: mol_type = other DNA
ggcgatctgcgtaacggtcgtgtgtatccgggggcgaatattgacgccattcctgtaccggcgggcagcgaatat

SEQ ID NO: 676652 - DNA, 75 bp, synthetic construct
  source 1..75: mol_type = other DNA
gctgtccaggccgtttaccggaaagcgtatttcagcgacggcgggtcatccggcgagtctgttgtggtgcattga

SEQ ID NO: 676653 - DNA, 75 bp, synthetic construct
  source 1..75: mol_type = other DNA
gcggcagcggactggccccggctttctggttcctggggatgcaggatgcggtgtacaccgaaaatatggaggtcg

SEQ ID NO: 676654 - DNA, 75 bp, synthetic construct
  source 1..75: mol_type = other DNA
gagcggcgtattcgccatgacgctttgcgtgtttgtgctgatcgcttctgagtttatgccagtcagcctgcttac

SEQ ID NO: 676655 - DNA, 75 bp, synthetic construct
  source 1..75: mol_type = other DNA
ggctgcttgttgaggcggcacgtcggcagcctgtgcgtattctttgcgctcgtgaactgcaaaacagtatcagcg

SEQ ID NO: 676656 - DNA, 75 bp, synthetic construct
  source 1..75: mol_type = other DNA
cctgcagctgaaatagcccggacttatttcgaactggggatgacgttcccggaactgtacgacgacagccatccg

SEQ ID NO: 676657 - DNA, 75 bp, synthetic construct
  source 1..75: mol_type = other DNA
tgcacatgatgatgcagtccaggccgtttaccggaaagcgtatttcagcgacggcgggtcatccggcgagtctgt

SEQ ID NO: 676658 - DNA, 75 bp, synthetic construct
  source 1..75: mol_type = other DNA
atgtgtgaagtggtcgcgcaatcggaaaacgggcgcgtcgccatcgtcagaatggtccccaccgactggaaatgc

SEQ ID NO: 676659 - DNA, 75 bp, synthetic construct
  source 1..75: mol_type = other DNA
gcattccggcctacacccgcgatgtaaaacacaacaaccccttctggtgtaaccagtacaaactggtgagaaaga

SEQ ID NO: 676660 - DNA, 75 bp, synthetic construct
  source 1..75: mol_type = other DNA
ggctaatgccctgtccatcacgctggctgaaggcggcagctataaaattaccggcaggggaaccctggacggtcc

SEQ ID NO: 676661 - DNA, 75 bp, synthetic construct
  source 1..75: mol_type = other DNA
cccgggtgattctcctgaatacgccttttattctgcttgatgaaccaggtgtagggctggatagtataaatgaac

SEQ ID NO: 676662 - DNA, 75 bp, synthetic construct
  source 1..75: mol_type = other DNA
cgaggcaatcaccattctctgatggcacgacagggacgctatgcagaactgtggttactgcagaaggagggaaaa

SEQ ID NO: 676663 - DNA, 75 bp, synthetic construct
  source 1..75: mol_type = other DNA
ggtcaagataggtataactcctttcaaaagagaagaggaagttattacacaaaaaaggcatcgccatttaagtga

SEQ ID NO: 676664 - DNA, 75 bp, synthetic construct
  source 1..75: mol_type = other DNA
tgaacaagcaccaacatatgaaattagcgaacctgtttttgcttatgataagactatgccggtttctatcttact

SEQ ID NO: 676665 - DNA, 75 bp, synthetic construct
  source 1..75: mol_type = other DNA
tattgtcaaaacgaagagatattattgaacaagcaccaacatatgaaattagcgaacctgtttttgcttatgata

SEQ ID NO: 676666 - DNA, 75 bp, synthetic construct
  source 1..75: mol_type = other DNA
agaacggcgaaaaaatcgcgcgttcaggcgcgtgaagctcgggcggcggtagaagaaataaaaaggcacagcttg

SEQ ID NO: 676667 - DNA, 75 bp, synthetic construct
  source 1..75: mol_type = other DNA
gaacactagcaccgctgcatgtgaaactccgcaagacttgctggcaacaaccacacgagaagtatacatccggca

SEQ ID NO: 676668 - DNA, 75 bp, synthetic construct
  source 1..75: mol_type = other DNA
acaatttgaggtggacgcgaggtttaaacgagaaaagtggagttctggtgaaattccacgtagccacaaacattg

SEQ ID NO: 676669 - DNA, 75 bp, synthetic construct
  source 1..75: mol_type = other DNA
tttttcagaggtcgagctacgtctaaaaagagaaaaatggaataacggtgaatatccgttgtctcatcaacacag

SEQ ID NO: 676670 - DNA, 75 bp, synthetic construct
  source 1..75: mol_type = other DNA
gagcagtaagtactttcattgaaaggattatggattttagttttgaaaatacctcaccaacagcatttagagggc

SEQ ID NO: 676671 - DNA, 75 bp, synthetic construct
  source 1..75: mol_type = other DNA
gatgcaatcctaccagcagaatcgcgtgagccgattaattatgatctggaagagttctatctgaacgtgagtgga

SEQ ID NO: 676672 - DNA, 75 bp, synthetic construct
  source 1..75: mol_type = other DNA
aaaatataaagatttcgaaaaactttttagtgaaattgtatttacgccagatgaatgtaatattgtgagaaactc

SEQ ID NO: 676673 - DNA, 75 bp, synthetic construct
  source 1..75: mol_type = other DNA
ggcgaaaacgcagcgccgcagcctggcggatgcgcttcagcagtccggcggcgaagacggtggcagtgtggtgtt

SEQ ID NO: 676674 - DNA, 75 bp, synthetic construct
  source 1..75: mol_type = other DNA
accaaataacacctatctaaaatataatcccaaagctaaagggaatggagttacaattatcaggcaagggagtaa

SEQ ID NO: 676675 - DNA, 75 bp, synthetic construct
  source 1..75: mol_type = other DNA
gccgatgcttataataatgagaactctatagttcgtgatattgtttcggctcatcctgccgagtttgagtcagac

SEQ ID NO: 676676 - DNA, 75 bp, synthetic construct
  source 1..75: mol_type = other DNA
gaacatgaacaccgaggtgctgaataaccgcaccacggatgtgataaacaaccatgctgagaccattggcaacaa

SEQ ID NO: 676677 - DNA, 75 bp, synthetic construct
  source 1..75: mol_type = other DNA
ttatttcttcagtttcagggttcgattcaggtgatgaacgattagcatctttatataatttatccttacatcaaa

SEQ ID NO: 676678 - DNA, 75 bp, synthetic construct
  source 1..75: mol_type = other DNA
ggcgagaataatttctgagctcggagataaagacgatatggtttattctggggcaggctcatcagaagtatttgc

SEQ ID NO: 676679 - DNA, 75 bp, synthetic construct
  source 1..75: mol_type = other DNA
aaaagaaagactcctttttacgttaaagctgttttgtattttacttctgttattaatagtaatgcgattttcaat

SEQ ID NO: 676680 - DNA, 75 bp, synthetic construct
  source 1..75: mol_type = other DNA
gtttaccaggcgataaaaatctgtggtagtgataagattttattcggtaccgataatcctattaatgggctagat

SEQ ID NO: 676681 - DNA, 75 bp, synthetic construct
  source 1..75: mol_type = other DNA
cagcgaacaggaagcacgccagcaatccccggctggctacgtgatggtattcgccgcccgtattcgtcagggggt

SEQ ID NO: 676682 - DNA, 75 bp, synthetic construct
  source 1..75: mol_type = other DNA
ggtcaggttatataaaagccagtaatatagcatctgaaaaaaacatggttaatattaccagtgttgccgatgata

SEQ ID NO: 676683 - DNA, 75 bp, synthetic construct
  source 1..75: mol_type = other DNA
aaaagcgcagcctgaactggatacgttttttcgtgaaacacgctactcgctggattatatgtttgccccgtttaa

SEQ ID NO: 676684 - DNA, 75 bp, synthetic construct
  source 1..75: mol_type = other DNA
gcacattacctcggtacagtgcaaatccactacaccccaaccaccttcaacgctgccgttaagcattatacctgt

SEQ ID NO: 676685 - DNA, 75 bp, synthetic construct
  source 1..75: mol_type = other DNA
atgaatagccccccttgcccctttgatccacaaaccgcacattacctcggtacagtgcaaatccactacagccca

SEQ ID NO: 676686 - DNA, 75 bp, synthetic construct
  source 1..75: mol_type = other DNA
tcagggggctatgtatccttccggcctgtacatcactctgccggatctggtgacgcccgtagcggaatcgccatt

SEQ ID NO: 676687 - DNA, 75 bp, synthetic construct
  source 1..75: mol_type = other DNA
ctgaatgaatggtatgttcagcctcaggcacaggttgtctggatgggtgtaaaagcagatgaacaccgtgaaagc

SEQ ID NO: 676688 - DNA, 75 bp, synthetic construct
  source 1..75: mol_type = other DNA
tgtcggcaatattgctcatatttccactatggttgaacccgtctcatgacttaaaattcaccggagtcagcagat

SEQ ID NO: 676689 - DNA, 75 bp, synthetic construct
  source 1..75: mol_type = other DNA
aaaaaacgttctgcagcttacagaaaatgttaatactattgacggaaaattaaaggatcccgctaaaatattgac

SEQ ID NO: 676690 - DNA, 75 bp, synthetic construct
  source 1..75: mol_type = other DNA
atcggtcaagggataatgatatccgcaatataaagagaaatttctctggcaatattacgattgcaacttacaaat

SEQ ID NO: 676691 - DNA, 75 bp, synthetic construct
  source 1..75: mol_type = other DNA
aaatctgatgaatgtcatctggtgagagagtctttagagcaggatcgtataacgccagaaaaaagagaagaaatt

SEQ ID NO: 676692 - DNA, 75 bp, synthetic construct
  source 1..75: mol_type = other DNA
tttcatatctatcggcatgatattagtgataaattggttccttattttcatgttacgcctgaatcggagaatgag

SEQ ID NO: 676693 - DNA, 75 bp, synthetic construct
  source 1..75: mol_type = other DNA
atacgccagtgcctcttctgacactgagcgcagagcacaagcagggcaagagcggtcagaatgacactcgctttg

SEQ ID NO: 676694 - DNA, 75 bp, synthetic construct
  source 1..75: mol_type = other DNA
acttttcagagtatgcattcaaacaaacttatcatgttgtaaaagcagtcgtaaatgaagctaaaagcgattttg

SEQ ID NO: 676695 - DNA, 75 bp, synthetic construct
  source 1..75: mol_type = other DNA
ccgagttttgttgctttgaatggtagaaattaccatcagcatgtcgatttctcagaatacggattcacacaaacc

SEQ ID NO: 676696 - DNA, 75 bp, synthetic construct
  source 1..75: mol_type = other DNA
tagttactttgagcgtctggccgcacttgaaaatgagatgattattttcacttctcccgatttgaaaccaagggt

SEQ ID NO: 676697 - DNA, 75 bp, synthetic construct
  source 1..75: mol_type = other DNA
acaacggttatcgttatcgatataaaaaagaaatttagatatatcagaagtcgtatcgaaaaaattcaaaaaaga

SEQ ID NO: 676698 - DNA, 75 bp, synthetic construct
  source 1..75: mol_type = other DNA
ttcacttgtggttaagtggatggaaaaagaaggtgagtttactatagaggatttggaggaaaaatggcaggaaca

SEQ ID NO: 676699 - DNA, 75 bp, synthetic construct
  source 1..75: mol_type = other DNA
atccaaataaaacagagaatgataatagccagttacaaaatcagaatctaagggagagtatcgaaaaaagcctcg

SEQ ID NO: 676700 - DNA, 75 bp, synthetic construct
  source 1..75: mol_type = other DNA
cgttgttgtacgacttgcgggactgaaagcctatgatttgcaggaaggggttcctgatggtctgaaatggaaagt

SEQ ID NO: 676701 - DNA, 75 bp, synthetic construct
  source 1..75: mol_type = other DNA
ttatattaatttcagtcttatgcatttttaatggattattgactcctggtgcatatgccgcagcagcgaatggat

SEQ ID NO: 676702 - DNA, 75 bp, synthetic construct
  source 1..75: mol_type = other DNA
gtacctgggtgaagaccagcgatgaaggtaaagccgagctgcgagtcgtttctgtgactgcgggaacgtatgcaa

SEQ ID NO: 676703 - DNA, 75 bp, synthetic construct
  source 1..75: mol_type = other DNA
aatgttaatactattgacggaaaattaaaggatcccgctaaaatattgaccctgcataactctgtgagaaaaacc

SEQ ID NO: 676704 - DNA, 75 bp, synthetic construct
  source 1..75: mol_type = other DNA
attcccaaccctcagattattgacagtatgagtcaatcttcagattcaatggtgcacagggataataaagggaag

SEQ ID NO: 676705 - DNA, 75 bp, synthetic construct
  source 1..75: mol_type = other DNA
gccatcggcactgatgaagttactgccggggcgttcccgtcgttcagtacagggggctatgaggcgtttgcagaa

SEQ ID NO: 676706 - DNA, 75 bp, synthetic construct
  source 1..75: mol_type = other DNA
atatagatattttacgtcagcagaatacaaacattcctcttaaagaggcatcctcacaaagtgaggagcctcatc

SEQ ID NO: 676707 - DNA, 75 bp, synthetic construct
  source 1..75: mol_type = other DNA
tgcatttcaaaaggccttgatgcatttttattatatcgataaatatcctaatggtgatttccactatcattacaa

SEQ ID NO: 676708 - DNA, 75 bp, synthetic construct
  source 1..75: mol_type = other DNA
ctggctaacattgctgacaacacaaccgggtcaagtgcaatggcaaagaccaaaggaaccttaactcacgctatc

SEQ ID NO: 676709 - DNA, 75 bp, synthetic construct
  source 1..75: mol_type = other DNA
agccgccgctcgctcgtgctggccgccatcagcctggtgttactggtcattatcgccaccggcggggattacctg

SEQ ID NO: 676710 - DNA, 75 bp, synthetic construct
  source 1..75: mol_type = other DNA
atggaacctatacggcggtgctgactgctggcgcaacgggagttggtgagctgactatcatgccgcgagttgatg

SEQ ID NO: 676711 - DNA, 75 bp, synthetic construct
  source 1..75: mol_type = other DNA
aacaaccacgttttcgttattcagccctggcccactgcgtggcgtgggcaaacatctctattcaggttcttttcc

SEQ ID NO: 676712 - DNA, 75 bp, synthetic construct
  source 1..75: mol_type = other DNA
ttgcctatcgcctgcagaatagtagccaggacgtcaatattcagctccctatagaaaccaaccttggtaacacca

SEQ ID NO: 676713 - DNA, 75 bp, synthetic construct
  source 1..75: mol_type = other DNA
atgccaaatacaattcattaccctcatgtaataccatttatatcccaaggaaaaataaatgctataaaaagcacg

SEQ ID NO: 676714 - DNA, 75 bp, synthetic construct
  source 1..75: mol_type = other DNA
cccgccgacgatgtacctcaaccagggtgacgtgattggcctggtcacgggggcggacattgatttttcagacgt

SEQ ID NO: 676715 - DNA, 75 bp, synthetic construct
  source 1..75: mol_type = other DNA
aaaataaataatttagaaaaaaagaatatccaccattatttgtgggttacagggaatgtgtacaacaaagattta

SEQ ID NO: 676716 - DNA, 75 bp, synthetic construct
  source 1..75: mol_type = other DNA
agagaatggcaatttgagagggtatatttttgagctttttgtatcctcgcaaatttctaatttttatggccttgg

SEQ ID NO: 676717 - DNA, 75 bp, synthetic construct
  source 1..75: mol_type = other DNA
acttgccgtaataaataatggcggttatttgaaggtgaaagattttgggattgtgtctggatctcctataaaaca

SEQ ID NO: 676718 - DNA, 75 bp, synthetic construct
  source 1..75: mol_type = other DNA
aaacctgctgcgtatgctgcagcaggcccggacggagcagaaacgtctgcagcgcattgaccgggcactggcgct

SEQ ID NO: 676719 - DNA, 75 bp, synthetic construct
  source 1..75: mol_type = other DNA
ggcagtcccttcaacaacgaagcgggaagagggaaataccctgaagattgccacacaaagcgtcatcaaactttt

SEQ ID NO: 676720 - DNA, 75 bp, synthetic construct
  source 1..75: mol_type = other DNA
gaaactttcataaattatctggtggtacacaggagttatcgactatcaatggtggtaatgaaggcatgagggtca

SEQ ID NO: 676721 - DNA, 75 bp, synthetic construct
  source 1..75: mol_type = other DNA
ttaaataaggatataaaagttacttttataaataaactaaaatattcagggaagcctgggggatattttcgatta

SEQ ID NO: 676722 - DNA, 75 bp, synthetic construct
  source 1..75: mol_type = other DNA
acggccattcaggctgcggcggcgaacttccatttcgcgaccggaggatttacggggacgggcggcaaatatgag

SEQ ID NO: 676723 - DNA, 75 bp, synthetic construct
  source 1..75: mol_type = other DNA
tcttcctgtttataaaatatcaccgatacaatatatacagtcatatgatttacttggtataagtgtaatagaaaa

SEQ ID NO: 676724 - DNA, 75 bp, synthetic construct
  source 1..75: mol_type = other DNA
ttgtccgaattcggacacaatcaaaaaagcttaattacgatcaatttgatctacatctctttaaccaacaatatg

SEQ ID NO: 676725 - DNA, 75 bp, synthetic construct
  source 1..75: mol_type = other DNA
atacttagttgggttaatcgtcaatgcagcaattgcatgggctggattcctttggttccagaaaacacggaaagg

SEQ ID NO: 676726 - DNA, 75 bp, synthetic construct
  source 1..75: mol_type = other DNA
ccggttgtgtttttggacgctattaattccaaatctgtgtgtgcttgcaacagagatataacattagatgaatta

SEQ ID NO: 676727 - DNA, 75 bp, synthetic construct
  source 1..75: mol_type = other DNA
ttttactttggactttccagtgtggatgtggcggcgcgccggcgcattgccggtattgatgttcgcccgggacgt

SEQ ID NO: 676728 - DNA, 75 bp, synthetic construct
  source 1..75: mol_type = other DNA
gcgctattgggattgctacgcgcgtggacacgttaccagtcagtttggtacggaaccgatcgcgcgttttgttaa

SEQ ID NO: 676729 - DNA, 75 bp, synthetic construct
  source 1..75: mol_type = other DNA
atgagttgcaagtttgaatggatcaatgagcccgccgtatggtgcaacgaaaataacgccctgtcggtaatcaca

SEQ ID NO: 676730 - DNA, 75 bp, synthetic construct
  source 1..75: mol_type = other DNA
tcggtttggttgactatgtaaaagataacctcgataaagcggcatcaattcatgtcaacctctacgatgatgagc

SEQ ID NO: 676731 - DNA, 75 bp, synthetic construct
  source 1..75: mol_type = other DNA
aaggttcctcattctcctttccctgacggtgaggcttttgcttatcgcttcgacacacaaggcaagcgaattgtc

SEQ ID NO: 676732 - DNA, 75 bp, synthetic construct
  source 1..75: mol_type = other DNA
gtaacatcattgattctatcttcggcacagacagtgaggagcctgttcaggaagccccaagaaagcgtttaagcc

SEQ ID NO: 676733 - DNA, 75 bp, synthetic construct
  source 1..75: mol_type = other DNA
gcgctattgggattgttacgcacggggacacgttaccagtcatttcggtatggaagcgatcgtgcgttttgttaa

SEQ ID NO: 676734 - DNA, 75 bp, synthetic construct
  source 1..75: mol_type = other DNA
gtaccactgcgaccatcgcggcctgccgctggcccttatcagcaaggaagggacaacagaatggtgcgcagaata

SEQ ID NO: 676735 - DNA, 75 bp, synthetic construct
  source 1..75: mol_type = other DNA
tcaaaatgtagttctcccaaaaggggctattcttaaaggtgaatcagagctaccctatgtagcaaatgatattaa

SEQ ID NO: 676736 - DNA, 75 bp, synthetic construct
  source 1..75: mol_type = other DNA
tgctcaggacgtgcaatacccggaacgccagttactcggatttgggcaagacgataaaaaacttattgaaaatct

SEQ ID NO: 676737 - DNA, 75 bp, synthetic construct
  source 1..75: mol_type = other DNA
tatgctgcgtaaagatgagcaagatcgtttattccaggcgtgtcacaagctgatttttgcaccagcaaaaacaga

SEQ ID NO: 676738 - DNA, 75 bp, synthetic construct
  source 1..75: mol_type = other DNA
atctaacagagcttttgagcgacgagacactggcgtcgaagctataccgaggcttgtttatccgccaagtgttga

SEQ ID NO: 676739 - DNA, 75 bp, synthetic construct
  source 1..75: mol_type = other DNA
tgtctctattttctgcttcggtattggggatggggcgagtgaatgaattgtgtggaatagatagtgtgaaaacga

SEQ ID NO: 676740 - DNA, 75 bp, synthetic construct
  source 1..75: mol_type = other DNA
aaccttactacagtgtttctgaagcgtcatctaagatacaatatgcccttgatctcaatggcgttattgacaaga

SEQ ID NO: 676741 - DNA, 75 bp, synthetic construct
  source 1..75: mol_type = other DNA
gcggtttatccccgctggcgcggggaacactctaaacataacctattattaattaatgattttttaagccagtca

SEQ ID NO: 676742 - DNA, 75 bp, synthetic construct
  source 1..75: mol_type = other DNA
gtttatccccgctggcgcggggaacacgtgctgccgtcgtacccggcgggcgctgccgccggtttatccccgctg

SEQ ID NO: 676743 - DNA, 75 bp, synthetic construct
  source 1..75: mol_type = other DNA
tatccccgctggcgcggggaacacaaaattcatattgataaacaccgcgtttgtatcggtttatccccgctggcg

SEQ ID NO: 676744 - DNA, 75 bp, synthetic construct
  source 1..75: mol_type = other DNA
gtttatccccgctggcgcggggaacacacactatccgggcggtattacgcccaaatatccggtttatccccgctg

SEQ ID NO: 676745 - DNA, 75 bp, synthetic construct
  source 1..75: mol_type = other DNA
ggggaactcactaaacttaatgatggccgttacagcgtggacggtttatccccgctggcgcggggaactctgtaa

SEQ ID NO: 676746 - DNA, 75 bp, synthetic construct
  source 1..75: mol_type = other DNA
atggtggtttatccccgctggcgcggggaacacctgttttcgcaaatctatggactattgctattcggtttatcc

SEQ ID NO: 676747 - DNA, 75 bp, synthetic construct
  source 1..75: mol_type = other DNA
gggaactctttcccggcggcaactctggctgcccaatcgtcggtttatccccgctggcgcggggaactcgccgag

SEQ ID NO: 676748 - DNA, 75 bp, synthetic construct
  source 1..75: mol_type = other DNA
gtgaaaaacaaagaagacttcagcatggttggcggcttctttaaaccgctaacgaaaccgggcttaggcgtagaa

SEQ ID NO: 676749 - DNA, 75 bp, synthetic construct
  source 1..75: mol_type = other DNA
ccgttcatcctttcccgcgcctacagcagttaccggaccaggacgcccgcgccggtaggggtgtttggtcccggc

SEQ ID NO: 676750 - DNA, 75 bp, synthetic construct
  source 1..75: mol_type = other DNA
ccggaagaagaggctcacgccaccgtgagcgaagcctggaacctgggtgtgcgttactttgataccgcgccgctg

SEQ ID NO: 676751 - DNA, 75 bp, synthetic construct
  source 1..75: mol_type = other DNA
attaattaatgattttttaagccagtcacaatctaccaactttatagtatcacacaaacaacacatccattatgt

SEQ ID NO: 676752 - DNA, 75 bp, synthetic construct
  source 1..75: mol_type = other DNA
gggaactctgtaaacataacctattattaattaatgattttttaagccagtcacaatctaccaactttatagtat

SEQ ID NO: 676753 - DNA, 75 bp, synthetic construct
  source 1..75: mol_type = other DNA
attattaattaatgattttttaagccagtcacaatctaccaactttatagtatcacacaaacaacacatccatta

SEQ ID NO: 676754 - DNA, 75 bp, synthetic construct
  source 1..75: mol_type = other DNA
gccgtctatcaggcaattaaccgcatcactgactataacgtcgaactggtgaaatacagcctgaccgccaaaggt

SEQ ID NO: 676755 - DNA, 75 bp, synthetic construct
  source 1..75: mol_type = other DNA
tttggggtgtttgggggggttaatcattatattctaattatctctgttgatacaaaacggaaaaagatatttata

SEQ ID NO: 676756 - DNA, 75 bp, synthetic construct
  source 1..75: mol_type = other DNA
gagtccgcgcgcatggacggagccagtaacttccgcatcttcatcgagatcatcatgccgctttccaaacccatt

SEQ ID NO: 676757 - DNA, 75 bp, synthetic construct
  source 1..75: mol_type = other DNA
attaggtgctgcagaatatagacaggtaaattcctatttgtttaaagactatgggcggatagcttttatcataaa

SEQ ID NO: 676758 - DNA, 75 bp, synthetic construct
  source 1..75: mol_type = other DNA
gatttctcgatggtatcattgctggataaaaactatatcagcgagaattacattcaggcaattggtgatgctgcc

SEQ ID NO: 676759 - DNA, 75 bp, synthetic construct
  source 1..75: mol_type = other DNA
accgcgatgaaatctgctgttttaatgatgatatccagggtactgcggcggtaacgctggggtgcctgatggcgg

SEQ ID NO: 676760 - DNA, 75 bp, synthetic construct
  source 1..75: mol_type = other DNA
atgattatgaaggatggcatctatagcattatatttattagcaatgaagactcctgtggggaaggtatactgatt

SEQ ID NO: 676761 - DNA, 75 bp, synthetic construct
  source 1..75: mol_type = other DNA
atgcctcactgcatcatggtgtgggggagatgcccgccggatggtgccggggctgatgatacgggaggcgtcatg

SEQ ID NO: 676762 - DNA, 75 bp, synthetic construct
  source 1..75: mol_type = other DNA
cgctggcgcggggaacacatcaacgttatcgattacaactgacagggagccggtttatccccgctggcgcgggga

SEQ ID NO: 676763 - DNA, 75 bp, synthetic construct
  source 1..75: mol_type = other DNA
tctcgcagctgttgggcttaatcaacagccatctggcgctggtgctgatttacgttggcggcatgatcccaatga

SEQ ID NO: 676764 - DNA, 75 bp, synthetic construct
  source 1..75: mol_type = other DNA
gtgagaaatgggtccgcctttcactctcctggctggttattgtgctggtgtcggtcatcatcatttacccgctgg

SEQ ID NO: 676765 - DNA, 75 bp, synthetic construct
  source 1..75: mol_type = other DNA
cgggaaaaagttgctaaccagattaattttaatggtttcgagtcgcttctcttttttatagaagaaaaattatag

SEQ ID NO: 676766 - DNA, 75 bp, synthetic construct
  source 1..75: mol_type = other DNA
ggatggacttgtgacggatggttttattttgcgtgaaaatgaatttgtcacatcgttgccgtctctgaaagaagc

SEQ ID NO: 676767 - DNA, 75 bp, synthetic construct
  source 1..75: mol_type = other DNA
ttacagtttctctcctgctgtcagttttccccgggatatcctgggcagatcgcgttgatgttcctgtatatgttg

SEQ ID NO: 676768 - DNA, 75 bp, synthetic construct
  source 1..75: mol_type = other DNA
cagtggtcatgtcaacgtaaccgatgggcgttatgtgtatatgcgtgccgcgctgccggggcgtgaggatgatat

SEQ ID NO: 676769 - DNA, 75 bp, synthetic construct
  source 1..75: mol_type = other DNA
gaggagtccggcctgtattacaaccgccaccgctattatgacccgctgcaggggcgatatatcactcaggatccg

SEQ ID NO: 676770 - DNA, 75 bp, synthetic construct
  source 1..75: mol_type = other DNA
gcgtctgaacgaccgtgcgggtgaaacgcgctacatcgatcctgtaactgaacaggagcgttcaagccgactttg

SEQ ID NO: 676771 - DNA, 75 bp, synthetic construct
  source 1..75: mol_type = other DNA
ggatggttttattttgcgtgaaaatgaatttgtcacatcattgcagtctctgaaagaagctgggcttaaggctgg

SEQ ID NO: 676772 - DNA, 75 bp, synthetic construct
  source 1..75: mol_type = other DNA
atgaaaaacgtaaactaccgtcccaacgaacatgaacgctatgcggacttcatcgaagaaatgttaaaagcactt

SEQ ID NO: 676773 - DNA, 75 bp, synthetic construct
  source 1..75: mol_type = other DNA
atgaaaaacgtaaactaccgccccaacgaacatgagcgttatgccgactttatcgaagaaatgctgaaagcactt

SEQ ID NO: 676774 - DNA, 75 bp, synthetic construct
  source 1..75: mol_type = other DNA
catgcagataaaattttatgtttttcattatttggctgttgtctttattacgataaatccatcgtaattcgctgg

SEQ ID NO: 676775 - DNA, 75 bp, synthetic construct
  source 1..75: mol_type = other DNA
tgttacagcttcgtttgatgacgctaagaagttacatgaaatagctgaaagacacgcaactccggtggctatagg

SEQ ID NO: 676776 - DNA, 75 bp, synthetic construct
  source 1..75: mol_type = other DNA
attgggaatggcgtggatgagacaactctgacagcaacagtgaaagatccttttgataacgtggttaaaaatctg

SEQ ID NO: 676777 - DNA, 75 bp, synthetic construct
  source 1..75: mol_type = other DNA
cccaatcaatgatcataccgtcacgtttgcggtattaagcggatcggcaacttccttcaacaatcaaaacaccgc

SEQ ID NO: 676778 - DNA, 75 bp, synthetic construct
  source 1..75: mol_type = other DNA
tataatcaaaacaagggagggattgctggtgctttgaataaagggatcaacgcgttaatagcaagtggatgcgaa

SEQ ID NO: 676779 - DNA, 75 bp, synthetic construct
  source 1..75: mol_type = other DNA
ccgataccatttccgtatgacgatttcgaagttatcgtttgtgcagcagatacaggagcaaataaaggggccgta

SEQ ID NO: 676780 - DNA, 75 bp, synthetic construct
  source 1..75: mol_type = other DNA
cttcttatcagtattactggcaacgccattcagtactggcactcaacgaatgtggagcgcgaatatttcgctaca

SEQ ID NO: 676781 - DNA, 75 bp, synthetic construct
  source 1..75: mol_type = other DNA
ggtgatgacggaaaggttattcataaaaaactgaatgaaaaactgaccatcaaaggtggtgcagagaagaatgct

SEQ ID NO: 676782 - DNA, 75 bp, synthetic construct
  source 1..75: mol_type = other DNA
tgcgtgaggcggcggaacaggcaacgcaagatgaatgggtagcatatattttgccgggtcataacggcatttatc

SEQ ID NO: 676783 - DNA, 75 bp, synthetic construct
  source 1..75: mol_type = other DNA
gtacatacgtgcgtagtgaacgaatattcgtcattgtccgactgatgatgctgtattcttcttctttagttgtca

SEQ ID NO: 676784 - DNA, 75 bp, synthetic construct
  source 1..75: mol_type = other DNA
ttgttcagtttggcactttttcaggaaacacgacccgctttatcagtggacacttccctataccattccctaatc

SEQ ID NO: 676785 - DNA, 75 bp, synthetic construct
  source 1..75: mol_type = other DNA
gatccctctgcatggcgatatggcgacactgttatctgcgatcgcttccgatttggcaaaacgcacgcatggtgg

SEQ ID NO: 676786 - DNA, 75 bp, synthetic construct
  source 1..75: mol_type = other DNA
gggtggactggtacaataatcaccgattgatggaacggaccggatatatcccgccagtggaggcagaaaaagcct

SEQ ID NO: 676787 - DNA, 75 bp, synthetic construct
  source 1..75: mol_type = other DNA
cgcacagctaatgccacttatacaggctatgaatattgttcagttcatgagctatttagcacttatgttatgtta

SEQ ID NO: 676788 - DNA, 75 bp, synthetic construct
  source 1..75: mol_type = other DNA
gtgtccaaattattttggcactagctaaatcttctcaatttttgttttttttcaaagcacttacacccataaata

SEQ ID NO: 676789 - DNA, 75 bp, synthetic construct
  source 1..75: mol_type = other DNA
gcggctatacggtcaagacacagctaaacccttatgatgaaaatcgggtagcaatcagcgataactatttctcga

SEQ ID NO: 676790 - DNA, 75 bp, synthetic construct
  source 1..75: mol_type = other DNA
agccagatggatcaggtgactcagcagaacgcctcgctggtagaagaagcggcggtggcaacggaacaactggcg

SEQ ID NO: 676791 - DNA, 75 bp, synthetic construct
  source 1..75: mol_type = other DNA
catgtagataaaattttatgtttttcattatttggttgttgtctttattacggtaaatccatcgtaattcgctgg

SEQ ID NO: 676792 - DNA, 75 bp, synthetic construct
  source 1..75: mol_type = other DNA
ggtggaaaaagtaggctatctgtagctgatgcaattaccagagtaatgattgtcggtatgacaactgaggtagcc

SEQ ID NO: 676793 - DNA, 75 bp, synthetic construct
  source 1..75: mol_type = other DNA
ccagggcgactagaactgttttttgtgtcggtagcggtccgtcactcactcgtgaggactgtgctgctatagaaa

SEQ ID NO: 676794 - DNA, 75 bp, synthetic construct
  source 1..75: mol_type = other DNA
agaccggcaccacgcgtatccagacggtatacgagccggggagcttcacaccgctcatcagaatcgaaacagaga

SEQ ID NO: 676795 - DNA, 75 bp, synthetic construct
  source 1..75: mol_type = other DNA
attaagtataaagaaaaagaagctgatgaggcacggcgacaaattatatcagatgcattgatttcagaagtggca

SEQ ID NO: 676796 - DNA, 75 bp, synthetic construct
  source 1..75: mol_type = other DNA
ctggcagtgctgctgggcggcatggttggcgcggggattgtgttggggcgtaatgctctacgcaactacaacgcg

SEQ ID NO: 676797 - DNA, 75 bp, synthetic construct
  source 1..75: mol_type = other DNA
ctgtaccgaaagtctccgacattcaggcttcgcttatcggacgttacagcactgcattctcagcattagcggaaa

SEQ ID NO: 676798 - DNA, 75 bp, synthetic construct
  source 1..75: mol_type = other DNA
cgagctgcgtaaacagggcgtttttatctccggcagtggtgtccgttctgtctggttacgctataaccttgagaa

SEQ ID NO: 676799 - DNA, 75 bp, synthetic construct
  source 1..75: mol_type = other DNA
taatgtaaaaactgtaatcgacttagaatctgcagataaagttatacgtaacgcgcttgatgactatggtttaaa

SEQ ID NO: 676800 - DNA, 75 bp, synthetic construct
  source 1..75: mol_type = other DNA
gcaaaaactactttttctcgagacatccagattataatgccaaccttagattttatagaagaaaaaataggtgag

SEQ ID NO: 676801 - DNA, 75 bp, synthetic construct
  source 1..75: mol_type = other DNA
acgggcgtccacaccacggcagcgaacctggatatcgatatcccgtatgcgacggacccggcaggaaaccggctg

SEQ ID NO: 676802 - DNA, 75 bp, synthetic construct
  source 1..75: mol_type = other DNA
ggatacggtggtgaaagtgctgtggcaataggggtatcccgtatatcagataacgggaaacttattatgaaaatg

SEQ ID NO: 676803 - DNA, 75 bp, synthetic construct
  source 1..75: mol_type = other DNA
aagcggccacaagtgtgagcagcgccagtgttcgctcatcggatgggcgtctggttacctatcagggctttgccg

SEQ ID NO: 676804 - DNA, 75 bp, synthetic construct
  source 1..75: mol_type = other DNA
caaacagaaatagtggaggacagctgggatattggtctggttcggctatccaggttaaccagtctggaggaaaat

SEQ ID NO: 676805 - DNA, 75 bp, synthetic construct
  source 1..75: mol_type = other DNA
gataatgaagaaatgctgattgtcgtgtttcctcatcctctttcgccggggtcgacggcgctgccgtccagtaaa

SEQ ID NO: 676806 - DNA, 75 bp, synthetic construct
  source 1..75: mol_type = other DNA
cttaatccccactggcctgctttcgcgcttatcggcctgattcttgagatcgcggctgaaaaagctgctgcctga

SEQ ID NO: 676807 - DNA, 75 bp, synthetic construct
  source 1..75: mol_type = other DNA
atgctcgggaacatgtgttcctgttcgaatcagagcgtgaagaatggctgaaaagtcagggcaataaaaaagcga

SEQ ID NO: 676808 - DNA, 75 bp, synthetic construct
  source 1..75: mol_type = other DNA
agtacagattgtggttgatgagatccgcgacacactggaaaaggcagtcattgactgttgtgatgaggccgatat

SEQ ID NO: 676809 - DNA, 75 bp, synthetic construct
  source 1..75: mol_type = other DNA
atataaaaagcaataaatgtagtacgaatagttcaacgatcactgtgctatctaatcgtgaagtgaccatattac

SEQ ID NO: 676810 - DNA, 75 bp, synthetic construct
  source 1..75: mol_type = other DNA
ccatccacgcgcttgaacaactggactggcagcggcctggctcgctcatgttgtgcggtttgcgcttcagcgagc

SEQ ID NO: 676811 - DNA, 75 bp, synthetic construct
  source 1..75: mol_type = other DNA
atgaaaatgaaaggcttcacgcttctggaaatgattattacccttgcaattatgggggtagcgatgctttcagta

SEQ ID NO: 676812 - DNA, 75 bp, synthetic construct
  source 1..75: mol_type = other DNA
atgtaactgcaactttgggcattgttaaccctgcagataataatacagcagtttacctgaatccgaaatttctgg

SEQ ID NO: 676813 - DNA, 75 bp, synthetic construct
  source 1..75: mol_type = other DNA
atgaggccagacggcaaattgtatcgaacgcattagtaacagaaatcagtggtatgttggcgtttgtaactgaag

SEQ ID NO: 676814 - DNA, 75 bp, synthetic construct
  source 1..75: mol_type = other DNA
accggactacagcgacaaccctcacgccaattgcccgcagttcgtgccggatgactacgtggcagtgccaccgga

SEQ ID NO: 676815 - DNA, 75 bp, synthetic construct
  source 1..75: mol_type = other DNA
gccgacgcgggcggctggctgatgggtatagcagcctgcagaataagcagttccgcgactttactgacgaagaca

SEQ ID NO: 676816 - DNA, 75 bp, synthetic construct
  source 1..75: mol_type = other DNA
ccagccgaccggagccgctactggcgcattgtgcgcgaccatgaaaagcgcctcaatgaagatttgccagtcggt

SEQ ID NO: 676817 - DNA, 75 bp, synthetic construct
  source 1..75: mol_type = other DNA
ctgacgggcgccctgctcttgaaatcgtgctcggcgccataaacaacgccaggcagagcattgacgtcgcggcct

SEQ ID NO: 676818 - DNA, 75 bp, synthetic construct
  source 1..75: mol_type = other DNA
cttagtgcgaatccggcagagactgttgttgagggaccgtttagtaaagacgtcatcctcaaaatcacctataac

SEQ ID NO: 676819 - DNA, 75 bp, synthetic construct
  source 1..75: mol_type = other DNA
agcagccttcattactccaggagtcagaaggctgaattaatgcatgagatttacttttttaatctccggtcgggc

SEQ ID NO: 676820 - DNA, 75 bp, synthetic construct
  source 1..75: mol_type = other DNA
aactttaggtgagtgtaccagaggagctcatagtggactgcctttttatcgggtggatggaccgttgcagacgat

SEQ ID NO: 676821 - DNA, 75 bp, synthetic construct
  source 1..75: mol_type = other DNA
acacgggtgtgacgctaccggcggagctggcggtgatgctggggaggctggagcgggaactgcggcagggcagcg

SEQ ID NO: 676822 - DNA, 75 bp, synthetic construct
  source 1..75: mol_type = other DNA
ttgtacgaaggtgacgctacctacaaagccgctatcgacaaagcattaaaaccggtcggactgagcggcatgttc

SEQ ID NO: 676823 - DNA, 75 bp, synthetic construct
  source 1..75: mol_type = other DNA
ctggataacgcctcagcttcggaaattgcccgcgtgctggaaagcctgactaaaaacagcggcgagaaccaacca

SEQ ID NO: 676824 - DNA, 75 bp, synthetic construct
  source 1..75: mol_type = other DNA
tgcgttatctgccggagtcctttgagatcccctggaatccgaacacccgtaccgaggtgagcaccctctgcatca

SEQ ID NO: 676825 - DNA, 75 bp, synthetic construct
  source 1..75: mol_type = other DNA
atcttctgtgatgaacatggccgagtgcgggtgaaatttaactgggaccgctataacccgtcaaaccaggacagt

SEQ ID NO: 676826 - DNA, 75 bp, synthetic construct
  source 1..75: mol_type = other DNA
gcggtcaggaaccgttcgccgtacccggtgacggcagaggacgggctggcggtcagccggatttgcgaggcggtg

SEQ ID NO: 676827 - DNA, 75 bp, synthetic construct
  source 1..75: mol_type = other DNA
gttacagttggatcgacaccctgaaagaagtggcggcgcagcaggtttctgatcagcaactggaaactgcccgct

SEQ ID NO: 676828 - DNA, 75 bp, synthetic construct
  source 1..75: mol_type = other DNA
tccctcggcctgccgccaaatgccccggttaaaaagcagattgatgagtttatccgccgctgggataacttcccg

SEQ ID NO: 676829 - DNA, 75 bp, synthetic construct
  source 1..75: mol_type = other DNA
aatttacttgatgcttttgcctgcaataacatggcatttactcaagacatcaaaaatccctaaagacatatgtga

SEQ ID NO: 676830 - DNA, 75 bp, synthetic construct
  source 1..75: mol_type = other DNA
tcgtcatcgccgaaggtctggccacagccttaagcgccgggcagctacagcacggcgcgatggccgtgatggcag

SEQ ID NO: 676831 - DNA, 75 bp, synthetic construct
  source 1..75: mol_type = other DNA
atgccaccagttcccgcgctgggtatggggtggcggcaggattcttcctggtctggttactcgtgctgggaaaga

SEQ ID NO: 676832 - DNA, 75 bp, synthetic construct
  source 1..75: mol_type = other DNA
atgcgttacgccgtacagatgttattgatggataacaaaaatatcactcaggtggcgcaattatgtggctatagc

SEQ ID NO: 676833 - DNA, 75 bp, synthetic construct
  source 1..75: mol_type = other DNA
ttccagacaatatcagcggacggtaaagaaaagcgcttcggaggtgacgcaaagggcgctttccgcatcatcaac

SEQ ID NO: 676834 - DNA, 75 bp, synthetic construct
  source 1..75: mol_type = other DNA
gagaagaccaccagcagtaaacggcgcagagcctccagcgacggcgaatctggtgtcgtgattgaggacaccgac

SEQ ID NO: 676835 - DNA, 75 bp, synthetic construct
  source 1..75: mol_type = other DNA
aggccgccactatgcggttcgccgggagcatgtaccgaccgacagcgacagagaagaccaccagcagtaaacggc

SEQ ID NO: 676836 - DNA, 75 bp, synthetic construct
  source 1..75: mol_type = other DNA
attcagtgattgataaaaaagagtatgaaacctggataacgctggcgggagacgtctggaaattgatgctcacac

SEQ ID NO: 676837 - DNA, 75 bp, synthetic construct
  source 1..75: mol_type = other DNA
attccctaccagcagaagttacctatgtggagttattagataccgatggaatctattatcagttcagaactctgg

SEQ ID NO: 676838 - DNA, 75 bp, synthetic construct
  source 1..75: mol_type = other DNA
gcaggggtctatgttactggagatgatatgggtataagtggcggcctctcgactatcccatttaaaaatgctgca

SEQ ID NO: 676839 - DNA, 75 bp, synthetic construct
  source 1..75: mol_type = other DNA
atccccctatgtctatccatttctgctgggattcagtgattgataaaaaagtgtatgaaacctggataacgctgg

SEQ ID NO: 676840 - DNA, 75 bp, synthetic construct
  source 1..75: mol_type = other DNA
ggatagtactatccctgtctcaacaacaataggacaatggcaggaaaatcttagtggtggaatgacggcattcaa

SEQ ID NO: 676841 - DNA, 75 bp, synthetic construct
  source 1..75: mol_type = other DNA
gcatctattatcagttcagaactctggatagtactatccctgtctcaacaacaataggacaatggcaggaaaatc

SEQ ID NO: 676842 - DNA, 75 bp, synthetic construct
  source 1..75: mol_type = other DNA
ggtacgcacattcatctggaaggggagtcggatgtgaacggtgatgcgccggtgattaactggaactgtggtgcc

SEQ ID NO: 676843 - DNA, 75 bp, synthetic construct
  source 1..75: mol_type = other DNA
ttaggactgtttatacgggttggcgccgtactgcgcggagaagaagaaatcacctggggtgagccaatctacctg

SEQ ID NO: 676844 - DNA, 75 bp, synthetic construct
  source 1..75: mol_type = other DNA
acctgatgaagtggagcagcgcaccgagaaggagattaacccggcccccgcccagcgcgtaagcctgtctgatat

SEQ ID NO: 676845 - DNA, 75 bp, synthetic construct
  source 1..75: mol_type = other DNA
ggctaaatatcttaaagaaaacaagcctgcggcaggagttcactggcatagacagttaaccgagaacctaggtgt

SEQ ID NO: 676846 - DNA, 75 bp, synthetic construct
  source 1..75: mol_type = other DNA
cccgaatggatattctgagtgatactgagtcagtatttatcatgatattatctactatcatcaaatcatatcagt

SEQ ID NO: 676847 - DNA, 75 bp, synthetic construct
  source 1..75: mol_type = other DNA
accatgtaaaaatagctaatggatattgtgtaatatgtggtaattttggaaaattaaaaaaagaccatgttcccc

SEQ ID NO: 676848 - DNA, 75 bp, synthetic construct
  source 1..75: mol_type = other DNA
tcggatctgccctgttcaccgagctgaagaataaggcagtgaagcgctactacctggttgattcacgtaacaagg

SEQ ID NO: 676849 - DNA, 75 bp, synthetic construct
  source 1..75: mol_type = other DNA
cttatctttctttataaactttgaatttgcaggttctctttctaaaagttctcttattagctctttacaagttct

SEQ ID NO: 676850 - DNA, 75 bp, synthetic construct
  source 1..75: mol_type = other DNA
tccataaggcacgaaaagaaattgcgaagtctgaagcagagtttgctgaaaaaatctcaaaacttattactgatt

SEQ ID NO: 676851 - DNA, 75 bp, synthetic construct
  source 1..75: mol_type = other DNA
gcgtcatcgggatataattattgcaaaaatagatttgtttattcaaagaatcactcataatttatggcatgcacg

SEQ ID NO: 676852 - DNA, 75 bp, synthetic construct
  source 1..75: mol_type = other DNA
tggacggaacgtgaagcgcgtaaccgctgcccgtccggttgtgttgctgtattcgccgcccgtattcgccagggg

SEQ ID NO: 676853 - DNA, 75 bp, synthetic construct
  source 1..75: mol_type = other DNA
aagggcgggactcgcacaacctgaataaagcgggtgtaaaaaaccagttgatcgccactgcaagccagggctatg

SEQ ID NO: 676854 - DNA, 75 bp, synthetic construct
  source 1..75: mol_type = other DNA
gcgctacttttattatatcaatcatatcttataaccttattgaaaaaccatcagtatccatagggcatgccatcg

SEQ ID NO: 676855 - DNA, 75 bp, synthetic construct
  source 1..75: mol_type = other DNA
actatcttgccggtgcgctgcacagcggtacgggaaaagtcagctacgttggtgggaacagtaaaggttcgtcct

SEQ ID NO: 676856 - DNA, 75 bp, synthetic construct
  source 1..75: mol_type = other DNA
cttactggctctggcagcttaaacggtcggcacgtaacctgattcttttgggggagcctgaatcgggttcagttt

SEQ ID NO: 676857 - DNA, 75 bp, synthetic construct
  source 1..75: mol_type = other DNA
cgcgtgtgaacgttattgatcgtggggcatttttttcacgggatcgaagcaacacagcaaaaacacttgagaact

SEQ ID NO: 676858 - DNA, 75 bp, synthetic construct
  source 1..75: mol_type = other DNA
cctggccgcacaaagtcagtctcggcgtcgagtatcaacatacctttaaggcgattaatcaacgtaacggagagc

SEQ ID NO: 676859 - DNA, 75 bp, synthetic construct
  source 1..75: mol_type = other DNA
aaaaaactggataactgcaagtgaaacccagctaaaaaaagagatatctaatttagggatggagcatatccataa

SEQ ID NO: 676860 - DNA, 75 bp, synthetic construct
  source 1..75: mol_type = other DNA
tatacaaaaatatacaacaaatcaactatagagaccacatctaacttcaccgcaaaccctgattttttagtgcaa

SEQ ID NO: 676861 - DNA, 75 bp, synthetic construct
  source 1..75: mol_type = other DNA
gatattacgataccgaacacctaataaaatgtggtttcaaacatattggagaaaacgtacttattgcaaaaaatt

SEQ ID NO: 676862 - DNA, 75 bp, synthetic construct
  source 1..75: mol_type = other DNA
aatcatgaagcgcatcaatgatgaagggttgaattggctggcagaggctgcagcattaggcagtgcaaaaaactc

SEQ ID NO: 676863 - DNA, 75 bp, synthetic construct
  source 1..75: mol_type = other DNA
catccaaaaggaaatggacatatccattgtggttttcttgcctggaacaagctgaatgagcttgcagatctcact

SEQ ID NO: 676864 - DNA, 75 bp, synthetic construct
  source 1..75: mol_type = other DNA
tctccggcgttaccgctaaccccgctgtcggctacgcctctgacctgctggtgcgctgcggcgcaacggtgatgt

SEQ ID NO: 676865 - DNA, 75 bp, synthetic construct
  source 1..75: mol_type = other DNA
tatgctgctggaaggcgacctgctctcagtttatagccgcgtctttgccgataccggagaaaacggggtgatgat

SEQ ID NO: 676866 - DNA, 75 bp, synthetic construct
  source 1..75: mol_type = other DNA
gcccggacggaacagaaacgactccagcgtatcgatcgggcgctggcgctgggcggctccattgaactgatggcc

SEQ ID NO: 676867 - DNA, 75 bp, synthetic construct
  source 1..75: mol_type = other DNA
cctgaacccactccggaagggcatgataacaacctgcgcccggaagccagctcctataccgcgaatatagctgcg

SEQ ID NO: 676868 - DNA, 75 bp, synthetic construct
  source 1..75: mol_type = other DNA
tgtcgccatcattgcgttaattaatggtattatcggcggcgttggcggctggtttggttttgcacatgcctcgct

SEQ ID NO: 676869 - DNA, 75 bp, synthetic construct
  source 1..75: mol_type = other DNA
ccagaacccaatgttcgacgtttctaactccatcgcgtatgccaagcaaatggtccatgctgtcgggcctaaaag

SEQ ID NO: 676870 - DNA, 75 bp, synthetic construct
  source 1..75: mol_type = other DNA
cgatgttcggagatctgccaccagagagtattggctggcttctggtcgatgaagcgggtcaggctgttcctcagg

SEQ ID NO: 676871 - DNA, 75 bp, synthetic construct
  source 1..75: mol_type = other DNA
taccagcgcacgcagtatgaagtgtatgactaccccggacgtttcaagggcgcccacgggcagaactttgcccgc

SEQ ID NO: 676872 - DNA, 75 bp, synthetic construct
  source 1..75: mol_type = other DNA
aggaaggccagcaccaggactaccagcgcacgcagtatgaagtgtatgactaccccggacgtttcaagggtgccc

SEQ ID NO: 676873 - DNA, 75 bp, synthetic construct
  source 1..75: mol_type = other DNA
gaaaagaaaaatatcaaaaaagttcgcgtcctgatgcttcagctcagatcggtgattaactggtgcatcagccgc

SEQ ID NO: 676874 - DNA, 75 bp, synthetic construct
  source 1..75: mol_type = other DNA
gtctcgacagagagaccgatctgctgcgggcgttcggcgtaaagttggatgagtggtgccgtgatcgtgtaggca

SEQ ID NO: 676875 - DNA, 75 bp, synthetic construct
  source 1..75: mol_type = other DNA
gttgaatgccgcttcgacaaagcctgttccagttatctcccgaatcgcaccttagaaaatgccatgtaccatgcc

SEQ ID NO: 676876 - DNA, 75 bp, synthetic construct
  source 1..75: mol_type = other DNA
ttatttcaatataatgaaatctacagaggtagcaatttttcttccctttactttctcttgcatatttgcaaaaaa

SEQ ID NO: 676877 - DNA, 75 bp, synthetic construct
  source 1..75: mol_type = other DNA
gaatggtctgcccccgcagcatctacgcagacccttgctgatcaggcatcgcgcttcaaatccaccttcgtcatg

SEQ ID NO: 676878 - DNA, 75 bp, synthetic construct
  source 1..75: mol_type = other DNA
acattcgcctctgttcggacgatgttcggggatctgccaccagagagcattggctggcttctggtagatgaagcg

SEQ ID NO: 676879 - DNA, 75 bp, synthetic construct
  source 1..75: mol_type = other DNA
ttgagcctttcgtcgcaccgtcgctcatgccgcaggctcgttggccttcgaaaggcggccatccattggtactgc

SEQ ID NO: 676880 - DNA, 75 bp, synthetic construct
  source 1..75: mol_type = other DNA
tgctcaacgaccgtaccaccaccgtaaaacacgatcaccgcgaaaccgtaaaaaatgaccagacggtcacgatcc

SEQ ID NO: 676881 - DNA, 75 bp, synthetic construct
  source 1..75: mol_type = other DNA
tacttgtattttccatgagcatgagcagcagcgcgtttgccagcgtggtaatgaccggaacccgtattattttcc

SEQ ID NO: 676882 - DNA, 75 bp, synthetic construct
  source 1..75: mol_type = other DNA
agggaaagtaaccaccatcagccgagctacgtccggattcagtgcgaaagacgccttcgatacatataccactaa

SEQ ID NO: 676883 - DNA, 75 bp, synthetic construct
  source 1..75: mol_type = other DNA
attgacgcttatttattggtgagaactacgttccatggcaggagttcgtcaacacggttggagggccattccggc

SEQ ID NO: 676884 - DNA, 75 bp, synthetic construct
  source 1..75: mol_type = other DNA
accggaccaggacgcccgcgccggtaggggtgtttggtcccggctggaaagcgcccttcgatatccgcttacaga

SEQ ID NO: 676885 - DNA, 75 bp, synthetic construct
  source 1..75: mol_type = other DNA
gggctattacgtcacaattcgcgccgctgaactgcttaataatggtaaaaaagtccccctcgcgaattcggtaat

SEQ ID NO: 676886 - DNA, 75 bp, synthetic construct
  source 1..75: mol_type = other DNA
tcgctcccggtgcgcagattcatttagtgaccgtcaacgactatggcgtaaatgtcacgtctgagcatgccttat

SEQ ID NO: 676887 - DNA, 75 bp, synthetic construct
  source 1..75: mol_type = other DNA
aaaataatctacaaacttccatttcagttcgatgggtattctgatgcactggcggcaattggagctggaagcatc

SEQ ID NO: 676888 - DNA, 75 bp, synthetic construct
  source 1..75: mol_type = other DNA
ataacgaatatacaggtaatggcgttacgacttcatttccttatacctttcgaatttttcagaagtcagacctgg

SEQ ID NO: 676889 - DNA, 75 bp, synthetic construct
  source 1..75: mol_type = other DNA
atgacacaacacataaaatcccacaattctgaagccgacccggaaattaagcgggggtggcgttttcgtacgcct

SEQ ID NO: 676890 - DNA, 75 bp, synthetic construct
  source 1..75: mol_type = other DNA
tatggccagtggtcatggtgttgtaaaaattaatcatagtgcagcgcttaaccagaacaatgactatagaggtat

SEQ ID NO: 676891 - DNA, 75 bp, synthetic construct
  source 1..75: mol_type = other DNA
gccttttagcattatttaatctatcattgtatggtgcttttttaagcgcatctcaggctgctcaactaaatattg

SEQ ID NO: 676892 - DNA, 75 bp, synthetic construct
  source 1..75: mol_type = other DNA
catcacgtagattgtatgacagacgtcttggggatgattttgtttattattatgacataaccacattacccgcag

SEQ ID NO: 676893 - DNA, 75 bp, synthetic construct
  source 1..75: mol_type = other DNA
ggaatgtcccagagataaggtttggacttaactcaagggggattgtgtttggtaatgtttgctattcattagacc

SEQ ID NO: 676894 - DNA, 75 bp, synthetic construct
  source 1..75: mol_type = other DNA
gaagctgcaattttgtacgtggccaacttcgattatctgcgctgcaaaacggtggatgacactatcgcggcgggt

SEQ ID NO: 676895 - DNA, 75 bp, synthetic construct
  source 1..75: mol_type = other DNA
agctgcggctggcacctacaaaaaaggtcaaccgttatcgattgccaatggacgtgtcaaagcggctgcggaagg

SEQ ID NO: 676896 - DNA, 75 bp, synthetic construct
  source 1..75: mol_type = other DNA
ggttatagcaatgaaaagctataagcgaacacattaccctttcctgcttcctcctgaactaccagagtttttata

SEQ ID NO: 676897 - DNA, 75 bp, synthetic construct
  source 1..75: mol_type = other DNA
ccgaaagcaagttgagcggtggtatcgcttctgcaatggcgatgaccggtctgccgcaggcttacacgccgggtg

SEQ ID NO: 676898 - DNA, 75 bp, synthetic construct
  source 1..75: mol_type = other DNA
gcgcattgtcgctaaaaatgcgtggcatttttgagtcaggcattaaagattatgacgatgtcgcgatgaagatcc

SEQ ID NO: 676899 - DNA, 75 bp, synthetic construct
  source 1..75: mol_type = other DNA
gtgccataggtctgaagcctcttcatgtcacgcgcttgtttctgacggaaggtatttttattggtgtgattggcg

SEQ ID NO: 676900 - DNA, 75 bp, synthetic construct
  source 1..75: mol_type = other DNA
ggaattgctgatcgggtcgcgtaaaacctacggtctgaatctgattggtggtgttcgccgcgatattctcaaaga

SEQ ID NO: 676901 - DNA, 75 bp, synthetic construct
  source 1..75: mol_type = other DNA
aggcatcgaacgttgacaacatggaatcactggatgcgctggaagccatgatgttaattgctgagcagcaggaca

SEQ ID NO: 676902 - DNA, 75 bp, synthetic construct
  source 1..75: mol_type = other DNA
gtaaagaaaagcgcttcagaggtgacgcaaagggcgctttccgcatcatcaaccggcagacgcagccgacgcgga

SEQ ID NO: 676903 - DNA, 75 bp, synthetic construct
  source 1..75: mol_type = other DNA
gggctgattccggttggcctgccggatcagcgtcggctggtgttgcccgatgactggccggaagatatgcatccg

SEQ ID NO: 676904 - DNA, 75 bp, synthetic construct
  source 1..75: mol_type = other DNA
actgctgaccgaaggctttagctataaacctcacgcattcgcgctgggctttgttgaagcgccacgcggtgaaga

SEQ ID NO: 676905 - DNA, 75 bp, synthetic construct
  source 1..75: mol_type = other DNA
gggtgatccctgtcggcccgctgcatatcacctccgatgaaccgggtcacttccgcttgtttgtggatggcgagc

SEQ ID NO: 676906 - DNA, 75 bp, synthetic construct
  source 1..75: mol_type = other DNA
gtgggtcagttgaaagtaacggatgcgcaggtttcccagaatacccagagcattactaacctggataatcgggta

SEQ ID NO: 676907 - DNA, 75 bp, synthetic construct
  source 1..75: mol_type = other DNA
gcattatcagtactgcgaagggggctgcaagtgggcagttccacggcggtgtagatgaattgcccgctggtatgg

SEQ ID NO: 676908 - DNA, 75 bp, synthetic construct
  source 1..75: mol_type = other DNA
ttgcgggtgatgataagaaattcaatgagatgttgaagaaacacgctaatagcgttactcaggccgtgagaagca

SEQ ID NO: 676909 - DNA, 75 bp, synthetic construct
  source 1..75: mol_type = other DNA
tattgctacagtgacagcccctaaaggtggttgggtagatcagggcaaacagcgtgaagatgcacagaagaaagc

SEQ ID NO: 676910 - DNA, 75 bp, synthetic construct
  source 1..75: mol_type = other DNA
caggtttctttgacttctttcagtcaacaaaaagtggtgatttacaccacaatataaagaagaatattgagtccg

SEQ ID NO: 676911 - DNA, 75 bp, synthetic construct
  source 1..75: mol_type = other DNA
aagtaagagcataagcattgcacagacagtactttcaattcagtcagcattggcccaagcactcgctaccccttg

SEQ ID NO: 676912 - DNA, 75 bp, synthetic construct
  source 1..75: mol_type = other DNA
attcatgtttaggtgtgatctaccgttagacttcgatgcatttaccgaaattatgcgtttgatctcattgcatgg

SEQ ID NO: 676913 - DNA, 75 bp, synthetic construct
  source 1..75: mol_type = other DNA
gtaaagttgtcgagcaattgatgaaacagcttgaagagccaatgcgtagcgcggtaagcggcgctcttaatcgtg

SEQ ID NO: 676914 - DNA, 75 bp, synthetic construct
  source 1..75: mol_type = other DNA
ttacgcggcggcacgggtggatcgtcacccaaagtcgctcgctggctgggtgatattcgccagtatttcccctct

SEQ ID NO: 676915 - DNA, 75 bp, synthetic construct
  source 1..75: mol_type = other DNA
cgtatgctgaccttgcttaatcgcaccgatattccggtagcaagcggtgcggtaaaaccgttaatgcgtaatttg

SEQ ID NO: 676916 - DNA, 75 bp, synthetic construct
  source 1..75: mol_type = other DNA
caaaaatgtcgagccatattcaatcgtaggtggcgtttctgcaaaacacctagggtacagatttgaggaatcaat

SEQ ID NO: 676917 - DNA, 75 bp, synthetic construct
  source 1..75: mol_type = other DNA
aacgggcgtgatgagcgcggtcagtttgcctcgtatgatgtggtggacgatgtccggcagatgctctttaaggcc

SEQ ID NO: 676918 - DNA, 75 bp, synthetic construct
  source 1..75: mol_type = other DNA
tcgaagaaatgacagcatttatgctgcttttaacggtgggatgaatttaggtgcatggcgactgcgtgcctcagg

SEQ ID NO: 676919 - DNA, 75 bp, synthetic construct
  source 1..75: mol_type = other DNA
ggcaataataaattaacaaaattgctatctttaataaaattattaccaaaaatattaaaatataagaatatattg

SEQ ID NO: 676920 - DNA, 75 bp, synthetic construct
  source 1..75: mol_type = other DNA
aggttgtcgcagtaaaaacatttgctgatgttgatgaagcgcaggcattgcgtctggcggcggcgctggagcaag

SEQ ID NO: 676921 - DNA, 75 bp, synthetic construct
  source 1..75: mol_type = other DNA
attttacgccgttcatatgaacggcaggggatcccctgcccatggcgttacaccaatgatcgcgatgtaagaacg

SEQ ID NO: 676922 - DNA, 75 bp, synthetic construct
  source 1..75: mol_type = other DNA
gcagcgtgtaacagaagaaggaaaacaggatgatgaagaaaaaccgcaaccatctggaacaacggcagatgaaca

SEQ ID NO: 676923 - DNA, 75 bp, synthetic construct
  source 1..75: mol_type = other DNA
caggacacaccgtcgatagatgctcagccacaggtaaattctgttgatgcgaaataccaggaactgcgggcagaa

SEQ ID NO: 676924 - DNA, 75 bp, synthetic construct
  source 1..75: mol_type = other DNA
gttcttctaaggcgctggagaaattactcgatttaaccccaccgacggcgcgcctggtcaccgacgaaggtgaaa

SEQ ID NO: 676925 - DNA, 75 bp, synthetic construct
  source 1..75: mol_type = other DNA
gcctgctcgacccgctggaaattcgcgacctccacaaactggtgcgtgatactgacaaagttttccctaatccga

SEQ ID NO: 676926 - DNA, 75 bp, synthetic construct
  source 1..75: mol_type = other DNA
taagcaggcttcagatgcacgagctcaggaagtcgccggtagcgaagtgctttactccggtgatgccaacctgac

SEQ ID NO: 676927 - DNA, 75 bp, synthetic construct
  source 1..75: mol_type = other DNA
aatgaatacatgtataaaacaaatcgacaggttcttgttctgtcttctttcccttttccagaacaaagtgagtca

SEQ ID NO: 676928 - DNA, 75 bp, synthetic construct
  source 1..75: mol_type = other DNA
ggggtgcgtagtgttatcagctatcttcttagtccattaaaggaaactattaatgaaagtttacgtgaacgttag

SEQ ID NO: 676929 - DNA, 63 bp, synthetic construct
  source 1..63: mol_type = other DNA
atgatcccgttaccttccgggaccaaaatttggctggttgccggtatcaccgatatgagaaat

SEQ ID NO: 676930 - DNA, 75 bp, synthetic construct
  source 1..75: mol_type = other DNA
taaccggtaatcctcgtattcgcacacgctctaccctggtgggtaaaattcaggttggcgagtattcctctatta

SEQ ID NO: 676931 - DNA, 75 bp, synthetic construct
  source 1..75: mol_type = other DNA
gacctatcttataaatcaccatttgtatcagaaattgaatctccatttatttcaccaacacaaataaaaacgcct

SEQ ID NO: 676932 - DNA, 75 bp, synthetic construct
  source 1..75: mol_type = other DNA
agacagaagaaaaactgcatcagaacagcgaaccggaagaaggaaaagtttgtaccgcctgcggtcaggctggcg

SEQ ID NO: 676933 - DNA, 75 bp, synthetic construct
  source 1..75: mol_type = other DNA
atcgaaacccaagccaccgacgctttcctggctgaaattgaacgcaaagcaatccgcaagttcattaacagcatt

SEQ ID NO: 676934 - DNA, 75 bp, synthetic construct
  source 1..75: mol_type = other DNA
tacggtccggattcttccactaataaagaacagtcagatgctcaggccgagatccgccgtctccgaaagagctga

SEQ ID NO: 676935 - DNA, 75 bp, synthetic construct
  source 1..75: mol_type = other DNA
atgagcggtaagcgttatcccgaagagtttaaaactgaagcagtcaaacaggttgttgatcgcgtttattctgtt

SEQ ID NO: 676936 - DNA, 75 bp, synthetic construct
  source 1..75: mol_type = other DNA
ttttctgattacattgaaagaagatcgagaactcttaagttggatgataatttttctaactgcgtagggaatatc

SEQ ID NO: 676937 - DNA, 75 bp, synthetic construct
  source 1..75: mol_type = other DNA
aaaacaaattaaagcactatcaaaccaactggaacatataaaatcttttaagacagattacgattcaaggctcaa

SEQ ID NO: 676938 - DNA, 75 bp, synthetic construct
  source 1..75: mol_type = other DNA
aaaacaaattgaagcgctatcaaaccaactggaacatataaaatcttttaagacagattacgattcaaggctcaa

SEQ ID NO: 676939 - DNA, 75 bp, synthetic construct
  source 1..75: mol_type = other DNA
aaacgtattgatgaaatcatcgcagagaataagccgcccttttctgttttccgtgacatattcactgctatgtct

SEQ ID NO: 676940 - DNA, 75 bp, synthetic construct
  source 1..75: mol_type = other DNA
tactgacagcaatcagcataacaatagcggtgataaaactgacaggacgacaaattccttaattaatatgtacgg

SEQ ID NO: 676941 - DNA, 75 bp, synthetic construct
  source 1..75: mol_type = other DNA
acgcaacttaccatgagacattctgcgaggaagattcagatgaatctcaggaaaaagctccggaggagatggaaa

SEQ ID NO: 676942 - DNA, 75 bp, synthetic construct
  source 1..75: mol_type = other DNA
gctaaacgcattgaggaaattatcgctgaaaataaaccgcccttttctgttttccgcgacaaattcatcaccatg

SEQ ID NO: 676943 - DNA, 75 bp, synthetic construct
  source 1..75: mol_type = other DNA
gaatctcaggaaaaagattcggagaaaatggaagacgataaacatccgcacaaggaaaacactggcaaccatccg

SEQ ID NO: 676944 - DNA, 75 bp, synthetic construct
  source 1..75: mol_type = other DNA
catgaagcccggaaaaacattccgccccaaaatcctgtcgatgcagacaaattactggctgcctatcgcggagaa

SEQ ID NO: 676945 - DNA, 75 bp, synthetic construct
  source 1..75: mol_type = other DNA
agctttgagcgtgtactgatgcccggtctcgaaaaaatcagtacagcatcctgtgggtggagcaccaggacaagg

SEQ ID NO: 676946 - DNA, 75 bp, synthetic construct
  source 1..75: mol_type = other DNA
ggcagcccgtgccataccggctttcacacacttcatgggagcaaccgttaccattgaagggaaaacggccacttt

SEQ ID NO: 676947 - DNA, 75 bp, synthetic construct
  source 1..75: mol_type = other DNA
ggttgcgactattttaccgacaactgggaaatcagaaacggcgcatgccaggccattagtagtgaaggaaatgaa

SEQ ID NO: 676948 - DNA, 75 bp, synthetic construct
  source 1..75: mol_type = other DNA
gcttggtttttcgtcgatgaacttcccgtttgccgctgcgctgagtattgccggtttgatcctgaccattctgtt

SEQ ID NO: 676949 - DNA, 75 bp, synthetic construct
  source 1..75: mol_type = other DNA
aaactcagtgaaataatcttgaatattattacatggttcgataaatatcccgatattgtgaaaaatataacccag

SEQ ID NO: 676950 - DNA, 75 bp, synthetic construct
  source 1..75: mol_type = other DNA
tatcattattccttcctcttatagttaattggtgttacaacaaaattgtcagtaacaaatataaaaaacttgagg

SEQ ID NO: 676951 - DNA, 75 bp, synthetic construct
  source 1..75: mol_type = other DNA
accgggtacacatattcagacgccggcttacgatgccaccgtcacttctcccgggaaaaccgataccgggtccgg

SEQ ID NO: 676952 - DNA, 75 bp, synthetic construct
  source 1..75: mol_type = other DNA
gaccatttacttctggcagaccgaagtcacgatgctcttgcgtggcttgctaataatataaaaatagaaccagaa

SEQ ID NO: 676953 - DNA, 75 bp, synthetic construct
  source 1..75: mol_type = other DNA
tattaccacctgtaatgtcgctttggctgaaaatagaatcgagaccagttaatattagtacaatatattggcaga

SEQ ID NO: 676954 - DNA, 75 bp, synthetic construct
  source 1..75: mol_type = other DNA
tgggggaattttgattcaaactggaaattttcagcagctaagcaattagctgattactccctgaacctcacatct

SEQ ID NO: 676955 - DNA, 75 bp, synthetic construct
  source 1..75: mol_type = other DNA
agctggggggccgggtgacgcggatatttatatttatgacgagattggtttctggggagttaccgcgaagcagtt

SEQ ID NO: 676956 - DNA, 75 bp, synthetic construct
  source 1..75: mol_type = other DNA
atgcccttaagcacagatgttgatcgtgtgttaacgttcactgaaagacttgaacaaattttaatggaaatggtc

SEQ ID NO: 676957 - DNA, 75 bp, synthetic construct
  source 1..75: mol_type = other DNA
cacagacataatcatggagaggtttctgatatgaaaaacccggagctatacaaaatcacacctaatactttctat

SEQ ID NO: 676958 - DNA, 75 bp, synthetic construct
  source 1..75: mol_type = other DNA
ttgagaacgcccgcgctttgtctgccttttttgccagtcagcaacagacactgaacgtgatgattgagctgggtg

SEQ ID NO: 676959 - DNA, 75 bp, synthetic construct
  source 1..75: mol_type = other DNA
cacgatgcgcagcctgacggaaggcaacgcattgttgagcaaagcagtggttgattcactggataatcagagtaa

SEQ ID NO: 676960 - DNA, 75 bp, synthetic construct
  source 1..75: mol_type = other DNA
gtgcgtatgcagcaagaagcagaacgcagtcgcttacgcggaagcgtagtcgaaattctcagctggcatcaaagg

SEQ ID NO: 676961 - DNA, 75 bp, synthetic construct
  source 1..75: mol_type = other DNA
aaagaagctgctggccgttgtgacctcgttgaaaccgataatagttgtgtggagaactgtttaaaagggaagttt

SEQ ID NO: 676962 - DNA, 75 bp, synthetic construct
  source 1..75: mol_type = other DNA
ggcgaatgaaatgggcgacttacatcccggggcatcctgacgctaatgataggtgggtagtacctggtgcgtcgt

SEQ ID NO: 676963 - DNA, 75 bp, synthetic construct
  source 1..75: mol_type = other DNA
gccccgctagaacaacggctggttttcgctgcaataggcgaagatactcaagaggatgtgatttatcgcgatgag

SEQ ID NO: 676964 - DNA, 75 bp, synthetic construct
  source 1..75: mol_type = other DNA
agaaaggggctactactgttgaaattcctgtaggtaaaagcattcctattttggctatccgaaatagtgaggtat

SEQ ID NO: 676965 - DNA, 75 bp, synthetic construct
  source 1..75: mol_type = other DNA
tattattatatacaactaaaaggcgctttttttatcggctattcatcatcagatcattcaaaatcaactggatac

SEQ ID NO: 676966 - DNA, 75 bp, synthetic construct
  source 1..75: mol_type = other DNA
caatagatttggtagatgggaaaagtattattatacacaactaagaggcgcttttttatcggctattcatcatca

SEQ ID NO: 676967 - DNA, 75 bp, synthetic construct
  source 1..75: mol_type = other DNA
ttcccggcggacgctgtggttgccgctcaacggatgccgcactggcactggctaaacaggcggcccaattaccag

SEQ ID NO: 676968 - DNA, 75 bp, synthetic construct
  source 1..75: mol_type = other DNA
tgcggtaataatacggggattttcccaggagcaatctatattaaaaatggcatgaaatgtaataatgaatatatt

SEQ ID NO: 676969 - DNA, 75 bp, synthetic construct
  source 1..75: mol_type = other DNA
aacaatgcaattaactcttatttttttattaatagctatcgcaatagcacctttaatggccccctttgtcacagg

SEQ ID NO: 676970 - DNA, 75 bp, synthetic construct
  source 1..75: mol_type = other DNA
taaaccgtccggaagtgcatcgtcggtatggtaatgactcgaacttattgatagtgttttatgttcagataatgc

SEQ ID NO: 676971 - DNA, 75 bp, synthetic construct
  source 1..75: mol_type = other DNA
tcactatactataaagccaaatatatatggctcgattgctgctggcttgtctcgaacaaaatcaatagctattac

SEQ ID NO: 676972 - DNA, 75 bp, synthetic construct
  source 1..75: mol_type = other DNA
gagggattaggctgtgatgttgttgatattcctatttcatcgcaaggtaaaaatccttttattgacatgctactt

SEQ ID NO: 676973 - DNA, 75 bp, synthetic construct
  source 1..75: mol_type = other DNA
ttgtccttgtaggtaatacattatggtcagtttataatttccgtagaggtctaattcaaagctttatgagcaatg

SEQ ID NO: 676974 - DNA, 75 bp, synthetic construct
  source 1..75: mol_type = other DNA
gcagaaagatccggcagaagaagcgctgaaacggaaacgcgcagaactggaacgacttaaccagggctttgctga

SEQ ID NO: 676975 - DNA, 75 bp, synthetic construct
  source 1..75: mol_type = other DNA
catcagtgcgtggtcaccgtttttaatcttaacggtgctggtcaccatctggaccatgaagccgtttaaagcgtt

SEQ ID NO: 676976 - DNA, 75 bp, synthetic construct
  source 1..75: mol_type = other DNA
atatgctttttcttttcgttttgcaaaagaagtttggtttttgaatgaggatgatagaaatgtatttttgagaaa

SEQ ID NO: 676977 - DNA, 75 bp, synthetic construct
  source 1..75: mol_type = other DNA
tgagaacgcagcctaccaactaatttccagagtggtttctgaacgcactggaagaacagaagtctttactccgca

SEQ ID NO: 676978 - DNA, 75 bp, synthetic construct
  source 1..75: mol_type = other DNA
ttgcattacaaacaaagataaaattattttatcgacctgagtcaattaaaacaatgcccgatgatgtatggcagg

SEQ ID NO: 676979 - DNA, 75 bp, synthetic construct
  source 1..75: mol_type = other DNA
aaaaagcgtagtaagaatacaatctacgccagacgtaaaaaaattaccgcaggacagagaatctctgttctattt

SEQ ID NO: 676980 - DNA, 75 bp, synthetic construct
  source 1..75: mol_type = other DNA
tccggctccggtaagtcagtgactgcgctggcattgatgcgtctgttggaacaggcgggcggtttagtgcagtgc

SEQ ID NO: 676981 - DNA, 75 bp, synthetic construct
  source 1..75: mol_type = other DNA
caaagctcgtatggaatccccaagcaaagatgctaccccgggcaacgtttacgctcaggctgactataagattgc

SEQ ID NO: 676982 - DNA, 75 bp, synthetic construct
  source 1..75: mol_type = other DNA
tccagagtggtttctgaacgcactggaagaacagaagtctttactccgcaaacggaagaagattttgattcaata

SEQ ID NO: 676983 - DNA, 75 bp, synthetic construct
  source 1..75: mol_type = other DNA
accgacacagcaggccaccactgatattaagctgaaagacaatggcggtggaggtggcaataaaccgaaacgcgc

SEQ ID NO: 676984 - DNA, 75 bp, synthetic construct
  source 1..75: mol_type = other DNA
tttgagaaacaatttagtatcagagcagatttaatgcagaaatatgatattatcatagatgctacgggtcgccct

SEQ ID NO: 676985 - DNA, 75 bp, synthetic construct
  source 1..75: mol_type = other DNA
tcgagcggttgggcgagggtaataaaaaatccacgaaaacggcgttcctgttcgctccagccatgtgggatggcg

SEQ ID NO: 676986 - DNA, 75 bp, synthetic construct
  source 1..75: mol_type = other DNA
gccagagcgacgaagtttcgtttacatgcagtatatcagccagtgagttaagagaatctgcggggcattatgtgg

SEQ ID NO: 676987 - DNA, 75 bp, synthetic construct
  source 1..75: mol_type = other DNA
aaagtatgcaaattcgttaaatatagtattgttccgcaaacgaatgcttttacaacctaaattagctataaaatt

SEQ ID NO: 676988 - DNA, 75 bp, synthetic construct
  source 1..75: mol_type = other DNA
tggttggcgcgcagccatcaggtacgctggcagtgataagcggaacgtcgaattgccatatgttgtgcagtgaaa

SEQ ID NO: 676989 - DNA, 75 bp, synthetic construct
  source 1..75: mol_type = other DNA
gtgggaacgttaactgccactgctgctgaagaattgggattaacgaccaatgttatagtggccagtggcttgatt

SEQ ID NO: 676990 - DNA, 75 bp, synthetic construct
  source 1..75: mol_type = other DNA
gtgcaatcccagacattacatatcataaattaaaagagtgtaaaacagcggatttctatacattattagctgaaa

SEQ ID NO: 676991 - DNA, 75 bp, synthetic construct
  source 1..75: mol_type = other DNA
tgaagcgaaagccaattttagcggcattcttgagatcagcaagcgaactggcatgaagattgaggatacgacgaa

SEQ ID NO: 676992 - DNA, 75 bp, synthetic construct
  source 1..75: mol_type = other DNA
aaagcattgcaaaagaccatagaaaacacagcaatgcgcctgatgcagcgtgaatcacaaagaccaggcggaatg

SEQ ID NO: 676993 - DNA, 75 bp, synthetic construct
  source 1..75: mol_type = other DNA
ggctgaatcatggctaccacagagtgaaccaatagtaataaataatgatgatgacgcattgaatgctgctgctta

SEQ ID NO: 676994 - DNA, 75 bp, synthetic construct
  source 1..75: mol_type = other DNA
ggtttttgtgatagcaatgatgttctatctattatgggacaacaaataccaagagtatttaagaacaagatgtta

SEQ ID NO: 676995 - DNA, 75 bp, synthetic construct
  source 1..75: mol_type = other DNA
cacttttgtgtaaaaacgctaaaaatatagactggtgcataaatagagcaatgttttgtgaagcttttcttagcc

SEQ ID NO: 676996 - DNA, 75 bp, synthetic construct
  source 1..75: mol_type = other DNA
gtctggaaagcggtcacggattcaggtatgaattcagcacgattatgaacgagcacgaatggcctgctgatgcta

SEQ ID NO: 676997 - DNA, 75 bp, synthetic construct
  source 1..75: mol_type = other DNA
cttggttaattaaaaaaaatcatagtttttcaaaactcgtcccccactatgatgatatggatgtttattgctccc

SEQ ID NO: 676998 - DNA, 75 bp, synthetic construct
  source 1..75: mol_type = other DNA
ccgtcaataaaaatactggcgttaacctttttattgtttgtcggtgtattgctggttgccgatagtctcaacatt

SEQ ID NO: 676999 - DNA, 75 bp, synthetic construct
  source 1..75: mol_type = other DNA
attacaagtgcacaaggctacctgtatcagaagccattaccctttagtgattggattttgaatggagatgtttgt

SEQ ID NO: 677000 - DNA, 75 bp, synthetic construct
  source 1..75: mol_type = other DNA
gatgatgctgtccaggccgtttaccggaaagcacatttcagcggtggtgggtcgcccggcgattctgtcgtagtg

SEQ ID NO: 677001 - DNA, 75 bp, synthetic construct
  source 1..75: mol_type = other DNA
atctacaacggttattgacacgtttcaacgatcctgaggggtggagtaatctggcgaaaaatcagtatctgagca

SEQ ID NO: 677002 - DNA, 75 bp, synthetic construct
  source 1..75: mol_type = other DNA
ttgcaaaagtgatccaacgccgtagtaatgaagtagcatcaaaaaaggttcattccgttggatttgatggtttat

SEQ ID NO: 677003 - DNA, 75 bp, synthetic construct
  source 1..75: mol_type = other DNA
ggcaggatttattaaaaaactatcaggaaataaacgcttccattaaagattacgatgacttattgcgaaaaatta

SEQ ID NO: 677004 - DNA, 75 bp, synthetic construct
  source 1..75: mol_type = other DNA
aatttcttaaaaaaggtaagtgctatcaatagcgatgtaaaaaatttttataatactgagacaaatattaaggaa

SEQ ID NO: 677005 - DNA, 75 bp, synthetic construct
  source 1..75: mol_type = other DNA
gtaacatttgattataaggaacttgcacccatttttgaaggtgttgaagaaaaacaaattgaagcgctatcaaac

SEQ ID NO: 677006 - DNA, 75 bp, synthetic construct
  source 1..75: mol_type = other DNA
agctgtctccgtatgacaccgaagagatgcttgaggctatgcgtatttttctggaagaacatggaggtgagcaaa

SEQ ID NO: 677007 - DNA, 75 bp, synthetic construct
  source 1..75: mol_type = other DNA
actttatttgataacaaaagggacaattggaatagtatagaagtgcaggatgaagtaaatgcattgaatgcgaaa

SEQ ID NO: 677008 - DNA, 75 bp, synthetic construct
  source 1..75: mol_type = other DNA
tatctcctttaattattgtgatttgcggagggccaatttagacaattattacagagaagattggtgcaaagactg

SEQ ID NO: 677009 - DNA, 75 bp, synthetic construct
  source 1..75: mol_type = other DNA
cgctgccattatccgcattcgtcggagagttcgctccgtacattcggttagctcctgctgatggtgtatggcaat

SEQ ID NO: 677010 - DNA, 75 bp, synthetic construct
  source 1..75: mol_type = other DNA
tcgaggcgctgggtaaccagctggctgtgctggacgaagcgcaggagaatggcgcgcgtagtgccgcggttctgg

SEQ ID NO: 677011 - DNA, 75 bp, synthetic construct
  source 1..75: mol_type = other DNA
tgaagatatatatgaaggacagatgaataggatttataattctattcggtatagagtctaccatctttgtaaaaa

SEQ ID NO: 677012 - DNA, 75 bp, synthetic construct
  source 1..75: mol_type = other DNA
aggacgctggcagaagaagacaatacggcgggtgtcgtcaaagataatttttatcaatggaacgcatccaatgac

SEQ ID NO: 677013 - DNA, 75 bp, synthetic construct
  source 1..75: mol_type = other DNA
ggaaatcaccacggataactattccgaggcgatgaagcaggcatacggtgccgggcaggcattccaggcgactgc

SEQ ID NO: 677014 - DNA, 75 bp, synthetic construct
  source 1..75: mol_type = other DNA
attttccgtaaccagagcgcaggcaatgaagcgctggcggcgtcctttgatgcactggccggtaatgcgtccaat

SEQ ID NO: 677015 - DNA, 75 bp, synthetic construct
  source 1..75: mol_type = other DNA
aagagagttatcagacctgagcaacaacccgtcgcctgaagcacttcaggaactggcgaaaaagctccaggaaat

SEQ ID NO: 677016 - DNA, 75 bp, synthetic construct
  source 1..75: mol_type = other DNA
atggctggaaatgacaatcgcagaccataccctcccgtcaacttcactggcgaaaactggctgccttatacccgg

SEQ ID NO: 677017 - DNA, 75 bp, synthetic construct
  source 1..75: mol_type = other DNA
tacggtgccagcaaagaagtacaggagctcgttgatgcggccaatgcgccagcagaagtggctcacatcgatata

SEQ ID NO: 677018 - DNA, 75 bp, synthetic construct
  source 1..75: mol_type = other DNA
ttactgctcacaatgcagtgacctcgagttctgcgcgctggtagagcatgagctttaccacatagcccaggccac

SEQ ID NO: 677019 - DNA, 75 bp, synthetic construct
  source 1..75: mol_type = other DNA
agcatacataatcctgaccacgcccatttaattgaagctgatttgtgttttatgtgggcttcagaatcgttcgcg

SEQ ID NO: 677020 - DNA, 75 bp, synthetic construct
  source 1..75: mol_type = other DNA
gaaggccagaatggaacagcagatgtatgaatggttcggacgcatcccgaagttcatcatcacgctggcagccga

SEQ ID NO: 677021 - DNA, 75 bp, synthetic construct
  source 1..75: mol_type = other DNA
tggtggatgctgcgaacaggccggcggaggttgctcatatcgatgttgccagagcgtgcgggacgtgcatgctta

SEQ ID NO: 677022 - DNA, 75 bp, synthetic construct
  source 1..75: mol_type = other DNA
tgaacttaagaaagggctggatgcactccgggattatcctgtacacaaattgcgctttcaacgatttgttaaacc

SEQ ID NO: 677023 - DNA, 75 bp, synthetic construct
  source 1..75: mol_type = other DNA
aatcgtgcaaataatcacggatgttattcataattctgacattttcagcttggataatgaaaacgcccgtataac

SEQ ID NO: 677024 - DNA, 75 bp, synthetic construct
  source 1..75: mol_type = other DNA
tttatcagccggggagcttcacaccactcatcagagttgaaactgccaccggtgaactggccagaacgcagcgcc

SEQ ID NO: 677025 - DNA, 75 bp, synthetic construct
  source 1..75: mol_type = other DNA
attgatatacctgcattcgagctcgttgactacctcgttaatgttgaacaagttcagaatggctatggtggatat

SEQ ID NO: 677026 - DNA, 75 bp, synthetic construct
  source 1..75: mol_type = other DNA
aaaaggtaataagataaatgataccatccttatagagaaggatggggaagttaaattaaaattaattcgagggat

SEQ ID NO: 677027 - DNA, 75 bp, synthetic construct
  source 1..75: mol_type = other DNA
gttattgaaatactctatttatttgatgcagttgtgtttgataactgataatcagctttctgaatactttaatac

SEQ ID NO: 677028 - DNA, 75 bp, synthetic construct
  source 1..75: mol_type = other DNA
ctcaaaaagcgactgagccgttttgcaattcctccgcggaactatgttgtgacaacaatcgatggatgggctctg

SEQ ID NO: 677029 - DNA, 75 bp, synthetic construct
  source 1..75: mol_type = other DNA
agaaccaatatacggcgttgcgctccgttttcccgccaaagaagtctttgagctttatcgacaaattttaagcag

SEQ ID NO: 677030 - DNA, 75 bp, synthetic construct
  source 1..75: mol_type = other DNA
tgggtgattcccgcagagtcacgtccagacaccagtttgcgcagcgcataaatggaattgatgtggttgaacccg

SEQ ID NO: 677031 - DNA, 75 bp, synthetic construct
  source 1..75: mol_type = other DNA
ggcaggtaaccgcctgcccgacccggagctgcacccggacagcaccctcagcatgtggccggataaccgtatcgc

SEQ ID NO: 677032 - DNA, 75 bp, synthetic construct
  source 1..75: mol_type = other DNA
gaactcatccgcatcagcagcccgcgccagacccggagttacagctacagcaccaccggcaggctgaccggcgtt

SEQ ID NO: 677033 - DNA, 75 bp, synthetic construct
  source 1..75: mol_type = other DNA
acggtgcattacgggtatgatgagaaaggccggctgaccggtgagcgtcagacggtgcatcacccgcagacggaa

SEQ ID NO: 677034 - DNA, 75 bp, synthetic construct
  source 1..75: mol_type = other DNA
gttacgctgaaagccggtaaaaatctcagcgtgaaacaaagtaacggtgattttacattctctgttattgatact

SEQ ID NO: 677035 - DNA, 75 bp, synthetic construct
  source 1..75: mol_type = other DNA
cgtaatgttgcacaccgtaccgggcaaatcgctatggacggttcgcaaaagcttccccagcgagcgctgacgccc

SEQ ID NO: 677036 - DNA, 75 bp, synthetic construct
  source 1..75: mol_type = other DNA
ggaaaattccgcccgtttttactcttcggtactgcgccgttaatgatcttcagggtgctggtattctgggtgcca

SEQ ID NO: 677037 - DNA, 75 bp, synthetic construct
  source 1..75: mol_type = other DNA
gcagaatacgatgaatggggcaacctgctgaatgaagagaacccgcatcagctgcagcagctcatccgcctgccg

SEQ ID NO: 677038 - DNA, 75 bp, synthetic construct
  source 1..75: mol_type = other DNA
aacattaatttatggctttaatgatactcttactggttataccggattacaggtcagtgagaaatatcaatcagg

SEQ ID NO: 677039 - DNA, 75 bp, synthetic construct
  source 1..75: mol_type = other DNA
ttgtgtctgttcaggataagagtagcacaggcattgttggcgatgatggacgggtttatatgagtggtttagatg

SEQ ID NO: 677040 - DNA, 75 bp, synthetic construct
  source 1..75: mol_type = other DNA
ggtacgtcgatgattgccggcacaccgctggcttttgctaacgtgatgccagaaggcaatattggcgtcattggc

SEQ ID NO: 677041 - DNA, 75 bp, synthetic construct
  source 1..75: mol_type = other DNA
ataagttcaaatgataatgatagtgtagacttgcgaaatataaaatgccctgaaggttcagagagagtaggcgat

SEQ ID NO: 677042 - DNA, 75 bp, synthetic construct
  source 1..75: mol_type = other DNA
tattgaagtttgtaagttacttagcattcgaatccataatgaactttaacaaattctggtatactctgttatttg

SEQ ID NO: 677043 - DNA, 75 bp, synthetic construct
  source 1..75: mol_type = other DNA
aggactgtcataaatatctgacaacagctctccggcagggacacaaggtgaggcatctgtcctgtcagctttttg

SEQ ID NO: 677044 - DNA, 75 bp, synthetic construct
  source 1..75: mol_type = other DNA
ttaattaatcacacacgagatgttgatatcaatgagccagacggaccaacgaaccttctggcatgggaaaggctt

SEQ ID NO: 677045 - DNA, 75 bp, synthetic construct
  source 1..75: mol_type = other DNA
atcagggttgaaaccgccaccggtgagcaggcgaaaacgcagcgccgcagcctggcggatacccttcagcagtcc

SEQ ID NO: 677046 - DNA, 75 bp, synthetic construct
  source 1..75: mol_type = other DNA
gacgcgcactatctttaccggtatgaccgtcacggcaggctgacagagaaaaccgacctcatcccggaaggggtt

SEQ ID NO: 677047 - DNA, 75 bp, synthetic construct
  source 1..75: mol_type = other DNA
tacgcgttataaaatgatgatgcaagagaaaataaaaatcttaaatgattataaaaatgaagccttttataaaaa

SEQ ID NO: 677048 - DNA, 75 bp, synthetic construct
  source 1..75: mol_type = other DNA
agtaaacagcaacatcagcagacttcttctgaacgtgagctggagatgtccaccgagattgcacgtatcaaacgc

SEQ ID NO: 677049 - DNA, 75 bp, synthetic construct
  source 1..75: mol_type = other DNA
gggaaaaagagcgctggcgttttatatgggctctgccctctgacgagtatcacaaaaaagaacgcatcggtgtta

SEQ ID NO: 677050 - DNA, 75 bp, synthetic construct
  source 1..75: mol_type = other DNA
ctatgccgggcagattaaatctgctatcgaaagtaagttctatgacgcatcgtcctatgcaggcaaaacctgtac

SEQ ID NO: 677051 - DNA, 75 bp, synthetic construct
  source 1..75: mol_type = other DNA
atgagcagatacactgaccgcataacaaactaccacgccggtaaaccaaagttctttgcacacgttgacctgtcc

SEQ ID NO: 677052 - DNA, 75 bp, synthetic construct
  source 1..75: mol_type = other DNA
agaactaacggtattcctagcgattatgcaggagttatgggcgtgccaattagctttttggataaatattgtcct

SEQ ID NO: 677053 - DNA, 75 bp, synthetic construct
  source 1..75: mol_type = other DNA
acttcgcgaagcgtctgaaatgaagtatgtctttattgaaaaacatcaggcggagttcagcatcaaagcaatgtg

SEQ ID NO: 677054 - DNA, 75 bp, synthetic construct
  source 1..75: mol_type = other DNA
ggagatagagttacaataaagtctggtgtatatatatgggatgggattaccttagaggatgacgtttttattgga

SEQ ID NO: 677055 - DNA, 75 bp, synthetic construct
  source 1..75: mol_type = other DNA
atgaaaatccatttattgagtgacgtaaaatcaaaaaaaataggcatgggcactacaatttggcaatttgtggta

SEQ ID NO: 677056 - DNA, 75 bp, synthetic construct
  source 1..75: mol_type = other DNA
attgttatttaaagtaacaaataagaacattatattactttgttgtggcgatgatgtagagtttataaaaagagg

SEQ ID NO: 677057 - DNA, 75 bp, synthetic construct
  source 1..75: mol_type = other DNA
cttcatttgataagtttgtatttaatgcaagttatttgattacttggagttcgtcattttctatttggaaggatg

SEQ ID NO: 677058 - DNA, 75 bp, synthetic construct
  source 1..75: mol_type = other DNA
gtagtgagcgaatgccagaaatgggagagcgacaatgctatgtgttagcagctgactttaaaaacaactacccac

SEQ ID NO: 677059 - DNA, 75 bp, synthetic construct
  source 1..75: mol_type = other DNA
gttaaaagaagaaattgcgaaagatgatggagagaaatatatcggaatatgccctgacgtttctacactcagaac

SEQ ID NO: 677060 - DNA, 75 bp, synthetic construct
  source 1..75: mol_type = other DNA
gtgcagcttgacgttgtgggcgaatgggttggtcgttcccgtcgcgtggctacaccggtaaccgggatttatttt

SEQ ID NO: 677061 - DNA, 75 bp, synthetic construct
  source 1..75: mol_type = other DNA
cagcggaccagcgaccagcgaccagcgaccagcggaccagcgaccagcgaccagcgaccagcgaccactgaatta

SEQ ID NO: 677062 - DNA, 75 bp, synthetic construct
  source 1..75: mol_type = other DNA
ttcgacatggagtcgaagtaatgatcaggctgccgagtggaataacatcagcagttatatgcagcgggcggtgat

SEQ ID NO: 677063 - DNA, 75 bp, synthetic construct
  source 1..75: mol_type = other DNA
gcctgcgtaaccgggtcatccttgaggtgctctggagtaccgggatcaggcggatggagctggcgaacctgatgc

SEQ ID NO: 677064 - DNA, 75 bp, synthetic construct
  source 1..75: mol_type = other DNA
caccgatctgtatccgacctcgggcagcggtgacctggaagtgaccatcaaagaggccgacggcagcgagcgcac

SEQ ID NO: 677065 - DNA, 75 bp, synthetic construct
  source 1..75: mol_type = other DNA
ctgaactacaacctcagcggcagcaacacctggcgcgatggacaaaacggttcggatgataactactacgcgaac

SEQ ID NO: 677066 - DNA, 75 bp, synthetic construct
  source 1..75: mol_type = other DNA
cagacgtcttcccggcgctggcagcactgccgccggatcaaccactggacgacattggccgctatatcccgatgg

SEQ ID NO: 677067 - DNA, 75 bp, synthetic construct
  source 1..75: mol_type = other DNA
tcgttttcctggtgatgggcttcactggcaaaaaagccgccgcattcaaggaagcctacattgctgagttcgacc

SEQ ID NO: 677068 - DNA, 75 bp, synthetic construct
  source 1..75: mol_type = other DNA
tgcaccagaataataccccgtccgctgacaagatgattccgggtaacggtcgcactctggttgtgcacttcgacg

SEQ ID NO: 677069 - DNA, 75 bp, synthetic construct
  source 1..75: mol_type = other DNA
ttaatgcaggcaaaggtggattaacagatgctgccggtaccacgaagacacgtctgacttataccccggatggaa

SEQ ID NO: 677070 - DNA, 75 bp, synthetic construct
  source 1..75: mol_type = other DNA
gagcattcactataacaggtattcttttaattacatggtatattaccggttggtctggtggtcatgtgatggtat

SEQ ID NO: 677071 - DNA, 75 bp, synthetic construct
  source 1..75: mol_type = other DNA
tgagacattggctggcgacccgaatgaaagagcgtggagtcaatctggtggacgctcaaggcatcttaggtcaca

SEQ ID NO: 677072 - DNA, 75 bp, synthetic construct
  source 1..75: mol_type = other DNA
ggtagacatgcagcctgatgagggtcctctcttcgggatgactccgagcgcctactctagctggtttaactcaag

SEQ ID NO: 677073 - DNA, 75 bp, synthetic construct
  source 1..75: mol_type = other DNA
gattgtccataagagggtataaaaaagaattttcttatatagtggccattacgggtgtttcaactattattttat

SEQ ID NO: 677074 - DNA, 75 bp, synthetic construct
  source 1..75: mol_type = other DNA
cagctaccgcaggtcaacggtttccgcacattgcgcgggctgggcgtgagcggtgaagctgaaggtcatgcgtta

SEQ ID NO: 677075 - DNA, 75 bp, synthetic construct
  source 1..75: mol_type = other DNA
ggtaagacgctgacgaagagtcttggtgacaatgtcgaaatcactggcaaaggcccaataaaaacccaggtggct

SEQ ID NO: 677076 - DNA, 75 bp, synthetic construct
  source 1..75: mol_type = other DNA
tggctgacgcagcgtgtgctgcgtgagcaagggctattcagatgccacacgcagcccggcttcttattgaatccg

SEQ ID NO: 677077 - DNA, 75 bp, synthetic construct
  source 1..75: mol_type = other DNA
catacgctgcctccctgcaatcagcttgcctgtcgaggcaagtaggtgctgcacttcttgatgatgaaggaaatc

SEQ ID NO: 677078 - DNA, 75 bp, synthetic construct
  source 1..75: mol_type = other DNA
gacgttcagggatggctcgttccttaaaattggttggccctcggtcaacattatggtaagcgtcaacggagcacc

SEQ ID NO: 677079 - DNA, 75 bp, synthetic construct
  source 1..75: mol_type = other DNA
aaaaatagcctttctgccaatattatgcaacctttatccaccggcataaaaattgctctcaacgatgaacagaac

SEQ ID NO: 677080 - DNA, 75 bp, synthetic construct
  source 1..75: mol_type = other DNA
tagtgttcgttcctttttggtgccctactcttccgtgcccaacatgctgcaaccaggtgtttcaaatttcgattt

SEQ ID NO: 677081 - DNA, 75 bp, synthetic construct
  source 1..75: mol_type = other DNA
tagtaagttatataatgataaaatacacgaaggtacaagctatcaggtcgcctataataaatatttagtgcaaac

SEQ ID NO: 677082 - DNA, 75 bp, synthetic construct
  source 1..75: mol_type = other DNA
tgaaaagccgggaaacgtggactctgccgatgggttttccgtaaccgccacccatgactataccgcagtcatcca

SEQ ID NO: 677083 - DNA, 75 bp, synthetic construct
  source 1..75: mol_type = other DNA
tgcaggcatcacaatcacaacacctgctgcgggcggtggtcaggggaatacggtttcccttaccggctccggcct

SEQ ID NO: 677084 - DNA, 75 bp, synthetic construct
  source 1..75: mol_type = other DNA
ccccgctcaccgagagcctgaaaaaacgcatggccgaactgcagtccggtattcagacatggtgtgaggcacacc

SEQ ID NO: 677085 - DNA, 75 bp, synthetic construct
  source 1..75: mol_type = other DNA
tgcactgttctacacctatatctgcattgataaagatctgctggtcgaaaaccttggcggtgacgaagcgttagc

SEQ ID NO: 677086 - DNA, 75 bp, synthetic construct
  source 1..75: mol_type = other DNA
caataaagacagcgtggccagcgcaattagtcactggcttgttgagctaggcgaattggatgcgacgtttcgcaa

SEQ ID NO: 677087 - DNA, 75 bp, synthetic construct
  source 1..75: mol_type = other DNA
taaatagagacattttattgttttgcctgcctctgtgtttgactatgattattaattgggttaaaggtaatattg

SEQ ID NO: 677088 - DNA, 75 bp, synthetic construct
  source 1..75: mol_type = other DNA
ctcttgcggctgcgttttccacgaatgcttttgcagtaacttatgatacctctaacagtcagcaggttgatgcat

SEQ ID NO: 677089 - DNA, 75 bp, synthetic construct
  source 1..75: mol_type = other DNA
aggttgtcgcagtaaaaacatttgctgatattgatgaagcgcaagcattgcgtctggcggcggcgctggagcaag

SEQ ID NO: 677090 - DNA, 75 bp, synthetic construct
  source 1..75: mol_type = other DNA
ttgctgaatatacgcgagagcgtactgttgcccgggtctatgtctgaaatgcatttttttttactgataggtatt

SEQ ID NO: 677091 - DNA, 75 bp, synthetic construct
  source 1..75: mol_type = other DNA
tttaagcctcgccgcactgaaccggttaccaatgagtaatattgaaggtcatatcaaaactatcgctgtgcgcaa

SEQ ID NO: 677092 - DNA, 75 bp, synthetic construct
  source 1..75: mol_type = other DNA
gatgagttttctttacggaaggggatgcgttcaggcagtggtgcattgaacagcggcaagatccggagatggcaa

SEQ ID NO: 677093 - DNA, 75 bp, synthetic construct
  source 1..75: mol_type = other DNA
atatagcgcggcgatttttttgataccgatttgcatttcatttgatactgctgaaaaacgccgatacgcaactta

SEQ ID NO: 677094 - DNA, 75 bp, synthetic construct
  source 1..75: mol_type = other DNA
acgaaatccgatgtgaactcacaccgggtagcgacgcgcaaagacgttgagcgtagggctttgttgaataaatca

SEQ ID NO: 677095 - DNA, 75 bp, synthetic construct
  source 1..75: mol_type = other DNA
ggggtgatggattctcgtttaatatttcgtttaaaggttattcgtccctttattaacatggtggagatcccctga

SEQ ID NO: 677096 - DNA, 75 bp, synthetic construct
  source 1..75: mol_type = other DNA
tcaggcccggctatgccgccaatatcaacgattacctcccggaaaaactgtcgacacgtctggctgaggagtctg

SEQ ID NO: 677097 - DNA, 75 bp, synthetic construct
  source 1..75: mol_type = other DNA
agagcgtcgcaagtcattgtttgtacacaagtaattgagcaaagcgtggatattgacctggacgaaatgatctcc

SEQ ID NO: 677098 - DNA, 75 bp, synthetic construct
  source 1..75: mol_type = other DNA
gatatgggcctgtccatcaacgtggagcatggacttgagctgctggacaccgcagacattattatcgtgccttac

SEQ ID NO: 677099 - DNA, 75 bp, synthetic construct
  source 1..75: mol_type = other DNA
aaagcgtttaatcgtgaactgaagcagggaaaactgaagcatctggaatacgacacagaaacgcggaagctgaac

SEQ ID NO: 677100 - DNA, 75 bp, synthetic construct
  source 1..75: mol_type = other DNA
tttctgatgaactggtaccggaaggggaacaggccacagtgctggctgaaatgaacatcccgttcctgcagaagc

SEQ ID NO: 677101 - DNA, 75 bp, synthetic construct
  source 1..75: mol_type = other DNA
tgttctcaggcaggatgcgcgggactttggctggcgtcagatgcgcaatgaacgggaaaaaagggccgttctgga

SEQ ID NO: 677102 - DNA, 75 bp, synthetic construct
  source 1..75: mol_type = other DNA
acgctctgcagccgtacacagtgatgacgaacgaactgccggagtatccgaacatgccgggacgtgtcctgtaca

SEQ ID NO: 677103 - DNA, 75 bp, synthetic construct
  source 1..75: mol_type = other DNA
cacggttactggaacggctggaagccgaaggtaacgaaaggggcatagagactctgacccggatatcgccggtgg

SEQ ID NO: 677104 - DNA, 75 bp, synthetic construct
  source 1..75: mol_type = other DNA
tctcgatcgcatcgtcgccacgctgggtctgaaggaaatgacgcagggaacgctgatccgtaagttatgtacata

SEQ ID NO: 677105 - DNA, 75 bp, synthetic construct
  source 1..75: mol_type = other DNA
ccctctctgtgtttgttgcgggcttgttatgcagtaaagcactatatgctagatcagatgagttttcgtttgact

SEQ ID NO: 677106 - DNA, 75 bp, synthetic construct
  source 1..75: mol_type = other DNA
tttgagatatgatttaactcttggaaaatatcgaccttattataatactagccgggaagataattttggtcattt

SEQ ID NO: 677107 - DNA, 75 bp, synthetic construct
  source 1..75: mol_type = other DNA
agcaataacaggacatcagccaatgcttcgtttaaaaattcgtttggtaccgtaaatggaatgtataactacagt

SEQ ID NO: 677108 - DNA, 75 bp, synthetic construct
  source 1..75: mol_type = other DNA
ccggcagacagaacatggcgaccacagccgttgctgaaaccgctggtcgacggcccgcagagcgctgtcgtgaca

SEQ ID NO: 677109 - DNA, 75 bp, synthetic construct
  source 1..75: mol_type = other DNA
tgattcctttttatgaaaggacctatgttcctttgattagggggattgccaatagcgtagcaaaagtagaagttc

SEQ ID NO: 677110 - DNA, 75 bp, synthetic construct
  source 1..75: mol_type = other DNA
tgtgccaacaagcaatgcgatagttttagctagttataaaaccatcaagggtaagaaagcgctctttagaatcaa

SEQ ID NO: 677111 - DNA, 75 bp, synthetic construct
  source 1..75: mol_type = other DNA
ccctgctgcagtcccagcacagctggggaattctgaataagataataaatttaatcaacgcggatacggacgagg

SEQ ID NO: 677112 - DNA, 75 bp, synthetic construct
  source 1..75: mol_type = other DNA
ggcggggtatggtgtccggtcagcacaatggagctgagccgcgaaatggtggcgatctattcagagcacagggcc

SEQ ID NO: 677113 - DNA, 75 bp, synthetic construct
  source 1..75: mol_type = other DNA
ttattggtggcgatgatttaacccctttgcatggtgacagattcggtgataaagaaattccgaataattactcgt

SEQ ID NO: 677114 - DNA, 75 bp, synthetic construct
  source 1..75: mol_type = other DNA
acctacaccccgccagcgccgggggaaaatattaccaccagcgcccccaattttacccgttggctgaatcatgca

SEQ ID NO: 677115 - DNA, 75 bp, synthetic construct
  source 1..75: mol_type = other DNA
gctgaaggtacggcgatgagggcagaatacgggcttgatgcactggcagaggccgatatcgttattattcctttc

SEQ ID NO: 677116 - DNA, 75 bp, synthetic construct
  source 1..75: mol_type = other DNA
tgccgaccccatgggggagccgtccggtgatttgctaccgttcactaatggtgtgcttaacctgaaaacggggga

SEQ ID NO: 677117 - DNA, 75 bp, synthetic construct
  source 1..75: mol_type = other DNA
tgcaggctttagtacaggagagtccatagcgataggagccaaagcgaaagcaaccaaagagcaggcaattgcgat

SEQ ID NO: 677118 - DNA, 75 bp, synthetic construct
  source 1..75: mol_type = other DNA
tattgattaccgggcagcggaaaccgacccggtggcagcgagccatagaagagagcaactggaagctgaccgcca

SEQ ID NO: 677119 - DNA, 75 bp, synthetic construct
  source 1..75: mol_type = other DNA
cgcgtctatctggcgtttatggcatacgcaggcaggagcaaaccgctaaacgtaaatgactttggaaaggctatg

SEQ ID NO: 677120 - DNA, 75 bp, synthetic construct
  source 1..75: mol_type = other DNA
aagtgaaatcgttcacgtatggcgcggcggggtatggtgtccgatcagcacaatggagctgagccgcgaaatggt

SEQ ID NO: 677121 - DNA, 75 bp, synthetic construct
  source 1..75: mol_type = other DNA
gcagagcgcaaaccaacgtgggctataacgagatggctgaggagtttataccgcgagcatatggcagcagcaccg

SEQ ID NO: 677122 - DNA, 75 bp, synthetic construct
  source 1..75: mol_type = other DNA
ccgactgggacgactaccgccagcaaaacgggctggaagtcgctacggctgcgtttaacgattcgatgtaccaga

SEQ ID NO: 677123 - DNA, 75 bp, synthetic construct
  source 1..75: mol_type = other DNA
acagccgcaggcggtgattattgccgaggggctggcaaccactttatcagtccacctgatgcgccctgacgcgct

SEQ ID NO: 677124 - DNA, 75 bp, synthetic construct
  source 1..75: mol_type = other DNA
caatcgccgtggcactggcattactttcaggttgtaccggcagtgtttataacaaagaaaaaaattgcgattatg

SEQ ID NO: 677125 - DNA, 75 bp, synthetic construct
  source 1..75: mol_type = other DNA
caggaaactacattctcgcttcagaaagcaaactttactcaaaatagcctctccacaaaggcatattcagttcct

SEQ ID NO: 677126 - DNA, 75 bp, synthetic construct
  source 1..75: mol_type = other DNA
accaaaaagatgccgcgactgggattatcaataagttagagacctataacggctgcattctggctgatagtgttg

SEQ ID NO: 677127 - DNA, 75 bp, synthetic construct
  source 1..75: mol_type = other DNA
gctttagtgaatacatttgccgggcttgatgactttgaattgctggcatttattgtgatccagcaaaagcacctg

SEQ ID NO: 677128 - DNA, 75 bp, synthetic construct
  source 1..75: mol_type = other DNA
tggtcaacggatgatgcctttatcaaccagttcgaagcggaaaatcgtaacggacgtatatcaaaaaggaaaacg

SEQ ID NO: 677129 - DNA, 75 bp, synthetic construct
  source 1..75: mol_type = other DNA
tgttattaaggttaattttggattcatcaatggtcagaagtttaccacccgcaatgccatgccagacggttttac

SEQ ID NO: 677130 - DNA, 75 bp, synthetic construct
  source 1..75: mol_type = other DNA
agtgaaaaggcttttcgtgactctatcggaaagattagaaatcagcttgaaagcaagttgagcactgttaaaaaa

SEQ ID NO: 677131 - DNA, 75 bp, synthetic construct
  source 1..75: mol_type = other DNA
tgtatctctgaaggccagaatctgcaggactgcgactatctcatcaactacgacatccactggaatcccgtgcgc

SEQ ID NO: 677132 - DNA, 75 bp, synthetic construct
  source 1..75: mol_type = other DNA
caagacacagctaaacccttatgatgaaaatcgggtagcaatcagcgataactatttctcgaagtcgaatataga

SEQ ID NO: 677133 - DNA, 75 bp, synthetic construct
  source 1..75: mol_type = other DNA
aatagtgcagtaaaagtcaatgcagcctgggatagccaaagtggtgtaggggtatctgcaggaatggcattaggt

SEQ ID NO: 677134 - DNA, 75 bp, synthetic construct
  source 1..75: mol_type = other DNA
acctattaggtgacgagcttcaacagacgctgacaccgaatacaaagttaaagattgctgcgtcttgcttttcta

SEQ ID NO: 677135 - DNA, 75 bp, synthetic construct
  source 1..75: mol_type = other DNA
ttaagatctgagcgacacgctctggtttacaataataaacaaatcgatacccgatttttagtcgaggctatctta

SEQ ID NO: 677136 - DNA, 75 bp, synthetic construct
  source 1..75: mol_type = other DNA
ctcaagccaacgacgtgtcttatcgcaaagagcaattgcgacgtctgcaggaggaggttattgagctggaagacc

SEQ ID NO: 677137 - DNA, 75 bp, synthetic construct
  source 1..75: mol_type = other DNA
ctacagcaatggctgggccggaatgctttatggcgtcggtggagccgtaggtatattgctggtggcgtggctgtt

SEQ ID NO: 677138 - DNA, 75 bp, synthetic construct
  source 1..75: mol_type = other DNA
agaacgtgttgacgatgagtaaacgcgaactggaaagaatgattaacgacgtaatggcgcagcaacagcgccggg

SEQ ID NO: 677139 - DNA, 75 bp, synthetic construct
  source 1..75: mol_type = other DNA
tttctgcttcacctggactattattcagaagcgccattcttcggatacaacgtgctttatccagcatggacatta

SEQ ID NO: 677140 - DNA, 75 bp, synthetic construct
  source 1..75: mol_type = other DNA
aaaattaattctgtttgtcgcgatggacggttggacaatgttatcaaaaggactcattttacaatattttgacct

SEQ ID NO: 677141 - DNA, 75 bp, synthetic construct
  source 1..75: mol_type = other DNA
ggtcagccgcaccagacaccgtgacggctaccgcccggaaacagagcggttccggtgggacagccgggaccagct

SEQ ID NO: 677142 - DNA, 75 bp, synthetic construct
  source 1..75: mol_type = other DNA
ggcagtaccgctacgataaagacacgctgcagctcacagaagtcattaacccgcagggcgagtcataccgttata

SEQ ID NO: 677143 - DNA, 75 bp, synthetic construct
  source 1..75: mol_type = other DNA
agcaaaacggtatgggtgttagcgaagccatgactcatatcgtgcaaatgcagcttgagaagatgaatccggcga

SEQ ID NO: 677144 - DNA, 75 bp, synthetic construct
  source 1..75: mol_type = other DNA
accagcaggctgaccgaattgaattgctggagaagaagaatggcgagctaggcagaacgctggaaaccgcagaga

SEQ ID NO: 677145 - DNA, 75 bp, synthetic construct
  source 1..75: mol_type = other DNA
cagtggaattgccggatggcatttgaatggcgatatcgctacatgggaagagattcttcctgaaattaacgatat

SEQ ID NO: 677146 - DNA, 75 bp, synthetic construct
  source 1..75: mol_type = other DNA
tgcagattacaatgaagaggacggccaatcagttgcaaccgttgagaacatttcctgctggattcaggaccctag

SEQ ID NO: 677147 - DNA, 75 bp, synthetic construct
  source 1..75: mol_type = other DNA
ataatatttcaattttctcgttactgcccgcatatgcattgagtgagataaaaagtgcatttattataggttttt

SEQ ID NO: 677148 - DNA, 75 bp, synthetic construct
  source 1..75: mol_type = other DNA
aagtattttggagtaatcataaatcactgctttttaaaactcttgatggagatatcatatctttattatcagatt

SEQ ID NO: 677149 - DNA, 75 bp, synthetic construct
  source 1..75: mol_type = other DNA
atgatgacgctggcggggaaaaatctccgccttttcctgccggtccccggacagagcacaaaggatgtcgccgca

SEQ ID NO: 677150 - DNA, 75 bp, synthetic construct
  source 1..75: mol_type = other DNA
cgtctatggattctccatgacgcgtgcttacaccattcctgcaaaagccagaggatatcagggcgttctgtctgt

SEQ ID NO: 677151 - DNA, 75 bp, synthetic construct
  source 1..75: mol_type = other DNA
aaatgggagttggcaatatgcatattgtgcatctgatagggattaaatatattttaagttatttttcagaaatgt

SEQ ID NO: 677152 - DNA, 75 bp, synthetic construct
  source 1..75: mol_type = other DNA
tacccatgaacatggtaatacgggaaaaaccataccaacttatggtcgctttgattgctttatatacggccatcc

SEQ ID NO: 677153 - DNA, 75 bp, synthetic construct
  source 1..75: mol_type = other DNA
atgaaaatcatatccgttacgggaattactgtgctgaatacagaagatgttcatttcttttctgattcatctgaa

SEQ ID NO: 677154 - DNA, 75 bp, synthetic construct
  source 1..75: mol_type = other DNA
atgaaaatgccctgtgtgttttttatgttattaatacctattgttattaaccaaaggttaaattgtgaaaatagt

SEQ ID NO: 677155 - DNA, 75 bp, synthetic construct
  source 1..75: mol_type = other DNA
atttgttgacactttttttaggtagttcagtttttttacctagttttactgcaattactcccatggcgtgtatga

SEQ ID NO: 677156 - DNA, 75 bp, synthetic construct
  source 1..75: mol_type = other DNA
tttagggttctataactttgtaaatgaaaataaaattttatttcgtgacgtaattggaaaggtggatttttcatg

SEQ ID NO: 677157 - DNA, 75 bp, synthetic construct
  source 1..75: mol_type = other DNA
gcaatgaagagtacattccggcttttcaacagctgttgcagtggtttcgtgcagggtgtggtacaggctcgcaat

SEQ ID NO: 677158 - DNA, 75 bp, synthetic construct
  source 1..75: mol_type = other DNA
gcacttgggttaggcgtgacttcttccctggcgatgtggttgtgacctgcgcactcgatactggcgtatcgttag

SEQ ID NO: 677159 - DNA, 75 bp, synthetic construct
  source 1..75: mol_type = other DNA
aacagcgagcctttagttatcaggaagatggcactaaaaaaatgtgttattacggcagattatcgccattagcga

SEQ ID NO: 677160 - DNA, 75 bp, synthetic construct
  source 1..75: mol_type = other DNA
tctttattcagggaaaacggatatgaccttcagacaggagcatggttctgtcttatttccgcccatctatatagt

SEQ ID NO: 677161 - DNA, 75 bp, synthetic construct
  source 1..75: mol_type = other DNA
agaaaaatgctggcctcatgttacggccactcagatgcggacgaatattcttatctggtatattaaaaatgttat

SEQ ID NO: 677162 - DNA, 75 bp, synthetic construct
  source 1..75: mol_type = other DNA
ctgtcattgctgttaagcccgatcgggctgattggcgcggccttcattgccacagggttgcttatctggcgattc

SEQ ID NO: 677163 - DNA, 75 bp, synthetic construct
  source 1..75: mol_type = other DNA
acattgttctttttttcgataaattaaaaaactctcaagaaatgacagcatcaaaggctcttgatattcttgctg

SEQ ID NO: 677164 - DNA, 75 bp, synthetic construct
  source 1..75: mol_type = other DNA
aaatcgcatttgaaatatcggtaattccatcaaagttttatcgttgccattgctcgctttgcaggaagcaaagcg

SEQ ID NO: 677165 - DNA, 75 bp, synthetic construct
  source 1..75: mol_type = other DNA
aacgccattaataccatgttttttaatgaggtgatgccgggcggcgcacttgccccctcccgtattatccgtgcg

SEQ ID NO: 677166 - DNA, 75 bp, synthetic construct
  source 1..75: mol_type = other DNA
atatttattttgggaggcatgcccaaaatatgaatttcatccggcatcattacctgatggtgaatttataattaa

SEQ ID NO: 677167 - DNA, 75 bp, synthetic construct
  source 1..75: mol_type = other DNA
acattgttcttttttttgataaatttaaaaactcccaagaaatgacagcatcaaaggttcttgctgcgaaatcaa

SEQ ID NO: 677168 - DNA, 75 bp, synthetic construct
  source 1..75: mol_type = other DNA
cacgggttcactttcgatgaaattgtggagcagtttacccgtgactttgatgggaagtcattctctcatgtggta

SEQ ID NO: 677169 - DNA, 75 bp, synthetic construct
  source 1..75: mol_type = other DNA
ccgtcagtaaggggaaaaaaggtaaagagcttgtggaagagctggttaaggtcattaacgctgacactgatgcgc

SEQ ID NO: 677170 - DNA, 75 bp, synthetic construct
  source 1..75: mol_type = other DNA
gctgggcaggagtcctatgtttccctgatgaatcttgtcactgcggcgggggaaaataatcttccccgtcttacg

SEQ ID NO: 677171 - DNA, 75 bp, synthetic construct
  source 1..75: mol_type = other DNA
atcgcagcggcatcagcaccgattaaaccggcggctgaagtacaggctattggcgggcaatccagtaaacaagcc

SEQ ID NO: 677172 - DNA, 75 bp, synthetic construct
  source 1..75: mol_type = other DNA
gcatcagcaatttctttcaggttatttttccgggaaaaagcattcgcagcgataatggctttaatagacagcgta

SEQ ID NO: 677173 - DNA, 75 bp, synthetic construct
  source 1..75: mol_type = other DNA
agctgcctcttggcttgtcgactgttctgcttcgaatataagtaatggtcgctggttaattgatatcgacggcgc

SEQ ID NO: 677174 - DNA, 75 bp, synthetic construct
  source 1..75: mol_type = other DNA
atttccacggtaactgtgggagccggtgatgtgatgcagattgagcgtcaggtgaccatgtatcgccagaacgca

SEQ ID NO: 677175 - DNA, 75 bp, synthetic construct
  source 1..75: mol_type = other DNA
accgcggtgatgggcggcgcgagaaatatcaccgccccaaacatcaatggcgtcaacacctggagctggtcgcgt

SEQ ID NO: 677176 - DNA, 75 bp, synthetic construct
  source 1..75: mol_type = other DNA
caccgacagcggcaccctacgcttcgaacacgatcttacggacaataccacagtgcgcaataccacccgctggtc

SEQ ID NO: 677177 - DNA, 75 bp, synthetic construct
  source 1..75: mol_type = other DNA
agtgaagagacactggtggtggaagccagcccaccttcactttattctcccggcgcctctgccgatccgaaattc

SEQ ID NO: 677178 - DNA, 75 bp, synthetic construct
  source 1..75: mol_type = other DNA
gtctggtcgattgactatgttgatagcggtaatactaaagctggtcagcaagatgtttcccaaccttggggaaag

SEQ ID NO: 677179 - DNA, 75 bp, synthetic construct
  source 1..75: mol_type = other DNA
gcaccaagtggcaaatatccgacaaacgtctgctgctcagcgcggcgttattccgtacggatattgaaaacgaag

SEQ ID NO: 677180 - DNA, 75 bp, synthetic construct
  source 1..75: mol_type = other DNA
atccggtgagtaacctgtcgattggcgggctggacagaaacggggcgaacgccaacggccagaccgataccttcg

SEQ ID NO: 677181 - DNA, 75 bp, synthetic construct
  source 1..75: mol_type = other DNA
gaaacccgcgcctcactgccgtttatcagcaatgaactggctacgctgattagccagcgagggctggaaagcgcc

SEQ ID NO: 677182 - DNA, 75 bp, synthetic construct
  source 1..75: mol_type = other DNA
gcatctgcaaaagtgcctacatcaggagcggttgcattaaaaagtgaaatgtctccaacattaacctctgtaaat

SEQ ID NO: 677183 - DNA, 75 bp, synthetic construct
  source 1..75: mol_type = other DNA
acggcaataatgtcgaatgggttgttgataaagacggtgcagctaagactgttgtacgtaaagatgacaaaatat

SEQ ID NO: 677184 - DNA, 75 bp, synthetic construct
  source 1..75: mol_type = other DNA
catttatcatggaaaaaaacgcatctctgcctttcggcagtttcaactcactggcattgtttacgggtctgtgtc

SEQ ID NO: 677185 - DNA, 75 bp, synthetic construct
  source 1..75: mol_type = other DNA
gggtatacgggtcttttacatggcggaatgacgagtaccctgctggatgcagcaatgactcattgtttgttcatg

SEQ ID NO: 677186 - DNA, 75 bp, synthetic construct
  source 1..75: mol_type = other DNA
tgcttttcttgccgggttgtttatggcagaagtgttcctgctgctgctctttgctttacttggctatatatggtc

SEQ ID NO: 677187 - DNA, 75 bp, synthetic construct
  source 1..75: mol_type = other DNA
ctattgatagaacaacatatgatccggtgaacagtccttacccattgatgtatgttaaggccacaaatatcgcgt

SEQ ID NO: 677188 - DNA, 75 bp, synthetic construct
  source 1..75: mol_type = other DNA
cctggaaaatataaaaacatggggagtaatagcgttaacattattattattaatacccgaaaaattatcccccct

SEQ ID NO: 677189 - DNA, 75 bp, synthetic construct
  source 1..75: mol_type = other DNA
tctaaatatcaatattcctgggcgtagcgctcttcttttagggaaaacaggagaaccgccgaactatctctattt

SEQ ID NO: 677190 - DNA, 75 bp, synthetic construct
  source 1..75: mol_type = other DNA
acggatattgattaacattaaccacgatttccctaacaatggtaatcttttcaatgactttctatttaaccatca

SEQ ID NO: 677191 - DNA, 75 bp, synthetic construct
  source 1..75: mol_type = other DNA
acaagatgaacaattagcaatggcatatatggccgctctcccgttcagcaggcctttagtttactgggatggcca

SEQ ID NO: 677192 - DNA, 75 bp, synthetic construct
  source 1..75: mol_type = other DNA
gttatgaattacatggaatatctggtaacttgccagttggatgaagaacaaatgtcatcgctgctttatgaaaga

SEQ ID NO: 677193 - DNA, 75 bp, synthetic construct
  source 1..75: mol_type = other DNA
ctggcctaacaaattgcaacctggaatatataaaaacatggggagtaatagcgttaacattattattaataatac

SEQ ID NO: 677194 - DNA, 75 bp, synthetic construct
  source 1..75: mol_type = other DNA
acctgaacggatgcagaaccacattacagcactgtacaccaaggctgtgtatgcccgcgcaaaggccgatctttt

SEQ ID NO: 677195 - DNA, 75 bp, synthetic construct
  source 1..75: mol_type = other DNA
gtgttggttgataacgatctgctctaccgcgtcagaggtagtggcagttacgtaaaagcccctaaagcacagcac

SEQ ID NO: 677196 - DNA, 75 bp, synthetic construct
  source 1..75: mol_type = other DNA
gtcggcacaccaggaacggccaggctgttttccgggcgtgttccgtcagcctttgacgccaattatgggttcgat

SEQ ID NO: 677197 - DNA, 75 bp, synthetic construct
  source 1..75: mol_type = other DNA
atgttttctataaaaccaggacctggaaatttacctatcgacaaccccacattgttatcatggaacattactgat

SEQ ID NO: 677198 - DNA, 75 bp, synthetic construct
  source 1..75: mol_type = other DNA
agttggagtcattaccaagaacgtaaacaaatccatccagaagatatacatctcactgcaaaagacttcgaagca

SEQ ID NO: 677199 - DNA, 75 bp, synthetic construct
  source 1..75: mol_type = other DNA
gtaacagagattaacactgaactggctgcacgccgtgaatactggcaggaacagggccacatccgggccgccgat

SEQ ID NO: 677200 - DNA, 75 bp, synthetic construct
  source 1..75: mol_type = other DNA
gacaacactgcaaaatattacgtgcaagaagacggtgctatcaccaacggttctggtaaggttgcttataaagac

SEQ ID NO: 677201 - DNA, 75 bp, synthetic construct
  source 1..75: mol_type = other DNA
gtaagctgggaatatcgctggagcaggccgcagcgatggcgggcgtgctggcgaatatgggtatcagagggagtg

SEQ ID NO: 677202 - DNA, 75 bp, synthetic construct
  source 1..75: mol_type = other DNA
aatccccgcgaactggcgaaactggtcggtgaaatggtcagggcagaaatggaacggcggcgcccgtgccgggcg

SEQ ID NO: 677203 - DNA, 75 bp, synthetic construct
  source 1..75: mol_type = other DNA
tttttctcaagcaatcgtgcatatgaaaataacatcacaaggattaatgcattattatgataagcgctggatatt

SEQ ID NO: 677204 - DNA, 75 bp, synthetic construct
  source 1..75: mol_type = other DNA
taacgcgggcgcgtgagcggtattcgcgcgcgcaggaaacagcgggaaaactgaaaacaggtggtgcgctggcaa

SEQ ID NO: 677205 - DNA, 75 bp, synthetic construct
  source 1..75: mol_type = other DNA
tacggtgatcatacaggaatgggatttagaaatggatctgacggagttgttttatcagcaaaaaatttcgaatct

SEQ ID NO: 677206 - DNA, 75 bp, synthetic construct
  source 1..75: mol_type = other DNA
tccgctgcctccggcgctggtccctgttgttgcggccagctcccgcccggtggcggaggccatacgatcgccagt

SEQ ID NO: 677207 - DNA, 75 bp, synthetic construct
  source 1..75: mol_type = other DNA
gagtttggcgtggtcatgctgatgtatctgcgtcatgccattgaagcgcacccggaattgtcccgtaaagagacg

SEQ ID NO: 677208 - DNA, 75 bp, synthetic construct
  source 1..75: mol_type = other DNA
attgctaactttcgcggtcatgctgctggttacagggctgctatagaagcagcaccacaactggaggttaaccgt

SEQ ID NO: 677209 - DNA, 75 bp, synthetic construct
  source 1..75: mol_type = other DNA
cccactgctggtctcgactcagtcgctcaagcagattttttagatgtgctctctaatttgagaaaccaaacacag

SEQ ID NO: 677210 - DNA, 75 bp, synthetic construct
  source 1..75: mol_type = other DNA
acgtgcagatggtagtcttcgcgctattaaaaaaggggattatttcacctcaggagagataatcaatgtatctgg

SEQ ID NO: 677211 - DNA, 75 bp, synthetic construct
  source 1..75: mol_type = other DNA
caggacggcaacggcaagccggatgatcaggatgcacaggaagcatttgagaatgcaaaagttcatgtagaaaag

SEQ ID NO: 677212 - DNA, 75 bp, synthetic construct
  source 1..75: mol_type = other DNA
tagaggccgagccgtcgttgaataatccgcaaacattcagtgagcagaagctggatgaggcgttgtatcacggcg

SEQ ID NO: 677213 - DNA, 75 bp, synthetic construct
  source 1..75: mol_type = other DNA
ttgtggcagatattgccgttatttttaactggtcgcccgccgaaatcttcatgatgacgccggcgaagtggttag

SEQ ID NO: 677214 - DNA, 75 bp, synthetic construct
  source 1..75: mol_type = other DNA
ctaagtcgcaagataaggttgcatttgatcatttttttgaatcggcagggcctggttgtacatttgtttttaaga

SEQ ID NO: 677215 - DNA, 75 bp, synthetic construct
  source 1..75: mol_type = other DNA
tatcattttcatataaaataaatagaaggtttcagtttttatctgttcagtttgttgatagcggaggtacagaac

SEQ ID NO: 677216 - DNA, 75 bp, synthetic construct
  source 1..75: mol_type = other DNA
acgagttaagccagtatcaatgccgtgggtttgatatttgtgatgggttcaaattcataaagcaaacaagcggta

SEQ ID NO: 677217 - DNA, 75 bp, synthetic construct
  source 1..75: mol_type = other DNA
gtaaaaaaaatagagcttcatgattggcttttttattctttttcgcgagtaaaaaattttcaatgggtgatcgat

SEQ ID NO: 677218 - DNA, 75 bp, synthetic construct
  source 1..75: mol_type = other DNA
gaacttgctttatcagagcctagaatcaatctactcccttatggagacatttttggtggcgctgcgttaaatttt

SEQ ID NO: 677219 - DNA, 75 bp, synthetic construct
  source 1..75: mol_type = other DNA
catgatctttcattaaagtataataatatatcgtatttaccatttggagaagtatttggcggagcagcaaaaaat

SEQ ID NO: 677220 - DNA, 75 bp, synthetic construct
  source 1..75: mol_type = other DNA
actggaaaaattggccgtgtatctaatactgataaaaaacagaaaaacaatcatcttttaaagtataacgataaa

SEQ ID NO: 677221 - DNA, 75 bp, synthetic construct
  source 1..75: mol_type = other DNA
tatctcaacggcatactctgtcggtggtactggcagaacaatggtatctcgtaatgacatggttattaatactaa

SEQ ID NO: 677222 - DNA, 75 bp, synthetic construct
  source 1..75: mol_type = other DNA
ccacccgcaaatacggggaagttgaccgggtatcgttctttaaggacatagccggagaagaggccttcacgtcat

SEQ ID NO: 677223 - DNA, 75 bp, synthetic construct
  source 1..75: mol_type = other DNA
caatagatagagaaacatatgaaccaattataagtccttacccattaatgtacactagcgcaatgaatattgcag

SEQ ID NO: 677224 - DNA, 75 bp, synthetic construct
  source 1..75: mol_type = other DNA
atggcagaattaaccaaagagcaattaatcgaagaagccaaattaaaaatagcgattgcgaaatgccacccaaat

SEQ ID NO: 677225 - DNA, 75 bp, synthetic construct
  source 1..75: mol_type = other DNA
tggtagtaaatattggcagggaaactgggaaaaacatgtcgatatgttagaagataatattaatggtccactata

SEQ ID NO: 677226 - DNA, 75 bp, synthetic construct
  source 1..75: mol_type = other DNA
ctggggagtccggttgcggtgggcgcaacgggcacaacctatgccagccagttcagcgtagcggtggactgggat

SEQ ID NO: 677227 - DNA, 75 bp, synthetic construct
  source 1..75: mol_type = other DNA
ccgcaatggcctgctgttaggcgcggtgacgatggtcggcgcactgaactggacttacagcgacagcggtctggt

SEQ ID NO: 677228 - DNA, 75 bp, synthetic construct
  source 1..75: mol_type = other DNA
acaggcggacggtagctggagcgtaggcattccggcggcgaacgtcagcacctggcctgcggggccgttaaccgt

SEQ ID NO: 677229 - DNA, 75 bp, synthetic construct
  source 1..75: mol_type = other DNA
cgttagcgtaccaactggcgatttagccaaccttaccgccagcccctatacggtgagcgcggcggtcagcgacaa

SEQ ID NO: 677230 - DNA, 75 bp, synthetic construct
  source 1..75: mol_type = other DNA
aatccggtggcgagcgacgatattatcaacgctgcggaatcgggcgtggcgcagaccatcagcggccaggtgacg

SEQ ID NO: 677231 - DNA, 75 bp, synthetic construct
  source 1..75: mol_type = other DNA
agtagcgccggaaatccgataagcattacgcatccggtaacggtggatctcactccggcggcgatcaccatcaac

SEQ ID NO: 677232 - DNA, 75 bp, synthetic construct
  source 1..75: mol_type = other DNA
ggcgttccggcaagcgtcgtctcggcactggcgaacggcacggtgaccattaacgccagcgtcaccgatgccgga

SEQ ID NO: 677233 - DNA, 75 bp, synthetic construct
  source 1..75: mol_type = other DNA
agcaaacgtccaggccagcgtcagcaacgtcgcagggaacagcgcccaggcaacgcatgcttacagcgttgatgc

SEQ ID NO: 677234 - DNA, 75 bp, synthetic construct
  source 1..75: mol_type = other DNA
acctgaacggtaaaaactacaccaccacgctggacgcctccggtaactggagcgtgggcattccggcggcggatg

SEQ ID NO: 677235 - DNA, 75 bp, synthetic construct
  source 1..75: mol_type = other DNA
ggcgatgatatcgtcaacagcatcgaacacgggcaggcgctggtgatcaccggcggcagtagcggcctgaatacc

SEQ ID NO: 677236 - DNA, 75 bp, synthetic construct
  source 1..75: mol_type = other DNA
gatctgtttattacccgtgatgactacggtacggggtatatcaacggctttaccaataacggcgacggcaccttt

SEQ ID NO: 677237 - DNA, 75 bp, synthetic construct
  source 1..75: mol_type = other DNA
aatattaacggcaacagcgcccaggccgatcgcgcgtatagcgttgatgccaccgcgccgcttattactatcaac

SEQ ID NO: 677238 - DNA, 75 bp, synthetic construct
  source 1..75: mol_type = other DNA
ttgcggcggccgtggaagcgaacgtggtacagaatgcctacggctataaaaatacgcagggtcacttcgtcgatc

SEQ ID NO: 677239 - DNA, 75 bp, synthetic construct
  source 1..75: mol_type = other DNA
aatagccctgggatgcctgccaagcctgggattaagtctggtgccggaaatagtcactgcgttttaccagcagaa

SEQ ID NO: 677240 - DNA, 75 bp, synthetic construct
  source 1..75: mol_type = other DNA
ttcctctgtcagcaattacgtcagcaactgcgagccattaaccttgagttataccctgaaaataaaaagtcaatt

SEQ ID NO: 677241 - DNA, 75 bp, synthetic construct
  source 1..75: mol_type = other DNA
acacaacctgcttctgctgggcagcccacaccaggattgattaagccgttaggcgtatacatgatatcgaactcc

SEQ ID NO: 677242 - DNA, 75 bp, synthetic construct
  source 1..75: mol_type = other DNA
ccctcaccctagcctacctcaccgcccatactcatcttccattctccgctcttcatcttctagctgccgacgctc

SEQ ID NO: 677243 - DNA, 75 bp, synthetic construct
  source 1..75: mol_type = other DNA
atgaaactgcgccacctggaaatcttctatgccgtgatgacatgcggaacactttcacgtgcagcggaatcgctg

SEQ ID NO: 677244 - DNA, 75 bp, synthetic construct
  source 1..75: mol_type = other DNA
caacagggggagattatgacgacgctgatagccgaagttccgctggtttatatcgaccgggactatcgacagggc

SEQ ID NO: 677245 - DNA, 75 bp, synthetic construct
  source 1..75: mol_type = other DNA
atcttgctccgattgcctataacaaaatacccgtcataactaccgagctattggcacagctttatggcaccgaga

SEQ ID NO: 677246 - DNA, 75 bp, synthetic construct
  source 1..75: mol_type = other DNA
aagcggaatgacaggcggtggtggtgatgctatggtgagcgggcgtgaaaacgcgcgtcgggaaaactgggttaa

SEQ ID NO: 677247 - DNA, 75 bp, synthetic construct
  source 1..75: mol_type = other DNA
gatatcttcaggtagctgctgagattgaagcgctggccagtggtgctgacaaggatgcagttgtgcgggagaccg

SEQ ID NO: 677248 - DNA, 75 bp, synthetic construct
  source 1..75: mol_type = other DNA
ccactgccacattctcagcaatcacgaccgccggaatgtttctcggtgcgctggttggcggcatcatcggtgaca

SEQ ID NO: 677249 - DNA, 75 bp, synthetic construct
  source 1..75: mol_type = other DNA
tcatgcaaaaatgctcgaaaccgatcaggcgtgggaggtgttcgaaaaactggaagatagctactttagccaacg

SEQ ID NO: 677250 - DNA, 75 bp, synthetic construct
  source 1..75: mol_type = other DNA
gggaagcattacttcaaattagaaggcgatcagttgcgagaatttaagaacaaggttactcaaagtaacttagtc

SEQ ID NO: 677251 - DNA, 75 bp, synthetic construct
  source 1..75: mol_type = other DNA
ccagccataatgtgcaggtcaatagcgccttgcctgccgtcaccattaacgcggtggcgaccgacgatattatta

SEQ ID NO: 677252 - DNA, 75 bp, synthetic construct
  source 1..75: mol_type = other DNA
tgacgcttggcgggaaaacctacaccgctaccgtgcaggggaatttaagctggagcgtggacgttccggcggcgg

SEQ ID NO: 677253 - DNA, 75 bp, synthetic construct
  source 1..75: mol_type = other DNA
tccggcggcgatcaccatcaacaccatcgccacggatgacgtgattaacgctgcagaaaaaggggctaatttaac

SEQ ID NO: 677254 - DNA, 75 bp, synthetic construct
  source 1..75: mol_type = other DNA
cacgaccgattcatccggcaactggagcgtcaccattccggcatcggcggttacagcattaggccaggccaacta

SEQ ID NO: 677255 - DNA, 75 bp, synthetic construct
  source 1..75: mol_type = other DNA
ccgccaacgtgggcgcactggctgacggcaacgctacggtcaccgccagcgtgaacgatgtcgccggtaacccga

SEQ ID NO: 677256 - DNA, 75 bp, synthetic construct
  source 1..75: mol_type = other DNA
catcagcgcctcggtgaccaattccgcaaataataccggcaccgcgacgcacgatatcgtgatagatgccaacct

SEQ ID NO: 677257 - DNA, 75 bp, synthetic construct
  source 1..75: mol_type = other DNA
gtgaccgtgttgcttaacggcaaaggctacagcgctaccattcagagcaacgggagctggagcgtgaacgtgccg

SEQ ID NO: 677258 - DNA, 75 bp, synthetic construct
  source 1..75: mol_type = other DNA
tgattaatgccagcgaaaaaggggccgatctccagattaccggcaccagcgatcagccagcgggtaccgccatca

SEQ ID NO: 677259 - DNA, 75 bp, synthetic construct
  source 1..75: mol_type = other DNA
ggtcaaaccacgcacaccctgaccgttgacaccgctgcgccgacggtgaccatcgccacggtagcgggcgacgat

SEQ ID NO: 677260 - DNA, 75 bp, synthetic construct
  source 1..75: mol_type = other DNA
tcaggcggacgggagctggagcgtcggcattccggcggcaaacgtcagcgcctggcctgcgggggcgttaaccgt

SEQ ID NO: 677261 - DNA, 75 bp, synthetic construct
  source 1..75: mol_type = other DNA
gcagccgctaacgttaagtggcaccagcaatttacccgatggcggtacggttaacgtgacgttgaataatgtcac

SEQ ID NO: 677262 - DNA, 75 bp, synthetic construct
  source 1..75: mol_type = other DNA
ggcggacggtagctggagcgtcagcgttcccacttcagccctgggcgcgctcatcgcaagcaattacaccgtcag

SEQ ID NO: 677263 - DNA, 75 bp, synthetic construct
  source 1..75: mol_type = other DNA
ttaacgccacggaaaaaggcgcggacctgcaaatcaccggcaccagtaatcagcctgcgggcaccaccattacgg

SEQ ID NO: 677264 - DNA, 75 bp, synthetic construct
  source 1..75: mol_type = other DNA
aatggcgtcggcaataccggcagcggctcgcgcgatatcacgatcgacgccaatctgcctggcctgcgggtcgat

SEQ ID NO: 677265 - DNA, 75 bp, synthetic construct
  source 1..75: mol_type = other DNA
aacacggtagcgggtgatgacatcatcaacgctactgaacacggacaggcacagattatcagcggctcggcaacg

SEQ ID NO: 677266 - DNA, 75 bp, synthetic construct
  source 1..75: mol_type = other DNA
cgggtcgatacggtggcgggcgatgatgtggtcaatatcatcgagcacgggcaggcgctggtggtcaccggcagc

SEQ ID NO: 677267 - DNA, 75 bp, synthetic construct
  source 1..75: mol_type = other DNA
tcagtaactggcctgcgggaacaatcaatattgccgtttccggcaccaacaccgccggaacaacaaccagcatta

SEQ ID NO: 677268 - DNA, 75 bp, synthetic construct
  source 1..75: mol_type = other DNA
accgacgcggcaggcaacagcgatgatgccagccgcacggtcaccgtgaatctcaccgcgccaaccattggcatc

SEQ ID NO: 677269 - DNA, 75 bp, synthetic construct
  source 1..75: mol_type = other DNA
cacggagaaaggcgcggatctggcgatttccggcaccagcgaccagcctgcgggcacgcagattaccgttacgct

SEQ ID NO: 677270 - DNA, 75 bp, synthetic construct
  source 1..75: mol_type = other DNA
tggtgataaccggtagcagcagcgggctggcggcgggcgcggcgctgacggtggtgatcaataacgtcacctatg

SEQ ID NO: 677271 - DNA, 75 bp, synthetic construct
  source 1..75: mol_type = other DNA
acgtgagcgaagcgggcgcggggatcaccatcagcggcaccaccacggcgcaggccgggcagacgctcaccgtca

SEQ ID NO: 677272 - DNA, 75 bp, synthetic construct
  source 1..75: mol_type = other DNA
aacctacaccaccaccctggatgcctccggtaactggagcgtcggcgttccggctgcggatgtcacggcgctggg

SEQ ID NO: 677273 - DNA, 75 bp, synthetic construct
  source 1..75: mol_type = other DNA
cgccagcatcagcaccgacacggggagttcggcaactgactttatcaccagcgatacctcgctcacgttgaccgg

SEQ ID NO: 677274 - DNA, 75 bp, synthetic construct
  source 1..75: mol_type = other DNA
caacacctttgcgggcgatgatgtggtgaatgcggcggagcacggctcgtcgctggtgatcagcggcaccaccac

SEQ ID NO: 677275 - DNA, 75 bp, synthetic construct
  source 1..75: mol_type = other DNA
tgggggctaacgatcccagccgccgatctcgcaaccttgccggacggcgcagcaaacgtccaggccagcgtcagc

SEQ ID NO: 677276 - DNA, 75 bp, synthetic construct
  source 1..75: mol_type = other DNA
taaccgtcacgcttaatggcgtgacttacagtggcaccgttcaggcggacggtagctggagcgtcagcgtgccga

SEQ ID NO: 677277 - DNA, 75 bp, synthetic construct
  source 1..75: mol_type = other DNA
accagaacggtgttccgctgaatatccgcgcggttaaatggctgaaaggccgtggtgtggggaataaggatcgca

SEQ ID NO: 677278 - DNA, 75 bp, synthetic construct
  source 1..75: mol_type = other DNA
cgtggtgtgggggataaggatcgcatggttgcgtacaccaacgacaagaaatacgtgcgctatccgctggtgccg

SEQ ID NO: 677279 - DNA, 75 bp, synthetic construct
  source 1..75: mol_type = other DNA
cgctgaacaatgcgccgaagacctgggcgaactccaccaacgacgagattctcgatagcgtgaacagcattctgt

SEQ ID NO: 677280 - DNA, 75 bp, synthetic construct
  source 1..75: mol_type = other DNA
tgattttaatatcgatgaatggcgggcaaaattcaggcagttatgtttagagtattttggcgatagtcgtacaca

SEQ ID NO: 677281 - DNA, 75 bp, synthetic construct
  source 1..75: mol_type = other DNA
ggaaatggtaagtttacaccaattagtgaaggcagcaaattattgaatatgctgtcagaatttaagttattgaga

SEQ ID NO: 677282 - DNA, 75 bp, synthetic construct
  source 1..75: mol_type = other DNA
gcagaatatcttccttcttacccaggatggaagatgccctaaaagaactgcaccctaaagagctgatagagcttc

SEQ ID NO: 677283 - DNA, 75 bp, synthetic construct
  source 1..75: mol_type = other DNA
cgcatgattcatacctatagtgaccccataaacgactgggaatgcggcatccatgaagttccagctgatcagata

SEQ ID NO: 677284 - DNA, 75 bp, synthetic construct
  source 1..75: mol_type = other DNA
tccagtttcgggtgaattaccggaatggcgggatattttaccgctccgcccgtgatggctatggctttgaggcgg

SEQ ID NO: 677285 - DNA, 75 bp, synthetic construct
  source 1..75: mol_type = other DNA
ggcgcaggcgtttaatcagctacaacatcgcccgtttcgcgccaatatcggtggcattaacaaagtgcgcaacga

SEQ ID NO: 677286 - DNA, 75 bp, synthetic construct
  source 1..75: mol_type = other DNA
gagtccggcctgtattacaaccgccaccgctattatgacccgctgcaggggaggtatatcactcaggatccgatt

SEQ ID NO: 677287 - DNA, 75 bp, synthetic construct
  source 1..75: mol_type = other DNA
cgaaataccttgttgacgaattgtgcgcaattattagcttgggcgagaaggcaatccattcccgtggtttacaca

SEQ ID NO: 677288 - DNA, 75 bp, synthetic construct
  source 1..75: mol_type = other DNA
ggttatgttggccagtattatcgctactcattattggccgtgggtacggtgggcttggcgcgataacaacaggga

SEQ ID NO: 677289 - DNA, 75 bp, synthetic construct
  source 1..75: mol_type = other DNA
cgatgctcaatgccatttatcagaaaaattaaaatatgcaattagagatggactaaaacggcaacaggaacttga

SEQ ID NO: 677290 - DNA, 75 bp, synthetic construct
  source 1..75: mol_type = other DNA
ttcaaacgccggccatcgctctgcatgaaggatatttcaaatatagtgtgatgggggggaatataaagaagaagg

SEQ ID NO: 677291 - DNA, 75 bp, synthetic construct
  source 1..75: mol_type = other DNA
tatggctataacagccagcggcaggtgacgtcggtgacgtacccggacgggcttcgcagcagccgggagtatgat

SEQ ID NO: 677292 - DNA, 75 bp, synthetic construct
  source 1..75: mol_type = other DNA
actgggcggccagtaacggtggatatgacagtgaaaccgtgcaggacgtcatgctgggtgccgtggagcgtcgtt

SEQ ID NO: 677293 - DNA, 75 bp, synthetic construct
  source 1..75: mol_type = other DNA
atgctcccctgtatggacatctccgctctcaacaccacgaatgacatcgaaaaactgcgtgccatggcccgtcgg

SEQ ID NO: 677294 - DNA, 75 bp, synthetic construct
  source 1..75: mol_type = other DNA
atgacaaacatgatctcatatcagggacttgttcgcaccttcccttggtatatacaggcactgcgtcccgatggt

SEQ ID NO: 677295 - DNA, 75 bp, synthetic construct
  source 1..75: mol_type = other DNA
ctccggctatcgaaagaatcctttcggcttatggacttagctcgcaaaaagaacttggcgaaaaacttggtattt

SEQ ID NO: 677296 - DNA, 75 bp, synthetic construct
  source 1..75: mol_type = other DNA
ctctcttgataagctgcaacagcaatttgtagattaccttgataaacaaggggatctgtcccttggggaatggaa

SEQ ID NO: 677297 - DNA, 75 bp, synthetic construct
  source 1..75: mol_type = other DNA
gaccaaagcaaggcaaccatccaagccaaacgtctggaggcccagcgcctaaacgtccagaataaggttaatgca

SEQ ID NO: 677298 - DNA, 75 bp, synthetic construct
  source 1..75: mol_type = other DNA
gggagtacctttataactacgctaaaaagcaccaggcaaaaggtaatggatttggcttcggactggtaaatccac

SEQ ID NO: 677299 - DNA, 75 bp, synthetic construct
  source 1..75: mol_type = other DNA
ctgaagaggcggcagcgaaagtggcggcagatgctaaagcgaaggccgaagcagatgctaaagctgcggaagaag

SEQ ID NO: 677300 - DNA, 75 bp, synthetic construct
  source 1..75: mol_type = other DNA
gaaacatgcggcaaaaggcaatggttttggttttggactagtagatccttccaatgttaatagtgtcaccagaac

SEQ ID NO: 677301 - DNA, 75 bp, synthetic construct
  source 1..75: mol_type = other DNA
ttctttctgccattatttcggtagccctgttttattcggcggcggcacatgcagatattcttgatcttcatgcac

SEQ ID NO: 677302 - DNA, 75 bp, synthetic construct
  source 1..75: mol_type = other DNA
gcacgcgagcaaacgtatttcgtcgacaatacggcggatcatagagaaaaccgcctgtggatgatggccaacatg

SEQ ID NO: 677303 - DNA, 75 bp, synthetic construct
  source 1..75: mol_type = other DNA
ttcgccggcgtggcatccatttttccgaggtggaggcgaactcctggatcgcacgcgagcatacgtatttcgtcg

SEQ ID NO: 677304 - DNA, 75 bp, synthetic construct
  source 1..75: mol_type = other DNA
acgccgtcaacgaacagatcaacagtacaattgaagatgcgattgcccgcgctcgggtgaaattccgcgtggcga

SEQ ID NO: 677305 - DNA, 75 bp, synthetic construct
  source 1..75: mol_type = other DNA
gcgcagatccgattctcaacaataccagcacgggtgaagccaccggcgttggcgtacgtttaatgaataaagatc

SEQ ID NO: 677306 - DNA, 75 bp, synthetic construct
  source 1..75: mol_type = other DNA
tgctgactgaactgaaaaaccgcggtctgaacgatatcctcatcgcctgtgtggatggcctgaaaggcttcccgg

SEQ ID NO: 677307 - DNA, 75 bp, synthetic construct
  source 1..75: mol_type = other DNA
gcacgcgagcaaacgtatttcgtcgacaacacggcggatcatagagaaaaccgtctgtggatgatggccaacatg

SEQ ID NO: 677308 - DNA, 75 bp, synthetic construct
  source 1..75: mol_type = other DNA
agataattagcgatagatattttaatcagagctggctacctacgctaaacagacaactagccgaaagcatagggt

SEQ ID NO: 677309 - DNA, 75 bp, synthetic construct
  source 1..75: mol_type = other DNA
tgactgatggcgcaggtatccccatgtccggataccatattattctgaaatcccgggtaaacaccccggaagtgg

SEQ ID NO: 677310 - DNA, 75 bp, synthetic construct
  source 1..75: mol_type = other DNA
gcaatgcaaacgcgggttcagggacaccagactggactcaccgggaggcacccggcaccatgttcatgatgatac

SEQ ID NO: 677311 - DNA, 75 bp, synthetic construct
  source 1..75: mol_type = other DNA
ccaaaaaggctgatgtgctggccattgccagggcatggggtatcagtggtgaggcagagctggtcgtgatgcagg

SEQ ID NO: 677312 - DNA, 75 bp, synthetic construct
  source 1..75: mol_type = other DNA
gtctttcgctgttgctgctgatgccactgaaagctgtgaggaccgtgtcgcgctcacatggaacaatctccggaa

SEQ ID NO: 677313 - DNA, 75 bp, synthetic construct
  source 1..75: mol_type = other DNA
caggctgaacgaattaatatcattattgcacgactgcttgatgaggttctgaaagattttctgtggcgctgtcgt

SEQ ID NO: 677314 - DNA, 75 bp, synthetic construct
  source 1..75: mol_type = other DNA
tattggaacagtggagaataggcatgatttcatcagaaaacgataatccaggcgagtctttggaagagtttttga

SEQ ID NO: 677315 - DNA, 75 bp, synthetic construct
  source 1..75: mol_type = other DNA
tctattccagcgaagccatcaatattcagagttcattgatatcacttgccgcatgcaaaattgaaattgatactc

SEQ ID NO: 677316 - DNA, 75 bp, synthetic construct
  source 1..75: mol_type = other DNA
tcattatatattagtgatgaggaggtgtataaagttggtgattctgattctatacctattgaaaaaagaattaaa

SEQ ID NO: 677317 - DNA, 75 bp, synthetic construct
  source 1..75: mol_type = other DNA
actatcggcgttttgctgtgcctgttatacggattgatcgtaatgggccttgcaaccctgcgcgagcatcaggac

SEQ ID NO: 677318 - DNA, 75 bp, synthetic construct
  source 1..75: mol_type = other DNA
gcagatgcaacgggctacagcactttgcaggtttgccgtattcaggcactttatcgagaatcaacgactgattaa

SEQ ID NO: 677319 - DNA, 75 bp, synthetic construct
  source 1..75: mol_type = other DNA
ggtgcttccgttaataatgcaaaagttagaaattacagatttcaaactggatgaaacagacttacgggtggggaa

SEQ ID NO: 677320 - DNA, 75 bp, synthetic construct
  source 1..75: mol_type = other DNA
tcgcagtacatactctgaaatgtacccaaaaagatttagcaaaccagttaggtgtttcctcaacgcaaattagca

SEQ ID NO: 677321 - DNA, 75 bp, synthetic construct
  source 1..75: mol_type = other DNA
ggagtgatggcgtaacgtcagatcgctatgacatacagtccggttctccggcgcaagccacatcaactatcgcca

SEQ ID NO: 677322 - DNA, 75 bp, synthetic construct
  source 1..75: mol_type = other DNA
agccagtacagtcaccgccagcatcaacaacagcagccagagccgggatgtgacgtttatcgccgatgtcaggac

SEQ ID NO: 677323 - DNA, 75 bp, synthetic construct
  source 1..75: mol_type = other DNA
tcggtaatgtgcttgccgggcagacggtcagcgtgttggcggacaacggcgcaacggtcactccgacggtcacca

SEQ ID NO: 677324 - DNA, 75 bp, synthetic construct
  source 1..75: mol_type = other DNA
aacccacagccgaataaagtttatcatgtagatggtgataaaatttataaaactgatgctcaggcagggccaagc

SEQ ID NO: 677325 - DNA, 75 bp, synthetic construct
  source 1..75: mol_type = other DNA
tgcctgtggtgcgaatactgtgctgtgtgcaaatgaagtcagtatctgggttgtggaaatggtcgctggcgatgt

SEQ ID NO: 677326 - DNA, 75 bp, synthetic construct
  source 1..75: mol_type = other DNA
tgattttggtaatccggttgataacggtctggaattgctgacagaggatgcggtgttcttacaaaatgtggaaaa

SEQ ID NO: 677327 - DNA, 75 bp, synthetic construct
  source 1..75: mol_type = other DNA
gtccggtagccgtcagcgggaactggcggtgatgacctttgcccgtcagtcgggcgttgagtccttgtttccggg

SEQ ID NO: 677328 - DNA, 75 bp, synthetic construct
  source 1..75: mol_type = other DNA
aagtatcaaaacagcattttgttccacaatattacattaaacaattttataataaaaataacaaagtatatcgag

SEQ ID NO: 677329 - DNA, 75 bp, synthetic construct
  source 1..75: mol_type = other DNA
cgcgcagggtgttaccgatctggataattacctgcaaaaaggagttaaaccagccaaacagcgggtgatgttccg

SEQ ID NO: 677330 - DNA, 75 bp, synthetic construct
  source 1..75: mol_type = other DNA
gaaaggcgacaccggtccggcagggccacgtggtcccagaggtgatacgggacccgcgggtccacgtgggccagc

SEQ ID NO: 677331 - DNA, 75 bp, synthetic construct
  source 1..75: mol_type = other DNA
aggcgcgttggttcgtgccaattttgatacccgcataggcgtgcgggcgctcattaccgttacccagggcggaaa

SEQ ID NO: 677332 - DNA, 75 bp, synthetic construct
  source 1..75: mol_type = other DNA
gcggtgtggtcgggcacgaaaatggcataacgctgagccagcctttaggggataccaatgttttgattaaagcgc

SEQ ID NO: 677333 - DNA, 75 bp, synthetic construct
  source 1..75: mol_type = other DNA
tggttgaacatctcacttccgcagtcagggcacacggtccgcatggtttgcatgaacatatcctttctactgttg

SEQ ID NO: 677334 - DNA, 75 bp, synthetic construct
  source 1..75: mol_type = other DNA
ttatcataatggtgtaaaagtggaggtcggtgtaagtatggttggaggaatatcagatagtaacaatcaaaatca

SEQ ID NO: 677335 - DNA, 75 bp, synthetic construct
  source 1..75: mol_type = other DNA
tggtgggtgccattgttggcggatccggagcaatcaccattgctgcagtaatgcttggcaatgcggatgggctgg

SEQ ID NO: 677336 - DNA, 75 bp, synthetic construct
  source 1..75: mol_type = other DNA
ggtatgagcgagggtacgtgaaggctaacccatgtgcaggtgtaagtaaattcaaggccaaaaaccgcgaacgat

SEQ ID NO: 677337 - DNA, 75 bp, synthetic construct
  source 1..75: mol_type = other DNA
ccaggacctcaggggccgaaaggcgacgcagggccaaagggtgagcctggtccgaaaggcgacacaggtccgaag

SEQ ID NO: 677338 - DNA, 75 bp, synthetic construct
  source 1..75: mol_type = other DNA
agggacgctgaatgagtttttgctgaatgaagaaacggcggcggaatatcccagagcactggcagagctggaggc

SEQ ID NO: 677339 - DNA, 75 bp, synthetic construct
  source 1..75: mol_type = other DNA
caccgatgttatatttaagcgcggttatgctaatcggcgggatcgtcacaatattaattgtccgctggttaaaga

SEQ ID NO: 677340 - DNA, 75 bp, synthetic construct
  source 1..75: mol_type = other DNA
ctattatcttattttgctcattgcgggacttacttgttgttatatttttggtgaatatacattctatgtgttttc

SEQ ID NO: 677341 - DNA, 75 bp, synthetic construct
  source 1..75: mol_type = other DNA
gcggcaatcgttattgacaaaatggtggttaaccatgttgttagattatttaaaggtgagtttaaagttggcaag

SEQ ID NO: 677342 - DNA, 75 bp, synthetic construct
  source 1..75: mol_type = other DNA
gcagagaaaatcggccagttttctctgcctgcagtccgcatgccgtatcgggccttgggttctaacctgttgcgt

SEQ ID NO: 677343 - DNA, 75 bp, synthetic construct
  source 1..75: mol_type = other DNA
caaacatccccaacactcaggtcggcgtatatggcgactggtttaatgatggcaatcccacttgggatgacggtg

SEQ ID NO: 677344 - DNA, 75 bp, synthetic construct
  source 1..75: mol_type = other DNA
aatatgatgaatggggcaacctgctgaatgatgagaacccgcatcatctgcagcagctcattcgcctgccggggc

SEQ ID NO: 677345 - DNA, 75 bp, synthetic construct
  source 1..75: mol_type = other DNA
atgtggggagtgcctgcgccatttttaccgcgctgacgaattactggtttaagcgcaaaacctaccgctacctga

SEQ ID NO: 677346 - DNA, 75 bp, synthetic construct
  source 1..75: mol_type = other DNA
gtttatgttcttctttttgccgggcctgttaatggcgtcctgggcaacccgtacgcctgctatccgcgatattct

SEQ ID NO: 677347 - DNA, 75 bp, synthetic construct
  source 1..75: mol_type = other DNA
ccagggcgacgcgggtcacagggacacgcgctgatggcgtcgcgttcagcatcgagcagggtgcggcgaacaata

SEQ ID NO: 677348 - DNA, 75 bp, synthetic construct
  source 1..75: mol_type = other DNA
cgtctggcctttggtttcgctggcatcttcgaccaggacgaggcagagcgagtaattgaaggaacaacggcagag

SEQ ID NO: 677349 - DNA, 75 bp, synthetic construct
  source 1..75: mol_type = other DNA
aatacgctgaagaatacagcgttcaaaagtggcaacgtcacggacgagcagtttacagccctgttgatcgtcgcc

SEQ ID NO: 677350 - DNA, 75 bp, synthetic construct
  source 1..75: mol_type = other DNA
tataccaccagacttaacaatggcggcatactcgatgtgcgggagaaaggcagcgcaacggggatacagcagagt

SEQ ID NO: 677351 - DNA, 75 bp, synthetic construct
  source 1..75: mol_type = other DNA
caaagcattctgggtttatctgttgcggaaaaaatctgaattgaaagctacgagcgaacgagacaaccgcattac

SEQ ID NO: 677352 - DNA, 75 bp, synthetic construct
  source 1..75: mol_type = other DNA
gaggactgtgaagttatagttgaagatagtaatggcatatcaagatatggtttgcgatttctttctctgaagggc

SEQ ID NO: 677353 - DNA, 75 bp, synthetic construct
  source 1..75: mol_type = other DNA
aaaatgtgcgatcatatgtttcacgtcaaatacatcgagtggttgacgactgaacagttaaccaaactcatgcag

SEQ ID NO: 677354 - DNA, 75 bp, synthetic construct
  source 1..75: mol_type = other DNA
tgactgacgcgctggcgcacctgcagcgtgcgatccagttagagcgaactgtcggtgtgaaaaaagatattgaac

SEQ ID NO: 677355 - DNA, 75 bp, synthetic construct
  source 1..75: mol_type = other DNA
tgcgcggcgggctgctgctccgctgcgtaatgcaactgcctatgagcagatgctcgtcaagctggccgcagactg

SEQ ID NO: 677356 - DNA, 75 bp, synthetic construct
  source 1..75: mol_type = other DNA
atgctgcttttcgctggtgcctgtcgttttgtttataataaaggacttgcgctgttaaaggagagctatgagtca

SEQ ID NO: 677357 - DNA, 75 bp, synthetic construct
  source 1..75: mol_type = other DNA
ctcagcctgaccgacggtgctgacgttcccgatatggtgcgcgctcgtctgcataaggtgactggcctgaccctg

SEQ ID NO: 677358 - DNA, 75 bp, synthetic construct
  source 1..75: mol_type = other DNA
ttcccgatatggtgcgcgctcgactgcataaggtgaccggcctgaccctgcgcgatgccggtcagagcgccgaag

SEQ ID NO: 677359 - DNA, 75 bp, synthetic construct
  source 1..75: mol_type = other DNA
ctggaaattgccccgtacgcgctgaaatacggcctcacctctgaccaccgccgcacaacaccttacatgctggtt

SEQ ID NO: 677360 - DNA, 75 bp, synthetic construct
  source 1..75: mol_type = other DNA
tacctttttattttatttaattctaaataaaaaatataaatatttattatggttgttagtaatatctgtaatatc

SEQ ID NO: 677361 - DNA, 75 bp, synthetic construct
  source 1..75: mol_type = other DNA
ggtggtgcctactggcggctgcgatgtttctgctcgtgatgtcaccgttactctgccggactaccctggttcagt

SEQ ID NO: 677362 - DNA, 75 bp, synthetic construct
  source 1..75: mol_type = other DNA
gtgacctggtggatttgcccctatatttccagacatctgttatcacttaacccattacaagcccgctgccgcaga

SEQ ID NO: 677363 - DNA, 75 bp, synthetic construct
  source 1..75: mol_type = other DNA
gcgtgctaatggcacccctccctctttccatgagcagagatctttatcagagcgattgttcagagagcagggggt

SEQ ID NO: 677364 - DNA, 75 bp, synthetic construct
  source 1..75: mol_type = other DNA
taagtctttatcaaagactgggtctataaaatggcgcttaattgatgattacggtgctttaacgaaagaatttag

SEQ ID NO: 677365 - DNA, 75 bp, synthetic construct
  source 1..75: mol_type = other DNA
ccatgttgtttccttttgttgttaatgcagcaggattaagtaccacaacaagaagctatagcattgtattgggag

SEQ ID NO: 677366 - DNA, 75 bp, synthetic construct
  source 1..75: mol_type = other DNA
tgtatttcccacagcgtcgcaatattgcaccaaagctccgcgccctgattgaccacgtcaaggaatggcggcagc

SEQ ID NO: 677367 - DNA, 75 bp, synthetic construct
  source 1..75: mol_type = other DNA
ctggcggctggcgcggtttgatgagcgccgggcggtattccgccacggtaaacgccagctgacgctgaaagtacc

SEQ ID NO: 677368 - DNA, 75 bp, synthetic construct
  source 1..75: mol_type = other DNA
cgacacaatcggcagatgttcgcccggaatcagaactgaaccgcgcagagcgcatctcacaggcgcttaaagcta

SEQ ID NO: 677369 - DNA, 75 bp, synthetic construct
  source 1..75: mol_type = other DNA
cattaactaagtatacacctcctgactggaatactcttgttgtaaagatgtatttagattacttaagtttaggag

SEQ ID NO: 677370 - DNA, 75 bp, synthetic construct
  source 1..75: mol_type = other DNA
agatgatattcgccaaggtacgaaccaggcggagtacaaacgcgaatacatccagttccatgcagtgatgattaa

SEQ ID NO: 677371 - DNA, 75 bp, synthetic construct
  source 1..75: mol_type = other DNA
tcgagtttccggcgtcgcgcggcatgcagggtggcacggcgacttacatgattacggcacctgcccgcgcgttga

SEQ ID NO: 677372 - DNA, 75 bp, synthetic construct
  source 1..75: mol_type = other DNA
gaccatattcgttttgttctgattgagtgcccgcaaaggtttgaaaactatttcatggactctcaggagatgata

SEQ ID NO: 677373 - DNA, 75 bp, synthetic construct
  source 1..75: mol_type = other DNA
aactaacaagtgaggtaattcaacacattgacaggtttaataaatccacattatcagattgcgatgtttctgaat

SEQ ID NO: 677374 - DNA, 75 bp, synthetic construct
  source 1..75: mol_type = other DNA
cgtatgttgttcactcattattttgtgctattaccgcattaaaatttggtttccccggaagtgatgaacttgaaa

SEQ ID NO: 677375 - DNA, 75 bp, synthetic construct
  source 1..75: mol_type = other DNA
gcgggacaatggcagcgtattgaacggacccaacgggcaatgccttatcttgtctacaccgtcggcccctcacgt

SEQ ID NO: 677376 - DNA, 75 bp, synthetic construct
  source 1..75: mol_type = other DNA
tgagtggtatgcttgggcataccctctttcgttttttatcatctcagcaggatcttttagtaactggtacagtac

SEQ ID NO: 677377 - DNA, 75 bp, synthetic construct
  source 1..75: mol_type = other DNA
gtatcatttatcaggttgatgatactccggctaatcatgagattaaaaccttagattttgccgaaggtaaatata

SEQ ID NO: 677378 - DNA, 75 bp, synthetic construct
  source 1..75: mol_type = other DNA
taactctgcggtagtgaataacgcgggtacctggaaaatgggttatcaggatgaaaacaacaatgccgggacgct

SEQ ID NO: 677379 - DNA, 75 bp, synthetic construct
  source 1..75: mol_type = other DNA
aatgggactttgccaaccaatgatggccacctatcgcccgcataataatcagctgatggaatgggtgcagacccg

SEQ ID NO: 677380 - DNA, 75 bp, synthetic construct
  source 1..75: mol_type = other DNA
aactctgctattggatcttcgttattccgtgttgaaactcgggatgatggcagccatgttgctatcgggcaaaaa

SEQ ID NO: 677381 - DNA, 75 bp, synthetic construct
  source 1..75: mol_type = other DNA
gggcagcagcatgatgaggaatcagggctgtactataaccgtcaccggtactacgatccgttgcaggggcggtat

SEQ ID NO: 677382 - DNA, 75 bp, synthetic construct
  source 1..75: mol_type = other DNA
caatgaaattggcgtttcaggcggctcactggcggcattgacttcacccttaacctcaacaactcccgtcgaaga

SEQ ID NO: 677383 - DNA, 75 bp, synthetic construct
  source 1..75: mol_type = other DNA
cgcaacgttaccagtatgacctgaccggaaaactcacgcagagtgaagacgaggggcttatcaccctctggcact

SEQ ID NO: 677384 - DNA, 75 bp, synthetic construct
  source 1..75: mol_type = other DNA
gctgacggcggagacctcgcgcagcggtgagacaacgcggtacagctatgatgacccggcgagtgagctgccgac

SEQ ID NO: 677385 - DNA, 75 bp, synthetic construct
  source 1..75: mol_type = other DNA
gaatttttttcctgcttattacatttaaaaagttttatactacctggtcgcgtctaaaagacataacaaggctca

SEQ ID NO: 677386 - DNA, 75 bp, synthetic construct
  source 1..75: mol_type = other DNA
atttgaaaataacgttgctaaaacaaatctttgcgccattctggaacaacacggcctgactaacctgcatagcct

SEQ ID NO: 677387 - DNA, 75 bp, synthetic construct
  source 1..75: mol_type = other DNA
ccgaactgcaatcaatgaatatcactgctgataacatcaccaagcttaaatcattgtttcctgaagcttttaatg

SEQ ID NO: 677388 - DNA, 75 bp, synthetic construct
  source 1..75: mol_type = other DNA
atattgaaccatttttttctgcggctaccgctgaagataaacagcaaattgaacaagctatcaatagtagcgtga

SEQ ID NO: 677389 - DNA, 75 bp, synthetic construct
  source 1..75: mol_type = other DNA
gcagggaatgtctgtaatcagatgaaaaaagaagcgctgtttcgccctaagccttcacctgaattagtgcaggaa

SEQ ID NO: 677390 - DNA, 75 bp, synthetic construct
  source 1..75: mol_type = other DNA
atgagattctggagttgaccgatcagcaattgggttaccagcctgttgttctggggttgctcgaccgtgaaccgc

SEQ ID NO: 677391 - DNA, 75 bp, synthetic construct
  source 1..75: mol_type = other DNA
agtggtggaagtattagtagtggattagttgtctggtccggtggtattaatatcactaaccagttatccgataca

SEQ ID NO: 677392 - DNA, 75 bp, synthetic construct
  source 1..75: mol_type = other DNA
tcgaagaagctaaagagcgtgttgaaacgctggccggggaggttaagcagaacgctgatgctgttgcgaaagaca

SEQ ID NO: 677393 - DNA, 75 bp, synthetic construct
  source 1..75: mol_type = other DNA
catcaggtacagcaacgctctataactcatggggcggtgccgtaactgttgctccggcttcaacatcaggtttca

SEQ ID NO: 677394 - DNA, 75 bp, synthetic construct
  source 1..75: mol_type = other DNA
gcgagtttctgcatcctcgctactggctcacatggtttgggcttggtgtactctggctttgggtacagcttcctt

SEQ ID NO: 677395 - DNA, 75 bp, synthetic construct
  source 1..75: mol_type = other DNA
ctggttcgtatcactcagatcatcaatggtggacagaacggcattaacgaccgtcgtgcacgctacgccaaagca

SEQ ID NO: 677396 - DNA, 75 bp, synthetic construct
  source 1..75: mol_type = other DNA
gcgggattctctgcgctggtggagaacttcaactacacgcctgccgcattactgacgacgtttggacgccgggta

SEQ ID NO: 677397 - DNA, 75 bp, synthetic construct
  source 1..75: mol_type = other DNA
tatagcaaccgcctgggtaacaaagcgcccggcgacggctggaaatatcgcggcagagggttaattcaaatcact

SEQ ID NO: 677398 - DNA, 75 bp, synthetic construct
  source 1..75: mol_type = other DNA
cgaaagagttaccactcgataataaaaaggcatatgcctggttcagtgccgcatacgctcatggacttgataaaa

SEQ ID NO: 677399 - DNA, 75 bp, synthetic construct
  source 1..75: mol_type = other DNA
tggggctgtggtctgcggctctgatgggcggcggtggacttggtgccgccataacgccctggttagttcaacata

SEQ ID NO: 677400 - DNA, 75 bp, synthetic construct
  source 1..75: mol_type = other DNA
cgatactgctggttctggtgctgattggtcttaatatgcgaccactgctcacctccgtcgggccactgctaccgc

SEQ ID NO: 677401 - DNA, 75 bp, synthetic construct
  source 1..75: mol_type = other DNA
ctgggacgcgtgcgtctgcgtcagttggcgcgtcgcgactggcttaccgccttgatgctcaccatgatggtatcg

SEQ ID NO: 677402 - DNA, 75 bp, synthetic construct
  source 1..75: mol_type = other DNA
attaaaaagtttgagaaacgtgatctggcacaggcggttattaatgctgcctacctggtggcctgtgcagatggt

SEQ ID NO: 677403 - DNA, 75 bp, synthetic construct
  source 1..75: mol_type = other DNA
gcagaagtcgaaacgcttctggaactttataaagccagaatttacgattctcttgaaaattatgaaggtggtaaa

SEQ ID NO: 677404 - DNA, 75 bp, synthetic construct
  source 1..75: mol_type = other DNA
gattacctgctttacccgtcaaatccctgcctcttctgttgaggaactaaccaaggggatcattgactggcataa

SEQ ID NO: 677405 - DNA, 75 bp, synthetic construct
  source 1..75: mol_type = other DNA
ctaaaacagatagcaccagacttaataatggcggcgttctggaggttcaggacggtggtgaggctaagcatgttg

SEQ ID NO: 677406 - DNA, 75 bp, synthetic construct
  source 1..75: mol_type = other DNA
tgataaaacaggctcggttaaaatccacaaagaggacgggcgatttcaggaagagcgtacttatcagcggaaaga

SEQ ID NO: 677407 - DNA, 75 bp, synthetic construct
  source 1..75: mol_type = other DNA
tcacacaagcgcattcagttcgtgaagaactatctgttggtgaatttatccagatttgtcgaggtgagtttctga

SEQ ID NO: 677408 - DNA, 75 bp, synthetic construct
  source 1..75: mol_type = other DNA
acgattgaaggcggaactcagtctctgaatagtaagtcaacggcaaaaaatacgcagatctattctggtggtacg

SEQ ID NO: 677409 - DNA, 75 bp, synthetic construct
  source 1..75: mol_type = other DNA
agggtgtggcgaatgagacaacaattaacgacggcggaatacaaacagtttcagctaacggagaggcaataaaaa

SEQ ID NO: 677410 - DNA, 75 bp, synthetic construct
  source 1..75: mol_type = other DNA
tatggaaaagatgttggcactgtactcaatagtgctggcacccaaacaatatatgccagtgccacttctgataaa

SEQ ID NO: 677411 - DNA, 75 bp, synthetic construct
  source 1..75: mol_type = other DNA
tttcttccgggcaagataaaggcgtaattctcgattatatgctggataaaatggggaacaaatatgacgcgattg

SEQ ID NO: 677412 - DNA, 75 bp, synthetic construct
  source 1..75: mol_type = other DNA
tatcataaaattgctgaaggatatcgtttccttgatcaaaacagacaattcatgcataaagatgcaattgaatta

SEQ ID NO: 677413 - DNA, 75 bp, synthetic construct
  source 1..75: mol_type = other DNA
aaaaaggaacacgcggacggcagcgtcacgcagagtcagtttgacgccgtgggcaggcttaaggcacagacagat

SEQ ID NO: 677414 - DNA, 75 bp, synthetic construct
  source 1..75: mol_type = other DNA
gcaccggagcagtatctctggatccaccgccgcttcaaaacgcgtccggtgggtgaagcgtcgttatacgtttaa

SEQ ID NO: 677415 - DNA, 75 bp, synthetic construct
  source 1..75: mol_type = other DNA
tggtttgagaaagctgctactcaaaacttacctattgcacaaattactttagggaaggtgcgaataagcggggaa

SEQ ID NO: 677416 - DNA, 75 bp, synthetic construct
  source 1..75: mol_type = other DNA
gggagatgacattgcgcaattttatgtcgggcttttatatcatcagggagatgaagacacaccgccggattacca

SEQ ID NO: 677417 - DNA, 75 bp, synthetic construct
  source 1..75: mol_type = other DNA
taccaccgttgatgctggcggtaaactgatcgtccagaaggaggccaaaacagataccaccagacttaacaatgg

SEQ ID NO: 677418 - DNA, 75 bp, synthetic construct
  source 1..75: mol_type = other DNA
agtgacgtccggccatccggtcaatcccctgctcggtgcaaaggtccttcccggtgaaaccgaccttgccctgcc

SEQ ID NO: 677419 - DNA, 75 bp, synthetic construct
  source 1..75: mol_type = other DNA
gcagcttgaggcgttgcccgatctgactgaaacacgcctgaccggaaaggatgttcttgaagggctgaaatcaca

SEQ ID NO: 677420 - DNA, 75 bp, synthetic construct
  source 1..75: mol_type = other DNA
cgaactggtcagcatttcacaacagcttcgcgccttcagctatctgtcggcgttcggcgcgcagaccaaagaaga

SEQ ID NO: 677421 - DNA, 75 bp, synthetic construct
  source 1..75: mol_type = other DNA
ttgaaaataacgttgctaaaacaaatctttgcgccattctggaacagcatggcctgacaaacttgcacagcctgt

SEQ ID NO: 677422 - DNA, 75 bp, synthetic construct
  source 1..75: mol_type = other DNA
aaggggatgatatattttttgatacaccaaaacctgtaaaattgattaaacgcattttagatttggcgacaaaca

SEQ ID NO: 677423 - DNA, 75 bp, synthetic construct
  source 1..75: mol_type = other DNA
attaccaccaggatatacttgtgcagaaccctatttattcccagacattaataaacccgatgggccagcaacagc

SEQ ID NO: 677424 - DNA, 75 bp, synthetic construct
  source 1..75: mol_type = other DNA
gtagatttaggcagatggcctacgacacaactactgaacgctggcgataccacggcactcgtcccttttagcctg

SEQ ID NO: 677425 - DNA, 75 bp, synthetic construct
  source 1..75: mol_type = other DNA
cccggatcccaacccaaatccgaagccggatccaaaaccagacccaaaaccggatccgaaaccagacccgactcc

SEQ ID NO: 677426 - DNA, 75 bp, synthetic construct
  source 1..75: mol_type = other DNA
ataaccccgaatatcatttatccaatggcatgaaatcgaaatcagtcgatcccgcagtatatatcgtgaactggg

SEQ ID NO: 677427 - DNA, 75 bp, synthetic construct
  source 1..75: mol_type = other DNA
acggatatacagccagccggtggcaatacctgttgagtaaagagttggggctgatatttattcctgttgaaattt

SEQ ID NO: 677428 - DNA, 75 bp, synthetic construct
  source 1..75: mol_type = other DNA
gaataaaaaatcgccaccaggcgcggctggaaattggcttaagcatcatttacagcatatcaatgccccaaatag

SEQ ID NO: 677429 - DNA, 75 bp, synthetic construct
  source 1..75: mol_type = other DNA
atgtttgtcacgaataaagctatttatgttaccaatatcatttcgagtgtgcacactatctatctgttttttcag

SEQ ID NO: 677430 - DNA, 75 bp, synthetic construct
  source 1..75: mol_type = other DNA
ataacggtgactgttgtacttagtgatgctcagggtaactttattactgatggtgtcgctcagcttaatgaggaa

SEQ ID NO: 677431 - DNA, 75 bp, synthetic construct
  source 1..75: mol_type = other DNA
gttcgataatctggtaaccggtgcaactacacagttagccgctaatggtgtgctgacggtggatggcaccgaccc

SEQ ID NO: 677432 - DNA, 75 bp, synthetic construct
  source 1..75: mol_type = other DNA
ccgggcagacagtcagcgtgattgcagacaacagcgcaacggtcactccgacggttatcaccgagccggacggga

SEQ ID NO: 677433 - DNA, 75 bp, synthetic construct
  source 1..75: mol_type = other DNA
gtctgaaattaaaaacatgggcaacggagattaattccgcgctatacgggatacaaccaggtgcagcagcaaaaa

SEQ ID NO: 677434 - DNA, 75 bp, synthetic construct
  source 1..75: mol_type = other DNA
gtgttggcaggcaacggcgcaacggttgccccgactgtcatcacagggcaggacggtacggtggagatctcagtc

SEQ ID NO: 677435 - DNA, 75 bp, synthetic construct
  source 1..75: mol_type = other DNA
gtctgaaaccgccggtgtttatactgctacatggtcggcgcaaatggcgggagactctcaccacgcgacgctgaa

SEQ ID NO: 677436 - DNA, 75 bp, synthetic construct
  source 1..75: mol_type = other DNA
gtggctgacggcgcaatggcgaacacgctgcggatgagggtcacggatgcattcggtaatacgcttggcggacag

SEQ ID NO: 677437 - DNA, 75 bp, synthetic construct
  source 1..75: mol_type = other DNA
ggcggacaacggcgcaacggtcgccccgacggtcaccacgcagccggacggtacggtggagatctctgttaccag

SEQ ID NO: 677438 - DNA, 75 bp, synthetic construct
  source 1..75: mol_type = other DNA
atgggcaatatcaaagacagtatatggcgcattttgcggaagcgaatttgaatgcgcaactgaacatggctggtt

SEQ ID NO: 677439 - DNA, 75 bp, synthetic construct
  source 1..75: mol_type = other DNA
ttgtggaagtcgagttactgagtgttaatggtgtaaaattcagggcgacagatggttttccagaaacagggtttg

SEQ ID NO: 677440 - DNA, 75 bp, synthetic construct
  source 1..75: mol_type = other DNA
agcagaataatggtgaatataccattgtctggacagcatgggttgccgaggaaaatctagttgccagtctgaaat

SEQ ID NO: 677441 - DNA, 75 bp, synthetic construct
  source 1..75: mol_type = other DNA
caacaacagcagcctgagccgggacgtgacgtttgttgccgatgtcaggacggcgcagatcgctgatctggtggt

SEQ ID NO: 677442 - DNA, 75 bp, synthetic construct
  source 1..75: mol_type = other DNA
agtcactgccagcatcaacagcagcagccagagccggaacgtgacgtttgtcgccgatgtcaggacggcgcagat

SEQ ID NO: 677443 - DNA, 75 bp, synthetic construct
  source 1..75: mol_type = other DNA
gctatcagcccaatgaagagcatatacaggaacagaattacaagcttgaacttgaactgagaaaattgaaacgat

SEQ ID NO: 677444 - DNA, 75 bp, synthetic construct
  source 1..75: mol_type = other DNA
ttgccgggcagacggtcagcgtgatggcaggcaacggcgcaacgactgccccgacggtgaccactcagccggatg

SEQ ID NO: 677445 - DNA, 75 bp, synthetic construct
  source 1..75: mol_type = other DNA
cagatcgcggatctggtggtcattaaggacggctcagtggctgacggcgcgacggcgaatacgctgcaggtgaag

SEQ ID NO: 677446 - DNA, 75 bp, synthetic construct
  source 1..75: mol_type = other DNA
ccggttttaacacctcgacatttaccaatatcgaaggcatttccggctcgaattttaacgacattctgaccggca

SEQ ID NO: 677447 - DNA, 75 bp, synthetic construct
  source 1..75: mol_type = other DNA
aaggtaaacccgcaagtgggcgcgctattttgtctcaggagcaggacggcattaaatcgcacgcccacggtgcca

SEQ ID NO: 677448 - DNA, 75 bp, synthetic construct
  source 1..75: mol_type = other DNA
agtggcgaatgataatgctaatggccgcgttccctccacgcgtaaaattaacggacattccctgaatgctgacac

SEQ ID NO: 677449 - DNA, 75 bp, synthetic construct
  source 1..75: mol_type = other DNA
aaaaagaatatctgcgcgaaacgatttctgtaatcgagcaagttattttcgccaggctatcgggggacgaggccg

SEQ ID NO: 677450 - DNA, 75 bp, synthetic construct
  source 1..75: mol_type = other DNA
cacaacgtggggcattcactggctatgcaaggggtcagcgccgaggaaattgcgcatattctgggacatagctcc

SEQ ID NO: 677451 - DNA, 75 bp, synthetic construct
  source 1..75: mol_type = other DNA
agatcgcagacctggtggtcattaaggacgactcagtggcagacggtgcaatggcgaatatgctgcgggcgagag

SEQ ID NO: 677452 - DNA, 75 bp, synthetic construct
  source 1..75: mol_type = other DNA
cggtggggtagtaccgcgaaaagtaggtacgttgtggggcgaatatggtaatttaaaaacgtatgggaacgcttt

SEQ ID NO: 677453 - DNA, 75 bp, synthetic construct
  source 1..75: mol_type = other DNA
aagatcgctgatctggtggtcattaaggacgactcagtggcagatggtgtaatggcgaatatgctgcgggcgagg

SEQ ID NO: 677454 - DNA, 75 bp, synthetic construct
  source 1..75: mol_type = other DNA
cgctggtagtgcctgataagttgccgcgtgaatacagaaacggttggcctcttgcgtatagtgattatgctgaag

SEQ ID NO: 677455 - DNA, 75 bp, synthetic construct
  source 1..75: mol_type = other DNA
cgccgatgtcaggacagcgaagatcgctgaactggaggtcatccgggataacgcggtggcagacggttcgacggc

SEQ ID NO: 677456 - DNA, 75 bp, synthetic construct
  source 1..75: mol_type = other DNA
ttaatgtgacgcttctcgaagagggacgggcggcggcgcgagataacatcaacgtttgcgcaattctgaccagcc

SEQ ID NO: 677457 - DNA, 75 bp, synthetic construct
  source 1..75: mol_type = other DNA
ctgtttgaactggcagcaacctactgggttgccatcgctcgcggtcacatctttcatgatggtaataaacgtacc

SEQ ID NO: 677458 - DNA, 75 bp, synthetic construct
  source 1..75: mol_type = other DNA
ttttaattatcctgatactatttatcattcacctgacaaaaataaactggagggaatgtatgatatatataatga

SEQ ID NO: 677459 - DNA, 75 bp, synthetic construct
  source 1..75: mol_type = other DNA
gcaggcgggtaaatactacggcggcgccgtttccgcgccggtctttggtgccatcatgggcggcgtattgcgtac

SEQ ID NO: 677460 - DNA, 75 bp, synthetic construct
  source 1..75: mol_type = other DNA
gcatgacgctatctatgacaccaactacagcgcctacgcctacgcctacgcctacgcctacgcctacgcctacgc

SEQ ID NO: 677461 - DNA, 75 bp, synthetic construct
  source 1..75: mol_type = other DNA
ccattgatgaagaactggaagaactccttaactatcgctggggtaacggtgaaaaagtagaacaggaagaacaga

SEQ ID NO: 677462 - DNA, 75 bp, synthetic construct
  source 1..75: mol_type = other DNA
cgaaaacaaagacgtcattctgcgcgcgggtggtattagctcgctggaggccgagctggagcgtcgttttgaatg

SEQ ID NO: 677463 - DNA, 75 bp, synthetic construct
  source 1..75: mol_type = other DNA
aatccttggtagatatacgatgtctctaggatggagtaagtactggggagttttgggggtacttcctgtaacaaa

SEQ ID NO: 677464 - DNA, 75 bp, synthetic construct
  source 1..75: mol_type = other DNA
atgtctaacactagttctgattttgagatggctggcgttttattaggaaaagaagtgcgtaaacgtaaaacacct

SEQ ID NO: 677465 - DNA, 75 bp, synthetic construct
  source 1..75: mol_type = other DNA
aaaagatactcaaaaataaaaaagttcctgaaaacatatgtcgtatattcagagaagatttaaaaaaagccagta

SEQ ID NO: 677466 - DNA, 75 bp, synthetic construct
  source 1..75: mol_type = other DNA
agtttgtgaaagaagaacttagatactacatatcttttgaatccaattttgaagactactatatgcctctgatta

SEQ ID NO: 677467 - DNA, 75 bp, synthetic construct
  source 1..75: mol_type = other DNA
gctgtttacttcttcctttccctgttgcgatgtttgtcggttgcctgtttctaggcattgatgatcgttttactg

SEQ ID NO: 677468 - DNA, 75 bp, synthetic construct
  source 1..75: mol_type = other DNA
agaatgcagaaacattttggaacgttgtggatgattttctacaaaaggaaaccgaacatcccggtgctgatatac

SEQ ID NO: 677469 - DNA, 75 bp, synthetic construct
  source 1..75: mol_type = other DNA
ggactattgatttaaacgacttgattattgctaatacagaagctggatccgttaaatactatcaatgcaaaactg

SEQ ID NO: 677470 - DNA, 75 bp, synthetic construct
  source 1..75: mol_type = other DNA
accggtaatgccgcaaccgcaacgaaactacagactgcacgcactatcaacggtgttatgtttgatggttctgcg

SEQ ID NO: 677471 - DNA, 75 bp, synthetic construct
  source 1..75: mol_type = other DNA
catacgatgccggttatagcggaaccagtatgacgggcgggaaaggcgcttcagggatttgtattatcgaggagt

SEQ ID NO: 677472 - DNA, 75 bp, synthetic construct
  source 1..75: mol_type = other DNA
acggtacggtggagatctctgttaccagccagacggcggggatcagtgcggtcacagccagcatcaacagcagca

SEQ ID NO: 677473 - DNA, 75 bp, synthetic construct
  source 1..75: mol_type = other DNA
aaagatcgctattgttcagcagagctttgaaccgggaatgacggtggatttgcccctatatccagacgagcctgt

SEQ ID NO: 677474 - DNA, 75 bp, synthetic construct
  source 1..75: mol_type = other DNA
gccagacaaacttggttttacatcaatgataaatttgttaaagaaactcattcaacattgccagatgatattaga

SEQ ID NO: 677475 - DNA, 75 bp, synthetic construct
  source 1..75: mol_type = other DNA
tagattataatactatgaacaagcttaagcagaagtgtttaggtgttaataagcaatgttattttgtattatatc

SEQ ID NO: 677476 - DNA, 75 bp, synthetic construct
  source 1..75: mol_type = other DNA
agaacttcattgttgatcgcgaaagggtggagaagaaagacttaattaacgcccccttcacggtcatccatccaa

SEQ ID NO: 677477 - DNA, 75 bp, synthetic construct
  source 1..75: mol_type = other DNA
tcgcatcgctttgcgtgagcaagcattggcagctttcaaagagcacttgccgaatgaaccgcgctggccaaatgt

SEQ ID NO: 677478 - DNA, 75 bp, synthetic construct
  source 1..75: mol_type = other DNA
ctggcaggaataccccaaacgtgctggtggtaattccaagtcggcagccttcaaagcctggaaagcccgaatcag

SEQ ID NO: 677479 - DNA, 75 bp, synthetic construct
  source 1..75: mol_type = other DNA
ctgaagcagggcaataccgcgaacaagtttgtggaaacccagcaaactgtggtgtggaaacaccgcaaacagtga

SEQ ID NO: 677480 - DNA, 75 bp, synthetic construct
  source 1..75: mol_type = other DNA
ggtggaagttggtcgaagtggatgttaattcaagagcagtttgaattacagttggcacaacgagagattaaagaa

SEQ ID NO: 677481 - DNA, 75 bp, synthetic construct
  source 1..75: mol_type = other DNA
gcttaataatggtgaagaaagagcaattgccgtggagcgaattaaagaaagcttacaattcgaacatggcatctc

SEQ ID NO: 677482 - DNA, 75 bp, synthetic construct
  source 1..75: mol_type = other DNA
ctaaactttaacaacacctctgccaaaaacgagcaaaaaaaaacactggatgtaaatctgaaagacatctcagga

SEQ ID NO: 677483 - DNA, 75 bp, synthetic construct
  source 1..75: mol_type = other DNA
caattcaacttgatgtttttaaagaaaaaaataaccgtggttttgaagggcttgggtgggaacaaagctcacata

SEQ ID NO: 677484 - DNA, 75 bp, synthetic construct
  source 1..75: mol_type = other DNA
cggaccgtatcgcgatgattaacccggagaacggcaacaccacgccgctgtttgtggcgcaggggaatcagctgt

SEQ ID NO: 677485 - DNA, 75 bp, synthetic construct
  source 1..75: mol_type = other DNA
tccccggtcgtcgatgagaaacccgcaccggtgccgacagcacccgcagctccacgtcaggtgaaaggctgttac

SEQ ID NO: 677486 - DNA, 75 bp, synthetic construct
  source 1..75: mol_type = other DNA
cgcagtggagtagcaacgcgcaggatcgctggcatctcggcgtcatggcaggctatgccaatcagcacagtaata

SEQ ID NO: 677487 - DNA, 75 bp, synthetic construct
  source 1..75: mol_type = other DNA
atgaaaaagatagttttcttttcaattccattgtttggacatgttaaacgtataggaagaataaacgcccttttc

SEQ ID NO: 677488 - DNA, 75 bp, synthetic construct
  source 1..75: mol_type = other DNA
aagaacaagaaaagttatttcgcttactgaactctgggaaatgcagtatcaaatgaaagaaacattcacgcaata

SEQ ID NO: 677489 - DNA, 75 bp, synthetic construct
  source 1..75: mol_type = other DNA
tattattttgcgccagatacgctgaattgggaaagtctggaagttggatattctgagtttcttcagtgggcatta

SEQ ID NO: 677490 - DNA, 75 bp, synthetic construct
  source 1..75: mol_type = other DNA
gagatgcaggcacgtttcctgaggatgcgttttttctcgatcctcgacacatcgatgagctcatttctgagtggg

SEQ ID NO: 677491 - DNA, 75 bp, synthetic construct
  source 1..75: mol_type = other DNA
gctgtgaagggatataaggacggaaaaataaacctttttgattttgctttgcttaatattttattatgtacaggt

SEQ ID NO: 677492 - DNA, 75 bp, synthetic construct
  source 1..75: mol_type = other DNA
agaaatcacgcagtctgatctgaaaaattattattctctaacgtataatgaaaattatacgtatgtagagagcat

SEQ ID NO: 677493 - DNA, 75 bp, synthetic construct
  source 1..75: mol_type = other DNA
tttatgacgatcagccttttgaccggcaaattgtgatcccggcagtggctttcagcggcgctaaacatgagagag

SEQ ID NO: 677494 - DNA, 75 bp, synthetic construct
  source 1..75: mol_type = other DNA
tttaagaaatgcgacctgacaaatatgaattgcactggcgcaattcttgataatgcgatgatatatggtaaagaa

SEQ ID NO: 677495 - DNA, 75 bp, synthetic construct
  source 1..75: mol_type = other DNA
tttggaataaaattgcatcctcatttccagagccatacaacagtaccatcacacataacattattttttatatag

SEQ ID NO: 677496 - DNA, 75 bp, synthetic construct
  source 1..75: mol_type = other DNA
cgtacagtcacaggaatttactgttcgtctgtacgaaaacggagccacggttcagggctgttctgcttttcaggc

SEQ ID NO: 677497 - DNA, 75 bp, synthetic construct
  source 1..75: mol_type = other DNA
tttgaatggatattcagaatttcttggtgtcgatggcaacaggaccgaaggtattccatccttagaattcagaca

SEQ ID NO: 677498 - DNA, 75 bp, synthetic construct
  source 1..75: mol_type = other DNA
aagatctcaaccgcaaaatcaatatttttaccaccaactatgatggatgtctgtgccatacagctgatagccttc

SEQ ID NO: 677499 - DNA, 75 bp, synthetic construct
  source 1..75: mol_type = other DNA
ttattcaacactattaatgaaacaattaagcataattttgatgatacttttcggcatcagtcagagaatatgagc

SEQ ID NO: 677500 - DNA, 75 bp, synthetic construct
  source 1..75: mol_type = other DNA
ctccagtagatggcgatggatattgtctgttaagagccatactggttttaaaacaacatgattattcatgggcgc

SEQ ID NO: 677501 - DNA, 75 bp, synthetic construct
  source 1..75: mol_type = other DNA
cctcctgaactttttgctcaggcttataagttaaaaaataaggaaatgaatgcgcaactcgactatttaaatcgt

SEQ ID NO: 677502 - DNA, 75 bp, synthetic construct
  source 1..75: mol_type = other DNA
ggctgcgctggtactggcgtaacccttccgatctttgcccgtggcacatggatgaaaagccaaatcagcgcccaa

SEQ ID NO: 677503 - DNA, 75 bp, synthetic construct
  source 1..75: mol_type = other DNA
ttgagcttcacgagacgccggaaacccggcgttaccgcatctgtggggtcgttcagggcgttggatttcgtccct

SEQ ID NO: 677504 - DNA, 75 bp, synthetic construct
  source 1..75: mol_type = other DNA
ccatactggttttaaaagaacatgagtattcatgggcgctgggcagccataagacgcaaaagcaagtatacgaag

SEQ ID NO: 677505 - DNA, 75 bp, synthetic construct
  source 1..75: mol_type = other DNA
tatcattatttatgagaacattgcgtactaatgatacacaaatttattcaggggtttcaggaggtattacatata

SEQ ID NO: 677506 - DNA, 75 bp, synthetic construct
  source 1..75: mol_type = other DNA
ctgtgatctcttttgacgacgcaatcaaaattggtcgtatcgtgcgtgagcaggtacaggtcgggtcattacatt

SEQ ID NO: 677507 - DNA, 75 bp, synthetic construct
  source 1..75: mol_type = other DNA
tacccaccagctatgaagtaaatgctatttcgttcgatcaatataacagagtcgcaacggtctacttttcttatt

SEQ ID NO: 677508 - DNA, 75 bp, synthetic construct
  source 1..75: mol_type = other DNA
ttttttgcattgcagaatggacatgcagatagtattcgtatgttcggaagtctgcttaataagaaaatgcttagt

SEQ ID NO: 677509 - DNA, 75 bp, synthetic construct
  source 1..75: mol_type = other DNA
gaacttgcagaatatttctataaactagataacaatatgctagaactggaagatgagatagaaagtcacaacgaa

SEQ ID NO: 677510 - DNA, 75 bp, synthetic construct
  source 1..75: mol_type = other DNA
taatgcacgaataataaaattatataatgctattcttttgagtaaaattgatagtctcagattatatgttgatgc

SEQ ID NO: 677511 - DNA, 75 bp, synthetic construct
  source 1..75: mol_type = other DNA
gaagactttaacagggctataaatataatccttcgggatgaagaaatatcaaacgcgttaaatcagaatgttaaa

SEQ ID NO: 677512 - DNA, 75 bp, synthetic construct
  source 1..75: mol_type = other DNA
atgcatatgggggtacatttggggtatgtgctgttcggtcttatggatatacccccaatgaaacttaacgcccgt

SEQ ID NO: 677513 - DNA, 75 bp, synthetic construct
  source 1..75: mol_type = other DNA
ggctttttgcttacttttcattcaggggggggagggatgattactggaagtatatgcataatattcatacatggt

SEQ ID NO: 677514 - DNA, 75 bp, synthetic construct
  source 1..75: mol_type = other DNA
gagttacgttgacggacgaaccctcaccaacggcaccaccacctggcaggtgcgggtggtcgatctggcgggcaa

SEQ ID NO: 677515 - DNA, 75 bp, synthetic construct
  source 1..75: mol_type = other DNA
tcacccagagcggcagcgacaccatcgtgcagatcgaccgcgacggcacgggcggcacttttgcgacaactaacg

SEQ ID NO: 677516 - DNA, 75 bp, synthetic construct
  source 1..75: mol_type = other DNA
ccaatcgtacttaaggaagaaacagaaagactcattcatgaagcagccgtgcgcttgactggagctggtacgact

SEQ ID NO: 677517 - DNA, 75 bp, synthetic construct
  source 1..75: mol_type = other DNA
gttatcaatgacatccaatagaatttcaagtgatatattggaaactcggttggagaaaatcaccaatagactgtc

SEQ ID NO: 677518 - DNA, 75 bp, synthetic construct
  source 1..75: mol_type = other DNA
tagttatagaaatgtgtataatcgattgttgttttatgtatacgatatggtggaaaatgagtaatactacagatt

SEQ ID NO: 677519 - DNA, 75 bp, synthetic construct
  source 1..75: mol_type = other DNA
caaaattaaatgaggtttttgcttctcaggtggatgatttgtttactgaccttatcgataatataaatgccgcga

SEQ ID NO: 677520 - DNA, 75 bp, synthetic construct
  source 1..75: mol_type = other DNA
catgtgaaaaattcacctgttatgctctactttttctcggtgtcttaggggccctacacattgctgcctttttgc

SEQ ID NO: 677521 - DNA, 75 bp, synthetic construct
  source 1..75: mol_type = other DNA
tatcaagcactgattgcgtcaaccggacaggcgcaggttgataaagagcaggtaaaaaagccgcccggcagaata

SEQ ID NO: 677522 - DNA, 75 bp, synthetic construct
  source 1..75: mol_type = other DNA
gtacgtgaacaaagccgggcaggtggtgcatggcgaccagcttatcttctttgcccagttgaaagatcaggtgcc

SEQ ID NO: 677523 - DNA, 75 bp, synthetic construct
  source 1..75: mol_type = other DNA
tattaagaaaaacaatttctaactcaactttggatagtatgcttttagatgcattagaaagcagtcctaaagaac

SEQ ID NO: 677524 - DNA, 75 bp, synthetic construct
  source 1..75: mol_type = other DNA
ttcattatcatcaattatattttctttaatttgggtggctttagtttggttaaaaaatatgttttttggtttctt

SEQ ID NO: 677525 - DNA, 75 bp, synthetic construct
  source 1..75: mol_type = other DNA
gtgtccgggtatctgttcaaccgcaaagctaacggcatcgatgaaatctggtacatctgcccggaccgggcgacg

SEQ ID NO: 677526 - DNA, 75 bp, synthetic construct
  source 1..75: mol_type = other DNA
taacaacgcagggattagagcaggactttggccttcagcaaggcgcgctgactccacaaactacagagggcaggg

SEQ ID NO: 677527 - DNA, 75 bp, synthetic construct
  source 1..75: mol_type = other DNA
tggcggtaaactcggaattggcgatgggacatatcacccagcgccacgagtaacaacgcagggattagagcagga

SEQ ID NO: 677528 - DNA, 75 bp, synthetic construct
  source 1..75: mol_type = other DNA
ccgggcacctgataaatcttgtagctataagttgaatattttatcggtaaatgaaggacaagagggggcggcctc

SEQ ID NO: 677529 - DNA, 75 bp, synthetic construct
  source 1..75: mol_type = other DNA
gacccgcatcgaagcctgcatgtcgcgtctgcgcattgacgtgacggataagtcgctggtggacaaagcgctgct

SEQ ID NO: 677530 - DNA, 75 bp, synthetic construct
  source 1..75: mol_type = other DNA
cctgcatgccggaacaggtaacgtgacctatgtggcgagcgatagcaaagacacggacttgttcttgtcactgct

SEQ ID NO: 677531 - DNA, 75 bp, synthetic construct
  source 1..75: mol_type = other DNA
agccagtggagacacagcaaccagtagcacagcaacaaccacagcaaagtggatttatgtctgatcttggtgaag

SEQ ID NO: 677532 - DNA, 75 bp, synthetic construct
  source 1..75: mol_type = other DNA
aggttatcagttgccgccgggccagctggcgccggtaccggccggtgtcagggacgcaggagcggggcttaaaaa

SEQ ID NO: 677533 - DNA, 75 bp, synthetic construct
  source 1..75: mol_type = other DNA
ggggagcttaactacagagcggcttaatgatttgaagtgtaataacatcattgagttacctggccacgttgataa

SEQ ID NO: 677534 - DNA, 75 bp, synthetic construct
  source 1..75: mol_type = other DNA
atttttgtcgccagatttttgcaagaaaagggagtttatgaatttattgaggctgcaaaaatagtcaaaaagaag

SEQ ID NO: 677535 - DNA, 75 bp, synthetic construct
  source 1..75: mol_type = other DNA
gttcgccattctgcgtccaggatcggatgctcgtaaaagccgccgccatattcgcgcgctgcgccgggattttgt

SEQ ID NO: 677536 - DNA, 75 bp, synthetic construct
  source 1..75: mol_type = other DNA
caactgatggtcgaacgcctcaatgccctgactgaaaaccagcgccaggtggctgatgcacgaatcgcgatcgtc

SEQ ID NO: 677537 - DNA, 75 bp, synthetic construct
  source 1..75: mol_type = other DNA
ctggcacccgtaccggcttctccgtcaatcacggccccggtggcgcaaccggccaggggaggcttcctgaaaaaa

SEQ ID NO: 677538 - DNA, 75 bp, synthetic construct
  source 1..75: mol_type = other DNA
atcgggtattgaaagataaagaggttgggggattgtgggctgctatatcgtccggcgatgtttttctgccttact

SEQ ID NO: 677539 - DNA, 75 bp, synthetic construct
  source 1..75: mol_type = other DNA
cattagctgggtgtttacttaccgactcgacgggcagaagctgcatcggctgactctggggcgctaccctgatat

SEQ ID NO: 677540 - DNA, 75 bp, synthetic construct
  source 1..75: mol_type = other DNA
tggaccgaatgggatatggatgcgtgggtgtggactgttccgaaagcgcatagtaaaggcggtgaaaaaattgta

SEQ ID NO: 677541 - DNA, 75 bp, synthetic construct
  source 1..75: mol_type = other DNA
aaatggaacggaacatcgtttgttgaaacccaccgttccaaccctaatacggttgagctcggggttccatatcct

SEQ ID NO: 677542 - DNA, 75 bp, synthetic construct
  source 1..75: mol_type = other DNA
aaactcaccgatcaaacccaaatactgttgaacttggtatcccttatccgtcaaacgaaattgttgagaaaatgg

SEQ ID NO: 677543 - DNA, 75 bp, synthetic construct
  source 1..75: mol_type = other DNA
gttggtaaaaagcaggcgaaaaaagatcgtgtactgaaagataaagaggttgggggattgtgggctgctatatcg

SEQ ID NO: 677544 - DNA, 75 bp, synthetic construct
  source 1..75: mol_type = other DNA
ctgaacgctgttgccgtggataaacgcgtaaaagcggtcgttgccagcaccatgtatgatatgagccgcgtgatg

SEQ ID NO: 677545 - DNA, 75 bp, synthetic construct
  source 1..75: mol_type = other DNA
acgatgcgtcagaccgtatcacccggcgcacggtgaacggcgacccggcggaacagtggcagtatgatgaacacg

SEQ ID NO: 677546 - DNA, 75 bp, synthetic construct
  source 1..75: mol_type = other DNA
tacaggtgaagtcgttggttgtgagacaaatgaatcaggaatatcggcagtggatttgcccctatatttccagac

SEQ ID NO: 677547 - DNA, 75 bp, synthetic construct
  source 1..75: mol_type = other DNA
gccgcaggcgacctgacagcaacggtatcaccggacggtaaacgcagcaccatcgaatatgataaacgcgggcgt

SEQ ID NO: 677548 - DNA, 75 bp, synthetic construct
  source 1..75: mol_type = other DNA
cgggagcgtgacctgacggggtggatgtcgctgtcgcgtaaaccggaggagacatggtacggctgggacggcgac

SEQ ID NO: 677549 - DNA, 75 bp, synthetic construct
  source 1..75: mol_type = other DNA
actgtgaccaccggggactgccgcaggcgctcatcagcccggaaggggaaacggcgtggtgcggggagtatgacg

SEQ ID NO: 677550 - DNA, 75 bp, synthetic construct
  source 1..75: mol_type = other DNA
ggcacaccattatgcggggaggccggagagccgctaccggtatgatgataccggtcgggtgacggagcaggtcaa

SEQ ID NO: 677551 - DNA, 75 bp, synthetic construct
  source 1..75: mol_type = other DNA
aacgtaaatacccgcttgcgcgatctcagtcgttcactgctgccgaatgatgcgaaaggctatatgtttcgcgga

SEQ ID NO: 677552 - DNA, 75 bp, synthetic construct
  source 1..75: mol_type = other DNA
gcaaccacccccccctcaaatcacatgattcagatgatctcctgttcaaaaaactattctccccttcgaaattaa

SEQ ID NO: 677553 - DNA, 75 bp, synthetic construct
  source 1..75: mol_type = other DNA
aactcccccttaaaccagctggtccggataattcagataatctcctgttcgaaaagctatcctccccgtcaaaat

SEQ ID NO: 677554 - DNA, 75 bp, synthetic construct
  source 1..75: mol_type = other DNA
aggagtcggggctgtactataaccgtcaccggcactacgatccgttgcaggggcggtatatcaccccggacccga

SEQ ID NO: 677555 - DNA, 75 bp, synthetic construct
  source 1..75: mol_type = other DNA
catggtctatggttaccggcctgtacgagctttctgaatgggatcgaaacatcactcagggttacgctgaagttg

SEQ ID NO: 677556 - DNA, 75 bp, synthetic construct
  source 1..75: mol_type = other DNA
ccagaatacgctgcaaaaatgggacgtggtgatatttcaggggaattcaacagagcctttttccgctaaaaaaga

SEQ ID NO: 677557 - DNA, 75 bp, synthetic construct
  source 1..75: mol_type = other DNA
agtggtatgaccgcttagaacttcttgcgggtaatcatcaaaatgttgttctgttacctgtagcgaatagagatt

SEQ ID NO: 677558 - DNA, 75 bp, synthetic construct
  source 1..75: mol_type = other DNA
ggggtgcattatgacaagcgaaccatttggcctgcagcgtttgaaccaaagaaacgcggggctgttttgcttgat

SEQ ID NO: 677559 - DNA, 75 bp, synthetic construct
  source 1..75: mol_type = other DNA
cagtagcgcagacaattttccggcactgacggtcagccattttattaccgccaatctgctcccggtgatgctggg

SEQ ID NO: 677560 - DNA, 75 bp, synthetic construct
  source 1..75: mol_type = other DNA
gtatcgccaatttgtttgtgattccgttcgccattgccattcgccattttgcccccgttactttattcgtacccc

SEQ ID NO: 677561 - DNA, 75 bp, synthetic construct
  source 1..75: mol_type = other DNA
ggtatattacacaagaccccattgggctggcggggggatggaacctgtataattacccactgaatccgataataa

SEQ ID NO: 677562 - DNA, 75 bp, synthetic construct
  source 1..75: mol_type = other DNA
ctttttcatcaagcttcgattctgatcgtttctatttttattatttctagatgtagcattagaattgtagttcct

SEQ ID NO: 677563 - DNA, 75 bp, synthetic construct
  source 1..75: mol_type = other DNA
aatatcagtttcatcacatcctcccttattggggccgacctctcgtctgccgccctgatgtgtgcctggctaaat

SEQ ID NO: 677564 - DNA, 75 bp, synthetic construct
  source 1..75: mol_type = other DNA
ttcttctgtcaaaagttagtgaggatcctcggcgcagcggttgacggcgatattccggcgaatctggtgctctcc

SEQ ID NO: 677565 - DNA, 75 bp, synthetic construct
  source 1..75: mol_type = other DNA
gctggatgatgcattggacgttctggacgccatgctggccgttatcatccgccacgccagaaggatgagccgggc

SEQ ID NO: 677566 - DNA, 75 bp, synthetic construct
  source 1..75: mol_type = other DNA
gcctggttacccgccttctatattgagattggtgccagcgcgcagtacagcggttccttgctggcattgatgacg

SEQ ID NO: 677567 - DNA, 75 bp, synthetic construct
  source 1..75: mol_type = other DNA
ggctgattaacgcacttctggtggcctgcggtaatctggcaggtattgcctgtttcagtttgttaatctggtttt

SEQ ID NO: 677568 - DNA, 75 bp, synthetic construct
  source 1..75: mol_type = other DNA
gcagcgatttcaaagatgtgttcctcgcgcaaattcgaccaaaaggtaatgcacgtccttctgtggtggtggccg

SEQ ID NO: 677569 - DNA, 75 bp, synthetic construct
  source 1..75: mol_type = other DNA
cagtaaacctgttatccagaaattacagatacactgtagctaacggcataggttataataccagctatggcattt

SEQ ID NO: 677570 - DNA, 75 bp, synthetic construct
  source 1..75: mol_type = other DNA
tgattggttattgatttacaaaatttcagataccaaacttcgttttgaacgtacaggcacacattcagatctgtt

SEQ ID NO: 677571 - DNA, 75 bp, synthetic construct
  source 1..75: mol_type = other DNA
ggtaaactggtgccgcaggatccgaatgatgaaccggcgtcggagctgcttagaggaatgaaaaagcagcaagaa

SEQ ID NO: 677572 - DNA, 75 bp, synthetic construct
  source 1..75: mol_type = other DNA
atgcacgatttacgcgcattcctcaaggcgggaatggagaaagcgagtggctacggcggtaaagaattttaccgc

SEQ ID NO: 677573 - DNA, 75 bp, synthetic construct
  source 1..75: mol_type = other DNA
cgttaccgccagggcaatcgtagccaacgacagtacctgaatatgcaaaatggtgctaattttggcccctggtga

SEQ ID NO: 677574 - DNA, 75 bp, synthetic construct
  source 1..75: mol_type = other DNA
cctgaactttatctgccacccgaatctggtgaaccagctgcgtgtgctggcaggcctgattcagttcaagcttta

SEQ ID NO: 677575 - DNA, 75 bp, synthetic construct
  source 1..75: mol_type = other DNA
tatgaagccacgcttcatgccggggctgtaccgggctcttttgaaaccgcagcagcttacaccgttgtttacgag

SEQ ID NO: 677576 - DNA, 75 bp, synthetic construct
  source 1..75: mol_type = other DNA
ttgcaaataaacactcagaaattaagagctaagattgaaaagcacagtgtaattgatagagaactatcatggttg

SEQ ID NO: 677577 - DNA, 75 bp, synthetic construct
  source 1..75: mol_type = other DNA
gtctggggctgaaggcctcttatgctctgaccggtcaggcaagtccgacgcccggtgctgtccagtcagtgataa

SEQ ID NO: 677578 - DNA, 75 bp, synthetic construct
  source 1..75: mol_type = other DNA
aaacattgggttcttatgatttttcatcacatttaattgagatttcaaacgatgaattaaatataagtttaccgc

SEQ ID NO: 677579 - DNA, 75 bp, synthetic construct
  source 1..75: mol_type = other DNA
acagcactaataaattaaattataaaaatattaaagcatcattacaatatgatgacgatatgggtgtgtatatca

SEQ ID NO: 677580 - DNA, 75 bp, synthetic construct
  source 1..75: mol_type = other DNA
aggaacgggatgaggcgctggcgagcgtggccaccctggaaagcgagctggcggtgctgcgcgaggtggtggccg

SEQ ID NO: 677581 - DNA, 75 bp, synthetic construct
  source 1..75: mol_type = other DNA
gcagctgctgaccggccagctggggctgctgtggcaggcggccgtgaaacaggctgaagccggggccctggcggc

SEQ ID NO: 677582 - DNA, 75 bp, synthetic construct
  source 1..75: mol_type = other DNA
ccatcgacgagcgcgatggcagaattacacaattccgtattcaacagtgccgattttacaacgcgaagggcgttt

SEQ ID NO: 677583 - DNA, 75 bp, synthetic construct
  source 1..75: mol_type = other DNA
gagcgggagaaagcgcagcgccgcagcctggcggagaagctgcagcaggaagggagcgaggacgggcacggcgtg

SEQ ID NO: 677584 - DNA, 75 bp, synthetic construct
  source 1..75: mol_type = other DNA
accctcgcaccggacctggacatccgcatcccgtatgccaccgacccggcgggaaaccgcctgccggacccggag

SEQ ID NO: 677585 - DNA, 75 bp, synthetic construct
  source 1..75: mol_type = other DNA
atcacatattctgagaccaagtctttacctacatcgggagtcagcaattcagtaggtgtaacggttggcggcgga

SEQ ID NO: 677586 - DNA, 75 bp, synthetic construct
  source 1..75: mol_type = other DNA
ccaggtgtgcagtgctgtgtcacatgtcaagagattgccgaactgaaaggcaaacattacatcggaggttcagta

SEQ ID NO: 677587 - DNA, 75 bp, synthetic construct
  source 1..75: mol_type = other DNA
ccgcgaaaaaactgcctgacggggtgaatgaaaccgtctggcagatgctgacggaggccggcagaaccgaaggct

SEQ ID NO: 677588 - DNA, 75 bp, synthetic construct
  source 1..75: mol_type = other DNA
acgcaggcgcagcgggcggaagaggcccgtaaaccgcacaccgcttcgttatcttcccctgacagtccccgccct

SEQ ID NO: 677589 - DNA, 75 bp, synthetic construct
  source 1..75: mol_type = other DNA
atccagacggtataccagccggggagcttcacgccgctcatcagaatcgaaacagagaatggcgaacaggcgaag

SEQ ID NO: 677590 - DNA, 75 bp, synthetic construct
  source 1..75: mol_type = other DNA
gcagcatggggtatgacgctgccgggcgcatcaccgtgctgaccaacgagaacggcagccagtccacgttccggt

SEQ ID NO: 677591 - DNA, 75 bp, synthetic construct
  source 1..75: mol_type = other DNA
tcatccggtatgcttatgataatccgcacagtgaattaccggccacgacaacagatgcgacgggcagcacccggc

SEQ ID NO: 677592 - DNA, 75 bp, synthetic construct
  source 1..75: mol_type = other DNA
ggtgacactgttaaaatattctgggctgatggtctgtgtcttttcaccaagcgccaggaggaaggcaatttatct

SEQ ID NO: 677593 - DNA, 75 bp, synthetic construct
  source 1..75: mol_type = other DNA
gtgggatgatacctttagtcaagagaagactaaatgtttacctacgacacctgaaaacatcaggatggttgtggc

SEQ ID NO: 677594 - DNA, 75 bp, synthetic construct
  source 1..75: mol_type = other DNA
gtttcctcttctcaggttttccccgacacgctgcccgccggtacagagtacggtgccgataacggtatccggctg

SEQ ID NO: 677595 - DNA, 75 bp, synthetic construct
  source 1..75: mol_type = other DNA
ccagggcgacattatcagttttacccttaatagcgaggttatccgtatggataactattgcgtcatgtttgaaat

SEQ ID NO: 677596 - DNA, 75 bp, synthetic construct
  source 1..75: mol_type = other DNA
gtaaagccagcaataaggaaagaagttatcgaagccatgtacggattcagagcgtcttctttcaatcgcatgatt

SEQ ID NO: 677597 - DNA, 75 bp, synthetic construct
  source 1..75: mol_type = other DNA
tgccattgatgccgtgcttgtgaataaaaactattttgaagagtacaaaatcaaaagtgagggagagaacatttt

SEQ ID NO: 677598 - DNA, 75 bp, synthetic construct
  source 1..75: mol_type = other DNA
atgcgtctaactgtattagatgacgatcccggcaggaagattaatctcggtgtagagcgatacgctgtttttctc

SEQ ID NO: 677599 - DNA, 75 bp, synthetic construct
  source 1..75: mol_type = other DNA
gttaaacttggtgaagatatttatttatggttaaaaatggcaatgctaggacaggttgcatattcagggtctccg

SEQ ID NO: 677600 - DNA, 75 bp, synthetic construct
  source 1..75: mol_type = other DNA
gaaaatgccgaagaagaaaaagaacggcaaatagcctcattactttcatgggaattagatgttatttataaagtc

SEQ ID NO: 677601 - DNA, 75 bp, synthetic construct
  source 1..75: mol_type = other DNA
ataggaattccggtagaaattgtcgagatggggtttcgggtgctgaaaaaaatcctctatccggtaatcttctct

SEQ ID NO: 677602 - DNA, 75 bp, synthetic construct
  source 1..75: mol_type = other DNA
gataaaaatatagatctattatatgttggacgttttgatatagaaaaacgtccagatagatttattaatattgtt

SEQ ID NO: 677603 - DNA, 75 bp, synthetic construct
  source 1..75: mol_type = other DNA
gtgacgtggcgttatttcgataataagctgggctacgatggctttggcgatcaaatgatttatatgcttggttat

SEQ ID NO: 677604 - DNA, 75 bp, synthetic construct
  source 1..75: mol_type = other DNA
cattaataaaaaaggggtactgaaatcagggaaggctgagatcaacaatcttacgattgccagtatcttagggtt

SEQ ID NO: 677605 - DNA, 75 bp, synthetic construct
  source 1..75: mol_type = other DNA
tcgagaagcaggcgcactgctcgtcggatggctggaattgggggacagcgtagtgggtcgaccgtcttacataga

SEQ ID NO: 677606 - DNA, 75 bp, synthetic construct
  source 1..75: mol_type = other DNA
cggaaaatattatgatcaaattagaaaatatgtacatgaaaataatcttagtgattatataaatttagtcggttt

SEQ ID NO: 677607 - DNA, 75 bp, synthetic construct
  source 1..75: mol_type = other DNA
cgggcagtacaaaacagatggcatggagccgttacggtcaactgctggccttcacggactgctcggggtacacga

SEQ ID NO: 677608 - DNA, 75 bp, synthetic construct
  source 1..75: mol_type = other DNA
ataacgccagttttgaagaatggcatgaactgttaatggactatgtagagttaccgcggtggaagcatggcgtga

SEQ ID NO: 677609 - DNA, 75 bp, synthetic construct
  source 1..75: mol_type = other DNA
tggagccggaatacacaccggcgcgaaaagctcatctttatcactgcgaccaccggggactgccgctggcgctta

SEQ ID NO: 677610 - DNA, 75 bp, synthetic construct
  source 1..75: mol_type = other DNA
gaatagcatggatccattaggattatatgaatttaaatcaaaaaatatagatgatattggaatatttgcattggc

SEQ ID NO: 677611 - DNA, 75 bp, synthetic construct
  source 1..75: mol_type = other DNA
caggagccgcatccagacgatttatcagccggggagcttcacaccactcatcagagttgaaactgccaccggtga

SEQ ID NO: 677612 - DNA, 75 bp, synthetic construct
  source 1..75: mol_type = other DNA
tgctgagcttcaccgactgttccggttatgtaacccgctatgaccatgaccgttttggtcaggtgacggcggtgc

SEQ ID NO: 677613 - DNA, 75 bp, synthetic construct
  source 1..75: mol_type = other DNA
cgcaacggaggatgccaccggcagccggaaaaccatgacatggagccgttacggtcagttgctgaccgtcactga

SEQ ID NO: 677614 - DNA, 75 bp, synthetic construct
  source 1..75: mol_type = other DNA
ggagaccccgcatcacctgcaccagccataccgtctgccggggcagcagcatgatgaggaatcaggactgtacta

SEQ ID NO: 677615 - DNA, 75 bp, synthetic construct
  source 1..75: mol_type = other DNA
gtgctgttcatcgaaagcgttgacggcagcgatttcaaagatgtgttcctcgcgcaaattcgaccaaaaggtaat

SEQ ID NO: 677616 - DNA, 75 bp, synthetic construct
  source 1..75: mol_type = other DNA
gggcgaggaaagcgcgcagcaccttcagcagtcactccgtctgccgggacagcagtatgatgaggagtcggggct

SEQ ID NO: 677617 - DNA, 75 bp, synthetic construct
  source 1..75: mol_type = other DNA
tatggttatgacagtaaaggccgcctcgccagtgaacacctgacggtgcatcatccgcagacgaatgaactgctc

SEQ ID NO: 677618 - DNA, 75 bp, synthetic construct
  source 1..75: mol_type = other DNA
gcaggtcagttacagagtcagcacctgaacagcctggtgtatgaccgtgactacgggtggaatgacaacggcgac

SEQ ID NO: 677619 - DNA, 75 bp, synthetic construct
  source 1..75: mol_type = other DNA
ccgctcatccgggtcgagacagagaacggcgagcgggaaaaagcgcagcggcgcagcctggcagagacgctccag

SEQ ID NO: 677620 - DNA, 75 bp, synthetic construct
  source 1..75: mol_type = other DNA
ggatggcagggcatcggcgttttactataaccaccacagccagttaacgtcagccaccgggcctgacgggctgga

SEQ ID NO: 677621 - DNA, 75 bp, synthetic construct
  source 1..75: mol_type = other DNA
ctaccactacgacagccagcaccgtctggtgttctacacgcggatacagcacggtgagccccaggtggagagccg

SEQ ID NO: 677622 - DNA, 75 bp, synthetic construct
  source 1..75: mol_type = other DNA
ctaccactacgacagccagcaccgtctggtgttctacacgcggatacagcacggtgagccaccggtcgagagccg

SEQ ID NO: 677623 - DNA, 75 bp, synthetic construct
  source 1..75: mol_type = other DNA
cgcggcaccgtagcctggcggaggtgttgcaggaggacacgggtgtgacgctaccggcggagctggcggtgatgc

SEQ ID NO: 677624 - DNA, 75 bp, synthetic construct
  source 1..75: mol_type = other DNA
ggggaaacctgctgggagaggaaagcacgctgcacctgcaacagtcactccgtctgccggggcagcagtatgatg

SEQ ID NO: 677625 - DNA, 75 bp, synthetic construct
  source 1..75: mol_type = other DNA
ctaccactacgacagccagcaccgtctggtgttctacacgcggatacagcacggtgagccccgggtagagagccg

SEQ ID NO: 677626 - DNA, 75 bp, synthetic construct
  source 1..75: mol_type = other DNA
ctaccactacgacagccagcaccgtctggtgttctacacgcggatacagcacggtgagcccctggttgagagccg

SEQ ID NO: 677627 - DNA, 75 bp, synthetic construct
  source 1..75: mol_type = other DNA
ggccgcctgaccggtgagcgtcagacggtgcatcacccgcagacggaagcactgctctggcagcatgagaccaga

SEQ ID NO: 677628 - DNA, 75 bp, synthetic construct
  source 1..75: mol_type = other DNA
gcacacgcagggcgaagccgggctgaagcgggtggtgaaaaaggaacacgcggacggcagcgtcacgcagagtca

SEQ ID NO: 677629 - DNA, 75 bp, synthetic construct
  source 1..75: mol_type = other DNA
attcaggaaactgcccctgacggcgatatcacccgctaccgttatgataatccacacagtgacctcccctgcgca

SEQ ID NO: 677630 - DNA, 75 bp, synthetic construct
  source 1..75: mol_type = other DNA
gaacccggagacaggggagatgctgtgggagcatgagacggggcatgcgtacagcgaacaggggctggcgacccg

SEQ ID NO: 677631 - DNA, 75 bp, synthetic construct
  source 1..75: mol_type = other DNA
tgcgccgctggcgcgctacacgtacacggccagcggagaactgcgggcggtgtatgaccgcagcgggacgcaggt

SEQ ID NO: 677632 - DNA, 75 bp, synthetic construct
  source 1..75: mol_type = other DNA
ctgtacgacatgccgcacggcgtggcaaatgccgtcctgctgccgcacgtggcgcgctataacctgatcgctaat

SEQ ID NO: 677633 - DNA, 75 bp, synthetic construct
  source 1..75: mol_type = other DNA
ggcaactggagcaccatagtgcctgcttccgcagtaggtgcgctgggcgaagccagctacacggtgacggcgaac

SEQ ID NO: 677634 - DNA, 75 bp, synthetic construct
  source 1..75: mol_type = other DNA
tcacgctcaatggtcataactacagcgccaccaccgacgcggcgggcaactggaccttaaccgtgccggtgagcg

SEQ ID NO: 677635 - DNA, 75 bp, synthetic construct
  source 1..75: mol_type = other DNA
ttaacgccgccgaagcgggtgctgcgctgactatcactggcagcagcacggcggaagccgggcagacggtgaccg

SEQ ID NO: 677636 - DNA, 75 bp, synthetic construct
  source 1..75: mol_type = other DNA
taacaacgttacttacgccgcgacggtgttagccgacggcacatggaacctcggcgttccggcggcagacgtcag

SEQ ID NO: 677637 - DNA, 75 bp, synthetic construct
  source 1..75: mol_type = other DNA
ctacaccgccaccgtagcaggcgatggcagttggacaaccagcatacctgccgccgatctcgccgcattacgcga

SEQ ID NO: 677638 - DNA, 75 bp, synthetic construct
  source 1..75: mol_type = other DNA
tggtaggcgcactgaactggacctacagcgacagcgggctggtgagcggtgcctacacctacagcgcgcgagtgg

SEQ ID NO: 677639 - DNA, 75 bp, synthetic construct
  source 1..75: mol_type = other DNA
tctcaccattaacaccgtggcgggcgatgacatcatcaacgacgccgaacacgcccaggcgctggtgatttccgg

SEQ ID NO: 677640 - DNA, 75 bp, synthetic construct
  source 1..75: mol_type = other DNA
cggtcagcgtcagccatccgttcactgtcgatttaacggcggtggcgatcagcatcaacaccgttgccagcgacg

SEQ ID NO: 677641 - DNA, 75 bp, synthetic construct
  source 1..75: mol_type = other DNA
agcggcaccaacagtgccggaacaacctccaccattactcatccggttaccgtcgatctgacggcggtcgccatc

SEQ ID NO: 677642 - DNA, 75 bp, synthetic construct
  source 1..75: mol_type = other DNA
gaccatcaacaccattgccagcgataacatcatcaacgccagcgaagcggcggcgggcgtaacggtgtccggcac

SEQ ID NO: 677643 - DNA, 75 bp, synthetic construct
  source 1..75: mol_type = other DNA
agcacggcggaagccgggcagacggtgaccgtgacgcttaacggcgtcaattacagcggtaacgtgcaggcagac

SEQ ID NO: 677644 - DNA, 75 bp, synthetic construct
  source 1..75: mol_type = other DNA
tgcggggacggtcaatattgccgtctctggcactaacactgccggaaccacaaccagcattactcatccggtcac

SEQ ID NO: 677645 - DNA, 75 bp, synthetic construct
  source 1..75: mol_type = other DNA
acagcggttccgccagtcataacgtgcaggtcaataccgcgctgccgggcgtcaccattaacgtggtggcaacgg

SEQ ID NO: 677646 - DNA, 75 bp, synthetic construct
  source 1..75: mol_type = other DNA
aagaaaaagaagatacatactaccctgctaaccatgccttgattgccagtattgccgaaataaaatttgcacgac

SEQ ID NO: 677647 - DNA, 75 bp, synthetic construct
  source 1..75: mol_type = other DNA
aagaattaatggaaggctcgggaatacttctattaattttttcgatactactgttgttcttatccgtacgagtct

SEQ ID NO: 677648 - DNA, 75 bp, synthetic construct
  source 1..75: mol_type = other DNA
ttgttctttagttaaatcaaataatcgtgaaactgcgattatatacattaatgaaaatgacagaactaaattcac

SEQ ID NO: 677649 - DNA, 75 bp, synthetic construct
  source 1..75: mol_type = other DNA
cctccaacaccgaaccggtggtgcggttgaatgtggaatcgcgcggtgatgtaccgctgatggaagaaaagacaa

SEQ ID NO: 677650 - DNA, 75 bp, synthetic construct
  source 1..75: mol_type = other DNA
ggtgggtgtatagtttcaggaacagctttccacaccccattacttgttcaaatcgacagattagctgaggaaaat

SEQ ID NO: 677651 - DNA, 75 bp, synthetic construct
  source 1..75: mol_type = other DNA
gaaagtcatggtgatactagtgctgcatgcgcgctaatttcccgtaacgcagctcttctacggacggaatatccc

SEQ ID NO: 677652 - DNA, 75 bp, synthetic construct
  source 1..75: mol_type = other DNA
gcgtcgtctcggcgctggcgaacggcacggtgaccattaacgccagcgtcaccgatgccgccggaaacagcggca

SEQ ID NO: 677653 - DNA, 75 bp, synthetic construct
  source 1..75: mol_type = other DNA
gaacagcggcggtagcgccacggtgggcggggcggtgacggggtatctttcgctcaacgaaggttctggcgtcga

SEQ ID NO: 677654 - DNA, 75 bp, synthetic construct
  source 1..75: mol_type = other DNA
atccggtgagcgttacgcatccggtgactgtcgatctcactgcggtggcggtcagcatcaacgccattactgccg

SEQ ID NO: 677655 - DNA, 75 bp, synthetic construct
  source 1..75: mol_type = other DNA
ggccgttgcgcgtgtgtacgacgccgaagctgctgaaattatggcaacaaggcaattaagcacctcgccaactgt

SEQ ID NO: 677656 - DNA, 75 bp, synthetic construct
  source 1..75: mol_type = other DNA
tcctcgacgaacgtgggatcgtagtagagaaaaccggcccttataacctgctgtttctctttagtattggtatcg

SEQ ID NO: 677657 - DNA, 75 bp, synthetic construct
  source 1..75: mol_type = other DNA
ttttgaaacggatattcacggcgcgaaacaggacgaagatggcgtttaccgcgtacgagtcctaaaaatggcggg

SEQ ID NO: 677658 - DNA, 75 bp, synthetic construct
  source 1..75: mol_type = other DNA
ggcctatgccgccacggtacaggcagacgggagctggagcgttggcattccggcggcaagcgtcagtgcatggcc

SEQ ID NO: 677659 - DNA, 75 bp, synthetic construct
  source 1..75: mol_type = other DNA
acagaccgtaacggcgagcgttaccgatgacgtcattaacgccagcgaaaaaggcgcggatctgcaaatttctgg

SEQ ID NO: 677660 - DNA, 75 bp, synthetic construct
  source 1..75: mol_type = other DNA
ccagcgaaaaaggagccgatgttcaaattaccggcaccagcgatcagcctgttaataccgccatcaccgtgacat

SEQ ID NO: 677661 - DNA, 75 bp, synthetic construct
  source 1..75: mol_type = other DNA
ggtgctgccgcaggtgattatcaacacctttgcgggcgacaacgtggtgaacaatgccgaagcggcggcagatca

SEQ ID NO: 677662 - DNA, 75 bp, synthetic construct
  source 1..75: mol_type = other DNA
gcggcagcaccagcggcgtggaagccgggcaaacggtgacagtcacctttggcggcaaaaattacaccactaccg

SEQ ID NO: 677663 - DNA, 75 bp, synthetic construct
  source 1..75: mol_type = other DNA
ccggtagcagcaccgggttaacggcaggaacggcgttaacggtcgttatcaacaacgtcacttatggcgcgacgg

SEQ ID NO: 677664 - DNA, 75 bp, synthetic construct
  source 1..75: mol_type = other DNA
gaccatcagcgccaccatcaccgatagcgcaggcaacagcagcacgcagacgcacaacgtgcaggtgaacacggc

SEQ ID NO: 677665 - DNA, 75 bp, synthetic construct
  source 1..75: mol_type = other DNA
gagcgatcgcgcgggcaacagcgacagcacgactcacgatgtgaccgttgatcttagcggcccgacgctgaccat

SEQ ID NO: 677666 - DNA, 75 bp, synthetic construct
  source 1..75: mol_type = other DNA
gtggaagcagggcagacggtgaccgtcacctttggcggtaaaaattacaccactactgtggaagccaacggtagc

SEQ ID NO: 677667 - DNA, 75 bp, synthetic construct
  source 1..75: mol_type = other DNA
ggccagcgtcagcactattaacggcaacacggcttcggcaacccacgcctacagcgtcgatgccacggccccgac

SEQ ID NO: 677668 - DNA, 75 bp, synthetic construct
  source 1..75: mol_type = other DNA
tactgaatgcgctggagtctcagcagccgctaacgttaagcggcaccagcaatttgcccgatggcggcacggtta

SEQ ID NO: 677669 - DNA, 75 bp, synthetic construct
  source 1..75: mol_type = other DNA
aggtgacggtcaataccgggctgccgaccattacctttaacgctatcagcggcgataacgtcctgaacgccgatg

SEQ ID NO: 677670 - DNA, 75 bp, synthetic construct
  source 1..75: mol_type = other DNA
ggtggttaccggcagtagcaccgggctggcagcgggcgcggcgttgacggtggttatcaacggcgtcacctacgg

SEQ ID NO: 677671 - DNA, 75 bp, synthetic construct
  source 1..75: mol_type = other DNA
cagcggcaccaccaccgcgcccgtcgggcagacgctgaccctgaccttaaacggcaaaacctacaccaccacggt

SEQ ID NO: 677672 - DNA, 75 bp, synthetic construct
  source 1..75: mol_type = other DNA
gaagagtatgaactgggatttattaagtctgttggcacttctctgcttgttgttgataaaagcgttaagatcaat

SEQ ID NO: 677673 - DNA, 75 bp, synthetic construct
  source 1..75: mol_type = other DNA
tctataaactgctcaacgccagtgacgctaccggcggcaacggctcagacgtggtgaatggctttacggtaggga

SEQ ID NO: 677674 - DNA, 75 bp, synthetic construct
  source 1..75: mol_type = other DNA
cctcgctgcacctgcgcatcaccgatcctaacggcattaacgtctattacggcaataccgtaaaactgtacaact

SEQ ID NO: 677675 - DNA, 75 bp, synthetic construct
  source 1..75: mol_type = other DNA
aagttttcactcgcaatttatacctgatcaaatgaaccttgattttggtaaaaaaacaagaaaagtatcaagcga

SEQ ID NO: 677676 - DNA, 75 bp, synthetic construct
  source 1..75: mol_type = other DNA
ggtcaagttttgtcagcaacaacgccaacagccggagcaccatcacgtgcaaaaactaaagttcaacaaggcgac

SEQ ID NO: 677677 - DNA, 75 bp, synthetic construct
  source 1..75: mol_type = other DNA
agcagtttcattctacggcaaccttgatgcaaatgatccaactgtattagctgtgagtaatatttccggtggagc

SEQ ID NO: 677678 - DNA, 75 bp, synthetic construct
  source 1..75: mol_type = other DNA
attaacaccatcgccgtcgacgacatcatcaacgccacggagaaaggcgcggatctggcgatttccggcaccagc

SEQ ID NO: 677679 - DNA, 75 bp, synthetic construct
  source 1..75: mol_type = other DNA
acagcacgactcacgatgtgaccgttgatctcagcggcccgacgctgaccatcaataccgtctccgacgatgaca

SEQ ID NO: 677680 - DNA, 75 bp, synthetic construct
  source 1..75: mol_type = other DNA
cggcggatgtcacggcgctggcgaccggtagccagaccatcaccgccagcctgagcgatcgcgcgggcaacagcg

SEQ ID NO: 677681 - DNA, 75 bp, synthetic construct
  source 1..75: mol_type = other DNA
aggtaaaaagctcggcgggcaacggcaacactgccaacgtcagcactggcacggtaacggtcaacgcggcgattg

SEQ ID NO: 677682 - DNA, 75 bp, synthetic construct
  source 1..75: mol_type = other DNA
ccgtgcgcggtacgctcggagcggcgcttgccgccgatgaacgggcgcaaatcagcctcgacggcggcgttacct

SEQ ID NO: 677683 - DNA, 75 bp, synthetic construct
  source 1..75: mol_type = other DNA
ctactacccacgcttacagcgtcgatgccagcgcgccaacggtggccattaacactattgcaggcgacgatattc

SEQ ID NO: 677684 - DNA, 75 bp, synthetic construct
  source 1..75: mol_type = other DNA
atgctgcaacaacatgctcctgccgagacgcatattcttccgcaacaggcgatacgcgatccttttgtgcttgaa

SEQ ID NO: 677685 - DNA, 75 bp, synthetic construct
  source 1..75: mol_type = other DNA
atgaagattcaggagaacttcacctctttgaaggggatatgaatccggaaggatcagaatataagtgtaattcag

SEQ ID NO: 677686 - DNA, 75 bp, synthetic construct
  source 1..75: mol_type = other DNA
actagtgccagtggcaaatattgccggaatatggctaacttcatccaacctagcaagagcactgaagtattcgaa

SEQ ID NO: 677687 - DNA, 75 bp, synthetic construct
  source 1..75: mol_type = other DNA
attcccgatgcgcaggttgtaacgcgtcgggataccttcgccggacgtatcacgctgctgttcgggcatttcaac

SEQ ID NO: 677688 - DNA, 75 bp, synthetic construct
  source 1..75: mol_type = other DNA
tatcggccgatgaatacgccattcagtattttctgtggccaaaactggcaccggttctgaaagaatatccgaaca

SEQ ID NO: 677689 - DNA, 75 bp, synthetic construct
  source 1..75: mol_type = other DNA
cagatccctttgtgctcgaatttctggaattgaaagatgaatattcagaatccgattttgaggaggcgctgatca

SEQ ID NO: 677690 - DNA, 75 bp, synthetic construct
  source 1..75: mol_type = other DNA
gattctcactgcagaaatggtttttaccccaaggggattttcaggaagcatggagtgtaattaattcatattgta

SEQ ID NO: 677691 - DNA, 75 bp, synthetic construct
  source 1..75: mol_type = other DNA
gaccagcggtatacagggtattcaggtcgatagtaatggtatggtgactttagaatatattctaaagaacgaaat

SEQ ID NO: 677692 - DNA, 75 bp, synthetic construct
  source 1..75: mol_type = other DNA
gtcgagtcgctgagtgttaatggtgcaaaattcagggcggcagatggttttccaaaaacagggtttgatggtgct

SEQ ID NO: 677693 - DNA, 75 bp, synthetic construct
  source 1..75: mol_type = other DNA
atgacgattgcagagcgaattcataatgatggatatataaaaggggagcagcgcattcttcgattgttgttgcag

SEQ ID NO: 677694 - DNA, 75 bp, synthetic construct
  source 1..75: mol_type = other DNA
gcgtgacctgacggggtggatgtcgctgtcgcgtaaaccggaggagacctggtacgggtgggacggtgacaggct

SEQ ID NO: 677695 - DNA, 75 bp, synthetic construct
  source 1..75: mol_type = other DNA
gaagtcgagtcgctgagtgttaatggtgtaaaattcagggcgacagatggttttccagaaacagggtttgatggt

SEQ ID NO: 677696 - DNA, 75 bp, synthetic construct
  source 1..75: mol_type = other DNA
cacgctgctgttcgggcatttcaacggcgtgggtatttacctgattgacgcgccgcatctctatgaccgccccgg

SEQ ID NO: 677697 - DNA, 75 bp, synthetic construct
  source 1..75: mol_type = other DNA
tcatcccccgtgacgctcgcgcagtgtgaagcactggcgcgggcactcgcggtgtggaatgaagacaatatcgac

SEQ ID NO: 677698 - DNA, 75 bp, synthetic construct
  source 1..75: mol_type = other DNA
tctgttctacccggcggacgccggagagggcgcaatagtcacctctgatcgcctggtgcgcgcgatttaccgtat

SEQ ID NO: 677699 - DNA, 75 bp, synthetic construct
  source 1..75: mol_type = other DNA
gggtgcagggtacagaaaaggtggaatcaaaagacggggagctgagccgcatatacctgtccgggaatatcccgc

SEQ ID NO: 677700 - DNA, 75 bp, synthetic construct
  source 1..75: mol_type = other DNA
gcaatgagcgtccggggctacttttcgatctggcgaccagatggcttctgcaaaacaaaatactgttgccaggcg

SEQ ID NO: 677701 - DNA, 75 bp, synthetic construct
  source 1..75: mol_type = other DNA
gcgaaattgttgttgatgctgattatgactatgaccggattgtctgggttgatgaagatagcaatgaagccaata

SEQ ID NO: 677702 - DNA, 75 bp, synthetic construct
  source 1..75: mol_type = other DNA
cactgatggatatactgtttttttgatgtctacagtaaatatggctggaatcaggaaaatacaggtgattatggg

SEQ ID NO: 677703 - DNA, 75 bp, synthetic construct
  source 1..75: mol_type = other DNA
tttttacaaaagagtaagaaaaactagctttttaagaaatttagtattctttttgatttatgtgacaaagattta

SEQ ID NO: 677704 - DNA, 75 bp, synthetic construct
  source 1..75: mol_type = other DNA
tgggtaaatataaaaaaatcgctgagaaattaaatgttttaacgcgcgttgatttttgtggttatatttcctcat

SEQ ID NO: 677705 - DNA, 75 bp, synthetic construct
  source 1..75: mol_type = other DNA
tctcggagagaaggactacctcgggtagtcatagaagcaatggcttatggtttaccgtgtgtttgcacatctgtt

SEQ ID NO: 677706 - DNA, 75 bp, synthetic construct
  source 1..75: mol_type = other DNA
tcccccggcctgtgagcgcgatacggtgtctatcaccatccgtaagccatcgaaggtacaaatcccgcatcagtc

SEQ ID NO: 677707 - DNA, 75 bp, synthetic construct
  source 1..75: mol_type = other DNA
ttttctgtaaatactcatcgagtgatatgtttggtacagagtatgattctcctgagattctacggagatatgcaa

SEQ ID NO: 677708 - DNA, 75 bp, synthetic construct
  source 1..75: mol_type = other DNA
ttgaacgtgaacgggaccggatgtaccgggaaaaattaccggcgcagatgatgaaagccatgacgcatcagttac

SEQ ID NO: 677709 - DNA, 75 bp, synthetic construct
  source 1..75: mol_type = other DNA
ccgaacaagggatcgccgatctgcgcggtctttccccgcttcaacgcgcccgcactatcattgataattgtgcac

SEQ ID NO: 677710 - DNA, 75 bp, synthetic construct
  source 1..75: mol_type = other DNA
acacactgtgggaataatattctcaaaagagataatattccagtaattagctggtttatgttaagaggtcggtgc

SEQ ID NO: 677711 - DNA, 75 bp, synthetic construct
  source 1..75: mol_type = other DNA
aacatttggggcgttcccagaagaagagcaagaacaaatgcttaaggacatgaaagacaaaaaagaatcaatgga

SEQ ID NO: 677712 - DNA, 75 bp, synthetic construct
  source 1..75: mol_type = other DNA
cggtaaggctacacctaaagcctcaagtttggataaactggttgaggttacagggcatccattgcattggttttt

SEQ ID NO: 677713 - DNA, 75 bp, synthetic construct
  source 1..75: mol_type = other DNA
tacaggtatatctttttctataattggcttgtggatgattgtttatttaaaacaagaaccaattgaggtgatttc

SEQ ID NO: 677714 - DNA, 75 bp, synthetic construct
  source 1..75: mol_type = other DNA
catttttcatatatttatctagtatcaacaaagtgaattttattgatggtgtttatgaatactttctcttatttc

SEQ ID NO: 677715 - DNA, 75 bp, synthetic construct
  source 1..75: mol_type = other DNA
atcagcagccattggtagttatatcagttctgttcctgttctcagtattactttgtctgacagttattgatctgg

SEQ ID NO: 677716 - DNA, 75 bp, synthetic construct
  source 1..75: mol_type = other DNA
atgtcattagtaagatataatagtaaaatcataataactgtcgcgctgatatcgttgctctctgcatgcaccaga

SEQ ID NO: 677717 - DNA, 75 bp, synthetic construct
  source 1..75: mol_type = other DNA
cgtttgcgtccgtcgttctggaacagggtgaaacggggtttgaactgctcgaccggctggcaaaacagcgcggcg

SEQ ID NO: 677718 - DNA, 75 bp, synthetic construct
  source 1..75: mol_type = other DNA
atgataatcaaaatcgtatacgtcgcggtattattgcacagcaaattgaacagattgatccgcaatatgttaaac

SEQ ID NO: 677719 - DNA, 75 bp, synthetic construct
  source 1..75: mol_type = other DNA
catgctgaggagtttttgagtaatgaacaggttgagcgccaactcaaaagcgcacttgaaaagtggattgtggat

SEQ ID NO: 677720 - DNA, 75 bp, synthetic construct
  source 1..75: mol_type = other DNA
ccgctgtcgctgagcatgtgcaggaaaaactgagcgccactgagcagcgccttgctgagatggaaaccgcctttt

SEQ ID NO: 677721 - DNA, 75 bp, synthetic construct
  source 1..75: mol_type = other DNA
tgaccttatcgcgatgaacaaggccgcgcagaaggtctacacctcaatggaaattcagccgaactttgccaatac

SEQ ID NO: 677722 - DNA, 75 bp, synthetic construct
  source 1..75: mol_type = other DNA
gtgggccatatctcccgtctgattcaggattttgacggtattttcaatcaaaccatgcgtaacaccaggaatttg

SEQ ID NO: 677723 - DNA, 75 bp, synthetic construct
  source 1..75: mol_type = other DNA
atgaaaccgggccagatccgcgtgccagcggagcggtgcaggtcatgaacaaggcaatggcaaatgcgggcgtaa

SEQ ID NO: 677724 - DNA, 75 bp, synthetic construct
  source 1..75: mol_type = other DNA
ggtgcctgcatgctgctgctggaagatccacagttggctgcggcgcgtggcgctgaggttctcgcggaagtggtg

SEQ ID NO: 677725 - DNA, 75 bp, synthetic construct
  source 1..75: mol_type = other DNA
caaccgcaggtattggttggcggcgcggatgagtacttcccgtctatgtcgctgtatatggatgcggtgacgcaa

SEQ ID NO: 677726 - DNA, 75 bp, synthetic construct
  source 1..75: mol_type = other DNA
tgaacgcaacgcgtatctgtcgatctttatggctccgtcgattgctaaagaaggcaagatctcaaccgtcgtgcc

SEQ ID NO: 677727 - DNA, 75 bp, synthetic construct
  source 1..75: mol_type = other DNA
tcaacaatcaacgaagtgatcgcccgacgaatggccaaaaagcagcagatgcagtggagtagaaagggcgcgcat

SEQ ID NO: 677728 - DNA, 75 bp, synthetic construct
  source 1..75: mol_type = other DNA
gctgtatatggatgcggtgacgcaaaagatccacatgacggctgaggcgagcgactatcagatttacggtaaaga

SEQ ID NO: 677729 - DNA, 75 bp, synthetic construct
  source 1..75: mol_type = other DNA
ttgcggccgggcgtggagagcgctttctcgcctccgggggaaatacccataaattaagagaaaaaatctgcagta

SEQ ID NO: 677730 - DNA, 75 bp, synthetic construct
  source 1..75: mol_type = other DNA
aacgaaattaggtatggcgggtgatgtgcaaaaagcactggaagaacgcaatatttttagcgttatttatgatgg

SEQ ID NO: 677731 - DNA, 75 bp, synthetic construct
  source 1..75: mol_type = other DNA
ccaggctgattttggcctgtggtttaaccataaaggtcgacattattttagcggcattgccgaagtgggccatat

SEQ ID NO: 677732 - DNA, 75 bp, synthetic construct
  source 1..75: mol_type = other DNA
ttgaatactccgatctgaacgaagatgttatcgattcactggataacgcagcgctctgggcctacaaagtgggta

SEQ ID NO: 677733 - DNA, 75 bp, synthetic construct
  source 1..75: mol_type = other DNA
cgaaataccccattttcctgaaacaacgaaagaatcgttttttcatcattgccttattatatttagggtagttca

SEQ ID NO: 677734 - DNA, 75 bp, synthetic construct
  source 1..75: mol_type = other DNA
attttaagaacgacgttattaacgtcattaacaacaatgaagatatttattttcttagagagagtaatttactga

SEQ ID NO: 677735 - DNA, 75 bp, synthetic construct
  source 1..75: mol_type = other DNA
ttgccatcgacaggaacagagggctgaaactgcctttgagactgcaaccagctttcgtgatgataagagcaatat

SEQ ID NO: 677736 - DNA, 75 bp, synthetic construct
  source 1..75: mol_type = other DNA
cagacggtataccagccggggagcttcacgccgctcatccgggtcgagacagagaacggcgagcgggagaaagcg

SEQ ID NO: 677737 - DNA, 75 bp, synthetic construct
  source 1..75: mol_type = other DNA
atggggttagatgcgattgagaatatgacatcaggtggactaatttatgccgtatctggtgtacctggattgatt

SEQ ID NO: 677738 - DNA, 75 bp, synthetic construct
  source 1..75: mol_type = other DNA
cactgtgaccaccggggcctgccgctggcgcttatcagtgaagacggcaatacggcgtggagcgcggaatatgat

SEQ ID NO: 677739 - DNA, 75 bp, synthetic construct
  source 1..75: mol_type = other DNA
tggactatggtgacggctgcaccaccgtgacggacggcaagggcactcaccgttattactatgatcctgacggca

SEQ ID NO: 677740 - DNA, 75 bp, synthetic construct
  source 1..75: mol_type = other DNA
agaacggcgctagttcgtggtggcaaacgcggagagtaccttcgagcaaatctggataaagcaacgagacatcgt

SEQ ID NO: 677741 - DNA, 75 bp, synthetic construct
  source 1..75: mol_type = other DNA
caggggatagacaaggtcagccagctaaagaaagaatcatggatcttaaaaataacactgtcggtattgcttgtg

SEQ ID NO: 677742 - DNA, 75 bp, synthetic construct
  source 1..75: mol_type = other DNA
ttgaggcctcacctgcgatgctctacagtaaattccccgtagctcaccgatgggcaacttattatttcttacctc

SEQ ID NO: 677743 - DNA, 75 bp, synthetic construct
  source 1..75: mol_type = other DNA
aaaagtcggtgaagcgattgagcgtctgaaattgattttggatttgcccctatatttccagacatctgttatcac

SEQ ID NO: 677744 - DNA, 75 bp, synthetic construct
  source 1..75: mol_type = other DNA
attacaaccgccaccgctattatgacccgctgcaggggcgatatatcactcaggatccgattggactgaaggggg

SEQ ID NO: 677745 - DNA, 75 bp, synthetic construct
  source 1..75: mol_type = other DNA
ttgctacccgttttttacagcggctgcggttgtggggcgtgtcatgcgccattgaaactgccggagacgcgccag

SEQ ID NO: 677746 - DNA, 75 bp, synthetic construct
  source 1..75: mol_type = other DNA
cgctgcgcccgctgggttacaaagaaggcatcgtgacgctgatggaatttacctggacgcacggctgtgtgattg

SEQ ID NO: 677747 - DNA, 75 bp, synthetic construct
  source 1..75: mol_type = other DNA
tggcgacagattgccagcgtgagcaactgagctatgtcattggcaccgaagttccggttccgggcggtgaggcca

SEQ ID NO: 677748 - DNA, 75 bp, synthetic construct
  source 1..75: mol_type = other DNA
cgttattactatgatcctgacggcaatattctgcgggaagaagcgccggatggcagtaccaccacgtatgaatgg

SEQ ID NO: 677749 - DNA, 75 bp, synthetic construct
  source 1..75: mol_type = other DNA
acagtgggtagaaaagcaaaataaggaaggcgtggagaaagccggggaagtcatgcaaaaagttgccaatatact

SEQ ID NO: 677750 - DNA, 75 bp, synthetic construct
  source 1..75: mol_type = other DNA
agtttctggcatcgggcttatttaactcatacgggggcaaaaaccgtaactttaccgtggaatgatcaaataact

SEQ ID NO: 677751 - DNA, 75 bp, synthetic construct
  source 1..75: mol_type = other DNA
agtttgccatctgggcaaaagcggtcgtgcaggtgctggagacattaccggatattctggaacgtgactgcggcc

SEQ ID NO: 677752 - DNA, 75 bp, synthetic construct
  source 1..75: mol_type = other DNA
gttaattcgatggaagaaaaaatgattattaatgccatcaacatggaggtctcaaaaattgatccccgtcgtcct

SEQ ID NO: 677753 - DNA, 75 bp, synthetic construct
  source 1..75: mol_type = other DNA
ctcatacgggggcaaaaaccgtaaccttaccgtggaatgagcaaattacgacagcactccgcgacggacaactcg

SEQ ID NO: 677754 - DNA, 75 bp, synthetic construct
  source 1..75: mol_type = other DNA
atgacattcaaacactttttactttctctggtatcaggattacttctgatatcttcccacaacgttgccgctgaa

SEQ ID NO: 677755 - DNA, 75 bp, synthetic construct
  source 1..75: mol_type = other DNA
taaactctaaacagttcttgattcatgagttttcctcaatttcagtaccaccatttccaaaaataaaaaacgtta

SEQ ID NO: 677756 - DNA, 75 bp, synthetic construct
  source 1..75: mol_type = other DNA
gcagcttgacgcccgccagccggttgcggccctgaccagccttcagactgacaccgtaaccgtgccggataaaaa

SEQ ID NO: 677757 - DNA, 75 bp, synthetic construct
  source 1..75: mol_type = other DNA
tagttctttcatttatttataaggagattctttttaagcataatttatctattttatatcttcttaggaaattta

SEQ ID NO: 677758 - DNA, 75 bp, synthetic construct
  source 1..75: mol_type = other DNA
gtctggagtttgacgccgggcacaccgacattgcgcagtcatttatggcaatccgtcgcgctaccactgccagtg

SEQ ID NO: 677759 - DNA, 75 bp, synthetic construct
  source 1..75: mol_type = other DNA
cccgtttggctggcgcgaagtgtggatcggatatgacccggcgaaaggtacgcagaacggcgacagcgccggatg

SEQ ID NO: 677760 - DNA, 75 bp, synthetic construct
  source 1..75: mol_type = other DNA
tcatcggtacgttgatcggtggtattgtgttatcgatgttgatagcacgtttttatccatcagcagatccgctcg

SEQ ID NO: 677761 - DNA, 75 bp, synthetic construct
  source 1..75: mol_type = other DNA
taaataaaggaaacgaagaagttgaaggtgcctggcctaacaaattgcaacctggaaaatataaaaacatgggga

SEQ ID NO: 677762 - DNA, 75 bp, synthetic construct
  source 1..75: mol_type = other DNA
tatattgttttaaaaatatcacaacggttaacgggcgtgccagacgcagggagtactggtattatcgcctgagtg

SEQ ID NO: 677763 - DNA, 75 bp, synthetic construct
  source 1..75: mol_type = other DNA
tctccttcaggaacggctatccagccgcagcttttcagcaactcattgagcgcttcagcctgcccgcttattctg

SEQ ID NO: 677764 - DNA, 75 bp, synthetic construct
  source 1..75: mol_type = other DNA
atgtgctctaacaaggctgctggatcctatgcaattgcataccagcggtcagatcagtctgcagtgaccagccga

SEQ ID NO: 677765 - DNA, 75 bp, synthetic construct
  source 1..75: mol_type = other DNA
tttaggcggtgctggagatggggctatttcacccctgacgtctgtgctgtcagacgcaatagtgatacctggttt

SEQ ID NO: 677766 - DNA, 75 bp, synthetic construct
  source 1..75: mol_type = other DNA
tggtgatacggcggtgactatggacgcaaacatcaatacttttgcattcatctaccagctaccttcgggtgcttt

SEQ ID NO: 677767 - DNA, 75 bp, synthetic construct
  source 1..75: mol_type = other DNA
aaccagatggacccggtatacacgccggcgcgaaaaattcacctgtaccactgcgaccatcgcggcctgccgctg

SEQ ID NO: 677768 - DNA, 75 bp, synthetic construct
  source 1..75: mol_type = other DNA
caggtaaccgcctgcccgacccggagctgcacccggacagcgccctcagcatgtggccggataaccgtatcgccc

SEQ ID NO: 677769 - DNA, 75 bp, synthetic construct
  source 1..75: mol_type = other DNA
tattggcggagcaggcaatggttcagtgtctccgttaacatccgttttgtcagaatgtttggttttccccggcaa

SEQ ID NO: 677770 - DNA, 75 bp, synthetic construct
  source 1..75: mol_type = other DNA
tgacgaccgaattattcgaaatagggagttacggtacaggctcattaaatattacggataagggttacgtcacga

SEQ ID NO: 677771 - DNA, 75 bp, synthetic construct
  source 1..75: mol_type = other DNA
tcaaaacatgaacaaatagaaagatcaataaccccaccgcttaaaaattataatgagcgattacacaatactaac

SEQ ID NO: 677772 - DNA, 75 bp, synthetic construct
  source 1..75: mol_type = other DNA
tggcgcaggaaaatcaactctcttaaaaaatcctcagcggcaactatgcgccaaccacgggttctgtagtgatta

SEQ ID NO: 677773 - DNA, 75 bp, synthetic construct
  source 1..75: mol_type = other DNA
ctcaggcagccgttcgttttgatggtacagaagcgcctggcggcgacggcgacctgaaagtgggtacgccgctta

SEQ ID NO: 677774 - DNA, 75 bp, synthetic construct
  source 1..75: mol_type = other DNA
accacgattttcctaacaatggcaatcttttcaatgactttctatttaaccatcaacaagatgaacaattagcaa

SEQ ID NO: 677775 - DNA, 75 bp, synthetic construct
  source 1..75: mol_type = other DNA
ggtaaagtatttacgcttagaggcggaactctaaatatcaatattcctgggcgtagcgctcttcttttagggaaa

SEQ ID NO: 677776 - DNA, 75 bp, synthetic construct
  source 1..75: mol_type = other DNA
ttaaatggaatgcctaaaacaacacccaaaagtgaccaggttattatgttgcaaaatcaatacgttcgtgaaatg

SEQ ID NO: 677777 - DNA, 75 bp, synthetic construct
  source 1..75: mol_type = other DNA
ataaaacactctccaggaaacccggggcggttcagcatgatccggtaaacacgtttggcattgatcgcaggcata

SEQ ID NO: 677778 - DNA, 75 bp, synthetic construct
  source 1..75: mol_type = other DNA
cagataattctttctatgggtatcataggggatgatcaatgccttgttggatttgtctttgttaccaaacattaa

SEQ ID NO: 677779 - DNA, 75 bp, synthetic construct
  source 1..75: mol_type = other DNA
aatcataccaataacagtgatgccggctaccaggtcgatatgctgattacaggtgacgataaagacggaaaagtg

SEQ ID NO: 677780 - DNA, 75 bp, synthetic construct
  source 1..75: mol_type = other DNA
atcaagtttgcatagttatgtgcagattgaggacaatgttttattaaacaaatattctatcagttgtatagcaga

SEQ ID NO: 677781 - DNA, 75 bp, synthetic construct
  source 1..75: mol_type = other DNA
ttgatagtactaaacctgatggaacacctcgtaaattaatgagcaatgaacgattgagtaaactaggctggtcac

SEQ ID NO: 677782 - DNA, 75 bp, synthetic construct
  source 1..75: mol_type = other DNA
tgatgggagcgattgtcgcgggactggcattattgctggtgtttatgtcagccagaaaacaacctgaaacagttt

SEQ ID NO: 677783 - DNA, 75 bp, synthetic construct
  source 1..75: mol_type = other DNA
gcgcggcgctggcggcagatgaacgggcgcaaatcagccttgatggtggcgttacctgggctacgttaaccgtta

SEQ ID NO: 677784 - DNA, 75 bp, synthetic construct
  source 1..75: mol_type = other DNA
acgctcggcgcggcgctctctgctggtgagttcgcgcaaatcagtatcgatggcggcaccacctggcagaatctg

SEQ ID NO: 677785 - DNA, 75 bp, synthetic construct
  source 1..75: mol_type = other DNA
ccacggtacagaccggcggtagctggagctacaccctcggcagcgccgatgtcaccgcgctggcggacggcaatg

SEQ ID NO: 677786 - DNA, 75 bp, synthetic construct
  source 1..75: mol_type = other DNA
cggcagttatcccatcaacgtttcagtgactgaccgcgccggaaacatgggtagccagtcactgacggtcacggt

SEQ ID NO: 677787 - DNA, 75 bp, synthetic construct
  source 1..75: mol_type = other DNA
gaacggcacctggagcgtcggcgttccggcggcggatgtcagcaactggcctgcgggaacgctgaatattaccgt

SEQ ID NO: 677788 - DNA, 75 bp, synthetic construct
  source 1..75: mol_type = other DNA
ccaccaccagcaaatccaccgcatgggggctgacctacggcctcgacacacacgggatgtggacagtgctggcca

SEQ ID NO: 677789 - DNA, 75 bp, synthetic construct
  source 1..75: mol_type = other DNA
ggacagcgccggaaacagcgccacggcttcgcgcagcgtggcggtggatctcaccgcgccggttatcagcattaa

SEQ ID NO: 677790 - DNA, 75 bp, synthetic construct
  source 1..75: mol_type = other DNA
acggtagggacatgggaaggcaccgccgacaccgatcgcattgatattcgtgaactgttacagggcagcggctac

SEQ ID NO: 677791 - DNA, 75 bp, synthetic construct
  source 1..75: mol_type = other DNA
gttgaactgggcggtaaaacttacaccgccaccgtccagccagatttaagctggaatgtaagcgtacctgccgcc

SEQ ID NO: 677792 - DNA, 75 bp, synthetic construct
  source 1..75: mol_type = other DNA
aactggagcgtcggcgttccggcagcagacgtcactgcgctgggcagaggcccgcaaaccatcactgcggccatt

SEQ ID NO: 677793 - DNA, 75 bp, synthetic construct
  source 1..75: mol_type = other DNA
gcattacgcatccggtaacggtcgatctcacgccggcggcgatcaccatcaacaccatcgccacggacgacgtga

SEQ ID NO: 677794 - DNA, 75 bp, synthetic construct
  source 1..75: mol_type = other DNA
cagtatgttgaagtggtgatcaacggcaaaacctacacctctgaaccgggcggtgcggtggtggtcgatccggcg

SEQ ID NO: 677795 - DNA, 75 bp, synthetic construct
  source 1..75: mol_type = other DNA
gatgtggtcaatatcatcgaacacagtcaggcgcaggtgatcaccggtagcagctccggctttgccgcaggtaca

SEQ ID NO: 677796 - DNA, 75 bp, synthetic construct
  source 1..75: mol_type = other DNA
accgccgaagcggggcagacggtaaccgtcacccttaatggcgtgacttacaccggcaccgtccaggcggacggg

SEQ ID NO: 677797 - DNA, 75 bp, synthetic construct
  source 1..75: mol_type = other DNA
caccaccgtgctggacgccaacggcaactggagcatcggcgtgcctgccagcgtgatttccgcactggcgcaggg

SEQ ID NO: 677798 - DNA, 75 bp, synthetic construct
  source 1..75: mol_type = other DNA
ggggatcaccatcagcggcaccaccacggcgcaggccgggcagacgctgaccgtcacgctcaataacaacacgta

SEQ ID NO: 677799 - DNA, 75 bp, synthetic construct
  source 1..75: mol_type = other DNA
atcgccatcagcgcgatcaccaccgatactggattgattactaacgattttgtcaccagcgacacgacgcttgcg

SEQ ID NO: 677800 - DNA, 75 bp, synthetic construct
  source 1..75: mol_type = other DNA
tacggtgagcgcagcggtcagcgacaaagccggaaatccggcctcggcgacgcataacctgacggtggatctcgt

SEQ ID NO: 677801 - DNA, 75 bp, synthetic construct
  source 1..75: mol_type = other DNA
gcacaaacaccttcaccaccgtgctggatgccagcggtaactggagcatcggcgtaccggcaagcgttgtctcgg

SEQ ID NO: 677802 - DNA, 75 bp, synthetic construct
  source 1..75: mol_type = other DNA
agacggccttaactggagttacgttgacgggcgcacgctcaccaacggcaccaccacctggcaggtgcgggttgt

SEQ ID NO: 677803 - DNA, 75 bp, synthetic construct
  source 1..75: mol_type = other DNA
caccgacctggaccaccgccagcaaaaccaccgcctgggggttgacctacggcctcgactcgcacgggatgtgga

SEQ ID NO: 677804 - DNA, 75 bp, synthetic construct
  source 1..75: mol_type = other DNA
ctgaccttaaacggcaaaacctacaccaccacggtgcagacgggcggtagctggagctacaccctcggcagcgcc

SEQ ID NO: 677805 - DNA, 75 bp, synthetic construct
  source 1..75: mol_type = other DNA
agtaatcagccagcaggcaccacaattacgctgacgctgaacgggcaaaattacactgcgacgacggacgccgca

SEQ ID NO: 677806 - DNA, 75 bp, synthetic construct
  source 1..75: mol_type = other DNA
tgttgaacggcctggcgtacagcgccaccaccgacggttccggcaactggagcgttaccgtgcccgcttcggcgg

SEQ ID NO: 677807 - DNA, 75 bp, synthetic construct
  source 1..75: mol_type = other DNA
acaacattgtcagcgccgcagaacataacgccgtgctggtactgagcggtacttcgaatgctgaagccgggcaaa

SEQ ID NO: 677808 - DNA, 75 bp, synthetic construct
  source 1..75: mol_type = other DNA
cggcagcaccagcggtgtggaagccgggcagacggtgaccgtcacctttggtggcaaaaattacaccaccaccgt

SEQ ID NO: 677809 - DNA, 75 bp, synthetic construct
  source 1..75: mol_type = other DNA
agaccaacaaaaacggtcaatcaacgttgtccggtggtggtgaacttggtgaccttatcaacgctattgcaggca

SEQ ID NO: 677810 - DNA, 75 bp, synthetic construct
  source 1..75: mol_type = other DNA
agaagtatgaaatttcacttcatttgtttggcggttttttaagttttacatttaaaaccatgcgagttattgaca

SEQ ID NO: 677811 - DNA, 75 bp, synthetic construct
  source 1..75: mol_type = other DNA
taaccaaaatgcaggtaatattaaagatgcgacaattgtttataaggcaaagaagtatgaaatttcacttcattt

SEQ ID NO: 677812 - DNA, 75 bp, synthetic construct
  source 1..75: mol_type = other DNA
tttcccgctagcgaaaattgaagcgaccatgcaacagcgtggtaaatcgttgcgctttgacccagaggaaattag

SEQ ID NO: 677813 - DNA, 75 bp, synthetic construct
  source 1..75: mol_type = other DNA
tctcgcggagtctaaaacaattggctataaaggggctaaattcgaagtacttgatgcgagtaaccaaagcataag

SEQ ID NO: 677814 - DNA, 75 bp, synthetic construct
  source 1..75: mol_type = other DNA
tcaggatctctcgatgagccgtgttggttactcactgagtgctgacaagctggctgacctcaacaaggacacaac

SEQ ID NO: 677815 - DNA, 75 bp, synthetic construct
  source 1..75: mol_type = other DNA
aaagtgcacagttaacaggaatgaccgtaacaatcaaatccaatacctgtgaatcaggctctggatttgctgaag

SEQ ID NO: 677816 - DNA, 75 bp, synthetic construct
  source 1..75: mol_type = other DNA
ggccgggaaagagtactggactaaccgctggaatctgcaaccgctactgcaaagcgcacagttaacaggaatgac

SEQ ID NO: 677817 - DNA, 75 bp, synthetic construct
  source 1..75: mol_type = other DNA
aaatgcaattaaggcaggggttggtgaaataacgattgaggaaatttataaggttttaggaggtgctttaaatat

SEQ ID NO: 677818 - DNA, 75 bp, synthetic construct
  source 1..75: mol_type = other DNA
atgaaaaatgtagaaaatattatctggcatgatggtgttttagtagaaaccagaatggaatgtcaccacaccgag

SEQ ID NO: 677819 - DNA, 75 bp, synthetic construct
  source 1..75: mol_type = other DNA
aattcgttgatgcaatttgcggatctggaaaatccaccacgttacagcactacatcaagtcaagtttattaacaa

SEQ ID NO: 677820 - DNA, 75 bp, synthetic construct
  source 1..75: mol_type = other DNA
atgaaatgatatggcatgatggtgttttactggaaaccagaacaatatgtcatcatgcagagtataattttatat

SEQ ID NO: 677821 - DNA, 75 bp, synthetic construct
  source 1..75: mol_type = other DNA
aaaagacaataaacatatcattaaaaaaaccaggctacgtattttttagtgcagcctatattttaggaggtccga

SEQ ID NO: 677822 - DNA, 75 bp, synthetic construct
  source 1..75: mol_type = other DNA
gtcacctggaccacgttaaccgttatcggcaccagctggagctatgccgatggtcgcacactgaccgacggcacc

SEQ ID NO: 677823 - DNA, 75 bp, synthetic construct
  source 1..75: mol_type = other DNA
gcacaggttaccgtcacactcaacggtcataactacagcgctaccaccgacgcggcgggcaactggaccttaacc

SEQ ID NO: 677824 - DNA, 75 bp, synthetic construct
  source 1..75: mol_type = other DNA
gttccggcaagcgtcgtctcggcgctggcgaacggcacggtgaccattaacgccagcgtcaccgatgccgccgga

SEQ ID NO: 677825 - DNA, 75 bp, synthetic construct
  source 1..75: mol_type = other DNA
tgcaggttcatgctcaggcctctgccgttgcgcgttacgttcgtgaaggaaatgacctgctgatctatatgcagg

SEQ ID NO: 677826 - DNA, 75 bp, synthetic construct
  source 1..75: mol_type = other DNA
aacatcatcaacgccagcgaagcggcggcgggcgtgacggtatccggcaccagcacggcggagacggggcagacg

SEQ ID NO: 677827 - DNA, 75 bp, synthetic construct
  source 1..75: mol_type = other DNA
atggatctcttcctgcctgccagccagggaagagctaactacggctcgctgttattcaacaccaacggcgtactg

SEQ ID NO: 677828 - DNA, 75 bp, synthetic construct
  source 1..75: mol_type = other DNA
agcggtgcttctcctggcgatacggtaacggtgaaattgggcactcatgtcctgacgggcattgtgctggcagat

SEQ ID NO: 677829 - DNA, 75 bp, synthetic construct
  source 1..75: mol_type = other DNA
tcactgccggactatacggagtatggccgggataacggtatccgcctgtcagcggtgtggctcacgcacgaccct

SEQ ID NO: 677830 - DNA, 75 bp, synthetic construct
  source 1..75: mol_type = other DNA
ggcgacgtgaacgggacctgacgggctggatgtcgctgtcacggaaaccggaagtgacctggtacggctgggacg

SEQ ID NO: 677831 - DNA, 75 bp, synthetic construct
  source 1..75: mol_type = other DNA
cgtaagcggcagcaccagcggtgtggaagctgggcaaacggtgactgtcacctttggcggtaaaaattacaccac

SEQ ID NO: 677832 - DNA, 75 bp, synthetic construct
  source 1..75: mol_type = other DNA
gctaaccatcagcggcagcagtaacgccgaagcggggcagacggtaaccgtcacgcttaatggcgtgacttacac

SEQ ID NO: 677833 - DNA, 75 bp, synthetic construct
  source 1..75: mol_type = other DNA
aactggagcaccacggtgccagcctccgctgtcggtgcgctgggcgaagccagttacacggtgacggcgaacgtc

SEQ ID NO: 677834 - DNA, 75 bp, synthetic construct
  source 1..75: mol_type = other DNA
atggcaatgaaaagttaacactaactgaagatgtgttgaatgctacagcctacgcgcttggcatcactcccacag

SEQ ID NO: 677835 - DNA, 75 bp, synthetic construct
  source 1..75: mol_type = other DNA
tatggtaatttgaaaacttatgggaacgcttttagcggtacggattattggacaaccactcagctcttaggggta

SEQ ID NO: 677836 - DNA, 75 bp, synthetic construct
  source 1..75: mol_type = other DNA
gttattccatccacagtggtgctccggtgcaggcaaattctgctatcaggacagataaatcggcatatatcgccg

SEQ ID NO: 677837 - DNA, 75 bp, synthetic construct
  source 1..75: mol_type = other DNA
aaaagggaaaataatgataagcaaagtttgtatattaggatcttttaatgtcgatattattgccaaagttgatcg

SEQ ID NO: 677838 - DNA, 75 bp, synthetic construct
  source 1..75: mol_type = other DNA
cgttgtcacggcggagcaataatattgcgtcggattttccattctcagcccgttaataacgttggtacctctatt

SEQ ID NO: 677839 - DNA, 75 bp, synthetic construct
  source 1..75: mol_type = other DNA
gcatacgggcgcgattctggtgtgtctttgttgctgtgtttttgcctttattgccagatcgcgctcattcccctg

SEQ ID NO: 677840 - DNA, 75 bp, synthetic construct
  source 1..75: mol_type = other DNA
agtctttatttatataggctattggtataaaagtcagaaagggtatcacttaaagggaggtctcaggttaatagt

SEQ ID NO: 677841 - DNA, 75 bp, synthetic construct
  source 1..75: mol_type = other DNA
tccgggtcacagaccacttcaggggataacgtctttaataccgtcgaacgcaaaacggtggggacaaaactcaaa

SEQ ID NO: 677842 - DNA, 75 bp, synthetic construct
  source 1..75: mol_type = other DNA
ggaggtgagttcctacggggattacagcaacaacggggtggtaagcgcaaacgtcaactgggtaccgcgccagag

SEQ ID NO: 677843 - DNA, 75 bp, synthetic construct
  source 1..75: mol_type = other DNA
tgggtcgagcagaataatggtgaatataccattgtctggacagcatgggttgccgaggaaaatctggttgccagt

SEQ ID NO: 677844 - DNA, 75 bp, synthetic construct
  source 1..75: mol_type = other DNA
gatggaaaatcaacctcaacgctgacctataccgcgcgagattccagcggcaagccgatccccggtatgacgtta

SEQ ID NO: 677845 - DNA, 75 bp, synthetic construct
  source 1..75: mol_type = other DNA
agggtattcaggtcgatagcaatggtatggtgactttagaattcattatcaataaagaggttactattacaggaa

SEQ ID NO: 677846 - DNA, 75 bp, synthetic construct
  source 1..75: mol_type = other DNA
attgatagcgggcaacgtcatcatcatctttacccgtctcattggccattgctatggttcacacttttggctgcg

SEQ ID NO: 677847 - DNA, 75 bp, synthetic construct
  source 1..75: mol_type = other DNA
cggaagctatgctacaaatctgtcattggctaactcattgtttttgattgatctaaatgaacgtaaacaattcac

SEQ ID NO: 677848 - DNA, 75 bp, synthetic construct
  source 1..75: mol_type = other DNA
ccgcaacacaactgagcggaggtgctcagaatgtttataaccttggtaatgcgtcaaatacagttatttttaagg

SEQ ID NO: 677849 - DNA, 75 bp, synthetic construct
  source 1..75: mol_type = other DNA
aatatttcaggaacagtatctacaggaggagttgtttcttccggagaaacacaaatagtgtattctggtggagaa

SEQ ID NO: 677850 - DNA, 75 bp, synthetic construct
  source 1..75: mol_type = other DNA
tcctatcctgatgacctctctcgcctttattctcggcgtattaccgctggctatcagtaacggtgccggcagtgg

SEQ ID NO: 677851 - DNA, 75 bp, synthetic construct
  source 1..75: mol_type = other DNA
cagatgaattaggtggaagttatttcgtaataacctccctcgatgttgacaataactcgcgcgctactgcggtag

SEQ ID NO: 677852 - DNA, 75 bp, synthetic construct
  source 1..75: mol_type = other DNA
agggtgacaatctgtttgtgctatcgaacgagctggatcaataccgcgatgggtttgtggtatcggacatcaatg

SEQ ID NO: 677853 - DNA, 75 bp, synthetic construct
  source 1..75: mol_type = other DNA
tgctaaatggattgtttgcgctggtcatgcactttgccgcgccggaattgttcggaagcactgagcattatgtcg

SEQ ID NO: 677854 - DNA, 75 bp, synthetic construct
  source 1..75: mol_type = other DNA
gaattaaagtgtcaacgatacatggagtaaaaggtggtgagtatgacactgttatatcattcggtttattacaag

SEQ ID NO: 677855 - DNA, 75 bp, synthetic construct
  source 1..75: mol_type = other DNA
ctatacttcggaaggaatgcagctatcaggaaatttcaaaaaacacgaagccataagaaatatactgaaagaata

SEQ ID NO: 677856 - DNA, 75 bp, synthetic construct
  source 1..75: mol_type = other DNA
gcggagggtataacctgaatgtgcatacatggacgtcatctgagggaattaaaggtgaattctggttacagcctc

SEQ ID NO: 677857 - DNA, 75 bp, synthetic construct
  source 1..75: mol_type = other DNA
tattagagaacgggggtcttctggctgttacatcaggcagcacagcaaccgatacaaccgtaaactcagccggtc

SEQ ID NO: 677858 - DNA, 75 bp, synthetic construct
  source 1..75: mol_type = other DNA
tgtaacatcaggcggtacagcaaccgatacaaccgtaaactcagccggtcgtttaagaatcgatgaggggggcgc

SEQ ID NO: 677859 - DNA, 75 bp, synthetic construct
  source 1..75: mol_type = other DNA
actggagtttggtgaaaccatccacaaaggccgggcagcgatggagcgggagttcccgaagcactggaacggatg

SEQ ID NO: 677860 - DNA, 75 bp, synthetic construct
  source 1..75: mol_type = other DNA
ctttaaccaggcacctttctataccggcgtacaggacacgaatactgttgtcctgaccaatgaggcataccgcaa

SEQ ID NO: 677861 - DNA, 75 bp, synthetic construct
  source 1..75: mol_type = other DNA
agaaaattctaggaaggcctgaaggaagtaaatattcccatttaattcagagtgagaaggctaagcattactctc

SEQ ID NO: 677862 - DNA, 75 bp, synthetic construct
  source 1..75: mol_type = other DNA
ttcatactgaaattgaattttttttcactcactattttatttttaaaaaacaacaatttatgttaaaattattaa

SEQ ID NO: 677863 - DNA, 75 bp, synthetic construct
  source 1..75: mol_type = other DNA
ggttatagaagtgccttcaaataaaataataagaggttattggagaaagtttagaggtgataaattaactgcgaa

SEQ ID NO: 677864 - DNA, 75 bp, synthetic construct
  source 1..75: mol_type = other DNA
ggtttcgtcgcagcggcagcaaactcactcttattaatccaacgccctacttcattaccgtaacaaatatgaaag

SEQ ID NO: 677865 - DNA, 75 bp, synthetic construct
  source 1..75: mol_type = other DNA
ggaaaatcggttacccggactgttgacctgactgatgccatataccggcgactgatcctgatgaaagccatgtcg

SEQ ID NO: 677866 - DNA, 75 bp, synthetic construct
  source 1..75: mol_type = other DNA
aaagctatcagtaaacagggagataactaattctgatagttttatttctatattgaaaatggcttatgagtttgc

SEQ ID NO: 677867 - DNA, 75 bp, synthetic construct
  source 1..75: mol_type = other DNA
aactgcttgaaaaagccacgagtatctttgctgagttgggcttacctattgagcaggctattaacgtctttttag

SEQ ID NO: 677868 - DNA, 75 bp, synthetic construct
  source 1..75: mol_type = other DNA
cagcaccagtatggatggcgtgtctgtcactcaggatggagcccgaaatattgctgagataaaaaccggggtgga

SEQ ID NO: 677869 - DNA, 75 bp, synthetic construct
  source 1..75: mol_type = other DNA
cctttttggcgcaaacttatatttgtcgatgttctggcgtctggaacaaggcccggcggcggcgattggtttaag

SEQ ID NO: 677870 - DNA, 75 bp, synthetic construct
  source 1..75: mol_type = other DNA
ttggcgattactttgctattcaggatgttactcttacagacaggtcattcactttcagtggaacaactatgacca

SEQ ID NO: 677871 - DNA, 75 bp, synthetic construct
  source 1..75: mol_type = other DNA
ctttgaagcgggaacatgtagcggcagcgaagggacgctgaatacctggtacgtccagccacaggcgcaaatcac

SEQ ID NO: 677872 - DNA, 75 bp, synthetic construct
  source 1..75: mol_type = other DNA
gcatatagtggcgcttatttgttttattttaatatttatgcatggtaagggtattgatggtattaataatggaat

SEQ ID NO: 677873 - DNA, 75 bp, synthetic construct
  source 1..75: mol_type = other DNA
tttatcgacaaaggaggagttgtcaatggaagcgttttatgtgagaaattaattttaaatggagagttgcatggt

SEQ ID NO: 677874 - DNA, 75 bp, synthetic construct
  source 1..75: mol_type = other DNA
aatcaccgtattattaatgtggaaaagattaactttcgacagccagaagaggggaggagatttgcgaccattcct

SEQ ID NO: 677875 - DNA, 75 bp, synthetic construct
  source 1..75: mol_type = other DNA
cacttcagttgatgttgccggaaatagaagaaatgatgtcactgggagtttccagggcggaaatttataaggcag

SEQ ID NO: 677876 - DNA, 75 bp, synthetic construct
  source 1..75: mol_type = other DNA
ctggtacttgatatagcaaacagtgaaagtgaaacagaattgcagggcaatcgtcaaattattgcgccttaccgt

SEQ ID NO: 677877 - DNA, 75 bp, synthetic construct
  source 1..75: mol_type = other DNA
ttagcgtggccgcctggcgttatgcttcgcaggattacaggacattcagcgaccatctttacgaaaatgataaac

SEQ ID NO: 677878 - DNA, 75 bp, synthetic construct
  source 1..75: mol_type = other DNA
tatttgggcgggccaccgcggaaggccggaccggagagttgcctttgatcaggcgagtaagtgatcactgtagcg

SEQ ID NO: 677879 - DNA, 75 bp, synthetic construct
  source 1..75: mol_type = other DNA
aagtacgcatatgaatcaggatttttaacttttatagcaggtgttgggctggttcttaatggaataaattctgtt

SEQ ID NO: 677880 - DNA, 75 bp, synthetic construct
  source 1..75: mol_type = other DNA
aaagtcttacatcgttgagaatgtttgcagctcttggtgtttttgttagtcaccttgggctattgtctcaatcat

SEQ ID NO: 677881 - DNA, 75 bp, synthetic construct
  source 1..75: mol_type = other DNA
tctgcgaatccatcattaataggttgagtggcattcggctcccctcaccttcgaaaaatgcatcaacaataatta

SEQ ID NO: 677882 - DNA, 75 bp, synthetic construct
  source 1..75: mol_type = other DNA
atgtaaggtgacagtgattgaactggcggcaaccgtcatgggccgtaatgcaccaccgcccgtgcaacgctatct

SEQ ID NO: 677883 - DNA, 75 bp, synthetic construct
  source 1..75: mol_type = other DNA
atgctaaaagtggttctagggtagattatgctgtaattaacgactatggtgcactgaacaaatatgagggtgtta

SEQ ID NO: 677884 - DNA, 75 bp, synthetic construct
  source 1..75: mol_type = other DNA
cgcataatctgacggtggatcttgttgcgccggtcgttaccattaacacggtggcgggcgatgacatcattaacg

SEQ ID NO: 677885 - DNA, 75 bp, synthetic construct
  source 1..75: mol_type = other DNA
cgtgcagacgtatcaggcaacggtacaggccgacggcagctggagcatcaatattccggcggcagatctcgcagc

SEQ ID NO: 677886 - DNA, 75 bp, synthetic construct
  source 1..75: mol_type = other DNA
aataccgcgctgccgggcgtcaccattaacgtggtggcaacggacgatattattaacgccgccgaagcgggcgtg

SEQ ID NO: 677887 - DNA, 75 bp, synthetic construct
  source 1..75: mol_type = other DNA
ccctgaccgccagcaactacaccgttagcgcggcggtgagcgacaaagccggaaacccggcctcggttaatcaca

SEQ ID NO: 677888 - DNA, 75 bp, synthetic construct
  source 1..75: mol_type = other DNA
ataccggcagcggttcgcgagatattactatcgacgccaacctgcctggcctgcgcgttgataccgtggcgggcg

SEQ ID NO: 677889 - DNA, 75 bp, synthetic construct
  source 1..75: mol_type = other DNA
tcgagcacgatcaggcgctggtgattaccggcagcagctccgatctggcagcgggcagcaacgtcacgctgacca

SEQ ID NO: 677890 - DNA, 75 bp, synthetic construct
  source 1..75: mol_type = other DNA
gcagacgctgactgtcacgctcaataacaacacgtaccagactaccgtccaggccgatggtacctggagtgtgaa

SEQ ID NO: 677891 - DNA, 75 bp, synthetic construct
  source 1..75: mol_type = other DNA
attaacagcattgcgggcgatgatgtgatcaacgccagcgaaaaaggagccgatctccagatcaccggcaccagc

SEQ ID NO: 677892 - DNA, 75 bp, synthetic construct
  source 1..75: mol_type = other DNA
ccgccagccataacgtgcaggtcaataccgcgctgccgggcgtcaccattaatccggtggcgacggacgatatta

SEQ ID NO: 677893 - DNA, 75 bp, synthetic construct
  source 1..75: mol_type = other DNA
agtcaccgtgacgctgggcggcaacacttacaccgctacggtacagggcaacttaagctggaacgtcaccgttcc

SEQ ID NO: 677894 - DNA, 75 bp, synthetic construct
  source 1..75: mol_type = other DNA
cacggtgactgtgacgctaggcggggcgacttacaccgctacggtacaggcagacttaagctggagtgtcgatgt

SEQ ID NO: 677895 - DNA, 75 bp, synthetic construct
  source 1..75: mol_type = other DNA
cggcggatattcaggccatcggtaatggcgatctgacggttaacgcttcggtgaccaacggcgttggtaataccg

SEQ ID NO: 677896 - DNA, 75 bp, synthetic construct
  source 1..75: mol_type = other DNA
gggggatacggttaccgttacgctgggcggcaacacctacaccgccacggtgcaggctaatttaagctggagtgt

SEQ ID NO: 677897 - DNA, 75 bp, synthetic construct
  source 1..75: mol_type = other DNA
gatgacataattaacgccagcgaaaaaggcgcggatctgcaaatttccggcaccagtaatcagccagcaggcacc

SEQ ID NO: 677898 - DNA, 75 bp, synthetic construct
  source 1..75: mol_type = other DNA
tgattgacgcggcgggcaacgtcggtgccactgacagccagaacgtggtgatcgacactaccgcgccagatccgg

SEQ ID NO: 677899 - DNA, 75 bp, synthetic construct
  source 1..75: mol_type = other DNA
tgggcggcaacacctacaccgccacggtgcaggctaatttaagctggagcgttagcgttccggcggcggatattc

SEQ ID NO: 677900 - DNA, 75 bp, synthetic construct
  source 1..75: mol_type = other DNA
ggaagattttgaagagtctgcgcattatctcggaaaatgctttgaacagcagtttaaagttgaccctgataaaaa

SEQ ID NO: 677901 - DNA, 75 bp, synthetic construct
  source 1..75: mol_type = other DNA
atggagccatacagcctcacactcgatgaggcctgtacatatctgatagatccgctatatggcggtttctttttg

SEQ ID NO: 677902 - DNA, 75 bp, synthetic construct
  source 1..75: mol_type = other DNA
acatctgagcataatatacagaaacgtgtcaatcgccttatatcttccacgatttcgggcgaaataaagatttag

SEQ ID NO: 677903 - DNA, 75 bp, synthetic construct
  source 1..75: mol_type = other DNA
ttaacgccgccgaaagcgggcaggatctgcccatcaccggcaccaccgacgctcagccagggcagacggtgaccg

SEQ ID NO: 677904 - DNA, 75 bp, synthetic construct
  source 1..75: mol_type = other DNA
taacgtcgcgctggtactgagcggcacgtcgaatgcagaagcggggcaaaccgtaacactgaacctgaacggcgt

SEQ ID NO: 677905 - DNA, 75 bp, synthetic construct
  source 1..75: mol_type = other DNA
tcatcaccgtcacactaaacagtaaaacctacaccaccacgctggacgcttccggcaactggagcgtcggcgttc

SEQ ID NO: 677906 - DNA, 75 bp, synthetic construct
  source 1..75: mol_type = other DNA
cacggccccgacgcttgccattaacaccatcgccaccgacgatattctgaacgccgccgaggcgggcaatccgct

SEQ ID NO: 677907 - DNA, 75 bp, synthetic construct
  source 1..75: mol_type = other DNA
gatttaacggcggtggcaatcagcatcaacaccgttgccagcgacgacgtgattaacgccgcagaaaaaggcacc

SEQ ID NO: 677908 - DNA, 75 bp, synthetic construct
  source 1..75: mol_type = other DNA
tgaccgatggcaactatctctatcaggtgcgggtgattgacgcagcgggcaacgtcggtgccaccgacagccaga

SEQ ID NO: 677909 - DNA, 75 bp, synthetic construct
  source 1..75: mol_type = other DNA
ccgtcactgccaccattaccgacgcggcaggcaacagcgatgacgccagccgcacggtcactgtgaatctgacct

SEQ ID NO: 677910 - DNA, 75 bp, synthetic construct
  source 1..75: mol_type = other DNA
ggtcaatgtaatcaccatggggcagggctggaaaggaactgttggatggaatgcagccggtggtgcatttggtaa

SEQ ID NO: 677911 - DNA, 75 bp, synthetic construct
  source 1..75: mol_type = other DNA
tggctgacggtggcctgcggacagtttcacaacctacggggtgcgtatcgaccggattaaagcaacgttcggcga

SEQ ID NO: 677912 - DNA, 75 bp, synthetic construct
  source 1..75: mol_type = other DNA
tcttattattatgatatttcaattgggattggcgggtacaagtaaattcaaaaaattacttgcggctgcaaagaa

SEQ ID NO: 677913 - DNA, 75 bp, synthetic construct
  source 1..75: mol_type = other DNA
gaacaactctcagaattaacagttgctgcaaatgctcttaagctggaagttgctaaaaataactataacatgaaa

SEQ ID NO: 677914 - DNA, 75 bp, synthetic construct
  source 1..75: mol_type = other DNA
caaaattgaacaggtcggtattgacaaatttaacgaaacccaattgtatcgtgaatcttataagaaaaaaaatgg

SEQ ID NO: 677915 - DNA, 75 bp, synthetic construct
  source 1..75: mol_type = other DNA
atataggttcttcaattggttcagaaggatcaggagctataatccaagaacagttaaaaaatcaacaggagaaga

SEQ ID NO: 677916 - DNA, 75 bp, synthetic construct
  source 1..75: mol_type = other DNA
aaataccgtatcacttataccaagactaaaggaaagaaaaaccgaacagtgcctatttcaaaggatttatatgaa

SEQ ID NO: 677917 - DNA, 75 bp, synthetic construct
  source 1..75: mol_type = other DNA
aggtttgtatctacttcgtgttcatggatatatattcaaatgtaaaagatcaggtgtcaccttcacttaatttca

SEQ ID NO: 677918 - DNA, 75 bp, synthetic construct
  source 1..75: mol_type = other DNA
atcttataatttaaatttggacttaaataaatttacaattaattactgcgcccaagcttatcttgatgtttataa

SEQ ID NO: 677919 - DNA, 75 bp, synthetic construct
  source 1..75: mol_type = other DNA
attccaaaaaaaaacagagcattacctaatgaacgatcacgtgttttcattcttaatgaaagagatataaataat

SEQ ID NO: 677920 - DNA, 75 bp, synthetic construct
  source 1..75: mol_type = other DNA
gaaacaaagatggttaaaaggtaagaagaaggtaaccggctcatttagaccgtctggtctgtttcctccggctct

SEQ ID NO: 677921 - DNA, 75 bp, synthetic construct
  source 1..75: mol_type = other DNA
cttgttaacgttaaggatataacaccaggccctttgtctgtaaccaaaaatcagtgtaaaagaatgtggggcgaa

SEQ ID NO: 677922 - DNA, 75 bp, synthetic construct
  source 1..75: mol_type = other DNA
taccggcagtagcaccgggctggcagcgggcgcggcgttgacggtggttatcaacggcgtcacctacggcgcaac

SEQ ID NO: 677923 - DNA, 75 bp, synthetic construct
  source 1..75: mol_type = other DNA
gccgggcaaacggtcaccgtcacctttggcggcaaaacctacactgcaagcgtcgcggcgaatggttcctggagt

SEQ ID NO: 677924 - DNA, 75 bp, synthetic construct
  source 1..75: mol_type = other DNA
cgctcaccaccaacggtacacagtggacttacaccgacagccgcacgctgaccgacggcagctacgtttatcagg

SEQ ID NO: 677925 - DNA, 75 bp, synthetic construct
  source 1..75: mol_type = other DNA
gtgatcaacgccgtggagaaaggcgaaacgctggtggtgagtggcagcaccagcggtgtggaagccgggcagacg

SEQ ID NO: 677926 - DNA, 75 bp, synthetic construct
  source 1..75: mol_type = other DNA
cggttactgtgtccggggaaagtagcgccggaaatccgataagcattacgcatccggtaacggtcgatctcacgc

SEQ ID NO: 677927 - DNA, 75 bp, synthetic construct
  source 1..75: mol_type = other DNA
ccagccagtttagcctggcggtggactggaaccatgacggcctgatggatatcgcccgtatcgcccagaccggac

SEQ ID NO: 677928 - DNA, 75 bp, synthetic construct
  source 1..75: mol_type = other DNA
aacgccgccgaaagcgggcaggatcttcccatcactggcaccactgacgcccagccggggcagacggtgaccgtt

SEQ ID NO: 677929 - DNA, 75 bp, synthetic construct
  source 1..75: mol_type = other DNA
cgggcatcaccattaatccggtggcgacggacgatattatcaacgcttcagaggcaggcagcgcgcaaactatca

SEQ ID NO: 677930 - DNA, 75 bp, synthetic construct
  source 1..75: mol_type = other DNA
ggcacgcgcgaaatcaccatagacgcgaatctccccggtctgcgggtcgacaccgtggcgggcgatgatgtggtt

SEQ ID NO: 677931 - DNA, 75 bp, synthetic construct
  source 1..75: mol_type = other DNA
caccgtctccggcgatgacattattaataatgcggagaaaacccaggatctgaccatcagcggcggctccagcgg

SEQ ID NO: 677932 - DNA, 75 bp, synthetic construct
  source 1..75: mol_type = other DNA
ggtcgataccgtggcgggcgatgatgtgattaacagccttgagcacagtcaggcgctggtgataacaggtagcag

SEQ ID NO: 677933 - DNA, 75 bp, synthetic construct
  source 1..75: mol_type = other DNA
aaaacctacacctctgaaccgggcggcgcggtagtggtcgatccggcgcacaacacctggtatgtacagttgccg

SEQ ID NO: 677934 - DNA, 75 bp, synthetic construct
  source 1..75: mol_type = other DNA
agcagttcgcaggccaccgacgacactacgccgctgctgaacggtgtactttccgcgccgcttgccagcggtgaa

SEQ ID NO: 677935 - DNA, 75 bp, synthetic construct
  source 1..75: mol_type = other DNA
agtccagtgcctgatcggccatctggcggaaagcgacctgcataacggattgatgtttatcgaacgggcggaagg

SEQ ID NO: 677936 - DNA, 75 bp, synthetic construct
  source 1..75: mol_type = other DNA
agatcagacagttgtttatcggtcgttatctgtcgtttaccagaggcaatacgttaactcaaatggagttcacca

SEQ ID NO: 677937 - DNA, 75 bp, synthetic construct
  source 1..75: mol_type = other DNA
atgcttataagcaacgtattgaaaagagaatgggaggtaaaatcaacgaattattcatccgttctcattctattc

SEQ ID NO: 677938 - DNA, 75 bp, synthetic construct
  source 1..75: mol_type = other DNA
gagcaacttaacccggcaggcctgagttaccgctaccagtatgagcaggaccgcatcaccgtcacggacagcctg

SEQ ID NO: 677939 - DNA, 75 bp, synthetic construct
  source 1..75: mol_type = other DNA
aatcagcccacaggaagtgctatcagtcggcacgtctgtgataactaataatggacaaacgataactcttacact

SEQ ID NO: 677940 - DNA, 75 bp, synthetic construct
  source 1..75: mol_type = other DNA
cgcattggccccggcgatattgtctttaagaacctgccccgcgcacttgctgttcgtggggagtggcaggagcgg

SEQ ID NO: 677941 - DNA, 75 bp, synthetic construct
  source 1..75: mol_type = other DNA
taatccatatcagattgctgaagttctggatatgatatccgtagcatctacgcgtacaagcaacgaatcgaaaag

SEQ ID NO: 677942 - DNA, 75 bp, synthetic construct
  source 1..75: mol_type = other DNA
tatgtaataaagtttttttcttaaacaaggatgattttaatgatctcattattgataataaaataaccataaaga

SEQ ID NO: 677943 - DNA, 75 bp, synthetic construct
  source 1..75: mol_type = other DNA
tcaggcgtaccgctgatgtcattgaagacagcattcaggaggccatgcttgagtatacagatcgtccactggacc

SEQ ID NO: 677944 - DNA, 75 bp, synthetic construct
  source 1..75: mol_type = other DNA
aacagaagaaggaaaacaggacgatgaagaaaaaccacaaccatctggcgcaatggcagatgaacagggaacggc

SEQ ID NO: 677945 - DNA, 75 bp, synthetic construct
  source 1..75: mol_type = other DNA
aggaaattgcgctaacggtaggaaagctgcgcgttgagctggaagcagcaaaatcaaaactcaacgagcagagtg

SEQ ID NO: 677946 - DNA, 75 bp, synthetic construct
  source 1..75: mol_type = other DNA
taccccgtcagccctgacggaggaggcgctgaaacggatcggcgagctgtatgccatcgagtcggagctcagagg

SEQ ID NO: 677947 - DNA, 75 bp, synthetic construct
  source 1..75: mol_type = other DNA
atttcaacaggggcaaatgcagcacgttccacaggggtgacggtgaacgtcctcccccatgatacgcaaaccggt

SEQ ID NO: 677948 - DNA, 75 bp, synthetic construct
  source 1..75: mol_type = other DNA
atgatttccggtgtcgcagggtataataatttaggttttgttagtccaaaagttactgtagatggtctagtaccg

SEQ ID NO: 677949 - DNA, 75 bp, synthetic construct
  source 1..75: mol_type = other DNA
atagtcagaagaatataattgttaaaggacgtccatttagtgaatatttcaaatattatattgttaatgtatata

SEQ ID NO: 677950 - DNA, 75 bp, synthetic construct
  source 1..75: mol_type = other DNA
gcgtaatactcacaaaagtcatgcgtgaactcgttgaaaccggtcattggccgggcgcaaccctttacgctccct

SEQ ID NO: 677951 - DNA, 75 bp, synthetic construct
  source 1..75: mol_type = other DNA
cgcggcgaacagcaacgatgaaataactttgccttcactggaactggaaaaacagtgggaaccaccaaaaccaat

SEQ ID NO: 677952 - DNA, 75 bp, synthetic construct
  source 1..75: mol_type = other DNA
tgagtgagcggggctatcgcaattacatggatagtaacacttacagagatggaactcagccagttcaggatagtg

SEQ ID NO: 677953 - DNA, 75 bp, synthetic construct
  source 1..75: mol_type = other DNA
cggctaatggttatgcagatactaaggtaactgtatcagagaaaaaactagatgatagaatatcggcaagtgaag

SEQ ID NO: 677954 - DNA, 75 bp, synthetic construct
  source 1..75: mol_type = other DNA
tggcggcaactgccctgattgtggcgcggtgatgggcgacgcaacataccaggaaacattcgatgaagagagtca

SEQ ID NO: 677955 - DNA, 75 bp, synthetic construct
  source 1..75: mol_type = other DNA
ccaaagcccagatggattttacttacggaaaagagacggctgacgccatgctggggctggtgaatacccgtttct

SEQ ID NO: 677956 - DNA, 75 bp, synthetic construct
  source 1..75: mol_type = other DNA
ctccaacaaaactccacgattctcgttatctaggtaataactatcgggaaaggcaaaccgttgctcgcaggcgct

SEQ ID NO: 677957 - DNA, 75 bp, synthetic construct
  source 1..75: mol_type = other DNA
ctgatgcgcgccgttggcagtggactcggcgccacattacaacccggagcagccatttcgcatcttgagggtgaa

SEQ ID NO: 677958 - DNA, 75 bp, synthetic construct
  source 1..75: mol_type = other DNA
ttgaagggattagcgacccgaatgatccgaaatgggttaaggggatccagacccgcgactctatataccagaatc

SEQ ID NO: 677959 - DNA, 75 bp, synthetic construct
  source 1..75: mol_type = other DNA
tgaagcccggaaaaccattccgcccaaaaatcctgtcgatgccgacaaattgctggctgcctctcgcggagaatt

SEQ ID NO: 677960 - DNA, 75 bp, synthetic construct
  source 1..75: mol_type = other DNA
ctggcctttctgattttccgttttctgcgtcgtctgggggaaaaacaggctcaggatgagcgcatgggggggcgt

SEQ ID NO: 677961 - DNA, 75 bp, synthetic construct
  source 1..75: mol_type = other DNA
ccgtcgaatcatcctgtggcgggaataacggtgaacttcaccatgccacaggacgtggcggcaaactttaccctc

SEQ ID NO: 677962 - DNA, 75 bp, synthetic construct
  source 1..75: mol_type = other DNA
tctataaagaatttatataataaattgttcttgaaagaacagcaaaacttattgtctttttttggtattcataaa

SEQ ID NO: 677963 - DNA, 75 bp, synthetic construct
  source 1..75: mol_type = other DNA
gataccccaaattaattaaagcattgggaagattgcctgcacagtatgtgcataaggataactataaaaacattc

SEQ ID NO: 677964 - DNA, 75 bp, synthetic construct
  source 1..75: mol_type = other DNA
cgattgctacgatcgccgcctggtcaggaatgaatgatattgccagttcccgcgcgtcaattaccgaccagctcc

SEQ ID NO: 677965 - DNA, 75 bp, synthetic construct
  source 1..75: mol_type = other DNA
tgaacccgatttctggaatcgatccccttgggattagccacctgtttatacagcataactttaggtatgctttcg

SEQ ID NO: 677966 - DNA, 75 bp, synthetic construct
  source 1..75: mol_type = other DNA
caagtgacctggtacggctgggacggcgaccggctgaccacgatacagaacgacagaacccgcatccagacgatt

SEQ ID NO: 677967 - DNA, 75 bp, synthetic construct
  source 1..75: mol_type = other DNA
gcgcacacagacgtttcaccgtgaggctggcggcgaaatcaccggcgtgacggatggcgcaggccgtcacttccg

SEQ ID NO: 677968 - DNA, 75 bp, synthetic construct
  source 1..75: mol_type = other DNA
cgccaaccttacccaaagtgcagtgctacatgtcgccctggtcgaacagtattgattttcagcccgtgacggttc

SEQ ID NO: 677969 - DNA, 75 bp, synthetic construct
  source 1..75: mol_type = other DNA
tgtcaaaacagaagctaacttcatctccaacttatggtgagcacaaaggtgcattaatgctggaagtaaactcat

SEQ ID NO: 677970 - DNA, 75 bp, synthetic construct
  source 1..75: mol_type = other DNA
acgacgtagtcataaacgctttggctatcgtgctcgtatttaattcagcatttgatctaatcaaagaggtggcag

SEQ ID NO: 677971 - DNA, 75 bp, synthetic construct
  source 1..75: mol_type = other DNA
aaacggcggcggctctgagctttatctcagccattggcgcagtgagcggctttttattccgcaggcgtttggcat

SEQ ID NO: 677972 - DNA, 75 bp, synthetic construct
  source 1..75: mol_type = other DNA
tgattacgaaaaagggtggtggtggtccaaatcaaaccaggacgtgatgaatatcaccggtctggagcaggtgga

SEQ ID NO: 677973 - DNA, 75 bp, synthetic construct
  source 1..75: mol_type = other DNA
caccggtggtggtggcaggggccattactcaggccgggaaactgggctcagccgggacattatatccggccctgc

SEQ ID NO: 677974 - DNA, 75 bp, synthetic construct
  source 1..75: mol_type = other DNA
gaggccatgctgccttatgtcgatcgtccgcttgatcgggatgtggcggacgacattcttggcagtattaatgcg

SEQ ID NO: 677975 - DNA, 75 bp, synthetic construct
  source 1..75: mol_type = other DNA
acgagatgtagccaccggcgttctggcccgttcaatggatgtggatatttataaccttcatccggcacacgctaa

SEQ ID NO: 677976 - DNA, 75 bp, synthetic construct
  source 1..75: mol_type = other DNA
gactatcacgctgggtacagatgaacacggccagactaatgccacggcgtcccttgtggtggatgtggtgaacgc

SEQ ID NO: 677977 - DNA, 75 bp, synthetic construct
  source 1..75: mol_type = other DNA
ccattgaactgacgacaggcacggttgctgtgcagaccatttctacggcagtgattggcctggtggggactgcgc

SEQ ID NO: 677978 - DNA, 75 bp, synthetic construct
  source 1..75: mol_type = other DNA
aattagcgacccgaacgatccgaaatgggttaaggggatccagactcgcgattctgtgtaccagaaccagccaga

SEQ ID NO: 677979 - DNA, 75 bp, synthetic construct
  source 1..75: mol_type = other DNA
ctcctctgccccgatgccgcagcgagtaacagaagaaggaaaacaggatgatgaagaaaaaccgcaaccatctgg

SEQ ID NO: 677980 - DNA, 75 bp, synthetic construct
  source 1..75: mol_type = other DNA
tactaccgatcaactctttttattaaccgcattaccctccgtttctggcgcattattgcgtgttccctactcctt

SEQ ID NO: 677981 - DNA, 75 bp, synthetic construct
  source 1..75: mol_type = other DNA
gattcggaggaaatggaaggcgctgaacatccgcacaatgagaatgctggcagcgatccgcatcgcgattgcagt

SEQ ID NO: 677982 - DNA, 75 bp, synthetic construct
  source 1..75: mol_type = other DNA
cagtcagcctcggttatgtgcggcaggaacgacttaaagatcgcctgcaccgtgaaattattgagcgtgattatc

SEQ ID NO: 677983 - DNA, 75 bp, synthetic construct
  source 1..75: mol_type = other DNA
aattaaccgaaatcgcacggaaaattcgcccggaactggtgacactggaggactggcaaaaacgccagcaagaag

SEQ ID NO: 677984 - DNA, 75 bp, synthetic construct
  source 1..75: mol_type = other DNA
tagagggctgaagacaggcatcgtactgggcaattctcttgcaggcataagctctttggaaaccctgaataaaag

SEQ ID NO: 677985 - DNA, 75 bp, synthetic construct
  source 1..75: mol_type = other DNA
caggaagtgaacgagcaaatccgcaacgcttccgtagtttatatctggcacgacactatagatgccatgggtgat

SEQ ID NO: 677986 - DNA, 75 bp, synthetic construct
  source 1..75: mol_type = other DNA
gggcaggcatatcaactatgagaagcacttcagtgcagagctgcgctcccagaccggagtgctcccaagctatac

SEQ ID NO: 677987 - DNA, 75 bp, synthetic construct
  source 1..75: mol_type = other DNA
taatggcagaatatacagagatgcatcatcctctcttgaaaatgttcttatagttggactgccagtaggcacaca

SEQ ID NO: 677988 - DNA, 75 bp, synthetic construct
  source 1..75: mol_type = other DNA
gtaagccatttaatgcaaaaaattccagattttctgaagaagcaactgaccaacccctgtcccgtgaaggtttcg

SEQ ID NO: 677989 - DNA, 75 bp, synthetic construct
  source 1..75: mol_type = other DNA
aacaatattttcagtttttttaagttttaagaggggggagaaagacttagttaactatcttaatggtggtctttt

SEQ ID NO: 677990 - DNA, 75 bp, synthetic construct
  source 1..75: mol_type = other DNA
gaaggagatctggcggctatgagatgggaggatataagagatggcaggctatacgtggaacaacaaaaaacaggg

SEQ ID NO: 677991 - DNA, 75 bp, synthetic construct
  source 1..75: mol_type = other DNA
gacgtcgtcatgcctggcatcgggctttaccgcattcaggcagaccgttctggcgattatgccggtgcccgcgaa

SEQ ID NO: 677992 - DNA, 75 bp, synthetic construct
  source 1..75: mol_type = other DNA
aagacgaatcggtaatgatggcgcttgactactgccgcgcccgccagctggatccgttgctcaaacctgtccacc

SEQ ID NO: 677993 - DNA, 75 bp, synthetic construct
  source 1..75: mol_type = other DNA
agcggcatacccctgcagcgcaatttctataaagagaatgttaaacgtcagtttgacacctcgcaggtcaaacgt

SEQ ID NO: 677994 - DNA, 75 bp, synthetic construct
  source 1..75: mol_type = other DNA
agaacgaagacgaactgtcgttagacaggaagatgatggcagtggttgtaaaagctgattctgcgtctttgtcgg

SEQ ID NO: 677995 - DNA, 75 bp, synthetic construct
  source 1..75: mol_type = other DNA
tgatttacctgaatcagctaaactcggatgggttagtaccacgaacataaacacattggggatatttgagtgcat

SEQ ID NO: 677996 - DNA, 75 bp, synthetic construct
  source 1..75: mol_type = other DNA
acaataataagctgaacataaaaatgtattactcatctctaagtgggggaatcaatacccaacaacttgaagaga

SEQ ID NO: 677997 - DNA, 75 bp, synthetic construct
  source 1..75: mol_type = other DNA
acaattttaaatatatatcccaacaagagaaggatatcgtcctaaaggtctataaatcagtaagtaaaataatta

SEQ ID NO: 677998 - DNA, 75 bp, synthetic construct
  source 1..75: mol_type = other DNA
atattgcaggtaatgcaaagttaacaatgagacttcaggcagacaagcctagtgggaatgcagttgtttcagatg

SEQ ID NO: 677999 - DNA, 75 bp, synthetic construct
  source 1..75: mol_type = other DNA
actataagggaatggcgataaaatcgaaggaccttctggagttaaaaaatcaggaagggcgagaccttattcgcg

SEQ ID NO: 678000 - DNA, 75 bp, synthetic construct
  source 1..75: mol_type = other DNA
gcgcgccctctgctcggcttcaccggtgaggatgtacagatgattgaagagattatcctggctcaccttgagcgt

SEQ ID NO: 678001 - DNA, 75 bp, synthetic construct
  source 1..75: mol_type = other DNA
atgagtgagttaaccgcactgcaggaacgtcttgccggtctgattgccagcctgtcaccggcggcgcgtcggcaa

SEQ ID NO: 678002 - DNA, 75 bp, synthetic construct
  source 1..75: mol_type = other DNA
atgaatgagtttaagcgttttgaagaccggctggctggactgattgaatcgctgtcaccgtcagggcgtcggcga

SEQ ID NO: 678003 - DNA, 75 bp, synthetic construct
  source 1..75: mol_type = other DNA
aaatctaatcttccacaacggctcataattgaaataatattgccatttatgaaattgggttgggttgaattagtt

SEQ ID NO: 678004 - DNA, 75 bp, synthetic construct
  source 1..75: mol_type = other DNA
aaattccttttcattatggagttcataaattcaaaatatttaaaggccatagatggggagctttagatcattttt

SEQ ID NO: 678005 - DNA, 75 bp, synthetic construct
  source 1..75: mol_type = other DNA
ctggcgacctacatggtggaaggcggcagcagcaaagccttcaccgtgatcaaaaaaaatgatgtatgccgatcc

SEQ ID NO: 678006 - DNA, 75 bp, synthetic construct
  source 1..75: mol_type = other DNA
gtttgctgaacctgcgcaatcgccacatcgatggtttccactaccaggacagcgccaccttctggaaagcctact

SEQ ID NO: 678007 - DNA, 75 bp, synthetic construct
  source 1..75: mol_type = other DNA
cagctggcggtgaaaaaacgcatcgagattgatgagccagaacagcagttcctgctgtggttcccccatgatgcg

SEQ ID NO: 678008 - DNA, 75 bp, synthetic construct
  source 1..75: mol_type = other DNA
atgaataataagggctccggtctgaccccagctcaggcactggataaacttgacgcgctgtatgagcaatctgta

SEQ ID NO: 678009 - DNA, 75 bp, synthetic construct
  source 1..75: mol_type = other DNA
cggcgttgatacggagctgttccgcagccctgcgaagagaatgatgcttgccagaaagctggctgaaaacggcga

SEQ ID NO: 678010 - DNA, 75 bp, synthetic construct
  source 1..75: mol_type = other DNA
gctaagctagcttggcccagagcgaccagcttggaagacatcactgggcaggtaggtgccatagacgtacctacg

SEQ ID NO: 678011 - DNA, 75 bp, synthetic construct
  source 1..75: mol_type = other DNA
ctcgatggggggcaaggtcgctcagcttatggcttcgcggcggcctgccggactggccgggttggttctcgtcgc

SEQ ID NO: 678012 - DNA, 75 bp, synthetic construct
  source 1..75: mol_type = other DNA
agatccatgtcgaggagcaagggcaaggcgatccgtcactcgtttttctgcattactggggcggctcctcccgca

SEQ ID NO: 678013 - DNA, 75 bp, synthetic construct
  source 1..75: mol_type = other DNA
gtctgataggactcatattgatgatctttacttccgtatttggatttgccaatagcccatcggcttattacttaa

SEQ ID NO: 678014 - DNA, 75 bp, synthetic construct
  source 1..75: mol_type = other DNA
ctcccatggctcgttcaggcatgggttgaggatattaacgaaaaacgcactgatgcttttacatctgtgccgctg

SEQ ID NO: 678015 - DNA, 75 bp, synthetic construct
  source 1..75: mol_type = other DNA
gtacagggcatttgtccatgttggaaacaccggatgcattgacaccattgattgagcatttctgccgttcgttgc

SEQ ID NO: 678016 - DNA, 75 bp, synthetic construct
  source 1..75: mol_type = other DNA
aaagttcgtgctatcaataagctgggaattaagaaaaaagtttatgaagcgcttttttataaagcgctaattcag

SEQ ID NO: 678017 - DNA, 75 bp, synthetic construct
  source 1..75: mol_type = other DNA
gaagaaaatataatgaaaacgatgacacctatcgtcatcattactgggcatcactcagaagatctttgttctctg

SEQ ID NO: 678018 - DNA, 75 bp, synthetic construct
  source 1..75: mol_type = other DNA
acgcctattaacaatccggtgcttagatctattaccaatgaaatgattcttctgcagtacaatctttcagttgaa

SEQ ID NO: 678019 - DNA, 75 bp, synthetic construct
  source 1..75: mol_type = other DNA
aggcgatcagttctgcatacactgccgaacaccgtcgacaatttcacaaacctgagaagatgtatcgaaaagctg

SEQ ID NO: 678020 - DNA, 75 bp, synthetic construct
  source 1..75: mol_type = other DNA
gaatgaaaaaaccaagttagggcagtaccgaaagatggttatgaacggtgtgatcaatgattctgtactaatcgt

SEQ ID NO: 678021 - DNA, 75 bp, synthetic construct
  source 1..75: mol_type = other DNA
tgatgagcagtattttctgcttatacgcttatcatccattcgttgcgatgaaggttgttctcgctatgagggatt

SEQ ID NO: 678022 - DNA, 75 bp, synthetic construct
  source 1..75: mol_type = other DNA
attacggacttcaacagttcgtactgttctactcaatgcttactatggcaatattcagagaggttaccggctgcc

SEQ ID NO: 678023 - DNA, 75 bp, synthetic construct
  source 1..75: mol_type = other DNA
ccagcgtgaaatgaaggagcagctttcccggctgtccatactggacgaggtgagagcgttaactgtcggtgatta

SEQ ID NO: 678024 - DNA, 75 bp, synthetic construct
  source 1..75: mol_type = other DNA
tgcctccaaatgtgatcgtaccaactctggcagacagagggacttatattgcttctgaatcaaccttttatcgtg

SEQ ID NO: 678025 - DNA, 75 bp, synthetic construct
  source 1..75: mol_type = other DNA
acgagatttatcgccgtcagcgagagaagaaagaagcgttagacactctggaggatttagatgcgatacgagcat

SEQ ID NO: 678026 - DNA, 75 bp, synthetic construct
  source 1..75: mol_type = other DNA
tcgtcctgtcctgcctgtgtgccggacggacatatgcggagtccgcaggccagacgccgtatccggaaaaaagcc

SEQ ID NO: 678027 - DNA, 75 bp, synthetic construct
  source 1..75: mol_type = other DNA
tacaatgccctgctgcgcacgttactggcgatcgacctgaaggccctgcgtgactacctggccggaacggaggcc

SEQ ID NO: 678028 - DNA, 75 bp, synthetic construct
  source 1..75: mol_type = other DNA
gattggtatgctgaaaaatcagtttgccgtatcgcagcgcatcgccaggacgaatgaagccgcgcaggtcaggct

SEQ ID NO: 678029 - DNA, 75 bp, synthetic construct
  source 1..75: mol_type = other DNA
aaatatcagggaataatccatggcgatattgcacaagatcataacgtgagaaaagtggttccagtatcagcgagt

SEQ ID NO: 678030 - DNA, 75 bp, synthetic construct
  source 1..75: mol_type = other DNA
tcgggttaatgagtattgtcgtgggcgataaacaacgtttcttgcctcaaggcgacggtgatgctgccaacttac

SEQ ID NO: 678031 - DNA, 75 bp, synthetic construct
  source 1..75: mol_type = other DNA
tccatggtatgaaacgcctgataatctctttttcagccagcataccctccaccgtactgacgaacgtacgcagat

SEQ ID NO: 678032 - DNA, 75 bp, synthetic construct
  source 1..75: mol_type = other DNA
agcaggtaaagttgtcaatgcaacaactggatgaactgcttactgcaatggttcaggcgcaggtcgatcgcaatg

SEQ ID NO: 678033 - DNA, 75 bp, synthetic construct
  source 1..75: mol_type = other DNA
aacagtaaaagtggcaaaattattgaaccgcgttcagcacacaacagagcgttagctcgagctgagttaccacat

SEQ ID NO: 678034 - DNA, 75 bp, synthetic construct
  source 1..75: mol_type = other DNA
cgtacgtagcctcaataatcccattgcatcggcctatctccaggtacttttgctcaccggtgcacggcgtgaaga

SEQ ID NO: 678035 - DNA, 75 bp, synthetic construct
  source 1..75: mol_type = other DNA
tttgcccatgaaaacaatgactcatggaaagtctgcccggtagcaagattgatcagagatggtcagaatgcgtgg

SEQ ID NO: 678036 - DNA, 75 bp, synthetic construct
  source 1..75: mol_type = other DNA
tttaatgcctccggtattgtctggccattacctgaatcactttcatttgcccaactcgatgccatactttatgcc

SEQ ID NO: 678037 - DNA, 75 bp, synthetic construct
  source 1..75: mol_type = other DNA
accgcagcccttgtattgtcacgcctgaatgctacccgtctggtggtacgttttcaggacggcacgatggttgat

SEQ ID NO: 678038 - DNA, 75 bp, synthetic construct
  source 1..75: mol_type = other DNA
gtgcatagcccgtgccgcccgccgtagccgcctgattgctcagggcctctacatcgacgaaatggagtccatcct

SEQ ID NO: 678039 - DNA, 75 bp, synthetic construct
  source 1..75: mol_type = other DNA
atgaaacgcacaccattttaccgcaggccagggcgcaccgggcaattctccggccttcgtgagcgcgttatctgg

SEQ ID NO: 678040 - DNA, 75 bp, synthetic construct
  source 1..75: mol_type = other DNA
taacgagcggcgtataaaattatcgctgggtgcagtcagccctgaaatgtaccgccaacaatgcgggctggcata

SEQ ID NO: 678041 - DNA, 75 bp, synthetic construct
  source 1..75: mol_type = other DNA
tgcgagcaggataaatgattatattttaaaccaaaaagtttactcagaagatattactatgacccgtaatatact

SEQ ID NO: 678042 - DNA, 75 bp, synthetic construct
  source 1..75: mol_type = other DNA
atcatactctatttttttaatgatcttagccgttttgattattccaattaaaacgttttttttctataagatgtc

SEQ ID NO: 678043 - DNA, 75 bp, synthetic construct
  source 1..75: mol_type = other DNA
actaaatgatctgaatgctcaggattctggtcaagattacttggctctcaaagcaggggatgatagtgctagtgg

SEQ ID NO: 678044 - DNA, 75 bp, synthetic construct
  source 1..75: mol_type = other DNA
aggatggggccgcgctggccccacaacagttccagcagcaggctcgctgggacgaacatattgctgacactgttg

SEQ ID NO: 678045 - DNA, 75 bp, synthetic construct
  source 1..75: mol_type = other DNA
gtaaaactgtttgaccctctcactccggaactgttacgggcgctaatccgcgaaatgaaagggggtatccgatga

SEQ ID NO: 678046 - DNA, 75 bp, synthetic construct
  source 1..75: mol_type = other DNA
agacgaagtttccgcagctatgcaaagccgggagccccgatgatgtgtctgaggtggtgaatgtggcgctgagcg

SEQ ID NO: 678047 - DNA, 75 bp, synthetic construct
  source 1..75: mol_type = other DNA
gtgcattgatcgtgccgcccgccgtcgccgcctgattgctcagggcctctacatcgacgaaatggagtccatcct

SEQ ID NO: 678048 - DNA, 75 bp, synthetic construct
  source 1..75: mol_type = other DNA
aacccgtatggtgatttatcgtcgtatcgcgaagaacaacagtgatccgatgccgccggtggccatgctgaatca

SEQ ID NO: 678049 - DNA, 75 bp, synthetic construct
  source 1..75: mol_type = other DNA
tggcctgatggccaactacgcagctgctcacggcctgacggtgaataaaatcagtctgcgtcccggttcctgcgt

SEQ ID NO: 678050 - DNA, 75 bp, synthetic construct
  source 1..75: mol_type = other DNA
aaaaggagctaaataccagctaccgcaaaggcccgtcatttgtcgactggctgccgtgggtggagtttttgcccg

SEQ ID NO: 678051 - DNA, 75 bp, synthetic construct
  source 1..75: mol_type = other DNA
tttcagcccggatgatgataacgggcggcgatccgaaagaagaagccgaaatgaagcgtgccgaccgggctatga

SEQ ID NO: 678052 - DNA, 75 bp, synthetic construct
  source 1..75: mol_type = other DNA
ccaggcgtgtgaacgtgtggtaagtgcgcttggcggggccggtattcgttgtacccgccagaacggtctgcaggt

SEQ ID NO: 678053 - DNA, 75 bp, synthetic construct
  source 1..75: mol_type = other DNA
taatcccgccccagaaatggccgactcaccccagcagttctggcaacaaatggcacagcaggatgacacgccaga

SEQ ID NO: 678054 - DNA, 75 bp, synthetic construct
  source 1..75: mol_type = other DNA
cggacgacgagcggacccaccactaccactacgacagccagcaccgcctggtgttctacacgcggatacagcatg

SEQ ID NO: 678055 - DNA, 75 bp, synthetic construct
  source 1..75: mol_type = other DNA
gctgcggcatcggtactgttctttgccatagtaaatagagctcaatttttaacccgggaccctaattttatacgt

SEQ ID NO: 678056 - DNA, 75 bp, synthetic construct
  source 1..75: mol_type = other DNA
atgggcatagctatcagcggcatagcctgctgaaaatgctcggtgttagcgtaaatcgtgacggtctggcgcagg

SEQ ID NO: 678057 - DNA, 75 bp, synthetic construct
  source 1..75: mol_type = other DNA
ccaattcatacaacgtttactgaagatatggcattatggtttgacctgctaaacgcaggtttcaaattttcaaat

SEQ ID NO: 678058 - DNA, 75 bp, synthetic construct
  source 1..75: mol_type = other DNA
gtaaacgggtgtggcggcgggtacgtgacctgacggggtggatgtcgctgtcgcgtaaaccggaggtaacgtggt

SEQ ID NO: 678059 - DNA, 75 bp, synthetic construct
  source 1..75: mol_type = other DNA
agcgtgacctgacggggtggatgtcgctgtcgcgtaaaccggaggtgacgtggtatggctgggacggagacaggc

SEQ ID NO: 678060 - DNA, 75 bp, synthetic construct
  source 1..75: mol_type = other DNA
accggccggggtcaggatgtggcggaaggtcgcgccagcgttccgggtgtgaagaaaccacgcgcaagggggtaa

SEQ ID NO: 678061 - DNA, 75 bp, synthetic construct
  source 1..75: mol_type = other DNA
cacgcaccggacggtgaacggcgacccggcggagcagtggcagtatgatgagcacgggtggttaaccaccatcag

SEQ ID NO: 678062 - DNA, 75 bp, synthetic construct
  source 1..75: mol_type = other DNA
aatatgatgaatggggcaaccagcttaatgaggagaacccgcatcacctgcaccagccgtaccggctgccggggc

SEQ ID NO: 678063 - DNA, 75 bp, synthetic construct
  source 1..75: mol_type = other DNA
ggcagctgattgccgaagccgtgaatttgtcgccgcgctgatcgtggaagagtggcgggcgtccggcggaaccgg

SEQ ID NO: 678064 - DNA, 75 bp, synthetic construct
  source 1..75: mol_type = other DNA
tttaatcgggtgtaacgaaaaggtttatgatgttgattattatgttaataacatcaaagaagcagagcagatgca

SEQ ID NO: 678065 - DNA, 75 bp, synthetic construct
  source 1..75: mol_type = other DNA
cggcccgtagcttcggcggggcgggcagtacagcggggtacgaacaggccacggcgtacaccctcacagggcagc

SEQ ID NO: 678066 - DNA, 75 bp, synthetic construct
  source 1..75: mol_type = other DNA
ccgacacgctgcccgccggtacagagtacggtgccgataacggtatccggctggaggcggtatggctgacacacg

SEQ ID NO: 678067 - DNA, 75 bp, synthetic construct
  source 1..75: mol_type = other DNA
cgtaacgataccggggggatcagcggtaagcagggcattgaagtcgccgttggcggcagcctgaccaataacatt

SEQ ID NO: 678068 - DNA, 75 bp, synthetic construct
  source 1..75: mol_type = other DNA
accgggaaacgctgcgcagcttcggccgttatgaactcaccaccgcttatacccctgccgggcagttacagagcc

SEQ ID NO: 678069 - DNA, 75 bp, synthetic construct
  source 1..75: mol_type = other DNA
cctgacggtgcatcacccgcagacggaagcactgctctggcagcatgagaccagacatgcgtacaacgcgcaggg

SEQ ID NO: 678070 - DNA, 75 bp, synthetic construct
  source 1..75: mol_type = other DNA
gaacggcgtgttgtctgtaaaaggcagcaatctgaacaacgactacggtgaaattcgtggttatgacgacgtcac

SEQ ID NO: 678071 - DNA, 75 bp, synthetic construct
  source 1..75: mol_type = other DNA
ttgattgccggtgagaatgtttctgtcgatgctaaatcgacgatttacaacaacactgcgctgatcgcggcgaat

SEQ ID NO: 678072 - DNA, 75 bp, synthetic construct
  source 1..75: mol_type = other DNA
acctggatatcgacgcgaccacgctgcaaaacagcagcagcggtacgatgatcgataacaatgcgaccgggttca

SEQ ID NO: 678073 - DNA, 75 bp, synthetic construct
  source 1..75: mol_type = other DNA
gcgactgggcaatggtactgacgtatcagggcaaaagatgcagcaggccatcaacaagttgtggcgttttaccgc

SEQ ID NO: 678074 - DNA, 75 bp, synthetic construct
  source 1..75: mol_type = other DNA
aggttgggaagcaggtgtacgaatgcagatgaaagcccagggctacaccgaagagcagattgatgaatatgtaaa

SEQ ID NO: 678075 - DNA, 75 bp, synthetic construct
  source 1..75: mol_type = other DNA
ccgcgatctggtcggcggtagcggcatcacgatgaacaatacgttcaacatacaggccaataacggttggaccga

SEQ ID NO: 678076 - DNA, 75 bp, synthetic construct
  source 1..75: mol_type = other DNA
atgactacaaatttaggtacgattgagtataccgttgatgcaaaaaccgaacggttactcgtggcccaacgccaa

SEQ ID NO: 678077 - DNA, 75 bp, synthetic construct
  source 1..75: mol_type = other DNA
cgaaaacgccggaagccatgcaggagctatctggcttcatgcaggttttgcttcaggataccgaaaacggtaacg

SEQ ID NO: 678078 - DNA, 75 bp, synthetic construct
  source 1..75: mol_type = other DNA
atgactaaaaatgtagggacaatcgaatatacgattgatgcaaaaactggtcagcttcttatcgcgcaacgccaa

SEQ ID NO: 678079 - DNA, 75 bp, synthetic construct
  source 1..75: mol_type = other DNA
tgtcagcgggcacgcagatcctttcagctattcgcgggatagctttcggtggcggacgctacaacggcggcgcgg

SEQ ID NO: 678080 - DNA, 75 bp, synthetic construct
  source 1..75: mol_type = other DNA
gctctaccctcactcctgaaagtatgccttcacgataagattgtcaatccgcaggctttgccgtctgcgatcctg

SEQ ID NO: 678081 - DNA, 75 bp, synthetic construct
  source 1..75: mol_type = other DNA
ttacagataaatttgctaatctgactaaaatgccagatgaaaataatggattgcaaaaaaatcagaaaaattttg

SEQ ID NO: 678082 - DNA, 75 bp, synthetic construct
  source 1..75: mol_type = other DNA
cgcggaaaaagacatccaagagatgaaagaagagattattcgatcaaagaatagtatgggggaattgactgccga

SEQ ID NO: 678083 - DNA, 75 bp, synthetic construct
  source 1..75: mol_type = other DNA
ggctccgctttacccggccatgcgggcatggccttgtgggttttcagttatgtggccgccgtgtcgtgtgcgggc

SEQ ID NO: 678084 - DNA, 75 bp, synthetic construct
  source 1..75: mol_type = other DNA
ttatgtggttgtccactttttgctcgtctgtatgttactttcagatgctttaaaagaggattttcccctatattt

SEQ ID NO: 678085 - DNA, 75 bp, synthetic construct
  source 1..75: mol_type = other DNA
tatccgtcagtggtcaacataccgatggtaaaaggggcaagcagcgccagcaattcacgacagctttcatcagtc

SEQ ID NO: 678086 - DNA, 75 bp, synthetic construct
  source 1..75: mol_type = other DNA
tagccgaaatgttgcatggcagttatccgaagtggaacagtggattgcggatcgtaaatcagcaatgtttaaagc

SEQ ID NO: 678087 - DNA, 75 bp, synthetic construct
  source 1..75: mol_type = other DNA
acgccggcgcgaaaaatccacctgtaccactgcgaccatcgcggcctgccgctggcgctcatcagcacggaaggg

SEQ ID NO: 678088 - DNA, 75 bp, synthetic construct
  source 1..75: mol_type = other DNA
tggagggcgaagcactgaaggaatgtctgcgccccaaccgcagggttgaaataaccggggaaacatcagtgacta

SEQ ID NO: 678089 - DNA, 75 bp, synthetic construct
  source 1..75: mol_type = other DNA
tatccactggtaccaatacgttacactgatccactggggttagaacgagttataagtgtatatgggcctcccgct

SEQ ID NO: 678090 - DNA, 75 bp, synthetic construct
  source 1..75: mol_type = other DNA
gacccggcaggaaaccggctgccggacccggaactgcacccggacagcacgctcacggcatggccggataaccgc

SEQ ID NO: 678091 - DNA, 75 bp, synthetic construct
  source 1..75: mol_type = other DNA
cattatgcggggaggccggagagccgctaccggtatgatgataccggtcgggtgacggagcaggtcaacccggag

SEQ ID NO: 678092 - DNA, 75 bp, synthetic construct
  source 1..75: mol_type = other DNA
gccggataaccgcatcgcggaagatgcgcactatgtctaccgctacgatgaatacggcaggctggcggagaagac

SEQ ID NO: 678093 - DNA, 75 bp, synthetic construct
  source 1..75: mol_type = other DNA
aaccggctgccggacccggaactgcacccggacagcaccctcacggcgtggccggataaccgcatcgcggaagat

SEQ ID NO: 678094 - DNA, 75 bp, synthetic construct
  source 1..75: mol_type = other DNA
gaaaaatataacattgggcaactcttcgggttagatggtataaaagcagataatccaataaaagcaaagcaaggg

SEQ ID NO: 678095 - DNA, 75 bp, synthetic construct
  source 1..75: mol_type = other DNA
attgccgaacttaaagcgcaacgcaatgatctggttggcataaatgcgacatacgtcctgaatcgtctcgttgaa

SEQ ID NO: 678096 - DNA, 75 bp, synthetic construct
  source 1..75: mol_type = other DNA
tagcgccgcacttctgaagaaaatcaaatggcctgataaggttaaaaaccttgagttgcttgggcgtcatgtttc

SEQ ID NO: 678097 - DNA, 75 bp, synthetic construct
  source 1..75: mol_type = other DNA
gcatgccaaaaatgataatagcagaaggttatcatatgaaaatagtagtgaaggattaagagattttataaagac

SEQ ID NO: 678098 - DNA, 75 bp, synthetic construct
  source 1..75: mol_type = other DNA
gtgacggagcaggtcaacccggaggggctggactaccgctttgagtacggagagcgccgggtaatcatcacggac

SEQ ID NO: 678099 - DNA, 75 bp, synthetic construct
  source 1..75: mol_type = other DNA
cctgtaccactgcgaccatcgcggcctgccgctggcgcttgtcagcacggaaggggcaacagaatggtgcgcaga

SEQ ID NO: 678100 - DNA, 75 bp, synthetic construct
  source 1..75: mol_type = other DNA
tcagagcattaagcccttacgactacacactgtattgcaggaagtgggtaaaaccaaatctgacttgtacgccac

SEQ ID NO: 678101 - DNA, 75 bp, synthetic construct
  source 1..75: mol_type = other DNA
gaagtttttcctagaccattccccttgccaattccatggcccaaaagccctgcacagcagcaagcagatgataat

SEQ ID NO: 678102 - DNA, 75 bp, synthetic construct
  source 1..75: mol_type = other DNA
ctactatcttgatatttcagggattaggttatcagtccaacaatacaacggtgagtatactacctataagggctc

SEQ ID NO: 678103 - DNA, 75 bp, synthetic construct
  source 1..75: mol_type = other DNA
agttcattcacactctgccaacagcgagtaatgttgtcgagggttttagatttacactgaatgccattctagggg

SEQ ID NO: 678104 - DNA, 75 bp, synthetic construct
  source 1..75: mol_type = other DNA
ctctctccggagcgaatgcatttgaaatgggcccggccagattaggtcagtacctgagtgcaaaggaatctgcct

SEQ ID NO: 678105 - DNA, 75 bp, synthetic construct
  source 1..75: mol_type = other DNA
ctgccgccggtggagtggctgacgtatggcagcggttatcttgcggggatgaagctgggcggaacaccgctggtc

SEQ ID NO: 678106 - DNA, 75 bp, synthetic construct
  source 1..75: mol_type = other DNA
cctgtatgcgtatccgctgaacccggtgcagcggggggatcctcttgggttgtctggtttcgggtggggcggcga

SEQ ID NO: 678107 - DNA, 75 bp, synthetic construct
  source 1..75: mol_type = other DNA
gccgccgttttcacctgatgctgaccacacaggcgcagcgggcggaagaggcccgtaaaccgcacaccgcttcgt

SEQ ID NO: 678108 - DNA, 75 bp, synthetic construct
  source 1..75: mol_type = other DNA
gaaccgctgtataccggacactggcaggcatgaagctcggcgacacaccgctggtggatttcacccgcgaccgcc

SEQ ID NO: 678109 - DNA, 75 bp, synthetic construct
  source 1..75: mol_type = other DNA
caggcgacctgacagcaacgatatcaccggacggtaaacgcagcgccaccgaatatgataaacgtgggcgtccgg

SEQ ID NO: 678110 - DNA, 75 bp, synthetic construct
  source 1..75: mol_type = other DNA
gaaaatgcatttggagattatattactgacatgacttctagtgaagcggtagataaatttaaaggtgatgataaa

SEQ ID NO: 678111 - DNA, 75 bp, synthetic construct
  source 1..75: mol_type = other DNA
gtgtcgaatgactaagacatttggatcaacaatagctgacgtgataggtaaaaatcatgaggcggctggggatag

SEQ ID NO: 678112 - DNA, 75 bp, synthetic construct
  source 1..75: mol_type = other DNA
aacccctgtgcaggacgatgtgcgacaacaacagaagcatgattacgttcatgacgacaattattcgtcccgtta

SEQ ID NO: 678113 - DNA, 75 bp, synthetic construct
  source 1..75: mol_type = other DNA
cctatttttttatttatatctggttttttatctttttctcgagatatacatgatacaccatactatctcaagaaa

SEQ ID NO: 678114 - DNA, 75 bp, synthetic construct
  source 1..75: mol_type = other DNA
cctgagggactttttactgactcgctgattaccggccagccgtggcgcgggcagcagcgccgcacccggatggtt

SEQ ID NO: 678115 - DNA, 75 bp, synthetic construct
  source 1..75: mol_type = other DNA
ggcaaatcaatagtgaactgactgaatgccacatccgcggtatcgccgtcaccacctttagtgtggatggcgctc

SEQ ID NO: 678116 - DNA, 75 bp, synthetic construct
  source 1..75: mol_type = other DNA
tatgtatatgaacaccccaagcaagatgctcaggtttcagcggcattcatttacactaactgcatgaataaatta

SEQ ID NO: 678117 - DNA, 75 bp, synthetic construct
  source 1..75: mol_type = other DNA
tgtatgggtatagcacaattcaccgcaaacgtaaccaaaggccgaaacggaggaatgaccaaagcagactattat

SEQ ID NO: 678118 - DNA, 75 bp, synthetic construct
  source 1..75: mol_type = other DNA
ttacgggggattgcccgtccggaagggctgtttaaggacacggaggtgaccggacaaccctggcgcggacagcag

SEQ ID NO: 678119 - DNA, 75 bp, synthetic construct
  source 1..75: mol_type = other DNA
tggtgaccgggcagccctggcgtggtcagcagcgacggacccggatggtggtgtaccgccgtatcgggaaaaaca

SEQ ID NO: 678120 - DNA, 75 bp, synthetic construct
  source 1..75: mol_type = other DNA
gaggccccggagggcatgatgccggtgatgaccgactttgcggaaagtctctggttcacgccgccggtgtcggat

SEQ ID NO: 678121 - DNA, 75 bp, synthetic construct
  source 1..75: mol_type = other DNA
ggtggcgaccgaagggcgaaccgaagagcgcctggagcaaatccgggactcggttgaggatgcacttcaggacag

SEQ ID NO: 678122 - DNA, 75 bp, synthetic construct
  source 1..75: mol_type = other DNA
tgccctggttcaatccaggaccggcgctgctgggtccgacagacgaagaccgcgagcggttctatcgcctggctt

SEQ ID NO: 678123 - DNA, 75 bp, synthetic construct
  source 1..75: mol_type = other DNA
tcttatgccgccgaccggcagatgctgccggcggatttgcaggaggcgctgtatgccctctcccggggggaaggt

SEQ ID NO: 678124 - DNA, 75 bp, synthetic construct
  source 1..75: mol_type = other DNA
aaactgtctttgaacgatgaaatgagtgaaatagcaattgaaagaaaactattggatagtagtgaaattcaaaaa

SEQ ID NO: 678125 - DNA, 75 bp, synthetic construct
  source 1..75: mol_type = other DNA
tatgagtacaacgccgcaggcgacctgactgccgttatcactccggacggcaaccggagcgagacacagtacgat

SEQ ID NO: 678126 - DNA, 75 bp, synthetic construct
  source 1..75: mol_type = other DNA
cggcaggaaggctaacggcgcagacggacgcggcgggacggcggacagagtatggtctgaatgtggtatccggcg

SEQ ID NO: 678127 - DNA, 75 bp, synthetic construct
  source 1..75: mol_type = other DNA
cgtctgccgggacagcagtatgatgaggagtcggggctgtactacaaccgcaaccggtactatgatccgttgcag

SEQ ID NO: 678128 - DNA, 75 bp, synthetic construct
  source 1..75: mol_type = other DNA
cacgccggacagcctgccgccggtggagtggctgacgtatggcagcggttacctggcgggaatgaagctgggcgg

SEQ ID NO: 678129 - DNA, 75 bp, synthetic construct
  source 1..75: mol_type = other DNA
ggtgacatggtacgggtgggacggtgacaggctgacgacggtacagaccggcaccacgcgtatccagacggtata

SEQ ID NO: 678130 - DNA, 75 bp, synthetic construct
  source 1..75: mol_type = other DNA
gctgaccacacaggcgcagcgggcggaagccttccgtaaacagcgcgccacgtctttatcttcccctgccggtcc

SEQ ID NO: 678131 - DNA, 75 bp, synthetic construct
  source 1..75: mol_type = other DNA
ctctggggttagaagcgattcttcctggtccgttccccttcccaattccattgccaaaaagtcctgtacagcagg

SEQ ID NO: 678132 - DNA, 75 bp, synthetic construct
  source 1..75: mol_type = other DNA
gaccgcatcccggaaggggttatccggatgcacgacgagcggacccaccactaccactacgacagccagcaccgc

SEQ ID NO: 678133 - DNA, 75 bp, synthetic construct
  source 1..75: mol_type = other DNA
ctgcatccggacagcacgctcacggcgtggccggataaccgcatcgcggaagatgcgcactatatctatcgctac

SEQ ID NO: 678134 - DNA, 75 bp, synthetic construct
  source 1..75: mol_type = other DNA
tgagtacgaccggtacggtcaacaaatcgccgttcaccgggaagaaggcatcagcacttacagcagttataaccc

SEQ ID NO: 678135 - DNA, 75 bp, synthetic construct
  source 1..75: mol_type = other DNA
gcacctactggtgttctatacgcggatacagcatggtgagccgctggtcgagagccgatacctttacgacccgct

SEQ ID NO: 678136 - DNA, 75 bp, synthetic construct
  source 1..75: mol_type = other DNA
atcttcccctgacaccccccgccctctttcagactcagcgttccccgacacactgcccggtaccgaatacggtcc

SEQ ID NO: 678137 - DNA, 75 bp, synthetic construct
  source 1..75: mol_type = other DNA
gggcacaatattgtcggcggatttttctccggcggcgaagcctcctgggggattgccaacggctggtcgctttac

SEQ ID NO: 678138 - DNA, 75 bp, synthetic construct
  source 1..75: mol_type = other DNA
cttaaataaaataaatagccaatctatttgcgaagataaagagttcgctggtttaatatgtaaggataatagtgg

SEQ ID NO: 678139 - DNA, 75 bp, synthetic construct
  source 1..75: mol_type = other DNA
aactactgggtaagctttcccgcgatattgctcagcgcacacccggcaccggcgatttccctacagccatagaag

SEQ ID NO: 678140 - DNA, 75 bp, synthetic construct
  source 1..75: mol_type = other DNA
gctgtatcacaagcattaatcacatttccacagataaactcctggaaagtgttagccacatcctgtagcggacat

SEQ ID NO: 678141 - DNA, 75 bp, synthetic construct
  source 1..75: mol_type = other DNA
ggcgcacatacccattctgtaggggcgcatagccatagtgtgagtgcatataaccataacgcaggcgcacatact

SEQ ID NO: 678142 - DNA, 75 bp, synthetic construct
  source 1..75: mol_type = other DNA
gattatttaattcttgatgtctttttacctaaaaaagataactatagcccagatgaaagaaatggattaggtctt

SEQ ID NO: 678143 - DNA, 75 bp, synthetic construct
  source 1..75: mol_type = other DNA
agaaaagggtttattgagccaaatgatggtgttttcattaaccgctattttaaaggaggacattcaacttacttc

SEQ ID NO: 678144 - DNA, 75 bp, synthetic construct
  source 1..75: mol_type = other DNA
aaaaataaggaggaccgctggcccggactggcggggccggatactgaaggcaatatgcacagcgataacctggcc

SEQ ID NO: 678145 - DNA, 75 bp, synthetic construct
  source 1..75: mol_type = other DNA
cttgaagatgcgcggcacgttggcacaagcagccccagttgaactggccaatttaaccgcacaggcgttgatctc

SEQ ID NO: 678146 - DNA, 75 bp, synthetic construct
  source 1..75: mol_type = other DNA
cagtctcttaaatctgaccttcgcgatgcgttcatcatatttgcacgtacaacaccggaattggctgccgaatac

SEQ ID NO: 678147 - DNA, 75 bp, synthetic construct
  source 1..75: mol_type = other DNA
attatccagggaatgcgcttcaataaagtggatatcgcctggtacggcaacctgtcggcaatggaagcggtggat

SEQ ID NO: 678148 - DNA, 75 bp, synthetic construct
  source 1..75: mol_type = other DNA
ccgcaccccggaagttttccggctggcggccagccatagccaacagcaagactgcaaaccttgtgaaacagaact

SEQ ID NO: 678149 - DNA, 75 bp, synthetic construct
  source 1..75: mol_type = other DNA
aataatgcccttattgctcatattaatcgtaaagttattcatgattatttactatttctgaataaaaatctaatc

SEQ ID NO: 678150 - DNA, 75 bp, synthetic construct
  source 1..75: mol_type = other DNA
gcccgtctggcagcacctgtgggcgtcatcagtgatgagcagatcggccgctaccggccgaaaatcatcctcgcc

SEQ ID NO: 678151 - DNA, 75 bp, synthetic construct
  source 1..75: mol_type = other DNA
cacgccggcgcgaaaaatccacctgtaccactgcgaccatcgcggcctgccgctggcgctcatcagcacggaagg

SEQ ID NO: 678152 - DNA, 75 bp, synthetic construct
  source 1..75: mol_type = other DNA
atgtagggcgtacatctttgcattgcctgacgttgatgcttttaaattggattttgcaaaggagttatcaggtga

SEQ ID NO: 678153 - DNA, 75 bp, synthetic construct
  source 1..75: mol_type = other DNA
gacaaagagcttgctgaaactttatttttagaattagttcattattgcattccccatccagttatagcgaaaaga

SEQ ID NO: 678154 - DNA, 75 bp, synthetic construct
  source 1..75: mol_type = other DNA
gtacacgccggcgcgaaaaatccacctgtaccactgcgaccatcgcggcctgccgctggcccttatcagcacgga

SEQ ID NO: 678155 - DNA, 75 bp, synthetic construct
  source 1..75: mol_type = other DNA
ctgctggccgttgtgacctcgttgaaaccgataatagttgtgtggagaactgtttaaaagggaagtttaaagagg

SEQ ID NO: 678156 - DNA, 75 bp, synthetic construct
  source 1..75: mol_type = other DNA
gaaataaggaaaaacaaagcattcaatattagagagtatgtagataatttagaaaaagaggttccaccaccacaa

SEQ ID NO: 678157 - DNA, 75 bp, synthetic construct
  source 1..75: mol_type = other DNA
ggggaagtcacccggctggtactggcaccgcgtgacggctttatcgttccggcagagccggacagtaagggccgt

SEQ ID NO: 678158 - DNA, 75 bp, synthetic construct
  source 1..75: mol_type = other DNA
ctggttctttcatggacaggataaccgcgaatgctatatttggagttgaattgttttttataataagcggattta

SEQ ID NO: 678159 - DNA, 75 bp, synthetic construct
  source 1..75: mol_type = other DNA
aactttatctcgctcggtggtcgcaccattgttgatgccacagggtctgagtctatcggacgagatgcgcaggca

SEQ ID NO: 678160 - DNA, 75 bp, synthetic construct
  source 1..75: mol_type = other DNA
ctcctgaactttgggatcatggtattgctggggcatttcttgactacaatttatatgcctctcattatgcaccac

SEQ ID NO: 678161 - DNA, 75 bp, synthetic construct
  source 1..75: mol_type = other DNA
tatcaccttcgccgcttctgatccggtctttcgtaaagtcgtgggccaaatcgtcaaagcttctcaacgacctga

SEQ ID NO: 678162 - DNA, 75 bp, synthetic construct
  source 1..75: mol_type = other DNA
ggacacacgacaccccacaaaagtcttgatattgagagagaattaaaaccgatcacaaaaaggttgtttaactcg

SEQ ID NO: 678163 - DNA, 75 bp, synthetic construct
  source 1..75: mol_type = other DNA
gagcacgaaaaaaaattaaatgcggcaatggatgctaaattttccaacgctaaaggcgttgatatcaacaccgca

SEQ ID NO: 678164 - DNA, 75 bp, synthetic construct
  source 1..75: mol_type = other DNA
ctctagatatgaaacgctaataaaatacgttaggtgggtggatgatagtaacgacactgaattaatcgataaaga

SEQ ID NO: 678165 - DNA, 75 bp, synthetic construct
  source 1..75: mol_type = other DNA
gaagcaaactgttcttcagaagtcatatacctgaaaatgaaggcctctagcgatccttactatctcgttagctac

SEQ ID NO: 678166 - DNA, 75 bp, synthetic construct
  source 1..75: mol_type = other DNA
tgcagttgagcgccagaaaagcggcaatcgctgaacggattgccgcccataaaattacccgcagcaaagtgtcgt

SEQ ID NO: 678167 - DNA, 75 bp, synthetic construct
  source 1..75: mol_type = other DNA
atatgagtgtcattagcaatgcccttgctactgtgacctctaacgcttcacgcttttcaaacgcaaagcctacag

SEQ ID NO: 678168 - DNA, 75 bp, synthetic construct
  source 1..75: mol_type = other DNA
ggtttattattactattcaaatataaaatcgccaaatctgttgacacgcctgagcatgcgtatgtgctaatacat

SEQ ID NO: 678169 - DNA, 75 bp, synthetic construct
  source 1..75: mol_type = other DNA
cccatgaaaaagcgttcaccacttacgccaacagcgagtggaagaaggcgctgaccggtatcagccccgcactgt

SEQ ID NO: 678170 - DNA, 75 bp, synthetic construct
  source 1..75: mol_type = other DNA
acagaatttgaattggccttttgtttgcctgtggatggcgatgatttgccaatactgccggcttttcgctgcgct

SEQ ID NO: 678171 - DNA, 75 bp, synthetic construct
  source 1..75: mol_type = other DNA
gctgtctatcattctgcccggtaaccgcgttctgccatttgtcgacctcgcttcattgatgttcctactggctat

SEQ ID NO: 678172 - DNA, 75 bp, synthetic construct
  source 1..75: mol_type = other DNA
gtctgggggcatcagtcatgatgccagtaatattctttattatcgcactttgctttggggtaaaaatcggtacgg

SEQ ID NO: 678173 - DNA, 75 bp, synthetic construct
  source 1..75: mol_type = other DNA
ctttccttgccgggtacgacgtttcggctgccgtttcgctggcaatcaaagtctccgccgctatgctgctgttgc

SEQ ID NO: 678174 - DNA, 75 bp, synthetic construct
  source 1..75: mol_type = other DNA
tccgataaattgttttataccctgggcggtgggtcggtgatatcgcagccggcgacgcgcagcaatatgaaaaaa

SEQ ID NO: 678175 - DNA, 75 bp, synthetic construct
  source 1..75: mol_type = other DNA
ctggtgaaaatatcaccattaatcttaattccccagcagaaccaggcgagcctataaaatggaaagcatctctgc

SEQ ID NO: 678176 - DNA, 75 bp, synthetic construct
  source 1..75: mol_type = other DNA
tgctgattccggtgcgaaaattgttaataaaggtacttgtagattcaatctgtcaatgcaacacccctttcaatt

SEQ ID NO: 678177 - DNA, 75 bp, synthetic construct
  source 1..75: mol_type = other DNA
caacctctgttgaagaaaaccttctatcgaagcggactgaatcctgaaaagatcaacataatccgttatgcggac

SEQ ID NO: 678178 - DNA, 75 bp, synthetic construct
  source 1..75: mol_type = other DNA
acactaaccagattgaactctctccttatctgcaaaaccgtaaagtggttgcctgggctaaacagcacggcatcc

SEQ ID NO: 678179 - DNA, 75 bp, synthetic construct
  source 1..75: mol_type = other DNA
aagttcgtgatcttttcttttctttgttttttagtgttaaaaatgttaatcggtagtcgtttaatgctagtacct

SEQ ID NO: 678180 - DNA, 75 bp, synthetic construct
  source 1..75: mol_type = other DNA
tgttaatagtaattgcgtttttatcaggaagatataaatctcctatatatatctattatatttttttgtcttttt

SEQ ID NO: 678181 - DNA, 75 bp, synthetic construct
  source 1..75: mol_type = other DNA
gataagaatgcttttattcagaaaggccgtattgttgctggtagttatgactatcgcctgaaacagggcactgta

SEQ ID NO: 678182 - DNA, 75 bp, synthetic construct
  source 1..75: mol_type = other DNA
gcatctagaactaagctacggattaactctgatattatgattagcgcaggtcatggtggtgctggtgataataat

SEQ ID NO: 678183 - DNA, 75 bp, synthetic construct
  source 1..75: mol_type = other DNA
attaagtgatgataaaattatcaaacatatggcgcgcaggaccctcaaactgtttgtaaaaatgaaacgccgcca

SEQ ID NO: 678184 - DNA, 75 bp, synthetic construct
  source 1..75: mol_type = other DNA
tgagcaatttttcacaacgttgcacagggctgatcgggcacaatggattctggaagccgacattcgcagttgttt

SEQ ID NO: 678185 - DNA, 75 bp, synthetic construct
  source 1..75: mol_type = other DNA
tcctttgagatcgtcatcccgccgctgcgcgcccgacgcaacagtattccgtcgctggtgcataaccggttgaag

SEQ ID NO: 678186 - DNA, 75 bp, synthetic construct
  source 1..75: mol_type = other DNA
gttggtggacataatgagcataatttagctgatagacaattaaaaaccacagctaacaggatggtttatcagatt

SEQ ID NO: 678187 - DNA, 75 bp, synthetic construct
  source 1..75: mol_type = other DNA
tgggctattcgatgctccaggtcttggcccggtattgcaggaatatgtcaaaaacctggtgtctggtggggaagt

SEQ ID NO: 678188 - DNA, 75 bp, synthetic construct
  source 1..75: mol_type = other DNA
acacaggttgtttctgaaattccaaacgaatgggcccagaagtttatcccgcaaggagacttttcaccttattac

SEQ ID NO: 678189 - DNA, 75 bp, synthetic construct
  source 1..75: mol_type = other DNA
cagatatttgcatctgcctaatgtcacccgcgcaatgcaacgctacaggtacgccagcattgtcagagtacgata

SEQ ID NO: 678190 - DNA, 75 bp, synthetic construct
  source 1..75: mol_type = other DNA
ggataccggctcaaactctgccgataacattggtggcgtatattacaggccggttcagaaatacattaacgggac

SEQ ID NO: 678191 - DNA, 75 bp, synthetic construct
  source 1..75: mol_type = other DNA
gtcagcacggaaggggcaacagaatggtgcgcagaatacgatgaatggggcaacctgctgaatgaagagaacccg

SEQ ID NO: 678192 - DNA, 75 bp, synthetic construct
  source 1..75: mol_type = other DNA
cattcttcatggagttgcgtaaaatagaggcaaaaggaatagagaattctctcttgtcaattattgaagagttgg

SEQ ID NO: 678193 - DNA, 75 bp, synthetic construct
  source 1..75: mol_type = other DNA
gtttttcccatgatgatttgtatgtggtcggcgataagggaaatgtctggcatttttctggaacagaatgggagc

SEQ ID NO: 678194 - DNA, 75 bp, synthetic construct
  source 1..75: mol_type = other DNA
tgacgaggaggggcatgtttatgcccgtaatagtggttgtaaatatgatggaatagagaggaaaattcctttcgg

SEQ ID NO: 678195 - DNA, 75 bp, synthetic construct
  source 1..75: mol_type = other DNA
atagctatgacgaagttgtttgtgttgatgatgagggatatgtttattcccgtagttgtaaatatgatagcagag

SEQ ID NO: 678196 - DNA, 75 bp, synthetic construct
  source 1..75: mol_type = other DNA
ctgcgggcctgatggaaacgggtactataacaacaacactgttggttctctcgtctggaccggcgtgaccgtaac

SEQ ID NO: 678197 - DNA, 75 bp, synthetic construct
  source 1..75: mol_type = other DNA
ggcccggtgaaatttcgctggcgcataacggcgtgctttttcttgatgagctacctgaatttgaacggcgtacac

SEQ ID NO: 678198 - DNA, 75 bp, synthetic construct
  source 1..75: mol_type = other DNA
tggataaagacaacttcgagtaccactatccgcgcggtttcgatgattgcttcactattgaaccggatctgccgt

SEQ ID NO: 678199 - DNA, 75 bp, synthetic construct
  source 1..75: mol_type = other DNA
cgatggttcggctgacattacgttgactcctaaagatctggacgtttacagcaaaagcgaaatagacaataaaaa

SEQ ID NO: 678200 - DNA, 75 bp, synthetic construct
  source 1..75: mol_type = other DNA
cgggcggcaagtctcgcgcgatgcctcatgtactggaggcttttccaaagggtgaatgtctcgttgagccttttg

SEQ ID NO: 678201 - DNA, 75 bp, synthetic construct
  source 1..75: mol_type = other DNA
gacacggggcgattgccgaagtggtgatcaatcggccggaaaaaatgaatgcaatgacgccagaaatgagtgaag

SEQ ID NO: 678202 - DNA, 75 bp, synthetic construct
  source 1..75: mol_type = other DNA
gttgtgtttgagaaaaacagtgcagtaatgattaacaaagaccgcgttaatgtgttgaatgatgcgactgtggaa

SEQ ID NO: 678203 - DNA, 75 bp, synthetic construct
  source 1..75: mol_type = other DNA
accgatacgtttagccatgcttaatctccgccgggctaaaaaagcggccaaaaccgtaacgcatgtgacgaaaac

SEQ ID NO: 678204 - DNA, 75 bp, synthetic construct
  source 1..75: mol_type = other DNA
aacagcaacagaccacaaaattagatattccggcgcaggggggtagaagtaaagctgctcgctttgatcccatta

SEQ ID NO: 678205 - DNA, 75 bp, synthetic construct
  source 1..75: mol_type = other DNA
agcggtggcctgcaagagatgtaacctattaataaagagaaatgatgtttcatttttaaatgctaacttcataag

SEQ ID NO: 678206 - DNA, 75 bp, synthetic construct
  source 1..75: mol_type = other DNA
aaacgcgcgccccgcgaaaagttaccggctgatttcatcccatccgatgctttccctgcttcgcactatgggagg

SEQ ID NO: 678207 - DNA, 75 bp, synthetic construct
  source 1..75: mol_type = other DNA
ctacggcccgcacacgtaccagtaagccactaaacgaagagcaaaccatatacaggcagtatcaccagtgccaga

SEQ ID NO: 678208 - DNA, 75 bp, synthetic construct
  source 1..75: mol_type = other DNA
actgtacaaattcatacatcaccaacttatacagcgaataaaccaacaggcctgacagatggaactgtatatgta

SEQ ID NO: 678209 - DNA, 75 bp, synthetic construct
  source 1..75: mol_type = other DNA
agctgttcaccaaactgggggtgaagaccgataagatcaatacagaagataattgtatttcactggatgaagcag

SEQ ID NO: 678210 - DNA, 75 bp, synthetic construct
  source 1..75: mol_type = other DNA
tgatgtatctcgataaagagccgctgtttattgatagttcatggatcccgctgtcgcgttatcctgactttgatg

SEQ ID NO: 678211 - DNA, 75 bp, synthetic construct
  source 1..75: mol_type = other DNA
ttcactttccaccgccgcacaagcgttatgggacgtggtacgaggccagggccgtgctctaatggctgggcggga

SEQ ID NO: 678212 - DNA, 75 bp, synthetic construct
  source 1..75: mol_type = other DNA
acaaaaagcaagccgccgaactgataagcgcattacagctttatgtaaacaacgaatttaaaaatgacgaagttg

SEQ ID NO: 678213 - DNA, 75 bp, synthetic construct
  source 1..75: mol_type = other DNA
cgctttataaccgcctggttgaatttaaaatcggcaccactgaagtgataccgggcctcgctgaaaagtgggaag

SEQ ID NO: 678214 - DNA, 75 bp, synthetic construct
  source 1..75: mol_type = other DNA
atctcactttataaggtacggggattcacttaagtttggaggcatgtggacggaagatatgccggtagatataga

SEQ ID NO: 678215 - DNA, 75 bp, synthetic construct
  source 1..75: mol_type = other DNA
agcgggtatgacgcggcaggaaggctcacggcgcagacggacgcggcgggacggcggacagagtacggtctgaat

SEQ ID NO: 678216 - DNA, 75 bp, synthetic construct
  source 1..75: mol_type = other DNA
agaatgatattacatcaggaagactgctgactgtcctggacgatttttcagtcactttcccgggctattatctgt

SEQ ID NO: 678217 - DNA, 75 bp, synthetic construct
  source 1..75: mol_type = other DNA
gtggtggtgatttcgcctcagtgccttccggaacaggacttacccgttgttccttcgcaattactgaagttaccg

SEQ ID NO: 678218 - DNA, 75 bp, synthetic construct
  source 1..75: mol_type = other DNA
tggagctaattacggattatggtctgattgatattgccagggagggttttgatgccggtgtgcgacggggaggcc

SEQ ID NO: 678219 - DNA, 75 bp, synthetic construct
  source 1..75: mol_type = other DNA
gctttcacctgtagtcagatgttaaactctgaatcaccaaataattgcaactctctctattataaagcggagtaa

SEQ ID NO: 678220 - DNA, 75 bp, synthetic construct
  source 1..75: mol_type = other DNA
aatgcttaaaattacttttagataacgcttatagtgtcgtatcgcacaatcaattctttgaaaaagtctggagcg

SEQ ID NO: 678221 - DNA, 75 bp, synthetic construct
  source 1..75: mol_type = other DNA
gccgccaaccacagcaagcagcaacccagcaaaccctgcgaagcggagttgacgcgcgcattgctttttaccgta

SEQ ID NO: 678222 - DNA, 75 bp, synthetic construct
  source 1..75: mol_type = other DNA
acacaggcacagcgggcggaagaggcccgtaaaccgcacaccgcttcgttatcttcccctgacagtccccgccct

SEQ ID NO: 678223 - DNA, 75 bp, synthetic construct
  source 1..75: mol_type = other DNA
gcagacattgcgatgattcatggtttatcaaaatctcaaaatgatgtgcttttacaattggcaatgctgattgga

SEQ ID NO: 678224 - DNA, 75 bp, synthetic construct
  source 1..75: mol_type = other DNA
atacgaaaaagatttctaggcttgaacggcatacatacatggatgaaaacggtgaggtaaaacaagactctaaga

SEQ ID NO: 678225 - DNA, 75 bp, synthetic construct
  source 1..75: mol_type = other DNA
tggcttgaaaagccagctgatcacaggcgcatttctgaactcttggagctgtggtggaaactgggtggacgcaac

SEQ ID NO: 678226 - DNA, 75 bp, synthetic construct
  source 1..75: mol_type = other DNA
tacgaaacagcactggtccgaaaaagattggcaaaaattgatggtgcaattccttcttcttttatttccaaagta

SEQ ID NO: 678227 - DNA, 75 bp, synthetic construct
  source 1..75: mol_type = other DNA
ataccaacgtctgagctaagcggtggtatcatgcaagctgaaaaatatctcttccatttatcaaaatggggaaca

SEQ ID NO: 678228 - DNA, 75 bp, synthetic construct
  source 1..75: mol_type = other DNA
atccttcggctaaaacaaatcggtttatagacattgcactggtggatgcaaacggcaaccttgatatcatcgaag

SEQ ID NO: 678229 - DNA, 75 bp, synthetic construct
  source 1..75: mol_type = other DNA
gcagaaggattgatcttagtgttgaagatgatggaagattatggaacgttagcgactgcgagatgattgtaatag

SEQ ID NO: 678230 - DNA, 75 bp, synthetic construct
  source 1..75: mol_type = other DNA
aactatccataaaacaaaggacaaaaaccacgcccggcggctcaccgccatgctgatgctgcatcgtggtgacac

SEQ ID NO: 678231 - DNA, 75 bp, synthetic construct
  source 1..75: mol_type = other DNA
ttccgggcaaataatttctttggtgtaccgcaggccgcagcggaagaaacgcgtcatcaggcggagtatcaaaac

SEQ ID NO: 678232 - DNA, 75 bp, synthetic construct
  source 1..75: mol_type = other DNA
tgatatggctgcgtgcacagatgaagctgacaagcctgtgctgggcgctgaaagagctggcaaagaatatctgga

SEQ ID NO: 678233 - DNA, 75 bp, synthetic construct
  source 1..75: mol_type = other DNA
atgagcatcaccctgtggatcgcgacgcaaactattggtttgcacacccaactggcggctaatgctggggcgtta

SEQ ID NO: 678234 - DNA, 75 bp, synthetic construct
  source 1..75: mol_type = other DNA
atcgtactgcactgattaccctgcctgcggatcaaaaagcggcaggcgtactgccagatggtatggacgatcgcg

SEQ ID NO: 678235 - DNA, 75 bp, synthetic construct
  source 1..75: mol_type = other DNA
aaataatccccccgcgaaagggaaagaggtagcggtggatgacggcattcttggtggattgaaggatattttgtt

SEQ ID NO: 678236 - DNA, 75 bp, synthetic construct
  source 1..75: mol_type = other DNA
ttaatcactctccggtgtatggcaagtacgaggatgaggtggaccgggaatccgcctatgagatgttgcaaaaag

SEQ ID NO: 678237 - DNA, 75 bp, synthetic construct
  source 1..75: mol_type = other DNA
gagctccgatcgcgatggtcgtgcgctgcccttaacggacgatcgtggcacagagagcctcgccggctatcttcg

SEQ ID NO: 678238 - DNA, 75 bp, synthetic construct
  source 1..75: mol_type = other DNA
gctttatcgtatttcttctctactggtaatgccatcaaaaacagaaattcctggaaatgctataatagaagcggc

SEQ ID NO: 678239 - DNA, 75 bp, synthetic construct
  source 1..75: mol_type = other DNA
caccggtagccgactgatcccgctcagtctcgcctggcgttcgcttgccgatcatcaaagtgccgccgctaacga

SEQ ID NO: 678240 - DNA, 75 bp, synthetic construct
  source 1..75: mol_type = other DNA
cccttatcagcaaggaagggacaacagaatggtgcgcagaatacgatgaatggggtaaccagctgaatgaagaga

SEQ ID NO: 678241 - DNA, 75 bp, synthetic construct
  source 1..75: mol_type = other DNA
atgggtatttgttgcatttattgcagtcgttcgcctggcgcagaaatataaaccagaatatgtctttattcgtaa

SEQ ID NO: 678242 - DNA, 75 bp, synthetic construct
  source 1..75: mol_type = other DNA
caggttttgactcagatgaggaccctgataaataccggacatcaggttattctggcttgcagaaagaacagcaga

SEQ ID NO: 678243 - DNA, 75 bp, synthetic construct
  source 1..75: mol_type = other DNA
gcaggggaaacgctatcgctatatacgctggggtttggaatatgccgatgatatattttatgctgatgaaaaaga

SEQ ID NO: 678244 - DNA, 75 bp, synthetic construct
  source 1..75: mol_type = other DNA
gttttggttacggaataaccctatttggtgagactttatattcaagtggttataattctctgggaatggggagca

SEQ ID NO: 678245 - DNA, 75 bp, synthetic construct
  source 1..75: mol_type = other DNA
tatcaattattattcttgggtttagtcctggtgtaattgccggggattatttcgatccttctatgttggaaaacg

SEQ ID NO: 678246 - DNA, 75 bp, synthetic construct
  source 1..75: mol_type = other DNA
ttacaaaaaaatgtacctgccggaccttttgaaataaatgattttagtccgtttggttacgcaggggatttattt

SEQ ID NO: 678247 - DNA, 75 bp, synthetic construct
  source 1..75: mol_type = other DNA
ttgggctgaaggggggatggaatttttatcagtatccgttgaatccagttacgaatacagatcctctggggttag

SEQ ID NO: 678248 - DNA, 75 bp, synthetic construct
  source 1..75: mol_type = other DNA
cgcctgccggggcagcagtatgatgaggagtccggcctgtattataaccgccaccgctattatgacccgctgcag

SEQ ID NO: 678249 - DNA, 75 bp, synthetic construct
  source 1..75: mol_type = other DNA
taagacttcagtaggtcaatggctagctatatgtgagggagatgattattggtgtgatcaggggaaattacaaaa

SEQ ID NO: 678250 - DNA, 75 bp, synthetic construct
  source 1..75: mol_type = other DNA
gagcaccatcaccaacggtggcaccggcacccagattaatggtgatgacgccacggcaaacaacaacggcaaaac

SEQ ID NO: 678251 - DNA, 75 bp, synthetic construct
  source 1..75: mol_type = other DNA
ggcaaatcgccgttggtggaagtgggggcgcacacctggaactcgcatttcggcgctgaggcgaacccgcaagga

SEQ ID NO: 678252 - DNA, 75 bp, synthetic construct
  source 1..75: mol_type = other DNA
cgcagtgcgattaaccacgaacagtatgtgcgtctgtctccctggagtagcgaagcgcgtcagcgcattaccgag

SEQ ID NO: 678253 - DNA, 75 bp, synthetic construct
  source 1..75: mol_type = other DNA
agctccattttcaggaatatgctcaactgacatattggttttccgtgctaaagagaacatctatagatcgttaat

SEQ ID NO: 678254 - DNA, 75 bp, synthetic construct
  source 1..75: mol_type = other DNA
aaaaaggcttcaaaatcgccagacggaatatcaaaatgaaattaatcaactatctgcgccaggtgttaattttga

SEQ ID NO: 678255 - DNA, 75 bp, synthetic construct
  source 1..75: mol_type = other DNA
catcctgaaaataaatacaaagactttaaggatctcgaagataaagttgaaaaaaggcttcaaaatcgccagacg

SEQ ID NO: 678256 - DNA, 75 bp, synthetic construct
  source 1..75: mol_type = other DNA
aagtagtgtggataaggggaaagatgtacctctcaagtggtgttttagaacaataccagagcgtatttcaattga

SEQ ID NO: 678257 - DNA, 75 bp, synthetic construct
  source 1..75: mol_type = other DNA
acagatataatatttcaaaagataaaatttaataatggaaacatatgtaacttaacagccctccgcgacaccctg

SEQ ID NO: 678258 - DNA, 75 bp, synthetic construct
  source 1..75: mol_type = other DNA
atgtacctcggtatgaacgccgaaaccggcagagcattaagcgatgagttgcacattaagcaatccgtaaaagat

SEQ ID NO: 678259 - DNA, 75 bp, synthetic construct
  source 1..75: mol_type = other DNA
agcgcgatcagcgccaaagctgaggcgctaaatcaggccagaaatgaacgcctttcccacatccagattacccgc

SEQ ID NO: 678260 - DNA, 75 bp, synthetic construct
  source 1..75: mol_type = other DNA
caattcgtgataaccaaccggaaaaagtcaccatttctggcgcggcggtgattttgtttcatgccgaatgggcaa

SEQ ID NO: 678261 - DNA, 75 bp, synthetic construct
  source 1..75: mol_type = other DNA
cagaagaaatagcaacgatctccataggaaaaacgccgcctcgtactcaaaaagaatgtttttgcgacaaaaaag

SEQ ID NO: 678262 - DNA, 75 bp, synthetic construct
  source 1..75: mol_type = other DNA
ttaagaagcccggccagacggatgaaacttgccgctgaactggccgaaaaatcccacgaacaggcagagggctga

SEQ ID NO: 678263 - DNA, 75 bp, synthetic construct
  source 1..75: mol_type = other DNA
cagcatggggtatgacgccgccgggcgcatcaccgtgctgactaacgagaacggcagccagtccacgttccggta

SEQ ID NO: 678264 - DNA, 75 bp, synthetic construct
  source 1..75: mol_type = other DNA
ctgttatgcatactaatgaatacgcaaaactgaaagggatgattgatgaaattgatcaggttattgcagtaaaga

SEQ ID NO: 678265 - DNA, 75 bp, synthetic construct
  source 1..75: mol_type = other DNA
aggcttaacaattgagcataagcgcgaccgcctaaccgccctaatcggtgatgtgagtggtgctgtagtgagtgg

SEQ ID NO: 678266 - DNA, 75 bp, synthetic construct
  source 1..75: mol_type = other DNA
catcactcatctacaagcggcactgtttgcatcagagcaaaaaacacatcaggctgccgtgtgatgaacgtaaac

SEQ ID NO: 678267 - DNA, 75 bp, synthetic construct
  source 1..75: mol_type = other DNA
cttatcagtgaagacggcaatacggcgtggagcgcggaatatgatgaatggggcaaccagcttaatgaggagaac

SEQ ID NO: 678268 - DNA, 75 bp, synthetic construct
  source 1..75: mol_type = other DNA
cggcaggagcattcactttgagccgctgtttcccggcgagataagctacagccgcagcgagtcactctggctggc

SEQ ID NO: 678269 - DNA, 75 bp, synthetic construct
  source 1..75: mol_type = other DNA
acagtccgttggcgaaagattatgctaagacggaatttattggaactgattttatacaagaaactcttcttggag

SEQ ID NO: 678270 - DNA, 75 bp, synthetic construct
  source 1..75: mol_type = other DNA
ggagcggatgcacatcccagtggcgccgggtgcctcgccggcgcggaaactccccccgtaccacggcgaccgacg

SEQ ID NO: 678271 - DNA, 75 bp, synthetic construct
  source 1..75: mol_type = other DNA
cattataggaataattatcggagcacttgcggtcgggttactaacaggaaagacagattctgtccttaacaattc

SEQ ID NO: 678272 - DNA, 75 bp, synthetic construct
  source 1..75: mol_type = other DNA
ttgtgttatttaattttttgacatttatgtatttacttctcagaaataaatcgggagtattttacaccctttggg

SEQ ID NO: 678273 - DNA, 75 bp, synthetic construct
  source 1..75: mol_type = other DNA
atgaacaataaaccaagttccggtaatggtaaacctattaaaagtgttacagttttacgagatccaaactatcct

SEQ ID NO: 678274 - DNA, 75 bp, synthetic construct
  source 1..75: mol_type = other DNA
agcaaatatacattacgacaaacccctatactataaaagtaaatttaccagcaaatacacaactgtttttaaaca

SEQ ID NO: 678275 - DNA, 75 bp, synthetic construct
  source 1..75: mol_type = other DNA
ctataacacaatacattgatgataatctggaaaaagaatccataaaaataggtgatgctgccaacttactgattt

SEQ ID NO: 678276 - DNA, 75 bp, synthetic construct
  source 1..75: mol_type = other DNA
gagccgttacggtcaactgctggcctttacggactgctcggggtacacgacgcggtatgagtacgaccggtacgg

SEQ ID NO: 678277 - DNA, 75 bp, synthetic construct
  source 1..75: mol_type = other DNA
aggaggtgcaagctcaaatagaatatttagcatataagaagcgttgtgagcaaaaacctgatagtaatttaagtc

SEQ ID NO: 678278 - DNA, 75 bp, synthetic construct
  source 1..75: mol_type = other DNA
acggggcgtttgaattggtgccagacgagaaacaaccaggggactttcataaatttacacctacaggaagcaaat

SEQ ID NO: 678279 - DNA, 75 bp, synthetic construct
  source 1..75: mol_type = other DNA
gaaacgggtatggcggcgggagcgtgacctgacggggtggatgtcgctgtcgcgtaaaccggaggtgacatggta

SEQ ID NO: 678280 - DNA, 75 bp, synthetic construct
  source 1..75: mol_type = other DNA
atgacccgctgggccgccggacgggaaaacgggtgtggcggcgggagcgtgacctgacggggtggatgtcgctgt

SEQ ID NO: 678281 - DNA, 75 bp, synthetic construct
  source 1..75: mol_type = other DNA
aatagatccagatatgtcacacatttggggcggttctctttttgggtgtctaaatggttgtctacctgctcgatg

SEQ ID NO: 678282 - DNA, 75 bp, synthetic construct
  source 1..75: mol_type = other DNA
gaactgcggcagggcagcgtgagtgaagaaagccagcagtggcttgcgcagtgcgggctgacggcggaacagatg

SEQ ID NO: 678283 - DNA, 75 bp, synthetic construct
  source 1..75: mol_type = other DNA
ttatcatattgatattaatctcgtttatttggtttgatgaaaaatgtaccctctcttgtaccctcggtcccttct

SEQ ID NO: 678284 - DNA, 75 bp, synthetic construct
  source 1..75: mol_type = other DNA
gcagcttgaccgggactacgactggaacgacaacggacagctaatccgcatcagcggcccgcaggagagccggga

SEQ ID NO: 678285 - DNA, 75 bp, synthetic construct
  source 1..75: mol_type = other DNA
ataacccgcgtgggcaaatggtcagtcagaaggatgcgcaggggcgtgaaacccgttatgagtacagcgccgcag

SEQ ID NO: 678286 - DNA, 75 bp, synthetic construct
  source 1..75: mol_type = other DNA
aggataacaataggcggtaaggacaacggggcgtttgaattggtgccagacgagaaacaaccaggggactttcat

SEQ ID NO: 678287 - DNA, 75 bp, synthetic construct
  source 1..75: mol_type = other DNA
caggaaaaggcaaaaattcatttgcacagaaactagctaacgaacttgatgctacagtgattgctcctgatgaaa

SEQ ID NO: 678288 - DNA, 75 bp, synthetic construct
  source 1..75: mol_type = other DNA
gatgaagctgggcggaacgccactggtcgagtacacgcgggaccggctgcaccgggagacggtgcgcagcttcgg

SEQ ID NO: 678289 - DNA, 75 bp, synthetic construct
  source 1..75: mol_type = other DNA
catgcggcagatgtgtctaaccgtagcgaagcgcaaaaaccggacgatacaaaacttattgttagctgtgtggat

SEQ ID NO: 678290 - DNA, 75 bp, synthetic construct
  source 1..75: mol_type = other DNA
gttaacaatgaatattggcagcgactgactatcaatattgcgctgagtggtatgcagggtggttgtaaagataaa

SEQ ID NO: 678291 - DNA, 75 bp, synthetic construct
  source 1..75: mol_type = other DNA
tgccaggtatgcgccagtttggcgcgatggcgacggtggttcctacatcaattcaggaagtcgctggctggccga

SEQ ID NO: 678292 - DNA, 75 bp, synthetic construct
  source 1..75: mol_type = other DNA
ttatgttcccaataccgttaactacaacgtgatttttactacccccaccagcccggatgtagccagcgcgcaaat

SEQ ID NO: 678293 - DNA, 75 bp, synthetic construct
  source 1..75: mol_type = other DNA
gtcgatttgtataatggccaggctgaggcggcgaacagaagccgcgcattgcaggcctgcttgctgaaccctaac

SEQ ID NO: 678294 - DNA, 75 bp, synthetic construct
  source 1..75: mol_type = other DNA
ggacagcgataaggccagaatgtgggggcatatgctcgggattatcgaatctggtagcgtctttaaacgcccgct

SEQ ID NO: 678295 - DNA, 75 bp, synthetic construct
  source 1..75: mol_type = other DNA
tccgcgacgccggcatcaacaccggatgtgaataatgaaaactgggcgctggcgcatactattgacgccagtaag

SEQ ID NO: 678296 - DNA, 75 bp, synthetic construct
  source 1..75: mol_type = other DNA
gagcagttccccggcggataaagtgccgcatctgtataccgtctggctgaacgatggcagcctggtgaacaataa

SEQ ID NO: 678297 - DNA, 75 bp, synthetic construct
  source 1..75: mol_type = other DNA
cagcgaactgcaaacgctgcattccagctttagcgcgttgggatggccgtcatcgcccagcttcccgtatttatc

SEQ ID NO: 678298 - DNA, 75 bp, synthetic construct
  source 1..75: mol_type = other DNA
taaaagctcgtcaacctcgtgtaaggcggtggatttgtatacggggagtactgtgggtaataaaagcacgtccta

SEQ ID NO: 678299 - DNA, 75 bp, synthetic construct
  source 1..75: mol_type = other DNA
gcttgaggtgacatctgacgtgtttaataccgaaaaacaagctgcggtcgtgaagtggggagagacaaacacgct

SEQ ID NO: 678300 - DNA, 75 bp, synthetic construct
  source 1..75: mol_type = other DNA
ccggatatgccgtttaccctcaatcgcggcgatggctatacccgctatcccgttgaaaaacataccgcaggcagc

SEQ ID NO: 678301 - DNA, 75 bp, synthetic construct
  source 1..75: mol_type = other DNA
tgcggcatgtttgaacaaaatagtactcaggattgtggtattgaggcgggtaaaacaccaggttttgccacctgt

SEQ ID NO: 678302 - DNA, 75 bp, synthetic construct
  source 1..75: mol_type = other DNA
atgtctaaaaacaccccaggaattgtatgtggcggaacggacgggactcgaacccgcgaccccctgcgtgacagg

SEQ ID NO: 678303 - DNA, 75 bp, synthetic construct
  source 1..75: mol_type = other DNA
cgaatgcgttaagtatcaccatcggtcgtgatggcgtggtcagcgtaacccaacaaggccaggcagctccggttc

SEQ ID NO: 678304 - DNA, 75 bp, synthetic construct
  source 1..75: mol_type = other DNA
tctgggagccttctttaacaccaacggtagcgtcgccgcattgctggtcgcactcttcaaccttgcatcgcaacg

SEQ ID NO: 678305 - DNA, 75 bp, synthetic construct
  source 1..75: mol_type = other DNA
aaccattgaagtggcttcacatgatggcagtcacaaagcgactgcgaccgttgaagtgaccgcagcaccggctgc

SEQ ID NO: 678306 - DNA, 75 bp, synthetic construct
  source 1..75: mol_type = other DNA
gcctcgataatctgttccacgaggcattattcacctattgcggcaatgcctatttacagcaatcctacgtgctta

SEQ ID NO: 678307 - DNA, 75 bp, synthetic construct
  source 1..75: mol_type = other DNA
agacggtaaaacgatggtatatgttcgcactgcagaaccggtggtggacagggaagaaaataacgcatccggtaa

SEQ ID NO: 678308 - DNA, 75 bp, synthetic construct
  source 1..75: mol_type = other DNA
gcgaaacgttatcttcctgctccaggtttgcgacaatttactgcgtcgcaaaaaagcaaacgtttagctccgcgc

SEQ ID NO: 678309 - DNA, 75 bp, synthetic construct
  source 1..75: mol_type = other DNA
gtatggcggtggacaatatgctgaatattaccgtgccgccatgtttggtctgggatttaacctcggcgatttcgg

SEQ ID NO: 678310 - DNA, 75 bp, synthetic construct
  source 1..75: mol_type = other DNA
tcaggcaaaaactgagcgactcatgggtgtacaactcaatgtctgatggtgaactggatgagggttcaacctggg

SEQ ID NO: 678311 - DNA, 75 bp, synthetic construct
  source 1..75: mol_type = other DNA
aatgaaatcaaaattctttagtattagatattttgttgcagtagtgtgttgcggattaggggtgtcaattgcaat

SEQ ID NO: 678312 - DNA, 75 bp, synthetic construct
  source 1..75: mol_type = other DNA
tcgtaccactgtcacgacaggccactgacattctgctgcagctcaaaactttctccggacaataccggctggttt

SEQ ID NO: 678313 - DNA, 75 bp, synthetic construct
  source 1..75: mol_type = other DNA
caacagcaggaagcggctgttgcaatgggggtttcaaggcagacactggccaatgtcctgaaagcagcccgtttt

SEQ ID NO: 678314 - DNA, 75 bp, synthetic construct
  source 1..75: mol_type = other DNA
ccgccagttacaatcgtgcgggcacatcgctcagcgaaacggtaacgacggatgatttggtggccgatacgttca

SEQ ID NO: 678315 - DNA, 75 bp, synthetic construct
  source 1..75: mol_type = other DNA
tttgtcgttctttactggagctgtcagaaaaacaccgaaacacaccaatggccggtcgtactctggcacttcagg

SEQ ID NO: 678316 - DNA, 75 bp, synthetic construct
  source 1..75: mol_type = other DNA
gcacaggagaaatctcttctatcgaaccgagaggccatcctcaacgccgccaaagttgtggatcagaaaaataag

SEQ ID NO: 678317 - DNA, 75 bp, synthetic construct
  source 1..75: mol_type = other DNA
gcgcgctggctgatcgtgtgaagcagtatgtccaagaaggcatcgtcagagcaatcagagatgatggagcgattg

SEQ ID NO: 678318 - DNA, 75 bp, synthetic construct
  source 1..75: mol_type = other DNA
tcatcaaccgcacctttaaggccaaactggaagagttgtgggcgcgggcgctgggtgacgagcgagaagagattg

SEQ ID NO: 678319 - DNA, 75 bp, synthetic construct
  source 1..75: mol_type = other DNA
ttaaacaggccgttgaaattgttaaagcttccgcggacttcaaacccaatacccgttttactgagatctccctgc

SEQ ID NO: 678320 - DNA, 75 bp, synthetic construct
  source 1..75: mol_type = other DNA
gcaactactgggcacatcccatcgaaaacctggtggcggtcgttgatttagaacagaaaaaatcgttaagattga

SEQ ID NO: 678321 - DNA, 75 bp, synthetic construct
  source 1..75: mol_type = other DNA
caggtgatgcgtgagactgaacagcagatttaccgtcagctgactgacgaggtactggccctgcgattgtctgaa

SEQ ID NO: 678322 - DNA, 75 bp, synthetic construct
  source 1..75: mol_type = other DNA
taaccgcaatatcaatcttatccgctataagctgtttaaccctgatctcctgatgtttgaactggtgaatgctgc

SEQ ID NO: 678323 - DNA, 75 bp, synthetic construct
  source 1..75: mol_type = other DNA
ggggaccatggcatgctgtactgaagcgtacggaagctgaccgctgggtgcaggcagaagagcagaaatatgaga

SEQ ID NO: 678324 - DNA, 75 bp, synthetic construct
  source 1..75: mol_type = other DNA
agcttgacgatgccggttataaaaaagaactggcggctctcaggaaatattatgccgaagaggacaaattacggg

SEQ ID NO: 678325 - DNA, 75 bp, synthetic construct
  source 1..75: mol_type = other DNA
cgcagcgttaaagaaccttcttggatccatcgacccgactatccgcgcgttcaattcgttggatgaacagcacgc

SEQ ID NO: 678326 - DNA, 75 bp, synthetic construct
  source 1..75: mol_type = other DNA
cactatttccggtacatatgctgattacttttcagcatgggataaatgggaaaaacaagcgctccccggtgaaga

SEQ ID NO: 678327 - DNA, 75 bp, synthetic construct
  source 1..75: mol_type = other DNA
acattgagcgcgcagcagattgaagagagtcggacgcggttatccgcattgaaaatttatccgcgcgatatgctc

SEQ ID NO: 678328 - DNA, 75 bp, synthetic construct
  source 1..75: mol_type = other DNA
tcatcacagaatgtaaccaggtgaatcatttgataccaacgagggttttagtgaaaggaggtgaaatcacctgta

SEQ ID NO: 678329 - DNA, 75 bp, synthetic construct
  source 1..75: mol_type = other DNA
agatgctcgccgggatgattgacctgatgccgtcatcgatggcgttgctggcaccaaacgtgaactcgtatcgcc

SEQ ID NO: 678330 - DNA, 75 bp, synthetic construct
  source 1..75: mol_type = other DNA
gacgcaggcgtcgtggggccataacaaccgcaccgtcgccctgcgtattccatgcggcgatcgtcataatcaccg

SEQ ID NO: 678331 - DNA, 75 bp, synthetic construct
  source 1..75: mol_type = other DNA
ctgcgactgaccagcggaagcggagaaggcagccgtctggtgaccaccgccatcaccgcggatacagagcatcgt

SEQ ID NO: 678332 - DNA, 75 bp, synthetic construct
  source 1..75: mol_type = other DNA
gccgctatttaggcgaacgcttctgccatgtctatcacgcctgtaaaaatgatgagctgttgcagtttgagcgcc

SEQ ID NO: 678333 - DNA, 75 bp, synthetic construct
  source 1..75: mol_type = other DNA
ggtttactccgttgataacctcaaccacttcgccgacgtgctcaatgatattgatgaactggcgcagttacagct

SEQ ID NO: 678334 - DNA, 75 bp, synthetic construct
  source 1..75: mol_type = other DNA
gttattcttcctgactacagaattacatcgctccttcagttcatacatcacttttacaacacttttacaacactc

SEQ ID NO: 678335 - DNA, 75 bp, synthetic construct
  source 1..75: mol_type = other DNA
atggcgggtgatttacgcaggttaaggggagatcgtgacaaaaaaagcgttcctcactgtatcgttcatgcctgc

SEQ ID NO: 678336 - DNA, 75 bp, synthetic construct
  source 1..75: mol_type = other DNA
ttgggtattacctactcaaggtatgctgatgatcttacgtttagcaccaaagtcaaaggagctttatttgatgtt

SEQ ID NO: 678337 - DNA, 75 bp, synthetic construct
  source 1..75: mol_type = other DNA
aatttcgcaatatccatgatctgcataccattgctattttcagttcgccgttcgaaggagtgagttcatttatca

SEQ ID NO: 678338 - DNA, 75 bp, synthetic construct
  source 1..75: mol_type = other DNA
gaccttgctttttatgatgagcgggatttttcgcggctcgatgatgtagcaaagaagattaaaagcccatttaag

SEQ ID NO: 678339 - DNA, 75 bp, synthetic construct
  source 1..75: mol_type = other DNA
catggaaaacgatgatgtcgtgaaacaagccacgaagaacgatcctcgggtgacacccttcggggcctttttacg

SEQ ID NO: 678340 - DNA, 75 bp, synthetic construct
  source 1..75: mol_type = other DNA
tgaaatccctggaaagctggttgcgtgaaaagatgaagaccctgtcgcgacactcagagttggcgaaagcgttcg

SEQ ID NO: 678341 - DNA, 75 bp, synthetic construct
  source 1..75: mol_type = other DNA
atggaacaatacttactgacaatccaaccgaatttatccaaaaaaattaaggagtctcataaagaatctgttaga

SEQ ID NO: 678342 - DNA, 75 bp, synthetic construct
  source 1..75: mol_type = other DNA
gacgatttatcagccggggagcttcacgccactcatcagggttgaaaccgccaccggtgagcaggcgaaaacgca

SEQ ID NO: 678343 - DNA, 75 bp, synthetic construct
  source 1..75: mol_type = other DNA
tggacctccggggccaacaggtagcgtcggtcctaagggggaaaaaggcgagcctggtgatcgaggcccacaggg

SEQ ID NO: 678344 - DNA, 75 bp, synthetic construct
  source 1..75: mol_type = other DNA
acaaggagagcgcggtattcaggggcctgccggtcctgcgggcctgcgaggtgaaaccggagccagaggtgaaaa

SEQ ID NO: 678345 - DNA, 75 bp, synthetic construct
  source 1..75: mol_type = other DNA
taagtcagcagattcaggctctggagcaacaaattggcgcacgactgttagcacgaaccaaccgcagcgtgctgc

SEQ ID NO: 678346 - DNA, 75 bp, synthetic construct
  source 1..75: mol_type = other DNA
gcgggctgacggtggagcaactggccagacaggtggagccggaatacacaccggcgcgaaaagctcatctttatc

SEQ ID NO: 678347 - DNA, 75 bp, synthetic construct
  source 1..75: mol_type = other DNA
gttgccctccagccagaacggctttgcgccagtggtacatgggattgcgaaaactaacgccacggtgatcatcaa

SEQ ID NO: 678348 - DNA, 75 bp, synthetic construct
  source 1..75: mol_type = other DNA
gcatcgcataccatccggtcaaattatgacgacgacgatgacagttattatctgaatttgcgtaatggtattaat

SEQ ID NO: 678349 - DNA, 75 bp, synthetic construct
  source 1..75: mol_type = other DNA
cgacgaacgcggctggctgacagacatcagccatatcagcgaagggcaccgggtgacggtgcattacgggtatga

SEQ ID NO: 678350 - DNA, 75 bp, synthetic construct
  source 1..75: mol_type = other DNA
ccggacagcaccctcagcatgtggccggataaccgtatcgcccgtgacgcgcactatctttaccggtatgaccgt

SEQ ID NO: 678351 - DNA, 75 bp, synthetic construct
  source 1..75: mol_type = other DNA
ctggtgcggctgctggacagactggaggaagaaatccgggcagaccgcgtgagcagtgaaagccgggcgtggctt

SEQ ID NO: 678352 - DNA, 75 bp, synthetic construct
  source 1..75: mol_type = other DNA
atcaactggctgaaatcacagggtgcttttgagggtccttactgggtaatgaccacgacgcggttactcaacagt

SEQ ID NO: 678353 - DNA, 75 bp, synthetic construct
  source 1..75: mol_type = other DNA
gtactggcgaaacacgatgaaaactacacgccgccagaagtcgagaaagcgatggaagctaatcaccgtcgcccg

SEQ ID NO: 678354 - DNA, 75 bp, synthetic construct
  source 1..75: mol_type = other DNA
aattctctacggtaaacgtgaaacccagcagatgccggaagttggtcaacgtctgcgcgttggcggaatggtaat

SEQ ID NO: 678355 - DNA, 75 bp, synthetic construct
  source 1..75: mol_type = other DNA
gcgggaacaaatttctgaacgcaagtgtttcagtcaaccctaaaactcaagtattaataccaggcgaatatacaa

SEQ ID NO: 678356 - DNA, 75 bp, synthetic construct
  source 1..75: mol_type = other DNA
caaccaataattttcgggaaattgcggaaacgtcaaccaactctccggtaattcctggtgaggtgttgtccgcaa

SEQ ID NO: 678357 - DNA, 75 bp, synthetic construct
  source 1..75: mol_type = other DNA
gctatcaaggttgtcgtattcttgaatcagagacatggaaaaaatacttttcaaataatgtcaattttggtaaga

SEQ ID NO: 678358 - DNA, 75 bp, synthetic construct
  source 1..75: mol_type = other DNA
taataatgaaagtatcttactgcctccattttcgaataacgacattacattaaaaaataaccacgcatcagaata

SEQ ID NO: 678359 - DNA, 75 bp, synthetic construct
  source 1..75: mol_type = other DNA
aactcgataacaattcattgaaaaataatgcaccagatgtattgaaaaatttgatcgaaaaagtgagggggcttc

SEQ ID NO: 678360 - DNA, 75 bp, synthetic construct
  source 1..75: mol_type = other DNA
ggaaccataatgcataggcttattaatgcagttgagtggtcagatgatatcgcgcataaaattggggaaggtgca

SEQ ID NO: 678361 - DNA, 75 bp, synthetic construct
  source 1..75: mol_type = other DNA
cataagttaatggattaccacttaaatgaagcggaagaagggcgtgccaaagagagcctgatggtgctgcgtgac

SEQ ID NO: 678362 - DNA, 75 bp, synthetic construct
  source 1..75: mol_type = other DNA
atgcggtcgaatggtctgaaaaaatgggctcaacagttgacgaggtagcggtatcaatcggaaatcaatttcagg

SEQ ID NO: 678363 - DNA, 75 bp, synthetic construct
  source 1..75: mol_type = other DNA
tctttgaggattataagacatttgttcccaaaaatggtgggccaagattgccaaaagatgacgatcatgaatatg

SEQ ID NO: 678364 - DNA, 75 bp, synthetic construct
  source 1..75: mol_type = other DNA
gatttcaagagaggaggaggtggtggttggggaagaattaaatatgcagtcaaacaattaatatctataggtgca

SEQ ID NO: 678365 - DNA, 75 bp, synthetic construct
  source 1..75: mol_type = other DNA
ttgccgcagaagaaaggatgcgcgtgttcgatgcattttatcgccctgaaggcgtgacccaacccggctctgggt

SEQ ID NO: 678366 - DNA, 75 bp, synthetic construct
  source 1..75: mol_type = other DNA
atgctttaaaaataactgttaatgaaaataagcatgagacttattttatatggcagcttttatgggatctctatt

SEQ ID NO: 678367 - DNA, 75 bp, synthetic construct
  source 1..75: mol_type = other DNA
gatcaccgatttggaatgtacccgtgcaaattatgatgcatttatgtcttcactggaaaagatactgacccgccg

SEQ ID NO: 678368 - DNA, 75 bp, synthetic construct
  source 1..75: mol_type = other DNA
cacgcaaccgggaacctttataattacagcgtggaactacctacggtgaatctcatcaagctgcatggttccctt

SEQ ID NO: 678369 - DNA, 75 bp, synthetic construct
  source 1..75: mol_type = other DNA
tatcgataaagacaagataaaaatagaattcggtatcagcgtcaacacgatcaaccgagaaacggatgctgaatt

SEQ ID NO: 678370 - DNA, 75 bp, synthetic construct
  source 1..75: mol_type = other DNA
agaaaatgcgtcacgtcggcgatcgtgttgctgcggtggtcgcagaaagtgaagaaattgcgctcgaagcactga

SEQ ID NO: 678371 - DNA, 75 bp, synthetic construct
  source 1..75: mol_type = other DNA
ctcagaaacggggagagcctgccagacatgctgattaattttgcccttattaacatcacagacagaaagaacgag

SEQ ID NO: 678372 - DNA, 75 bp, synthetic construct
  source 1..75: mol_type = other DNA
ttcacgcaattatgaatatgccgattcattttcggatgatgttgattatgttccgcaggattcttcatctgctcc

SEQ ID NO: 678373 - DNA, 75 bp, synthetic construct
  source 1..75: mol_type = other DNA
ggatgggcctcttctcaggcttcaggcgcaatgacagactggttaagccgcttcggtacctacaaaccaaatatg

SEQ ID NO: 678374 - DNA, 75 bp, synthetic construct
  source 1..75: mol_type = other DNA
cagtgacaacctcgagcaacagatagccagtacttcacagcaaatcgggtctctgctcgccgaagatatgtgtca

SEQ ID NO: 678375 - DNA, 75 bp, synthetic construct
  source 1..75: mol_type = other DNA
atggacagaaaaaaagaagctatgaactggtggtacgactatctgaataagcaaattagtggtgacagtaatgat

SEQ ID NO: 678376 - DNA, 75 bp, synthetic construct
  source 1..75: mol_type = other DNA
tatcagcgaacttaccaggcgaatgccacaccacagggagcgaataatgacaattgcagagcgaattcataatga

SEQ ID NO: 678377 - DNA, 75 bp, synthetic construct
  source 1..75: mol_type = other DNA
tgataggcagattggtatttcaccacggattgattttaataatgcaattgatttaaacggctttgaaaagggggt

SEQ ID NO: 678378 - DNA, 75 bp, synthetic construct
  source 1..75: mol_type = other DNA
acaggatgataaacgaatacggcgaaaatgattttctaattaccttcgatgaccgctgctatttatcatttcggc

SEQ ID NO: 678379 - DNA, 75 bp, synthetic construct
  source 1..75: mol_type = other DNA
gctgctggtacctcaccggtgaacttaacgggcatatcaccgtgcatccactggcgaccatccatgcggtgacag

SEQ ID NO: 678380 - DNA, 75 bp, synthetic construct
  source 1..75: mol_type = other DNA
ccctgtgcatccccgccttatcgcccggcttttatggaggcacggcaccgcccggtgccgcagaacatgtgacta

SEQ ID NO: 678381 - DNA, 75 bp, synthetic construct
  source 1..75: mol_type = other DNA
atgtggcctcagcgtcgtgtgcgggcggtgccgtgcctccatcgtagccgggcttctgcgggcgggttgcaaggt

SEQ ID NO: 678382 - DNA, 75 bp, synthetic construct
  source 1..75: mol_type = other DNA
ctgacccaaatcgccagtgtgatatatgacaaccctgactcgcagactcttgttaagcaactggatggtgataat

SEQ ID NO: 678383 - DNA, 75 bp, synthetic construct
  source 1..75: mol_type = other DNA
ttgtgattgttggtcagcagaccgaggtcagggatgaaatcgcctttgcaagcgcattacgcacgctgatcccat

SEQ ID NO: 678384 - DNA, 75 bp, synthetic construct
  source 1..75: mol_type = other DNA
aaaaaacaccctgtacacggcgctcaaaaatctggtcgaaaacgcgattcactatatccctgaaaacgggcagat

SEQ ID NO: 678385 - DNA, 75 bp, synthetic construct
  source 1..75: mol_type = other DNA
atgcggttatttataatacaaaaatttgtgatttaatttatccagaggagttaaaaatggctgatcattttgagt

SEQ ID NO: 678386 - DNA, 75 bp, synthetic construct
  source 1..75: mol_type = other DNA
tggcccattcattttgtaattggatttagtaaaacatgttatagaaccattgttgatattgaagttggtgatgtt

SEQ ID NO: 678387 - DNA, 75 bp, synthetic construct
  source 1..75: mol_type = other DNA
cccgcttaaatttacgcgtagttttaatgatatgcgtcagcagttttcaccattccgtaagggtagcccttctca

SEQ ID NO: 678388 - DNA, 75 bp, synthetic construct
  source 1..75: mol_type = other DNA
gagaaaaatatagaaatacgtgtaaatggcgcgctaactggctatggcgaacttgttgaagtggatgataaattg

SEQ ID NO: 678389 - DNA, 75 bp, synthetic construct
  source 1..75: mol_type = other DNA
ttgtgatttaatttatccagaggagttaaaaatggctgatcattttgagtacgaggaagattttgaaacagatga

SEQ ID NO: 678390 - DNA, 75 bp, synthetic construct
  source 1..75: mol_type = other DNA
gagcacgaactcgcgcgtctggatgcgtcagacctgatttcgctggccggtaaggtggttggttttttgtcaccg

SEQ ID NO: 678391 - DNA, 75 bp, synthetic construct
  source 1..75: mol_type = other DNA
tggtataaacctcaattaaaaaaagaatatcagatgctttgttataataatagttggtattatgttcttgctcgt

SEQ ID NO: 678392 - DNA, 75 bp, synthetic construct
  source 1..75: mol_type = other DNA
caggaagatcaactgggggctctgggcttggttactaatgcagtggttctgtggaacacgctctatatgcaggaa

SEQ ID NO: 678393 - DNA, 75 bp, synthetic construct
  source 1..75: mol_type = other DNA
atgggaacaaaaacccacgatattttcacgctaccgttgtgccgggaacatcacaacgaacttcatgcggatccg

SEQ ID NO: 678394 - DNA, 75 bp, synthetic construct
  source 1..75: mol_type = other DNA
ccgcctgcaccagcacaccaccattaccggcagtgcggcttaccgtcaattgcccgaaactgaggccctgccagc

SEQ ID NO: 678395 - DNA, 75 bp, synthetic construct
  source 1..75: mol_type = other DNA
acaactggagaaactgaaacgtgaaaatcaacagcttcgtgaatgggctgatactgctttgcccgctgatattat

SEQ ID NO: 678396 - DNA, 75 bp, synthetic construct
  source 1..75: mol_type = other DNA
gtgcggtggggcaggtggttgttaccagcacggttcttgaattgagaaaacacagccgtgtggtcgatgcagtgt

SEQ ID NO: 678397 - DNA, 75 bp, synthetic construct
  source 1..75: mol_type = other DNA
aagacgaagttatatggcagtacagcgtggataaagaaggcgtatcgtgtagcgttgcaggaggtaaacagtgag

SEQ ID NO: 678398 - DNA, 75 bp, synthetic construct
  source 1..75: mol_type = other DNA
aagtgaaggcgttgctgttaatcttgatgtagaaagtaacatcaatatttccaataactcccgcgttgcactgat

SEQ ID NO: 678399 - DNA, 75 bp, synthetic construct
  source 1..75: mol_type = other DNA
agaaatgaatggttcgaaaaagcgcatccttgatgatgcgcctgaacatattatcaccggtccctggaaagccgt

SEQ ID NO: 678400 - DNA, 75 bp, synthetic construct
  source 1..75: mol_type = other DNA
tatgacggacacggcaggatccagcgatatcatttttggcctgttctggttactgggctaccagttttcccctcg

SEQ ID NO: 678401 - DNA, 75 bp, synthetic construct
  source 1..75: mol_type = other DNA
catataaatatgctgggacattatacgttttcgttaccggaagatattctgaagggcgagttaagaccattaaat

SEQ ID NO: 678402 - DNA, 75 bp, synthetic construct
  source 1..75: mol_type = other DNA
gagcgaaactccgttcgtgctgcctacattcataaagcagaacacctcgatgagagaaagcttatgttgcagtgg

SEQ ID NO: 678403 - DNA, 75 bp, synthetic construct
  source 1..75: mol_type = other DNA
ggtaaagataaaaaaggcgactctctcgctattggtaagcgactcgtcagaaccgtattgatatttactgagagc

SEQ ID NO: 678404 - DNA, 75 bp, synthetic construct
  source 1..75: mol_type = other DNA
tccgttctatcatcaatatctttgtgtcccagatggtaaaggggactatacttgtggtggccaagaccaacgggg

SEQ ID NO: 678405 - DNA, 75 bp, synthetic construct
  source 1..75: mol_type = other DNA
tatcagtatccgttgaatccgatctcaaatatagatccattaggattagaaacactaaaatgcattaagccactg

SEQ ID NO: 678406 - DNA, 75 bp, synthetic construct
  source 1..75: mol_type = other DNA
gcaggtcaatgatgccgtccgggccgtactgcttgccagtgcccgtgggaacgatctggatcaggttggggcgaa

SEQ ID NO: 678407 - DNA, 75 bp, synthetic construct
  source 1..75: mol_type = other DNA
ttggcaacgtctcaggcaattattgatctgtctgcgataccggtaccggatgcggtggaggtgccggacactgct

SEQ ID NO: 678408 - DNA, 75 bp, synthetic construct
  source 1..75: mol_type = other DNA
tgatatcaataacaagaaaatgatcttcagcgcaataaaagaaatatatgatgaagatccaagttttatcttcga

SEQ ID NO: 678409 - DNA, 75 bp, synthetic construct
  source 1..75: mol_type = other DNA
aaaaataaaattggtctgaagattttgccaatgacttatgaacagaatattaattatgtcagagtaacattttca

SEQ ID NO: 678410 - DNA, 75 bp, synthetic construct
  source 1..75: mol_type = other DNA
aagcggaaaaatggccccgtgaatattctatgcttgctcgaaggatacaatttctacgattcaatgattatccag

SEQ ID NO: 678411 - DNA, 75 bp, synthetic construct
  source 1..75: mol_type = other DNA
ttaatattctgacctctcaccgcccttcaccgctggcaaagggaaacccgtcgcacagcaatcttgtccagatcg

SEQ ID NO: 678412 - DNA, 75 bp, synthetic construct
  source 1..75: mol_type = other DNA
gcgcaggctcgttacgacgtgatctgtggaattgaaatgggaatttaccccctctcaattgtaaatacgctagat

SEQ ID NO: 678413 - DNA, 75 bp, synthetic construct
  source 1..75: mol_type = other DNA
gtaaagcagtcggtgttacaggtggcggcggtgtaggccttttcctaataaagctggctagcttcattacagatc

SEQ ID NO: 678414 - DNA, 75 bp, synthetic construct
  source 1..75: mol_type = other DNA
cgtgtgcgtccggtggtactgcccggtattcgctatgccgtgatgtgtgtgccgacacccttgactctggcagtc

SEQ ID NO: 678415 - DNA, 75 bp, synthetic construct
  source 1..75: mol_type = other DNA
tacccatcatgggctgggcctgtcgatcgtgcgtgccgtcgccattatgcaccggggagatgtatttgcccgtag

SEQ ID NO: 678416 - DNA, 75 bp, synthetic construct
  source 1..75: mol_type = other DNA
acagtggggcttatcagtgacataggcagtcaggtggcggatattgccagaacggaaggacagatagccggtgag

SEQ ID NO: 678417 - DNA, 75 bp, synthetic construct
  source 1..75: mol_type = other DNA
ctaggtaccgggacgttaaacatttccggcactggcatcaatcccggaacgctcagtgtgggtgatggaacagtt

SEQ ID NO: 678418 - DNA, 75 bp, synthetic construct
  source 1..75: mol_type = other DNA
ctgggcacggtttatgaccacttctggttcaggcgaggggggattctctgatcgccatatgcatctgcaaattgg

SEQ ID NO: 678419 - DNA, 75 bp, synthetic construct
  source 1..75: mol_type = other DNA
tagtcgatactaaggatcaattgattaaagagggtttttacttaaataataaagacaataaagataaaaaagatg

SEQ ID NO: 678420 - DNA, 75 bp, synthetic construct
  source 1..75: mol_type = other DNA
tatttcgcttttccggttcagtgatgtaaaagaaaacaggttgttcgttactcaggaaaagaccgggcacaagct

SEQ ID NO: 678421 - DNA, 75 bp, synthetic construct
  source 1..75: mol_type = other DNA
tgataaactaaaaagagaattcccagattatgaattggataaaattgctgatactttaaaaattttcacaaagat

SEQ ID NO: 678422 - DNA, 75 bp, synthetic construct
  source 1..75: mol_type = other DNA
cttccgttactcgttctgatactccgtattcaaagggcctgcgggccctttacgctcagtgcctgccgcccggat

SEQ ID NO: 678423 - DNA, 75 bp, synthetic construct
  source 1..75: mol_type = other DNA
gatttcactacgactatttgggagcgagatggaatgcagcagtaaaacgtgctggtattcgccgccgtaatccgt

SEQ ID NO: 678424 - DNA, 75 bp, synthetic construct
  source 1..75: mol_type = other DNA
cccgcttaaacacctgtcgaaagaggcgctggaagctgccgcagaacctgacgacctcagcgagtgggctgacat

SEQ ID NO: 678425 - DNA, 75 bp, synthetic construct
  source 1..75: mol_type = other DNA
gctaacttttaatgatgactatgtggtgaaaccgctggatgatcagacctggattgggggcggtattattgtcaa

SEQ ID NO: 678426 - DNA, 75 bp, synthetic construct
  source 1..75: mol_type = other DNA
tattggctatacttgtatccgccgcgatatctaatttgtctggtgtatctgtcgtatcagcgtctgttgttaata

SEQ ID NO: 678427 - DNA, 75 bp, synthetic construct
  source 1..75: mol_type = other DNA
atgagtaaaaagcagagttccaccccacatgatgcgctgttcaaactctttttacgccaaccggagacggcacgc

SEQ ID NO: 678428 - DNA, 75 bp, synthetic construct
  source 1..75: mol_type = other DNA
ataccaaatataagtaaagagattctacatcttaaggatgaaacagagagattggagaaagagtatcaacaagaa

SEQ ID NO: 678429 - DNA, 75 bp, synthetic construct
  source 1..75: mol_type = other DNA
cctgtgttgaagtttccaatccgggcgatccgatagcacctgagcacttacaccggctttttgagcggttttatc

SEQ ID NO: 678430 - DNA, 75 bp, synthetic construct
  source 1..75: mol_type = other DNA
ccacctgccataaaagttaatgcgggatacaaagagagcattggtggcgaaagaatttcaataacaaaatcctca

SEQ ID NO: 678431 - DNA, 75 bp, synthetic construct
  source 1..75: mol_type = other DNA
cctgccataaaagttaatgcgggatacaaagagagcattggtggcgcaaagaatttcaataacaaaatcctcaaa

SEQ ID NO: 678432 - DNA, 75 bp, synthetic construct
  source 1..75: mol_type = other DNA
aaccctgaaaacagcagagtacgttgagccctcttttgctgaaaaacagctttcgctgaatgttgagggcgatgt

SEQ ID NO: 678433 - DNA, 75 bp, synthetic construct
  source 1..75: mol_type = other DNA
cctggggaccatggtcagcgcctgaataccgaagcattacctgacgaattacagcaattagcatcatcttttaat

SEQ ID NO: 678434 - DNA, 75 bp, synthetic construct
  source 1..75: mol_type = other DNA
atgagtccgtggatcaccgcgcgaacttcgactgacggctggtctacgctggccaataaattcaccgtattaacc

SEQ ID NO: 678435 - DNA, 75 bp, synthetic construct
  source 1..75: mol_type = other DNA
aaagacaccaaaatgccggactacctgatactgatctccaccctcggcggcatggagctgtacggcattaacggc

SEQ ID NO: 678436 - DNA, 75 bp, synthetic construct
  source 1..75: mol_type = other DNA
aatcatgaagatgataattttgataaaatgcaaaagatttttttagcattgaatgaatttaaggaaagaacggaa

SEQ ID NO: 678437 - DNA, 75 bp, synthetic construct
  source 1..75: mol_type = other DNA
ggcaaagacattacgatgaacgtaactatttaaaaataaatcgttctgctatttcaaacagcgcaagatttcact

SEQ ID NO: 678438 - DNA, 75 bp, synthetic construct
  source 1..75: mol_type = other DNA
caacaagattttttcaccagagtctgggaagaagaaggtatgcgtgtgcctactaacacgttatatcagaacata

SEQ ID NO: 678439 - DNA, 75 bp, synthetic construct
  source 1..75: mol_type = other DNA
tggtgactccgttgtggttaccttcaatcagcgtccgacaagtacgactgagtggaaaattccagtcggcgtaac

SEQ ID NO: 678440 - DNA, 75 bp, synthetic construct
  source 1..75: mol_type = other DNA
agatcaggctgtaaccacgacacttacttccccagcacaaaagaatacagctgctttagtagctggttttgaatc

SEQ ID NO: 678441 - DNA, 75 bp, synthetic construct
  source 1..75: mol_type = other DNA
tattggtttcaattataaatggtttaaaggaatttaaactttatgttctaataaatatatttggaagtttattct

SEQ ID NO: 678442 - DNA, 75 bp, synthetic construct
  source 1..75: mol_type = other DNA
taagtcccgcagatgtagcgctaataagaagaaaagatcaactaaaccatcaaagagcaggtaatgctgccaact

SEQ ID NO: 678443 - DNA, 75 bp, synthetic construct
  source 1..75: mol_type = other DNA
ccacctgagcgaaggccaccgtgtcgctgtccactacggctacgacgataagggccgcctgacgggcgaacggca

SEQ ID NO: 678444 - DNA, 75 bp, synthetic construct
  source 1..75: mol_type = other DNA
ctggccctgcattcaagataaaggtcaaagctcaagttgcttacttttacactgaaataaaaaaattattccaac

SEQ ID NO: 678445 - DNA, 75 bp, synthetic construct
  source 1..75: mol_type = other DNA
aatacaatctcgtcgatgcgcaattaaataaagcctatggtgaagcttatcgttatatagaacaagtgccacgca

SEQ ID NO: 678446 - DNA, 75 bp, synthetic construct
  source 1..75: mol_type = other DNA
taggcattatctcttgccaggcttacgcagaagatacggttatagtaaacgaccatgacatttcagccatcaaag

SEQ ID NO: 678447 - DNA, 75 bp, synthetic construct
  source 1..75: mol_type = other DNA
ggccccatcactaccattacgacagcctgcaccgcctggtccattacatccgtatccaatatgaggagccactgg

SEQ ID NO: 678448 - DNA, 75 bp, synthetic construct
  source 1..75: mol_type = other DNA
agtacaacgccgcaggcgacctgactgccgttatccccccggacggcaaccggagtgagacactgtacgatgcgt

SEQ ID NO: 678449 - DNA, 75 bp, synthetic construct
  source 1..75: mol_type = other DNA
acgggaaccagttgacggcggtggtgtacccggacgggctggagagccgccgggaatatgatgaaccgggcaggc

SEQ ID NO: 678450 - DNA, 75 bp, synthetic construct
  source 1..75: mol_type = other DNA
gcatgaagctgggcgggacgccgctggtcgagtatacgcgggacaggctgcaccgtgagacggtgcgcagcttcg

SEQ ID NO: 678451 - DNA, 75 bp, synthetic construct
  source 1..75: mol_type = other DNA
caccgcgaggaaggtatcagcctttaccgctactatgacaaccgtggccggttaacctcggtgaaagacgcacag

SEQ ID NO: 678452 - DNA, 75 bp, synthetic construct
  source 1..75: mol_type = other DNA
gcgatactgaagtgcagttttttccagcaagtcgatacggtgttgaagttcctagttttacgtctgaattaaaac

SEQ ID NO: 678453 - DNA, 75 bp, synthetic construct
  source 1..75: mol_type = other DNA
aagcggaacgatttaatgaatggcttgaggaaaattacccggatattgtccctgagtctgaagcatgggaggagg

SEQ ID NO: 678454 - DNA, 75 bp, synthetic construct
  source 1..75: mol_type = other DNA
ttactcttcggtatttcttgccggggcgatctctgcggtgctgggtattattgtcacgatactgtcatttcgtcg

SEQ ID NO: 678455 - DNA, 75 bp, synthetic construct
  source 1..75: mol_type = other DNA
gttctgcctggcgtgtacagtgttcgcctgacacagagcacacagcgcttttcagaaattggtgttattcgcgtt

SEQ ID NO: 678456 - DNA, 75 bp, synthetic construct
  source 1..75: mol_type = other DNA
cgaccatatctggatattccgctgattgataccaacgccgctggcgagcttggagaatcaggtgttgatggatgg

SEQ ID NO: 678457 - DNA, 75 bp, synthetic construct
  source 1..75: mol_type = other DNA
taaacaaaaattcacattctccttatttctcatcatggagattaccgtgtgggtggtgtcgttaaccaggcctat

SEQ ID NO: 678458 - DNA, 75 bp, synthetic construct
  source 1..75: mol_type = other DNA
actaaagctcataatcgaaatatggaaaataaattacatgatgctgaatttggtgatgctgccaacttactgatt

SEQ ID NO: 678459 - DNA, 75 bp, synthetic construct
  source 1..75: mol_type = other DNA
atgacccggaccagttccggcaggagctagagggagagtttgcaagcggggcattccctgaaacagtaaagtata

SEQ ID NO: 678460 - DNA, 75 bp, synthetic construct
  source 1..75: mol_type = other DNA
ccgcagcgctagttacatcatattatccattgatttcaaaatcaccgaccaaagaaaacatcaggttttattttg

SEQ ID NO: 678461 - DNA, 75 bp, synthetic construct
  source 1..75: mol_type = other DNA
ctaacagttacgaagttattagccgtgctgatttaaaaatgaatggtggttccggtgatgctgccaacttactga

SEQ ID NO: 678462 - DNA, 75 bp, synthetic construct
  source 1..75: mol_type = other DNA
ggacttttaagccaggttaatgattctgaaaagatggtaaataacacccgtcttgaaaccacagataaaacgaac

SEQ ID NO: 678463 - DNA, 75 bp, synthetic construct
  source 1..75: mol_type = other DNA
cagcaggaaatgacgctgacatcggcaacaaccaccggacaacaggacagcagcgcggccacacctcccggtcag

SEQ ID NO: 678464 - DNA, 75 bp, synthetic construct
  source 1..75: mol_type = other DNA
gcgggtaaaaaagaccgcaatacggactatacggaaaacagccgccaggctatggcagatatggcacgtaccacg

SEQ ID NO: 678465 - DNA, 75 bp, synthetic construct
  source 1..75: mol_type = other DNA
accgcggcgattaccctgatgcgccatagcctgatgggcgttgcggatgcgctcgcgatttcccgcgcaacgctg

SEQ ID NO: 678466 - DNA, 75 bp, synthetic construct
  source 1..75: mol_type = other DNA
tgtaccagaacagcatataatggagtgtattatcgtgtgaatacaccaacgcagacggcaacaataaatggcacg

SEQ ID NO: 678467 - DNA, 75 bp, synthetic construct
  source 1..75: mol_type = other DNA
ctggggtgctatattggtcagcgctcacgacttggagtacaggtggttattttaccgggtcgaatcattgctccg

SEQ ID NO: 678468 - DNA, 75 bp, synthetic construct
  source 1..75: mol_type = other DNA
cgtcacggtaacatgacgctggaaaatccatcgccagagctgctcacggtgttgatccgcgaactgagcgggagg

SEQ ID NO: 678469 - DNA, 75 bp, synthetic construct
  source 1..75: mol_type = other DNA
tgagcagaaagaacctgtggcggccattgcgccgttttatccacttccactcagaccagagtcagtgccagttcc

SEQ ID NO: 678470 - DNA, 75 bp, synthetic construct
  source 1..75: mol_type = other DNA
aggcgtgttgtttgtatccacgaagctatttttatgctatttcacgaccgaccaatcgctgaggggaaagaaatt

SEQ ID NO: 678471 - DNA, 75 bp, synthetic construct
  source 1..75: mol_type = other DNA
acataaaacgacactggtatttggaaggtggggttatatacacgaaacggggtaataaaccaatgtcttttgcca

SEQ ID NO: 678472 - DNA, 75 bp, synthetic construct
  source 1..75: mol_type = other DNA
actacaagctgaccatgaacggtaaagagctggtagaaatcgacgtcctcaacatgattgagaaggtgaacggcg

SEQ ID NO: 678473 - DNA, 75 bp, synthetic construct
  source 1..75: mol_type = other DNA
ttttttagagcgagaaaaatttcatacacatatatttgtgcccctaataaagagtgtgtttatgataaatatctt

SEQ ID NO: 678474 - DNA, 75 bp, synthetic construct
  source 1..75: mol_type = other DNA
acccgctgcgcccggcgagccaaagccctcgccgctggtacatacggcccggtcgctgttcgccaactggagact

SEQ ID NO: 678475 - DNA, 75 bp, synthetic construct
  source 1..75: mol_type = other DNA
ccagcgcgacgacaccggcgaaatcaacgcggtcgaggtggtcatgcgtggccgtcataaagaaatcgacggcgg

SEQ ID NO: 678476 - DNA, 75 bp, synthetic construct
  source 1..75: mol_type = other DNA
ctcggtctcgacgatgatgcgttaaccgtcgagtggtctgtcggtggccagcctgatgtggctctgtgggcgcag

SEQ ID NO: 678477 - DNA, 75 bp, synthetic construct
  source 1..75: mol_type = other DNA
aacctcgtaaaaagtattcgaatgaattcaaacttcgtatggttgaactggcatcacaacccggtgcttgtatgg

SEQ ID NO: 678478 - DNA, 75 bp, synthetic construct
  source 1..75: mol_type = other DNA
gttgtatctttgttcttctacttattatcatggggagcattccgttttcaccgtttgaaaaatggtggtttatag

SEQ ID NO: 678479 - DNA, 75 bp, synthetic construct
  source 1..75: mol_type = other DNA
aatgcgttgcgaaatatgaactgccgattaagaaaaaatcgtcaggtattatttctgtaacaacaaattgccaat

SEQ ID NO: 678480 - DNA, 75 bp, synthetic construct
  source 1..75: mol_type = other DNA
ttatgatccctgcagtgaacctgtctacaggaaagccgctgtttttcaagacaccacataaccctgattttacac

SEQ ID NO: 678481 - DNA, 75 bp, synthetic construct
  source 1..75: mol_type = other DNA
tatttttccaccaagatggtggctattcaatctccttaaatcacttgtttctcccatttatagtagtaaaccact

SEQ ID NO: 678482 - DNA, 75 bp, synthetic construct
  source 1..75: mol_type = other DNA
tcacacctataaatttagggctatttaaaaactgccaagactggtctaatgattctttagaaacatgtaagatga

SEQ ID NO: 678483 - DNA, 75 bp, synthetic construct
  source 1..75: mol_type = other DNA
ttactacccgtgagtatgcatttgattcccataagctgcgtaatacaatgcaacaacggctttcagcagcaaaag

SEQ ID NO: 678484 - DNA, 75 bp, synthetic construct
  source 1..75: mol_type = other DNA
ttatcattgattactatatttttgtttttcggtattttagagaaaaaatactcattaaagttagaaaaattaact

SEQ ID NO: 678485 - DNA, 75 bp, synthetic construct
  source 1..75: mol_type = other DNA
aatactatgctcaaaaaactaaatgcatttctgactgagcaccaaaataattataggcgctggcataaatacgtc

SEQ ID NO: 678486 - DNA, 75 bp, synthetic construct
  source 1..75: mol_type = other DNA
atactcgtttaaagttgaacgacttaattttggtggtttaaatattctttttgataattctgatgcccttttcat

SEQ ID NO: 678487 - DNA, 75 bp, synthetic construct
  source 1..75: mol_type = other DNA
cggtgcgaaattttatgaaaaaaatcatattcaaatcgccgtaataaatcctgattgtattaaaggtattttctt

SEQ ID NO: 678488 - DNA, 75 bp, synthetic construct
  source 1..75: mol_type = other DNA
gtccaacttttcccggatattacctttactatcccagccgtaagcagcatccgcctgcttttgcgctgttgattg

SEQ ID NO: 678489 - DNA, 75 bp, synthetic construct
  source 1..75: mol_type = other DNA
tggggaaatagtttcgaaatggaatgaacagattaaaaatgctgagttatatgcgctagaaacaaagttagatcg

SEQ ID NO: 678490 - DNA, 75 bp, synthetic construct
  source 1..75: mol_type = other DNA
attcgatgatattttatttatggatgatgactttgatgataactcccctgaggatgctcccattgagaatagtcc

SEQ ID NO: 678491 - DNA, 75 bp, synthetic construct
  source 1..75: mol_type = other DNA
atagtattgtaaaattaatttgtaaggaagctgcatcagagacgtatcgcggtgctcttgaaattttacaaaaaa

SEQ ID NO: 678492 - DNA, 75 bp, synthetic construct
  source 1..75: mol_type = other DNA
ttaacgctagcgcagtttggggtagtggaagttataatgaaaataaatcttctaaacacatggagctactagctc

SEQ ID NO: 678493 - DNA, 75 bp, synthetic construct
  source 1..75: mol_type = other DNA
tatgaaaacaaaatagatgagatttcatctttgtcagagtcaaaggaacaccccatagatattcaagaaaaaaca

SEQ ID NO: 678494 - DNA, 75 bp, synthetic construct
  source 1..75: mol_type = other DNA
gaacttcagtaactatgatattcaatatgtgaactggggaacgtcattgtttgatcttgatactccgtgtatttt

SEQ ID NO: 678495 - DNA, 75 bp, synthetic construct
  source 1..75: mol_type = other DNA
gatgttgatactccgtgtatttttaatgcgcctgcttacaacaagagtaatgaaaaatcattaaaacctgtgagc

SEQ ID NO: 678496 - DNA, 75 bp, synthetic construct
  source 1..75: mol_type = other DNA
agacagaaatcggtgaggttccatacactgactggatgaaaaaattaagacgtaaagaccagaccgcagcgttaa

SEQ ID NO: 678497 - DNA, 75 bp, synthetic construct
  source 1..75: mol_type = other DNA
agagatttcaactaacaatggtactcaggtaaatattataggtggagagggctttgacacgatatctttggacaa

SEQ ID NO: 678498 - DNA, 75 bp, synthetic construct
  source 1..75: mol_type = other DNA
ttaagtagtgccaatgatggtgatgttaaatatttcacctatcagtccactgatattcctggtttaactctttgg

SEQ ID NO: 678499 - DNA, 75 bp, synthetic construct
  source 1..75: mol_type = other DNA
tgaaatattcagcgaagtatgtggacgtcttgataccactgagccggtattctggttggtcgcgctacatgagca

SEQ ID NO: 678500 - DNA, 75 bp, synthetic construct
  source 1..75: mol_type = other DNA
taacaccagaaaacgaaaaaaatattgaaatacgaataaatggtgttactgcaggtcatggtgagcttgtggaaa

SEQ ID NO: 678501 - DNA, 75 bp, synthetic construct
  source 1..75: mol_type = other DNA
acgcatccgcgatatgcgcgccagcatgcgccgtgtttatttgcaggtgatttgccccctgctgactctcagcca

SEQ ID NO: 678502 - DNA, 75 bp, synthetic construct
  source 1..75: mol_type = other DNA
atcatcgagagaaaataatgttgatcagtatgttcaatccgctaaaagaaatgaacaggcccttttcgataatat

SEQ ID NO: 678503 - DNA, 75 bp, synthetic construct
  source 1..75: mol_type = other DNA
tggtggcgcaggcgcagcagagcgcggaaactgcaacagaaagcgaacgacaggcagggcaacatgcagacgctg

SEQ ID NO: 678504 - DNA, 75 bp, synthetic construct
  source 1..75: mol_type = other DNA
tggccggcatcatgcagtattcccgccgcgacgggcgtcttccggatgtctcccgcccctggccctggacactca

SEQ ID NO: 678505 - DNA, 75 bp, synthetic construct
  source 1..75: mol_type = other DNA
caggagtgccgtcagcgccatcccgacagctggctgaagacagccggttgttatcaccatcctgccggtggaaag

SEQ ID NO: 678506 - DNA, 75 bp, synthetic construct
  source 1..75: mol_type = other DNA
agatttattttttttacggtgttaatggagaggtttattacgcccgtggcacttctggtgtcccggcatgggaac

SEQ ID NO: 678507 - DNA, 75 bp, synthetic construct
  source 1..75: mol_type = other DNA
tatataattacagtcgatgaaagtggcgaacagactcttcatattaaagaggaacatacgtttcccggatattac

SEQ ID NO: 678508 - DNA, 75 bp, synthetic construct
  source 1..75: mol_type = other DNA
cgacgagtactgtgttggcgatattgctgtatacgacgactcaaagcccggcacgctgaacgattttctgactgc

SEQ ID NO: 678509 - DNA, 75 bp, synthetic construct
  source 1..75: mol_type = other DNA
aagtcaagctgtctggaggagatcttgaaacggtattcaaatacaaaaatggcaattttgtctgggagatagcca

SEQ ID NO: 678510 - DNA, 75 bp, synthetic construct
  source 1..75: mol_type = other DNA
gtagataaattaaaacaaacgcagtttatcaacgctagtcaatttgatattaatgagcttcagcagagttctgct

SEQ ID NO: 678511 - DNA, 75 bp, synthetic construct
  source 1..75: mol_type = other DNA
gccggagaacaattaaaacgtattaaatatgatgttaatgaagataaattaaaagtatacaacgtacactttgat

SEQ ID NO: 678512 - DNA, 75 bp, synthetic construct
  source 1..75: mol_type = other DNA
ttaacaactgaagagaatgaacctgtaaaatatgtcaactggattaatgggcgtgattatattgtgattgtggcg

SEQ ID NO: 678513 - DNA, 75 bp, synthetic construct
  source 1..75: mol_type = other DNA
atgctctccttatcgcgcatcctggatatcattggcgatatgccagcatacgggtatcgccgtgtctgggcgatc

SEQ ID NO: 678514 - DNA, 75 bp, synthetic construct
  source 1..75: mol_type = other DNA
ccgcgtgtccactattgctgtgtaagatcagtccgggagatagccaaaattaacattactctccaaaaagaagag

SEQ ID NO: 678515 - DNA, 75 bp, synthetic construct
  source 1..75: mol_type = other DNA
ggtactcaggtaaatattataggtggagagggctttgacacgatatctttggacaatactacagtaacaagtgct

SEQ ID NO: 678516 - DNA, 75 bp, synthetic construct
  source 1..75: mol_type = other DNA
catctttgtcagagtcaaaggaacacaccgtagatattcaagaaaaaacgaataagtttgtgcagcattttcagc

SEQ ID NO: 678517 - DNA, 75 bp, synthetic construct
  source 1..75: mol_type = other DNA
gctgtctggggaaaatcttgaaacggtattcaaatataaaaaaggaagttttgtccgggagatagccagaattaa

SEQ ID NO: 678518 - DNA, 75 bp, synthetic construct
  source 1..75: mol_type = other DNA
agagcgcagcctcaagataaaatcgatagctataattcagcactgcaagctttttccatcttttgttcatctacg

SEQ ID NO: 678519 - DNA, 75 bp, synthetic construct
  source 1..75: mol_type = other DNA
agattggcgatgatttctgggatgccttcaatggcctcgatcgtgaggtgttgattcagcagacgttgcagcttc

SEQ ID NO: 678520 - DNA, 75 bp, synthetic construct
  source 1..75: mol_type = other DNA
gggtggatgtcgctgtcgcgtaaaccggaggagacatggtacggctgggacggcgacaggctgacgacggtacag

SEQ ID NO: 678521 - DNA, 75 bp, synthetic construct
  source 1..75: mol_type = other DNA
tggatgatgactttgatgatagttcctctgaggatgagcccgttgagaatagtcctgttgtgactagtccccttg

SEQ ID NO: 678522 - DNA, 75 bp, synthetic construct
  source 1..75: mol_type = other DNA
tcatcattaggtattctgctaatcagtggtcttttattagttagcccacgcaacaaagtacagtatattcagcag

SEQ ID NO: 678523 - DNA, 75 bp, synthetic construct
  source 1..75: mol_type = other DNA
gagaaagcgcagcgccgcagcctggcggagaagctgcagcaggaagggagcgaggacgggcacggcgtggtattt

SEQ ID NO: 678524 - DNA, 75 bp, synthetic construct
  source 1..75: mol_type = other DNA
aatgcggctatcacatattctgagaccaagtctttacctacatcgggagtcagcaattcagtaggtgtaacggtt

SEQ ID NO: 678525 - DNA, 75 bp, synthetic construct
  source 1..75: mol_type = other DNA
agagggtggtttatataatttaggtggattggactttaaggggtgcttcttttctggacagaacttcagtaacta

SEQ ID NO: 678526 - DNA, 75 bp, synthetic construct
  source 1..75: mol_type = other DNA
gggtttaatttcaaattatttccagaagtcaagctgtctggaggagatcttgaaacggtattcaaatacaaaaat

SEQ ID NO: 678527 - DNA, 75 bp, synthetic construct
  source 1..75: mol_type = other DNA
gaacaaatagttgctgatgccgatgccgcgttatatcgggcgaaagaaaatgggcgaaatcggtgggctaaataa

SEQ ID NO: 678528 - DNA, 75 bp, synthetic construct
  source 1..75: mol_type = other DNA
taaccggcggtaccggttcatttggcaataagttcgttcgcatgacattagaaaactataatcctaaaaagatta

SEQ ID NO: 678529 - DNA, 75 bp, synthetic construct
  source 1..75: mol_type = other DNA
atttggcttaaaaaccgtaaaagaatttgttaaagcaattctttatattatttttttttgcattggcgatcaaag

SEQ ID NO: 678530 - DNA, 75 bp, synthetic construct
  source 1..75: mol_type = other DNA
ctctcgacgccttgggccggcattgcagacccggaaaatggcgtaggctgcgaacttttcatggaattagacgct

SEQ ID NO: 678531 - DNA, 75 bp, synthetic construct
  source 1..75: mol_type = other DNA
gttgcagttaatgccggttactatatcaccccagaggcaaaagtgtacatcgagggtgtatggagtcgtctcaca

SEQ ID NO: 678532 - DNA, 75 bp, synthetic construct
  source 1..75: mol_type = other DNA
gaaatgatactgttctggctttagggtatgaaggtaatagtgcggatgctattattaatacgaatatagacttgg

SEQ ID NO: 678533 - DNA, 75 bp, synthetic construct
  source 1..75: mol_type = other DNA
tgcagacacgtcttgatggtctgactccggcggatgtaccggcggtgacggatcaggacggtaacggcaaggcgg

SEQ ID NO: 678534 - DNA, 75 bp, synthetic construct
  source 1..75: mol_type = other DNA
gtaattcagactctaaggttgacttggatggagagtggattaaaggtgaaacctggaacgagggcgatataactt

SEQ ID NO: 678535 - DNA, 75 bp, synthetic construct
  source 1..75: mol_type = other DNA
ggtttcgtttatgaaagtgatagtaacgcagaatggatgagcattgaagaacttcgtcaatggatcgacgataat

SEQ ID NO: 678536 - DNA, 75 bp, synthetic construct
  source 1..75: mol_type = other DNA
ggtcggtggtgaagtttatgtaaaaaaaataccttccatgaaagtcactgatatagctacagctgttgcacctaa

SEQ ID NO: 678537 - DNA, 75 bp, synthetic construct
  source 1..75: mol_type = other DNA
gtaataccattcttcttatctattaaggagaacggtgaactgccgataactgatgagcgtatgacacgctttatg

SEQ ID NO: 678538 - DNA, 75 bp, synthetic construct
  source 1..75: mol_type = other DNA
cagaacgaagggcatgtttcgcggcgtcttccggtaacaacctcttctgacactggcgttgaattattacctgta

SEQ ID NO: 678539 - DNA, 75 bp, synthetic construct
  source 1..75: mol_type = other DNA
cagggagtcagccgaatgttgggaaggatttgacggatgaagagaagaactgcctggccggcggcagtacgggaa

SEQ ID NO: 678540 - DNA, 75 bp, synthetic construct
  source 1..75: mol_type = other DNA
taactggtggtactggttcatttggtaataaattcgttcgaatgacattagagaagtataatcctaaaaaaatta

SEQ ID NO: 678541 - DNA, 75 bp, synthetic construct
  source 1..75: mol_type = other DNA
agcccccgggctgatattgaaccggcaaccggtacggctccccgttgtgccgctgttaatgtgacgcgtaaagag

SEQ ID NO: 678542 - DNA, 75 bp, synthetic construct
  source 1..75: mol_type = other DNA
tgcataaatatgtgatggctgtcacttatttatttcaagaaatatatcacctaaaaacaacgcggggcagggaat

SEQ ID NO: 678543 - DNA, 75 bp, synthetic construct
  source 1..75: mol_type = other DNA
cgctaactgatgccaacgcgctggaggctatccgcttgatttcgctgtggctgccgaaagcggtagaagatggtc

SEQ ID NO: 678544 - DNA, 75 bp, synthetic construct
  source 1..75: mol_type = other DNA
gccagtgtaatgctggagatccctgcctccgttaccgctgccaccggtatggacgcactaacccatgccatagaa

SEQ ID NO: 678545 - DNA, 75 bp, synthetic construct
  source 1..75: mol_type = other DNA
ttcagatatacgttaggaagtcgactggctaatgaaggagcctcaattgaggtgattgctaaagcgttagatcat

SEQ ID NO: 678546 - DNA, 75 bp, synthetic construct
  source 1..75: mol_type = other DNA
taccacctttaggctgtggtaatgggggcctcgattggaataaggttgaggctcttattttaaaaacttttcaaa

SEQ ID NO: 678547 - DNA, 75 bp, synthetic construct
  source 1..75: mol_type = other DNA
tatctcgttccccaggaaccgctgcttttcccaagcctgtcgataaaagaaaacatcctgtttgggatggcaaaa

SEQ ID NO: 678548 - DNA, 75 bp, synthetic construct
  source 1..75: mol_type = other DNA
gcccgctgcgttgccaccactccaagagcaatcccgtatcgtcgccaaagtcgatgaactgatggccttatgcga

SEQ ID NO: 678549 - DNA, 75 bp, synthetic construct
  source 1..75: mol_type = other DNA
gcctattgggcaaggcgcatgccaccaaagagtggcgatattttcttcacgcgcgaggccccaatgggggaagcg

SEQ ID NO: 678550 - DNA, 75 bp, synthetic construct
  source 1..75: mol_type = other DNA
ctaacggcagtacccgtaaaaaagagcggtgtcgacttacccgagtcagactttgaagcatgggctacgttacag

SEQ ID NO: 678551 - DNA, 75 bp, synthetic construct
  source 1..75: mol_type = other DNA
aaattagcctgcatggtgctggggcaattggcgatatggtaaatctggttgcgcataaacagtggggaaaagcac

SEQ ID NO: 678552 - DNA, 75 bp, synthetic construct
  source 1..75: mol_type = other DNA
gccgcctactgcaggattatatcagcggtatgaccgacctctatgcgtgggatgaataccgacgtctgatggccg

SEQ ID NO: 678553 - DNA, 75 bp, synthetic construct
  source 1..75: mol_type = other DNA
gtggtgaaccgggctgacagtatcgtgggaaataccggacagcagtgcagtgcgcagcagataaaccgcagtgaa

SEQ ID NO: 678554 - DNA, 75 bp, synthetic construct
  source 1..75: mol_type = other DNA
ttatgacatcgataagagactaagtgcgttttttaaccccttatctaatatacttatgggcatagagattgaaga

SEQ ID NO: 678555 - DNA, 75 bp, synthetic construct
  source 1..75: mol_type = other DNA
cgccaaaatgcttgccaaagatccggcgttaccgtcttacgacgaattaaaaaaaatgggtatctataagcgtaa

SEQ ID NO: 678556 - DNA, 75 bp, synthetic construct
  source 1..75: mol_type = other DNA
atgtttgaaatcatcaacacccgctacgagcgcctgaagccgacgatcctgatcagcaacctgccgaaggatgag

SEQ ID NO: 678557 - DNA, 75 bp, synthetic construct
  source 1..75: mol_type = other DNA
ccattgagcggatgcttgatcagctgagtaagccaccggaagacatcccgaattgcgaggtggttatcgagcgcg

SEQ ID NO: 678558 - DNA, 75 bp, synthetic construct
  source 1..75: mol_type = other DNA
ctgatgacgtacagtcatcatgcctgtcgcacggagtgttatgccatgacggttcattattaccgtctgcgggac

SEQ ID NO: 678559 - DNA, 75 bp, synthetic construct
  source 1..75: mol_type = other DNA
tcactccctcattactgttgctgttactactggcgatgcctttgctgcctggcctttactggctgtggtgtcgtt

SEQ ID NO: 678560 - DNA, 75 bp, synthetic construct
  source 1..75: mol_type = other DNA
gtgaggatgacccgctggttccccgccagttgcgacagtcgcgccatcgtcgtccgttaccggcacatctccccc

SEQ ID NO: 678561 - DNA, 75 bp, synthetic construct
  source 1..75: mol_type = other DNA
ccatttgtttggtgatgaggtactcataaaaatagttaatcttattaaagatgaattgcctcgcagtaaaggtga

SEQ ID NO: 678562 - DNA, 75 bp, synthetic construct
  source 1..75: mol_type = other DNA
aatgtgtctgagtatcgtcgttcagtatctaataatgtattttatgaactagagatatcaccagatgaactgtta

SEQ ID NO: 678563 - DNA, 75 bp, synthetic construct
  source 1..75: mol_type = other DNA
gccgatgtgattaacgtttttgctttggagctggaaaagtccatcgatcgcgctgtacgacgggcggctaaaaaa

SEQ ID NO: 678564 - DNA, 75 bp, synthetic construct
  source 1..75: mol_type = other DNA
acgccccggcgatgttctgcttcagtctgtatggctacattctggatttaaatccggggattattggctacaaaa

SEQ ID NO: 678565 - DNA, 75 bp, synthetic construct
  source 1..75: mol_type = other DNA
gatgtttattgttgcctataaaaaaagtaaatatctctatatatgtatgctattcgtttttgcatcggcaatatc

SEQ ID NO: 678566 - DNA, 75 bp, synthetic construct
  source 1..75: mol_type = other DNA
atgtaagtcaactaacaagaattttgcaccgaattgttcatttctcgatgggtgggttgaattgtagttgcagca

SEQ ID NO: 678567 - DNA, 75 bp, synthetic construct
  source 1..75: mol_type = other DNA
ttttgagaatttgctaaaggagctagatctaaatggcgttatgttgcttattgatgaatggtctgaattggggag

SEQ ID NO: 678568 - DNA, 75 bp, synthetic construct
  source 1..75: mol_type = other DNA
atggcatattgcaaatattttggctccggacgctccggtttatacgcatccggcagatcaacgggcaatggaact

SEQ ID NO: 678569 - DNA, 75 bp, synthetic construct
  source 1..75: mol_type = other DNA
cagtggggacttgtcagggggcgaacacaaacgcacataccatggcctgaaataaagaaaatagatccggattat

SEQ ID NO: 678570 - DNA, 75 bp, synthetic construct
  source 1..75: mol_type = other DNA
aacgcaaaatatcaagagcggcgggaaagctgacacgacaaatatctcctccgggagccggcaggttgttgagaa

SEQ ID NO: 678571 - DNA, 75 bp, synthetic construct
  source 1..75: mol_type = other DNA
ggttttccgtattgaaccaccgttgtttaattatgttcttcattcaagagtgcagcttgttcttaaagaaatgac

SEQ ID NO: 678572 - DNA, 75 bp, synthetic construct
  source 1..75: mol_type = other DNA
atatatgtagaggaccgctatggcaaagataatgccatgcgagagaaaccttatcatattagcgataaaggtaac

SEQ ID NO: 678573 - DNA, 75 bp, synthetic construct
  source 1..75: mol_type = other DNA
agaaatatgagaataaagaagaggcaagggttattacaataattgaatcgcgtgcggcgaaaactttaggtgagt

SEQ ID NO: 678574 - DNA, 75 bp, synthetic construct
  source 1..75: mol_type = other DNA
gtcgtgaagctgaaccgttttaaaagtaacgtagcaggtaaaatgagcagcggtggagccgccaatggcagttac

SEQ ID NO: 678575 - DNA, 75 bp, synthetic construct
  source 1..75: mol_type = other DNA
aacgggctgggcggtcacattgaaaccgggatgcgatttaccgatggtaactggaacctgacgccgtatgcatcg

SEQ ID NO: 678576 - DNA, 75 bp, synthetic construct
  source 1..75: mol_type = other DNA
agtgtgggcagttattctctgggcggctatgccagttgggaacatgaaagtggtttctatctggacggtatcgtg

SEQ ID NO: 678577 - DNA, 75 bp, synthetic construct
  source 1..75: mol_type = other DNA
ccaacccaaatccgaagccggatccaaaaccagacccaaaaccggatccgaaaccagacccgactcccgatccaa

SEQ ID NO: 678578 - DNA, 75 bp, synthetic construct
  source 1..75: mol_type = other DNA
agtaaacagtttgctcctcaacgacggtgatgtttatttatcagcacaaacagcagcgcctgccacaactaacgg

SEQ ID NO: 678579 - DNA, 75 bp, synthetic construct
  source 1..75: mol_type = other DNA
atgctaaagctgatgcgacccgaatagataatggcggggttatggatgttgccggaaacgcgacaaataccataa

SEQ ID NO: 678580 - DNA, 75 bp, synthetic construct
  source 1..75: mol_type = other DNA
ttggaaattttcttggagttctgcactagtgggcatattactgaaggtgagtttttaaaaataaggcaaagtgaa

SEQ ID NO: 678581 - DNA, 75 bp, synthetic construct
  source 1..75: mol_type = other DNA
gcctcagaatatggcttcggtgcggttatcgccgccctacccggttttctggtgctctcaaaggcgctggccgcc

SEQ ID NO: 678582 - DNA, 75 bp, synthetic construct
  source 1..75: mol_type = other DNA
cagctggcaaacgcattcatgggattgtggtgcgtgatatctacggtgatggtgcaccgcacaataagcaggtca

SEQ ID NO: 678583 - DNA, 75 bp, synthetic construct
  source 1..75: mol_type = other DNA
aacaaaaaacgtgggaaatagtgctgggcaaatacctgatatgtcttactggtcttcaccggcaggcggaattaa

SEQ ID NO: 678584 - DNA, 75 bp, synthetic construct
  source 1..75: mol_type = other DNA
catctgctaaaagaattaatgtaaaaagtgtacgagctgcaaattctgaatggtatgaaaaagataaaaaagagc

SEQ ID NO: 678585 - DNA, 75 bp, synthetic construct
  source 1..75: mol_type = other DNA
aaccgatccagaaactggcatcagcgttgaagcactggaactggcgctggaacagtggccgattaaaggcatcat

SEQ ID NO: 678586 - DNA, 75 bp, synthetic construct
  source 1..75: mol_type = other DNA
ccatcagcatcaccacacttgccggaattaccggttcagcgtccggcgggatgagtattgctcttgcggctatgt

SEQ ID NO: 678587 - DNA, 75 bp, synthetic construct
  source 1..75: mol_type = other DNA
atagcacacgactcattcagttggccctgataagcgggacgcttattgcctcctcggcgtggggattcgagacga

SEQ ID NO: 678588 - DNA, 75 bp, synthetic construct
  source 1..75: mol_type = other DNA
ttccaggccacactacagcaggatggaactataccaatagaagcaggtgagtttaaagccaccagtactttccag

SEQ ID NO: 678589 - DNA, 75 bp, synthetic construct
  source 1..75: mol_type = other DNA
gcggtgtgcttggttccgtcactattattattggtctgggcgctgctggggcgtatgatcgaacactctggtggt

SEQ ID NO: 678590 - DNA, 75 bp, synthetic construct
  source 1..75: mol_type = other DNA
ccgctggaatttaccttcctgttcatttcaccgttgctgtttgcggtacacgctgtgctggcggcctcaatgtcg

SEQ ID NO: 678591 - DNA, 75 bp, synthetic construct
  source 1..75: mol_type = other DNA
gggtgtgggtttacaccttcctcgaacgtattctgatcccaaccggtttacaccacttcatctacggaccgttta

SEQ ID NO: 678592 - DNA, 75 bp, synthetic construct
  source 1..75: mol_type = other DNA
ttaaccgacgaacagaagaacgcagtacaggaactattgaacagtaatgcctcagcgaaagatctgattgcatat

SEQ ID NO: 678593 - DNA, 75 bp, synthetic construct
  source 1..75: mol_type = other DNA
acctggcgacaaacagccttcaggggccgtggtggatactcggctggccggagcgggtgccggaggcggacgagg

SEQ ID NO: 678594 - DNA, 75 bp, synthetic construct
  source 1..75: mol_type = other DNA
aagcttcacgccgctcctgagaatcgaaacagagaatggtgaacaggcgaaggcgcggcaccgtagcctggcgga

SEQ ID NO: 678595 - DNA, 75 bp, synthetic construct
  source 1..75: mol_type = other DNA
ccggtggagtggctgacgtatggcagcggttatcttgcggggatgaagctgggcggaacgccgctggtcgagtac

SEQ ID NO: 678596 - DNA, 75 bp, synthetic construct
  source 1..75: mol_type = other DNA
acagcaacggtatcaccggacggtaaacgcagcaccatcgcatatgataaacgcgggcgtccggtgagtgtgacg

SEQ ID NO: 678597 - DNA, 75 bp, synthetic construct
  source 1..75: mol_type = other DNA
cagaggagctcatagtggactgcctttttatcgggtggatggaccgttgcagacgatgaaaataacgggtacgcc

SEQ ID NO: 678598 - DNA, 75 bp, synthetic construct
  source 1..75: mol_type = other DNA
ggggaggctgaaggcacagacggatgcggcggggcggcggacggagtacagcctgcatatggcgtcgggtgcggt

SEQ ID NO: 678599 - DNA, 75 bp, synthetic construct
  source 1..75: mol_type = other DNA
ggacgggctgcgcagcagccggaaatatgaccgtcagggcaggctggcggaagagatctcgcgcaacggtaacat

SEQ ID NO: 678600 - DNA, 75 bp, synthetic construct
  source 1..75: mol_type = other DNA
tacctggcgacaaacagccttcaggggccgtggtggatactcggctggccggagcgggtgccggaagtggacgag

SEQ ID NO: 678601 - DNA, 75 bp, synthetic construct
  source 1..75: mol_type = other DNA
ttcatgagcgggaactgatactcaacgacaacggcggcaggagcattcactttgagccgctgtttcccggcgaga

SEQ ID NO: 678602 - DNA, 75 bp, synthetic construct
  source 1..75: mol_type = other DNA
ggctggactaccgctttgagtacggagagagccgggtaatcatcacggacagcctgaacaggcgggaggtgctgt

SEQ ID NO: 678603 - DNA, 75 bp, synthetic construct
  source 1..75: mol_type = other DNA
gaatccaaatgtcgggaaggatttgacggaggaagagaagaactgcctgggtggtggcagtacgggaagcccggg

SEQ ID NO: 678604 - DNA, 75 bp, synthetic construct
  source 1..75: mol_type = other DNA
gttccggtatgacccggtggacaggctgacggagcagcgcggctttgacgggcggacgcaacgttaccactatga

SEQ ID NO: 678605 - DNA, 75 bp, synthetic construct
  source 1..75: mol_type = other DNA
ggcagcatggcaggcagtaatgcagcatatgaactgaccagcacatacaccctcacagggcagctacagagcagg

SEQ ID NO: 678606 - DNA, 75 bp, synthetic construct
  source 1..75: mol_type = other DNA
ccggtaccattacgacagtcagcaccggctggtgcactacacgcggacacaatatgcagagccgctggtcgaaag

SEQ ID NO: 678607 - DNA, 75 bp, synthetic construct
  source 1..75: mol_type = other DNA
tgaccacgatacagaacgacaggagccgcatccagacgatttatcagccggggagcttcgcgccgctcatccgca

SEQ ID NO: 678608 - DNA, 75 bp, synthetic construct
  source 1..75: mol_type = other DNA
tgataaataccggggccggatggtggcgcaccgtcacacgggccggccggaaatccgttaccgttacgacagcga

SEQ ID NO: 678609 - DNA, 75 bp, synthetic construct
  source 1..75: mol_type = other DNA
cagcgaggatgaggggctggtcacccactggcactatgacgaagcagaccgcctcacgcaccgcaccgtgaatgg

SEQ ID NO: 678610 - DNA, 75 bp, synthetic construct
  source 1..75: mol_type = other DNA
gtggctggtgcgcggcggcgtggcgaaactggatgaaggtcaccggctggccgcactctggcaggcgctgccgga

SEQ ID NO: 678611 - DNA, 75 bp, synthetic construct
  source 1..75: mol_type = other DNA
catgaatccgataagttcaaatgataatgatagtgtagacttgcgaaatataaaatgccctgaaggttcagagag

SEQ ID NO: 678612 - DNA, 75 bp, synthetic construct
  source 1..75: mol_type = other DNA
ttacctgcaccagccataccgtctgccggggcagcagcatgatgaggaatcagggctgtactataaccggaaccg

SEQ ID NO: 678613 - DNA, 75 bp, synthetic construct
  source 1..75: mol_type = other DNA
ggcggagctcataatggggccgccgatgcaatgagacattgttacttgatgtgtcgaatgactaagacatttgga

SEQ ID NO: 678614 - DNA, 75 bp, synthetic construct
  source 1..75: mol_type = other DNA
ttattttgttcaactgatttaaaatcgaaatcacaatcacctgcattaggtttggggcatgagtttgctcatgcg

SEQ ID NO: 678615 - DNA, 75 bp, synthetic construct
  source 1..75: mol_type = other DNA
ggtggagtacacccgcgaccgcctgcaccgggaaacgctgcgcagcttcggtcgttatgaactcaccaccgctta

SEQ ID NO: 678616 - DNA, 75 bp, synthetic construct
  source 1..75: mol_type = other DNA
cctgccgccggtggagtggctgacgtatggcagcggttacctggcgggaatgaagctgggcgggacgccgctggt

SEQ ID NO: 678617 - DNA, 75 bp, synthetic construct
  source 1..75: mol_type = other DNA
gacttgtcatcctctggtactacgatgaatcggaccgtatcactcaccgcacggtgaacggtgaacggcgaaccg

SEQ ID NO: 678618 - DNA, 75 bp, synthetic construct
  source 1..75: mol_type = other DNA
gggagcttcacgccactcatcagggttgaaaccgccaccggtgagctggcgaaaacgcagcgccgcagcctggcg

SEQ ID NO: 678619 - DNA, 75 bp, synthetic construct
  source 1..75: mol_type = other DNA
gcgcttgaatcaaatattaaagcggcgattcagcgcagtgatgatttaccttttttgaaacaaattcgcacagaa

SEQ ID NO: 678620 - DNA, 75 bp, synthetic construct
  source 1..75: mol_type = other DNA
gtgacgatcctgaccgtgggctgcgtcttttctggtgcgtggtaattaccctgatcccgctttcaattcttttca

SEQ ID NO: 678621 - DNA, 75 bp, synthetic construct
  source 1..75: mol_type = other DNA
tggaaagctatgccattcatcagtttatcaatggcgtaatcaacgtcccacaggtgctggaaacactgggcggcg

SEQ ID NO: 678622 - DNA, 75 bp, synthetic construct
  source 1..75: mol_type = other DNA
ggacagatctttataaaaatgctcagttgtatactgtacttaaatcagcgctgatcaatctgaaccaagactatt

SEQ ID NO: 678623 - DNA, 75 bp, synthetic construct
  source 1..75: mol_type = other DNA
tgccgtcaatgggcgcagtatttcacgtaaaaatgggcaggatcaggatgttggcgcatcagttatgaatgccat

SEQ ID NO: 678624 - DNA, 75 bp, synthetic construct
  source 1..75: mol_type = other DNA
aacgagaatactacagaaaagaaaaagcggactgtcaatagtgaaaaagcgatggaaagagaaattgagcgaatt

SEQ ID NO: 678625 - DNA, 75 bp, synthetic construct
  source 1..75: mol_type = other DNA
aatctatgcggatgatgatgttatttacggagcaaattggttatcagaattaataaatgagtttaaccgtcatga

SEQ ID NO: 678626 - DNA, 75 bp, synthetic construct
  source 1..75: mol_type = other DNA
agatgagcatggcataaaagggatactggtgtgtaataatccatcaataagaccactgattatgagccagaatgc

SEQ ID NO: 678627 - DNA, 75 bp, synthetic construct
  source 1..75: mol_type = other DNA
cccgctcagcccggtgacatggttatcatgcaggttcagtccaccgtcccgaaccatgccgggattttgcttgat

SEQ ID NO: 678628 - DNA, 75 bp, synthetic construct
  source 1..75: mol_type = other DNA
gtgtggctgatgcacgacccggaatacccggataatttacctgccgcgccactggtgtgctacgactggacgcca

SEQ ID NO: 678629 - DNA, 75 bp, synthetic construct
  source 1..75: mol_type = other DNA
taccggtatttattttgctgtaaataaaaacacgcatgatgtatatgagcgtcagtctttttacgggatacgttc

SEQ ID NO: 678630 - DNA, 75 bp, synthetic construct
  source 1..75: mol_type = other DNA
caactgatacggtttcattctacaatgaagctggaaggcgagagctggcggaacagaacattaaggaagggacaa

SEQ ID NO: 678631 - DNA, 75 bp, synthetic construct
  source 1..75: mol_type = other DNA
tgggccgtttctccaaaggatattaaatttgagtgtcagtggactactcatcgagttatttctttagggaaatgt

SEQ ID NO: 678632 - DNA, 75 bp, synthetic construct
  source 1..75: mol_type = other DNA
cataccagtgacggccaccgagtgtcggtccactacggctatgacgataaacgcagcaccatcgaatatgataaa

SEQ ID NO: 678633 - DNA, 75 bp, synthetic construct
  source 1..75: mol_type = other DNA
tccactacggctatgacgataaaggccgcctgacgggcgaacggcagacggtggagaacccggagacggggagga

SEQ ID NO: 678634 - DNA, 75 bp, synthetic construct
  source 1..75: mol_type = other DNA
ggcgcgggccgctgttttcacctggtgctgaccacacaggcgcagcgggcggaagccttccgtaaacagcgcgcc

SEQ ID NO: 678635 - DNA, 75 bp, synthetic construct
  source 1..75: mol_type = other DNA
cagtttgatgcggtgggcaggcttaaggcacagacggatgccgcaggccggacaacagagtacagcccggatgtg

SEQ ID NO: 678636 - DNA, 75 bp, synthetic construct
  source 1..75: mol_type = other DNA
ctgcgaccatcgcggcctgccgctggcgcttgtcagcacggaaggggcaacagaatggtgcgcagaatacgatga

SEQ ID NO: 678637 - DNA, 75 bp, synthetic construct
  source 1..75: mol_type = other DNA
gggaaaggccgtcagcaccacacagggtggtctgacgcgcagcatggaatacgatgctgcgggacgtgtcatcag

SEQ ID NO: 678638 - DNA, 75 bp, synthetic construct
  source 1..75: mol_type = other DNA
acagtacgcaaccatgcaagcgaccgtgcctgaaatagatagcattatcgagagtgttacctctgcatttagaga

SEQ ID NO: 678639 - DNA, 75 bp, synthetic construct
  source 1..75: mol_type = other DNA
gaagctgcaatggagtcagaagtaaaaccaaacgccagatttattatattagaccccaatggcgagtatgtacgt

SEQ ID NO: 678640 - DNA, 75 bp, synthetic construct
  source 1..75: mol_type = other DNA
cgtcatatagcagtgctcggaaatactggtagcggtaagtcttgctctgtatctggattaatccagtggtcactc

SEQ ID NO: 678641 - DNA, 75 bp, synthetic construct
  source 1..75: mol_type = other DNA
gacaacggcggcaggagcattcactttgagccgctgtttcccggcgagataagctacagccgcagcgagtcactc

SEQ ID NO: 678642 - DNA, 75 bp, synthetic construct
  source 1..75: mol_type = other DNA
tggcgcaattattgacaaggggactgcctatccgatattcctgctatgtctggagttggctgcctcagtgacgag

SEQ ID NO: 678643 - DNA, 75 bp, synthetic construct
  source 1..75: mol_type = other DNA
gccttctggggcttaagatgctacgagcttcgcgacggcttttttcctttaaatgatgccaaaattaaattttat

SEQ ID NO: 678644 - DNA, 75 bp, synthetic construct
  source 1..75: mol_type = other DNA
ttcctaaagctaatggtgtaactccggtatttaaattctatggcgaagcagaagcacaagatgattctattgcta

SEQ ID NO: 678645 - DNA, 75 bp, synthetic construct
  source 1..75: mol_type = other DNA
tttaccgcgtatgggattactcagatattgcacttgctcattctgaagcattcgttaatatcgttattggtgagt

SEQ ID NO: 678646 - DNA, 75 bp, synthetic construct
  source 1..75: mol_type = other DNA
tactgggtgggtgtctgatgtccgcaccgctgacagctgcacagtctgtttccggggcaacccgaccggttcaga

SEQ ID NO: 678647 - DNA, 75 bp, synthetic construct
  source 1..75: mol_type = other DNA
tccagaactactaaataaactcacaactgtagaagaaacagtaaatagtaatgaattaaccgaagcagaattaga

SEQ ID NO: 678648 - DNA, 75 bp, synthetic construct
  source 1..75: mol_type = other DNA
aattagcagtaccgccaacgatgaatgggaaatgattcaggaaggcgtactaacccatattagcattggctataa

SEQ ID NO: 678649 - DNA, 75 bp, synthetic construct
  source 1..75: mol_type = other DNA
tactaccgctgctggcgttgtagctgatgacctacaagatcaatacattccagaactactaaaaatttctgcact

SEQ ID NO: 678650 - DNA, 75 bp, synthetic construct
  source 1..75: mol_type = other DNA
gttacccggcattcgtacccatctggtggcgtttgacacaagcgtcgttgatctcacggcagacgttgccgatcc

SEQ ID NO: 678651 - DNA, 75 bp, synthetic construct
  source 1..75: mol_type = other DNA
cttcatcacagggggcaccttctgaggctgaaaaagttccggcgtggatgtttcgtctggtcatggtggtgtcac

SEQ ID NO: 678652 - DNA, 75 bp, synthetic construct
  source 1..75: mol_type = other DNA
gccagagctgcgccactgatgcagtcactgtacgactggatacagactcagatgaaaacactggcgcgtcactcg

SEQ ID NO: 678653 - DNA, 75 bp, synthetic construct
  source 1..75: mol_type = other DNA
ggctatcgagacgatgcggaacgcatcgctgatgagcagtctgaacttgttaagaagatggtgtttgatacgctg

SEQ ID NO: 678654 - DNA, 75 bp, synthetic construct
  source 1..75: mol_type = other DNA
gtgaagtagaaataacaaatgccaacaaactgttaacaagcttggctaaacttcatgcaaaaaatccgttgagct

SEQ ID NO: 678655 - DNA, 75 bp, synthetic construct
  source 1..75: mol_type = other DNA
tcgggcgggtgatttcgtggaacggcattgtcacttacggggcgatggcgatgggtgcgccgttaggcgtcgtgt

SEQ ID NO: 678656 - DNA, 75 bp, synthetic construct
  source 1..75: mol_type = other DNA
gcttgagcactatcgccacagcgtggagaaactggcagaacatccgactattcggtgtttggcgggggacgataa

SEQ ID NO: 678657 - DNA, 75 bp, synthetic construct
  source 1..75: mol_type = other DNA
gcgatacaacctgcctgagaaaagcatacaaacagcgattaaaaactttaaaccatctttatgacgcgattaata

SEQ ID NO: 678658 - DNA, 75 bp, synthetic construct
  source 1..75: mol_type = other DNA
gttaagtatcaatttcttcatgggctttacgcgatgggagccgctggggaactgcatgactcacaggtactgtgg

SEQ ID NO: 678659 - DNA, 75 bp, synthetic construct
  source 1..75: mol_type = other DNA
ccacagaaacgggtatcaggaagtcggagtcagccatagtagtgatgaagcgagtaatgatcgtggatcgaaggg

SEQ ID NO: 678660 - DNA, 75 bp, synthetic construct
  source 1..75: mol_type = other DNA
atgccgttgaagtgatggtttctgtactgaatgactctgttacgaaggagaatgcaatgactgttaaaaatctca

SEQ ID NO: 678661 - DNA, 75 bp, synthetic construct
  source 1..75: mol_type = other DNA
tggctgcctgcccgggaatgaccgtggagagcgcccgggctgtgctggctgcgggatcaggtaaggcagaaccgg

SEQ ID NO: 678662 - DNA, 75 bp, synthetic construct
  source 1..75: mol_type = other DNA
ggcctgggccagacaaaaaaatatcccggcagagcgcgtcagaaagcgggaaattacgttaaatcatgatggcgg

SEQ ID NO: 678663 - DNA, 75 bp, synthetic construct
  source 1..75: mol_type = other DNA
ccacaaccgggcggtttaatctggcgtgactggttaggccttatcgaaacgggtaaatcagaaaacaatacggaa

SEQ ID NO: 678664 - DNA, 75 bp, synthetic construct
  source 1..75: mol_type = other DNA
ggtggctttagcgctgtagttgaaaatttgaactacacaccatctgcgctggtggcgacgttcggaaagaggatc

SEQ ID NO: 678665 - DNA, 75 bp, synthetic construct
  source 1..75: mol_type = other DNA
acatacttgaaaaagatcctctgttgcaggaggaagtgttcgggccgctcgcgattgtggttgaagccgctgatg

SEQ ID NO: 678666 - DNA, 75 bp, synthetic construct
  source 1..75: mol_type = other DNA
gttacgcccaatttttaaagccgaccttcgatataaagcctgacttagagattacgttactcaacgatttcaagt

SEQ ID NO: 678667 - DNA, 75 bp, synthetic construct
  source 1..75: mol_type = other DNA
ccgccaacgctcaaaaaacagaatcagacaaaaacgcagcggcatcatcaaaaacagcagcagcaaactcagcaa

SEQ ID NO: 678668 - DNA, 75 bp, synthetic construct
  source 1..75: mol_type = other DNA
gtgtgcataccgacacggaagataacccgttcagcggtgggttgttcagccagtttggtctgtcagacacactgt

SEQ ID NO: 678669 - DNA, 75 bp, synthetic construct
  source 1..75: mol_type = other DNA
aatggtctttacaaagcggaggtaatacaccgtaatagctggaaaaccggacagaagtggaactggccacactaa

SEQ ID NO: 678670 - DNA, 75 bp, synthetic construct
  source 1..75: mol_type = other DNA
tacaattacttcccgtatgatgactattcagttatttatcgtatgggtcaatgtcagattggggctaaaaatatc

SEQ ID NO: 678671 - DNA, 75 bp, synthetic construct
  source 1..75: mol_type = other DNA
gtttaatgagcatcagcagcttgtacggcgatgatatggtccgtatcgctcactgggtggcaaaacagtcgcata

SEQ ID NO: 678672 - DNA, 75 bp, synthetic construct
  source 1..75: mol_type = other DNA
tctcaccccagtcatcacccaggaagtcggcgaggcgatgactatcatcggcctggtttccgcgggtcttggcgt

SEQ ID NO: 678673 - DNA, 75 bp, synthetic construct
  source 1..75: mol_type = other DNA
aggcaatgcctccggggtgaatgacggagccgctgcgttgattattgccagtgaacagatggcagcagcgcaagg

SEQ ID NO: 678674 - DNA, 75 bp, synthetic construct
  source 1..75: mol_type = other DNA
gtataaaaaataatctcaaaatactgttttttcttttagatacaatgtgttattgcattttttataatctaccag

SEQ ID NO: 678675 - DNA, 75 bp, synthetic construct
  source 1..75: mol_type = other DNA
catccgtcgttgacaatacagggttacaactgttatgacggtggtgaacatacggacagtgacccgcaggccgaa

SEQ ID NO: 678676 - DNA, 75 bp, synthetic construct
  source 1..75: mol_type = other DNA
ttataaaacctggctgtttacttcaagacatcgggcgttgttatatttatatcagagcggaaaatacactggaga

SEQ ID NO: 678677 - DNA, 75 bp, synthetic construct
  source 1..75: mol_type = other DNA
ctttgccaacgtcacgttgaacgggacgaacacagtgaaatcagaagcttgtactgtgaccacgccctctgttga

SEQ ID NO: 678678 - DNA, 75 bp, synthetic construct
  source 1..75: mol_type = other DNA
ggtggtgcgggcgatgtatgccgcgacgattgaatccacactggattcggaaaaagcgtttgaatatatcgccgg

SEQ ID NO: 678679 - DNA, 75 bp, synthetic construct
  source 1..75: mol_type = other DNA
tcggggccgcttaaagcctgtccggttctctcactgctcggaatgacggtcatggatgaactttgttcccgtcac

SEQ ID NO: 678680 - DNA, 75 bp, synthetic construct
  source 1..75: mol_type = other DNA
gatgtgttagctggtgtggtaatcacccgccgtgaattgatgagcatcattcgtgatttctcgcatcagctatta

SEQ ID NO: 678681 - DNA, 75 bp, synthetic construct
  source 1..75: mol_type = other DNA
ggattaattcgtctctcgcttgggcaggaaaatgccgctcttttaattgccgatctggagcgtgcttttgactcg

SEQ ID NO: 678682 - DNA, 75 bp, synthetic construct
  source 1..75: mol_type = other DNA
tggcatccttgaaaagcttgcagctaatacagggttagtttctatcgagaaagagaaaggctatacggaactggt

SEQ ID NO: 678683 - DNA, 75 bp, synthetic construct
  source 1..75: mol_type = other DNA
aagaaaataagccttcatatgaatgtatgaatactgctgaaacttgtttggggctggctggaatggcttcggaag

SEQ ID NO: 678684 - DNA, 75 bp, synthetic construct
  source 1..75: mol_type = other DNA
tctctgtatacattgatgctaacaaggatacttcctggtatcaatttatgagaaaaacacatcgaaatagcaatt

SEQ ID NO: 678685 - DNA, 75 bp, synthetic construct
  source 1..75: mol_type = other DNA
agttttataaccggaaaaataatagcttatggaaatagcgaattttcaaccaaagtgggtttttcttttattcaa

SEQ ID NO: 678686 - DNA, 75 bp, synthetic construct
  source 1..75: mol_type = other DNA
tggggactcagtgtcgatgattatcagcgttatcagcagttgatgaaggggccccggggtatccagtcgccgggg

SEQ ID NO: 678687 - DNA, 75 bp, synthetic construct
  source 1..75: mol_type = other DNA
taacgctggcggaactggcaaaagaaccgtttgttttttttgatccgcacgtagggacggggctgtatgacgaca

SEQ ID NO: 678688 - DNA, 75 bp, synthetic construct
  source 1..75: mol_type = other DNA
gttcattctcccggactcacagacactgcagttgctctattccatgagtctctccgacaaaccggttattgagaa

SEQ ID NO: 678689 - DNA, 75 bp, synthetic construct
  source 1..75: mol_type = other DNA
tctgctggtcctggaactggcccgtgaggagtttgattacctttccgctgaagagattgcagaagaaatacgccg

SEQ ID NO: 678690 - DNA, 75 bp, synthetic construct
  source 1..75: mol_type = other DNA
actgaagtgatagcagtttattatgcgtgtaaaggcgattgtgataaatatttcgatgattattattggagtaaa

SEQ ID NO: 678691 - DNA, 75 bp, synthetic construct
  source 1..75: mol_type = other DNA
ttatttttaatgaatacttgcctataaagtgtgaccattgtggaaaggacttaatagaaaaccatcatgaagaaa

SEQ ID NO: 678692 - DNA, 75 bp, synthetic construct
  source 1..75: mol_type = other DNA
atgattataataacatcattcatggttctgttgtttttatttacagataatttaaaattaaaaaacttcagaata

SEQ ID NO: 678693 - DNA, 75 bp, synthetic construct
  source 1..75: mol_type = other DNA
atgtttttatcgaaatactttattgacttccttcttatgttgcataatgccattaaacgtaagaaaattttcatt

SEQ ID NO: 678694 - DNA, 75 bp, synthetic construct
  source 1..75: mol_type = other DNA
tatcatcggaagaatacggcgaaggaagttttacaaaaggtatttatgtcaccattccatttgatctcatgctac

SEQ ID NO: 678695 - DNA, 75 bp, synthetic construct
  source 1..75: mol_type = other DNA
cgttgcgtaatgggcgagtctggcaactggcgattatctacctgaccattcaggtggcggtttacggattaattt

SEQ ID NO: 678696 - DNA, 75 bp, synthetic construct
  source 1..75: mol_type = other DNA
atgagcaccgctttgcttgacgccgtggtgaagaaaaaccgtgcgcgtttaattccgtttatgttggcgctgtat

SEQ ID NO: 678697 - DNA, 75 bp, synthetic construct
  source 1..75: mol_type = other DNA
gactgagcgatgcgctgcgtaatgggcgagtctggcaactggcgattatctacctgaccattcaggtggcggttt

SEQ ID NO: 678698 - DNA, 75 bp, synthetic construct
  source 1..75: mol_type = other DNA
tggcttgctgagcaggggctggtgcgtaagcgcacgcttgttaacggttatttcatcgctgaactgaccggccgg

SEQ ID NO: 678699 - DNA, 75 bp, synthetic construct
  source 1..75: mol_type = other DNA
atgatttatctcacttcgcaatggtttccgcagcgtaatcgcgccagcattatggggctgttctatatgggcgca

SEQ ID NO: 678700 - DNA, 75 bp, synthetic construct
  source 1..75: mol_type = other DNA
ctcgttgaagcaggaacccaccgaaatgattcaggcgacagcctgaacgtagcagggatccacgttcttcagggc

SEQ ID NO: 678701 - DNA, 75 bp, synthetic construct
  source 1..75: mol_type = other DNA
tacaattacgaagttattcattgcatcaggattattttcgacattttggtggaagatgtaaaatcagagattgct

SEQ ID NO: 678702 - DNA, 75 bp, synthetic construct
  source 1..75: mol_type = other DNA
cctgggcttccgctgacaacttcatgaatggtcgtaccaacggtgttgcaacctaccgtaactatgatttctttg

SEQ ID NO: 678703 - DNA, 75 bp, synthetic construct
  source 1..75: mol_type = other DNA
aaacacaacattgataattacaagtttgattccttctgatgtttcgatagaggatctttaccgggttgtttcatt

SEQ ID NO: 678704 - DNA, 75 bp, synthetic construct
  source 1..75: mol_type = other DNA
gctggagatgcatggatttatggggcatcccggctggttctggatgtttgtgattgaaggattgctggcagtcgg

SEQ ID NO: 678705 - DNA, 75 bp, synthetic construct
  source 1..75: mol_type = other DNA
ggttctggatgtttgtgattgaaggattgctggcagtcggcgctggggtattcacattcttttggcttgatgaca

SEQ ID NO: 678706 - DNA, 75 bp, synthetic construct
  source 1..75: mol_type = other DNA
ggagcgtaaccatgttcgcgccgcttacatccatcttgctgaacatctcgatgagcgtaggctaatgctacagtg

SEQ ID NO: 678707 - DNA, 75 bp, synthetic construct
  source 1..75: mol_type = other DNA
aagaacttagtggaaaattagcttcactcaatggtgagtgggatgattcacaaccgaataaaaaagttttaagac

SEQ ID NO: 678708 - DNA, 75 bp, synthetic construct
  source 1..75: mol_type = other DNA
ggaagtgcgtttattgaggcggggctaaagcgctgcctggacatgtatatcaagcgatgggggagcaagcgcaat

SEQ ID NO: 678709 - DNA, 75 bp, synthetic construct
  source 1..75: mol_type = other DNA
atcccacattaacgcgagtaaaatacttaccaacaggggagaaaaaagcacaaattcatcctgaacaatatcgcc

SEQ ID NO: 678710 - DNA, 75 bp, synthetic construct
  source 1..75: mol_type = other DNA
attatgctgatttcctaaaaagctatgactggaccgctattatggctatgccttatatggaaggtgtcgcagaaa

SEQ ID NO: 678711 - DNA, 75 bp, synthetic construct
  source 1..75: mol_type = other DNA
cgctgatggcgtcgcgttcagcatcgagcaggatgcggcgaacaatatcctgctggcaaatggcggcgtgttaac

SEQ ID NO: 678712 - DNA, 75 bp, synthetic construct
  source 1..75: mol_type = other DNA
gccagtcagtatcgagtcaggggcgtgttgacggtacgacgataaatatgtccgggcatcaggagattacgcaag

SEQ ID NO: 678713 - DNA, 75 bp, synthetic construct
  source 1..75: mol_type = other DNA
tgttgatggtacaacgataaataagtccggttatcaggacatcacgcaaggaagtctggcgacgaacacaaccat

SEQ ID NO: 678714 - DNA, 75 bp, synthetic construct
  source 1..75: mol_type = other DNA
gaaaaaagaagcgctgtttcgccctaagccttctcctgagttagtgcaggaattgcaaatgctggatgaaggcaa

SEQ ID NO: 678715 - DNA, 75 bp, synthetic construct
  source 1..75: mol_type = other DNA
tttacaacggttattgacacgtttcaacgatcctgaggggtggagtaatctggcgaaaaatcagtatctgagtac

SEQ ID NO: 678716 - DNA, 75 bp, synthetic construct
  source 1..75: mol_type = other DNA
attacagcaaaatacgccacgtaacgatagttgggcgaaactatttctgagtcaggaaaacagtacccgtgcgca

SEQ ID NO: 678717 - DNA, 75 bp, synthetic construct
  source 1..75: mol_type = other DNA
atgttatatgaagatcttgccggacatgctgcttttgatggcctattgttccacgatgatgctttgctttcagat

SEQ ID NO: 678718 - DNA, 75 bp, synthetic construct
  source 1..75: mol_type = other DNA
gtgctaatggacagctcacctatctccaggcgatgctgttggcaaaagattcatcaaatgatgttcgctcgagtt

SEQ ID NO: 678719 - DNA, 75 bp, synthetic construct
  source 1..75: mol_type = other DNA
atgcagttggcgaacgattcatcaaacaatgttgtcacaagcttaacgttcaagctggcagagatgaaacaccat

SEQ ID NO: 678720 - DNA, 75 bp, synthetic construct
  source 1..75: mol_type = other DNA
cccaagcagcattcagaaaatctcaccttaaaacatcaggccagtaataaatggctaaagcccatggttcgcgta

SEQ ID NO: 678721 - DNA, 75 bp, synthetic construct
  source 1..75: mol_type = other DNA
tgctgttcgttgatatcacggttaaatctttcgacggtgatggtatctatgcgtttctgtacgacgacacagccc

SEQ ID NO: 678722 - DNA, 75 bp, synthetic construct
  source 1..75: mol_type = other DNA
tctgttgaggtaaagcagagggaatatgggagaacagctgtgcataaatgtacttttgtttttagccctcaggta

SEQ ID NO: 678723 - DNA, 75 bp, synthetic construct
  source 1..75: mol_type = other DNA
gcgttgaaaaccatggcggatcactccgcatatggtttcactataatggcaaacgtgtcagagaaaacctcggtg

SEQ ID NO: 678724 - DNA, 75 bp, synthetic construct
  source 1..75: mol_type = other DNA
atgaaaaatcgaataaattttggtggatagattacgaaggggatagtttagctgtcaactatggcaaggtaggta

SEQ ID NO: 678725 - DNA, 75 bp, synthetic construct
  source 1..75: mol_type = other DNA
cttctcagccaccttccggcttggtaattggattattaagacttgtaagttatgcattggtaattattattgagg

SEQ ID NO: 678726 - DNA, 75 bp, synthetic construct
  source 1..75: mol_type = other DNA
tgggacactcggatgctcagatggtttatcgcgtttacggatcgtggatggcagaaaacaatcaggatcaggtat

SEQ ID NO: 678727 - DNA, 75 bp, synthetic construct
  source 1..75: mol_type = other DNA
atgaagaaaaaaatcatattagtggtttttttgttgcttattctcgttgcttgtcttattggcggtaattatctt

SEQ ID NO: 678728 - DNA, 75 bp, synthetic construct
  source 1..75: mol_type = other DNA
aaagaaaggtgaaatgttatctgatatttgtatttatgctacagcatgcggacatgcaggaattggtggtgggat

SEQ ID NO: 678729 - DNA, 75 bp, synthetic construct
  source 1..75: mol_type = other DNA
tcagactcagtcattgcagtatgaagcgcaggaatggggactgagtgcggaggagtatgcccgttttgaggcgct

SEQ ID NO: 678730 - DNA, 75 bp, synthetic construct
  source 1..75: mol_type = other DNA
gagctgttgattcgccagtatgaatttattcagtcttttttaggtagcgaagcagattttctgtaccaggaataa

SEQ ID NO: 678731 - DNA, 75 bp, synthetic construct
  source 1..75: mol_type = other DNA
tctgcatgattcgccgcgccagtgaagagttgctggcggtaaacgacgagataacgcagcactatgagcagttgc

SEQ ID NO: 678732 - DNA, 75 bp, synthetic construct
  source 1..75: mol_type = other DNA
gcaaaaatatattcagatgatattagtatgttttctgatgttatgactaaaccagatcttgagacacacgatctg

SEQ ID NO: 678733 - DNA, 75 bp, synthetic construct
  source 1..75: mol_type = other DNA
cgtcgatcaacgctggcatgctctacttttttatcgcacgccggatcggtgctgattatgatcgccttcttgctg

SEQ ID NO: 678734 - DNA, 75 bp, synthetic construct
  source 1..75: mol_type = other DNA
atcatggcagaatcatttgcaacaggttccgatcatcaggttgtaaacgagctcaacggggaaagactgagagag

SEQ ID NO: 678735 - DNA, 75 bp, synthetic construct
  source 1..75: mol_type = other DNA
atttgcaactggttccgatcatcaggttgtaggtaatgactccaacttattgatagtgttttatgttcagataat

SEQ ID NO: 678736 - DNA, 75 bp, synthetic construct
  source 1..75: mol_type = other DNA
aaatcacctacgaacgatgaaaacaaaaaagtcggccaaaccatcatcaatgaaaatgtagtagagaatactcat

SEQ ID NO: 678737 - DNA, 75 bp, synthetic construct
  source 1..75: mol_type = other DNA
atacatggtcccaccaaggatctattgcacagtctgcctcgacttatagcattataaagaatgcattagagagcg

SEQ ID NO: 678738 - DNA, 75 bp, synthetic construct
  source 1..75: mol_type = other DNA
ttacttgctttgggaggggacacatacctcatgggagaaagccgatgcggaagcgtttatcgacgctgcaataaa

SEQ ID NO: 678739 - DNA, 75 bp, synthetic construct
  source 1..75: mol_type = other DNA
tatctcattctgaatatcatattgagaataatactccccacatcatcatctctgatgacaatgagttccgattca

SEQ ID NO: 678740 - DNA, 75 bp, synthetic construct
  source 1..75: mol_type = other DNA
gattccggtgctgctcaacgacgacggcagtatcttcaatgaggggctggcggataagctcgccaccgagagaaa

SEQ ID NO: 678741 - DNA, 75 bp, synthetic construct
  source 1..75: mol_type = other DNA
caggttaacgccggaaagttcatctatgacatgtcggcgcaggaactggcggatttgctggaagcagtgcagggc

SEQ ID NO: 678742 - DNA, 75 bp, synthetic construct
  source 1..75: mol_type = other DNA
atctcggcatcaagcgcgcactgaaagcactgttcgaccagcgcctgaccggacgagagcgagaggtaaacagcc

SEQ ID NO: 678743 - DNA, 75 bp, synthetic construct
  source 1..75: mol_type = other DNA
atgaaacggttaattatcagaattgtcatattcttttttttgtctggttaccagaatatttcccattctgctcat

SEQ ID NO: 678744 - DNA, 75 bp, synthetic construct
  source 1..75: mol_type = other DNA
ggggctgaataccggtcttctgtggctgtcagcgctcaagccaacgacgcgcagctggcacgccagccgtcatgg

SEQ ID NO: 678745 - DNA, 75 bp, synthetic construct
  source 1..75: mol_type = other DNA
gtagcagaggcgcagcgcggcacgctggaggcattcaataacctctcgcagcagtcgcaggtgtacgccagtcag

SEQ ID NO: 678746 - DNA, 75 bp, synthetic construct
  source 1..75: mol_type = other DNA
gcaaactatggcaatcgctgggtgtttgaaaatgaaaagtcgcagcgcgttttaactgtatcgtctatcgcttta

SEQ ID NO: 678747 - DNA, 75 bp, synthetic construct
  source 1..75: mol_type = other DNA
taatttcaacaagtggcgcgccatctacagatgacatacaaatcatcgcttatccagacacaaacagtttgttgg

SEQ ID NO: 678748 - DNA, 75 bp, synthetic construct
  source 1..75: mol_type = other DNA
gttatgaaataaagggaggaagtaatggaactttttatgtttcaggtcctcctgtttatgttgaactggtgatca

SEQ ID NO: 678749 - DNA, 75 bp, synthetic construct
  source 1..75: mol_type = other DNA
cgctattagatgtttataagcgtcaaaccgatatgctacagcttaaagcctatttggaaactaacgccgctacat

SEQ ID NO: 678750 - DNA, 75 bp, synthetic construct
  source 1..75: mol_type = other DNA
ctgtaattacagcagatgtaagccttttaaatagtgattatgttgattcacttactattggttatgagaaattag

SEQ ID NO: 678751 - DNA, 75 bp, synthetic construct
  source 1..75: mol_type = other DNA
accagcaaattaattcaattggtgattcagtaaataatgcgtggagtaataaattatactcttattcaatgtctt

SEQ ID NO: 678752 - DNA, 75 bp, synthetic construct
  source 1..75: mol_type = other DNA
aattcaaatggcaatggatttgacgctaacatcaagcctattcttgatgataatgttcatttagaaggcattgat

SEQ ID NO: 678753 - DNA, 75 bp, synthetic construct
  source 1..75: mol_type = other DNA
aaacacacaacagccatttctgcgtcgggttctgtctggtaaggaaaaatttaaaactaccccactcaaaagata

SEQ ID NO: 678754 - DNA, 75 bp, synthetic construct
  source 1..75: mol_type = other DNA
aatgtgccaagtgctccaggaagaccgcagagactggtataagtggtgtcagcggcggacaaggataagaacaag

SEQ ID NO: 678755 - DNA, 75 bp, synthetic construct
  source 1..75: mol_type = other DNA
atgctttggatttgagccgtgaaattgcacgcatgattgactgcgaattgcttcaagaacatttaaaaggaatta

SEQ ID NO: 678756 - DNA, 75 bp, synthetic construct
  source 1..75: mol_type = other DNA
gaaaatttatggggcggacggtaaaacaggtttttctattggctctatgctcaaggagaatgtacccatcaacct

SEQ ID NO: 678757 - DNA, 75 bp, synthetic construct
  source 1..75: mol_type = other DNA
tttatagatattgtctgtcttgttgaaggtgaatttttggatgagaaaaggctagagactgatgccgagaaggtc

SEQ ID NO: 678758 - DNA, 75 bp, synthetic construct
  source 1..75: mol_type = other DNA
atacgattagctcactgattactgacagcgtaaaaactcagagcgttattgctaaagaggcaggcgtgtcagagg

SEQ ID NO: 678759 - DNA, 75 bp, synthetic construct
  source 1..75: mol_type = other DNA
gagctggatacctattcctcccgcgtcgctattcgggccaataaggtggcgacacaagggaaagatgcgctgtaa

SEQ ID NO: 678760 - DNA, 75 bp, synthetic construct
  source 1..75: mol_type = other DNA
gtggtgacaacaaccagcgctgcgcctgttggtatccgcagcaatccgcgcttaccggtgtggcgcatcatcaca

SEQ ID NO: 678761 - DNA, 75 bp, synthetic construct
  source 1..75: mol_type = other DNA
acggcagacgttatccatcatccccggcatccgtataccattggtttgctgcaatgcgcaccagaacatggagta

SEQ ID NO: 678762 - DNA, 75 bp, synthetic construct
  source 1..75: mol_type = other DNA
gtgctgagcttgggatcgcgaaggcagtagcacgtttagccggaaatgagaaaaaacaaatcggtgtattaagaa

SEQ ID NO: 678763 - DNA, 75 bp, synthetic construct
  source 1..75: mol_type = other DNA
ctcccggtaaatgggtatccgaagaacagctaattgcgctgaaaggaataaaaaagggaacgctaaaaaaagcca

SEQ ID NO: 678764 - DNA, 75 bp, synthetic construct
  source 1..75: mol_type = other DNA
ttttatgcgccagaccgttgaacggcagcataatacctggttccgtgacctggttgaggcagggacgtcagcaac

SEQ ID NO: 678765 - DNA, 75 bp, synthetic construct
  source 1..75: mol_type = other DNA
tggaaaaaggtactaaaaccaaatatggctgattgtgaaataaataaagttcctattatcagatatttacaggaa

SEQ ID NO: 678766 - DNA, 75 bp, synthetic construct
  source 1..75: mol_type = other DNA
aaaggaagaaaagactatatggtgctatttgaagaacctgagttatttctttatccaagaatagttaaagagttg

SEQ ID NO: 678767 - DNA, 75 bp, synthetic construct
  source 1..75: mol_type = other DNA
cgtagggctctgattgaataccattttgggagacgagggagttcttctcctctgctgattgttgggaagtatcgt

SEQ ID NO: 678768 - DNA, 75 bp, synthetic construct
  source 1..75: mol_type = other DNA
ggcagcctgagttcacagataaaacactctccaggaaaaccggggcggttcaacaactgcatttgagtttccccg

SEQ ID NO: 678769 - DNA, 75 bp, synthetic construct
  source 1..75: mol_type = other DNA
cttctaagtatgggtattatgagaaagttggcggtggtttttatagatatatagaatctttaaccccatatcttc

SEQ ID NO: 678770 - DNA, 75 bp, synthetic construct
  source 1..75: mol_type = other DNA
ataatgagatgaaaaaaagcattaaaatatctgaattagttatccataatattataaagaaaggattgactaatt

SEQ ID NO: 678771 - DNA, 75 bp, synthetic construct
  source 1..75: mol_type = other DNA
gattatcggtggcaatgccaccggtatcggaaccctgaatgtgcaggatcaagactctgtcattacggtacgcag

SEQ ID NO: 678772 - DNA, 75 bp, synthetic construct
  source 1..75: mol_type = other DNA
ggggttggcaattatgtggtgaagcctgttgcaaatacagcaggcaagtggataaccggtggctggaatcctaaa

SEQ ID NO: 678773 - DNA, 75 bp, synthetic construct
  source 1..75: mol_type = other DNA
tgttctaaaagtggtcaaatatgacgaatatcagtcaaatttttgtccagccgatgtccagccagtgtccagccc

SEQ ID NO: 678774 - DNA, 75 bp, synthetic construct
  source 1..75: mol_type = other DNA
caggcggcgaaatctgccggaaacagccggcttgaagccctgcagggggtgaaggccgcgctctcgggggctcag

SEQ ID NO: 678775 - DNA, 75 bp, synthetic construct
  source 1..75: mol_type = other DNA
cacccagcaattaaaatgcagctggatactggtgccatcataattaacaaagaaaatattaatgatatccttcag

SEQ ID NO: 678776 - DNA, 75 bp, synthetic construct
  source 1..75: mol_type = other DNA
ggtatcagctatgccgatcgggatgccgacaaactcgcgcagcaaaaaacgcttgcccgggaacacgcttcaagg

SEQ ID NO: 678777 - DNA, 75 bp, synthetic construct
  source 1..75: mol_type = other DNA
gcgcaatcttaattgttgttggtcttcttgctgcagttccaagtggtggttcaagtattgcgggtgcattggcac

SEQ ID NO: 678778 - DNA, 75 bp, synthetic construct
  source 1..75: mol_type = other DNA
cgatcccaacaattacgtccagaggacgtgttactgcgctcaccggaacaacgcaaggcgatgcagctgggttgc

SEQ ID NO: 678779 - DNA, 75 bp, synthetic construct
  source 1..75: mol_type = other DNA
aatcagaatacatccggtaacgcggctacagcgaccaagttacaaaccgcgagaactataaatggggtgtcgttt

SEQ ID NO: 678780 - DNA, 75 bp, synthetic construct
  source 1..75: mol_type = other DNA
cagccacttgatgcaactttaacagcgctcgctggccttacgactggcgcaaataaattgccgtactttaccggt

SEQ ID NO: 678781 - DNA, 75 bp, synthetic construct
  source 1..75: mol_type = other DNA
cacgcgcagaagaacatgaacaccgaggtgctgaataaccgcaccactgatgtgataaacaaccatgccgaaaaa

SEQ ID NO: 678782 - DNA, 75 bp, synthetic construct
  source 1..75: mol_type = other DNA
ggatgccagcctggtaatcaccggtgaaggtcgtcttgatagccagagcatcagtggtaaaacaccgattggtgt

SEQ ID NO: 678783 - DNA, 75 bp, synthetic construct
  source 1..75: mol_type = other DNA
ggctggtattcaggtcgacaatcccttatgaaaaggtctggatccaccatgacagttttctgccttttggtcttc

SEQ ID NO: 678784 - DNA, 75 bp, synthetic construct
  source 1..75: mol_type = other DNA
tactattgaaatgctggcaaccagaaatgagccgcatttagtttctattcgtcgcgcgcttcaggtcgtgacttc

SEQ ID NO: 678785 - DNA, 75 bp, synthetic construct
  source 1..75: mol_type = other DNA
atcagactttggcctgatgaatcccctaatgattttggtaaaaatcattaagttaaggtggatacacatcttgtc

SEQ ID NO: 678786 - DNA, 75 bp, synthetic construct
  source 1..75: mol_type = other DNA
aggggattcatcagtgctaagcatgaaatttacaacgtgatttatgcgctggcggcgcagggtgtggcggtgctg

SEQ ID NO: 678787 - DNA, 75 bp, synthetic construct
  source 1..75: mol_type = other DNA
tcgttccctcggctccgtaaacctgcccacgaccgtggttgagtggtgggaagacacgccgcgcgctgaacctta

SEQ ID NO: 678788 - DNA, 75 bp, synthetic construct
  source 1..75: mol_type = other DNA
gaaactcagtagattgacgctgggtgttttgctggcactaagcggttcagcgtctggtgcaagtctggaagttga

SEQ ID NO: 678789 - DNA, 75 bp, synthetic construct
  source 1..75: mol_type = other DNA
tcacgcaccgcacggtgaacggcgaaccggcagagcagtggcagtatgatggccacggctggctgacagacatca

SEQ ID NO: 678790 - DNA, 75 bp, synthetic construct
  source 1..75: mol_type = other DNA
atgggagtacccatagggaggtatatacaactcagaagagtttcaagggctgcggtattattacgattgacatca

SEQ ID NO: 678791 - DNA, 75 bp, synthetic construct
  source 1..75: mol_type = other DNA
atgcaactcaccaatgaagaacaagcacagattgcacgtataaaagaaaagattccacgcattgccgcactggat

SEQ ID NO: 678792 - DNA, 75 bp, synthetic construct
  source 1..75: mol_type = other DNA
aatcagttaaataatgacaaagggtttgattatttacttgaattgcttagtcaatgtggctcaagagaggacgga

SEQ ID NO: 678793 - DNA, 75 bp, synthetic construct
  source 1..75: mol_type = other DNA
gagatgggagcctctgtctctgattattttaaaaagatgcaaccccgcagagatacctggatttggataatagat

SEQ ID NO: 678794 - DNA, 75 bp, synthetic construct
  source 1..75: mol_type = other DNA
ggatacctgtccgttgcatctgttgccgtggctggcctgggagtttgctgtggatttctggcaggatgactggag

SEQ ID NO: 678795 - DNA, 75 bp, synthetic construct
  source 1..75: mol_type = other DNA
tatattcattcactgttaataatgatgcctgagcttgacgatgaaactctatcctcagctgtctttgctatacaa

SEQ ID NO: 678796 - DNA, 75 bp, synthetic construct
  source 1..75: mol_type = other DNA
tatattcattcactgttaataataatgcctgaacttgacgatgacactctatcctcagctgtctttgctatacga

SEQ ID NO: 678797 - DNA, 75 bp, synthetic construct
  source 1..75: mol_type = other DNA
aacttaataacgagttctacattaaattttttgtaaacattactggcaatgtagtgcttacagtatctcttcatc

SEQ ID NO: 678798 - DNA, 75 bp, synthetic construct
  source 1..75: mol_type = other DNA
ttatgtttatttatatagttagttttatagataaaattgaaattataaatataaataatgaattagcagaagcat

SEQ ID NO: 678799 - DNA, 75 bp, synthetic construct
  source 1..75: mol_type = other DNA
ctatctggcagaggccgggatgacaggaccactctctgtttttgaaggacgcttcggtctattcgcgacacatgg

SEQ ID NO: 678800 - DNA, 75 bp, synthetic construct
  source 1..75: mol_type = other DNA
cacgtactggaaagccgagggcaaagcattccatcacgaccagtggcagcagaaactggcgcgcagtgttcaact

SEQ ID NO: 678801 - DNA, 75 bp, synthetic construct
  source 1..75: mol_type = other DNA
agcccataacgggcagtctgccaagcgtcgagcacaggacgcagacaggaagagaaatgtccgcaaagcgtccgc

SEQ ID NO: 678802 - DNA, 75 bp, synthetic construct
  source 1..75: mol_type = other DNA
gtgccgacctgcacacgcaccctaaagttgtccgcatggcgtccgcattgaaagcggacagattgcggatagttg

SEQ ID NO: 678803 - DNA, 75 bp, synthetic construct
  source 1..75: mol_type = other DNA
gaccggcacattagcgggcacgcatatgatcacggctcgtctggctaacagcaatgtcagcgatacacagccaat

SEQ ID NO: 678804 - DNA, 75 bp, synthetic construct
  source 1..75: mol_type = other DNA
tattgtgcccgataccagcaacgcgcaggtcacgctgaatatcccggctcaacaggtggtgaccaataacagcga

SEQ ID NO: 678805 - DNA, 75 bp, synthetic construct
  source 1..75: mol_type = other DNA
ccgtttatcccgactgattcctgatgtgtatattaaaggttatatggatgaggtgttaagtgaaatgtctcctga

SEQ ID NO: 678806 - DNA, 75 bp, synthetic construct
  source 1..75: mol_type = other DNA
gcttgcgcgcatgcactaggtctggcaggcagtcaagcatcagggattgctgaatatttgacgaatagctcttca

SEQ ID NO: 678807 - DNA, 75 bp, synthetic construct
  source 1..75: mol_type = other DNA
agcagggcggtcagacctggtatgtcgtctttaatggtgcggtatataaaaatgcttggtgggtagcctcttcta

SEQ ID NO: 678808 - DNA, 75 bp, synthetic construct
  source 1..75: mol_type = other DNA
aattgtttattctggaatcctgctttcgtaacccatcaattacatggcctgcccgttttgaagcgcaaggggcca

SEQ ID NO: 678809 - DNA, 75 bp, synthetic construct
  source 1..75: mol_type = other DNA
acgagattatcaatctctcgttaccgccgtcatccacccgtgttttctgcgctgaatggccctccagtacatcca

SEQ ID NO: 678810 - DNA, 75 bp, synthetic construct
  source 1..75: mol_type = other DNA
atatcatcacccgcgctctggtagcgctggaccagcgcccggattatgcccgtattgcccgtcacgttatcaaca

SEQ ID NO: 678811 - DNA, 75 bp, synthetic construct
  source 1..75: mol_type = other DNA
attaaattctggagatataaaaatatcaggagtcagagcgttggccatggctaattatcagggtaaaggatggtt

SEQ ID NO: 678812 - DNA, 75 bp, synthetic construct
  source 1..75: mol_type = other DNA
tataactattgatgattatgaaactatccttgttggtaaaagctcagttgatttaagcaacccttctgtttataa

SEQ ID NO: 678813 - DNA, 75 bp, synthetic construct
  source 1..75: mol_type = other DNA
cagtctgttgttacgctacatacttcacagaatattaaagatccgtccgaggtgggtggatatattttattcacc

SEQ ID NO: 678814 - DNA, 75 bp, synthetic construct
  source 1..75: mol_type = other DNA
cgactccgagcgggggacgtgctggtggtgtggaagctagacaggctgggccgcagcgtgcgcgatctgattacg

SEQ ID NO: 678815 - DNA, 75 bp, synthetic construct
  source 1..75: mol_type = other DNA
aatatacaacaaagtttgaattattcaatttatagcagcacaaccaaacgcaaaaaaaaaaaaaataataaccaa

SEQ ID NO: 678816 - DNA, 75 bp, synthetic construct
  source 1..75: mol_type = other DNA
gtactatatctttgcagggacagggggcgattggcgttgaggccagcaataaagggactgttaaccttgatggct

SEQ ID NO: 678817 - DNA, 75 bp, synthetic construct
  source 1..75: mol_type = other DNA
gttaactggctgcgcaaacgcggcgtgcgctattgccagggatggttttttgcgaaggcgatgccgccgcaggtg

SEQ ID NO: 678818 - DNA, 75 bp, synthetic construct
  source 1..75: mol_type = other DNA
tgcgaaggcgatgccgccgcaggtgtttatgcaatggatggagcaattacccgcgcgggagttaacgcgcgggca

SEQ ID NO: 678819 - DNA, 75 bp, synthetic construct
  source 1..75: mol_type = other DNA
tatttttaaaatattgcttctgataaatgctgtgatgctaatcatcggattttaccatgcaggaaaatcagttat

SEQ ID NO: 678820 - DNA, 75 bp, synthetic construct
  source 1..75: mol_type = other DNA
cttgccgtatcattatcttcattacatgaagttaattattatgatgttcagcagccggagttgacttatgatagt

SEQ ID NO: 678821 - DNA, 75 bp, synthetic construct
  source 1..75: mol_type = other DNA
atgagtttttatacaggtaaaacaataaaagttaggcagccatttggtgatttttatattgcatcaattcctgcc

SEQ ID NO: 678822 - DNA, 75 bp, synthetic construct
  source 1..75: mol_type = other DNA
gcgtatattaaaggttatatggacgaggtgttaagtgaaatgtcacctgaggcgataggatacggtttgggtgag

SEQ ID NO: 678823 - DNA, 75 bp, synthetic construct
  source 1..75: mol_type = other DNA
aactgctcgaatggctccacaacaataccgacaaacccctacgaatcgctgatattgcagcgaaagcaggatact

SEQ ID NO: 678824 - DNA, 75 bp, synthetic construct
  source 1..75: mol_type = other DNA
ctgtgcaaaatcgggcactggaactttattattcaggagctaaggatttccatcagggaaaatacgatagcccat

SEQ ID NO: 678825 - DNA, 75 bp, synthetic construct
  source 1..75: mol_type = other DNA
aaagttattatcccatcctgccgtattgccagtgagcaggcgattttggcattaaaacgcgatgattatcttcag

SEQ ID NO: 678826 - DNA, 75 bp, synthetic construct
  source 1..75: mol_type = other DNA
gggttgcaactgagacgctcattgtcgggggagtccagacgatttacgacggaggctcagcgtcggagattacaa

SEQ ID NO: 678827 - DNA, 75 bp, synthetic construct
  source 1..75: mol_type = other DNA
gaagtgcgattaacaccacactggatggctatcagacagttttcaatggtggcaacgcaacaggcaccacaatta

SEQ ID NO: 678828 - DNA, 75 bp, synthetic construct
  source 1..75: mol_type = other DNA
tgctaccagcaccattattaatgccggattccaggaggtttccagtggtggcagtgctaccagcaccactattaa

SEQ ID NO: 678829 - DNA, 75 bp, synthetic construct
  source 1..75: mol_type = other DNA
ctgtactaaggaccttgtagattatacctgtccaacgcatcgcgaccgtttaattaagttgctaagtcaacacag

SEQ ID NO: 678830 - DNA, 75 bp, synthetic construct
  source 1..75: mol_type = other DNA
tgctgaaccgtgggctgattgacgggaaatatacgcgtcttcaggcgaacaccctgacgaattccggtaccgggc

SEQ ID NO: 678831 - DNA, 75 bp, synthetic construct
  source 1..75: mol_type = other DNA
aattgaagcgcaggcagctggcgttgaacaacgtctgaaagatctggttaaccaggatggcggcgaaaactgggc

SEQ ID NO: 678832 - DNA, 75 bp, synthetic construct
  source 1..75: mol_type = other DNA
gtaaagaaaaacaacgtattcgccatgcaatccccaccgctgatgatcattttttgcattaccgctggcaggctg

SEQ ID NO: 678833 - DNA, 75 bp, synthetic construct
  source 1..75: mol_type = other DNA
gtgatcctggtttaccaatatggcaagaaaatacgcctgatgaggcaacgcagacagataatgatgcagaacctc

SEQ ID NO: 678834 - DNA, 75 bp, synthetic construct
  source 1..75: mol_type = other DNA
aatcgcagagctctttattcgtcatgactgggggtatgttagcgaagcctgtactaaggaccttgtagattatac

SEQ ID NO: 678835 - DNA, 75 bp, synthetic construct
  source 1..75: mol_type = other DNA
caaaacttgagggagtaacgttaaatatcggacagttatcaggaaatggcaccttcttgatgaatactgatattg

SEQ ID NO: 678836 - DNA, 75 bp, synthetic construct
  source 1..75: mol_type = other DNA
accggattacctgcaggatgcggtggcccttaatccgctgaaaggtggcgtaagtgtccacgcagtgtccacggg

SEQ ID NO: 678837 - DNA, 75 bp, synthetic construct
  source 1..75: mol_type = other DNA
ggcacgcaaagattcagacaacaatgatttatgcccatcttgcgccggattacttgcaggatgcggtgagattta

SEQ ID NO: 678838 - DNA, 75 bp, synthetic construct
  source 1..75: mol_type = other DNA
ccatttcagtatcggacatcacccttctcccggacaggcgcggcggctcagccagttgattagtcgtattgcgat

SEQ ID NO: 678839 - DNA, 75 bp, synthetic construct
  source 1..75: mol_type = other DNA
gatgctctttatagtcccggaatgctgcatgactggcttaagacggtcgtggatttacagacaatacatagcata

SEQ ID NO: 678840 - DNA, 75 bp, synthetic construct
  source 1..75: mol_type = other DNA
agcgcgggtgtatggactgacggcattggtaatacatcgggcgtcattcccggcaaaacaatcacggaacgacag

SEQ ID NO: 678841 - DNA, 75 bp, synthetic construct
  source 1..75: mol_type = other DNA
gcgggcgtgtggacgtcaggcatcggccacactgccggggtggtaccgaaacgcgatatcaccgagcgccaagcg

SEQ ID NO: 678842 - DNA, 75 bp, synthetic construct
  source 1..75: mol_type = other DNA
tggagcagatgcaaaaccagatggacccggtatacacgccggcgcgaaaaattcacctgtaccactgcgaccatc

SEQ ID NO: 678843 - DNA, 75 bp, synthetic construct
  source 1..75: mol_type = other DNA
gtgacctggtacggctgggacggcgaccgcctgaccacaatacagaacgacagaacccgcatccagacgatttat

SEQ ID NO: 678844 - DNA, 75 bp, synthetic construct
  source 1..75: mol_type = other DNA
accatcattagcggcggggagcagcgagtttccagcggtggtagtgccgtagacaccaccattgaggggggactg

SEQ ID NO: 678845 - DNA, 75 bp, synthetic construct
  source 1..75: mol_type = other DNA
aaaacacaagtttttccccttgataaaaatgacagtgttaggacacgacttacccattcacatgaagtggcaaat

SEQ ID NO: 678846 - DNA, 75 bp, synthetic construct
  source 1..75: mol_type = other DNA
atgttggaacttgaaccgaagaacacggcggtgcggtatccggagagtaacggcatagcagagagcttcgtgaaa

SEQ ID NO: 678847 - DNA, 75 bp, synthetic construct
  source 1..75: mol_type = other DNA
cccggtatacacgccggcgcgaaaaattcacctgtaccactgcgaccatcgcggcctgccgctggcccttatcag

SEQ ID NO: 678848 - DNA, 75 bp, synthetic construct
  source 1..75: mol_type = other DNA
gacggtaataaggcaatcagtgaaacagagcatgatgcggtgaaagcgatgttcagggggatactgcgaaaatga

SEQ ID NO: 678849 - DNA, 75 bp, synthetic construct
  source 1..75: mol_type = other DNA
cggttgggccatcgtttagagtacactgtcggtcggataagatgcgcaagtatcgcatccgacattattgcggca

SEQ ID NO: 678850 - DNA, 75 bp, synthetic construct
  source 1..75: mol_type = other DNA
ggaacccttgcggcgcggcgatgtatacatcgctaacgtgccttactcttttcacagcagagggtagcggtagca

SEQ ID NO: 678851 - DNA, 75 bp, synthetic construct
  source 1..75: mol_type = other DNA
gcctgctgtatgcggggcagtggcaggatgtggaatccgggctgtgctataaccggttccggtattacgagccgg

SEQ ID NO: 678852 - DNA, 75 bp, synthetic construct
  source 1..75: mol_type = other DNA
aaccacgtaccgctacaacgccgccggagaactgacagaggtcattctgccgggggatgagacgctgacgttcag

SEQ ID NO: 678853 - DNA, 75 bp, synthetic construct
  source 1..75: mol_type = other DNA
ggggagctgtgggaataccgccacgacgccagcggcagacgaacagagaaacgctgcgaccggaagaaaatccgc

SEQ ID NO: 678854 - DNA, 75 bp, synthetic construct
  source 1..75: mol_type = other DNA
gccggcgcgaaaaatccacctgtaccactgcgaccatcgcggcctgccgctggcgctcatcagcacggaaggggc

SEQ ID NO: 678855 - DNA, 75 bp, synthetic construct
  source 1..75: mol_type = other DNA
cgcggtaaatatttattacaggcaattcgtgatgtgactccattacccgtaacagcgctggtttattctcattac

SEQ ID NO: 678856 - DNA, 75 bp, synthetic construct
  source 1..75: mol_type = other DNA
tcttttgcatcaggacgattttttataaggaaagaggaagttaaacttctgctgcttttaatgctttttacagga

SEQ ID NO: 678857 - DNA, 75 bp, synthetic construct
  source 1..75: mol_type = other DNA
acatctaagggccatagggcaaaaaacattactcttacaaagaataatattgcatcagataatcgtctggatttt

SEQ ID NO: 678858 - DNA, 75 bp, synthetic construct
  source 1..75: mol_type = other DNA
caacagccggatacagggacaacatactgagctggatgcaaccagtggaaatctgtccacacagaatgcgcaact

SEQ ID NO: 678859 - DNA, 75 bp, synthetic construct
  source 1..75: mol_type = other DNA
cagttacagagccagcacctgaacagcctgcagtatgaccgcgattacacctggaacgacaacggcgaactcatc

SEQ ID NO: 678860 - DNA, 75 bp, synthetic construct
  source 1..75: mol_type = other DNA
tatgtggatggagcggttagggatactggcgggaacacatgaaaacgtaaccgcactaccagcagccagaagaaa

SEQ ID NO: 678861 - DNA, 75 bp, synthetic construct
  source 1..75: mol_type = other DNA
cggcggcaactcaggcgtacgcgaaggtagctgggatctgggggtagaatggttcccgatgctcgagaatcctgt

SEQ ID NO: 678862 - DNA, 75 bp, synthetic construct
  source 1..75: mol_type = other DNA
tgaggcggtggatgtattccgtctgcacaaacattctgtgtcggcagaacctcgcggagcgggtgaaccagttag

SEQ ID NO: 678863 - DNA, 75 bp, synthetic construct
  source 1..75: mol_type = other DNA
aacaaagccgttaagatacgtagcaccagagccaaccaactggcggaactggcccatcagcgcacccgcctgggt

SEQ ID NO: 678864 - DNA, 75 bp, synthetic construct
  source 1..75: mol_type = other DNA
atacatatattatctgcaagaactttggatggaaccatacctggtttatatcaggcccttcaaaatggacatgct

SEQ ID NO: 678865 - DNA, 75 bp, synthetic construct
  source 1..75: mol_type = other DNA
aaatgaccagcgaactggcaaaacgtcttggcgttgagcaacagtttactgaaggccgtacacaggaagagtgga

SEQ ID NO: 678866 - DNA, 75 bp, synthetic construct
  source 1..75: mol_type = other DNA
tgcctgattaaccagcattctgaaatcaaccgtacccatgaaatccttcaggatgataagaagtgcgagctgatt

SEQ ID NO: 678867 - DNA, 75 bp, synthetic construct
  source 1..75: mol_type = other DNA
gttacctgacgatgttgtttcagtcgcaccggaaggtcattttgttaagtgggatggagcaaagtgggtccacga

SEQ ID NO: 678868 - DNA, 75 bp, synthetic construct
  source 1..75: mol_type = other DNA
aaccatgctgaacgatttaggcgttgatccgcatgtcgtggagcagcttacaggccaccagatgccaggaatgca

SEQ ID NO: 678869 - DNA, 75 bp, synthetic construct
  source 1..75: mol_type = other DNA
agcaacgttcttgatgatatgagtgtggcggacgttgggaaaaaaccggatataagcgagcgtgtcttaagcacc

SEQ ID NO: 678870 - DNA, 75 bp, synthetic construct
  source 1..75: mol_type = other DNA
gccggcgcacagtcaggtaagacgactgttgagaataatgcgctcagcttcggtgatggttttgaaagcaatgca

SEQ ID NO: 678871 - DNA, 75 bp, synthetic construct
  source 1..75: mol_type = other DNA
atacacaactgaacggtgccgtgattgcgtccacggcaacggcagataaaaacaggctggataccggcacactgg

SEQ ID NO: 678872 - DNA, 75 bp, synthetic construct
  source 1..75: mol_type = other DNA
tgcgttcatgtcaaccatatgtaagaaccgtatttaactctgtagtggtgttgaacataatgagaaccacccaca

SEQ ID NO: 678873 - DNA, 75 bp, synthetic construct
  source 1..75: mol_type = other DNA
cactcttcaccgaagaaaagtgataagacaggcctggcaccatggatcagcattggcgatgccctccatgatatc

SEQ ID NO: 678874 - DNA, 75 bp, synthetic construct
  source 1..75: mol_type = other DNA
agcattactttctgagtttagctgagattgtgattccaccagaagagtttgaatatcatggcgtagtattaaaaa

SEQ ID NO: 678875 - DNA, 75 bp, synthetic construct
  source 1..75: mol_type = other DNA
tatcagcactggtttcatgcgccctgatttcaggctgtaaagaagaaaataaaacgaatgtatccatcgaattta

SEQ ID NO: 678876 - DNA, 75 bp, synthetic construct
  source 1..75: mol_type = other DNA
cctgatctgacactggggcgtgcggagccacaggccggaccttttgtgagtgccccagcagatttgtttgacagg

SEQ ID NO: 678877 - DNA, 75 bp, synthetic construct
  source 1..75: mol_type = other DNA
tttcagcatggaaggattatttgacacttcgtggtgctgaaaagagtaagatatcagcagctcaggtgcatgagt

SEQ ID NO: 678878 - DNA, 75 bp, synthetic construct
  source 1..75: mol_type = other DNA
cttccaagatacatattttgagctgactgataatgactccgaagtcattagcttcaaagaactagatatcaacgg

SEQ ID NO: 678879 - DNA, 75 bp, synthetic construct
  source 1..75: mol_type = other DNA
ttccagtatataatgttgaagcttatatagaggaatgcttggaaagtttatttccacaaatagccaattctaaaa

SEQ ID NO: 678880 - DNA, 75 bp, synthetic construct
  source 1..75: mol_type = other DNA
ataaaggaagtcgataagcttggccgtcatattgacaaggtaagggttggattcattttggatagaattattggg

SEQ ID NO: 678881 - DNA, 75 bp, synthetic construct
  source 1..75: mol_type = other DNA
atttaaaaaaagaatataatggtgagaggatatatcaaattagaaagaacaaagcaggacctaatgaatttgaaa

SEQ ID NO: 678882 - DNA, 75 bp, synthetic construct
  source 1..75: mol_type = other DNA
tcaaaaacagagatggccaaggttgctaatgtcagtaagcaggcggtaaccggatggtttagaaccggtaaaatc

SEQ ID NO: 678883 - DNA, 75 bp, synthetic construct
  source 1..75: mol_type = other DNA
cggagctggctgtcagtgacaggtacggggtcagcagtaaacgtgacccaatgctgcgccggcagcgacgtgaag

SEQ ID NO: 678884 - DNA, 75 bp, synthetic construct
  source 1..75: mol_type = other DNA
cggacttcattgcagctgatgttcgcccggaaaaaatcgctgaaacagaaagtctgcagcagtatgcctgtcgtc

SEQ ID NO: 678885 - DNA, 75 bp, synthetic construct
  source 1..75: mol_type = other DNA
atgcgacacgtcattcgaaatgaatcattcgtggcgctggttgatgtcatgaaggacggctgcgaatgggttaac

SEQ ID NO: 678886 - DNA, 75 bp, synthetic construct
  source 1..75: mol_type = other DNA
tacctatcgtcatcgagggtcattcattcatctgcaacgaccagcgcatgtggaacctgaacgagattcaccgag

SEQ ID NO: 678887 - DNA, 75 bp, synthetic construct
  source 1..75: mol_type = other DNA
gacctttctctggtcagtcagcagtttctttcccttgaatttgcgcaggtgctggacaaaatggcctacctgacg

SEQ ID NO: 678888 - DNA, 75 bp, synthetic construct
  source 1..75: mol_type = other DNA
taaggacagcctgacgcaactcagtgcgggcagggatatgacgctttccacagtgaccacatccgcgcaggacaa

SEQ ID NO: 678889 - DNA, 75 bp, synthetic construct
  source 1..75: mol_type = other DNA
tctgttgagaaaggttggctgcctctatttgacttcgcttaccaggggtttgctcgtggtctggaagaggatgct

SEQ ID NO: 678890 - DNA, 75 bp, synthetic construct
  source 1..75: mol_type = other DNA
atttatctcaaagttcaaatatagagaatgtagcgggtgatgaagtcgtttcattagataaacacatcaacacca

SEQ ID NO: 678891 - DNA, 75 bp, synthetic construct
  source 1..75: mol_type = other DNA
aacagtggtcagactattgcgaacggaaaccttacgctttccgttaatggcgatgtctctaataccggcagcctg

SEQ ID NO: 678892 - DNA, 75 bp, synthetic construct
  source 1..75: mol_type = other DNA
tgtcattctttccagccgcgcctgcttgcagatgagaattgggactttgccgaaacggtaagatactttagccag

SEQ ID NO: 678893 - DNA, 75 bp, synthetic construct
  source 1..75: mol_type = other DNA
gcaatcgtgactatcaggcaaaatggttatgtgatctatcaaagcaacgtgccagcgggtgcctttgaaattaac

SEQ ID NO: 678894 - DNA, 75 bp, synthetic construct
  source 1..75: mol_type = other DNA
tttgagctatcagtttgagcccggcgcggatgctgacggtgtgaccgtacatattccgctgccgttacttaacca

SEQ ID NO: 678895 - DNA, 75 bp, synthetic construct
  source 1..75: mol_type = other DNA
ttctttttggaaacaagcaatccaatgatgagatcgtattatcaaatggaatgagggaggagtatgagatatcaa

SEQ ID NO: 678896 - DNA, 75 bp, synthetic construct
  source 1..75: mol_type = other DNA
atgagcgagaaattgaagatcgtctatcgccctttacaagaactgtctccgtatgcacacaacgccaggacacac

SEQ ID NO: 678897 - DNA, 75 bp, synthetic construct
  source 1..75: mol_type = other DNA
aaaagagggcggttacgtcaatcacccggatgataaaggcggaccgacaaaatggggtattacggaaaaagtcgc

SEQ ID NO: 678898 - DNA, 75 bp, synthetic construct
  source 1..75: mol_type = other DNA
gcgtggcgatcccgcacaccaaatctcagtggatccgtcattccagtatcagcattgcccggctggtgaaaccgg

SEQ ID NO: 678899 - DNA, 75 bp, synthetic construct
  source 1..75: mol_type = other DNA
gtgttcgattctgacgccgccaacgataaaggagtgctccctgatgcagcaaatgataagcccgccctgtcgcgg

SEQ ID NO: 678900 - DNA, 75 bp, synthetic construct
  source 1..75: mol_type = other DNA
cgaatttaaccgacaaaacgggctggtgttcgattctgacgccgccaacgataaaggagtgctccctgatgcagc

SEQ ID NO: 678901 - DNA, 75 bp, synthetic construct
  source 1..75: mol_type = other DNA
cgcaataacccagactacgccaacagaagtgcgtttctggcggaagctgcccggcgtgtattgccgggcgtttaa

SEQ ID NO: 678902 - DNA, 75 bp, synthetic construct
  source 1..75: mol_type = other DNA
cattcttcttggcgtggcgagtcacattgacaactatcagccacctgaacagagtactacggtacaacacaagta

SEQ ID NO: 678903 - DNA, 75 bp, synthetic construct
  source 1..75: mol_type = other DNA
gggctgtttttcccccgaacccggcgtgacttagtcgattccgcagtcattgtagagtgtatgttcgcaggcagg

SEQ ID NO: 678904 - DNA, 75 bp, synthetic construct
  source 1..75: mol_type = other DNA
cacctcaggaagtgaagcgccagcgtatgcgtgaaactgaatttaaccgtcaacacgggctggtgtttgattcag

SEQ ID NO: 678905 - DNA, 75 bp, synthetic construct
  source 1..75: mol_type = other DNA
gcctgaggttaatttctatggtgttaacttcttagcgagaatggtatgtaattggcaggcgttattcccatataa

SEQ ID NO: 678906 - DNA, 75 bp, synthetic construct
  source 1..75: mol_type = other DNA
ctagcccatttaaaatatattcaagtcattaatttacttacaagaggtgatttttatgaagcatgggtagaactt

SEQ ID NO: 678907 - DNA, 75 bp, synthetic construct
  source 1..75: mol_type = other DNA
gttggatgtgtattactcaagaagatagtgctattcttgattatcttaatgctgagttaaaaaaagctcaatcct

SEQ ID NO: 678908 - DNA, 75 bp, synthetic construct
  source 1..75: mol_type = other DNA
gggagcaggccagggcactggatgaagatcacgatatcgtgattggtctgctggataagctggaagagcgggtta

SEQ ID NO: 678909 - DNA, 75 bp, synthetic construct
  source 1..75: mol_type = other DNA
gtgttcgattctgacgccgctaacgataaaggagtgatccctgatgcagcaaatgataaacccgcgtcttcgcgg

SEQ ID NO: 678910 - DNA, 75 bp, synthetic construct
  source 1..75: mol_type = other DNA
ggtggaaggttacgaaggctacggggttttacagcagtggtttgtcggtcagtacagccgcccggtgtaccgggc

SEQ ID NO: 678911 - DNA, 75 bp, synthetic construct
  source 1..75: mol_type = other DNA
atggtttgatggacgtctctggtgtgccagtgattatggcatctgggtgctggaagatgacaaactggtgcttgc

SEQ ID NO: 678912 - DNA, 75 bp, synthetic construct
  source 1..75: mol_type = other DNA
cgccagcttgccggaagatgatcgcatcaaagcgattaatgaaatccgcatggcgatccatcaggttagccctga

SEQ ID NO: 678913 - DNA, 75 bp, synthetic construct
  source 1..75: mol_type = other DNA
gatgatggagaaatagaaaacctttttgatcaacagggatattttagttgcgattcattaacagccgaagaagta

SEQ ID NO: 678914 - DNA, 75 bp, synthetic construct
  source 1..75: mol_type = other DNA
tcgagtattaatcaaacttacttacatgataaaaatcctggtgacgttattagcctgtatggcactttagataac

SEQ ID NO: 678915 - DNA, 75 bp, synthetic construct
  source 1..75: mol_type = other DNA
ggcgttcagacgctgaataaccggacgcacagtctgatttatagtgcgggagatatgcatatcggtggtggactt

SEQ ID NO: 678916 - DNA, 75 bp, synthetic construct
  source 1..75: mol_type = other DNA
ctggaagcgcgtaaactggcaggcgataacgtcaaagtgacgctggtttccagcggctacgatctgggccagcag

SEQ ID NO: 678917 - DNA, 75 bp, synthetic construct
  source 1..75: mol_type = other DNA
gcaaacctgcgccgaaagagccggtgctgatcccggtgacgatgatcgataaaaacaacgtcggcaattacaaag

SEQ ID NO: 678918 - DNA, 75 bp, synthetic construct
  source 1..75: mol_type = other DNA
gctacatggtaatggtagccatgaaattgcctgtacacgctaccctgaatgggcagataaaattaaaactgggga

SEQ ID NO: 678919 - DNA, 75 bp, synthetic construct
  source 1..75: mol_type = other DNA
ttattgctgaaaaaccggatactgccgttggtccggataaatggagaagtgaatatgaaatggcaaagcaatttg

SEQ ID NO: 678920 - DNA, 75 bp, synthetic construct
  source 1..75: mol_type = other DNA
gaccgtgatgatggtttgtggttccagaggagctgctatttatgatggtaatgcctggaatgtcctctttgattc

SEQ ID NO: 678921 - DNA, 75 bp, synthetic construct
  source 1..75: mol_type = other DNA
atgggctggcatcattgtcagtatcattcatttactgctctgtatgttatgaatcattatgttgtatgtttgctc

SEQ ID NO: 678922 - DNA, 75 bp, synthetic construct
  source 1..75: mol_type = other DNA
tgtcgagtaataatgaatatggcctgttcaaaaatagagaaacctcactgtggaaacgcaaagtaccagaaagcg

SEQ ID NO: 678923 - DNA, 75 bp, synthetic construct
  source 1..75: mol_type = other DNA
ttatctcatggtttagttacaatcaatggagtaaacagaaaaaagatggtcttggaggatactctccattaagct

SEQ ID NO: 678924 - DNA, 75 bp, synthetic construct
  source 1..75: mol_type = other DNA
atctcaagccatttgatatagatgttgattatttatgtgtgatggcggatgatttaaataatgtaaaagatgaag

SEQ ID NO: 678925 - DNA, 75 bp, synthetic construct
  source 1..75: mol_type = other DNA
ccgtttgttgacagctttgtgcgcggattcggctatagcatgggcgttgctaccacgtacgcactattcagcagc

SEQ ID NO: 678926 - DNA, 75 bp, synthetic construct
  source 1..75: mol_type = other DNA
atcaacccggattactcccggcgcacaaatatggacgctggataaacgcctgtcccgactggcagagcgtctgaa

SEQ ID NO: 678927 - DNA, 75 bp, synthetic construct
  source 1..75: mol_type = other DNA
acattaagcgatctggatctgttaccgaaaagtcatcaggccactattactgaagttttaactttcatcgaaaat

SEQ ID NO: 678928 - DNA, 75 bp, synthetic construct
  source 1..75: mol_type = other DNA
tcatttacatagtactttcgcaggctttttgggcagaatcattattttcttgttgcttaaatggccaaagataag

SEQ ID NO: 678929 - DNA, 75 bp, synthetic construct
  source 1..75: mol_type = other DNA
gtggctgcttccctgcgttcctggtatgaaaactggaataaacaaagcgcactgccggaaccgccgcagtttgtg

SEQ ID NO: 678930 - DNA, 75 bp, synthetic construct
  source 1..75: mol_type = other DNA
ataagttcaggcatggctgtggatttgctctggcagaaaaaggggtggatacacgcctgatacaggattatctgg

SEQ ID NO: 678931 - DNA, 75 bp, synthetic construct
  source 1..75: mol_type = other DNA
ctggtatcagcagaaaacacgtcaaagctggagggaaagaacacatccagtggcagcagtgtgggtgtcggtatc

SEQ ID NO: 678932 - DNA, 75 bp, synthetic construct
  source 1..75: mol_type = other DNA
tatctgatatgttccgcgaagccattgttgaaggacgtatatctcaaaatccagtaacgccaacaagagcaccga

SEQ ID NO: 678933 - DNA, 75 bp, synthetic construct
  source 1..75: mol_type = other DNA
aaatatgagtcagtatgcatcgccgcgatggaacatttaaaaagtaaagcaacggcccctatacaaaacggaccg

SEQ ID NO: 678934 - DNA, 75 bp, synthetic construct
  source 1..75: mol_type = other DNA
gtatgactgacctgcgcgaggttaacctgaaaaagctgacctttccggccagaacacggctaggctgcgccgtta

SEQ ID NO: 678935 - DNA, 75 bp, synthetic construct
  source 1..75: mol_type = other DNA
tactatgcagaggatggttgggccgaagtcgataacaacatcgcagagaacgccttacgggatgtggctgtaggc

SEQ ID NO: 678936 - DNA, 75 bp, synthetic construct
  source 1..75: mol_type = other DNA
gcttatttgacacttcaacgcatttatcgtgaaaaacttcaaaaaactaaggccgactcactccaggctgccatg

SEQ ID NO: 678937 - DNA, 75 bp, synthetic construct
  source 1..75: mol_type = other DNA
gcgaatgccggatagcaaaacagccgttcttgttgccagggagtttgacaggaaaggtgactggcgaatgaaatg

SEQ ID NO: 678938 - DNA, 75 bp, synthetic construct
  source 1..75: mol_type = other DNA
tattaatgtgtttgcagagggacacaacgcctttcgttttacaaaaaacggtgtgctggcattagaaaatctctc

SEQ ID NO: 678939 - DNA, 75 bp, synthetic construct
  source 1..75: mol_type = other DNA
atcagcaggggacggtggtcagcaacggtaacagcaggcttgatgtcacacggtttgataatcagggcggcagac

SEQ ID NO: 678940 - DNA, 75 bp, synthetic construct
  source 1..75: mol_type = other DNA
cgcggcgtgacgttaatgggcagccagccgcaactggtcgccgggctgctggtaggcactgttttaggcgtagcg

SEQ ID NO: 678941 - DNA, 75 bp, synthetic construct
  source 1..75: mol_type = other DNA
aatgcacctaatggacaaatgaatgccgtgcatatccgctttgatagtaactcctccgtaatggcagatgtccag

SEQ ID NO: 678942 - DNA, 75 bp, synthetic construct
  source 1..75: mol_type = other DNA
gtggttagttgtttttatactggcttcactggcctttttagtgtttttgctgtatattttttatggtttaaagcc

SEQ ID NO: 678943 - DNA, 75 bp, synthetic construct
  source 1..75: mol_type = other DNA
gccaccgtagtgtcgcctttgccaaaaccgtggctgcccccatcatggcgacaggtgtgggtgcggcattaatgt

SEQ ID NO: 678944 - DNA, 75 bp, synthetic construct
  source 1..75: mol_type = other DNA
tggtagcaaatatgcagcgcctggaaatgactgcgcgattttttattcagaggttagagcagagtggaatcagcg

SEQ ID NO: 678945 - DNA, 75 bp, synthetic construct
  source 1..75: mol_type = other DNA
ccggaaggactgattaaagcggtgcgtttttatgagcaggtaaaacgtgagaacccgcaagtcgaaacaggggca

SEQ ID NO: 678946 - DNA, 75 bp, synthetic construct
  source 1..75: mol_type = other DNA
atgaccactattaccagagaacaggcacagaaaattattgaagcagccgatgaggttattagtgcgctggccgga

SEQ ID NO: 678947 - DNA, 75 bp, synthetic construct
  source 1..75: mol_type = other DNA
ggttcaggtgcctcaggtgtatgcccgtgtaaaacccggtgatgtgaacagtgccggtgcgctgattgcgggccg

SEQ ID NO: 678948 - DNA, 75 bp, synthetic construct
  source 1..75: mol_type = other DNA
tgatgaggctcgccagactatgatgaaggccactaatgcagcagttgctttgcagggcgtgtctgagtcatttat

SEQ ID NO: 678949 - DNA, 75 bp, synthetic construct
  source 1..75: mol_type = other DNA
gcagccctggcaggtggtgcagcaccgtatattgctaaaattatcaaacagaccaccccggacggtgcgggacgt

SEQ ID NO: 678950 - DNA, 75 bp, synthetic construct
  source 1..75: mol_type = other DNA
tttgctgtagcattcccggtgcgtgtggcaccaggcagtgggtgtttcatgaagacgaacgcgccgcgtttgttc

SEQ ID NO: 678951 - DNA, 75 bp, synthetic construct
  source 1..75: mol_type = other DNA
acaagactcctttatcggtaatttaaaaagaataaatggtattgagggagagcattatgactggaaaaatcaaga

SEQ ID NO: 678952 - DNA, 75 bp, synthetic construct
  source 1..75: mol_type = other DNA
agaaattaaaatgtcgttaagagaaggggtgaatacattatctgatgcaattgataatatgaatttagatggaat

SEQ ID NO: 678953 - DNA, 75 bp, synthetic construct
  source 1..75: mol_type = other DNA
caagaaatactcaagaaaaataatgcagcgatatcaataggtggtagagaatttaatgtattaaatttgtataag

SEQ ID NO: 678954 - DNA, 75 bp, synthetic construct
  source 1..75: mol_type = other DNA
tttgcggctgggaatcccgccgatggttgggatgttgatggccgggccgattggcctttttcgccagcgttgccc

SEQ ID NO: 678955 - DNA, 75 bp, synthetic construct
  source 1..75: mol_type = other DNA
actcagcacacactcaggaatatagtaagacaaaaagataaatataaagaatggttggtttacactccccaaaga

SEQ ID NO: 678956 - DNA, 75 bp, synthetic construct
  source 1..75: mol_type = other DNA
agcagaattacgtggcaaccggaaaattgccgccccttatcgcggcgcggttgtactggttaattttgataccga

SEQ ID NO: 678957 - DNA, 75 bp, synthetic construct
  source 1..75: mol_type = other DNA
gcgcagctttatgccttacccaacacctgagccactaattgcttatcaggaagattatcctccagaaaattttga

SEQ ID NO: 678958 - DNA, 75 bp, synthetic construct
  source 1..75: mol_type = other DNA
gtcagtgtcaaagactctggagaaatattgattcagtgtcctcatgaagataaacctgttgcagctttgggtctg

SEQ ID NO: 678959 - DNA, 75 bp, synthetic construct
  source 1..75: mol_type = other DNA
ggcgtccttttacggatcaggatggcaatatatgggatctgtcatttcttgatgcacatgaggtttcttatactc

SEQ ID NO: 678960 - DNA, 75 bp, synthetic construct
  source 1..75: mol_type = other DNA
tagatttagccagttcattatatcaagattttctgttgaatccctcttatctgactgaacgaaataggaagtttt

SEQ ID NO: 678961 - DNA, 75 bp, synthetic construct
  source 1..75: mol_type = other DNA
acaagccgggagcgattttaagctgcatacgcccttagtggtgaatgaaacatcccttccggtactaacggcagt

SEQ ID NO: 678962 - DNA, 75 bp, synthetic construct
  source 1..75: mol_type = other DNA
aagttattatctatcaacaacagaatgagcaatcatatccagctcaggagcatctccttttacaactttgtatgc

SEQ ID NO: 678963 - DNA, 75 bp, synthetic construct
  source 1..75: mol_type = other DNA
cgatacggcggttcgcgacccattaatggaaatgaccttgagctggagtggcacaccaagcgatttgataatgct

SEQ ID NO: 678964 - DNA, 75 bp, synthetic construct
  source 1..75: mol_type = other DNA
aacatcatggaccagggcgttcttgagccgattatcgtctggaaagacccggagacagggctgtcttgtgtggtt

SEQ ID NO: 678965 - DNA, 75 bp, synthetic construct
  source 1..75: mol_type = other DNA
gacttcattcctgaaaaatattattctgaaaatagtctttttctaattatcgaatggactcaattatccccaaaa

SEQ ID NO: 678966 - DNA, 75 bp, synthetic construct
  source 1..75: mol_type = other DNA
taagaggctatagttcaggaaatgcagagaggatagtggatggatttcgtagtgacatgaacattaaaaagttag

SEQ ID NO: 678967 - DNA, 75 bp, synthetic construct
  source 1..75: mol_type = other DNA
gtacgccgtcagtatgttgattatctctggcgcggattccgtgacagtgaagacaactacattaagtttgacgac

SEQ ID NO: 678968 - DNA, 75 bp, synthetic construct
  source 1..75: mol_type = other DNA
cacgcaaggaaattacaaaagcactcgaagatgccagtggcgaatatgccgaggctctgcgctgggtgcttgggg

SEQ ID NO: 678969 - DNA, 75 bp, synthetic construct
  source 1..75: mol_type = other DNA
cccgtaaagaaatcacaaaggcccttgaaggtgccagcggtgactacgctgatgctctgcgctgggtgcttgggg

SEQ ID NO: 678970 - DNA, 75 bp, synthetic construct
  source 1..75: mol_type = other DNA
cattcatttggctcaaattgccccgcctgaatggcatgactggaagaaccgtttattcacgaaagataaaagtgc

SEQ ID NO: 678971 - DNA, 75 bp, synthetic construct
  source 1..75: mol_type = other DNA
tcagatcccatgttttgtgtgtatcaaaagcgcgaaatcgttgttgatgctgattatgaccatgaccggattgtc

SEQ ID NO: 678972 - DNA, 75 bp, synthetic construct
  source 1..75: mol_type = other DNA
agacaaaatctgcaccagattcgtttggcatcatcggtgaaaatattcgaacacaggataatcgaataacgtcag

SEQ ID NO: 678973 - DNA, 75 bp, synthetic construct
  source 1..75: mol_type = other DNA
tatactgaaagtggttttgagtacattgctgattacgaacgaggtggttgcgcaatggtgcttaggagcgtttta

SEQ ID NO: 678974 - DNA, 75 bp, synthetic construct
  source 1..75: mol_type = other DNA
gatggaagtaagcgcatagcagaactggaaaaacaatgcgccgaatgggagcgaaaagcattaagcaactttgaa

SEQ ID NO: 678975 - DNA, 75 bp, synthetic construct
  source 1..75: mol_type = other DNA
ggaaatacccggatattacgcgctgaagcgggaacggcggtaagctatcacatggacctgcaaaacggtacgacg

SEQ ID NO: 678976 - DNA, 75 bp, synthetic construct
  source 1..75: mol_type = other DNA
ttaaggtggcacatatccgcactcgcgaaacatatggaacccggcggctccagacggagctggcagataacggaa

SEQ ID NO: 678977 - DNA, 75 bp, synthetic construct
  source 1..75: mol_type = other DNA
cagagattttcggtgttgatccgcgcacaattgaacgctggcagatgcaagggcttccccatgtatctggtggcg

SEQ ID NO: 678978 - DNA, 75 bp, synthetic construct
  source 1..75: mol_type = other DNA
ttacgatgcaaaggcagtttcccgcgatgactccggcaatgatcgatggcctgaggagggaaacagcacgcgcct

SEQ ID NO: 678979 - DNA, 75 bp, synthetic construct
  source 1..75: mol_type = other DNA
tctcaaatcaataatgttacactcctcagtaaagaaatatactttgataaatttatggagttagccagaaggaat

SEQ ID NO: 678980 - DNA, 75 bp, synthetic construct
  source 1..75: mol_type = other DNA
ttgcaatcaacaaatacaacaacagcgcagaaccccttgatgctctacaccctatcaagtcgctggttatgcctg

SEQ ID NO: 678981 - DNA, 75 bp, synthetic construct
  source 1..75: mol_type = other DNA
ggcgatgaggcgtggagttacctagaggcactgaatacaggacacgaaggcagtgtgacaaccattcacgccaac

SEQ ID NO: 678982 - DNA, 75 bp, synthetic construct
  source 1..75: mol_type = other DNA
cgggaccttttacccgacagcaggccgaagcggttacccgcaggtatcgcaacatcagcattgaagacgaccagg

SEQ ID NO: 678983 - DNA, 75 bp, synthetic construct
  source 1..75: mol_type = other DNA
aggtgttggtagtgagtttattaacggattcacgaaagaagcattaaataacccatttgaagaaaaatcaggggc

SEQ ID NO: 678984 - DNA, 75 bp, synthetic construct
  source 1..75: mol_type = other DNA
atgtcggactgtcaccctgttttattgcccgaaggccctttctcacgcgaacaggcgatgactgtcacaacagct

SEQ ID NO: 678985 - DNA, 75 bp, synthetic construct
  source 1..75: mol_type = other DNA
tagtcaaaataggtgatatcgacagttccgggtttatttctaccgcaggtatgtcatatgttagtgaaaaaaaaa

SEQ ID NO: 678986 - DNA, 75 bp, synthetic construct
  source 1..75: mol_type = other DNA
gcaggatccgaatgacgaaccagcctccgaactgctcaaacgtattgcgcaggaaaaagctcaactggtgaaaga

SEQ ID NO: 678987 - DNA, 75 bp, synthetic construct
  source 1..75: mol_type = other DNA
acagcgcatgcacaccacttcaggatcgtttggccgacgcatcaactgagtttgatgttggtcatataccgatgg

SEQ ID NO: 678988 - DNA, 75 bp, synthetic construct
  source 1..75: mol_type = other DNA
aggacgtccataacaatgacctgcgtccggaggctggcacatacaccacaaacctcgttgctgcgaacaccatgt

SEQ ID NO: 678989 - DNA, 75 bp, synthetic construct
  source 1..75: mol_type = other DNA
tcgaaattagggatggataatgcatggttgggacgattatttatcaaacatcacctaaatgctgtaaaaaaggat

SEQ ID NO: 678990 - DNA, 75 bp, synthetic construct
  source 1..75: mol_type = other DNA
ttgcagattatgaattaaaaatgatccagtacttgaaaaaaaagcacaagataaaaaatataacaacaccaaaaa

SEQ ID NO: 678991 - DNA, 75 bp, synthetic construct
  source 1..75: mol_type = other DNA
caacagcaaacacctggtcaggtggaaaaccgcgccttatatccccgccctgaaggatggggttttacggcgcac

SEQ ID NO: 678992 - DNA, 75 bp, synthetic construct
  source 1..75: mol_type = other DNA
tcagtaatgacagttttagcgactccgatacactggcggtagttcaggctccaggtgctcaaggagcgcgaataa

SEQ ID NO: 678993 - DNA, 75 bp, synthetic construct
  source 1..75: mol_type = other DNA
aggcggtggtcaaatcagtaagtgctgaagagtattattataatacaagtgaggtgtcgggtgcctcccgaaata

SEQ ID NO: 678994 - DNA, 75 bp, synthetic construct
  source 1..75: mol_type = other DNA
ccagctcctgggcgtggcagaccagggatcgcaatcactcacaaattacagggttatagtgcaaacaaccgccct

SEQ ID NO: 678995 - DNA, 75 bp, synthetic construct
  source 1..75: mol_type = other DNA
atggattcagaaactgttcacgaagcagtcaggtctggcgttatcggtgtgtcggaagccgagccgtccggctgg

SEQ ID NO: 678996 - DNA, 75 bp, synthetic construct
  source 1..75: mol_type = other DNA
cagtaattgatcttaataatgtcagtataaccacctggggtggagaacgtgctgatggtttggtcgtcggcggag

SEQ ID NO: 678997 - DNA, 75 bp, synthetic construct
  source 1..75: mol_type = other DNA
tggattaaaaggctcaataaaatggatgatggtaaatcacgtgagttcagcccatttgtggaggtgaactggttg

SEQ ID NO: 678998 - DNA, 75 bp, synthetic construct
  source 1..75: mol_type = other DNA
gctgccctgctccggaatgcgggttggtatccaattccagccggaaccacggatatggcgatgtttgagctgtct

SEQ ID NO: 678999 - DNA, 75 bp, synthetic construct
  source 1..75: mol_type = other DNA
tgcgtgggacggtgagtgatgtgcgtaagggaagccaggagatgcacattggtatcgcggagattgtcgcaggca

SEQ ID NO: 679000 - DNA, 75 bp, synthetic construct
  source 1..75: mol_type = other DNA
atggatcaggtgacacagcagaacgcctcgctggtagaagaagcggcggtggcaacggaacaactggcgaatcag

SEQ ID NO: 679001 - DNA, 75 bp, synthetic construct
  source 1..75: mol_type = other DNA
ccggtaacatgggatatctcattttcctccagcctgtcaccagcgaaaattcgaacgcaaaccgatttactggat

SEQ ID NO: 679002 - DNA, 75 bp, synthetic construct
  source 1..75: mol_type = other DNA
gcgcatccctgcagatttatatattgtttatgaaacacagcaggtgacgcccgcgatggttaagctgttggctgc

SEQ ID NO: 679003 - DNA, 75 bp, synthetic construct
  source 1..75: mol_type = other DNA
caagctttcagcgaagggcaaacggtcgtcgtgcccgccggattggtttgtgacaatatcaacaccggcatcttc

SEQ ID NO: 679004 - DNA, 75 bp, synthetic construct
  source 1..75: mol_type = other DNA
tatggcgttgatcatggatgcgcgttacagcaaagatcgcattcttgagctgtatatgaatgaggtgtatctcgg

SEQ ID NO: 679005 - DNA, 75 bp, synthetic construct
  source 1..75: mol_type = other DNA
tattttgacgggcaatgtcggcatcagcggcggaaatagtggcgcgcgtgaatcgacctataccattaccataga

SEQ ID NO: 679006 - DNA, 75 bp, synthetic construct
  source 1..75: mol_type = other DNA
gtgaagatgaatggcttcctattcgcccgggcaccgatgccgcgctggttgcgggtattgcctgggtattgatta

SEQ ID NO: 679007 - DNA, 75 bp, synthetic construct
  source 1..75: mol_type = other DNA
caaaagtgcagaacgccgaaggcaaactctataccgaccataaaattggtaatccgtttgataacttcgcccaga

SEQ ID NO: 679008 - DNA, 75 bp, synthetic construct
  source 1..75: mol_type = other DNA
accgtaacagatgctgcaggaaataccggcgcggcgtctcgagcaatcacgctggtcggtgtttctccgttgatc

SEQ ID NO: 679009 - DNA, 75 bp, synthetic construct
  source 1..75: mol_type = other DNA
gatattgtcgttacggtgaccgatgccgctggtaacaccggttcggcgagccataacatcaccctggcgggcgtt

SEQ ID NO: 679010 - DNA, 75 bp, synthetic construct
  source 1..75: mol_type = other DNA
aagagaagcgcgtcaagatcaagcacaagctgaactacagcaccccaacaccgcgtggtaaagcctccgaagagg

SEQ ID NO: 679011 - DNA, 75 bp, synthetic construct
  source 1..75: mol_type = other DNA
taacaaaggcggcaagctgaccatactgcaggaagatcaggggcagctgttcgggatcaacggcggcgttgacgg

SEQ ID NO: 679012 - DNA, 75 bp, synthetic construct
  source 1..75: mol_type = other DNA
acgcgagtggtcatgatgatgtaatctttcttcgagaagtacaaaaactggctaaaactgagcttaagcttgaat

SEQ ID NO: 679013 - DNA, 75 bp, synthetic construct
  source 1..75: mol_type = other DNA
ttaaagaaaacgaagagttaggtggtgaaaacgatcataaaatgatcattttattgactttttatacagtgaagg

SEQ ID NO: 679014 - DNA, 75 bp, synthetic construct
  source 1..75: mol_type = other DNA
ggggtctccccatgcgagagtagggaactgccaggcatcaaataaaacgaaaggctcagtcgaaagactgggcct

SEQ ID NO: 679015 - DNA, 75 bp, synthetic construct
  source 1..75: mol_type = other DNA
ccggaggctattcttactacgacaaattcaagaatgctaatggtgggtgggattggcccaagaatttggggtttg

SEQ ID NO: 679016 - DNA, 75 bp, synthetic construct
  source 1..75: mol_type = other DNA
acaaggaaagattgcccccgcttttggtgagcctggaggggggattcaaatattacctaatatgcaagaacgagt

SEQ ID NO: 679017 - DNA, 75 bp, synthetic construct
  source 1..75: mol_type = other DNA
gtttacattcgtggcgatatcactgcggcacaaacctgcgaaattaataatttacagccgatttattttgatttt

SEQ ID NO: 679018 - DNA, 75 bp, synthetic construct
  source 1..75: mol_type = other DNA
agatcaaggccaatatcttttacctgcgccctcaaataacctttactggatgagaagactatttgaaaaaggtat

SEQ ID NO: 679019 - DNA, 75 bp, synthetic construct
  source 1..75: mol_type = other DNA
cgctggtcttctacttcatccagctgttggctatatgcttaatgagtatgttgtcactcagggacataagatcca

SEQ ID NO: 679020 - DNA, 75 bp, synthetic construct
  source 1..75: mol_type = other DNA
tagtcaggaatggcaggtaattgatgggttgcagcgaatgacgtcaataatcagatttttatctgacccaagctg

SEQ ID NO: 679021 - DNA, 75 bp, synthetic construct
  source 1..75: mol_type = other DNA
ttacaacattcaactccgcggcgcgctcttatcagcaatcaatcacctgtttactgagaacaatctggatacaga

SEQ ID NO: 679022 - DNA, 75 bp, synthetic construct
  source 1..75: mol_type = other DNA
aggtttttctgtagcgcctgtcgcgtgggaatacccagaacagatatctttccgctggtcagacgcacaaatccc

SEQ ID NO: 679023 - DNA, 75 bp, synthetic construct
  source 1..75: mol_type = other DNA
ttaacgatcagggaaaaccgctactttatgtccccggcgacagcgcccgtacgcgttttcatttatacgaaatac

SEQ ID NO: 679024 - DNA, 75 bp, synthetic construct
  source 1..75: mol_type = other DNA
cgccactgcaacaggtgctgcagctcaggcttttggtgtttccgctctggcatccgggacgaccagtctggctat

SEQ ID NO: 679025 - DNA, 75 bp, synthetic construct
  source 1..75: mol_type = other DNA
ggttatcagggggaattgaccggtggcaacataaatgttgttcctcaagcgtatggcgtgtattcatgggcatcc

SEQ ID NO: 679026 - DNA, 75 bp, synthetic construct
  source 1..75: mol_type = other DNA
ttaattgccgtgaaagacacgcagggccatgaaacgcggtatgaatataacgccgccggtgacctgaccaccgtc

SEQ ID NO: 679027 - DNA, 75 bp, synthetic construct
  source 1..75: mol_type = other DNA
atgatggaaattctgcgtggttcgcctgcactgtcggcattccgaatcaacaaactgctggcacgttttcaggct

SEQ ID NO: 679028 - DNA, 75 bp, synthetic construct
  source 1..75: mol_type = other DNA
ttgtcctcgttgtggtatcccgctaactcataacttgtgggcatatgaactaccatttgatgtggtggatggatt

SEQ ID NO: 679029 - DNA, 75 bp, synthetic construct
  source 1..75: mol_type = other DNA
atcagaccgcctttgactggtttatgaaagccgctgagcgcaataacgccgccgcctggtataacctggcaatta

SEQ ID NO: 679030 - DNA, 75 bp, synthetic construct
  source 1..75: mol_type = other DNA
tacagatcaatgtacgggcaggtgcattccctccggcagaagagaatggggtctgttatttgaaaattcctttaa

SEQ ID NO: 679031 - DNA, 75 bp, synthetic construct
  source 1..75: mol_type = other DNA
atgagtattcaattaaatctctagtggaaaacaaactatatcttaatcatctcaacatgatgaatgacagtgctg

SEQ ID NO: 679032 - DNA, 75 bp, synthetic construct
  source 1..75: mol_type = other DNA
aagagtaaatgataatgtaactaagtattcttatcttgattttaagaatgaatttgaatttagaataaataatat

SEQ ID NO: 679033 - DNA, 75 bp, synthetic construct
  source 1..75: mol_type = other DNA
catatctaggtaatgcgagttatacgctatacgaaataagatctagtaatgatgttacacggaactgttccggac

SEQ ID NO: 679034 - DNA, 75 bp, synthetic construct
  source 1..75: mol_type = other DNA
tgttcgtctccgcagtcgaagaaggcagcttggtaagcgccgctcgacggtttggcctgtcaccgtcgatggcgg

SEQ ID NO: 679035 - DNA, 75 bp, synthetic construct
  source 1..75: mol_type = other DNA
acccaactttttctgtgaccgcgaacattccacgcgctggtgccgaagacggcaagctgacgttcactttccgcc

SEQ ID NO: 679036 - DNA, 75 bp, synthetic construct
  source 1..75: mol_type = other DNA
tttacctacatcgggagtcagcaattcagtaggtgtaacggttggcggcggagttggggggcattttgcgtatac

SEQ ID NO: 679037 - DNA, 75 bp, synthetic construct
  source 1..75: mol_type = other DNA
gatcaggcggtctggcatcagccgtcagtcgtgtcctttgaagtggagcctgcccgctggcagcaccaggaggtg

SEQ ID NO: 679038 - DNA, 75 bp, synthetic construct
  source 1..75: mol_type = other DNA
ccgtggcagcatattgtgttcacacttccctgccagtactggtctctggtgttccataaccggtggttactggca

SEQ ID NO: 679039 - DNA, 75 bp, synthetic construct
  source 1..75: mol_type = other DNA
aaccaagagagcgagccatggttgccgcgtattctttggtaacgcagtttggtggcaaacagcaggatgtagcta

SEQ ID NO: 679040 - DNA, 75 bp, synthetic construct
  source 1..75: mol_type = other DNA
gtgtggatcactattgcaccgttcgtgacattcgcgctggactgctgtgaccgtgaggcactgcactgggcggtc

SEQ ID NO: 679041 - DNA, 75 bp, synthetic construct
  source 1..75: mol_type = other DNA
gtgaatgtcattgccatacatcacgcactgctcaaatcaggcatcacaccacaggaagtggatgtggttgtcacc

SEQ ID NO: 679042 - DNA, 75 bp, synthetic construct
  source 1..75: mol_type = other DNA
atgtactacccaaataatagttaccttaaccgggttggcagtaactataaaccatcagccgaagcaatggataaa

SEQ ID NO: 679043 - DNA, 75 bp, synthetic construct
  source 1..75: mol_type = other DNA
acctgcaccagccataccgtctgccggggcagcagcatgatgaggaatcagggctgtactataaccgtcaccggt

SEQ ID NO: 679044 - DNA, 75 bp, synthetic construct
  source 1..75: mol_type = other DNA
tccgcatcgaaacagacaacggtgagcgggagaaagcgcagcgccgcagcctggcggagaagctgcagcaggaag

SEQ ID NO: 679045 - DNA, 75 bp, synthetic construct
  source 1..75: mol_type = other DNA
cggcattgcataatcttgcagtggcgatcgaacattacaatgaaaaccatccgcacagtgcgttgggttatcgct

SEQ ID NO: 679046 - DNA, 75 bp, synthetic construct
  source 1..75: mol_type = other DNA
gatgaagagcgtgccagccagcaaagtatgttgatctgttgttcgcgtgcgaagggtaaacgcctggtgttggat

SEQ ID NO: 679047 - DNA, 75 bp, synthetic construct
  source 1..75: mol_type = other DNA
tacaggtgagccaggttgaaccccttatcgaacctggcacacacgtttatacctgtggccccgaggcgctaattg

SEQ ID NO: 679048 - DNA, 75 bp, synthetic construct
  source 1..75: mol_type = other DNA
ggttataaaaaagagatcgcgggactgaagcaagaacttagtgatgcgaatgaatacatcgaagagctagctgat

SEQ ID NO: 679049 - DNA, 75 bp, synthetic construct
  source 1..75: mol_type = other DNA
tgattttgacatgttagcattcatcaaatctcgactgacggtacttaacgatatgctggcaaaagatgttacctt

SEQ ID NO: 679050 - DNA, 75 bp, synthetic construct
  source 1..75: mol_type = other DNA
tggctggtcgtgatgggggcgggcgatattacagatgcacaacgggagtggcttttacgacgacgggcatattgc

SEQ ID NO: 679051 - DNA, 75 bp, synthetic construct
  source 1..75: mol_type = other DNA
agcaaagcgtcctgaaacaacaatgacgcgaatcgtggaaatcttctcctgcatcagcaagtacgcaacctgcca

SEQ ID NO: 679052 - DNA, 75 bp, synthetic construct
  source 1..75: mol_type = other DNA
ccttactaataactcaactatatgcgactctacgttgattctgaggaacgagcagggggtcagcccgcaagtatt

SEQ ID NO: 679053 - DNA, 75 bp, synthetic construct
  source 1..75: mol_type = other DNA
aatgggtatacatgcagcctgacgagggtcctctctttggtatgactccaagcgcatacagcagttggtttaact

SEQ ID NO: 679054 - DNA, 75 bp, synthetic construct
  source 1..75: mol_type = other DNA
gaagctggtgaaggatgttgactctaagcgcagagcgttcacagatgacgagctggagggacttctcggaagagt

SEQ ID NO: 679055 - DNA, 75 bp, synthetic construct
  source 1..75: mol_type = other DNA
catccagctacaaggacctctcgtcctcactcaatactgtctcccggttcctgcctgaagacatggacctgatgt

SEQ ID NO: 679056 - DNA, 75 bp, synthetic construct
  source 1..75: mol_type = other DNA
actggtctgtatcgacatcaacgaagatggggacggtaagtctgtgaagaacaagcattcagtccgacttgtgcc

SEQ ID NO: 679057 - DNA, 75 bp, synthetic construct
  source 1..75: mol_type = other DNA
cagtcaattacgtatgacctgtacgggaaaggacacgcagttggtaggctggctgaggtgctgaagacagcttta

SEQ ID NO: 679058 - DNA, 75 bp, synthetic construct
  source 1..75: mol_type = other DNA
gctactctggtcgacgagaagtcgaacctgaaggagctagccgccacgcaagcattgagtctggaccagcagaaa

SEQ ID NO: 679059 - DNA, 75 bp, synthetic construct
  source 1..75: mol_type = other DNA
tgccacctgactaaacgtgacattgtaacgattgatacgatggtctgcatcgacatcaatgaagatggggacggg

SEQ ID NO: 679060 - DNA, 75 bp, synthetic construct
  source 1..75: mol_type = other DNA
aaacctcttccggattacttctcccggcgacgccggagagttgcgattttttgcatcaaatcaaaataggtgagt

SEQ ID NO: 679061 - DNA, 75 bp, synthetic construct
  source 1..75: mol_type = other DNA
gacgcaatgctggctgctgaggtgagaccctccacgattaataagctgctgacgaaggcgaagatgtgtcttgat

SEQ ID NO: 679062 - DNA, 75 bp, synthetic construct
  source 1..75: mol_type = other DNA
gtgcgaagcggttgttatcgctgaacctgaaaaaaggcgatcgcgtggcactgattgccgaaacaagtagcgggt

SEQ ID NO: 679063 - DNA, 75 bp, synthetic construct
  source 1..75: mol_type = other DNA
gcgacactggttgacgagaagtccaacctcagggaacttgcagcgacaagagcgttgagtgtggaccagcagagg

SEQ ID NO: 679064 - DNA, 75 bp, synthetic construct
  source 1..75: mol_type = other DNA
tgaggtctgccacctgactaaacgtgacattgtaaccttggacaatggactggtctgtatcgacatcaatgaaga

SEQ ID NO: 679065 - DNA, 75 bp, synthetic construct
  source 1..75: mol_type = other DNA
atgaaaaaacaacctgcctcaccaaatcaggcggtatcgtgctgcctgtcccctgctgatgtctggcacactctg

SEQ ID NO: 679066 - DNA, 75 bp, synthetic construct
  source 1..75: mol_type = other DNA
ctattccatctaatccgaagcaatactttgaaacccacacctgtatatgctaattattttgataacactactgat

SEQ ID NO: 679067 - DNA, 75 bp, synthetic construct
  source 1..75: mol_type = other DNA
gaactccgtcattgtcacactgaaaaacagtaataatcagtatgcccgaacggcattttgcaacggagacagttg

SEQ ID NO: 679068 - DNA, 75 bp, synthetic construct
  source 1..75: mol_type = other DNA
gtgggtactgaagtttttgttagttttattcagggggatccgaattaccctgttataataggaagcgtttataat

SEQ ID NO: 679069 - DNA, 75 bp, synthetic construct
  source 1..75: mol_type = other DNA
atgaaaaaacaaccggtctcaccaaatcggacactatcgtgctgcctgtcccctgctgatgtctggcacactctg

SEQ ID NO: 679070 - DNA, 75 bp, synthetic construct
  source 1..75: mol_type = other DNA
ccctgctgatgtctggcacactctgctggcttacttgctggagaagcactacggactcactctcagcgacacgcc

SEQ ID NO: 679071 - DNA, 75 bp, synthetic construct
  source 1..75: mol_type = other DNA
tctaagtattgcgcaaagttcacccaaaaagaagccatcttaccccccctacgcaccttaataaaacctccatta

SEQ ID NO: 679072 - DNA, 75 bp, synthetic construct
  source 1..75: mol_type = other DNA
ggcgggtgcgttttgaacagggcgatgcgtttaacccggaggaactcagcgcgttaactccgcggcctacgctgg

SEQ ID NO: 679073 - DNA, 75 bp, synthetic construct
  source 1..75: mol_type = other DNA
cttactgcatccttttcactggggcttgatgggcccaagcgtggatcactcacgcgtcagtgagtggagcgcgtg

SEQ ID NO: 679074 - DNA, 75 bp, synthetic construct
  source 1..75: mol_type = other DNA
ggaatacgggatgattacgtgagtgaactggcccttgctctgcatgaggctccctgtaacgataaacttcatcag

SEQ ID NO: 679075 - DNA, 75 bp, synthetic construct
  source 1..75: mol_type = other DNA
attggataaatacggaaatttctcacttgattataacaaaataaaatactgggataatgcgtatgatagtaactc

SEQ ID NO: 679076 - DNA, 75 bp, synthetic construct
  source 1..75: mol_type = other DNA
ctttaagcaaagaggatgctcttatacgcatcaaacaagctgaagctaacttactgaaagctaacgaaaggttag

SEQ ID NO: 679077 - DNA, 75 bp, synthetic construct
  source 1..75: mol_type = other DNA
gcgcagggggggggatccaaaagagctggcaacgaaggtgaccagttacactcttaccgatgccgaccgtggtcg

SEQ ID NO: 679078 - DNA, 75 bp, synthetic construct
  source 1..75: mol_type = other DNA
gatccggatgaagttgtcaaaatgctggggatgtatatcccttatctatgtgcctttgcttttttggtaatgact

SEQ ID NO: 679079 - DNA, 75 bp, synthetic construct
  source 1..75: mol_type = other DNA
tcaacgaatgcgctggaagtgagtggtacaaacagtaaaggtcaatttagtataaaagatggtgtgtccaaaaaa

SEQ ID NO: 679080 - DNA, 75 bp, synthetic construct
  source 1..75: mol_type = other DNA
atacggcctctattctacagatacgctacgcaccgttcagactgccacttttttttcaggtggcagaacaccaat

SEQ ID NO: 679081 - DNA, 75 bp, synthetic construct
  source 1..75: mol_type = other DNA
agcagtcaagagtgtcctccaggagaaagcgaaataacaaataaatgtttacataatagttgtattataaaaata

SEQ ID NO: 679082 - DNA, 75 bp, synthetic construct
  source 1..75: mol_type = other DNA
gccgtaaaactttcgagcgtactgtagctaaagcggggattgtactgcctgaaggccagtgtacacatgtattac

SEQ ID NO: 679083 - DNA, 75 bp, synthetic construct
  source 1..75: mol_type = other DNA
gtgaagtcgttggttgtgagacaaatgaatcaggaatatcggcagcatatggcacaacgaagatctatactacag

SEQ ID NO: 679084 - DNA, 75 bp, synthetic construct
  source 1..75: mol_type = other DNA
aaaggtatactaaattttcccgacacttataaaggcaagaaatatcagagagataaagtaattagcatggctttt

SEQ ID NO: 679085 - DNA, 75 bp, synthetic construct
  source 1..75: mol_type = other DNA
ctccatctacaggatttgttaaaagattatgtggagtttggtcgaatgatttctctataaatgatgattctgact

SEQ ID NO: 679086 - DNA, 75 bp, synthetic construct
  source 1..75: mol_type = other DNA
cgggcatcgttccggggagtcgtcatctggtcctcgaacggtgccgtgatgaaattggcgactggcgtattattt

SEQ ID NO: 679087 - DNA, 75 bp, synthetic construct
  source 1..75: mol_type = other DNA
ccgagtggagcaggattaaccgccgactcgacgccgttaatgtatcaggggctggaagtcggacagctgactaaa

SEQ ID NO: 679088 - DNA, 75 bp, synthetic construct
  source 1..75: mol_type = other DNA
gtgaatttgagtcagtaaaaactggggaacgtacaatcagtattatatctaaaacagcgaagaaagccctgatga

SEQ ID NO: 679089 - DNA, 75 bp, synthetic construct
  source 1..75: mol_type = other DNA
atcagacatggagaaagatgcgatcgctctcaaaacaaatgtctgtcagcccacgaagggatcactgtaaacgga

SEQ ID NO: 679090 - DNA, 75 bp, synthetic construct
  source 1..75: mol_type = other DNA
gaaaccattgctcagttattgcgttacggttgtattgtgattgcctgtggcggtggcggtattcccgttgttcgc

SEQ ID NO: 679091 - DNA, 75 bp, synthetic construct
  source 1..75: mol_type = other DNA
ccggtgtagaaaaagtagcgattaactttggtacaccacaacaacagtggctcgacgctatcagcgttgccgaag

SEQ ID NO: 679092 - DNA, 75 bp, synthetic construct
  source 1..75: mol_type = other DNA
gtttttttcccgacgaaaaggaactgaaaaatcagaaatacccgtcactgcttataggaaaaatgcctgaaaaca

SEQ ID NO: 679093 - DNA, 75 bp, synthetic construct
  source 1..75: mol_type = other DNA
ttgaaagctatagcaggcatagccaaatacacatggatatacatggcgatattcattatatcgctgatgattatt

SEQ ID NO: 679094 - DNA, 75 bp, synthetic construct
  source 1..75: mol_type = other DNA
aatgctttgcagcgtattgtgaaccccaaaactatagaaaccgttgatttcaccgaacaactggaagatacaaga

SEQ ID NO: 679095 - DNA, 75 bp, synthetic construct
  source 1..75: mol_type = other DNA
aggctcaacaattgctcaaagaagggcaatttggtgaaggaagtatgcagcccaaggtcgaagcgattgttgatt

SEQ ID NO: 679096 - DNA, 75 bp, synthetic construct
  source 1..75: mol_type = other DNA
agaaattgacaatagaaagatcgaattaacaactgaagagaatgaacctgtaaaatatgtcaactggattaatgg

SEQ ID NO: 679097 - DNA, 75 bp, synthetic construct
  source 1..75: mol_type = other DNA
aggtcagcggttcgatcccgcttagctccaccaaatttcaaaccctcgctgcaaagcgggggttttttgtctctg

SEQ ID NO: 679098 - DNA, 75 bp, synthetic construct
  source 1..75: mol_type = other DNA
cagcttattcagtacatcgtcgacgaagttgttgctgcagggatcaaaaaaatcgttctggtcacagacgcatcg

SEQ ID NO: 679099 - DNA, 75 bp, synthetic construct
  source 1..75: mol_type = other DNA
tcgtaattagtgagttttgccgcccgtttattgcacataaaattgtcagttttgatcaaaacaaggagtcttttt

SEQ ID NO: 679100 - DNA, 75 bp, synthetic construct
  source 1..75: mol_type = other DNA
tatcagtctggtgctgtggttactcgataccgaactcgaaggtaaatttaaagtcaacatgaactcggtaatgaa

SEQ ID NO: 679101 - DNA, 75 bp, synthetic construct
  source 1..75: mol_type = other DNA
gtttatttcacataaaattgttagttttgatcaaaaaaatgagtctttttttgttaatgcaagaaaatattcccg

SEQ ID NO: 679102 - DNA, 75 bp, synthetic construct
  source 1..75: mol_type = other DNA
gcagaatggtttttgactcatggtatgcaaaatcagcagcaattgtttataaagaatcaagaaaagaagagtatt

SEQ ID NO: 679103 - DNA, 75 bp, synthetic construct
  source 1..75: mol_type = other DNA
aaggcaagccgcagctgtggaaccataaacaaaatgatgcgttaggtctttatcttgatctccttatacaagcaa

SEQ ID NO: 679104 - DNA, 75 bp, synthetic construct
  source 1..75: mol_type = other DNA
tgataaatggctagagcaatataatacattccttactgattatgactggctagataaaaaagatgaaaagcaagc

SEQ ID NO: 679105 - DNA, 75 bp, synthetic construct
  source 1..75: mol_type = other DNA
agacgcctgcaccggtgggcgttttcggccccggctggaaagcgccttctgatatccgcttacagctacgtgatg

SEQ ID NO: 679106 - DNA, 75 bp, synthetic construct
  source 1..75: mol_type = other DNA
cgcacggatgatgagcggactcaccggtaccattacgacagccggcaccggctggtgcactacacgcggacacaa

SEQ ID NO: 679107 - DNA, 75 bp, synthetic construct
  source 1..75: mol_type = other DNA
attaaaatcgattgcgctgttggttgcttatctggataaagccaatttctatattatggaagattctggagcgtg

SEQ ID NO: 679108 - DNA, 75 bp, synthetic construct
  source 1..75: mol_type = other DNA
ccagtgtcgtaggggtacttaaaggcaccaagacaaaagccggtacccgtaaggtggagctgaacagtgaggcgc

SEQ ID NO: 679109 - DNA, 75 bp, synthetic construct
  source 1..75: mol_type = other DNA
tgataaatcagaagccatttacattcatgaaggatgctactgtctttgaagatccaaagaccaataagccctggg

SEQ ID NO: 679110 - DNA, 75 bp, synthetic construct
  source 1..75: mol_type = other DNA
gattcaaagccagaaaacgaccttaaaaaccattcgcaaccagttatctttcctgcggtcagcacttgatgaagc

SEQ ID NO: 679111 - DNA, 75 bp, synthetic construct
  source 1..75: mol_type = other DNA
gttccattacaaaatcattgacaaagagaagttcgattgtttcaaaggttctgatagaggatcgtggtttgcctt

SEQ ID NO: 679112 - DNA, 75 bp, synthetic construct
  source 1..75: mol_type = other DNA
tcgccagcataaaactggcgataccctggtgatcacattcacctacaagggggttctctgccgggagcccctttc

SEQ ID NO: 679113 - DNA, 75 bp, synthetic construct
  source 1..75: mol_type = other DNA
accattaacccggtaaccctcgtcagcgccagccggtaccacgtgatcgacagtagcccgagcgccgacgattac

SEQ ID NO: 679114 - DNA, 75 bp, synthetic construct
  source 1..75: mol_type = other DNA
accgctgttgaaatccctggaaagctggttgcgtgaaaagatgaagaccctgttcttcggctctggccatggtgg

SEQ ID NO: 679115 - DNA, 75 bp, synthetic construct
  source 1..75: mol_type = other DNA
tgaagctgaatcagaacgcggaattgcgcatcaacaaggcgctggtcgagggtgaaatcaccgacttttacgact

SEQ ID NO: 679116 - DNA, 75 bp, synthetic construct
  source 1..75: mol_type = other DNA
aggaaagcgatagaggactatatccattattataacaacgagcggatcagcctgaaattaaaaggcctgagtccg

SEQ ID NO: 679117 - DNA, 75 bp, synthetic construct
  source 1..75: mol_type = other DNA
caaaatctatagaaatgttcatgatattatgttcaggacgattttacttcatccctaaagcactaaaatatttat

SEQ ID NO: 679118 - DNA, 75 bp, synthetic construct
  source 1..75: mol_type = other DNA
ttccgccaataaagggatgccgattctgttgcttaccgcgcttggcaccattgaacatcgcgtcaaggtgctgga

SEQ ID NO: 679119 - DNA, 75 bp, synthetic construct
  source 1..75: mol_type = other DNA
gcgcatcaacaaggcgctggctgagggtgaggtcatcgacttttacgacttcctcgatctgcttaacgccgagac

SEQ ID NO: 679120 - DNA, 75 bp, synthetic construct
  source 1..75: mol_type = other DNA
gcgcatcaacaaggcgctggtcgagggtgaaatcaccgacttttacgacttcctcgatttgcttaacgccgagac

SEQ ID NO: 679121 - DNA, 75 bp, synthetic construct
  source 1..75: mol_type = other DNA
catcgctattgatgagaaagaatatttacgacttgggctattactcgaacaagtgttcccagaggccagtattga

SEQ ID NO: 679122 - DNA, 75 bp, synthetic construct
  source 1..75: mol_type = other DNA
attactcatcatgtcattaaagtagattgtagctctttagggtctggggatatggcgggcgcagaggcagattct

SEQ ID NO: 679123 - DNA, 75 bp, synthetic construct
  source 1..75: mol_type = other DNA
aagtcctttcccctcatattcggttattgtattctccacaagaactgggatttaatgatgcgggtttaatagttt

SEQ ID NO: 679124 - DNA, 75 bp, synthetic construct
  source 1..75: mol_type = other DNA
gcattaatcttttggcggcgttttttcaaacatcatcctaaaactatagtaattaaagaagttggttatatttac

SEQ ID NO: 679125 - DNA, 75 bp, synthetic construct
  source 1..75: mol_type = other DNA
acgaagccgaagctcgacggtggttatctggtcaagccgaggctatcagagccgaagttgaacgcttaaaaaaaa

SEQ ID NO: 679126 - DNA, 75 bp, synthetic construct
  source 1..75: mol_type = other DNA
aaaacgacacaccatactttcctaggcctagcatctgcagagcagggatctggaacactcaggttaagtcggatc

SEQ ID NO: 679127 - DNA, 75 bp, synthetic construct
  source 1..75: mol_type = other DNA
gatccaaagaccaataagccttgggcaagtgctgatgcaattagaaaaaaagcatgggtgccaacattgcgaaaa

SEQ ID NO: 679128 - DNA, 75 bp, synthetic construct
  source 1..75: mol_type = other DNA
caggcagcgcccctgagacgctggatacactcaaagagttggctgacgccctcggcaacgatccgaattttgcga

SEQ ID NO: 679129 - DNA, 75 bp, synthetic construct
  source 1..75: mol_type = other DNA
ccagtacgcgccgaaggcaagcccaacattcaccggcacgccaacagcgcccacgcctgaaaatagcgacaacag

SEQ ID NO: 679130 - DNA, 75 bp, synthetic construct
  source 1..75: mol_type = other DNA
gatgtctaaaatgaaagatgttgatcaaaattatgatgcattatactggcatatactacaagcatatttaatttt

SEQ ID NO: 679131 - DNA, 75 bp, synthetic construct
  source 1..75: mol_type = other DNA
gcaacctggcagattgaagccgctgcggcggcgctgggcttcaccattaaggtgacggccgttctgccgcaccac

SEQ ID NO: 679132 - DNA, 75 bp, synthetic construct
  source 1..75: mol_type = other DNA
ccggcgcacagtcaggtaagacgactgttgagaataatgcgctcagtctgccatcaggaatggtgagttatggtc

SEQ ID NO: 679133 - DNA, 75 bp, synthetic construct
  source 1..75: mol_type = other DNA
ggtttcagtcagtgttatgtctgatgccgttcagtcagacccgtcgattcctgccccgcaggttttgtctgtaaa

SEQ ID NO: 679134 - DNA, 75 bp, synthetic construct
  source 1..75: mol_type = other DNA
ttttgtaacaaaaagtattggtggaggagataaaaatgaggggcatagatttatttttgatgatacaaagggtga

SEQ ID NO: 679135 - DNA, 75 bp, synthetic construct
  source 1..75: mol_type = other DNA
tactgaagttaagggaaccatgatgacagttcagggaagtgctataacacaaattaaaggtggcattataaatat

SEQ ID NO: 679136 - DNA, 75 bp, synthetic construct
  source 1..75: mol_type = other DNA
aaagatttctttttaattgtaaataatgatgcgatccatgaaatcaaaaataaacatgcactaaaggtttcaaaa

SEQ ID NO: 679137 - DNA, 75 bp, synthetic construct
  source 1..75: mol_type = other DNA
gatgtctaaaatgaaagatgttgatcaaaactttgatgctttatactggcatattcttcaagtatatttaatttt

SEQ ID NO: 679138 - DNA, 75 bp, synthetic construct
  source 1..75: mol_type = other DNA
aatctgacggataaacagatccacaattacgcacaacagctggcaggagatacaccgctgaaagaggttcggccg

SEQ ID NO: 679139 - DNA, 75 bp, synthetic construct
  source 1..75: mol_type = other DNA
ttggcaaaaacgtccgaccatgccttcaatgagtagttacttgttagagacaatgctacttaactacttcaacgg

SEQ ID NO: 679140 - DNA, 75 bp, synthetic construct
  source 1..75: mol_type = other DNA
gctgaaagtggaagtcccggacaaagatgccggacggtttacctgtattgatgacgtcatgacgccattaatcag

SEQ ID NO: 679141 - DNA, 75 bp, synthetic construct
  source 1..75: mol_type = other DNA
cagaatggaagtaaacgcgcgcggtgtgaagtacgccgagcgtctgctgggagaaataaaaaatcagattatcga

SEQ ID NO: 679142 - DNA, 75 bp, synthetic construct
  source 1..75: mol_type = other DNA
tttttgatttttctggtgtgccacctattgagtcaattacatacgcttttaacacaactgagaaatattacggtc

SEQ ID NO: 679143 - DNA, 75 bp, synthetic construct
  source 1..75: mol_type = other DNA
ggtgttgatgaatttggtttttcatatgccaaaatgcgaacaaaagataatatgacaggacaatcatctgcactt

SEQ ID NO: 679144 - DNA, 75 bp, synthetic construct
  source 1..75: mol_type = other DNA
cgttcgactcgtttgaaaatttttggtaatgctgccactggcaaaacggtaaaaatgtacctggacgaatatctt

SEQ ID NO: 679145 - DNA, 75 bp, synthetic construct
  source 1..75: mol_type = other DNA
gctataaatacaggtctgcgtagttctgaattatgtgcccttagatggcgtgatattgactttgtagggaggact

SEQ ID NO: 679146 - DNA, 75 bp, synthetic construct
  source 1..75: mol_type = other DNA
atgggccagacaaaactgctcaaactaccgcgcggcgtaacaatcagaaaacaccgtcagggagaaacgatcaat

SEQ ID NO: 679147 - DNA, 75 bp, synthetic construct
  source 1..75: mol_type = other DNA
aatggcaacggccaatgccatgtacgatcgactggtcaaaacctggcttgctttctattcgccagaggtgttccc

SEQ ID NO: 679148 - DNA, 75 bp, synthetic construct
  source 1..75: mol_type = other DNA
ttatgtggcatatcggaagtattattttaaatataagaatataatgtacaatgatacaaagaattataacctgtt

SEQ ID NO: 679149 - DNA, 75 bp, synthetic construct
  source 1..75: mol_type = other DNA
taaaatacaaaattttacgataacaaatattgacttctatgcccatgaaaatggaactcaaaaaccttatatatt

SEQ ID NO: 679150 - DNA, 75 bp, synthetic construct
  source 1..75: mol_type = other DNA
aaactgcggcgaaaagcagtcaggctgcagcagccgaaagcgagagtgcggcagccggttctgcgacttcagcag

SEQ ID NO: 679151 - DNA, 75 bp, synthetic construct
  source 1..75: mol_type = other DNA
gaaatgataatcagctcaagatttgaaatcctggcgatgcctggaatcagtattatccccaatggctctacgtta

SEQ ID NO: 679152 - DNA, 75 bp, synthetic construct
  source 1..75: mol_type = other DNA
cctggccggacaaatgaaagcggtaaaaattacttctcaggcaattgttgatttaattgcccagggacatgggtg

SEQ ID NO: 679153 - DNA, 75 bp, synthetic construct
  source 1..75: mol_type = other DNA
ccacacaagaattactagaaggacgaaacaaccttgtgattgtaggaaaccatagctcaggtaaaacatctcttt

SEQ ID NO: 679154 - DNA, 75 bp, synthetic construct
  source 1..75: mol_type = other DNA
cggtaacttttctaaggcagcggatgattacaaacgcagtctctcaaaactcgtacaaaatggagccccaaaaga

SEQ ID NO: 679155 - DNA, 75 bp, synthetic construct
  source 1..75: mol_type = other DNA
tggattaatcagtaataacgagcttgagtcattatctaaaattccattcattggcgatgaaccgccccgggtttc

SEQ ID NO: 679156 - DNA, 75 bp, synthetic construct
  source 1..75: mol_type = other DNA
tagtgatgtgcgtgtcggctggcgtgatgagcagggcgctcctgctcccgggcaaattacgtcagtatcgttgcg

SEQ ID NO: 679157 - DNA, 75 bp, synthetic construct
  source 1..75: mol_type = other DNA
ataacaatatacagtatttacgatatgcagaagtcaaagtttattgttgtattatttatattgtttattctttat

SEQ ID NO: 679158 - DNA, 75 bp, synthetic construct
  source 1..75: mol_type = other DNA
ccttggcttattcactagcgaagcggcggcacgtgctgcttacctgaaagcaaaagccagataccatccctcgac

SEQ ID NO: 679159 - DNA, 75 bp, synthetic construct
  source 1..75: mol_type = other DNA
tcagacacagacaaccgtgaaggttactggcaacccaagcacagcacatgttgctagttttatcgctgatccgtc

SEQ ID NO: 679160 - DNA, 75 bp, synthetic construct
  source 1..75: mol_type = other DNA
ggcgggaataacggtgaacttcaccatgccacagggcgtggcggcaaactttaccctcgaaaataacggcattgc

SEQ ID NO: 679161 - DNA, 75 bp, synthetic construct
  source 1..75: mol_type = other DNA
atttttgcagtagcaatggctacacacttccccttggagaccatttaaaccatagtcgttcccgaggcatcgggt

SEQ ID NO: 679162 - DNA, 75 bp, synthetic construct
  source 1..75: mol_type = other DNA
gacgtttgtggcggataaagacagcgcagttgtcgttctgcaaacatcgaaagcggaaatcattgggaatggcgt

SEQ ID NO: 679163 - DNA, 75 bp, synthetic construct
  source 1..75: mol_type = other DNA
tgtcggtgactcaagtaccgcacaggttgatctgcagaagtcgaaaaatgaagtggtcgctgacggcaatgacag

SEQ ID NO: 679164 - DNA, 75 bp, synthetic construct
  source 1..75: mol_type = other DNA
gccagaccgcataatcgccggtaccccgcagaacagctccggcagcgtcatcaccgccacaatcgttgataataa

SEQ ID NO: 679165 - DNA, 75 bp, synthetic construct
  source 1..75: mol_type = other DNA
ttgaagtggcgtggtatttgtcgaagtacggtaaatctcaaccacctgtgggattgggtgttcagaaatggaaag

SEQ ID NO: 679166 - DNA, 75 bp, synthetic construct
  source 1..75: mol_type = other DNA
ttacataatgacatacaagaacaaacatcgatagacttatacacgagcataataaataaagagttggatagcaat

SEQ ID NO: 679167 - DNA, 75 bp, synthetic construct
  source 1..75: mol_type = other DNA
atatgagaaaagcttaactttccgaagaatcattaattattatgtgaaggaaataaacttaagtgattatggctt

SEQ ID NO: 679168 - DNA, 75 bp, synthetic construct
  source 1..75: mol_type = other DNA
atctatattttttaacggaaaacataataaccaacatgatggagcttttggaaaaataatagattttacccaaaa

SEQ ID NO: 679169 - DNA, 75 bp, synthetic construct
  source 1..75: mol_type = other DNA
cgggaaattattgaacgtgattatcacctgagcgcggctatgtactgcgaaaccgcagcgctggatcagttcttc

SEQ ID NO: 679170 - DNA, 75 bp, synthetic construct
  source 1..75: mol_type = other DNA
cagaaaagatactcgctttggccctttctttttaagattaggcacatttgaagttataagaaaaaatagtacatt

SEQ ID NO: 679171 - DNA, 75 bp, synthetic construct
  source 1..75: mol_type = other DNA
tggtgtgcatttgatatgcaccactgccaaagtggatcgtagttttggcgatattccgttagggaaggtgcgaat

SEQ ID NO: 679172 - DNA, 75 bp, synthetic construct
  source 1..75: mol_type = other DNA
ttataccagcttttgtgaaaaatatcttggtgcttacctccaccattatccaaatacaaatgacatgctaaaaaa

SEQ ID NO: 679173 - DNA, 75 bp, synthetic construct
  source 1..75: mol_type = other DNA
tgagcgcgaaacctgtcgggggcagcgctgtggctggatactcgatacatacgttcaacacttttcaggaaatag

SEQ ID NO: 679174 - DNA, 75 bp, synthetic construct
  source 1..75: mol_type = other DNA
ctgcttatccgtgtggacgggctgaatgccagctgcgtctctgaaatcctgctgattcctggtaaggaagatgct

SEQ ID NO: 679175 - DNA, 75 bp, synthetic construct
  source 1..75: mol_type = other DNA
acggtgtcatgtgcggagatactaaaagattaatcaaattctacaaatcctttgggtttgaaattcacggtaata

SEQ ID NO: 679176 - DNA, 75 bp, synthetic construct
  source 1..75: mol_type = other DNA
tgggcatggttctgctggtctacctcttcttaagtgcggagatgaatttttatcaccggcagatattgtcgaccg

SEQ ID NO: 679177 - DNA, 75 bp, synthetic construct
  source 1..75: mol_type = other DNA
ttcaaacgtttttaaccgaacccgcaatattaattggtttgctggtgggcattggttatgccctcgataaaaaat

SEQ ID NO: 679178 - DNA, 75 bp, synthetic construct
  source 1..75: mol_type = other DNA
atggaaacggcaacccgttagccaatgaggcggtgacattcacgctaccggcagatgtgagcgcaagcttcactc

SEQ ID NO: 679179 - DNA, 75 bp, synthetic construct
  source 1..75: mol_type = other DNA
tgaatcttctccattcagaaaaaaatgttacccctacaaatgaaatgggtatacttcaagaaaaagtaaagggta

SEQ ID NO: 679180 - DNA, 75 bp, synthetic construct
  source 1..75: mol_type = other DNA
tggatgttcccgaaaccgggacggatagttttggttttacctatggaaagtttgtctgtaacgattctctgattg

SEQ ID NO: 679181 - DNA, 75 bp, synthetic construct
  source 1..75: mol_type = other DNA
gaacctataccgattcatatcagttaggagatggagagctgcttgtttgtacggtgaatatccctgctggcgtat

SEQ ID NO: 679182 - DNA, 75 bp, synthetic construct
  source 1..75: mol_type = other DNA
cgcgtgctggggtatcaacgcgcggcggtggtgcacagcggcgggatggatgaagtttcattacacgcgccgaca

SEQ ID NO: 679183 - DNA, 75 bp, synthetic construct
  source 1..75: mol_type = other DNA
gattttgtcataactggagcaacagcggaactcctgcgtaatgacgttatgccaatagttatcgactttctgggt

SEQ ID NO: 679184 - DNA, 75 bp, synthetic construct
  source 1..75: mol_type = other DNA
cgcggaatacgcttctccattccggggatcacccccaaaacactgagacatagctttgctatgcatctggcgatg

SEQ ID NO: 679185 - DNA, 75 bp, synthetic construct
  source 1..75: mol_type = other DNA
tcatttatttggtcatatcaggaatttcagaatatggcataaagcattaacagaccaacaaatggctgaggttat

SEQ ID NO: 679186 - DNA, 75 bp, synthetic construct
  source 1..75: mol_type = other DNA
tggagtgcgcgccagactttcaacggcgggatcaccggggcactgacagggaacgccgacaccgcgacgaaattg

SEQ ID NO: 679187 - DNA, 75 bp, synthetic construct
  source 1..75: mol_type = other DNA
caagtgggcaaatattactgcgatcgcgcaatggctaaaaagtttgtgctgaacttcaggcccggctatgccgcc

SEQ ID NO: 679188 - DNA, 75 bp, synthetic construct
  source 1..75: mol_type = other DNA
tgaacctgttaattacctcagtggatggtgataaaaccgcaggcgcggcgtcggtggatattggtgaattttacc

SEQ ID NO: 679189 - DNA, 75 bp, synthetic construct
  source 1..75: mol_type = other DNA
ggaaaccgtgatgaattaattgatacaactcaggcaaggccaattcagtattgcattaatggaacgtggtataac

SEQ ID NO: 679190 - DNA, 75 bp, synthetic construct
  source 1..75: mol_type = other DNA
accccgagcacttccagcggtggcggaattactaacgctcaattcacctatattaatcatggtgatgcttatgct

SEQ ID NO: 679191 - DNA, 75 bp, synthetic construct
  source 1..75: mol_type = other DNA
ctattatgatcaagtctccgatacaacacttgctgtttcggaaggtggtaaaatttctgcacctactattagttt

SEQ ID NO: 679192 - DNA, 75 bp, synthetic construct
  source 1..75: mol_type = other DNA
ctgggatatcaacgcgcggcggtggtgcacagcggcgggatggatgaagtttcattacacgcgccgacaatcgtt

SEQ ID NO: 679193 - DNA, 75 bp, synthetic construct
  source 1..75: mol_type = other DNA
tgaccgatcaaaacggaatcgcgacaacaagcgtgaaaggagcgatgacaggtagcgtcacggtaagcgcagtca

SEQ ID NO: 679194 - DNA, 75 bp, synthetic construct
  source 1..75: mol_type = other DNA
aatcacagagcgtttgccggacttgcttatgaactatgacgggatcaagtctgtcactccggagttctaccggga

SEQ ID NO: 679195 - DNA, 75 bp, synthetic construct
  source 1..75: mol_type = other DNA
tagatataacgctggtggcaggcccggctgacgcctcgcagtccgtccttaagaacaatcggtcatcactgaaag

SEQ ID NO: 679196 - DNA, 75 bp, synthetic construct
  source 1..75: mol_type = other DNA
gacggagagggtatcgcaacgctgatccccgtattgaatggtgttcatcaggcgggcctgagtaccacgatagaa

SEQ ID NO: 679197 - DNA, 75 bp, synthetic construct
  source 1..75: mol_type = other DNA
atattcatcttttgataaacctaatttggatattactgatatgaagagagattttgtaatacatccgttgtttga

SEQ ID NO: 679198 - DNA, 75 bp, synthetic construct
  source 1..75: mol_type = other DNA
ttagtttaagcaccaactctgagttagcgttaggtgcacaggaaggaagcgcagcgaaggctgcagggattattg

SEQ ID NO: 679199 - DNA, 75 bp, synthetic construct
  source 1..75: mol_type = other DNA
tcaatggtcagcttgatgtattgctgaaagggacgggttttctaaacgtttcaaatgccggtagtgaattgtatg

SEQ ID NO: 679200 - DNA, 75 bp, synthetic construct
  source 1..75: mol_type = other DNA
gtgcgaaaacccttaacggtatcgaacttatccatgtagacggtaagtctgagggcgaatttgttcaggctgggc

SEQ ID NO: 679201 - DNA, 75 bp, synthetic construct
  source 1..75: mol_type = other DNA
cccgcgagttccagccatttatggaagtgaactggctacataacagtaaggatttcagcactcgcatggatggcg

SEQ ID NO: 679202 - DNA, 75 bp, synthetic construct
  source 1..75: mol_type = other DNA
gtaaataatgacggcctgtatatcggctatggcctgacgcagcttgatttgcaggctactgacagcgatgccctg

SEQ ID NO: 679203 - DNA, 75 bp, synthetic construct
  source 1..75: mol_type = other DNA
tgataattctgcatttagcggcaaagtaacgattggccaaaatggagctttggggatcactcaaaatataggcac

SEQ ID NO: 679204 - DNA, 75 bp, synthetic construct
  source 1..75: mol_type = other DNA
gatcttttattcattcgttctcttggactttccagcggaagctacgctcattggctggccacaagttgtagccag

SEQ ID NO: 679205 - DNA, 75 bp, synthetic construct
  source 1..75: mol_type = other DNA
gtgtccaaccggttgtgatgaccgatcgcgccacctttatccgccgtgcttatatgcatctggctggggcagttg

SEQ ID NO: 679206 - DNA, 75 bp, synthetic construct
  source 1..75: mol_type = other DNA
tggcgaaacaggcagcgcagaaagtctcctgcaggccgttaacgctttgctggactggaattcatggtatggcct

SEQ ID NO: 679207 - DNA, 75 bp, synthetic construct
  source 1..75: mol_type = other DNA
tcaaggcttatttctctgtgggcgatcatgtatgcgcggtcgcagtggaaaaatagcaacggtgtattatgaggc

SEQ ID NO: 679208 - DNA, 75 bp, synthetic construct
  source 1..75: mol_type = other DNA
gtcacgagaaaagagagcccttatgttacgccaagacatcaagaaagggctcgtgggcggacaaataacggatca

SEQ ID NO: 679209 - DNA, 75 bp, synthetic construct
  source 1..75: mol_type = other DNA
cgctgtgtttcgagtcattggcgaactctacttaaacgttcccaaagagcataagtatcgcttctatattctgat

SEQ ID NO: 679210 - DNA, 75 bp, synthetic construct
  source 1..75: mol_type = other DNA
ggcatggaaggcgcgaaaaacgcttacagagcgtttcaggaggtcaggcgcgccgataccccttgttgttctttc

SEQ ID NO: 679211 - DNA, 75 bp, synthetic construct
  source 1..75: mol_type = other DNA
ccggttattcaggtggcctgtaagctggctggtgcggttcatttcgctgatgtgcagatcaacgtcgttcgctaa

SEQ ID NO: 679212 - DNA, 75 bp, synthetic construct
  source 1..75: mol_type = other DNA
ggagctcaacggttatcccggtttctgagcgcattcgcctctactcatccccggaagatatcggcacagatttcg

SEQ ID NO: 679213 - DNA, 75 bp, synthetic construct
  source 1..75: mol_type = other DNA
ttcagaatggactgattgctccgggtgtatggaacgggggcgaccttggtcagttgtcatcaggtgacacactgc

SEQ ID NO: 679214 - DNA, 75 bp, synthetic construct
  source 1..75: mol_type = other DNA
atggccgatgccgtgctgtcggtgatggccactaacggtatgcgcaccagtcaccacatcgccaataccattatt

SEQ ID NO: 679215 - DNA, 75 bp, synthetic construct
  source 1..75: mol_type = other DNA
gtcgccgcgtgcagcatcagggcgaaattttggtgcattactcattctcggcccgtccacaatcattccggtaag

SEQ ID NO: 679216 - DNA, 75 bp, synthetic construct
  source 1..75: mol_type = other DNA
acagcctgcagtatgaccgcgattacacctggaacgacaacggcgaactcatccgcatcagcagcccgcgccaga

SEQ ID NO: 679217 - DNA, 75 bp, synthetic construct
  source 1..75: mol_type = other DNA
gctcatggttttaatgttaaaataattgaaggagcttcatttaaccatggaggtacaagaaatcaagccattact

SEQ ID NO: 679218 - DNA, 75 bp, synthetic construct
  source 1..75: mol_type = other DNA
gggtataaattagggcaaagttataataagttgccaccaagtatagtgaaaaaattatctatgcataagcgatat

SEQ ID NO: 679219 - DNA, 75 bp, synthetic construct
  source 1..75: mol_type = other DNA
ggatgttgacggggatcctgcctttgatagggggggcgtcggcggctgcgtttgcaaccgaaaatgaagagggaa

SEQ ID NO: 679220 - DNA, 75 bp, synthetic construct
  source 1..75: mol_type = other DNA
atattgttgtaactcgctgggaaccaagcgagatttcactagttactgtacccgcagatattcatgcaggtattg

SEQ ID NO: 679221 - DNA, 75 bp, synthetic construct
  source 1..75: mol_type = other DNA
ccagtgacagcgaaatggtccgtacgggcaacgacaaagagatgtacaccgccacttataaccagaacttccgcg

SEQ ID NO: 679222 - DNA, 75 bp, synthetic construct
  source 1..75: mol_type = other DNA
gcaaacgagttcttattactggctccggaagaggtattggatttcttctggcaaagggcttaggtgattatggcg

SEQ ID NO: 679223 - DNA, 75 bp, synthetic construct
  source 1..75: mol_type = other DNA
cttcatatcgaaaacctttccgggaagcagttggataaagtgacccaattacggctgcgtgaccaaatagtagag

SEQ ID NO: 679224 - DNA, 75 bp, synthetic construct
  source 1..75: mol_type = other DNA
aacgctgacggtggataccggcgcagacaatgccgccggaaagctgacctttaacattgacgggctggcaagggc

SEQ ID NO: 679225 - DNA, 75 bp, synthetic construct
  source 1..75: mol_type = other DNA
atgttcagttgcgtggacaatatcacccggatgcaggtggcgctgatgcaccctctggatgtccatgatatcgcc

SEQ ID NO: 679226 - DNA, 75 bp, synthetic construct
  source 1..75: mol_type = other DNA
ttaacttcacgctatctgttttagaaaaaacagaagcaagcaagctgataaaagaacatgaaaaacaagagcata

SEQ ID NO: 679227 - DNA, 75 bp, synthetic construct
  source 1..75: mol_type = other DNA
tataaaaaaggcagcattgttagttctttcatttgcagcattatttgattttataatacttttgtttgattactc

SEQ ID NO: 679228 - DNA, 75 bp, synthetic construct
  source 1..75: mol_type = other DNA
gaaagagcaatacagcaaccccgttggttgaacgggtgggttaactttattcgttgttacgagcagatgcatgaa

SEQ ID NO: 679229 - DNA, 75 bp, synthetic construct
  source 1..75: mol_type = other DNA
ccggttattcaggtggcctgtaagctggcgggtgcggttcatttcgctgatgttcagatcaacgtcgttcgctaa

SEQ ID NO: 679230 - DNA, 75 bp, synthetic construct
  source 1..75: mol_type = other DNA
ggggcctcgctcattaattttcgtctttatgatgaggcgtttatttgtggtccggcggcgatgatggatgacgcg

SEQ ID NO: 679231 - DNA, 75 bp, synthetic construct
  source 1..75: mol_type = other DNA
gtgacggacaaaaagtgactgtacgtcaggatgggcgggatcgggaaatcgtgcttaatgccgacgatgaaagca

SEQ ID NO: 679232 - DNA, 75 bp, synthetic construct
  source 1..75: mol_type = other DNA
atatcctcagcgtttacagttgttgtgcattttcagtcaggaaaccctcgacagcgatctgcttcacgggcgtat

SEQ ID NO: 679233 - DNA, 75 bp, synthetic construct
  source 1..75: mol_type = other DNA
ctcccggtattgaaacgtcgaatattcagttagcgaattccgctgagcaaacagtgacttttaaagttgattata

SEQ ID NO: 679234 - DNA, 75 bp, synthetic construct
  source 1..75: mol_type = other DNA
gtgcagcgaaaggcgtagctattcgtttatataaccgtgcagataacactcaggtcaagttatatgaaaattctg

SEQ ID NO: 679235 - DNA, 75 bp, synthetic construct
  source 1..75: mol_type = other DNA
gcgcagattatccagcaggcgggcaactccgtgctgtctaaagccaaccaggtaccgcagcaagttctgtctctg

SEQ ID NO: 679236 - DNA, 75 bp, synthetic construct
  source 1..75: mol_type = other DNA
cattgacacgaccgctgttacctactcgaacggcgtggccaccgccaccactgcctctgcacatggtctgactgc

SEQ ID NO: 679237 - DNA, 75 bp, synthetic construct
  source 1..75: mol_type = other DNA
aaaccaagaaaaaacccgtttaaccttcgccggtttgaaatataacgagttaggatcatttgactatgccgtaac

SEQ ID NO: 679238 - DNA, 75 bp, synthetic construct
  source 1..75: mol_type = other DNA
atacccttcagcagtccggcggcgaagacggtggcagtgtggtgttcccgccggtgctggtgcagatgctcgacc

SEQ ID NO: 679239 - DNA, 75 bp, synthetic construct
  source 1..75: mol_type = other DNA
atgagcctcttttcaaaaaatgattatgccggtgcgcttggcgcgttgctgccgacgggcagggcgtggcccaga

SEQ ID NO: 679240 - DNA, 75 bp, synthetic construct
  source 1..75: mol_type = other DNA
gtggtgacgggctaaatggggatgactggccatttgtctggctggtagaggcggaagacacaacgataacttatg

SEQ ID NO: 679241 - DNA, 75 bp, synthetic construct
  source 1..75: mol_type = other DNA
tacaccgtatctggggcggaggagttgtccgctaacacaaccgctttttctcgggacatgtggtgatgctgccaa

SEQ ID NO: 679242 - DNA, 75 bp, synthetic construct
  source 1..75: mol_type = other DNA
gctgccgtcggtgaacacagcgctgaactactcagccgactggtacggcctggttatcgccgatactgcaatgac

SEQ ID NO: 679243 - DNA, 75 bp, synthetic construct
  source 1..75: mol_type = other DNA
ggggccacctcagcaattggtattcctgttgctgccggcactggcactgacctggcgccgctgctgggcattgac

SEQ ID NO: 679244 - DNA, 75 bp, synthetic construct
  source 1..75: mol_type = other DNA
cgatacgctcaaggcaaaaaactgcaacgtatttgtgcgctacgccaacgataccgccatcatccaggaaggcgt

SEQ ID NO: 679245 - DNA, 75 bp, synthetic construct
  source 1..75: mol_type = other DNA
agatcatcagcacgacttcgacgaccgatgttgcgtctaaattaaaggccggtaagtattcccgtacctttattc

SEQ ID NO: 679246 - DNA, 75 bp, synthetic construct
  source 1..75: mol_type = other DNA
ggtggccctatcgggcaactgaattccggcgatacgctgacaaaaggttattacgtgtatgcgcaacctctttcc

SEQ ID NO: 679247 - DNA, 75 bp, synthetic construct
  source 1..75: mol_type = other DNA
cgaacggtgacttcttcgacgagcgccacgggctcgactggttgcagaactacgttcagaccaacctctataacc

SEQ ID NO: 679248 - DNA, 75 bp, synthetic construct
  source 1..75: mol_type = other DNA
tggccatgaatggcgttggatgccgcgcaaccgcccgcattatgggcgttggcctcaacgcgattttccgccagt

SEQ ID NO: 679249 - DNA, 75 bp, synthetic construct
  source 1..75: mol_type = other DNA
aaaaatggcgaaatcagacgggtatcgtgcaatgaatatgtatccgcacgatgtcattatgcaggaagctaataa

SEQ ID NO: 679250 - DNA, 75 bp, synthetic construct
  source 1..75: mol_type = other DNA
tatgccgcagcctctgcctttggtcgcgcgttcacagtaaatttcctgggtaacaacaccaccattaccctgaaa

SEQ ID NO: 679251 - DNA, 75 bp, synthetic construct
  source 1..75: mol_type = other DNA
ccgtgaggcgcgaaaagctccggtgatccaggtggcaaccaaactgacgggtgctatccacttcgctgacgtatt

SEQ ID NO: 679252 - DNA, 75 bp, synthetic construct
  source 1..75: mol_type = other DNA
cgccagtgcacgcattattggcgttggcctcaacacgattttccgccacttaaaaactcaggccgcagtcggtaa

SEQ ID NO: 679253 - DNA, 75 bp, synthetic construct
  source 1..75: mol_type = other DNA
gcaaagtggatggtgcctgggagctgtcagataatcttaaagagttacgtttacgccacctcgaaccgaaacgtg

SEQ ID NO: 679254 - DNA, 75 bp, synthetic construct
  source 1..75: mol_type = other DNA
ttcgtgcgttgaccgccgtcgagaacactgcaactcagttggccgctgaagttaggcaatcgcagcctttccagg

SEQ ID NO: 679255 - DNA, 75 bp, synthetic construct
  source 1..75: mol_type = other DNA
aaaatgtgttttctgaaactaaaaaattatcgaataaaaataatgacgatcagttttttgaatgcgctaaaagaa

SEQ ID NO: 679256 - DNA, 75 bp, synthetic construct
  source 1..75: mol_type = other DNA
aatttatcgacattattttgaataccaaccgacatatatacgtaatcggtcccgcgtcttcctatgcgatggcga

SEQ ID NO: 679257 - DNA, 75 bp, synthetic construct
  source 1..75: mol_type = other DNA
gctggcatcacgcattcaggtaaaagaaaagattaccacggaacaaattgtttccgaatttaataagaatgttac

SEQ ID NO: 679258 - DNA, 75 bp, synthetic construct
  source 1..75: mol_type = other DNA
gttactggttttaccgcaatgatgaatttgtctttgactacagactcaaagcggaagatgagcgtgatgcccttc

SEQ ID NO: 679259 - DNA, 75 bp, synthetic construct
  source 1..75: mol_type = other DNA
atgcgtctggaagccagtgccgtttctggtcaggcgatggtgtcggacaatcaggatttaggttttattgtcgcc

SEQ ID NO: 679260 - DNA, 75 bp, synthetic construct
  source 1..75: mol_type = other DNA
ctggtcaggcgatggtgtcggacaatcaggatttaggttttattgtggccgatcagaacgatacgccgatcacgc

SEQ ID NO: 679261 - DNA, 75 bp, synthetic construct
  source 1..75: mol_type = other DNA
ggctgaagcgggtggtgaaaaaggaacacgcggacggcagcgtcacgcagagtcagtttgacgccgtgggcaggc

SEQ ID NO: 679262 - DNA, 75 bp, synthetic construct
  source 1..75: mol_type = other DNA
gaatcgctgcaaaccaacttctttggtttcaacagtggcggcaagatgagcggccttttcgacttcgtgctggtg

SEQ ID NO: 679263 - DNA, 75 bp, synthetic construct
  source 1..75: mol_type = other DNA
ttgaagctcgccacttcgatcaggtcagacggctaacaagatcatctgatgaaaccccggtagtttctgttcatt

SEQ ID NO: 679264 - DNA, 75 bp, synthetic construct
  source 1..75: mol_type = other DNA
ggctcactgacagagaaagactgctcttttggagaagctagcgaagacatcgaggtgcaagtcacattcgcagat

SEQ ID NO: 679265 - DNA, 75 bp, synthetic construct
  source 1..75: mol_type = other DNA
attaaaaggaatggatgagtattcaaaattccaaaaactactggtagatgattatttcatttatatgatatcatt

SEQ ID NO: 679266 - DNA, 75 bp, synthetic construct
  source 1..75: mol_type = other DNA
ctacaaaatggccgatggcggcggtttgtaccttgaggtttcggccaaaggatcaaaatattggcgtatgaaata

SEQ ID NO: 679267 - DNA, 75 bp, synthetic construct
  source 1..75: mol_type = other DNA
gcgctttgcccgctgggatgaaattgacctgcataacgccatgtggaccatccccgctgagcgtgagccgatccc

SEQ ID NO: 679268 - DNA, 75 bp, synthetic construct
  source 1..75: mol_type = other DNA
tctcctcacctggtacctctgtcgcatcaggccatcgaactgctgcgcgaggtgcggcagcattgccgaccggga

SEQ ID NO: 679269 - DNA, 75 bp, synthetic construct
  source 1..75: mol_type = other DNA
cattccatttcaatgatggtgctataggttttaaaaacagaagattaaacattagtaattttcatattactactt

SEQ ID NO: 679270 - DNA, 75 bp, synthetic construct
  source 1..75: mol_type = other DNA
atctggaagaacgccgactgatgctacagtggtgggcagattttctgaatgcgaacagagagaaatgtatcagtc

SEQ ID NO: 679271 - DNA, 75 bp, synthetic construct
  source 1..75: mol_type = other DNA
gaaaccattgctcgtgaatggcatgccagcaacaagcgctggagtgaagaccatcgatctcgcgttcttcgatat

SEQ ID NO: 679272 - DNA, 75 bp, synthetic construct
  source 1..75: mol_type = other DNA
ttaacagctatgcgggaaaataaagaatctgaatttatgttttatgatgatatcaaagttcatgaacttgatcaa

SEQ ID NO: 679273 - DNA, 75 bp, synthetic construct
  source 1..75: mol_type = other DNA
atcattaataatatcagtgataaatacaaggagcgtatggaccgtttacttaatcttgtgtcctatgaacaagga

SEQ ID NO: 679274 - DNA, 75 bp, synthetic construct
  source 1..75: mol_type = other DNA
tccataaaaaaatagcagaaaactctgcacagattaaccttatactcatcaataacaatttgaataatttttttt

SEQ ID NO: 679275 - DNA, 75 bp, synthetic construct
  source 1..75: mol_type = other DNA
cctatgaaatatcgcagcgaaaatatattgttacgaattccgctgattatgataaatattctgacatagtcaaaa

SEQ ID NO: 679276 - DNA, 75 bp, synthetic construct
  source 1..75: mol_type = other DNA
acgctgtagcacttcgctcgtacagagatggcccatttgaaacactggacgcatctccggaaaataccctttcac

SEQ ID NO: 679277 - DNA, 75 bp, synthetic construct
  source 1..75: mol_type = other DNA
ggtaaaattcctggggaaatcagaagccggtaaaccttttattggggacgatggtaatattagcgataactactt

SEQ ID NO: 679278 - DNA, 75 bp, synthetic construct
  source 1..75: mol_type = other DNA
ttaacactagctcatttatagatagtggaaattgtaatgaaagaaaatcttctgaatccatggatctactagctt

SEQ ID NO: 679279 - DNA, 75 bp, synthetic construct
  source 1..75: mol_type = other DNA
taactgtttattgcatcatagtccctattattgtttcatactcaagtgctttatttattaaattttatggctaca

SEQ ID NO: 679280 - DNA, 75 bp, synthetic construct
  source 1..75: mol_type = other DNA
ccggaataaagaagtgtggaaagcattaaaaacaggtttcaaagatgcaagcatcgggacattagtaactgtttc

SEQ ID NO: 679281 - DNA, 75 bp, synthetic construct
  source 1..75: mol_type = other DNA
aaggttgatgcgcttaaaagcattaatcttgatatcaataaaggcgaatttctcgcactgtgtgggccgtcaggc

SEQ ID NO: 679282 - DNA, 75 bp, synthetic construct
  source 1..75: mol_type = other DNA
gccgtctggaaaagctggtcggttcagagccgcgtatcaaacaggtagcggccgatctggttcaacattttgaaa

SEQ ID NO: 679283 - DNA, 75 bp, synthetic construct
  source 1..75: mol_type = other DNA
cctttgaggcctgtcaggcaaataaatccgcctggctgcaacgcagggaagaactgacgcaggccgaacaggcat

SEQ ID NO: 679284 - DNA, 75 bp, synthetic construct
  source 1..75: mol_type = other DNA
cagccagcttgccagcccgttaaccagcgtttcttcaacgttcgtgtattcacaccctactataaccctgaagcc

SEQ ID NO: 679285 - DNA, 75 bp, synthetic construct
  source 1..75: mol_type = other DNA
atcagattatcgccgtgattaaatcgtttgaatacgggcgaactgttaaagatgtggcttatctgaagccactta

SEQ ID NO: 679286 - DNA, 75 bp, synthetic construct
  source 1..75: mol_type = other DNA
tacaaaaacattactaggacataaagtccaagcaaccaccgaccgctataacgatactcgaggtcaggaatgggt

SEQ ID NO: 679287 - DNA, 75 bp, synthetic construct
  source 1..75: mol_type = other DNA
agatggggacattacgtaccgatgcggatggcgcgctgggcaacacccgggaactgaacatcagcaacgcggcca

SEQ ID NO: 679288 - DNA, 75 bp, synthetic construct
  source 1..75: mol_type = other DNA
tgacgtaccggcgtgaggccgccggtgacctggccggggaaatcaccggcgtgacggacggtgccgggcgggagt

SEQ ID NO: 679289 - DNA, 75 bp, synthetic construct
  source 1..75: mol_type = other DNA
ctctggtctacgacacccgcaaattcaattcattgcgccccatcgcaggcctgataagcgtagcgcatcaggcaa

SEQ ID NO: 679290 - DNA, 75 bp, synthetic construct
  source 1..75: mol_type = other DNA
gtttacgtaccgggcggaggtgggggctgacccgcaactcactaagcttttcactgagccgttcaagtttagttt

SEQ ID NO: 679291 - DNA, 75 bp, synthetic construct
  source 1..75: mol_type = other DNA
atgctaagcgaagacgatttagaacagcaatgcctgcaatggtttgctgaacagggctgggacgtgctgcacggg

SEQ ID NO: 679292 - DNA, 75 bp, synthetic construct
  source 1..75: mol_type = other DNA
acaacttaagacatttatatctcaactgaaaaaagataaaaatcaccgatttattaaagagtacatggacactga

SEQ ID NO: 679293 - DNA, 75 bp, synthetic construct
  source 1..75: mol_type = other DNA
taaaatcaattgaagaagttaacactatttgtaatcctgcaatacatcaattgcaaacacatttacgacaaattt

SEQ ID NO: 679294 - DNA, 75 bp, synthetic construct
  source 1..75: mol_type = other DNA
ctggtaagcggaccgtttttagtagtctgcttaggttttattatttataagataatcagcgcacaaaaaagtaga

SEQ ID NO: 679295 - DNA, 75 bp, synthetic construct
  source 1..75: mol_type = other DNA
agaagtcactgccggacgtgctgggctggaaatattcaggcaaccgcattatgccagaaacactcccgaaaaatc

SEQ ID NO: 679296 - DNA, 75 bp, synthetic construct
  source 1..75: mol_type = other DNA
caactagctagctttggtaaaaacattgaatttcatttcacagacataagctactggaatccatcattaatttct

SEQ ID NO: 679297 - DNA, 75 bp, synthetic construct
  source 1..75: mol_type = other DNA
caaggtcatcatttgtgaacaaattagcgataacaaatacttcgagatattatcttcattagactattgctatga

SEQ ID NO: 679298 - DNA, 75 bp, synthetic construct
  source 1..75: mol_type = other DNA
cgatgagcaaagcctggtcactatgtaacacgctggatgaggccgaacctttgcaggaagagttcgcgtttcttt

SEQ ID NO: 679299 - DNA, 75 bp, synthetic construct
  source 1..75: mol_type = other DNA
aacggtcgatgccagggaagcctttgcgattctgctggaaaaaatggatgtcattcatgggatgtttgcccgttc

SEQ ID NO: 679300 - DNA, 75 bp, synthetic construct
  source 1..75: mol_type = other DNA
gtttcctgccgtggaaaaccgtggctaacgaagacgacaagccgcagtttgactggcagcttaaaacggtagtgc

SEQ ID NO: 679301 - DNA, 75 bp, synthetic construct
  source 1..75: mol_type = other DNA
tcatatacgcttatttgataggtggcaaagctatgtaaatacactaaatagcggccacataaaagatattttatc

SEQ ID NO: 679302 - DNA, 75 bp, synthetic construct
  source 1..75: mol_type = other DNA
gacagtcgatgctcatgaagcgttctccatcctgcttgaaaagctggatgtgattcatggaatgtttgccaaaac

SEQ ID NO: 679303 - DNA, 75 bp, synthetic construct
  source 1..75: mol_type = other DNA
cgcggtgtttggtgattacgtctctatctacgatatacaggatgcggtggaagatggcgcaaccgtgcctatcta

SEQ ID NO: 679304 - DNA, 75 bp, synthetic construct
  source 1..75: mol_type = other DNA
caaagccaatttgcacggaacacgcagccacacggttggtaggtggtcgtagaccttcggtgttacagcgatggg

SEQ ID NO: 679305 - DNA, 75 bp, synthetic construct
  source 1..75: mol_type = other DNA
tccacgttcaacagctccatcatgtttttgccgtccgttcaccgctaaaacggctcagaaatcgggacaggatgt

SEQ ID NO: 679306 - DNA, 75 bp, synthetic construct
  source 1..75: mol_type = other DNA
tctgtctggttgtgcctctaaaatcacccagccagataaatattctggttttttaggtaatgctgccaacttact

SEQ ID NO: 679307 - DNA, 75 bp, synthetic construct
  source 1..75: mol_type = other DNA
agcgcacgcagtatgaagtgtatgactaccccggacgtttcaagagcgcccacgggcagaactttgcccgctggc

SEQ ID NO: 679308 - DNA, 75 bp, synthetic construct
  source 1..75: mol_type = other DNA
caacaggactttgtgcagtggacacaggagtcggcggaatcagtcgtgccggatgcagacggtaaaggcgcaggc

SEQ ID NO: 679309 - DNA, 75 bp, synthetic construct
  source 1..75: mol_type = other DNA
gttataatcgtgaagctagcattcaaggggctgtactttctgttttaaaccaagttggtaatcataatatcgagg

SEQ ID NO: 679310 - DNA, 75 bp, synthetic construct
  source 1..75: mol_type = other DNA
gatgttttggcttcataagcggcaagtgtctgcaaatcagatcacacttgccgctttggcactttctcttctcac

SEQ ID NO: 679311 - DNA, 75 bp, synthetic construct
  source 1..75: mol_type = other DNA
tgttatttccgatattgcgctctatttaccgtttttatttttaccggaaagtaacgcatcactcgtaatactcat

SEQ ID NO: 679312 - DNA, 75 bp, synthetic construct
  source 1..75: mol_type = other DNA
ctgcactggcgctttctcttcttaccggtttgctgttgatgttggtgtcacaacccatcctctttttgctattgc

SEQ ID NO: 679313 - DNA, 75 bp, synthetic construct
  source 1..75: mol_type = other DNA
tgcagccccctgaaaacaattctggcgcgtttttttggtctggcctgttgtttccctgtctttttgcgttttttg

SEQ ID NO: 679314 - DNA, 75 bp, synthetic construct
  source 1..75: mol_type = other DNA
tatccgcaaggtaaatatgatttggagttactcacaagactaacaggacaacttccgaggaatcaagcaagagca

SEQ ID NO: 679315 - DNA, 75 bp, synthetic construct
  source 1..75: mol_type = other DNA
gagcaatcacaccaacttcagcagcctgaagccgattccgccattcagcgggaagccgatcgggtagtcccggaa

SEQ ID NO: 679316 - DNA, 75 bp, synthetic construct
  source 1..75: mol_type = other DNA
gaagtcagtgagtcgtctgctgacaacaaggcagacaaaacggatatccggaaaacggcggaagagaaagtgaag

SEQ ID NO: 679317 - DNA, 75 bp, synthetic construct
  source 1..75: mol_type = other DNA
aaactggattatttgactttctggacaaaattttaataacccgtcctttcgctattgtatccaataactgctggg

SEQ ID NO: 679318 - DNA, 75 bp, synthetic construct
  source 1..75: mol_type = other DNA
gggcagaattatcctggcatttacgccagcgtactacctcaaagacgaaagccttatataacaaaagctgaatat

SEQ ID NO: 679319 - DNA, 75 bp, synthetic construct
  source 1..75: mol_type = other DNA
atgtccgctacctcaacccacaaacggggattgccgacaaatgtaacttctgcgccgatactcgcctggaggtcg

SEQ ID NO: 679320 - DNA, 75 bp, synthetic construct
  source 1..75: mol_type = other DNA
tagctgatgagattaatatcccaggcgttttcacaatcgggggcatggtacccccacatctattgaatccgcaac

SEQ ID NO: 679321 - DNA, 75 bp, synthetic construct
  source 1..75: mol_type = other DNA
ggcttggggcaattttgaatgagactggtgatgttatttccgatattgcgctctatttaccatttttatttttac

SEQ ID NO: 679322 - DNA, 75 bp, synthetic construct
  source 1..75: mol_type = other DNA
tgagagcaatggtaatatttacccgggagatgtattgttcaacttcagacacagatattatctcaagtatatcaa

SEQ ID NO: 679323 - DNA, 75 bp, synthetic construct
  source 1..75: mol_type = other DNA
gctatagctaatataaacacggatttttcaaatggtatacaaaataccatcaatgagataaataatgaaatacct

SEQ ID NO: 679324 - DNA, 75 bp, synthetic construct
  source 1..75: mol_type = other DNA
cagagtgttaatgtcaaaagtaataatgcaaataactggcatctgaccattatcgatgaccatggcaactatatt

SEQ ID NO: 679325 - DNA, 75 bp, synthetic construct
  source 1..75: mol_type = other DNA
gtgacgatttcggatgtcaaagctaataatgtcaaagtcaattatgaaactattatgattgcccccttagaaagt

SEQ ID NO: 679326 - DNA, 75 bp, synthetic construct
  source 1..75: mol_type = other DNA
caacggcaagcgaagcgccttacatcctcgatggcctgctgatgaacgatgctggacgccatatccgcgagcagt

SEQ ID NO: 679327 - DNA, 75 bp, synthetic construct
  source 1..75: mol_type = other DNA
gtgccgatttctgaggaactggagaaaaaagttaaagaggaggccagcgccaaattattcaaagttgattatgag

SEQ ID NO: 679328 - DNA, 75 bp, synthetic construct
  source 1..75: mol_type = other DNA
tatgattatgtcactaaaaattttggatatgatgacgttataattgaagcacctgaagctaaagcttcaacatta

SEQ ID NO: 679329 - DNA, 75 bp, synthetic construct
  source 1..75: mol_type = other DNA
aagggaacactcgcgttcgggttgataacattggcggcgtcggtgcacaaacggtcaacggtattgaactcattg

SEQ ID NO: 679330 - DNA, 75 bp, synthetic construct
  source 1..75: mol_type = other DNA
tagggtgttatcgttatttctaaaagtaatatatatttattcattatatgcgatatttacttcatatataaaaac

SEQ ID NO: 679331 - DNA, 75 bp, synthetic construct
  source 1..75: mol_type = other DNA
gctatcctatcattgacactttccgttattaccatttatgttaacaaagggatagttcatggcgaatatcaagga

SEQ ID NO: 679332 - DNA, 75 bp, synthetic construct
  source 1..75: mol_type = other DNA
cctctggcagcagtattttacattgcatcttcaattatcattgttaaaatatttactgcaataccgattttgcga

SEQ ID NO: 679333 - DNA, 75 bp, synthetic construct
  source 1..75: mol_type = other DNA
ctgacttcaacagcgacgattacgcgattgcctgctgcgtcagcccaatggtgattggtaagcaaatgcagttct

SEQ ID NO: 679334 - DNA, 75 bp, synthetic construct
  source 1..75: mol_type = other DNA
agatagtttctacggtaagcatttctcaagaacacataacaatcctcaacgatgttctaacggcgcatactgagg

SEQ ID NO: 679335 - DNA, 75 bp, synthetic construct
  source 1..75: mol_type = other DNA
tcaagttttacgttctggcagaaggtgactcatatcccgatccgcataatgataatcggtatgtcggtgcatatg

SEQ ID NO: 679336 - DNA, 75 bp, synthetic construct
  source 1..75: mol_type = other DNA
gcgggcctgacagtagcggcggttggtaaaatgtctgccagcgagttgtcagagttgaaggctctaatggctgtt

SEQ ID NO: 679337 - DNA, 75 bp, synthetic construct
  source 1..75: mol_type = other DNA
tgaatgccgggaataatctgtctgttgtcgcaaccggcaaaaacaggggcgataaccgcggagatattgtgattg

SEQ ID NO: 679338 - DNA, 75 bp, synthetic construct
  source 1..75: mol_type = other DNA
agagtgccagcaccatcggctccactgccggtaatgtcagtattaccgcgggcaaacaggctcatatcagcggtt

SEQ ID NO: 679339 - DNA, 75 bp, synthetic construct
  source 1..75: mol_type = other DNA
gctattgatgctgcattctatgcaccaaccaagcaattaaccgtaacctattggcagaaagttttcggttcttca

SEQ ID NO: 679340 - DNA, 75 bp, synthetic construct
  source 1..75: mol_type = other DNA
tcattaaagcgaatgattccatcaggtagtctggctaaaggaactgctcttcgctcgttaaacgatattgatgtg

SEQ ID NO: 679341 - DNA, 75 bp, synthetic construct
  source 1..75: mol_type = other DNA
agaaagcaaagctattgaaagaatgcttcacttcatgcacgggattttatcaaaagacgaaccgagaaaatattg

SEQ ID NO: 679342 - DNA, 75 bp, synthetic construct
  source 1..75: mol_type = other DNA
ttggagctgcccgccccgttttgttattaattgcccgtatcgccgtggtcttaattttcattattttggttttcc

SEQ ID NO: 679343 - DNA, 75 bp, synthetic construct
  source 1..75: mol_type = other DNA
cagcttttctggacaatgttggcgttaccagcctgacgtttatgaaaaacaatggcgaaatgccgcttgatgctg

SEQ ID NO: 679344 - DNA, 75 bp, synthetic construct
  source 1..75: mol_type = other DNA
gccaccaatagcacgtctgaaaagctcgcagcgacgcctaaggctgttaaggctgcatatgacctggctgacgga

SEQ ID NO: 679345 - DNA, 75 bp, synthetic construct
  source 1..75: mol_type = other DNA
aatatggcgcaaagcggtccgctcaaagagtttgttattccggggaaaaatctgccatcggcacagctacacgtt

SEQ ID NO: 679346 - DNA, 75 bp, synthetic construct
  source 1..75: mol_type = other DNA
cccgtcaggaaagcttcctgatatgcggggatggacaatcaaggggaaacccgccagcggtcgggcggtattatc

SEQ ID NO: 679347 - DNA, 75 bp, synthetic construct
  source 1..75: mol_type = other DNA
caggccacttagcacaaccattgatctgaataccctggggaatgcaggtgatatcggcatatggaggaacagtaa

SEQ ID NO: 679348 - DNA, 75 bp, synthetic construct
  source 1..75: mol_type = other DNA
ccgtggccatcagatactgtgccgtctggttacgccctgatgcagggacagacttttgataaatctgcatacccg

SEQ ID NO: 679349 - DNA, 75 bp, synthetic construct
  source 1..75: mol_type = other DNA
cacgcccagacgctggccgccttcgaggaactgtggcgcgagggcaaagactacaacttgtttatcgtcggcaaa

SEQ ID NO: 679350 - DNA, 75 bp, synthetic construct
  source 1..75: mol_type = other DNA
gaggctgacggcagcacgcagatttttaccgtaccctattcgtcagtcccgcttttgcaacgtgaagggcatact

SEQ ID NO: 679351 - DNA, 75 bp, synthetic construct
  source 1..75: mol_type = other DNA
ggtaactatggcagtgggacggacagcagtcaggtcggttatttcagccgtgtcgatgacgcgactcactatcag

SEQ ID NO: 679352 - DNA, 75 bp, synthetic construct
  source 1..75: mol_type = other DNA
gctacgtaatagcatcgctatttttgcgctaaccacgctgtttattttattggtgcagagttacggctggttcac

SEQ ID NO: 679353 - DNA, 75 bp, synthetic construct
  source 1..75: mol_type = other DNA
ccagccgaattttctgaatctgcattacaaatgatgaaaacggtgggtcagttgcgtaataaccttcagcatttt

SEQ ID NO: 679354 - DNA, 75 bp, synthetic construct
  source 1..75: mol_type = other DNA
atccgatggtgctggcgtataaggtgcatccggaggatttggagcgtattctgcgtctagcggaaagctatggcc

SEQ ID NO: 679355 - DNA, 75 bp, synthetic construct
  source 1..75: mol_type = other DNA
tacccgtactctaattaaatctgctgataccgcagaacgttacgtacaggatgcaatggtacgtggtgctggtct

SEQ ID NO: 679356 - DNA, 75 bp, synthetic construct
  source 1..75: mol_type = other DNA
tctggctctgcatgcggatcctgaatcccctgaatcctacatgttgcgcccaaaacaccgcaggtgggtgaatga

SEQ ID NO: 679357 - DNA, 75 bp, synthetic construct
  source 1..75: mol_type = other DNA
cagcggatgatccacaccatgtcattggtcacggcatgggcggtaccgccactaaagcccacgatttgtttgtga

SEQ ID NO: 679358 - DNA, 75 bp, synthetic construct
  source 1..75: mol_type = other DNA
taaaaaccaagcgtgatgtaagattgtttttatggatggcaggaaacgatgttgctattgaaaattaccggcaaa

SEQ ID NO: 679359 - DNA, 75 bp, synthetic construct
  source 1..75: mol_type = other DNA
aatattattacgtctcaaagtccggcaacagctattaatgtagcatttactttaatagaaaagctgacatctaga

SEQ ID NO: 679360 - DNA, 75 bp, synthetic construct
  source 1..75: mol_type = other DNA
ccgtgccggaaatgcatttcccatcgcccgacagtcctcttggattctctgttgtgaccacgcctgccgatgcaa

SEQ ID NO: 679361 - DNA, 75 bp, synthetic construct
  source 1..75: mol_type = other DNA
gttctgtctggtttgatggatgatcagaaaaaggcgtaccgcctggcagataatcgcctgccgatgaatgctggc

SEQ ID NO: 679362 - DNA, 75 bp, synthetic construct
  source 1..75: mol_type = other DNA
cggataacagtgaaattctttatcgacctgtagataatgctcctccgctatatagtgaaagggctgcaattgaga

SEQ ID NO: 679363 - DNA, 75 bp, synthetic construct
  source 1..75: mol_type = other DNA
aattatcttttcctaatagaatctcggggccaatcttggaaacaagtcttagcgatgtttcgattggtgagattt

SEQ ID NO: 679364 - DNA, 75 bp, synthetic construct
  source 1..75: mol_type = other DNA
tgaacaggtgaccaacggcgtttttgggagagatttacgttaccaccgcccgcgccctgcgtcgctgcggcgttc

SEQ ID NO: 679365 - DNA, 75 bp, synthetic construct
  source 1..75: mol_type = other DNA
gtacgcagaatacgatgaatggggtaaccagctgaatgaagagaacccgcaccagctgcagcagctcatccgcct

SEQ ID NO: 679366 - DNA, 75 bp, synthetic construct
  source 1..75: mol_type = other DNA
ggcctgaagaacaagcgcggtacggtggcaatggcaagaacacaagcgccgcacagtgctaccagtcaatttttt

SEQ ID NO: 679367 - DNA, 75 bp, synthetic construct
  source 1..75: mol_type = other DNA
ttttataccgtgttactggaaggggaagatgaatcagacccactgggtgatgaaattcgctcaatccttgatggc

SEQ ID NO: 679368 - DNA, 75 bp, synthetic construct
  source 1..75: mol_type = other DNA
gtaaaacagcgccagtcaacacctccattccgtcagtagtaaaagttgagtttgggaaggtaaaaattcatggag

SEQ ID NO: 679369 - DNA, 75 bp, synthetic construct
  source 1..75: mol_type = other DNA
tcaaacaagaacgctaataaagttcaacaattaggatttaataataagcaattagaatcaaatttatatttagat

SEQ ID NO: 679370 - DNA, 75 bp, synthetic construct
  source 1..75: mol_type = other DNA
cgtcaaatactctgaagcaattgataaaattaaaagagagcttgagtctcaagagtataataaaattcataagaa

SEQ ID NO: 679371 - DNA, 75 bp, synthetic construct
  source 1..75: mol_type = other DNA
aggcgcaggtggcgcgagctattttgccgaacagatggatacccacctggactgggccacactgcactggatccg

SEQ ID NO: 679372 - DNA, 75 bp, synthetic construct
  source 1..75: mol_type = other DNA
cactgaattacgtctattttgatccggcttacgcgtgggtttttgcccaagcccgctctcgtaaggttccgttag

SEQ ID NO: 679373 - DNA, 75 bp, synthetic construct
  source 1..75: mol_type = other DNA
aatcgtcttttagaacaacatggcatcacaaacattgttcgaattgatgctgatgattttcgctggtggttcccc

SEQ ID NO: 679374 - DNA, 75 bp, synthetic construct
  source 1..75: mol_type = other DNA
caggatgattcccagtatccagggatggatacaaagacagcaagtgattacctgccacagacaaattggccaaca

SEQ ID NO: 679375 - DNA, 75 bp, synthetic construct
  source 1..75: mol_type = other DNA
gttatgtttgtcgcgacatatttttggtcaatcaacaatggcttgttagacattattatcaagatcgtagtcggt

SEQ ID NO: 679376 - DNA, 75 bp, synthetic construct
  source 1..75: mol_type = other DNA
ttggattgcagaagctaaaattggttatggataccagaaaatttttgaaggtttattacaactattaacacgata

SEQ ID NO: 679377 - DNA, 75 bp, synthetic construct
  source 1..75: mol_type = other DNA
cccgggacagatcctgttaaaaagcacgaatatgcagaagatgggaccaacaagtcttgatattgcgtctgttga

SEQ ID NO: 679378 - DNA, 75 bp, synthetic construct
  source 1..75: mol_type = other DNA
cagcgtatgctgggcaaaaacgtcctgcagccgatcggctgggacgcgtttggtctgcctgcggaaggcgcggcg

SEQ ID NO: 679379 - DNA, 75 bp, synthetic construct
  source 1..75: mol_type = other DNA
tatgtgaatacagaaacaatgataaaaaaccttacgttaatttgcaattttttgtccctgttataccgctcagcg

SEQ ID NO: 679380 - DNA, 75 bp, synthetic construct
  source 1..75: mol_type = other DNA
attacttactactctccctcaataaaaaatagcgaaaatgtttttatcaaaacattttcttgtccgcaagaaaat

SEQ ID NO: 679381 - DNA, 75 bp, synthetic construct
  source 1..75: mol_type = other DNA
gtggacaataatctgacaccggaacaaacacaggctggactggataagatagcgaaaggtgatatgccggacagc

SEQ ID NO: 679382 - DNA, 75 bp, synthetic construct
  source 1..75: mol_type = other DNA
gtgataaacaaccatgctgagaccattggcaacaatcagatgattgcggttaccaacaatcagatacagacggtg

SEQ ID NO: 679383 - DNA, 75 bp, synthetic construct
  source 1..75: mol_type = other DNA
cagatacagacggttggtgtcaaccaggtggaaacggtgggcagtaaccagattatcaaagtgggatcaaaccag

SEQ ID NO: 679384 - DNA, 75 bp, synthetic construct
  source 1..75: mol_type = other DNA
cgaccgctggtggaatgcaaacagtagatataacgctggtggcaggcccggcagacgcctcgcagtccgtcctta

SEQ ID NO: 679385 - DNA, 75 bp, synthetic construct
  source 1..75: mol_type = other DNA
aaccgttggtcaaccatttctctaaagccaattttataaataagatgatatatgcatataagcatatagttcctg

SEQ ID NO: 679386 - DNA, 75 bp, synthetic construct
  source 1..75: mol_type = other DNA
aataagaacaaagaaataaggtctatatggatagcaaaagataaaatggaattgctgcaggctaggaatagtgga

SEQ ID NO: 679387 - DNA, 75 bp, synthetic construct
  source 1..75: mol_type = other DNA
gtgactcactgttgattaactggaactgtgcagcctcgaaatccccaccgaagacccctgatgaaaagcaggata

SEQ ID NO: 679388 - DNA, 75 bp, synthetic construct
  source 1..75: mol_type = other DNA
ttgcgacaaccaccgtgaaaagtgcgcgaactgggagcgtaactgttagtgcaggaacgagcacaggtgcaacgc

SEQ ID NO: 679389 - DNA, 75 bp, synthetic construct
  source 1..75: mol_type = other DNA
cacgctgaaggctactgttgaggacggcagtggtaaccaagtcgaaggcgtcaatgtgaacttcgcattaaaaag

SEQ ID NO: 679390 - DNA, 75 bp, synthetic construct
  source 1..75: mol_type = other DNA
taacgctatatatactaccaaccacgacgcaatttttacgcaagctttaccgctacaaaagccggggtttatcaa

SEQ ID NO: 679391 - DNA, 75 bp, synthetic construct
  source 1..75: mol_type = other DNA
actgcgaagctattaatgcaaaactggaatgaagatttgcataccgctggatttatcatcgacgccaacccgcag

SEQ ID NO: 679392 - DNA, 75 bp, synthetic construct
  source 1..75: mol_type = other DNA
atgatctggcagcctgagttcacagataaaacactctccaggaaacccggggcggttcatagcaacgggactgca

SEQ ID NO: 679393 - DNA, 75 bp, synthetic construct
  source 1..75: mol_type = other DNA
aacccaagcaccgcacatgttgctagttttatcgctgatccgtcgactctcacggccaacaacagtgatatcagc

SEQ ID NO: 679394 - DNA, 75 bp, synthetic construct
  source 1..75: mol_type = other DNA
tatagggcaaatgatgaacataaaaaaagcggccccgaaatggagccacctttctgaacaattaacccgctgcgc

SEQ ID NO: 679395 - DNA, 75 bp, synthetic construct
  source 1..75: mol_type = other DNA
agctggtaatggagggggatgaatggacgctgaatgataatggcatatttagcgatagctatacacaaaaatccg

SEQ ID NO: 679396 - DNA, 75 bp, synthetic construct
  source 1..75: mol_type = other DNA
cgggtattaagccgcgagcagctgctggcgttcactcatagcgatagcgtggaagtgtttgatcgcaccatcgac

SEQ ID NO: 679397 - DNA, 75 bp, synthetic construct
  source 1..75: mol_type = other DNA
gtgcaatgcccatttatggcgaggccggtgacagcggttcgcctttatttgcttttgatactgttcagaataaat

SEQ ID NO: 679398 - DNA, 75 bp, synthetic construct
  source 1..75: mol_type = other DNA
tagttgatggttataaagatggcgtattgattgcaggtgcctggtatctggggcctgcggtgtcagtgggtaaag

SEQ ID NO: 679399 - DNA, 75 bp, synthetic construct
  source 1..75: mol_type = other DNA
ccggcggaaatctgagtgcagccctggcaggtggtgctgcgccgtatattgctgaaattatcaaacagaccaccc

SEQ ID NO: 679400 - DNA, 75 bp, synthetic construct
  source 1..75: mol_type = other DNA
ccaggagttccgtagcgccctgacagtatcagatatcgtggtgacactggttaagccgtcctctgatttcgaaag

SEQ ID NO: 679401 - DNA, 75 bp, synthetic construct
  source 1..75: mol_type = other DNA
agtggtgcgctgagggagaatttagcgaaaatcgtcatgaggttgcatcaaaaatacttgatgttataagtacta

SEQ ID NO: 679402 - DNA, 75 bp, synthetic construct
  source 1..75: mol_type = other DNA
cagcggcagcctgaattttggtctgcttctgggtgcctctaaccccagttccgcagaagatgcgttgtatctgaa

SEQ ID NO: 679403 - DNA, 75 bp, synthetic construct
  source 1..75: mol_type = other DNA
gtgggcaattatcttgcttgttggggccgtattgtgctgccattttcatccgttcagaacgtgaatattttttta

SEQ ID NO: 679404 - DNA, 75 bp, synthetic construct
  source 1..75: mol_type = other DNA
ttgattatggggctgcaattattaacagcagcacagacaagtcattattgactttaaatctgtcaccattgaaaa

SEQ ID NO: 679405 - DNA, 75 bp, synthetic construct
  source 1..75: mol_type = other DNA
tggtatggcaatgatgtgttctttgagtcatatggttgatatgttatctcctaatacatcaactaactggatgtc

SEQ ID NO: 679406 - DNA, 75 bp, synthetic construct
  source 1..75: mol_type = other DNA
cttccaggttctctgaaagaactggttttgaatggatgtacagagcttaaatcaataaactgcttaccccccaac

SEQ ID NO: 679407 - DNA, 75 bp, synthetic construct
  source 1..75: mol_type = other DNA
tgacggatgttttgccaggtacaggaaatgaggaggagccgtacacgacgaaaattgatacgcctgtttatgagc

SEQ ID NO: 679408 - DNA, 75 bp, synthetic construct
  source 1..75: mol_type = other DNA
gccggataacaaaaaaatcattctttactccggcaatattggtgaaaagcaggggctggaaaacgttattgaagc

SEQ ID NO: 679409 - DNA, 75 bp, synthetic construct
  source 1..75: mol_type = other DNA
ttctttactccggcaatattggtgaaaagcagggactggaaaacgttattgaagctgccgatcgcctgcgcgatg

SEQ ID NO: 679410 - DNA, 75 bp, synthetic construct
  source 1..75: mol_type = other DNA
cgacaagtgcgacaataccattaatagcacctctggctggagcattaatacttgattattataactggaatgtaa

SEQ ID NO: 679411 - DNA, 75 bp, synthetic construct
  source 1..75: mol_type = other DNA
tatgcttattttgggtagaattctgcaggcaataggtgcaggtgctggacctgtaatatcaaaagcaattgctaa

SEQ ID NO: 679412 - DNA, 75 bp, synthetic construct
  source 1..75: mol_type = other DNA
gatgcccggcgggatgaaggctcttaatctgaagaaaacgcttctgacttacagcagtttcatttctgccgttcg

SEQ ID NO: 679413 - DNA, 75 bp, synthetic construct
  source 1..75: mol_type = other DNA
ttaaactaatcgctggtggtacaactaatactagtgctatatactttgccgctgataaatttgttatttctggtg

SEQ ID NO: 679414 - DNA, 75 bp, synthetic construct
  source 1..75: mol_type = other DNA
caggcatccggctagttgcttcttcaggaacggctacaaactcagctttatatgttgccgctaacaagtttattg

SEQ ID NO: 679415 - DNA, 75 bp, synthetic construct
  source 1..75: mol_type = other DNA
ataaaattgatataaatcaatccactgatgttattactaaacagattgaggaaattcaaaagattgctcgtaatg

SEQ ID NO: 679416 - DNA, 75 bp, synthetic construct
  source 1..75: mol_type = other DNA
aaaacagagcagcaagggcacaccggagccgccaacggagaactacgcagacctgagaaatgcagtaaatcgcac

SEQ ID NO: 679417 - DNA, 75 bp, synthetic construct
  source 1..75: mol_type = other DNA
aatgatcatccctgcctttagtcgtttttgctattcagcgtcagccttgctttggcgtcgactattccctacaaa

SEQ ID NO: 679418 - DNA, 75 bp, synthetic construct
  source 1..75: mol_type = other DNA
catgattctgatggcctgctgattcgcctgatggatatccatgaagtgggacgggaaatccgccgccaactggag

SEQ ID NO: 679419 - DNA, 75 bp, synthetic construct
  source 1..75: mol_type = other DNA
gtcgaatttattgttagaatggctaacagatttgatgggtatgcttacattgatgatgctcatggcatgtcaata

SEQ ID NO: 679420 - DNA, 75 bp, synthetic construct
  source 1..75: mol_type = other DNA
ctgacagaaaataatacggcattattgatgaatgactcatcgggtgcgactacgaatgtcaggctgagcatttcg

SEQ ID NO: 679421 - DNA, 75 bp, synthetic construct
  source 1..75: mol_type = other DNA
tcacaactgatgcgatgggttgccagaaagatatagcagagaagatacaaaaacagggaggtgattatttattcg

SEQ ID NO: 679422 - DNA, 75 bp, synthetic construct
  source 1..75: mol_type = other DNA
ccagacggtataccagccgggaagcttcacgccgctcctgagaatcgaaacagagaatggtgaacaggcgaaggc

SEQ ID NO: 679423 - DNA, 75 bp, synthetic construct
  source 1..75: mol_type = other DNA
aaatataaaaactattacacagcgttaactgaactgattgattatctagggaaggtgcgaataagcggggaaatt

SEQ ID NO: 679424 - DNA, 75 bp, synthetic construct
  source 1..75: mol_type = other DNA
aagggcgaaattattgctggtcacggtcgcgttatggcggctgaagtgctcaaaatggattccgttccggtcatt

SEQ ID NO: 679425 - DNA, 75 bp, synthetic construct
  source 1..75: mol_type = other DNA
acctaactttaccagcaacccctccgtccccagtagcactggctgctgggtgcgttttattcataaagcaaggct

SEQ ID NO: 679426 - DNA, 75 bp, synthetic construct
  source 1..75: mol_type = other DNA
tcccgcaggaggatgatatcgaccggatgggcgtctcaccggaagactggcagcgttcggttgatcccctgctga

SEQ ID NO: 679427 - DNA, 75 bp, synthetic construct
  source 1..75: mol_type = other DNA
ggagcagttccgcgtaccgatgatggtctggatgtcagataaatatctggaaaatccggccaatgcgcaggcgtt

SEQ ID NO: 679428 - DNA, 75 bp, synthetic construct
  source 1..75: mol_type = other DNA
aaggcaattctacgttgtgcaatatcagctattcatacccgagaaaatatagatagcctacataaaaactttata

SEQ ID NO: 679429 - DNA, 75 bp, synthetic construct
  source 1..75: mol_type = other DNA
atgacaacgcagcggcgctggatcagtcttcctggggcggattgtttgttgccaatattgatgctgagaaagcgg

SEQ ID NO: 679430 - DNA, 75 bp, synthetic construct
  source 1..75: mol_type = other DNA
tcaaccatgaatccccgcgtcgtggtgaaacattcgtaacacgtaaaatcacgcgtgctattgcaaatatttcgc

SEQ ID NO: 679431 - DNA, 75 bp, synthetic construct
  source 1..75: mol_type = other DNA
gtggcgctgcatcatcgcgatccggcgctgttctgcgcgaaccccgataatctgaacgaattacgtttgcgtgat

SEQ ID NO: 679432 - DNA, 75 bp, synthetic construct
  source 1..75: mol_type = other DNA
ccccggttaaggatattgctgtcagggtaaaaagaagttactggggtgtatataaccggattgttttattgcgcg

SEQ ID NO: 679433 - DNA, 75 bp, synthetic construct
  source 1..75: mol_type = other DNA
tcgataaaaaggcatatgagacggagatctggttcagccgggatacgtggcagcagatgttgactgcctatcctg

SEQ ID NO: 679434 - DNA, 75 bp, synthetic construct
  source 1..75: mol_type = other DNA
taccctcaaggaatctctccaggacatacgcctgacgtaggctggggaggcgcaattgaagggccgataatacca

SEQ ID NO: 679435 - DNA, 75 bp, synthetic construct
  source 1..75: mol_type = other DNA
aatcgtcaacagtaaggacgacgcttctccggaagcggtcgtgaggtttatgaaagagactgacaaacaggaaaa

SEQ ID NO: 679436 - DNA, 75 bp, synthetic construct
  source 1..75: mol_type = other DNA
ccggtgatggaatgcctgcggatccccgccttatccacctcgctggagacgattcaattgcctgaacgatttatg

SEQ ID NO: 679437 - DNA, 75 bp, synthetic construct
  source 1..75: mol_type = other DNA
gtatggatcaatgggggcagaagctgccttatgaccactggcagtttaattttttttacccgaaaaacctgccag

SEQ ID NO: 679438 - DNA, 75 bp, synthetic construct
  source 1..75: mol_type = other DNA
tgtcggctgccatgaccgtagggctggtgtgaggacgctgctgggcgatggcgtggagcaatgggggcagaagtt

SEQ ID NO: 679439 - DNA, 75 bp, synthetic construct
  source 1..75: mol_type = other DNA
cgtaacccgggccagtcgcgagctgccgctgataaatgacgtgacggggaagtacgcaaagcgtattgcattaac

SEQ ID NO: 679440 - DNA, 75 bp, synthetic construct
  source 1..75: mol_type = other DNA
cacaagcttatcgcgaccgtgtgctcgaccctgttcgcgagctgatgccggccgaggtggtcagcagcattgaag

SEQ ID NO: 679441 - DNA, 75 bp, synthetic construct
  source 1..75: mol_type = other DNA
tggatgcaacaggagcctatcaccgggaaatggtgcgccagatggggcaaacacatgaccatgtgatgacgccaa

SEQ ID NO: 679442 - DNA, 75 bp, synthetic construct
  source 1..75: mol_type = other DNA
atcgcgttcgttcaggcccctgagatggaatttagtgaagagttcttgcgtgaagcattccgtcaggacttcgag

SEQ ID NO: 679443 - DNA, 75 bp, synthetic construct
  source 1..75: mol_type = other DNA
agtatgcaaagcgtattgcattaactgcgttacagagcgaagagccggtaggtattgacctactgaaagaaatgg

SEQ ID NO: 679444 - DNA, 75 bp, synthetic construct
  source 1..75: mol_type = other DNA
ccaacaggtcacacacttctgctactggatgcaacaggagcctatcaccgggaaatggtgcgtcagatggggcaa

SEQ ID NO: 679445 - DNA, 75 bp, synthetic construct
  source 1..75: mol_type = other DNA
gttgcctgggttacacttcgccggacggcggcattaacgaaaacaacaactggtgtcacatcccgcgggagaagg

SEQ ID NO: 679446 - DNA, 75 bp, synthetic construct
  source 1..75: mol_type = other DNA
agggctgagtcagtaccgcgcatacgacagccgtggacagttaattgccgtgaaagacacgcagggccatgaaac

SEQ ID NO: 679447 - DNA, 75 bp, synthetic construct
  source 1..75: mol_type = other DNA
cacagcgagacagttattattctctgaatgccagttggaatggttcattcactgcgactcgccacggtgccgctt

SEQ ID NO: 679448 - DNA, 75 bp, synthetic construct
  source 1..75: mol_type = other DNA
aaccaggatcaactgtacctaaatatttcgattccctggggaactagtagaacattgagctatggtatgcaacga

SEQ ID NO: 679449 - DNA, 75 bp, synthetic construct
  source 1..75: mol_type = other DNA
cgggattctgtccacaatcgggcgcgatatattggcgtaagcatgaaaaaatacggagaattgctgcccttcacc

SEQ ID NO: 679450 - DNA, 75 bp, synthetic construct
  source 1..75: mol_type = other DNA
gggggattatctcggacgtaataaagactctgtcaggtgccgcgcaggaatgattggtgccggattaacaaagtg

SEQ ID NO: 679451 - DNA, 75 bp, synthetic construct
  source 1..75: mol_type = other DNA
aaggtcgtgcacctgctcatgtccgcccgtggacacctgaagaagatgcgctgctgattgcgctttattcctcca

SEQ ID NO: 679452 - DNA, 75 bp, synthetic construct
  source 1..75: mol_type = other DNA
gttgtcttggctatacttcaccggatggtggaattaacgaaaacaacaactggtgtcacatcccgcagacaaaag

SEQ ID NO: 679453 - DNA, 75 bp, synthetic construct
  source 1..75: mol_type = other DNA
tggattgtactggtgagtattatcccgttgatacttatctggatgaaccgctcacaagacaccttctggcgtcag

SEQ ID NO: 679454 - DNA, 75 bp, synthetic construct
  source 1..75: mol_type = other DNA
tctctgccggagccagctactacatgacatttatgaacgtcatgattggctatgggattgtcgcttcggtgatga

SEQ ID NO: 679455 - DNA, 75 bp, synthetic construct
  source 1..75: mol_type = other DNA
gttgacggctcggcagagacgtgtccgtggatggtgggttttacggcaaacagtagtgtaaatttttatctttta

SEQ ID NO: 679456 - DNA, 75 bp, synthetic construct
  source 1..75: mol_type = other DNA
gctatggggggtaagcccacaaattagctatggtaattttaacccagcctcggatatgagtgaagcgggtcttgg

SEQ ID NO: 679457 - DNA, 75 bp, synthetic construct
  source 1..75: mol_type = other DNA
catttgcgcagttgaaaaaagaggcggatatgaaagtgccgcgccgccatgtggagctgtatgacaccatcatgg

SEQ ID NO: 679458 - DNA, 75 bp, synthetic construct
  source 1..75: mol_type = other DNA
tgcgcaatattgccaaagccttcggcaaattttatgcgctcaaaggggtggatttgacggtctaccctggcgaga

SEQ ID NO: 679459 - DNA, 75 bp, synthetic construct
  source 1..75: mol_type = other DNA
atgaaatcacggtgcggattgtctacgaagggcgagctgccaaagtggtgcttgataacagtaagctggaagaga

SEQ ID NO: 679460 - DNA, 75 bp, synthetic construct
  source 1..75: mol_type = other DNA
catttggctaaaaaatagtcttaacgtggtttattttccgaattccaaactgaacccaaatacagcatgtgctgg

SEQ ID NO: 679461 - DNA, 75 bp, synthetic construct
  source 1..75: mol_type = other DNA
gcgtgtttcctaaagtatctattgtccaatgcgtagttatccgttttgttaaagagaaaaagcgtcttacccaag

SEQ ID NO: 679462 - DNA, 75 bp, synthetic construct
  source 1..75: mol_type = other DNA
gggccgatttaggtattgatattgaagaaaaagcgtttttcgacattcttgctcatatgcgcgataaatatcagt

SEQ ID NO: 679463 - DNA, 75 bp, synthetic construct
  source 1..75: mol_type = other DNA
ttggcagcatcacctcagactcgtattcctgacggcattctctatatcaacggtctgccactggtcgtctttgaa

SEQ ID NO: 679464 - DNA, 75 bp, synthetic construct
  source 1..75: mol_type = other DNA
gagcagactgaatggcaccgtgttgtgctgtttggcaaactggctgaagtggccagcgaatatctgcgcaaaggt

SEQ ID NO: 679465 - DNA, 75 bp, synthetic construct
  source 1..75: mol_type = other DNA
ggtgatggcgctgcgtcagcgtcttggcctgccggatgaacgcaaaattattctctactccggcaatatcggtga

SEQ ID NO: 679466 - DNA, 75 bp, synthetic construct
  source 1..75: mol_type = other DNA
actattcgcctgaactcaccggcatcggcaaatacaccggcgaaatggtcgagtggatggtgcagcagggtcacg

SEQ ID NO: 679467 - DNA, 75 bp, synthetic construct
  source 1..75: mol_type = other DNA
gtggggcatcgtcatttgtttttcaggtaatgactccaacttattgatagtgttttatgttcagataatgcccga

SEQ ID NO: 679468 - DNA, 75 bp, synthetic construct
  source 1..75: mol_type = other DNA
tgatactcccattgatatcggtcgcttacagcgttttgttactgattttgaacaacaaaccgggatggaaattta

SEQ ID NO: 679469 - DNA, 75 bp, synthetic construct
  source 1..75: mol_type = other DNA
aactcactccggcttttacgcctttactggcgattaaagaagcctctcgctgtttattatgtcatgacgctccct

SEQ ID NO: 679470 - DNA, 75 bp, synthetic construct
  source 1..75: mol_type = other DNA
taaaaagtgtagggatatggattttagtggtcgaaatgtaaaagagtttataaggttattatcagatcacgatta

SEQ ID NO: 679471 - DNA, 75 bp, synthetic construct
  source 1..75: mol_type = other DNA
acttcccgaaagctataactatatccacaagtcgggaactttgcatgaagcgccaagccctatcattccgctaaa

SEQ ID NO: 679472 - DNA, 75 bp, synthetic construct
  source 1..75: mol_type = other DNA
ccaaagccgtggcgtgccggtcatcggcctgacctgggtgactgattccccgctggtggcgcactgcgactttgt

SEQ ID NO: 679473 - DNA, 75 bp, synthetic construct
  source 1..75: mol_type = other DNA
gcagtaaatacggcgtgccttttgctatgatcctgcgagcttcgtatggcgtgcgtggcgcactgtttcccggac

SEQ ID NO: 679474 - DNA, 75 bp, synthetic construct
  source 1..75: mol_type = other DNA
aggctaatgccaccactcatgagttcgaatcgtccacactgaaaacgggtggtaacggtctgcagtacaaagctg

SEQ ID NO: 679475 - DNA, 75 bp, synthetic construct
  source 1..75: mol_type = other DNA
atggctgatgccgtgctgtcggtgatggccactaacggtatgcgtaccagtcaccacatcgccaataccattatt

SEQ ID NO: 679476 - DNA, 75 bp, synthetic construct
  source 1..75: mol_type = other DNA
accaaagacgaaattcaagggttgttaacattaacagaaaacacacgaaagttaacgttgacggagaaaccctgg

SEQ ID NO: 679477 - DNA, 75 bp, synthetic construct
  source 1..75: mol_type = other DNA
caggcctgagccgctcatgtcggtatcgcctggaaaagaccggacaattcccatcacggcgtaaactcggcggtc

SEQ ID NO: 679478 - DNA, 75 bp, synthetic construct
  source 1..75: mol_type = other DNA
catcaaccgcaaaaaagcgaacgttatgcgcccggtggaataccagaacggcgaagcattcactatccgtaatgt

SEQ ID NO: 679479 - DNA, 75 bp, synthetic construct
  source 1..75: mol_type = other DNA
cggtggtgcagcgagtttcccacaacacataacgttacgtacgcctatgttgtcgctgggaaatcagcaatggaa

SEQ ID NO: 679480 - DNA, 75 bp, synthetic construct
  source 1..75: mol_type = other DNA
gcgcatccgactttacgcaaaacgcccactcgtttcgtgagcaggcgctggggcaaacgctgggtttagttgtgg

SEQ ID NO: 679481 - DNA, 75 bp, synthetic construct
  source 1..75: mol_type = other DNA
ggcgtgcgctggagatggcgcaacttgtgcaggccgaacgggataataaccggtcacaatcagtgccatccggtg

SEQ ID NO: 679482 - DNA, 75 bp, synthetic construct
  source 1..75: mol_type = other DNA
atggtcattgttaccgtatgttgaagttatttttctctacattattaaatctaaatttgttatgactttccataa

SEQ ID NO: 679483 - DNA, 75 bp, synthetic construct
  source 1..75: mol_type = other DNA
tatgtctccaccatctcgcgctcgatgatgaacaaagcgcaggagaagggcgtcgcgccggaaaaggtgatcttt

SEQ ID NO: 679484 - DNA, 75 bp, synthetic construct
  source 1..75: mol_type = other DNA
ccggttccggagatggcgccgtcatttcaggcgccatcagaaatgacggagaaaggggaggccctggtataccgt

SEQ ID NO: 679485 - DNA, 75 bp, synthetic construct
  source 1..75: mol_type = other DNA
gatggtgttggcggtgtagaaaaatgtgtcaatagaccatcatacctaccgctagtatgcacaagatatttgagt

SEQ ID NO: 679486 - DNA, 75 bp, synthetic construct
  source 1..75: mol_type = other DNA
ttggtgtaataagtaaattgtcgaggaggatgcagtcaaataaaagaacaactgttcgttcgccattgccagaac

SEQ ID NO: 679487 - DNA, 75 bp, synthetic construct
  source 1..75: mol_type = other DNA
gatatgcctggtactggcggtatccaaaggccgaagctggggatatggtgatattaagttcctcacaacaacagg

SEQ ID NO: 679488 - DNA, 75 bp, synthetic construct
  source 1..75: mol_type = other DNA
ctaacgctggcaccacgggacttcttgatctaaccacccgtgactggaaacctgcattgctggatatggctggcc

SEQ ID NO: 679489 - DNA, 75 bp, synthetic construct
  source 1..75: mol_type = other DNA
aaattaatacagtactggctaataaatagtgtactaattaatttacctatacatgaagctgcttatgctttcata

SEQ ID NO: 679490 - DNA, 75 bp, synthetic construct
  source 1..75: mol_type = other DNA
acttaatccagatttggtcatcaaaaactcgtctatcaaagagttggttaacaaaatgcattgcagcaatgtcaa

SEQ ID NO: 679491 - DNA, 75 bp, synthetic construct
  source 1..75: mol_type = other DNA
attgcgtgcaaatagtatcttcgctcaactaccaattcaaacttattcaggcctagaaggtgaaggtaatttagt

SEQ ID NO: 679492 - DNA, 75 bp, synthetic construct
  source 1..75: mol_type = other DNA
atttaaacgctcactaaataatattaatacaactcctaacgttaaggaaaaccaaatggaaaacaaatctgtaat

SEQ ID NO: 679493 - DNA, 75 bp, synthetic construct
  source 1..75: mol_type = other DNA
atgtccctgtatgtcgcctttcatctcgcgctggaaaccgccatgcgacagggcgagattctgtcactccgctgg

SEQ ID NO: 679494 - DNA, 75 bp, synthetic construct
  source 1..75: mol_type = other DNA
aaaaaataggtaacaaccaggcgatcaccgttaccaataaccagatccagaacattggcgttaatcagatacaga

SEQ ID NO: 679495 - DNA, 75 bp, synthetic construct
  source 1..75: mol_type = other DNA
atccgcgaagcctgcggagttaatgcgactttcatcgcggacggggtgccacagtttgctctggttaatgggctg

SEQ ID NO: 679496 - DNA, 75 bp, synthetic construct
  source 1..75: mol_type = other DNA
cccagattaatggtgatgacgccacggcgaataacacgggtaaaaccaccgttgacggtaaagattccaccggta

SEQ ID NO: 679497 - DNA, 75 bp, synthetic construct
  source 1..75: mol_type = other DNA
cagttcattttttcctcttgtaatgcaggcgcgttggaaacctgattatattatttgcgttgtacccacgttatt

SEQ ID NO: 679498 - DNA, 75 bp, synthetic construct
  source 1..75: mol_type = other DNA
atagctagcggctattctgttttttattcagcacgatatttaattagctcttcaatttccccagtaaataatcaa

SEQ ID NO: 679499 - DNA, 75 bp, synthetic construct
  source 1..75: mol_type = other DNA
tgataaaggaatgaaatgtcgtattgaagattgtaatttaacgtctaatgatgttggagtgctgtctgtagttcc

SEQ ID NO: 679500 - DNA, 75 bp, synthetic construct
  source 1..75: mol_type = other DNA
aaccgtggctgttcgtgattgtcggccagggcggcgggaaagcgcgactggaaaaactggcgctggaacgaggcc

SEQ ID NO: 679501 - DNA, 75 bp, synthetic construct
  source 1..75: mol_type = other DNA
attgccgattgtcatctcgtcgttcaaaagaaaggcgctgctgatgcggttctgccttctaagcttacgaatatc

SEQ ID NO: 679502 - DNA, 75 bp, synthetic construct
  source 1..75: mol_type = other DNA
gaaaaaaccgaatggcatcgagtggtgattttcggcaaactagccgagattgccggagaatacctgaaaaaaggg

SEQ ID NO: 679503 - DNA, 75 bp, synthetic construct
  source 1..75: mol_type = other DNA
gtctacatcgaaggtcagcttcgcacccgtagctgggaagataacggtatcacccgttacgtcactgaaattctt

SEQ ID NO: 679504 - DNA, 75 bp, synthetic construct
  source 1..75: mol_type = other DNA
gcaaggattccaccggtacggaaatcaacggtaataacgggaaagtgattcaggacggcgatctggatgtcagcg

SEQ ID NO: 679505 - DNA, 75 bp, synthetic construct
  source 1..75: mol_type = other DNA
tggggaagtacttgtcagagcaagattaaaaataacactatgctatcaggttcagactctgcaataattattcaa

SEQ ID NO: 679506 - DNA, 75 bp, synthetic construct
  source 1..75: mol_type = other DNA
agccttggctattcgttattgtgggcgagggtggcgggaaagccagaatggaaaaaatggttcgcgagggcgggc

SEQ ID NO: 679507 - DNA, 75 bp, synthetic construct
  source 1..75: mol_type = other DNA
ttattacatttagccgactgtcatctggttattcagaaacgcggggccgcggatgcggttctgccctctaaatta

SEQ ID NO: 679508 - DNA, 75 bp, synthetic construct
  source 1..75: mol_type = other DNA
tatatatactaccaaccacgacggcaatttttacgcaagctttaccgctacaaaagccggggtttatcaagtgac

SEQ ID NO: 679509 - DNA, 75 bp, synthetic construct
  source 1..75: mol_type = other DNA
caggagcgatgtctggcacgctgacgcttatgccacagctgaacggtgtggatgcggctaaagcccccgccgtgg

SEQ ID NO: 679510 - DNA, 75 bp, synthetic construct
  source 1..75: mol_type = other DNA
ttcaccagtacgccagaaaccgataacacctggccgattgaagtcaccgctgaagatgtcaaaggcaatttgtcg

SEQ ID NO: 679511 - DNA, 75 bp, synthetic construct
  source 1..75: mol_type = other DNA
caggcgctactctgacggcaacgctaacctctgcaaatggcactccagggagggtcaggtcatcaactttagcgt

SEQ ID NO: 679512 - DNA, 75 bp, synthetic construct
  source 1..75: mol_type = other DNA
agcgcagaaacgagctatggtggggcgcaaacagtagatataacgctggtggcaggcccggcagacgcctcgcag

SEQ ID NO: 679513 - DNA, 75 bp, synthetic construct
  source 1..75: mol_type = other DNA
atgtgaacttcgcattaaaaagaggctttgcctttgccacattaacgtcattaacagcggtgaccgatcaaaacg

SEQ ID NO: 679514 - DNA, 75 bp, synthetic construct
  source 1..75: mol_type = other DNA
catcaaccgcaaaaaagcaaacgtcatgcgcccggtggcgtaccagaacggaaaagcattcactatccgtaacgt

SEQ ID NO: 679515 - DNA, 75 bp, synthetic construct
  source 1..75: mol_type = other DNA
aatgtgtgccgtatgaaggtttaggcgaacgccgctttagcttacgcaacagtttgcttacaggtgatgaacctc

SEQ ID NO: 679516 - DNA, 75 bp, synthetic construct
  source 1..75: mol_type = other DNA
aaggaaagcgtgcacatcagtcagggactcttactgatgcatatacaggcgaagtgtttgcttcagacgataaaa

SEQ ID NO: 679517 - DNA, 75 bp, synthetic construct
  source 1..75: mol_type = other DNA
ccgggaatcctatcgaggtgacggtagaactgagagatgaaaatgacaaacctgttaaggagcaaaaacagcaac

SEQ ID NO: 679518 - DNA, 75 bp, synthetic construct
  source 1..75: mol_type = other DNA
gttcttgtgacaagcaccattgcaggaacgaaagtagttacagctaatctggcaaatgcacctaccgaagccgcc

SEQ ID NO: 679519 - DNA, 75 bp, synthetic construct
  source 1..75: mol_type = other DNA
gtggatcgcaacaacaacatcgttctggaatatcgcaaaaaagaactggtccgcctgaccctgacagaccccgtg

SEQ ID NO: 679520 - DNA, 75 bp, synthetic construct
  source 1..75: mol_type = other DNA
accgacgcgaaatagggtcactgttcggtgagtggggagatatggggcattatatggacgctgatttttattcag

SEQ ID NO: 679521 - DNA, 75 bp, synthetic construct
  source 1..75: mol_type = other DNA
agcaacgcacggctcacgctgaacatccctgctcaccaggtggtgacgaataacagcgacagtgtgcagctgaca

SEQ ID NO: 679522 - DNA, 75 bp, synthetic construct
  source 1..75: mol_type = other DNA
agacaaccagtctgtatattgaggtgaaggataattacggcaacggtgtcccccagcatcaggtaaccctcagcg

SEQ ID NO: 679523 - DNA, 75 bp, synthetic construct
  source 1..75: mol_type = other DNA
agaccggataccgttgaggccagtctggaaaatggtagctccacgcttagcacatcaattaatgtcaacgctgat

SEQ ID NO: 679524 - DNA, 75 bp, synthetic construct
  source 1..75: mol_type = other DNA
gcaattgattacagtcaaaatatcaacggtgattacaaagccactgttacaggcggcggagagggtatcgcaacg

SEQ ID NO: 679525 - DNA, 75 bp, synthetic construct
  source 1..75: mol_type = other DNA
ccccttcccgctgatgaccttcagcgcggagcaacgccagggtaaacagggcgaaaatgacacccgttttgccgt

SEQ ID NO: 679526 - DNA, 75 bp, synthetic construct
  source 1..75: mol_type = other DNA
cttactgatacagtctccgcaggcaacacgaccgatctgtatgttgtggtaaacgataattacggaaacggtgta

SEQ ID NO: 679527 - DNA, 75 bp, synthetic construct
  source 1..75: mol_type = other DNA
cacctcccccgcagacacgcaactgagtctgaacgcgcgtaatactaatgagaacggtattgctgaagttaccct

SEQ ID NO: 679528 - DNA, 75 bp, synthetic construct
  source 1..75: mol_type = other DNA
cacgatctatcaggtcatccgatcaatgtttctgaagggctggaatttgtgcaatcaggtaccaacgtgccctat

SEQ ID NO: 679529 - DNA, 75 bp, synthetic construct
  source 1..75: mol_type = other DNA
tccctggaaacagggacgcaaaacacttatcaaacgcatgaatttttttatggggcgtgttataaacagatttaa

SEQ ID NO: 679530 - DNA, 75 bp, synthetic construct
  source 1..75: mol_type = other DNA
aaggacagcgcaattgtcgttctgcaaacatcgaaagtggaaatcattgggaatggcgtggatgagacgacgctg

SEQ ID NO: 679531 - DNA, 75 bp, synthetic construct
  source 1..75: mol_type = other DNA
tcgttgataataatggctttccggtgaaaggtgtgactgtgaacttcaccagcagaacaaactctgccgaaatga

SEQ ID NO: 679532 - DNA, 75 bp, synthetic construct
  source 1..75: mol_type = other DNA
aacccgtgacattcagtgcagagccatcctcgcaaatgatcatcagccagaatacggtctctactaatacgcagg

SEQ ID NO: 679533 - DNA, 75 bp, synthetic construct
  source 1..75: mol_type = other DNA
cttgcccggggacgaggagagcatgccctaatggtggctcaggagaaaaaaacgctgcggctttacatgatgcgc

SEQ ID NO: 679534 - DNA, 75 bp, synthetic construct
  source 1..75: mol_type = other DNA
aacaaatccgggatgatgaagcctttttgaaactactgttacaattgtgttatcacggaatcagctctgcagaag

SEQ ID NO: 679535 - DNA, 75 bp, synthetic construct
  source 1..75: mol_type = other DNA
cacactgttggccgctaaaaatcatgacaacatgtcagctgttcatatagccattcatcataatcattataaaac

SEQ ID NO: 679536 - DNA, 75 bp, synthetic construct
  source 1..75: mol_type = other DNA
tatattcaggggcgcaacgcgattgtaggtgccatagtgatgaccagtaaagatccgaccttcgactgggaatcc

SEQ ID NO: 679537 - DNA, 75 bp, synthetic construct
  source 1..75: mol_type = other DNA
atgccctcaaacatggcgaggtgcaacaggctcgccacgtgctggctttgctggccagtgaaatcgtgatcacgg

SEQ ID NO: 679538 - DNA, 75 bp, synthetic construct
  source 1..75: mol_type = other DNA
ttactgttgatgaaataatatccaaaagagacgaagaactactttcgatagtgatttatatattttcagctatat

SEQ ID NO: 679539 - DNA, 75 bp, synthetic construct
  source 1..75: mol_type = other DNA
acaatcattgaccctgccgttggtagacgtagttataaatggatggatgctgctcagtattttagtggggttgct

SEQ ID NO: 679540 - DNA, 75 bp, synthetic construct
  source 1..75: mol_type = other DNA
aattaacggagaaacggtaatcgatacgggtattgccggttttggtatccgtattcagaaagtaagcgatcactt

SEQ ID NO: 679541 - DNA, 75 bp, synthetic construct
  source 1..75: mol_type = other DNA
ggcgtgcgctatggttttgatccggtcagcgatcgctttgtccagacaaccgacacgcaataccagtacagcgat

SEQ ID NO: 679542 - DNA, 75 bp, synthetic construct
  source 1..75: mol_type = other DNA
tttaatcagctcgatagccacgatactgcgcgatttaaaacgctgctcggtcgggatattgcgcgcctgccgctg

SEQ ID NO: 679543 - DNA, 75 bp, synthetic construct
  source 1..75: mol_type = other DNA
cgatatctcttacgatccgcagcacattgacgcccaaacctgtatggcctggatggataattaccgcgcagggct

SEQ ID NO: 679544 - DNA, 75 bp, synthetic construct
  source 1..75: mol_type = other DNA
caactgggtacagcctgacggcaccatgttctacccgtatatcggcaaagttcacgtggtggggaaaacgctcgc

SEQ ID NO: 679545 - DNA, 75 bp, synthetic construct
  source 1..75: mol_type = other DNA
atgaatgagcaaacatcgaatcccaacgcgatcaacgaaggcacgaacgaacaagccgcggtaagcagccttcct

SEQ ID NO: 679546 - DNA, 75 bp, synthetic construct
  source 1..75: mol_type = other DNA
cgaagataataagctgacattgtcaggcggtaatggtgccggacaaaatggtgttgttatcagtggtgtggcaag

SEQ ID NO: 679547 - DNA, 75 bp, synthetic construct
  source 1..75: mol_type = other DNA
gcaaccattgctgttaatgcaggcaaaggtggattaacagatgctgccggtaccacgaagacacgtctgacttat

SEQ ID NO: 679548 - DNA, 75 bp, synthetic construct
  source 1..75: mol_type = other DNA
ctgccactgagcgaatatttcgacacaaacgcacagccggacatggccaacatcaaccgcaaaaaagcgaacgtc

SEQ ID NO: 679549 - DNA, 75 bp, synthetic construct
  source 1..75: mol_type = other DNA
gctccattgagcagttatatgcaatgaatatccataaattatgtcctctcaagtttgcacttagacaaaaaatag

SEQ ID NO: 679550 - DNA, 75 bp, synthetic construct
  source 1..75: mol_type = other DNA
caaatactttttcgctcaaatccctatctatttgttatgtcagatgccaaccctgcgatggagaatattaatttg

SEQ ID NO: 679551 - DNA, 75 bp, synthetic construct
  source 1..75: mol_type = other DNA
aattagctattcatttatcgcatccttgatgttattattaataatatcgactcaaataaccgtgttaccagtgat

SEQ ID NO: 679552 - DNA, 75 bp, synthetic construct
  source 1..75: mol_type = other DNA
agccattgatactgaagtatttaaacttggtttcatgcgtaactccgagccgttcttcgcttatcacaatgctaa

SEQ ID NO: 679553 - DNA, 75 bp, synthetic construct
  source 1..75: mol_type = other DNA
gctggctttaaagcactggctgacatgagtccgtttgaatccctgctgattgtggatttaggcggaaccacgctg

SEQ ID NO: 679554 - DNA, 75 bp, synthetic construct
  source 1..75: mol_type = other DNA
aatatctctgttcaggttctttttccactcgctgtcacctttaccccagtaatggcggcacgtgcgcagcatgcg

SEQ ID NO: 679555 - DNA, 75 bp, synthetic construct
  source 1..75: mol_type = other DNA
atacatacgtgctgagcgggggctgaacgggataaagagtcgcctgacgctgggtgaggattacacgccgtcaga

SEQ ID NO: 679556 - DNA, 75 bp, synthetic construct
  source 1..75: mol_type = other DNA
atggccgatgccgtactgtcggtgatggccactaacggtatgcgtaccagtcaccacatcgccaataccattatc

SEQ ID NO: 679557 - DNA, 75 bp, synthetic construct
  source 1..75: mol_type = other DNA
aacctcaaacacgtttccccctgaaagaagagcgacacagaagctttactatagacggttaaatctgactcgaaa

SEQ ID NO: 679558 - DNA, 75 bp, synthetic construct
  source 1..75: mol_type = other DNA
gagaacagagtaggttcaatatttaacactacggtgactaatggtgcctcttatccaggtcgctgtcattgtgat

SEQ ID NO: 679559 - DNA, 75 bp, synthetic construct
  source 1..75: mol_type = other DNA
atgatgtcattctcaatgaactgtcacctgcagccagttttatcgctaatcgatttacatcgcaatgcgatcccg

SEQ ID NO: 679560 - DNA, 75 bp, synthetic construct
  source 1..75: mol_type = other DNA
tagccgggcgccataacctgaaaatggcgctgggcaaagacctgaccgacaaagcgatcgatcatattgaccaga

SEQ ID NO: 679561 - DNA, 75 bp, synthetic construct
  source 1..75: mol_type = other DNA
ctgcgtgataacgctgaatacgttaatgcctgggcgtctctgcatcgtgttcagcaattccgcttctttggcatt

SEQ ID NO: 679562 - DNA, 75 bp, synthetic construct
  source 1..75: mol_type = other DNA
agtgcgaagtctgctggtgtggccatagcgatggaagataaccagcgtgaatttttcgccaatggtgcgaagtct

SEQ ID NO: 679563 - DNA, 75 bp, synthetic construct
  source 1..75: mol_type = other DNA
tccattaacgatgaacggatactgcaaatttcgacggtttggcgctgcgtgagcctgatttcaacgctcacggca

SEQ ID NO: 679564 - DNA, 75 bp, synthetic construct
  source 1..75: mol_type = other DNA
agcagcatggtacgtttaagcaatttgttagcgataacaccgcaggtgctgatctcatgctgcattgtcgtaaag

SEQ ID NO: 679565 - DNA, 75 bp, synthetic construct
  source 1..75: mol_type = other DNA
ggatgatatctggtttgccgacaaattgagtcatgcaataaaagttataaatgaaaagcaagcagatgcttattc

SEQ ID NO: 679566 - DNA, 75 bp, synthetic construct
  source 1..75: mol_type = other DNA
tgcttcattattaggtgctatcaagcgtataaaaaaaattaaagattcttggtatagaaatgaggtaaaaaaaat

SEQ ID NO: 679567 - DNA, 75 bp, synthetic construct
  source 1..75: mol_type = other DNA
ataccaaccggcggatgcgatatctcatcgcgcgacgttaacgttgatctacctgattatgacgcaaacgcttct

SEQ ID NO: 679568 - DNA, 75 bp, synthetic construct
  source 1..75: mol_type = other DNA
gtggacaccacaaagacaaaaacgctcgatttaggaactgctttccactgccgggtacttgaaccggaagaattc

SEQ ID NO: 679569 - DNA, 75 bp, synthetic construct
  source 1..75: mol_type = other DNA
agccgtatctcagtttgagagagcaggagctccgcgaaaatcaacactggaaaaactggctgagatttacaactg

SEQ ID NO: 679570 - DNA, 75 bp, synthetic construct
  source 1..75: mol_type = other DNA
atggatactgatgatatctgtgttcctgaaaggtttgagaaacaaataagttattttcagaaaaatccaagtacg

SEQ ID NO: 679571 - DNA, 75 bp, synthetic construct
  source 1..75: mol_type = other DNA
atgttgactgcgctgccttcggtttctggcgcgttattacgtgttccatactcctttatggttcctatcttcggt

SEQ ID NO: 679572 - DNA, 75 bp, synthetic construct
  source 1..75: mol_type = other DNA
gcgcattgcgatatcaacctgccggacccgctgcctgccgatctgtttaacggcttgttactgccatgccagcat

SEQ ID NO: 679573 - DNA, 75 bp, synthetic construct
  source 1..75: mol_type = other DNA
aataattgagccagttattgaattgtataacgacgtggtatgggcgtcgttcaacacactgcacaacaaaatcaa

SEQ ID NO: 679574 - DNA, 75 bp, synthetic construct
  source 1..75: mol_type = other DNA
gtagccttgaaaatcaggatctaatcaaactgcgtgactggctcctccctattcttatgaacggacaggtcaaga

SEQ ID NO: 679575 - DNA, 75 bp, synthetic construct
  source 1..75: mol_type = other DNA
gcctcaatattaaccagctggcggcgctgactaatctgcatcgtcagaccgtcgcaagtagactgagcaatgttg

SEQ ID NO: 679576 - DNA, 75 bp, synthetic construct
  source 1..75: mol_type = other DNA
cagttacgctttggctcagtgtatttgttgatgcttcagccgggaaccgtcatcatgttgtgattgatgggggaa

SEQ ID NO: 679577 - DNA, 75 bp, synthetic construct
  source 1..75: mol_type = other DNA
ctttttgcggcgtgaactttcccaacccgttctgcctctcttcttcgccggtaggcaactgctatgagatgtgtg

SEQ ID NO: 679578 - DNA, 75 bp, synthetic construct
  source 1..75: mol_type = other DNA
agaatatttcggggaaaatctggatgacttcacaaaaaattacttcgatggggaactggacgacttcacaaaaaa

SEQ ID NO: 679579 - DNA, 75 bp, synthetic construct
  source 1..75: mol_type = other DNA
aactggcaaaagaaattattagcatgaaccagccactgattgaccggattgtcacggctgaattcgataaaatca

SEQ ID NO: 679580 - DNA, 75 bp, synthetic construct
  source 1..75: mol_type = other DNA
aatgccgctattgatgagtatttcaatggtcccaaagaatttcgcgatcagttagacgattatttttacatgggg

SEQ ID NO: 679581 - DNA, 75 bp, synthetic construct
  source 1..75: mol_type = other DNA
ggcgagggcttgcggcattaaatagcaaaagccgctcagatggatttttattctacgtgatgaagtatttcaaac

SEQ ID NO: 679582 - DNA, 75 bp, synthetic construct
  source 1..75: mol_type = other DNA
ctcgacatacacaccgtcgagaaacagcatgtggaagtgaacattcagattgagcgccgatccaaaacgctggat

SEQ ID NO: 679583 - DNA, 75 bp, synthetic construct
  source 1..75: mol_type = other DNA
agattatttcggggaaaatcttgatgactttacgcgggattacttctcgccatcgcttgacgattttacccgtca

SEQ ID NO: 679584 - DNA, 75 bp, synthetic construct
  source 1..75: mol_type = other DNA
tttcaaccccgataatcctctttccgtattattatcacaagtaattaatattcttattgaaaaatacccaatatt

SEQ ID NO: 679585 - DNA, 75 bp, synthetic construct
  source 1..75: mol_type = other DNA
ctgaatacgccgatttcaccagcgatatgctgatctacgaaaaaacctatacggctgaactttcgtccattgcag

SEQ ID NO: 679586 - DNA, 75 bp, synthetic construct
  source 1..75: mol_type = other DNA
aaacccggcgataagatttgggaatctgacgatattaaaattcccgtctattgtgacaacaataccaacggcaac

SEQ ID NO: 679587 - DNA, 75 bp, synthetic construct
  source 1..75: mol_type = other DNA
ctgacgatattaaaattcccgtctattgtgacaacaataccaacggcaattttgaaagtgagcatgtttatgcct

SEQ ID NO: 679588 - DNA, 75 bp, synthetic construct
  source 1..75: mol_type = other DNA
tcatcatctgtctgttatttctaccgttaaaatctgcgcttgccctgaactgttactttggttcatccggtggtt

SEQ ID NO: 679589 - DNA, 75 bp, synthetic construct
  source 1..75: mol_type = other DNA
tcatcttttttctgctgtttctacccttgaagtctgcgctggcgctgaactgctattttggtacttccggcgggg

SEQ ID NO: 679590 - DNA, 75 bp, synthetic construct
  source 1..75: mol_type = other DNA
caaaatttgctcgggcgatcccgctaatattcatatgtcgcgtacctttctcgctcgcatgcggttatacgtcaa

SEQ ID NO: 679591 - DNA, 75 bp, synthetic construct
  source 1..75: mol_type = other DNA
aaaatttttcaggaaaatcagttgattacaaaattaacgtagggattgactatgctaaagtggttgacttgcaga

SEQ ID NO: 679592 - DNA, 75 bp, synthetic construct
  source 1..75: mol_type = other DNA
ggtgtactttcgatgtaataaatcagaatgaccttccctccgcaattcagctattttatgataaaccctatggta

SEQ ID NO: 679593 - DNA, 75 bp, synthetic construct
  source 1..75: mol_type = other DNA
attgcaaaaatagatttatttattcaaaaaatcacccttaatttatggacagcaagtatcaaaaatgtgtcgtta

SEQ ID NO: 679594 - DNA, 75 bp, synthetic construct
  source 1..75: mol_type = other DNA
atattaattatttattttggcccaatactggctgaacgagtaatgccgttatcctttttcccagaacaattgcaa

SEQ ID NO: 679595 - DNA, 75 bp, synthetic construct
  source 1..75: mol_type = other DNA
agagaaattatcatagggctgtttattgcatgcttattagcatccccattttggattttccttgctataggtagc

SEQ ID NO: 679596 - DNA, 75 bp, synthetic construct
  source 1..75: mol_type = other DNA
ctgattttggcgtcgaccatgaaaaagaaaatctccgattttatgaggcatcacaggttgtcgcatcaactctcg

SEQ ID NO: 679597 - DNA, 75 bp, synthetic construct
  source 1..75: mol_type = other DNA
aatcaaaacatcgtcgcgtcagtcgaagatgaatcctcactggcagaagcccaggctaaagcagattccgcatac

SEQ ID NO: 679598 - DNA, 75 bp, synthetic construct
  source 1..75: mol_type = other DNA
acgaactgggcttgcagtttatgcagggtgcgcgcttctggcacgtcctggatgcctctgccggaaaagatcagg

SEQ ID NO: 679599 - DNA, 75 bp, synthetic construct
  source 1..75: mol_type = other DNA
cagaagcaatggcgatgacttctgccgggaatcacaactcatgggtggcatcctggctggtaaagtcccgtgccg

SEQ ID NO: 679600 - DNA, 75 bp, synthetic construct
  source 1..75: mol_type = other DNA
ttgtacacaaagttctgatggaatagtgtcatgctggtatagtaaccatgaagatgataaaatgaatatcatcgt

SEQ ID NO: 679601 - DNA, 75 bp, synthetic construct
  source 1..75: mol_type = other DNA
attttggtacccgcatgaacggtgtgactgttcatcaggacggcgcccgtaatatcggagaagtgaaagccggtg

SEQ ID NO: 679602 - DNA, 75 bp, synthetic construct
  source 1..75: mol_type = other DNA
gtgaaaaagggggctaactttagtacatccggaggtactattgttgctacattagacggaagtcgaatcatcaac

SEQ ID NO: 679603 - DNA, 75 bp, synthetic construct
  source 1..75: mol_type = other DNA
attgaaaactcaaacggcttaatagaagggggcaatattataacctctggtgataatgccagaggcgttgttatt

SEQ ID NO: 679604 - DNA, 75 bp, synthetic construct
  source 1..75: mol_type = other DNA
ggtcgtatggccatcgatggtctgaaagaagttcaggaagcggtgacgactatcaggaaatttttgcccagcagg

SEQ ID NO: 679605 - DNA, 75 bp, synthetic construct
  source 1..75: mol_type = other DNA
atgccgtttgacctgctgacggttctgccgacccgcctggatgttgaagtgaatggctttaacggtggtgttctg

SEQ ID NO: 679606 - DNA, 75 bp, synthetic construct
  source 1..75: mol_type = other DNA
ttggcaatcagatgtttcagtatgcaactgcatttgctattgcaaaaagaactcatcaaaatttgactgttgata

SEQ ID NO: 679607 - DNA, 75 bp, synthetic construct
  source 1..75: mol_type = other DNA
agttacagcaggaagggagcgaagacggtcacggtgtggtgttcccggctgaactggtgcggctgctggacagac

SEQ ID NO: 679608 - DNA, 75 bp, synthetic construct
  source 1..75: mol_type = other DNA
acgcttttctgcgtgccttcctggcgcaggacgttgtagacatgttcagcggcgcggttcatggcgcggaacgct

SEQ ID NO: 679609 - DNA, 75 bp, synthetic construct
  source 1..75: mol_type = other DNA
tgattagtaaaactcatttctctgatatactcagatttgcattgcttgcggaacatgggggattatggatagatt

SEQ ID NO: 679610 - DNA, 75 bp, synthetic construct
  source 1..75: mol_type = other DNA
ctgaattatttatttttaaaatgatggatcttttattaaagtcttcaaaattactatccaggtacaagatttttc

SEQ ID NO: 679611 - DNA, 75 bp, synthetic construct
  source 1..75: mol_type = other DNA
ggtggcgcccggcagacaactacaggcggagaagccaatcaggctcccaggaaaccatcttcacctgctccagtt

SEQ ID NO: 679612 - DNA, 75 bp, synthetic construct
  source 1..75: mol_type = other DNA
aaacttcagaaggtgaagaacgcgaacggtgattacatctggcgcgaccgtttacaggcgggtgatcctgatacg

SEQ ID NO: 679613 - DNA, 75 bp, synthetic construct
  source 1..75: mol_type = other DNA
ccttatctacccgcgtactgatgggggctgctgaggtgagccagacttggggcccgtggctgttactggccgcag

SEQ ID NO: 679614 - DNA, 75 bp, synthetic construct
  source 1..75: mol_type = other DNA
taacagagcatccggtagaggtcggggccgctgtcgctgatcatgcctataaaaaaccgtcagaagtggtgatgg

SEQ ID NO: 679615 - DNA, 75 bp, synthetic construct
  source 1..75: mol_type = other DNA
atcgagagtttagcgatccaacaattacacaccacggcaaatttacccaacatgcagcgcgtagtggggggtgat

SEQ ID NO: 679616 - DNA, 75 bp, synthetic construct
  source 1..75: mol_type = other DNA
acgctggcgcggctgtggggggcgctgccgccggatatccggttaagcccgcatctttacctggcgaccaacagc

SEQ ID NO: 679617 - DNA, 75 bp, synthetic construct
  source 1..75: mol_type = other DNA
atcgccaccagcccgccaacccgttctgttttgccgatattggcccacttctggcaacggcgctgcatgaccatc

SEQ ID NO: 679618 - DNA, 75 bp, synthetic construct
  source 1..75: mol_type = other DNA
cagcggcaacaaaaccaccaagcctccagatacttcactgctgaaaagcatcacgggtaacgtggcgtcattact

SEQ ID NO: 679619 - DNA, 75 bp, synthetic construct
  source 1..75: mol_type = other DNA
ccctgtctacccgcgtactgatggggatggctgaggtgagccagacctggggcccgtggctgttgctggccgcag

SEQ ID NO: 679620 - DNA, 75 bp, synthetic construct
  source 1..75: mol_type = other DNA
tattcagcttgaggttcttcaaaaaccaggttcggatatttcggctcaactggctgggatgcaacaaattccggg

SEQ ID NO: 679621 - DNA, 75 bp, synthetic construct
  source 1..75: mol_type = other DNA
aaggattaaagcaatctcaagtactgcccggtcgaatcacatttgttaaaactaaaggaaagaagaaccgcactg

SEQ ID NO: 679622 - DNA, 75 bp, synthetic construct
  source 1..75: mol_type = other DNA
atcgggaatgggttattttggacatcctgaaatatttatgaagcacaggggcaaaataaagtctactgacattca

SEQ ID NO: 679623 - DNA, 75 bp, synthetic construct
  source 1..75: mol_type = other DNA
gcggatttgtgggttttgcggcggagcatccctggctttttggggcagcggttattgccggaggaagcggggctt

SEQ ID NO: 679624 - DNA, 75 bp, synthetic construct
  source 1..75: mol_type = other DNA
gtgcacgaacaggtgattagcccgctacacagccacctgacacgcctgattgccgcctggaccggctgcgacgcc

SEQ ID NO: 679625 - DNA, 75 bp, synthetic construct
  source 1..75: mol_type = other DNA
gtgctaatgacagccagataactgcgctgttaaattacattttactgactggcgatgaagcgcgttttaatgagt

SEQ ID NO: 679626 - DNA, 75 bp, synthetic construct
  source 1..75: mol_type = other DNA
tggtccctgtgctggctggacgaatttgccgccccgactaccgcacggaaactttatagcgcagcgttcccgctg

SEQ ID NO: 679627 - DNA, 75 bp, synthetic construct
  source 1..75: mol_type = other DNA
tgacgctggatgttaatgaagaacacctcaagcggcttgaggcgatatttgaaaagtatcgcaatggtctgatga

SEQ ID NO: 679628 - DNA, 75 bp, synthetic construct
  source 1..75: mol_type = other DNA
ttgcgcaatataacggcggcaatgcggcggtcgggaaagataacaccctgagactcaaaagtgaaacagtggatt

SEQ ID NO: 679629 - DNA, 75 bp, synthetic construct
  source 1..75: mol_type = other DNA
ccaaatgcaataagcaaagctggtgcaaaaggtttatttcaatttattccagaaacagcaaaagcttatgggctg

SEQ ID NO: 679630 - DNA, 75 bp, synthetic construct
  source 1..75: mol_type = other DNA
ctcaggtaatcaggctcgaagttcaacaaaaaccaggttcagatatactggcacaactcgccggaatgcaacaaa

SEQ ID NO: 679631 - DNA, 75 bp, synthetic construct
  source 1..75: mol_type = other DNA
tttcgcaggacaaaaaggggctaccctggaatcggggccaaatgcccgttttgccagcttcccgacgatgctgga

SEQ ID NO: 679632 - DNA, 75 bp, synthetic construct
  source 1..75: mol_type = other DNA
aacttacaagcagatcaattctacgctacggacgaccacttcgagattaaacaacctgtttaaaaccaccgtatc

SEQ ID NO: 679633 - DNA, 75 bp, synthetic construct
  source 1..75: mol_type = other DNA
gcgctggaatacaaatacactgaaaacggtaacgagcgcgtcattcccgtcaaaaacatcatgcacattcgcggg

SEQ ID NO: 679634 - DNA, 75 bp, synthetic construct
  source 1..75: mol_type = other DNA
gcaaaagattaactggcacaaaaatgacgataaaaccattccgtgcatcaatgatttactggtcgataaatttgg

SEQ ID NO: 679635 - DNA, 75 bp, synthetic construct
  source 1..75: mol_type = other DNA
attaatgagcggggagataaatatactcttagcgagtataggactgggggtagcttggaccgcgtgggaacaaat

SEQ ID NO: 679636 - DNA, 75 bp, synthetic construct
  source 1..75: mol_type = other DNA
ccaacggtttgaatgaaagaggcctgattactgcgggatgctcttttctttatctattaattatgatggggctta

SEQ ID NO: 679637 - DNA, 75 bp, synthetic construct
  source 1..75: mol_type = other DNA
ttgtgttctgacctttaaggccgttcgcgagacttaccgccagcgcattgagggggctggcctgtgtccagattc

SEQ ID NO: 679638 - DNA, 75 bp, synthetic construct
  source 1..75: mol_type = other DNA
acaacagcaggtggtttttttaaattattatctcataatgtcatggatttgcccctatatttccagacacctgtt

SEQ ID NO: 679639 - DNA, 75 bp, synthetic construct
  source 1..75: mol_type = other DNA
attatagctcattacccattaggagttgacgtaggcaaacaaaagttcgtgcaggccattggagagcttcctgac

SEQ ID NO: 679640 - DNA, 75 bp, synthetic construct
  source 1..75: mol_type = other DNA
cagaaactgattttagtacatgggaatttgcacttcatagttgtttttataaattatctcccccaactggttcta

SEQ ID NO: 679641 - DNA, 75 bp, synthetic construct
  source 1..75: mol_type = other DNA
tcatttcctcgttaaatgaaatttccgggccaaaaatcgtgactatatcaggccgaaaacttattattgatttgg

SEQ ID NO: 679642 - DNA, 75 bp, synthetic construct
  source 1..75: mol_type = other DNA
tgatgcaatgggattacagcgcgaaggataaggctgaccgtatccttaacgccgcgctaaaggccaatacggaag

SEQ ID NO: 679643 - DNA, 75 bp, synthetic construct
  source 1..75: mol_type = other DNA
atgaacgactggaaaaagcgaaaagagagcggggctgactgggcgattaataacagccagacaccgcttggcgag

SEQ ID NO: 679644 - DNA, 75 bp, synthetic construct
  source 1..75: mol_type = other DNA
atcgaatccagcgtgagcacttttaaatatttatcaatggtagagggggaagaacgcactttcatgctctatagc

SEQ ID NO: 679645 - DNA, 75 bp, synthetic construct
  source 1..75: mol_type = other DNA
aagcactagatatcttcagaaatagagcgaagagtgtcaatcttacgttaagacgcaaaactaaattaaagaaat

SEQ ID NO: 679646 - DNA, 75 bp, synthetic construct
  source 1..75: mol_type = other DNA
caaagggatatttgcttttgcattaatggacttttggcaacagaaggctgatggtttgagtgccttagcttttga

SEQ ID NO: 679647 - DNA, 75 bp, synthetic construct
  source 1..75: mol_type = other DNA
gttatgtcgccgccccaacagtgaaatgacgccgtcgcgctttatgctgatggtggttgccagtatctgccttcg

SEQ ID NO: 679648 - DNA, 75 bp, synthetic construct
  source 1..75: mol_type = other DNA
gggtttggtctcgatggcgtgtgcggcatgatgccgacaatggccggggttgacgttttcggcgctgctatgtcg

SEQ ID NO: 679649 - DNA, 75 bp, synthetic construct
  source 1..75: mol_type = other DNA
aggctttctaccgtctgggcgtgcgtgaggctcttgagtgagtcggtatccacgcttccgctaaaaatttacgag

SEQ ID NO: 679650 - DNA, 75 bp, synthetic construct
  source 1..75: mol_type = other DNA
gcttggtgtgcctatcagcctgactaccggcacattctgggaggaatggtttggtaccagcagcagcggaaaggt

SEQ ID NO: 679651 - DNA, 75 bp, synthetic construct
  source 1..75: mol_type = other DNA
ctaaactgcttcgcgaagtccataatgcggttttccctgatattcctttcgaacaatctccactgaaacaggccg

SEQ ID NO: 679652 - DNA, 75 bp, synthetic construct
  source 1..75: mol_type = other DNA
gtggggatatctacacagttcaactgaatctcaccccgcttgaagacttgcgtaaaaacagtacagccgaaaaag

SEQ ID NO: 679653 - DNA, 75 bp, synthetic construct
  source 1..75: mol_type = other DNA
tttgcctaatattaagattgcagctgcgcactcattatccctcagcatgctacctaaacttctgcactcactcac

SEQ ID NO: 679654 - DNA, 75 bp, synthetic construct
  source 1..75: mol_type = other DNA
tcagaatatttcgaatggggtgattatagtctctggtttcaagatttctcgatttataataagatgggttttatc

SEQ ID NO: 679655 - DNA, 75 bp, synthetic construct
  source 1..75: mol_type = other DNA
aagaatcggttgcgcaatatttgatcgaattgtctgagtttacagagggcgtgttggcctggactgactcggcag

SEQ ID NO: 679656 - DNA, 75 bp, synthetic construct
  source 1..75: mol_type = other DNA
tcattaccaccggaagttcgactgatgatgcgtttgtacagtcgggtcgtattgcggcaggtgcctatgattact

SEQ ID NO: 679657 - DNA, 75 bp, synthetic construct
  source 1..75: mol_type = other DNA
ctcttcggtggattcaggtgaagccattgttgctaacaatggcaagttttcgaccatcacactcaacaacgcaac

SEQ ID NO: 679658 - DNA, 75 bp, synthetic construct
  source 1..75: mol_type = other DNA
gctgaatcaggatgtgaagcgatccttcgagtcaatctggcaaagcctcaatcaaaggcaagagcgggtaccgca

SEQ ID NO: 679659 - DNA, 75 bp, synthetic construct
  source 1..75: mol_type = other DNA
tgctgttcctgaccttaccgactgacgggcagggcggaagcttcatggcgttcttcgcagtcttcctggcgctgt

SEQ ID NO: 679660 - DNA, 75 bp, synthetic construct
  source 1..75: mol_type = other DNA
agcttaattaaggcccaaaagactgagatacccgcgcgtactatggcggtacttacttttctggaaatatgtttt

SEQ ID NO: 679661 - DNA, 75 bp, synthetic construct
  source 1..75: mol_type = other DNA
cgcctgccgaccagacgctgaattttaccgcgacgctcaagcaggatggtaatcagcaaatccggggcggagatt

SEQ ID NO: 679662 - DNA, 75 bp, synthetic construct
  source 1..75: mol_type = other DNA
gcgagtgttacggcgaagataccggtcatttcggcatgattgacgccattgatgatccgcaggtttttgccgcgt

SEQ ID NO: 679663 - DNA, 75 bp, synthetic construct
  source 1..75: mol_type = other DNA
tcagccggggtgtggatacgcagttccgccatatcaacattgcggaagccgatcacttcaaacagttcctgcgtc

SEQ ID NO: 679664 - DNA, 75 bp, synthetic construct
  source 1..75: mol_type = other DNA
ttgcgccgaccaccgaactgttcccgatgtcgaaaattaacgacgccatccagcatgtgcgcgacggtaaggcgc

SEQ ID NO: 679665 - DNA, 75 bp, synthetic construct
  source 1..75: mol_type = other DNA
agtactgtgcctgcgatgaacacttactttcgtgctgccgcgactttgccactaaaacgctatcgtctggtcaac

SEQ ID NO: 679666 - DNA, 75 bp, synthetic construct
  source 1..75: mol_type = other DNA
gctgcaaaccctgcgcctgaaacgcctcacgaactacaaaatcatcgctgcatcaataacgtaacgtggataaac

SEQ ID NO: 679667 - DNA, 75 bp, synthetic construct
  source 1..75: mol_type = other DNA
tgtcgatattgttgagggtcgttttgatgccgggatacgcctgggtgaaattgtagataacgatatggttgcagt

SEQ ID NO: 679668 - DNA, 75 bp, synthetic construct
  source 1..75: mol_type = other DNA
aaagggtgttatcgggtaaccaatattgatgtcaaactgaccaccggggctcgtgcggtatcaacctcgctattg

SEQ ID NO: 679669 - DNA, 75 bp, synthetic construct
  source 1..75: mol_type = other DNA
ctctggcgggcgtggaattttgaacccgacaccggattctggtttaaccgctatctgctcagccacggcattccc

SEQ ID NO: 679670 - DNA, 75 bp, synthetic construct
  source 1..75: mol_type = other DNA
gtggattgggttaagttcgtgcctgcttccgctgctgaatgagcagggcattatttatcatttctacgggcaatc

SEQ ID NO: 679671 - DNA, 75 bp, synthetic construct
  source 1..75: mol_type = other DNA
tgcggtaacaccctgcgactgggcgttaccggccccccggcgcggggaaaagtacctttcttgaggcctttggca

SEQ ID NO: 679672 - DNA, 75 bp, synthetic construct
  source 1..75: mol_type = other DNA
gcgttgatcagttattaccagagcgataaagcgcagcgttcagcactaaaagcgttacttatcactcatatcggc

SEQ ID NO: 679673 - DNA, 75 bp, synthetic construct
  source 1..75: mol_type = other DNA
ggcaatagcggaaactttgacgtaaatgtcaccgctggcggtgatatcagaagtaataatggttggttaattact

SEQ ID NO: 679674 - DNA, 75 bp, synthetic construct
  source 1..75: mol_type = other DNA
tccctgtctgctactggcgttttgtgtatggatgttattcagtgccgtcgcggtaaatttaccgaaagtcggctt

SEQ ID NO: 679675 - DNA, 75 bp, synthetic construct
  source 1..75: mol_type = other DNA
gcggggtatacggcagttccttttgaacatgtttccaaccaggcaactacaacagatcacacttgtcagggaaac

SEQ ID NO: 679676 - DNA, 75 bp, synthetic construct
  source 1..75: mol_type = other DNA
atattgctaatgcaacatcttctgaaaattatagcgttctgtgtaactgtgattcaaaacatagcaatggcgctt

SEQ ID NO: 679677 - DNA, 75 bp, synthetic construct
  source 1..75: mol_type = other DNA
atgccaacaataaccactgcacaaattaaaagcacactgcagtctgcaaagcaatccgctgcaaataaattgcac

SEQ ID NO: 679678 - DNA, 75 bp, synthetic construct
  source 1..75: mol_type = other DNA
cggaaattcctgccctggtttgtctcaatatgattcccaaatccccacggactggcagtgttatgacatgaagat

SEQ ID NO: 679679 - DNA, 75 bp, synthetic construct
  source 1..75: mol_type = other DNA
acggacaggtaaaccaatatacgggggtatctggttctctgttggagcagcataatctcagttataacatacaac

SEQ ID NO: 679680 - DNA, 75 bp, synthetic construct
  source 1..75: mol_type = other DNA
atatgctggtgccggacttccctggcctgtcggaagatggcatcaccatcacctttgatcgtgaagtggcgctgg

SEQ ID NO: 679681 - DNA, 75 bp, synthetic construct
  source 1..75: mol_type = other DNA
agtttccggatgtacagatcctgcactacgccttcttcggaccgtttattggcgcactggcgcgttctgcggggg

SEQ ID NO: 679682 - DNA, 75 bp, synthetic construct
  source 1..75: mol_type = other DNA
aggcagctcccgccacagggtacggaagctcagcaactggcggcagtgattgccggtggtctgttacctgagggg

SEQ ID NO: 679683 - DNA, 75 bp, synthetic construct
  source 1..75: mol_type = other DNA
tgcgggtgatgctggatgcggcacaagacgccggggctgtgtttactccgatactcagcagtaacaaagagctgg

SEQ ID NO: 679684 - DNA, 75 bp, synthetic construct
  source 1..75: mol_type = other DNA
tgtcgatattgttgacggtcgttttgatgccgggatacgcctgggtgaaattgtagataaggatatggttgcagt

SEQ ID NO: 679685 - DNA, 75 bp, synthetic construct
  source 1..75: mol_type = other DNA
cacggtgattattcagcatctattaatttaaatattccgttaagcggattgttaaagcaaaacacaaaaaaagag

SEQ ID NO: 679686 - DNA, 75 bp, synthetic construct
  source 1..75: mol_type = other DNA
gacaatgactattctttattgcctgaactctctctttctactgggcaatccgcatataataaatcaggttttaaa

SEQ ID NO: 679687 - DNA, 75 bp, synthetic construct
  source 1..75: mol_type = other DNA
gataataactattctttcctacctgaattctctctttctagcgggcaatctgcatataataaatcaggatttaaa

SEQ ID NO: 679688 - DNA, 75 bp, synthetic construct
  source 1..75: mol_type = other DNA
aacacaaaacaaagtattttaaataaattagataatgccagtgatgaaattttatatttaagaaagcagtttttc

SEQ ID NO: 679689 - DNA, 75 bp, synthetic construct
  source 1..75: mol_type = other DNA
aagaaaatatttcagataactataaaaagaacataaaatcattaaaaaatgaactacaacaacttgaatgggctc

SEQ ID NO: 679690 - DNA, 75 bp, synthetic construct
  source 1..75: mol_type = other DNA
ctactaatgaattagtacatttaagaaaacaattatcacataataagaataagataaattatctaagaaaacaat

SEQ ID NO: 679691 - DNA, 75 bp, synthetic construct
  source 1..75: mol_type = other DNA
aagatgggatacacaaaacgccggaatgggcagaaaaaattacccacgttccagcgcaaaccattcgtcaactgg

SEQ ID NO: 679692 - DNA, 75 bp, synthetic construct
  source 1..75: mol_type = other DNA
ccacgcttcccgataacgaattggatccacaaatgccgattatgcgcgcctgtgttcgtggtcgcggctatcgta

SEQ ID NO: 679693 - DNA, 75 bp, synthetic construct
  source 1..75: mol_type = other DNA
ccaccagtcataagcgcgtcaccactgccgacgttgcatccacacagtcttcttgcaccaggcgtttcgctacgt

SEQ ID NO: 679694 - DNA, 75 bp, synthetic construct
  source 1..75: mol_type = other DNA
catttatcgctaccggggatcggtgctggtggattatcgcattcttcgtaattttgttcgtatctatcattcagc

SEQ ID NO: 679695 - DNA, 75 bp, synthetic construct
  source 1..75: mol_type = other DNA
tgaattcttgaataaaaaggtcgctcgaggtagagctacaacactaaaaaatagtctcggtagaaatctgcaatt

SEQ ID NO: 679696 - DNA, 75 bp, synthetic construct
  source 1..75: mol_type = other DNA
gtgatcaacgagatcaatcgtggggagctggagatcctgctgccgcgttaccagtcagatccacgcccggtttat

SEQ ID NO: 679697 - DNA, 75 bp, synthetic construct
  source 1..75: mol_type = other DNA
ctcccggctgaaaacatcgttcaccgtcttatctgccggacagaacacatcatgcaggcacatgatgtctgcgta

SEQ ID NO: 679698 - DNA, 75 bp, synthetic construct
  source 1..75: mol_type = other DNA
gaagccgccagagtaccacaacaaaagacctgatgacgctgaaatgggatgcactaaatattcttgttaatgccg

SEQ ID NO: 679699 - DNA, 75 bp, synthetic construct
  source 1..75: mol_type = other DNA
ggagacaccgcctcgctggcggccgggttaaagacctgatgaatctcaaatgggatacactaaatattctggtta

SEQ ID NO: 679700 - DNA, 75 bp, synthetic construct
  source 1..75: mol_type = other DNA
ctcaacccttgcctggattcgaaatactgactgggcaaagattggttttaaaaatgatgccgacagcgatactga

SEQ ID NO: 679701 - DNA, 75 bp, synthetic construct
  source 1..75: mol_type = other DNA
tgtcgatattgttgatggtcgttttgatgccgggatacgcctgggtgaaattgtggataatgatatggttgcagt

SEQ ID NO: 679702 - DNA, 75 bp, synthetic construct
  source 1..75: mol_type = other DNA
tgtcgatattgttgaaggtcgttttgatgccgggatacgcctgggtgaaattgttgataatgatatggttgcagt

SEQ ID NO: 679703 - DNA, 75 bp, synthetic construct
  source 1..75: mol_type = other DNA
ccagaactttgctgaggtgattgcagaagcgcgtcttgatgcggcagacccgaaaacctggtatctggcggcggc

SEQ ID NO: 679704 - DNA, 75 bp, synthetic construct
  source 1..75: mol_type = other DNA
gtgactttattgctgtggtcggcagaatgcaggatatcagcgccgtgcgtcaggtaaaagccgcgttgttatcgt

SEQ ID NO: 679705 - DNA, 75 bp, synthetic construct
  source 1..75: mol_type = other DNA
ggcagtcattatacgagcaggcagttccggcagttattgtggcgataccagatcagacagagtatgagccggcgc

SEQ ID NO: 679706 - DNA, 75 bp, synthetic construct
  source 1..75: mol_type = other DNA
tgcacgtatatccttacaaaaagttgataacgggggggatttcgatattacaattagaactcttgatttcgagaa

SEQ ID NO: 679707 - DNA, 75 bp, synthetic construct
  source 1..75: mol_type = other DNA
cattggtacgacgaatgcgttaggtggaaattcaattgctttcggggataacgataccggcctgaaacagaacgg

SEQ ID NO: 679708 - DNA, 75 bp, synthetic construct
  source 1..75: mol_type = other DNA
aatgcattattcgacttcataacattagatcttaatattccaaatgtaaaaaatagctatgaaaaaagtccagta

SEQ ID NO: 679709 - DNA, 75 bp, synthetic construct
  source 1..75: mol_type = other DNA
taattgttgaagatgagatagaaatgtcttccattgttaatgaagtgtttagcgaacagttcagtgacatcaata

SEQ ID NO: 679710 - DNA, 75 bp, synthetic construct
  source 1..75: mol_type = other DNA
ggtgagcatgcgttaattagagatgttgttattcctaaaaaaaagtctgattattatctttctttgtgccgtatt

SEQ ID NO: 679711 - DNA, 75 bp, synthetic construct
  source 1..75: mol_type = other DNA
accgaagaactccattctaggtaagttattaagctcatgcattggtactgattatgaagatcgtattacggaaat

SEQ ID NO: 679712 - DNA, 75 bp, synthetic construct
  source 1..75: mol_type = other DNA
gaggatgttgttatagcagactcattatatggaagttcagcaaattttgaattcttccaggtaaagaacactgga

SEQ ID NO: 679713 - DNA, 75 bp, synthetic construct
  source 1..75: mol_type = other DNA
aaacaaaaacggattgtcacatcagttgctatggatgatactgaaatcattcatacgtcaactgaagatggaggt

SEQ ID NO: 679714 - DNA, 75 bp, synthetic construct
  source 1..75: mol_type = other DNA
gtgaagggaagttattgattgcatattcagaccatagcggagctacagtaggcttagagttttcatcagtagctt

SEQ ID NO: 679715 - DNA, 75 bp, synthetic construct
  source 1..75: mol_type = other DNA
ttataagcttaagtttgttgggaattggaacaatagcgattatggtattaatcttaaatgtaaatacagtaaatg

SEQ ID NO: 679716 - DNA, 75 bp, synthetic construct
  source 1..75: mol_type = other DNA
gatacccgagcggcgccgggaactggtggcgggttgtcagcgctgcgctgattgccaagaagagtttgaagaacg

SEQ ID NO: 679717 - DNA, 75 bp, synthetic construct
  source 1..75: mol_type = other DNA
aaatttctggttaagtccgttcgccacatcggagcgtatcttactgccgatggtgatgcgtgggtgacggtgttc

SEQ ID NO: 679718 - DNA, 75 bp, synthetic construct
  source 1..75: mol_type = other DNA
ggtacgggtttacgacaacgcatcagctgactggggaaaaccgaagaaaattgagctttatgaacttgtcggtca

SEQ ID NO: 679719 - DNA, 75 bp, synthetic construct
  source 1..75: mol_type = other DNA
taaagttagatattataacttcgggtgatcttagcgtggattgtctatcgggcttaactgggaaattaaagtccg

SEQ ID NO: 679720 - DNA, 75 bp, synthetic construct
  source 1..75: mol_type = other DNA
aatataatgagaatagctcaacaggcactcagtagcgttccagaagaagagtttacagaaaccagtgattacatt

SEQ ID NO: 679721 - DNA, 75 bp, synthetic construct
  source 1..75: mol_type = other DNA
ataaatgaagccctgttaagcatcaatgtttttgacttgtttcgcccatcttgggttatcttgcaaaatagtaac

SEQ ID NO: 679722 - DNA, 75 bp, synthetic construct
  source 1..75: mol_type = other DNA
aaagaaaaacggattgtcacatcggttgtgatggatgatactgagatcattcaaacaacaagtgatgatggaggc

SEQ ID NO: 679723 - DNA, 75 bp, synthetic construct
  source 1..75: mol_type = other DNA
tggatatattaataaatatcgctcacgtcagcatttggttttactaatggcattggacattagttgttctgatga

SEQ ID NO: 679724 - DNA, 75 bp, synthetic construct
  source 1..75: mol_type = other DNA
aataaagggaaaaacactccctataaaaaggacataaaaaaaaccatacttcgtctggaacaagaaatggcaaca

SEQ ID NO: 679725 - DNA, 75 bp, synthetic construct
  source 1..75: mol_type = other DNA
agaaataaagcttgatcacatctggagcaccattaaggatgaaattattaccctgcaaagaaaaggcctgaaccc

SEQ ID NO: 679726 - DNA, 75 bp, synthetic construct
  source 1..75: mol_type = other DNA
tttgctcggctatcgtcttggcggtgtgatgatggaaaagatgttcgcttatccggaaccggtaaacgggctgac

SEQ ID NO: 679727 - DNA, 75 bp, synthetic construct
  source 1..75: mol_type = other DNA
aacgctttggtatcaaaaaggtattattgcttggtctggtcaccgctgcgatccgctatggcttctttatttacg

SEQ ID NO: 679728 - DNA, 75 bp, synthetic construct
  source 1..75: mol_type = other DNA
gtggagcgtttagatgaatttaaagaacgattctcaattattaatgactataattttacgcctcagtatcgccaa

SEQ ID NO: 679729 - DNA, 75 bp, synthetic construct
  source 1..75: mol_type = other DNA
aagactttaggaggaaattttacaatactaatagcgaaaaaagatgggcaagtgttgaatgtaatacacacaaaa

SEQ ID NO: 679730 - DNA, 75 bp, synthetic construct
  source 1..75: mol_type = other DNA
gaatctttaattacgcaaacctggactgctctggaaatcattattattaacgatggttcaacgggtgatgctgcc

SEQ ID NO: 679731 - DNA, 75 bp, synthetic construct
  source 1..75: mol_type = other DNA
tttggcaaaatatggtggctatgatgctcactggtgaactggtcgactcagcacattggaaaggccatccagtgg

SEQ ID NO: 679732 - DNA, 75 bp, synthetic construct
  source 1..75: mol_type = other DNA
tacaccgcccgtttgtcgtgggatgacttcccctaccgcaaatattcgccggggctgatttatgccctggtgctg

SEQ ID NO: 679733 - DNA, 75 bp, synthetic construct
  source 1..75: mol_type = other DNA
aaaactggccgattttctctgcactggagggataatacaaggcctgataagcgtagcgcatcaggcagatttgcg

SEQ ID NO: 679734 - DNA, 75 bp, synthetic construct
  source 1..75: mol_type = other DNA
acgttaacgatccggcaacgacgtgtacctgtgcgctgtacggctttcagtttcagggggctgaggaaaatcagc

SEQ ID NO: 679735 - DNA, 75 bp, synthetic construct
  source 1..75: mol_type = other DNA
cggtggggaaacgcatctcaccattgtgaccgaagcgctggtaccgacacctgcctttttcccgttaatcgacaa

SEQ ID NO: 679736 - DNA, 75 bp, synthetic construct
  source 1..75: mol_type = other DNA
attgccagcctggtggtgtggctttgttcggagggcgcaaattacacgacagggcagtcgttgatagtggatggc

SEQ ID NO: 679737 - DNA, 75 bp, synthetic construct
  source 1..75: mol_type = other DNA
cgacgttttttgggccggaccggaattttgaaaacccctggttgctcccggtaagcggcacgaacaaccagcgtt

SEQ ID NO: 679738 - DNA, 75 bp, synthetic construct
  source 1..75: mol_type = other DNA
catgatcaaatccttgcgcgttcttatgaacacattgaatcgaagctaacagttaaacccgaatgtttactaagc

SEQ ID NO: 679739 - DNA, 75 bp, synthetic construct
  source 1..75: mol_type = other DNA
atggcttcgatttagtgcgttggccagcatttgagcattcttggtatgtattgaatgatgaaataacacctccac

SEQ ID NO: 679740 - DNA, 75 bp, synthetic construct
  source 1..75: mol_type = other DNA
ttacggataaaggctatgttctgataaaacatgaaacagaaatcggtagtggagaagagggtaaaatcgtctatt

SEQ ID NO: 679741 - DNA, 75 bp, synthetic construct
  source 1..75: mol_type = other DNA
ctgaaagggattattacccgttagacaaggcagccagaaggcttgggtgtgacgttgatgatttgattcacttca

SEQ ID NO: 679742 - DNA, 75 bp, synthetic construct
  source 1..75: mol_type = other DNA
tgcgtgtcgctaaaaccacaatcggcggcaacctggagaatggcggcacggttcaaatgaatagcgaagggggaa

SEQ ID NO: 679743 - DNA, 75 bp, synthetic construct
  source 1..75: mol_type = other DNA
gcgatggcttgatgcgagtgcagctgtcatcctacgacaagatgtttggctttacccatgcaacagggactgaat

SEQ ID NO: 679744 - DNA, 75 bp, synthetic construct
  source 1..75: mol_type = other DNA
ttacctatccatctgttgcagctttgaacttaacagttgagttaattcgggctggcaaaatgtcatccccttcag

SEQ ID NO: 679745 - DNA, 75 bp, synthetic construct
  source 1..75: mol_type = other DNA
ttaaacagaggttggccgaacgcgtagcatggctttgctccaatcccgattgcagagttgtgactgttgggcccc

SEQ ID NO: 679746 - DNA, 75 bp, synthetic construct
  source 1..75: mol_type = other DNA
ttgcaacagtatacttattactacttaaaacgattgtctcaaatggtgtggttaacaacaaacaactaagtaagt

SEQ ID NO: 679747 - DNA, 75 bp, synthetic construct
  source 1..75: mol_type = other DNA
gctttttaccgacgctgacggggagttaatcacgtcgctggtggtggtggataagccgcgccctcccgttgaact

SEQ ID NO: 679748 - DNA, 75 bp, synthetic construct
  source 1..75: mol_type = other DNA
aagtacttaattacaaccccattgcggattgcgcattatttcggtcagatggcgagagaaacaggcagatttgcg

SEQ ID NO: 679749 - DNA, 75 bp, synthetic construct
  source 1..75: mol_type = other DNA
cggaaaactgagacttaaacctgtttcttttccaggtgaaagcctgtcaaaagaagggaaagtttcctcaaccat

SEQ ID NO: 679750 - DNA, 75 bp, synthetic construct
  source 1..75: mol_type = other DNA
cagaacgcgactgcgggttttggggtgattggatctgacagtttactcgacatgatgcaggcgatgcgtgcgctg

SEQ ID NO: 679751 - DNA, 75 bp, synthetic construct
  source 1..75: mol_type = other DNA
atgagcgagcaagtcggaagccttcagatagagattgacctgaagacaaaaaatttactggtatcacaacgccat

SEQ ID NO: 679752 - DNA, 75 bp, synthetic construct
  source 1..75: mol_type = other DNA
tgctgtctctgagtttaccaatggaattatcaaggatttcaataatcctcaagctcctgaaaaaaaggaaaataa

SEQ ID NO: 679753 - DNA, 75 bp, synthetic construct
  source 1..75: mol_type = other DNA
gacaataatctgacaccggaacaaacacaggctgggctggataagatagcgaaaggtgatatgcgggacagtacc

SEQ ID NO: 679754 - DNA, 75 bp, synthetic construct
  source 1..75: mol_type = other DNA
agccgtgaaaagacgctgtcctccgtggtcagccgtgcacaggcctatgctgatgaggcgctggcctggttacag

SEQ ID NO: 679755 - DNA, 75 bp, synthetic construct
  source 1..75: mol_type = other DNA
atgaagaaaattatctgtgttctgtttgtggggcttttattttcggttcaggcagatgctgcgcggggaagaaaa

SEQ ID NO: 679756 - DNA, 75 bp, synthetic construct
  source 1..75: mol_type = other DNA
cgggaaccacaggtaaaccgacagttgtcggctatacgcaaaacgatattgataactgggccaatattgtagcgc

SEQ ID NO: 679757 - DNA, 75 bp, synthetic construct
  source 1..75: mol_type = other DNA
tgccaggtatgccaccagctgcgccatcggattaagtcgatggtggggatctctactgaaccgccccgggtttcc

SEQ ID NO: 679758 - DNA, 75 bp, synthetic construct
  source 1..75: mol_type = other DNA
attccggcctatgcgcaagcattaacagcaggtacgcagatcatttcagccattcgcggcatagcttttggtggc

SEQ ID NO: 679759 - DNA, 75 bp, synthetic construct
  source 1..75: mol_type = other DNA
aatatacgattgatgcaaaaacagacaagctactgatcgccggacgccaggctgatgactctttcgacattatcg

SEQ ID NO: 679760 - DNA, 75 bp, synthetic construct
  source 1..75: mol_type = other DNA
cttgaggaagcgatgaagcgcgtagctatgggcgtttgcaggcaggagtcaaccagaccgggagggatgttagcc

SEQ ID NO: 679761 - DNA, 75 bp, synthetic construct
  source 1..75: mol_type = other DNA
agctacggcacgccatcgctggaaagcgccgtagatgaactactggctgaacatgttgatcatatcgtggtactg

SEQ ID NO: 679762 - DNA, 75 bp, synthetic construct
  source 1..75: mol_type = other DNA
tttccagggaatgcattattgcggctatgcgtgcctatgatgaaggtgtacgccaccagttcagcgagtcccggc

SEQ ID NO: 679763 - DNA, 75 bp, synthetic construct
  source 1..75: mol_type = other DNA
ggaattgcggtgttaaatattaccggtgttatgcttaaacccgaaaattttaatggcggtctaaattctaaatgc

SEQ ID NO: 679764 - DNA, 75 bp, synthetic construct
  source 1..75: mol_type = other DNA
atcaacaatgtcagtttgcttttagtacaccggattcagaacccacaacctctgtattacaaggcacggcgcagt

SEQ ID NO: 679765 - DNA, 75 bp, synthetic construct
  source 1..75: mol_type = other DNA
ctggaaagaaccatcagaactaatggcatccgaaaccggggcttacgagatcataaaattgatcacacgcctgga

SEQ ID NO: 679766 - DNA, 75 bp, synthetic construct
  source 1..75: mol_type = other DNA
aagatatcgcaagcagacttatgcaaaatgtccggtattccgccaaaagctttcagccgcagcctgagaactcga

SEQ ID NO: 679767 - DNA, 75 bp, synthetic construct
  source 1..75: mol_type = other DNA
gtgaaagatattttattttcttctggtgtcggttttggcattggtgctttatttacaatcgtgcgattacctatt

SEQ ID NO: 679768 - DNA, 75 bp, synthetic construct
  source 1..75: mol_type = other DNA
ccgggcgggatgacttcgggcaacccggtaaatccgctgctgggggcgaaggtgctgcccggcgagacggacctt

SEQ ID NO: 679769 - DNA, 75 bp, synthetic construct
  source 1..75: mol_type = other DNA
cgttacatgcatatatagctgatggcattaaggttcattctcttattatatgggcaggtccttatctttttgatc

SEQ ID NO: 679770 - DNA, 75 bp, synthetic construct
  source 1..75: mol_type = other DNA
tgtttattttaaaaaacaaagccctccaacaaacaataaatgataaccacttcattgctcttgaagtatcagaaa

SEQ ID NO: 679771 - DNA, 75 bp, synthetic construct
  source 1..75: mol_type = other DNA
actgtacgctggggaaatcaggcagatcaacaatgtcagtttgcttttagtacaccggattcagaacccacaacc

SEQ ID NO: 679772 - DNA, 75 bp, synthetic construct
  source 1..75: mol_type = other DNA
acaacacagtttgtggtgcccaacagaggtgcaatggtagcggcgcgtttcaacgccaatatcggttatcgcgta

SEQ ID NO: 679773 - DNA, 75 bp, synthetic construct
  source 1..75: mol_type = other DNA
cagctctgagattaatgccctgctggatacactgaaaggagattaccggcttgtggcattactttgcctcagtac

SEQ ID NO: 679774 - DNA, 75 bp, synthetic construct
  source 1..75: mol_type = other DNA
atcaagcaattaaaaatgcctcaccgcaggatgtgttaaattatgctttacatcggcaaggcttgtctgggcata

SEQ ID NO: 679775 - DNA, 75 bp, synthetic construct
  source 1..75: mol_type = other DNA
tcgccatgagcttatggcccgaatggctggggttgagcttgttgcccaaagtcgcggcgatgttggcatcttcct

SEQ ID NO: 679776 - DNA, 75 bp, synthetic construct
  source 1..75: mol_type = other DNA
ttatgccgagtatggaaccgggcaaccgccaaactgaaacgcgaagatttgcgcccttatggcttccgcgtcgcc

SEQ ID NO: 679777 - DNA, 75 bp, synthetic construct
  source 1..75: mol_type = other DNA
gacggcacgctggcggcggatgttcgtccgctggtgcgtctttccgtgagcgttctggtcgaagaagatggcaaa

SEQ ID NO: 679778 - DNA, 75 bp, synthetic construct
  source 1..75: mol_type = other DNA
cggcattgatgccacgcgtctgcggtttgatccgatcggggagtatcaaaaaatgctggcggatgtggaaggtcg

SEQ ID NO: 679779 - DNA, 75 bp, synthetic construct
  source 1..75: mol_type = other DNA
ataacgccaaatggaatcattccaccgtcgcccaggcgcagtgctatttatgccgtgtgtggaaccgggcaaccg

SEQ ID NO: 679780 - DNA, 75 bp, synthetic construct
  source 1..75: mol_type = other DNA
acaagagcaagttaaagccacggttgcgatccttcgcgcctacttcattgcggaagaccgcgacgagctgggccg

SEQ ID NO: 679781 - DNA, 75 bp, synthetic construct
  source 1..75: mol_type = other DNA
gtcatatctaaccgtagatgaaagaatagtaaaactggcagacgggtttacgtatggaagtaagggtagagatgg

SEQ ID NO: 679782 - DNA, 75 bp, synthetic construct
  source 1..75: mol_type = other DNA
ctcacaccacggcgctgatagtgattattctgattctttggccttgcgacgctggcggcgtttgatttcgccgcg

SEQ ID NO: 679783 - DNA, 75 bp, synthetic construct
  source 1..75: mol_type = other DNA
ataaacgatggccgatttatagttgatggattctactctattgatgacttatcacgtgcaattgataagtctgct

SEQ ID NO: 679784 - DNA, 75 bp, synthetic construct
  source 1..75: mol_type = other DNA
tggtcacccactggcactatgacgaagcagaccgcctcacgcaccgcaccgtgaagggtgaaaccgcagagcggt

SEQ ID NO: 679785 - DNA, 75 bp, synthetic construct
  source 1..75: mol_type = other DNA
aagtttatcgcgcgaccggacaaacgctggctttaagtgccatccccagattactttggctggcgcaccatcgtt

SEQ ID NO: 679786 - DNA, 75 bp, synthetic construct
  source 1..75: mol_type = other DNA
acgatggtaaaattacagctaatcaaataaggtcaaatatcagcacacaatttgaaatgcttccatctcaaatac

SEQ ID NO: 679787 - DNA, 75 bp, synthetic construct
  source 1..75: mol_type = other DNA
aatatactacagcaacaaataaaatccatagctgaacaaaaatcattttttatcaaaaatgatttaatttgctca

SEQ ID NO: 679788 - DNA, 75 bp, synthetic construct
  source 1..75: mol_type = other DNA
ttggcgaggttcaaaacttccttgctcagtactcacagggtaagccctttactttttcacttggattgttgagta

SEQ ID NO: 679789 - DNA, 75 bp, synthetic construct
  source 1..75: mol_type = other DNA
taagatcgattcaggatgaggtttatgcccatcgatcgacctcgaatcctgtgcccaattgtctccacagattca

SEQ ID NO: 679790 - DNA, 75 bp, synthetic construct
  source 1..75: mol_type = other DNA
cgcgtggcatttttgaaatggaactgtgtaagtatgcggttaacgcaggactaaatgattttaatcagacggcca

SEQ ID NO: 679791 - DNA, 75 bp, synthetic construct
  source 1..75: mol_type = other DNA
gccgcgaagttattcttgagcgtattcgtcgacaaatatcaacccatggaaatgtcgtattactcgaagggaacc

SEQ ID NO: 679792 - DNA, 75 bp, synthetic construct
  source 1..75: mol_type = other DNA
gttgtggtgagaatatcacctttcatcaggtggccaaatttagtgtgccactacagtggccttattctcggacga

SEQ ID NO: 679793 - DNA, 75 bp, synthetic construct
  source 1..75: mol_type = other DNA
aatcgcttcaaagggtacaagggtaataactactaataataattcaataacagttggtgagttaatacaattcac

SEQ ID NO: 679794 - DNA, 75 bp, synthetic construct
  source 1..75: mol_type = other DNA
cttcctgctgtttttgctgttctgtgccggtttttcgttatccatttacctgccgtttatcccgtttatcttctg

SEQ ID NO: 679795 - DNA, 75 bp, synthetic construct
  source 1..75: mol_type = other DNA
tccaaacgataccgaccagatggacatgcgcacgctgtggaacaccgatactacgcgtgctcgcgcggagctgaa

SEQ ID NO: 679796 - DNA, 75 bp, synthetic construct
  source 1..75: mol_type = other DNA
aaggtgaaaaagtgaagctgaaaatgggcggcgcgctgcgcgaacagctggagattggcgttaatctttccggtc

SEQ ID NO: 679797 - DNA, 75 bp, synthetic construct
  source 1..75: mol_type = other DNA
tgggtaacgcttggcgcatggtatcagacctttgccactgctaaccagcgtctggccgagctggctgacagagct

SEQ ID NO: 679798 - DNA, 75 bp, synthetic construct
  source 1..75: mol_type = other DNA
aaatgaaggacattggtgattacaccatggtcacaaccgaaaccatctgggcgggttataccaccgtcagggtgc

SEQ ID NO: 679799 - DNA, 75 bp, synthetic construct
  source 1..75: mol_type = other DNA
catggtcacaaccgaaaccatctgggcgggttataccaccgtcagggtgctttcaactgccggcagcaactccgt

SEQ ID NO: 679800 - DNA, 75 bp, synthetic construct
  source 1..75: mol_type = other DNA
atgtcagtaagcaatatgccacctattgatagagctgagcaatcagctgctcatgaaatacagcaagcgaaagtt

SEQ ID NO: 679801 - DNA, 75 bp, synthetic construct
  source 1..75: mol_type = other DNA
ttccaggctcgttatattgctctcgggcagtccgtagctggtactgcaaacgctgatgcgaccttcaaagttcaa

SEQ ID NO: 679802 - DNA, 75 bp, synthetic construct
  source 1..75: mol_type = other DNA
ctggccctcggcgtctatcccgacgtctcccttgctgaagccagaatcaaacgcgacgatgcccgaaaaattatc

SEQ ID NO: 679803 - DNA, 75 bp, synthetic construct
  source 1..75: mol_type = other DNA
cattcagctcagcctcttcaggactcaccctgaccccgggagtaagtaataccaatgagtctggcatcgcgcagg

SEQ ID NO: 679804 - DNA, 75 bp, synthetic construct
  source 1..75: mol_type = other DNA
ataccggcggtttcgttgatcttgggacctatgagtatgtcctgaaaagcgacggcaacagcaactggaacctga

SEQ ID NO: 679805 - DNA, 75 bp, synthetic construct
  source 1..75: mol_type = other DNA
aagatgaaaatgtttctggtttgacattgattgcatatgatttagaagattttattgacagactagtagtcgaag

SEQ ID NO: 679806 - DNA, 75 bp, synthetic construct
  source 1..75: mol_type = other DNA
ctttgatgtcggtgtggggaggtgcgtttgccgcagtgggcccaacgaaagatatgagtttaggtgcaaatttaa

SEQ ID NO: 679807 - DNA, 75 bp, synthetic construct
  source 1..75: mol_type = other DNA
tagcctttaaaaaagaattagttttaaatgccggaggttatcaaaatgaatacttatatgaagattattcattat

SEQ ID NO: 679808 - DNA, 75 bp, synthetic construct
  source 1..75: mol_type = other DNA
gacttccaggattatcaggcgatcattggtcaccaggcggtggcgctcgacccgaacgataccgaccagatggac

SEQ ID NO: 679809 - DNA, 75 bp, synthetic construct
  source 1..75: mol_type = other DNA
ctgataactgaaggtatgaatattattttggtgcaaatttgctccgtgtttatctatatgattagatatgttatt

SEQ ID NO: 679810 - DNA, 75 bp, synthetic construct
  source 1..75: mol_type = other DNA
cagtttcagcctctctggcagataaacctactgaagtcatctcgcgattactgaatgcaaaagcagatattaatt

SEQ ID NO: 679811 - DNA, 75 bp, synthetic construct
  source 1..75: mol_type = other DNA
acctgaaggtcaggtaatggtcgcacaagacgtagcagttaaagctcacgttaacgaccagtttggcaacccggt

SEQ ID NO: 679812 - DNA, 75 bp, synthetic construct
  source 1..75: mol_type = other DNA
ttaacgttatgtgggcaggaccgtggtcatcgcgccatcaggatgaagtgttagcggaagcgaaagctaaccccg

SEQ ID NO: 679813 - DNA, 75 bp, synthetic construct
  source 1..75: mol_type = other DNA
gaactgggaacgctacggcaataaacagctggagctgctggacgccaacgccattcgccgcgaggtcgccagcga

SEQ ID NO: 679814 - DNA, 75 bp, synthetic construct
  source 1..75: mol_type = other DNA
atgaccgaacataccagcagttactacgccgccagtgcgaataaatacgcgccattcgacacactgaatgagtca

SEQ ID NO: 679815 - DNA, 75 bp, synthetic construct
  source 1..75: mol_type = other DNA
accgctggacgggcaacttcctgctgaccctgtcacgtatgccacagtttggtcgcctcgataaaaacatttact

SEQ ID NO: 679816 - DNA, 75 bp, synthetic construct
  source 1..75: mol_type = other DNA
ggtcgccttgataccaacatctattacatgcagggcacagcggccacggcgtcacctgtacccatcttgccgggc

SEQ ID NO: 679817 - DNA, 75 bp, synthetic construct
  source 1..75: mol_type = other DNA
cacagcggcgggcatattcacccgttgaacctcgccattggtgaagccgacgccatccgcctcaacggcgggcgc

SEQ ID NO: 679818 - DNA, 75 bp, synthetic construct
  source 1..75: mol_type = other DNA
tcgctacactggtgcgctgctggatcacagcggcgggcatattcacccgctgaacctcgccattggtgaagccga

SEQ ID NO: 679819 - DNA, 75 bp, synthetic construct
  source 1..75: mol_type = other DNA
gtgacctttatcgatctggctggtgaccctacctacccagttgaagaaaacagcggtttggttgtcccacgtatg

SEQ ID NO: 679820 - DNA, 75 bp, synthetic construct
  source 1..75: mol_type = other DNA
ggtgatatctcttttgatgccgcctttggcgtgtctcccggttcctttaccctggatgcttccgccgaaagcctg

SEQ ID NO: 679821 - DNA, 75 bp, synthetic construct
  source 1..75: mol_type = other DNA
ggcgttaaggatcgctacggttggaccagtgttgacgatgacgggatgattaagatgcaaagtgaattttctctg

SEQ ID NO: 679822 - DNA, 75 bp, synthetic construct
  source 1..75: mol_type = other DNA
gccgaaactgctgaaaaccttcccgcagttgaagggcgtgaaaatcgactatcgctggacgggcaacttcctgct

SEQ ID NO: 679823 - DNA, 75 bp, synthetic construct
  source 1..75: mol_type = other DNA
agatccagcacaccacgcccgccgtggtgcgcactaccaaaggccaggtgacggcgaagtatgtgattgtcgccg

SEQ ID NO: 679824 - DNA, 75 bp, synthetic construct
  source 1..75: mol_type = other DNA
atttaccaacagcttgctaaactgcgtcgccaggtttcccaggcgctaggcgcggcccgcaactatagcgaccgt

SEQ ID NO: 679825 - DNA, 75 bp, synthetic construct
  source 1..75: mol_type = other DNA
ccgatggtcaacagctaacccatatcacctttgccgatactgctgcgggtggattagcccccgtagaactgactg

SEQ ID NO: 679826 - DNA, 75 bp, synthetic construct
  source 1..75: mol_type = other DNA
cagcggcggaagctggtcggtatttattccggcgcagcagtttgccggattaagcgacggcagctacaccatcag

SEQ ID NO: 679827 - DNA, 75 bp, synthetic construct
  source 1..75: mol_type = other DNA
aacggtcaccatcgccacggtggcgggtgacgatattatcaacaacgccgagcagcttgccgggcagaccatcag

SEQ ID NO: 679828 - DNA, 75 bp, synthetic construct
  source 1..75: mol_type = other DNA
ggtcaatattgccgtctctggcaccaacaccgccggaacgacaaccagtattacccatccggtgaccgtcgatct

SEQ ID NO: 679829 - DNA, 75 bp, synthetic construct
  source 1..75: mol_type = other DNA
caccggcaccgttcagacggacggcagctggagcgtcagcgtgccgacggcggatctcagcaatctgaccgccag

SEQ ID NO: 679830 - DNA, 75 bp, synthetic construct
  source 1..75: mol_type = other DNA
attccgaccacgctggcgcaaatcaccagccagaccacgcgcgatactacgccgattatcagcggggtgatcacc

SEQ ID NO: 679831 - DNA, 75 bp, synthetic construct
  source 1..75: mol_type = other DNA
gctcgcgcgatatcacgatcgacgccaatctgcctggcctgcgggtcgataccgtggcgggcgatgatgttatta

SEQ ID NO: 679832 - DNA, 75 bp, synthetic construct
  source 1..75: mol_type = other DNA
cgattggcacgaccacctataccaccgtgctggacgccaacggcaactggagcatcggcgtgcctgccagcgtga

SEQ ID NO: 679833 - DNA, 75 bp, synthetic construct
  source 1..75: mol_type = other DNA
tcaccgtcacctttggcgggaaaacctataccgccaccgtagcaggcgatggcagctggacaaccagcgtacccg

SEQ ID NO: 679834 - DNA, 75 bp, synthetic construct
  source 1..75: mol_type = other DNA
ccgatctggcggcgttacccgatggcagcgcctccgcgcaggccagcgtcagcaatataaacggcaatagcgcct

SEQ ID NO: 679835 - DNA, 75 bp, synthetic construct
  source 1..75: mol_type = other DNA
tggagcgtcagcgtaccggcgaacgttttgcaggcgctgggtaacggtgaactgaccatcagcgcctcgttgacc

SEQ ID NO: 679836 - DNA, 75 bp, synthetic construct
  source 1..75: mol_type = other DNA
tggcggcagtagcggcctgaatgcaggtgctgtgctgacggttaccatcaacagtgtggcgtattccgccacggt

SEQ ID NO: 679837 - DNA, 75 bp, synthetic construct
  source 1..75: mol_type = other DNA
ggtgatcaacgggagcagcagcggattaacggcgggaacggcgttaacggtcgtgattaacaacgtcacttacgc

SEQ ID NO: 679838 - DNA, 75 bp, synthetic construct
  source 1..75: mol_type = other DNA
aggtcaccgtcggcacgctgacgtggtatggctcgatcgtggcatttgataaagagggcgacggctatctcgact

SEQ ID NO: 679839 - DNA, 75 bp, synthetic construct
  source 1..75: mol_type = other DNA
gggctggctgaaggcacgccgcttaccgtcacgattaataatgtggaatacaccactgcggtgcaggccgatggt

SEQ ID NO: 679840 - DNA, 75 bp, synthetic construct
  source 1..75: mol_type = other DNA
cacgaccgacgcctccggcaactggagcgtcacggttccggcatcggcggtaaccgcactgggccaggccaacta

SEQ ID NO: 679841 - DNA, 75 bp, synthetic construct
  source 1..75: mol_type = other DNA
cacggcgacggtgggcagcaatctcacctggagcgtgaacgttccggcggcagatttacaggcgctgggcgacgg

SEQ ID NO: 679842 - DNA, 75 bp, synthetic construct
  source 1..75: mol_type = other DNA
tggctggcgaatggcggcatggacgtggttgatttccgcctctcaacggtaggcgtgaccgctaacttaagcagc

SEQ ID NO: 679843 - DNA, 75 bp, synthetic construct
  source 1..75: mol_type = other DNA
ccaccaccgccccagtcgggcagacgctgaccctgaccttaaacggcaaaacctacaccaccacggtacagaccg

SEQ ID NO: 679844 - DNA, 75 bp, synthetic construct
  source 1..75: mol_type = other DNA
agcaaccagcctgcgggcacgcaggtaactgttacgctcaacgggcaaaattacaccaccacagccgatgcttcc

SEQ ID NO: 679845 - DNA, 75 bp, synthetic construct
  source 1..75: mol_type = other DNA
gctggacaggtacgaaccgtacggcctgctactggccgcccatcaaaatataatccggcaggaaatggaagccgc

SEQ ID NO: 679846 - DNA, 75 bp, synthetic construct
  source 1..75: mol_type = other DNA
gccggttacaaccccgacgaggttcgggaccgtaacgcgcttatccaggcgctggacaggtacgaaccgtacggc

SEQ ID NO: 679847 - DNA, 75 bp, synthetic construct
  source 1..75: mol_type = other DNA
cagtttcagcccatcggacagccgcccatatcggtttaccgcgagctgcgcaaacttagtaatcagatcacgacc

SEQ ID NO: 679848 - DNA, 75 bp, synthetic construct
  source 1..75: mol_type = other DNA
ggcggggaacaccggtccggtggtatcgaaaacggtggtggtcgatacgattaaccccaccgccacgccgaccat

SEQ ID NO: 679849 - DNA, 75 bp, synthetic construct
  source 1..75: mol_type = other DNA
atgttcgctttactcctgctcacgccgctgcttttttcgctgctctgttttgcctgccggaaacggaggctctct

SEQ ID NO: 679850 - DNA, 75 bp, synthetic construct
  source 1..75: mol_type = other DNA
gtgaagcgccgagtccggtcagcgccctgctctccgccgtattgctgaactgcgcgctgttggtgctgattcgct

SEQ ID NO: 679851 - DNA, 75 bp, synthetic construct
  source 1..75: mol_type = other DNA
aataccatcgccacggacgatgtgattaacgccgcagaaaaaggcgctgatttaactctttccggcaccaccact

SEQ ID NO: 679852 - DNA, 75 bp, synthetic construct
  source 1..75: mol_type = other DNA
gcgggcgatgatgtgattaacaacgtcgaacacactcaggcgcagattatcagcggcaccaccacgggcgcggtc

SEQ ID NO: 679853 - DNA, 75 bp, synthetic construct
  source 1..75: mol_type = other DNA
ccgcacttgctaataacggctacaccctgaccgccacggtcagcgatctggcgggtaaccctggcagcgccagca

SEQ ID NO: 679854 - DNA, 75 bp, synthetic construct
  source 1..75: mol_type = other DNA
ggcgttaaccgttgatgtggcaggccagagcagcgccggaaatccggtcagcgtcagccatccgttcaccgtcga

SEQ ID NO: 679855 - DNA, 75 bp, synthetic construct
  source 1..75: mol_type = other DNA
tctattccgaccacgctggcgcaaatcaccagccagaccacgcgcgatactacgccgattatcagcggggtgatc

SEQ ID NO: 679856 - DNA, 75 bp, synthetic construct
  source 1..75: mol_type = other DNA
ggaaaccccggcagcgccagccgtggcgtgacgctgaacggcgacgtgcccaccgtcaccatcaacacctttgcg

SEQ ID NO: 679857 - DNA, 75 bp, synthetic construct
  source 1..75: mol_type = other DNA
ccgccgaacagcagcagccgttaacccttaacggctcgaccagcgcggaagtggggcagacggtcaccgtcacct

SEQ ID NO: 679858 - DNA, 75 bp, synthetic construct
  source 1..75: mol_type = other DNA
ttcgcaggctaccgacgacaccacaccgctgttaaacggtgtgctctccgctccgcttgccagcggagaagtggt

SEQ ID NO: 679859 - DNA, 75 bp, synthetic construct
  source 1..75: mol_type = other DNA
cggcggatattcaggccatcggtaatggcgatctgacggttaacgcttcggtgaccaacggcgttggcaacaccg

SEQ ID NO: 679860 - DNA, 75 bp, synthetic construct
  source 1..75: mol_type = other DNA
agcgcagactatcagcgggcaagtaacgggcgcggcggcgggcgatacggttaccgtaacgcttggcgggaaaac

SEQ ID NO: 679861 - DNA, 75 bp, synthetic construct
  source 1..75: mol_type = other DNA
gcggcacgcgggatatcaccattgatgccaacctgccggggctgcgcgtagataccgtggcgggcgatgatatcg

SEQ ID NO: 679862 - DNA, 75 bp, synthetic construct
  source 1..75: mol_type = other DNA
gagcgacaaagccggaaacccggcctcggttaatcacaacctgacggtggatacttctgttccggtcgtcaccat

SEQ ID NO: 679863 - DNA, 75 bp, synthetic construct
  source 1..75: mol_type = other DNA
cttacactgccacggtgcaggcgaatttaagctggagcatcgatgttccggccccggcgttacaggcgctgggca

SEQ ID NO: 679864 - DNA, 75 bp, synthetic construct
  source 1..75: mol_type = other DNA
tattaagtctgccaagttttaaatcggtagatatttacgatagaaattatggaaaaaaagactcctcttatcagt

SEQ ID NO: 679865 - DNA, 75 bp, synthetic construct
  source 1..75: mol_type = other DNA
atacgggaaatggttcatcgacaaatccccgtattcggataagcaggtagaaagctttcgatacaataatcgggg

SEQ ID NO: 679866 - DNA, 75 bp, synthetic construct
  source 1..75: mol_type = other DNA
ttgaaaaaaaacaagaaagaaacaaatcctgaagataattttgtcttaaaattctcacaggaagaaatcaatgag

SEQ ID NO: 679867 - DNA, 75 bp, synthetic construct
  source 1..75: mol_type = other DNA
cgctgatccatactattccggccgcggtgattggtggtgcatcaattgttgtgttcgggctgattgccgtcgcag

SEQ ID NO: 679868 - DNA, 75 bp, synthetic construct
  source 1..75: mol_type = other DNA
gaagccgcattatccgctgaagatatcccgcaggaggatgatatcgaccggatgggcgtgtcaccggaagactgg

SEQ ID NO: 679869 - DNA, 75 bp, synthetic construct
  source 1..75: mol_type = other DNA
gtttttgtatcggaatatttagccgaaacatccatggcagatttgggaatagaaattcccgttgataagtattca

SEQ ID NO: 679870 - DNA, 75 bp, synthetic construct
  source 1..75: mol_type = other DNA
ttccggcaattcagggatatattgcagatatgttccactcacttcagctttcattcctggtttctatgctctgct

SEQ ID NO: 679871 - DNA, 75 bp, synthetic construct
  source 1..75: mol_type = other DNA
tctaaacacttacgtgaactatgtgatgtgtatgctgttcctaccgcagatatgctcaagactgtctacacggta

SEQ ID NO: 679872 - DNA, 75 bp, synthetic construct
  source 1..75: mol_type = other DNA
tggtattttcctctacggtacaaattctttccttgcatcagaagggaaggatgaaattggcgttaaaagtggaga

SEQ ID NO: 679873 - DNA, 75 bp, synthetic construct
  source 1..75: mol_type = other DNA
gcgtatgaatttataaagcctcgttataaatttgtcggtgagtattatatagaaattgaaaacacctatcgctca

SEQ ID NO: 679874 - DNA, 75 bp, synthetic construct
  source 1..75: mol_type = other DNA
caaagaggctcgtggtggagaattacagatcaacgaattacttcccgccagcctggatgcagcaaaagcccatgg

SEQ ID NO: 679875 - DNA, 75 bp, synthetic construct
  source 1..75: mol_type = other DNA
atctatggcaaagcattggctgaaaaaggctatctcgttctcgcttatgacgccagtttccagggagaatctggt

SEQ ID NO: 679876 - DNA, 75 bp, synthetic construct
  source 1..75: mol_type = other DNA
gtgaaacgctttcgcgtttttcgtgcgccgcttcacgcgctgatccatactattccggccgcggtgattggtggt

SEQ ID NO: 679877 - DNA, 75 bp, synthetic construct
  source 1..75: mol_type = other DNA
caagggcgccgacaaaacgagcttcattccagtctcctgggaaaccgcgacggccgcaggagatgacagccataa

SEQ ID NO: 679878 - DNA, 75 bp, synthetic construct
  source 1..75: mol_type = other DNA
cgcggtgagcaaggccactacgttgcttgctataagcgtaaggcagaaaatgatcagccaaaatggttttgtagc

SEQ ID NO: 679879 - DNA, 75 bp, synthetic construct
  source 1..75: mol_type = other DNA
ttgcgtatcctttcctgcgcgctgttcgttaacccctggattatttcattagtgaagctgttacatgctattgag

SEQ ID NO: 679880 - DNA, 75 bp, synthetic construct
  source 1..75: mol_type = other DNA
tactgaaatcattattgatgaaagcatgacgggtacacaattgcagcgaagtcgtcctgacctgttacctaaaga

SEQ ID NO: 679881 - DNA, 75 bp, synthetic construct
  source 1..75: mol_type = other DNA
tcatctgctcgtttaagccatccagcattcatcagaggaaaccgacttcctcaaactgaccaggccatcattatc

SEQ ID NO: 679882 - DNA, 75 bp, synthetic construct
  source 1..75: mol_type = other DNA
tcttcttctcgtttaaaccaccctgcatttatcagaggaaaccggcaacctcaaactgaccaggccatcattatt

SEQ ID NO: 679883 - DNA, 75 bp, synthetic construct
  source 1..75: mol_type = other DNA
aatggagagaacattaaagtcgtgctggaaggcggatcacttcagatagtgatagatccgaccgttctgaatttg

SEQ ID NO: 679884 - DNA, 75 bp, synthetic construct
  source 1..75: mol_type = other DNA
attatctggcacccatacccccgtacacactgccactttacgaccgttgatcgtggagagttgatggcgttcggc

SEQ ID NO: 679885 - DNA, 75 bp, synthetic construct
  source 1..75: mol_type = other DNA
aggttgaaggcctgcgccgtttgcgcgaaatcctgcaaacgcaggggctgaatatcgaagcgctgttccgcgagt

SEQ ID NO: 679886 - DNA, 75 bp, synthetic construct
  source 1..75: mol_type = other DNA
atgatttacgtctaatagaaccaacaattgaaagtcaattaataaatgttattgagcatagtgatggtgttggta

SEQ ID NO: 679887 - DNA, 75 bp, synthetic construct
  source 1..75: mol_type = other DNA
aaggggacgattattataaagcgcatactggtgctaatccgcatcggccttctcgcctgaaagatgctgaagagg

SEQ ID NO: 679888 - DNA, 75 bp, synthetic construct
  source 1..75: mol_type = other DNA
aagcaggtcagggaactgatggcgcaacttaacgtatcggtgctgttaagcaagctggatgagttaatggacgtc

SEQ ID NO: 679889 - DNA, 75 bp, synthetic construct
  source 1..75: mol_type = other DNA
tttaccggtcggcagaacgtgtatatgtccgggctgatgatgggcctgggccgggaagagatcgagcgcttaatg

SEQ ID NO: 679890 - DNA, 75 bp, synthetic construct
  source 1..75: mol_type = other DNA
tggtcatcgctgctggattatctctttttgccgatgatcaacgtcttgttggcgaaaatctatctctccgccctc

SEQ ID NO: 679891 - DNA, 75 bp, synthetic construct
  source 1..75: mol_type = other DNA
acttctggcggcgtaaaggaatgaataaaagctggaaggaacacttccactatttattaatgccgctggttggcg

SEQ ID NO: 679892 - DNA, 75 bp, synthetic construct
  source 1..75: mol_type = other DNA
tatccaatgctagaaattaatggaaactgcaaaatcatcggcgttgtggttgatgccaaaatactaaacatccca

SEQ ID NO: 679893 - DNA, 75 bp, synthetic construct
  source 1..75: mol_type = other DNA
tattgatggcaattatgggttccggtaacgatctggaaattgacggtattggcggcggtaatccactgaccagta

SEQ ID NO: 679894 - DNA, 75 bp, synthetic construct
  source 1..75: mol_type = other DNA
cagccgctttaaagacccggatgccgcactgccggagattgcactgtacgtcggcggcaagctgttccagtcgat

SEQ ID NO: 679895 - DNA, 75 bp, synthetic construct
  source 1..75: mol_type = other DNA
cttcctgacggcggtctacggcggcgttatctttattgccgcatcgttctttatgcaactgttcttcccggatat

SEQ ID NO: 679896 - DNA, 75 bp, synthetic construct
  source 1..75: mol_type = other DNA
accactggcgaaggcctgggggaacgctgttatcaccctgacggaaagcaatgccggttttgtgcgctgtagcgg

SEQ ID NO: 679897 - DNA, 75 bp, synthetic construct
  source 1..75: mol_type = other DNA
aagggcgatgtgcctgtgatgatcaccaagcattgcctgcgttttgcctttaatctgtgcccgaaacaggcgaaa

SEQ ID NO: 679898 - DNA, 75 bp, synthetic construct
  source 1..75: mol_type = other DNA
cgcctgatattagccagagagctctggactaagatccgcgatgacgttcgccgtgactttaacgctcgcctaaag

SEQ ID NO: 679899 - DNA, 75 bp, synthetic construct
  source 1..75: mol_type = other DNA
atcctgaaatcgagccacgcaatgggaagttggttgtagcgaagcttgaaggcgataacgaagcgacctttaaga

SEQ ID NO: 679900 - DNA, 75 bp, synthetic construct
  source 1..75: mol_type = other DNA
tcacctatctggatatccagccggagttcccgccatggcagagaatgatcctgggaggaataacgatagccagct

SEQ ID NO: 679901 - DNA, 75 bp, synthetic construct
  source 1..75: mol_type = other DNA
gccactcccctgccgggcgggtggagaagtttgaatacaacgccgcactcggtcagttaagccgttacacggcgg

SEQ ID NO: 679902 - DNA, 75 bp, synthetic construct
  source 1..75: mol_type = other DNA
tttagtttggccgtatgacaccgacaatgatggaattgccgatgctggcggcatggacccgatgggttcagatgg

SEQ ID NO: 679903 - DNA, 75 bp, synthetic construct
  source 1..75: mol_type = other DNA
tatgctcaagactgtctacacggtaaggctcgatctctttaatcaccttcattttagcgttgaagagtgccctta

SEQ ID NO: 679904 - DNA, 75 bp, synthetic construct
  source 1..75: mol_type = other DNA
atggttatcattaatcctatctttatgtctaaattaagcaagatctttcctgaaataagtacacaaaaaatagag

SEQ ID NO: 679905 - DNA, 75 bp, synthetic construct
  source 1..75: mol_type = other DNA
cgaagcgtttatatctcgtgccagagttttatttgaggaagcaaacagtgagctggcttattacaacataagaca

SEQ ID NO: 679906 - DNA, 75 bp, synthetic construct
  source 1..75: mol_type = other DNA
acagggcacctttggcgctaaaacgtttaacaagtcactaggcagtgacgctggttcggctggctcactgatcca

SEQ ID NO: 679907 - DNA, 75 bp, synthetic construct
  source 1..75: mol_type = other DNA
gcaggcattattttcggtggtatcggtctgataatcatggtcccctcctctaaaaaatcacgcaggaacaggaag

SEQ ID NO: 679908 - DNA, 75 bp, synthetic construct
  source 1..75: mol_type = other DNA
gtgtattgcgatccgccgtatgagggtacgttttccggctatcacactgatggtttcactgaagatgaccagtat

SEQ ID NO: 679909 - DNA, 75 bp, synthetic construct
  source 1..75: mol_type = other DNA
gcttcaggcacgcaaattgcggaagagctacgtaagtcgggccgtgaggtttatctgtcggtcggcgaacattac

SEQ ID NO: 679910 - DNA, 75 bp, synthetic construct
  source 1..75: mol_type = other DNA
atgaagatgataaaaatggactggaaatttttgctggtctggctgattccgtttttatgggtggttgcccagtta

SEQ ID NO: 679911 - DNA, 75 bp, synthetic construct
  source 1..75: mol_type = other DNA
tagcatctttatcatttattcttaccggatgtaatgaagatacaaaatctgtcgattggtggactaatcacccga

SEQ ID NO: 679912 - DNA, 75 bp, synthetic construct
  source 1..75: mol_type = other DNA
acaattggggcatatgtagcaactcaagctctgcttggtatatcattactttttgtgactcgatttttctgcgat

SEQ ID NO: 679913 - DNA, 75 bp, synthetic construct
  source 1..75: mol_type = other DNA
caggcgcggcgaatgatcccacgattaaaggcgggcgcttaattgttgaaaaagatgggattgccgtctttgccg

SEQ ID NO: 679914 - DNA, 75 bp, synthetic construct
  source 1..75: mol_type = other DNA
tttactacacgacacgttttatttatgcgttaaaatttgcagtggccatgactgtcgccaatatgggctatcagg

SEQ ID NO: 679915 - DNA, 75 bp, synthetic construct
  source 1..75: mol_type = other DNA
attacaaagcgccaacccaataaaactgaatgattcaaaagtaactttatccggaagtggaacgaatgaattgta

SEQ ID NO: 679916 - DNA, 75 bp, synthetic construct
  source 1..75: mol_type = other DNA
atccagattctatttcttggggatacaggggaggaaaacttgatctaaatggtaataatattacctttactagat

SEQ ID NO: 679917 - DNA, 75 bp, synthetic construct
  source 1..75: mol_type = other DNA
caggaataaacgatggaggtcttaaggttggtgatggtaccgttattcttaaccaggaagccgatagtaatggaa

SEQ ID NO: 679918 - DNA, 75 bp, synthetic construct
  source 1..75: mol_type = other DNA
aaccggcacatatcaacccgacaatacagcagaatttttcatgggtgggtagaaaagcttggtctcgaagcttcg

SEQ ID NO: 679919 - DNA, 75 bp, synthetic construct
  source 1..75: mol_type = other DNA
cagcttcaaccggacaaaaatgccctgaaagcggtgtttggaaagtggtaggaacgccttcaactacagcaccaa

SEQ ID NO: 679920 - DNA, 75 bp, synthetic construct
  source 1..75: mol_type = other DNA
ggggggggttggtcccggctggaaagcccccttcgatatccgcttacagatacgcgatgaaggcctgatactcaa

SEQ ID NO: 679921 - DNA, 75 bp, synthetic construct
  source 1..75: mol_type = other DNA
tgaccgtaggactgttcgtgatgactttttttaatccgggagccaatctttttgtggtggtgcaaaccagcctgg

SEQ ID NO: 679922 - DNA, 75 bp, synthetic construct
  source 1..75: mol_type = other DNA
aaacaattacagggacacaataaaggtgatactttaaagacaattatcaatatattacaaggtaaaaatgcgcaa

SEQ ID NO: 679923 - DNA, 75 bp, synthetic construct
  source 1..75: mol_type = other DNA
aaattatggacaggtcataaaaaaagaaaagaagagcacaaaagtaaagggaatggcttcgggtattcactcttc

SEQ ID NO: 679924 - DNA, 75 bp, synthetic construct
  source 1..75: mol_type = other DNA
gataagcatggggcattagtcggaacccttgataaagcgccaatgattgattttagcagtactgatttacttggt

SEQ ID NO: 679925 - DNA, 75 bp, synthetic construct
  source 1..75: mol_type = other DNA
gttgatgataataccagtaagaaaaacgacaagtcatcattgtatgtatcatggactctgagttttactgctcca

SEQ ID NO: 679926 - DNA, 75 bp, synthetic construct
  source 1..75: mol_type = other DNA
cttaatggtgcaacctttctgaataatactcctataagtatagataaaggagcaaaagttatagcacaaaattcc

SEQ ID NO: 679927 - DNA, 75 bp, synthetic construct
  source 1..75: mol_type = other DNA
tacaaacttgaagaaaaccgtcaaacattactccatattgtgtttactggtgataaagataaactatcctcagga

SEQ ID NO: 679928 - DNA, 75 bp, synthetic construct
  source 1..75: mol_type = other DNA
cgcaggtactctttctgctgggctatgacagtgaaaagtatcctgagcatgtatgtcgggagttattaaaagaac

SEQ ID NO: 679929 - DNA, 75 bp, synthetic construct
  source 1..75: mol_type = other DNA
gagttatacgagcgcgccgcttgcggtgaatttggtgatgttgctgaatatgtggctccaattataatcgaatca

SEQ ID NO: 679930 - DNA, 75 bp, synthetic construct
  source 1..75: mol_type = other DNA
atataaaattaccgcgctattctagcacatcaggcaatagtattgatgttaaatgtgatatcagaggtatcggta

SEQ ID NO: 679931 - DNA, 75 bp, synthetic construct
  source 1..75: mol_type = other DNA
catggaagaagtgggcatcaaatggaggggctatctcagcagatgttggtgttctcgttgatggagaaatactag

SEQ ID NO: 679932 - DNA, 75 bp, synthetic construct
  source 1..75: mol_type = other DNA
ggaattaaatatttaaaaggtcctgtattatcctctccactatcagaggatgaatttttacgtaagttgttagag

SEQ ID NO: 679933 - DNA, 75 bp, synthetic construct
  source 1..75: mol_type = other DNA
aacgacagaacccgcatccagacgatttatcagccggggagcttcacgccactcatcagggttgaaaccgccacc

SEQ ID NO: 679934 - DNA, 75 bp, synthetic construct
  source 1..75: mol_type = other DNA
agctcggcggtgggcgtcgcgctcgcggcaaccggtggcggtgatggttctaataccgggaccacaacaaccacg

SEQ ID NO: 679935 - DNA, 75 bp, synthetic construct
  source 1..75: mol_type = other DNA
aataccatatgttgatatggcatctttagatgttgaacttccatatatagactataaaggagaaactaagtcagg

SEQ ID NO: 679936 - DNA, 75 bp, synthetic construct
  source 1..75: mol_type = other DNA
ttgtcctgggctacaacgacaggttttccggatgtgtcgatgactcctaccgtcggtacccggttaaacatctgg

SEQ ID NO: 679937 - DNA, 75 bp, synthetic construct
  source 1..75: mol_type = other DNA
atggaaaagcagcaacttttatatggcgttaaatgcggtgataaagtccattttgactttgccgtcaggctgcct

SEQ ID NO: 679938 - DNA, 75 bp, synthetic construct
  source 1..75: mol_type = other DNA
aatataaagatgttttaactgtcggattttcaatggtatcatttattattgcatgcacatccttgttcttttcag

SEQ ID NO: 679939 - DNA, 75 bp, synthetic construct
  source 1..75: mol_type = other DNA
gcagtggtatttgaacactttcattcttgctaccgctaacatgttaatttcactgttcgttgtgacgatgaccgc

SEQ ID NO: 679940 - DNA, 75 bp, synthetic construct
  source 1..75: mol_type = other DNA
ccaagccgggagcgcaagcggattactaccgtagtgttcttgttgaaggtggcattgtggaaattaccggagaaa

SEQ ID NO: 679941 - DNA, 75 bp, synthetic construct
  source 1..75: mol_type = other DNA
ggcaatggaacagagaaaactgtgctggctctaaaaagagcacgaagcaaagctaaatatatttttcatgattcg

SEQ ID NO: 679942 - DNA, 75 bp, synthetic construct
  source 1..75: mol_type = other DNA
ctttaagcccaaccagaagaagccggaatatgacgacctggtggcgttgtaccagggcaaagagctgtttcgcta

SEQ ID NO: 679943 - DNA, 75 bp, synthetic construct
  source 1..75: mol_type = other DNA
gtattaccggcagccttctgctctgtgtgggcgctcaggctcagccttataaccggaccctccctgctgtagtta

SEQ ID NO: 679944 - DNA, 75 bp, synthetic construct
  source 1..75: mol_type = other DNA
gacgctgacagggccgtgccgtccttcatatgttgccatgaccgccgaatccggcgtggtgacatccggatttgg

SEQ ID NO: 679945 - DNA, 75 bp, synthetic construct
  source 1..75: mol_type = other DNA
atgacgtcattatccgaacagctgcaggcaataaatgccgcgtatcaggagtccctgaaaagtgaggaaaaacag

SEQ ID NO: 679946 - DNA, 75 bp, synthetic construct
  source 1..75: mol_type = other DNA
tcacctggtggcgacatctttgaagggctggctatctataacgccctgaaaaatcatccggcaaaaaaaatcgta

SEQ ID NO: 679947 - DNA, 75 bp, synthetic construct
  source 1..75: mol_type = other DNA
ccggcaaccgtcacctatttggacacgttcgaaatctgcgtatttggcacaaggcattgactgatgctcagatgg

SEQ ID NO: 679948 - DNA, 75 bp, synthetic construct
  source 1..75: mol_type = other DNA
ggtgcaatcccgctattagttcattagcagaagttaataccaattgggatgaatcgccaaacaaagaaggtagcg

SEQ ID NO: 679949 - DNA, 75 bp, synthetic construct
  source 1..75: mol_type = other DNA
tgattatatttatattgcgacccctcaagttgaaggtggggcatgcgcttcatcgtttattataacaggcgcatc

SEQ ID NO: 679950 - DNA, 75 bp, synthetic construct
  source 1..75: mol_type = other DNA
tgctttgcatcggtgttttgggcgaatatattgggaaaatatacattgaagtaaaaaaacgtcccagatatttta

SEQ ID NO: 679951 - DNA, 75 bp, synthetic construct
  source 1..75: mol_type = other DNA
gttttcgatatcagttcttagcgcaatattaattattttttctttcattaaatatattatggggcaaactctgca

SEQ ID NO: 679952 - DNA, 75 bp, synthetic construct
  source 1..75: mol_type = other DNA
gatccagaacctttttgacatcctccggcaacaggaacctccgcaggcaattattgaggcggagttcgcggttcc

SEQ ID NO: 679953 - DNA, 75 bp, synthetic construct
  source 1..75: mol_type = other DNA
aggtggcagaatccgatgccagcctgctttctcgtttggcccggacctataacgccgtcagtaaacccgccgggg

SEQ ID NO: 679954 - DNA, 75 bp, synthetic construct
  source 1..75: mol_type = other DNA
agccggtacagtgaaggtaaccccgctataccgggtgtttacgacgtcagtgtttatgtaaacgaccaaccaatc

SEQ ID NO: 679955 - DNA, 75 bp, synthetic construct
  source 1..75: mol_type = other DNA
aagcactgcaagtcattgattaaacttaattatcgcgaatcgcgagaattaggtttaggtgacaatccgcgagga

SEQ ID NO: 679956 - DNA, 75 bp, synthetic construct
  source 1..75: mol_type = other DNA
ctgaaaccagtgaagaagacgtgtctttcggcggtgcaacgctgggggctaaaaaactgtcctctaaaatcattc

SEQ ID NO: 679957 - DNA, 75 bp, synthetic construct
  source 1..75: mol_type = other DNA
gccaagccgggagccaagcggattactaccgtagtgttcttgttgaaggtggcattgtggaaattaccggagaaa

SEQ ID NO: 679958 - DNA, 75 bp, synthetic construct
  source 1..75: mol_type = other DNA
cttttagattaatgggtcctgttatcatgcttctgaccacgccacaattgttgtcgactttgggaaatgtggaat

SEQ ID NO: 679959 - DNA, 75 bp, synthetic construct
  source 1..75: mol_type = other DNA
gtcattgagagcttcgcagaagcgttaagtgtcacgaacggtgcaatagtgatccacacccaacgcctgaaatca

SEQ ID NO: 679960 - DNA, 75 bp, synthetic construct
  source 1..75: mol_type = other DNA
gagactaccggctacgttaaatcggacggcgagtggttcatcaactgcgagaaaatccgggtgactggcgcgaag

SEQ ID NO: 679961 - DNA, 75 bp, synthetic construct
  source 1..75: mol_type = other DNA
ggttgccacgctcgttctcacgcgtctgggtgatgaccgacaccgggcgggagactaccggctacgttaaatcgg

SEQ ID NO: 679962 - DNA, 75 bp, synthetic construct
  source 1..75: mol_type = other DNA
cgtttcagcaataagcttcgcacctggatgagcgacggtgtggcagtgaaaggtgattacacccagaatggtttt

SEQ ID NO: 679963 - DNA, 75 bp, synthetic construct
  source 1..75: mol_type = other DNA
attgcacgcgaagaggaactgcgccgccaggatcaggactatatccacgaaaacgagccggaacagcgccagcag

SEQ ID NO: 679964 - DNA, 75 bp, synthetic construct
  source 1..75: mol_type = other DNA
ccgggcaacagatccctaccgaaaacgagctttgtacacaatataacgtcagccgcattaccattcgcaaagcca

SEQ ID NO: 679965 - DNA, 75 bp, synthetic construct
  source 1..75: mol_type = other DNA
ataactgcgtcgacatttacccgcaactgaataaagcattttctggcggtaatgcggtgaacgtggcggtgtatt

SEQ ID NO: 679966 - DNA, 75 bp, synthetic construct
  source 1..75: mol_type = other DNA
gtgcagcttcctcggcaacggcggcagcaaattccgccacggcggcaaaaacgtccgagacgaacgccaggtcat

SEQ ID NO: 679967 - DNA, 75 bp, synthetic construct
  source 1..75: mol_type = other DNA
gtgcagcttcctcggcaacggcggcagcaaattccgcaacggcggcaaaaacgtccgagacgaaagccaggtcat

SEQ ID NO: 679968 - DNA, 75 bp, synthetic construct
  source 1..75: mol_type = other DNA
gtgcagcttcctcggcaacggcggcaggaaattccgcgacggcggcaaaaacgtccgagacgaacgccaggtcat

SEQ ID NO: 679969 - DNA, 75 bp, synthetic construct
  source 1..75: mol_type = other DNA
gtgcagcttcctcggcaacggcggcagcaaattccgcgacggcggcaaaaacgtccgagacgaaggccaggtcat

SEQ ID NO: 679970 - DNA, 75 bp, synthetic construct
  source 1..75: mol_type = other DNA
gccacgaacgcttcagaggcggcgacctcagcccgggatgcggaggcctcaaaagacgcggcaaaatcatcagaa

SEQ ID NO: 679971 - DNA, 75 bp, synthetic construct
  source 1..75: mol_type = other DNA
gccacgaatgcttcagaggcggctacctcagcccgagatgcggaggcctcaaaagacgcggcaaaatcatcagaa

SEQ ID NO: 679972 - DNA, 75 bp, synthetic construct
  source 1..75: mol_type = other DNA
gccacgaatgcttcagaggcggcaacctcagcccgtgatgcggaggcctcaaaagacgcggcaaaatcatcagaa

SEQ ID NO: 679973 - DNA, 75 bp, synthetic construct
  source 1..75: mol_type = other DNA
gccacgaaggcttcagaggcggcgacctcagcccgcgatgcggaggcctcaaaagacgcggcaaaatcatcagaa

SEQ ID NO: 679974 - DNA, 75 bp, synthetic construct
  source 1..75: mol_type = other DNA
gccacgaaggcttcagaggcggccacctcagcccgggatgcggaggcctcaaaagacgcggcaaaatcatcagaa

SEQ ID NO: 679975 - DNA, 75 bp, synthetic construct
  source 1..75: mol_type = other DNA
gtaaaggcatcatcgtctcaactcccatcaatatgggcggtgctgcaatcggtagtagtatcaagggagaagatc

SEQ ID NO: 679976 - DNA, 75 bp, synthetic construct
  source 1..75: mol_type = other DNA
cctgaacaagttagtatgcatatttatgggaatgtggtcgatcagggctgtgatgtcgccaccaaaagtgcatta

SEQ ID NO: 679977 - DNA, 75 bp, synthetic construct
  source 1..75: mol_type = other DNA
atgaagaaaaaaacgatatttcagtgcgttatcttgttctttagcattcttaacatccatgtcgggatggctggg

SEQ ID NO: 679978 - DNA, 75 bp, synthetic construct
  source 1..75: mol_type = other DNA
acctgcgccatccccaatttatgtacgtgtaaagacatccggcggatatgaggcttttgtttctttaatttacaa

SEQ ID NO: 679979 - DNA, 75 bp, synthetic construct
  source 1..75: mol_type = other DNA
agccagatgaatgcctgacggtgagacaagataacactgtaacgtctgaagtttgtgagtcttcatctaatcaaa

SEQ ID NO: 679980 - DNA, 75 bp, synthetic construct
  source 1..75: mol_type = other DNA
caaaccatccatataggcgattttaatatcagtgatttccaggctgcaaatactgttagtgccgcggctgacctg

SEQ ID NO: 679981 - DNA, 75 bp, synthetic construct
  source 1..75: mol_type = other DNA
gcagaaggggtggtggtctgttatcgaggacaagttcaccattttgctggaatgtctgtgaattgtgtcgatagc

SEQ ID NO: 679982 - DNA, 75 bp, synthetic construct
  source 1..75: mol_type = other DNA
ctattgagcaacggctggaacagtctttagtttctattggtggtgttatttcggcaaaaatacatgttagctatg

SEQ ID NO: 679983 - DNA, 75 bp, synthetic construct
  source 1..75: mol_type = other DNA
tattcttgttgctgatgttgattggatgtgagcaacgtgaagagttaatttctaatttatctcaaagacaggcaa

SEQ ID NO: 679984 - DNA, 75 bp, synthetic construct
  source 1..75: mol_type = other DNA
gcctgatgcatccgcagtattataatgtggctgatcaaattattctgtttattatgtcaatgttattgttgaata

SEQ ID NO: 679985 - DNA, 75 bp, synthetic construct
  source 1..75: mol_type = other DNA
tggttttaagcacaatttccgccacaaccgttgccgctacaccgcctaatacgttggttgtagcccagggactgg

SEQ ID NO: 679986 - DNA, 75 bp, synthetic construct
  source 1..75: mol_type = other DNA
ggggcgaccggccttgattacaacgttctcccctggatgttcgagttacacggggttgaggatgcggcggcctgc

SEQ ID NO: 679987 - DNA, 75 bp, synthetic construct
  source 1..75: mol_type = other DNA
gcatttgctgcaaccccaaaagccgtcaaaatcgtcatggacgagacgaaaaccaaagcgccgctggacagcccg

SEQ ID NO: 679988 - DNA, 75 bp, synthetic construct
  source 1..75: mol_type = other DNA
cattagccagtatcattatgtggttaagcggtttcagcctggaaaacaaagggatacatcataaatatcaggcaa

SEQ ID NO: 679989 - DNA, 75 bp, synthetic construct
  source 1..75: mol_type = other DNA
gggctgggccaccgccagcttcgcgataagctggcgattaatcacagcaaaatgctggcgtattccgggatcctg

SEQ ID NO: 679990 - DNA, 75 bp, synthetic construct
  source 1..75: mol_type = other DNA
aagtttaaagaggtaaggccgcgttattctgtattgcctgatatattcatacctataaatttagggctatttaaa

SEQ ID NO: 679991 - DNA, 75 bp, synthetic construct
  source 1..75: mol_type = other DNA
actgcattcaatgggcggaactggtgaaagaagcggtccagatatatgggggaatccgttctatcatcaatatct

SEQ ID NO: 679992 - DNA, 75 bp, synthetic construct
  source 1..75: mol_type = other DNA
cgccatcaaaaccaataccgacggattagggatcaaaatctgggaaaacagtaaaccctttaagcccggcagcac

SEQ ID NO: 679993 - DNA, 75 bp, synthetic construct
  source 1..75: mol_type = other DNA
cgcatggtttctataaggcgaacggaacgacaatacagtgggatacatgttatgtgctggatgcagcacaggcat

SEQ ID NO: 679994 - DNA, 75 bp, synthetic construct
  source 1..75: mol_type = other DNA
gttatgataatccacacagtgacctcccctgcgcaacggaagatgccaccggcagccggaaaaccatgacgtgga

SEQ ID NO: 679995 - DNA, 75 bp, synthetic construct
  source 1..75: mol_type = other DNA
gagaatattgggacgaaatattttcaggtaaagatgagaaaatagttaaaagtaaagataacaatatcaagtcat

SEQ ID NO: 679996 - DNA, 75 bp, synthetic construct
  source 1..75: mol_type = other DNA
cgacagccgccattctacggcggaaaaaccggtatttaaccgcaccgttgggctgcgtgatacctgggcgaagtt

SEQ ID NO: 679997 - DNA, 75 bp, synthetic construct
  source 1..75: mol_type = other DNA
ttgagcgtgaaggttatttctgcctcgacagccgccattctacggcggaaaaaccggtatttaaccgcaccgttg

SEQ ID NO: 679998 - DNA, 75 bp, synthetic construct
  source 1..75: mol_type = other DNA
agcacacattgccgggtgtttaccgtgcattatccggaactccggattacaccggagaaggtgagtttattattg

SEQ ID NO: 679999 - DNA, 75 bp, synthetic construct
  source 1..75: mol_type = other DNA
cgccgccgcccgctaccaccatcccgccggaggcaaacccgcagccgtttaccgccagaaaatcggccagcaaat

SEQ ID NO: 680000 - DNA, 75 bp, synthetic construct
  source 1..75: mol_type = other DNA
cgtggacgctgaatattgccggaaccggctaccgttaccccagccgttcttcagcctgccgggcattgctggact

SEQ ID NO: 680001 - DNA, 75 bp, synthetic construct
  source 1..75: mol_type = other DNA
tgggagaagccagatatgtcattcagcgaggagctaatgtcaatggtgcatggatacgctggtcagatggtgcaa

SEQ ID NO: 680002 - DNA, 75 bp, synthetic construct
  source 1..75: mol_type = other DNA
gtagtgttaaacgttatggtgaaattagtggaaatgtagatacagaaacccgtccacgaaatattgcattcaact

SEQ ID NO: 680003 - DNA, 75 bp, synthetic construct
  source 1..75: mol_type = other DNA
tgggagcgggtgcacctgccatcggtattccgttcttctggccatcctcggcgatgcctaatactgttatgacag

SEQ ID NO: 680004 - DNA, 75 bp, synthetic construct
  source 1..75: mol_type = other DNA
tagcgatagacctgcaatactttattgtgctggtaacattgattgtctgcgtaataaatgtttggcggtaattgg

SEQ ID NO: 680005 - DNA, 75 bp, synthetic construct
  source 1..75: mol_type = other DNA
cggtctgaaaaaggatccatccttaagtctgtacgccattcctgacggtgatgtgaaaggtcgcgtggtagcaat

SEQ ID NO: 680006 - DNA, 75 bp, synthetic construct
  source 1..75: mol_type = other DNA
gaatgtgagccattaaagagacatagggatgtcattaaaaatatctatatacgctcagatgatacaaatctcaga

SEQ ID NO: 680007 - DNA, 75 bp, synthetic construct
  source 1..75: mol_type = other DNA
acggtgatagcaaatcagatgtagatattaatgcaagtttagataaaataaaattcagcgaaatattctccacta

SEQ ID NO: 680008 - DNA, 75 bp, synthetic construct
  source 1..75: mol_type = other DNA
tgacgtgggactcgggcaaatcaacatcggctggcaccaggcatattttgactctccctgcgacgccctgtatcc

SEQ ID NO: 680009 - DNA, 75 bp, synthetic construct
  source 1..75: mol_type = other DNA
tgctgctgccctgcctggcgcagccgctgccggaagcgtacctgcgcgccgcggagcattaccgcgtgccaccgg

SEQ ID NO: 680010 - DNA, 75 bp, synthetic construct
  source 1..75: mol_type = other DNA
accgcgccgatggtagttttatggatgaactgttaacgctgatgacagcacaccgcgtgtggtcacgcattccta

SEQ ID NO: 680011 - DNA, 75 bp, synthetic construct
  source 1..75: mol_type = other DNA
gcagcagatgtgaagccggggatattcacggtaatccacacatggggccgggaccagcagtgtcatccacatatc

SEQ ID NO: 680012 - DNA, 75 bp, synthetic construct
  source 1..75: mol_type = other DNA
ttcattcatgacagggatgcttgctccaggtcgtacagttacagctaatacagctatagcgctggggggatctgt

SEQ ID NO: 680013 - DNA, 75 bp, synthetic construct
  source 1..75: mol_type = other DNA
atcatacaggtaactggaaatcatcattgttacacaacgcgctccttggtctggcaaatgtttataatggcttac

SEQ ID NO: 680014 - DNA, 75 bp, synthetic construct
  source 1..75: mol_type = other DNA
acacagacggaagtggtggtatggcaacggggattgctgtgcaaattcttgatgcgcaaagtcaacaagaaatcc

SEQ ID NO: 680015 - DNA, 75 bp, synthetic construct
  source 1..75: mol_type = other DNA
tggcaccggcagtgaaattcagcggggtatccaggccgcgacagccgcgcttcagggactggcgggggataattt

SEQ ID NO: 680016 - DNA, 75 bp, synthetic construct
  source 1..75: mol_type = other DNA
tatcgagaagactctgcctttactggcgactttattgtgaactccgttcgcctgttagggaatagcaggcaacca

SEQ ID NO: 680017 - DNA, 75 bp, synthetic construct
  source 1..75: mol_type = other DNA
tgagaaagcgaagcgggacccggcagcactgaatcaggcccgcgcagagcttgaggcagcaggaaaaccgttcac

SEQ ID NO: 680018 - DNA, 75 bp, synthetic construct
  source 1..75: mol_type = other DNA
tataagtccacaaaggcgggagcaacgggcggtaatgcgacggcggttctctattttgatctggtttaccagtga

SEQ ID NO: 680019 - DNA, 75 bp, synthetic construct
  source 1..75: mol_type = other DNA
attaccgaatgctacaaaattgccggaatggcagaagcctatgacgtgacccttgcgccgcactgtccgctcgga

SEQ ID NO: 680020 - DNA, 75 bp, synthetic construct
  source 1..75: mol_type = other DNA
atgaagaaaaaaacaatatttcagtacgttatcttgttctttagctttcttaacacccatgtcgggatggctggg

SEQ ID NO: 680021 - DNA, 75 bp, synthetic construct
  source 1..75: mol_type = other DNA
gctgatttgaatatcgatatcaccggttgtgccgctggtattactggcgcggacgtcctttttagcggcgaggct

SEQ ID NO: 680022 - DNA, 75 bp, synthetic construct
  source 1..75: mol_type = other DNA
agtgcattacaaaatattcatattggtgattttaatatcagtgattttcaggccgcgaataccgtaagcactgct

SEQ ID NO: 680023 - DNA, 75 bp, synthetic construct
  source 1..75: mol_type = other DNA
acgctggtcatagtcaccgctgatcacgcccacgccagccagattgttgcgccggacaccaaagcgccgggcctc

SEQ ID NO: 680024 - DNA, 75 bp, synthetic construct
  source 1..75: mol_type = other DNA
aaaacctgctggtgaggcaggttcttttatttactactttgacgataacttgctgattgtgcaacatttcgtacc

SEQ ID NO: 680025 - DNA, 75 bp, synthetic construct
  source 1..75: mol_type = other DNA
aaaacctgctggtgaggcaggttcttttatttactactttgatgttaagttactgatagtgcaacatggcatctc

SEQ ID NO: 680026 - DNA, 75 bp, synthetic construct
  source 1..75: mol_type = other DNA
aagaaaatttgacaaacagaatgaagaatttaagcaacgaacagatcgtaaccgagtccctttactgaaatcgcc

SEQ ID NO: 680027 - DNA, 75 bp, synthetic construct
  source 1..75: mol_type = other DNA
gcctggaataccacgagaaaactgacccgcgcacccgggagcgtttccttgaatattcccatgacggcaaactga

SEQ ID NO: 680028 - DNA, 75 bp, synthetic construct
  source 1..75: mol_type = other DNA
taaagaaaatgaatcaggtgcaagcctacagcggcctcaattatttttactcttagatatcgcggaacgtggcga

SEQ ID NO: 680029 - DNA, 75 bp, synthetic construct
  source 1..75: mol_type = other DNA
gaattgctgtctgacggtaaaagctggagcaaaatccaggctttgatcggttgttcaagagctactatcgcaaag

SEQ ID NO: 680030 - DNA, 75 bp, synthetic construct
  source 1..75: mol_type = other DNA
gtcttcaggagctggcggcagtactcgggcgcgatgccgatatttcaggctctaaagctgatcttgaacagcgcc

SEQ ID NO: 680031 - DNA, 75 bp, synthetic construct
  source 1..75: mol_type = other DNA
aagctcaagactccataggaattgtttctaaacatttaaacagagtgctaaataatgatgagaaagaattagttc

SEQ ID NO: 680032 - DNA, 75 bp, synthetic construct
  source 1..75: mol_type = other DNA
aaagatgacatttttacatcagataaaatacattttaatacattgaaaattgcaagattggtacgaaaaattctt

SEQ ID NO: 680033 - DNA, 75 bp, synthetic construct
  source 1..75: mol_type = other DNA
gcggaaaaccagcaggtgaagctgtcaatgccggaaccggaagaactggcagcagcaatggcgcaggctgttgtt

SEQ ID NO: 680034 - DNA, 75 bp, synthetic construct
  source 1..75: mol_type = other DNA
agccgttcacgttcgaatggaacggtcgcacctggaatgctggccccgactcaatggctcgtctttatccggcag

SEQ ID NO: 680035 - DNA, 75 bp, synthetic construct
  source 1..75: mol_type = other DNA
tccagcgaatgtatgtataacagaaaagcaatcgatgcctgggtcgcttcaatgaaaaacaaacaacctgggtga

SEQ ID NO: 680036 - DNA, 75 bp, synthetic construct
  source 1..75: mol_type = other DNA
tttttatattaagtatttgtttcttcgatgttgcgaggaataattcttcattcttattcgcgattattatttgtg

SEQ ID NO: 680037 - DNA, 75 bp, synthetic construct
  source 1..75: mol_type = other DNA
acgatgacggccattttcgggatctctttccactgaatcaggcgcctgctgtggtgattattgacacagaaatca

SEQ ID NO: 680038 - DNA, 75 bp, synthetic construct
  source 1..75: mol_type = other DNA
tgttcacgactatagggatgttgaacctaaaacatggaaagaaaatgttaaagcgatattgatgcgttttaatta

SEQ ID NO: 680039 - DNA, 75 bp, synthetic construct
  source 1..75: mol_type = other DNA
aaatatatagaacaaccagtacagagacgtaaaaagtttggttttgctcaaactaagagtactggtaaaaactat

SEQ ID NO: 680040 - DNA, 75 bp, synthetic construct
  source 1..75: mol_type = other DNA
attccaatttacgaagaattaattaaattaaatatatcaacattcatagatcatgttgaaataaattggggcgat

SEQ ID NO: 680041 - DNA, 75 bp, synthetic construct
  source 1..75: mol_type = other DNA
agcattgacggtgcagcattccgcgtgggtgcaggtgtacaggctgatatcaccaaaaacatgggagcatatgca

SEQ ID NO: 680042 - DNA, 75 bp, synthetic construct
  source 1..75: mol_type = other DNA
atgaggggtttaccgtatgcgataaaacccgcgaatttggtcatggcttattggtgggatttggcaacctttgcc

SEQ ID NO: 680043 - DNA, 75 bp, synthetic construct
  source 1..75: mol_type = other DNA
ctgaagaatactttagtttagatcctgatgtactcaatatgcttatgatctacgatacttttatagaaccatccg

SEQ ID NO: 680044 - DNA, 75 bp, synthetic construct
  source 1..75: mol_type = other DNA
tcaccgctttcctcggcaaccacaggggcagccctgcgcgtcgatggcggtgtcgtcgacaccctgactatgtaa

SEQ ID NO: 680045 - DNA, 75 bp, synthetic construct
  source 1..75: mol_type = other DNA
cggtgcgattgtttctctgctcggcctactgttgctgcttgcgcaaatccgccgctgtcacagcagtaaatttca

SEQ ID NO: 680046 - DNA, 75 bp, synthetic construct
  source 1..75: mol_type = other DNA
aatcccacttgggatgacggtgatggcgaagacctgtatctcaaagaggtaacccactggatgcctctaccagaa

SEQ ID NO: 680047 - DNA, 75 bp, synthetic construct
  source 1..75: mol_type = other DNA
ctatcgcgtcgtttcccatatgaaagaacaggttgttgagccagactcttacaccatccgtacccaggcttatat

SEQ ID NO: 680048 - DNA, 75 bp, synthetic construct
  source 1..75: mol_type = other DNA
aagttgtggaagacattgttgcgcagaaactggaggctgcaggttactggcgcagagcttctgcccgctggcttt

SEQ ID NO: 680049 - DNA, 75 bp, synthetic construct
  source 1..75: mol_type = other DNA
gtggtttttggagtgggcttactcttttcgcagcttggcttatcgccaactttgagtcaggcggagggtattggt

SEQ ID NO: 680050 - DNA, 75 bp, synthetic construct
  source 1..75: mol_type = other DNA
tggtaaatgaactggaagctgcggctatcgataccagcatttcggtctgtgtgattaccggtaatgcacgctttt

SEQ ID NO: 680051 - DNA, 75 bp, synthetic construct
  source 1..75: mol_type = other DNA
taccaccctggtacgtattcaccgtgaagcggaaggtgcatcgtttaccggtgtaaaatcggcaggtcatattcc

SEQ ID NO: 680052 - DNA, 75 bp, synthetic construct
  source 1..75: mol_type = other DNA
gcttttgtcgggagatgctctgtccctgactgcaggcgtggttaacaatacatccggtcaggtggtggcaaacgg

SEQ ID NO: 680053 - DNA, 75 bp, synthetic construct
  source 1..75: mol_type = other DNA
gtagtggtaaaaatgacctggattatccctctgctgatatacgagcgaagatcagtaaagatatagaaggtggta

SEQ ID NO: 680054 - DNA, 75 bp, synthetic construct
  source 1..75: mol_type = other DNA
gaaactcccgaagaagaaaagggttactggtttcatgcttatcaacccgaagatctttgtaccatccataatcca

SEQ ID NO: 680055 - DNA, 75 bp, synthetic construct
  source 1..75: mol_type = other DNA
gtagaacgtgcaatgacgcaacatttgcaggaaatcagcgaatctgtgcgccagatccgccaggaaaacagcgac

SEQ ID NO: 680056 - DNA, 75 bp, synthetic construct
  source 1..75: mol_type = other DNA
gcagcagcagaacgcaagaggcagattcttattgaacaggccaactctaacatgaacagtaagcaatggcctggt

SEQ ID NO: 680057 - DNA, 75 bp, synthetic construct
  source 1..75: mol_type = other DNA
atgaacgaatatgtttatagcgcaaggcataatgcttttttccctgtggatatgattgataaatataaatcagag

SEQ ID NO: 680058 - DNA, 75 bp, synthetic construct
  source 1..75: mol_type = other DNA
cgcgagcgccttatccggcctacggttgggcatcgtttgagtcactgtaggtcggataagatgcgcaagcatcgc

SEQ ID NO: 680059 - DNA, 75 bp, synthetic construct
  source 1..75: mol_type = other DNA
gcaaagattcagacaacgatgatttatgcccatcttgcgccggattacttgcaggatgcggtgagatttaatcct

SEQ ID NO: 680060 - DNA, 75 bp, synthetic construct
  source 1..75: mol_type = other DNA
agatggttaacaccatgtcggcgtcacgcagctatcaggccaatgttgaagtgctcaacacggtgaaaagcatga

SEQ ID NO: 680061 - DNA, 75 bp, synthetic construct
  source 1..75: mol_type = other DNA
agtaccgtgcggttatcagcgctgccggtgatgtgtctgccagctttgccactgacaccggtaataccactgtca

SEQ ID NO: 680062 - DNA, 75 bp, synthetic construct
  source 1..75: mol_type = other DNA
tgaacaaacgtatgggtgacctgcgtgatatcaacggcgaagccggtgcatgggcacgcatcatgagcggtaccg

SEQ ID NO: 680063 - DNA, 75 bp, synthetic construct
  source 1..75: mol_type = other DNA
ggtaatgatgtcatcagtgttgaagggaaatctgctgccgcaggaacatcctcctatacagggcatatcactctg

SEQ ID NO: 680064 - DNA, 75 bp, synthetic construct
  source 1..75: mol_type = other DNA
gaatgttagcattcgtagaacaaagtttccgtctcggatttaagaaaacagtaaaaggtacaacgacaccacgtg

SEQ ID NO: 680065 - DNA, 75 bp, synthetic construct
  source 1..75: mol_type = other DNA
ggataaagaaaaagcaattgggttatatgctcagatgaaaatgcaggaaagtgctcctttatcatatatatatca

SEQ ID NO: 680066 - DNA, 75 bp, synthetic construct
  source 1..75: mol_type = other DNA
ggcaaaccaggtgatctgtattatacgacctttgacgggaattattatctgttgaaaagtaaccgatatggcagc

SEQ ID NO: 680067 - DNA, 75 bp, synthetic construct
  source 1..75: mol_type = other DNA
tcaaaggtgaaaaggacagccgtatgctgatgtccgttggcctgaatgcagaaatcagggataacgtccgctttg

SEQ ID NO: 680068 - DNA, 75 bp, synthetic construct
  source 1..75: mol_type = other DNA
cagattggcttaagtgtacgtaaaagtaaattttcaaaagagatgcttaatccatggcgtttaccagtcatcgtg

SEQ ID NO: 680069 - DNA, 75 bp, synthetic construct
  source 1..75: mol_type = other DNA
agtctcggaagcactccagaaagaatacggtctggatgaagttcaggcgggaatagtcgcgagcgctgcggcgtc

SEQ ID NO: 680070 - DNA, 75 bp, synthetic construct
  source 1..75: mol_type = other DNA
tacattcttgaccgtcttggcctgaaaccggaaaaagattaccgctttctgggggatgcggcttttgatacccgg

SEQ ID NO: 680071 - DNA, 75 bp, synthetic construct
  source 1..75: mol_type = other DNA
cgctgtccactacggctacgacgataagggccgcctgacgggcgaacggcagacggtggagaacccggagacggg

SEQ ID NO: 680072 - DNA, 75 bp, synthetic construct
  source 1..75: mol_type = other DNA
cgcacctacagcagctaccggacgaagacgcctgcaccggtgggaatttttggccccggctggaaagcgccttct

SEQ ID NO: 680073 - DNA, 75 bp, synthetic construct
  source 1..75: mol_type = other DNA
tttatcagatattattggtaaacgagcagacttgcgtatttcagatcgggtttttggtcatacgctcagaattaa

SEQ ID NO: 680074 - DNA, 75 bp, synthetic construct
  source 1..75: mol_type = other DNA
aggaagtaaatcaaaatattatcagtgagtttatggctgaaccgccacaaggaaaaatccgtattgccggagatg

SEQ ID NO: 680075 - DNA, 75 bp, synthetic construct
  source 1..75: mol_type = other DNA
tcgaatcctgcaccggcagtgtcacgcctgatgccgtccacgatggccggaagataatagttattgatgatccga

SEQ ID NO: 680076 - DNA, 75 bp, synthetic construct
  source 1..75: mol_type = other DNA
aagtaccttcagtgtcattttgaaagtcaggtggaattatttccgcttgtctttaatcaggattatatcgaaaga

SEQ ID NO: 680077 - DNA, 75 bp, synthetic construct
  source 1..75: mol_type = other DNA
tagcgcttgtacaaggagagagccatttttattataattatgctaatgccttgtctaataagattagtgtcgata

SEQ ID NO: 680078 - DNA, 75 bp, synthetic construct
  source 1..75: mol_type = other DNA
tcttttggtggagcaccactggcaaaaatcattgaaaatcataacggtaacgcaatgatttggaatatccagtct

SEQ ID NO: 680079 - DNA, 75 bp, synthetic construct
  source 1..75: mol_type = other DNA
atcaagtcctccaggatttggttttgaccatacatcacagttacatgcactcgtttggtggagccccgatcgcaa

SEQ ID NO: 680080 - DNA, 75 bp, synthetic construct
  source 1..75: mol_type = other DNA
gctgggtatattgaaaattacgcaaaaatgtttcgccacaacagaaaacttgaaacagcaatacctgaaaaagca

SEQ ID NO: 680081 - DNA, 75 bp, synthetic construct
  source 1..75: mol_type = other DNA
tatggatatatatcctattatagagagagctttaaaaggaacagagagaaaggttagttctgtttgtttcaatgc

SEQ ID NO: 680082 - DNA, 75 bp, synthetic construct
  source 1..75: mol_type = other DNA
cgtgactctggtgtcaaccttttagccatgaaccatctattagagactggcaacaaggctgcggctaaatggcat

SEQ ID NO: 680083 - DNA, 75 bp, synthetic construct
  source 1..75: mol_type = other DNA
acaccggttgattattctaaaccgatggctgatgtttatattcgtggagacattactgcaccacaaagttgtgaa

SEQ ID NO: 680084 - DNA, 75 bp, synthetic construct
  source 1..75: mol_type = other DNA
tctaataatctgggaaatgtatcattaagtgcgctttggcggaattactgggggcgaagtggaaatgctaaagat

SEQ ID NO: 680085 - DNA, 75 bp, synthetic construct
  source 1..75: mol_type = other DNA
atcccagaaacacttgtggcgaatttgtatggaactataagtcgtgatacgccgattgattattcacaaccgatg

SEQ ID NO: 680086 - DNA, 75 bp, synthetic construct
  source 1..75: mol_type = other DNA
gacttttgctggaaagttaattgtccctgaaactctcgtggcaaaattgtacggaactataagccgtgacactcc

SEQ ID NO: 680087 - DNA, 75 bp, synthetic construct
  source 1..75: mol_type = other DNA
tgggtaaacagtccaatattggcccgattgaccctcagtttaatggattttctacacatgctattattgaggaat

SEQ ID NO: 680088 - DNA, 75 bp, synthetic construct
  source 1..75: mol_type = other DNA
acaaaggagcctggaagcagatggaaaatacttgggcaaaagcattgggtgaaggaaaagaggttaaggtcaaca

SEQ ID NO: 680089 - DNA, 75 bp, synthetic construct
  source 1..75: mol_type = other DNA
cgacaggccagccggaggagctgacgtcgccgtccgggatgtgatgcgggatatggatcggacaaaagaaacgcc

SEQ ID NO: 680090 - DNA, 75 bp, synthetic construct
  source 1..75: mol_type = other DNA
gaaaaccataccgaaggaaattcttaacgagctgattaacaatgcttttaatgatgcgaagagtaaatcccggca

SEQ ID NO: 680091 - DNA, 75 bp, synthetic construct
  source 1..75: mol_type = other DNA
cgcctccatcagcgccagcgatggcctgtacatggcggcggcaaacgacatcaatattaccggggcgaaggtgag

SEQ ID NO: 680092 - DNA, 75 bp, synthetic construct
  source 1..75: mol_type = other DNA
gaccgtgatggtgccaaaagtgtatctgtcgccaaaagatgtgacggtgcagagcggcagcgtgatcagcggcaa

SEQ ID NO: 680093 - DNA, 75 bp, synthetic construct
  source 1..75: mol_type = other DNA
ctgaataaccatggctccgttcagggggcttccctgagcgtgggcagctccacgctcagcaattcgggttccctg

SEQ ID NO: 680094 - DNA, 75 bp, synthetic construct
  source 1..75: mol_type = other DNA
tgaggaagagtaaaccaacgattggttatgacaatggggaggatatagccgtaatcagtaaggcattggggcaca

SEQ ID NO: 680095 - DNA, 75 bp, synthetic construct
  source 1..75: mol_type = other DNA
atctgtgggaagaaggaataaatgccgggctactaaactatagttttaatggtaattctattaataaccgtagta

SEQ ID NO: 680096 - DNA, 75 bp, synthetic construct
  source 1..75: mol_type = other DNA
tcaagataaggctaagcgaatttgtgatgagctaaacaatcatcatacaacctatgcgcatgctagacatattca

SEQ ID NO: 680097 - DNA, 75 bp, synthetic construct
  source 1..75: mol_type = other DNA
atcttggcgacaccggccttggccttgatacgcgctaaagcactaggttctaaccccgtgtggcaaaacatggtg

SEQ ID NO: 680098 - DNA, 75 bp, synthetic construct
  source 1..75: mol_type = other DNA
ggtgaaatctgggactggcagagcgcgcaacaatgcatggcgatcagcggatgcgacgcactgagagatcccctc

SEQ ID NO: 680099 - DNA, 75 bp, synthetic construct
  source 1..75: mol_type = other DNA
ttactcatacatgcggtcatgaatatactttcgagtgggagcaggtagtattcaaatttaaacagttaccgaatg

SEQ ID NO: 680100 - DNA, 75 bp, synthetic construct
  source 1..75: mol_type = other DNA
agaaaggttattatattaacccgagccatattgtctcaatatattatgaagcaactgatacggttacagtcactc

SEQ ID NO: 680101 - DNA, 75 bp, synthetic construct
  source 1..75: mol_type = other DNA
cctcaatacgggaaataaacgtgaaccccgtaaaccgcttcacctcatgacaacaacagaaaactccgggacata

SEQ ID NO: 680102 - DNA, 75 bp, synthetic construct
  source 1..75: mol_type = other DNA
acactggctggatacgttattctcccgttatcctgaattgcccattgacagtgttgctcatgtcttcggtgaaca

SEQ ID NO: 680103 - DNA, 75 bp, synthetic construct
  source 1..75: mol_type = other DNA
gacagtgccagcaccattactggccgctccaccacttattctcctgaagcccggtactacgggcacgttgcgctt

SEQ ID NO: 680104 - DNA, 75 bp, synthetic construct
  source 1..75: mol_type = other DNA
tatcgctgctggtggcgggggaattgcaggcaggagtggtggtcggcggaacgcgatttatctttccggcagaca

SEQ ID NO: 680105 - DNA, 75 bp, synthetic construct
  source 1..75: mol_type = other DNA
cccgctggaagcttatcaacaattacgctggacacggaattcgcagggtgtacaactcactaacccaacgcctta

SEQ ID NO: 680106 - DNA, 75 bp, synthetic construct
  source 1..75: mol_type = other DNA
agttgccaactaatttaccacttaagtttattaccactgaaggtaacgaacatttagtttcaggtaattaccgtg

SEQ ID NO: 680107 - DNA, 75 bp, synthetic construct
  source 1..75: mol_type = other DNA
aatggtgaattacctgggttatcagttcgcgggtgggcttgataaaccgtgtttccagatattcatcaggttgat

SEQ ID NO: 680108 - DNA, 75 bp, synthetic construct
  source 1..75: mol_type = other DNA
gcggcaaaggtgatatgcaacaggccaactggagtaatccgggatggccgacgttgggcttttatcggaccaact

SEQ ID NO: 680109 - DNA, 75 bp, synthetic construct
  source 1..75: mol_type = other DNA
gttgccagcctgaagaacaaagctatgaccttcaacgaattctgggaagaggcggacgtagcggtgattgatgac

SEQ ID NO: 680110 - DNA, 75 bp, synthetic construct
  source 1..75: mol_type = other DNA
gcaggaaaccgtacacgaagtagtgcctctgatggtattccaggttcccaatatgccagatccgaacgaggtcgg

SEQ ID NO: 680111 - DNA, 75 bp, synthetic construct
  source 1..75: mol_type = other DNA
agcgcgatgctgtgcgtgattcgctggtaaatctccggaaagctcgccgttactggcataatgagaacgataaga

SEQ ID NO: 680112 - DNA, 75 bp, synthetic construct
  source 1..75: mol_type = other DNA
gcttaacccctggcggctgccgctgatcgcggtatttgataatcagcaggttggcgtgatcacccgccgtgacaa

SEQ ID NO: 680113 - DNA, 75 bp, synthetic construct
  source 1..75: mol_type = other DNA
tcctgctcgatgaacccagtgcctcgctggatgaaatggcggaagcgtatttaattgaacaactaaaacagtgga

SEQ ID NO: 680114 - DNA, 75 bp, synthetic construct
  source 1..75: mol_type = other DNA
gccggggtgatgatggcgatcctgtttgagttctgtatgcgcatggtgcgcacgcatctttctgatgtgatcggc

SEQ ID NO: 680115 - DNA, 75 bp, synthetic construct
  source 1..75: mol_type = other DNA
cgcgaaagagactattttgcgtgaacagggcgaacccacggcgcgacgcgtggtgttgcaggagaagaataaggg

SEQ ID NO: 680116 - DNA, 75 bp, synthetic construct
  source 1..75: mol_type = other DNA
tactcgacggtagtattctgtttacaggaaataatgttggttataccgataatttaagcagcaatgtctttatag

SEQ ID NO: 680117 - DNA, 75 bp, synthetic construct
  source 1..75: mol_type = other DNA
gattatctggttaccttgatcatatcgatctggataggcagaaaaacccttacaggtatgatctcatgctcttta

SEQ ID NO: 680118 - DNA, 75 bp, synthetic construct
  source 1..75: mol_type = other DNA
attattaatgagttaaggcaatgtcatccattatcacaattactggttatcgcggatttgccacgtagtacattt

SEQ ID NO: 680119 - DNA, 75 bp, synthetic construct
  source 1..75: mol_type = other DNA
tgaccaccggcgcgctggtcgggacgacgatcctggcttcgcgcaccattgcgccgctgtcgcagatatccggcg

SEQ ID NO: 680120 - DNA, 75 bp, synthetic construct
  source 1..75: mol_type = other DNA
ttcctgctgtttgtctttattttgtggatgatcggcggctggctggtgctggtggttttgctggcgctgccgtta

SEQ ID NO: 680121 - DNA, 75 bp, synthetic construct
  source 1..75: mol_type = other DNA
agcggtgacgaagggctggaaaccacattaaacgtcacggatatagaagacaaaatcgttgaactggcgctactg

SEQ ID NO: 680122 - DNA, 75 bp, synthetic construct
  source 1..75: mol_type = other DNA
cgcccgctcagcgctattcctgacgcgcgggtagatgactacattcgcccgtatcaggcgaactggttctggaat

SEQ ID NO: 680123 - DNA, 75 bp, synthetic construct
  source 1..75: mol_type = other DNA
ttttctcaggagaacgtgcgcgcgaccgtcaactgggagcgcgacagtaagcgggaggagttactcaccgacatg

SEQ ID NO: 680124 - DNA, 75 bp, synthetic construct
  source 1..75: mol_type = other DNA
ccgtcaactgggagcgcgacagcaagcgggaggagttgctcaccgacatggcgcggcagttgggaatggggttac

SEQ ID NO: 680125 - DNA, 75 bp, synthetic construct
  source 1..75: mol_type = other DNA
aaaccaggcgcaaagccagcaaggaaccccagtaatggttctgctttcgcgcaattctcgtgttgacgcttatcg

SEQ ID NO: 680126 - DNA, 75 bp, synthetic construct
  source 1..75: mol_type = other DNA
caagcaatagctgacttgggaggtcgatacacacccgaactcaacgtaaagctagaaatagcagagatatttgat

SEQ ID NO: 680127 - DNA, 75 bp, synthetic construct
  source 1..75: mol_type = other DNA
aaacgtataaagaaaaaatattcgatattaatgaagagctcattcaagtcaaacttattttacggtctatagatg

SEQ ID NO: 680128 - DNA, 75 bp, synthetic construct
  source 1..75: mol_type = other DNA
gagatatagatcccactatcttacttaaagaaactggaacgaaaaaaataagcaataaagaaatgtggtggctta

SEQ ID NO: 680129 - DNA, 75 bp, synthetic construct
  source 1..75: mol_type = other DNA
aattcaacaacagtgaagttggctaacaacccattcttacttctcgaaggaaaagcaggaattggtaagtctcat

SEQ ID NO: 680130 - DNA, 75 bp, synthetic construct
  source 1..75: mol_type = other DNA
gtgcaatgaattacgtatattcattaattcaacaacagtgaagttggctaacaacccattcttacttctcgaagg

SEQ ID NO: 680131 - DNA, 75 bp, synthetic construct
  source 1..75: mol_type = other DNA
tagctttctggtcgctggaaagaaattacatagttgcgatgtaatttcctcagaattatttgaaataaaccagtc

SEQ ID NO: 680132 - DNA, 75 bp, synthetic construct
  source 1..75: mol_type = other DNA
tttttattatttcactaggggcttgcttggggttgcattactttcttggctttcttatttttgtttaaacaattc

SEQ ID NO: 680133 - DNA, 75 bp, synthetic construct
  source 1..75: mol_type = other DNA
gatataaatggcagcttcagccagtatggcggaaacctctattttcaggggcatccggtaccacatgcctttacg

SEQ ID NO: 680134 - DNA, 75 bp, synthetic construct
  source 1..75: mol_type = other DNA
aaaaatgggttcttattggtgttttacggggatatgagggtacaaaaggaaaaaccaactggtatgtggtaatac

SEQ ID NO: 680135 - DNA, 75 bp, synthetic construct
  source 1..75: mol_type = other DNA
cacaaaattttactggacgcatacattcaggtattattgatccagtgtggaatgatctaaaaacagaaagttacc

SEQ ID NO: 680136 - DNA, 75 bp, synthetic construct
  source 1..75: mol_type = other DNA
atgcttccgccgttattcatcatgctggcttacctgaatttacgcgccaaattagatcacctgccacgcgatttc

SEQ ID NO: 680137 - DNA, 75 bp, synthetic construct
  source 1..75: mol_type = other DNA
taacttgatcaccgccattctcgacataacagacggcgaattaaaagaggatttattgcaaagcctgatggattc

SEQ ID NO: 680138 - DNA, 75 bp, synthetic construct
  source 1..75: mol_type = other DNA
ttatcattctgaaccattgtttgagatgttgaatgaacacatcttgtttaaagagttccctgacaaagggatatt

SEQ ID NO: 680139 - DNA, 75 bp, synthetic construct
  source 1..75: mol_type = other DNA
cattcgccctgctggaaggtgggcaattgtggaaaatccgcatgccgctgcctgccggtgatgtggatgataaac

SEQ ID NO: 680140 - DNA, 75 bp, synthetic construct
  source 1..75: mol_type = other DNA
cctggctgcgaccggccgtggaattgaacagtgctctggtgtccggcggggcggcgtttgtgtgtgcggtagcgc

SEQ ID NO: 680141 - DNA, 75 bp, synthetic construct
  source 1..75: mol_type = other DNA
tttggtgttctggcagcggtccgttttcgccagggaatgaaggttatccgctaccgtcgcaatctgcggcgcctg

SEQ ID NO: 680142 - DNA, 75 bp, synthetic construct
  source 1..75: mol_type = other DNA
tggtgaaaaaggaacacgcggacggcagcgtcacgcagagtcagtttgacgcggtgggcaggctcagggcacaga

SEQ ID NO: 680143 - DNA, 75 bp, synthetic construct
  source 1..75: mol_type = other DNA
agaacagctaaacccggcaggcttaagctacacgtatcagtatgagaaagaccgcatcaccatcaccgacagcct

SEQ ID NO: 680144 - DNA, 75 bp, synthetic construct
  source 1..75: mol_type = other DNA
ccagaaagccgtggtgtatgtcgggctggacgcgctctccgatgcggtggtcgctgccgccgtcggcaactcaat

SEQ ID NO: 680145 - DNA, 75 bp, synthetic construct
  source 1..75: mol_type = other DNA
tattaatccgaacatccgggttaacgggctcattcagctggatcaggcttccgtctatcgtaccgcgttgtcgaa

SEQ ID NO: 680146 - DNA, 75 bp, synthetic construct
  source 1..75: mol_type = other DNA
cattgtgcgtgggattttctactctatgttgcgcgcaatattgcttcatcttttgctacggttcacgagcacggg

SEQ ID NO: 680147 - DNA, 75 bp, synthetic construct
  source 1..75: mol_type = other DNA
aagatacaaaactggtggagcaggaacagatagcaaaacgtgaaaaacttaaaacagaagcgcttaaagctgagt

SEQ ID NO: 680148 - DNA, 75 bp, synthetic construct
  source 1..75: mol_type = other DNA
aacgaaataaaaaaatatattcaagatttcaatgctgtttcagtcagagaagatagtggcgttaatatttgtgca

SEQ ID NO: 680149 - DNA, 75 bp, synthetic construct
  source 1..75: mol_type = other DNA
cacagacaattaaaatctacaacctgtcagccggaacaaatgaatttatcggcgaaggcgatgcctggatccctc

SEQ ID NO: 680150 - DNA, 75 bp, synthetic construct
  source 1..75: mol_type = other DNA
catccgtatacctttaaagcgcaaggtaatgactccaacttattgatagtgttttatgttcagataatgcccgat

SEQ ID NO: 680151 - DNA, 75 bp, synthetic construct
  source 1..75: mol_type = other DNA
taatgcctgggcagatggcgaaccgccaactgaaaatatcttaaaagatcaattcaaaaagcagtatcacggcat

SEQ ID NO: 680152 - DNA, 75 bp, synthetic construct
  source 1..75: mol_type = other DNA
ttgattggtttttattcccaacaagatatgttaatgaagctcaaccgaatgttttatttgaatcagttgccgctg

SEQ ID NO: 680153 - DNA, 75 bp, synthetic construct
  source 1..75: mol_type = other DNA
atatagacgacttacttgatccattaaatgtagagttgagggcgagggtacgtaaagagataaaacaggttgttt

SEQ ID NO: 680154 - DNA, 75 bp, synthetic construct
  source 1..75: mol_type = other DNA
ctgttcagcatggtcgacatttgcgcgccgtatgtccaggcggaaccggtgatgagttatttcgacaaactgggc

SEQ ID NO: 680155 - DNA, 75 bp, synthetic construct
  source 1..75: mol_type = other DNA
cgtggatatggctcgtaacgcgatgattgattttgttgatggtgaagttgggccaaacaagaacgttccggggct

SEQ ID NO: 680156 - DNA, 75 bp, synthetic construct
  source 1..75: mol_type = other DNA
gcggggctgaagtctggcgcaatggacgaaatcaaggttatcaaccgtggaggtcaggcatattgcgtaaaagat

SEQ ID NO: 680157 - DNA, 75 bp, synthetic construct
  source 1..75: mol_type = other DNA
ctggaaaacgaactggatggcttcaccttcgaagacaataaagacgaccagtttgctgtcggtgcccaggctgaa

SEQ ID NO: 680158 - DNA, 75 bp, synthetic construct
  source 1..75: mol_type = other DNA
ccacgcaatggttcatcgtggtagtgaaacactgaaagttgaagaactgaaaaagaaaatgagattctggagtta

SEQ ID NO: 680159 - DNA, 75 bp, synthetic construct
  source 1..75: mol_type = other DNA
agcccctcggaggggattttcattatcacaggaaatatgcatttcctgtgataatttacaggaagcgatggatga

SEQ ID NO: 680160 - DNA, 75 bp, synthetic construct
  source 1..75: mol_type = other DNA
tccaaactgtcacgcaatggtacatcgcggtaacgaagtattaagtgtcgaaagtttaaaagcactgttgtttaa

SEQ ID NO: 680161 - DNA, 75 bp, synthetic construct
  source 1..75: mol_type = other DNA
cggtggagatgtaatatatgaaatgtctattgaagaaagaaagggtgaacgaatctatacagttcatgaaaatgg

SEQ ID NO: 680162 - DNA, 75 bp, synthetic construct
  source 1..75: mol_type = other DNA
atcaagtaattcaagagaaggcggatctgatcatcagatgcttcgagtggtatagggatggattcagtactggag

SEQ ID NO: 680163 - DNA, 75 bp, synthetic construct
  source 1..75: mol_type = other DNA
gacactatcaggttcatcgtgaacagtggaatcgaggttcacgatatttctgccagtactgtgttacggaaagat

SEQ ID NO: 680164 - DNA, 75 bp, synthetic construct
  source 1..75: mol_type = other DNA
gcgctggcggcggagaatgcggggctgaagtctggcgctatggacgaaatcaaggttatcaaccgtggaggtcag

SEQ ID NO: 680165 - DNA, 75 bp, synthetic construct
  source 1..75: mol_type = other DNA
tcttgtgttttagcggcaatattccgcttcgacatggcgttacgttttactcctttttgggtgcatacacgttgt

SEQ ID NO: 680166 - DNA, 75 bp, synthetic construct
  source 1..75: mol_type = other DNA
ggtttcacctatctggactcagtcatgcagagaaatagttcatctctcaaaaacgaccaaaaatattggtgttaa

SEQ ID NO: 680167 - DNA, 75 bp, synthetic construct
  source 1..75: mol_type = other DNA
ctgtcgaatccgtcattagtgtctgtaactctgataacagtcaggggatgctacggcaagttttcatgggaagcg

SEQ ID NO: 680168 - DNA, 75 bp, synthetic construct
  source 1..75: mol_type = other DNA
aggtctacagtgataataagtttaaaacaaacgatgaattaaagagctttaaggattcgtttatttatcattgga

SEQ ID NO: 680169 - DNA, 75 bp, synthetic construct
  source 1..75: mol_type = other DNA
acggagaagacggaccgtatcccgacgggtgtgatacggacggacgacgagcggacccaccactaccactacgac

SEQ ID NO: 680170 - DNA, 75 bp, synthetic construct
  source 1..75: mol_type = other DNA
ataaccgtcaccggtactacgatccgttgcaggggcggtatatcactcaggacccgatagggctggaggggggga

SEQ ID NO: 680171 - DNA, 75 bp, synthetic construct
  source 1..75: mol_type = other DNA
tcgtggacgtcctgtctatgcgcaacccgtctcgccgcgggtatcttacaacacaccaaatctggctggacgctg

SEQ ID NO: 680172 - DNA, 75 bp, synthetic construct
  source 1..75: mol_type = other DNA
gagggcgtagatggcgtgatgcgggtgatcaaacagcttgccggagtcggtttacccgcctcactctgggaaagc

SEQ ID NO: 680173 - DNA, 75 bp, synthetic construct
  source 1..75: mol_type = other DNA
attccaaagcacaggtcacattggcgtacctgtgatggcactggaacatttcgccgaccagcttcgcaaaggagg

SEQ ID NO: 680174 - DNA, 75 bp, synthetic construct
  source 1..75: mol_type = other DNA
gcggctgcgagtgcggaagaggccagacagcacgcggaaaatgcgcagagtgcacaggcgactgccgaagatgtc

SEQ ID NO: 680175 - DNA, 75 bp, synthetic construct
  source 1..75: mol_type = other DNA
gtgcattatctgaccgtctgggcggaactcgtgtcacgctggtgaactttattctgatggcgattttcagcggcc

SEQ ID NO: 680176 - DNA, 75 bp, synthetic construct
  source 1..75: mol_type = other DNA
catttcgttccgcgacacacatcgaatgtgatgtttaatcaaggccatcaaattaagagaggatgcacaaaaaaa

SEQ ID NO: 680177 - DNA, 75 bp, synthetic construct
  source 1..75: mol_type = other DNA
ggctggctgttgggtttccatgcggcagtctatggcgtcacgcttttgttcttgagttggcgtcttcgcaaaacg

SEQ ID NO: 680178 - DNA, 75 bp, synthetic construct
  source 1..75: mol_type = other DNA
agaaattaaaagttaagcctaaaacttggttaataacaggggttgcgggtttcattggttctaatttacttgaaa

SEQ ID NO: 680179 - DNA, 75 bp, synthetic construct
  source 1..75: mol_type = other DNA
aaaatctgttaacatctaaaaaaaaatggctaattactggagtcgctggatttattgggagtaaccttttagaac

SEQ ID NO: 680180 - DNA, 75 bp, synthetic construct
  source 1..75: mol_type = other DNA
gttcgccattcgcaagctgatatcactaaagccaaaactagacttggatacgagccacagttcagtatatcggag

SEQ ID NO: 680181 - DNA, 75 bp, synthetic construct
  source 1..75: mol_type = other DNA
caggcttccttttcagaatggttttttagtaacacgtcatccatttcgctttagctattttattcatatcaagtt

SEQ ID NO: 680182 - DNA, 75 bp, synthetic construct
  source 1..75: mol_type = other DNA
ttatcaacctcagtttgatattatagctggcttaagaaaggccatgccttggtatataaacttattcaaaaatgc

SEQ ID NO: 680183 - DNA, 75 bp, synthetic construct
  source 1..75: mol_type = other DNA
ggacatcagcgaaatctcgacgaagttgagcggatcgttacacctgaagcatggaaaaaatttacgatgatcgaa

SEQ ID NO: 680184 - DNA, 75 bp, synthetic construct
  source 1..75: mol_type = other DNA
ttattgatgagaacgataatgttgttagggattattttaatatgaacccagtagatttttcgtgggggaatgaaa

SEQ ID NO: 680185 - DNA, 75 bp, synthetic construct
  source 1..75: mol_type = other DNA
atccttgagctttaaagatttggggaaaagtgcttttagtggtaagcacctgaaaggtggtctaggtgatttttt

SEQ ID NO: 680186 - DNA, 75 bp, synthetic construct
  source 1..75: mol_type = other DNA
tgaagagagtctgcgtaaatctgaacgtatacaagctgcatggaaccgtaaaaaagaactcatctctgaaggtat

SEQ ID NO: 680187 - DNA, 75 bp, synthetic construct
  source 1..75: mol_type = other DNA
ttttctgaaactaaaaaattatcgaataaaaataatgccgatcagttttttgaatgcgctaaaagaaatgaatag

SEQ ID NO: 680188 - DNA, 75 bp, synthetic construct
  source 1..75: mol_type = other DNA
atgtttagtattaatagttgtgtgagaaatttccccatatatcaaaaataccatacccgtccgatgagtttaaca

SEQ ID NO: 680189 - DNA, 75 bp, synthetic construct
  source 1..75: mol_type = other DNA
accaacaccattccgttccaggcgcgttattatgcaatcggcgaggcaaccccgggtgctgctaatgcggatgcg

SEQ ID NO: 680190 - DNA, 75 bp, synthetic construct
  source 1..75: mol_type = other DNA
aagggataagtgaaatcgctggctattatcccagagtcatatcagatgatttgttttacgctgtacaggaaattc

SEQ ID NO: 680191 - DNA, 75 bp, synthetic construct
  source 1..75: mol_type = other DNA
gatcctaagacatttttggagtttttggtaaaaatatttaccctggttatgtggattttagcaaacgctccaacg

SEQ ID NO: 680192 - DNA, 75 bp, synthetic construct
  source 1..75: mol_type = other DNA
tttagttggagtaatattgtttttttgttatatggaaccgtatgtacaatactttataatcatgggcctggcatt

SEQ ID NO: 680193 - DNA, 75 bp, synthetic construct
  source 1..75: mol_type = other DNA
aaatattacgcattcgtgaacgaggattagaagagcaggtatatagtaccataacaaacaacatgataatattgt

SEQ ID NO: 680194 - DNA, 75 bp, synthetic construct
  source 1..75: mol_type = other DNA
ttcgccatgacgatagtgttcggcgcattttctttggtcaatggtgcgttcaacctggttgcagcggtgcggcaa

SEQ ID NO: 680195 - DNA, 75 bp, synthetic construct
  source 1..75: mol_type = other DNA
caacttgtttgcagcggtgcgccatatccagaaaaaagagcgctggggctggttgttgttcagcggcattgtcgg

SEQ ID NO: 680196 - DNA, 75 bp, synthetic construct
  source 1..75: mol_type = other DNA
ggagcattacccgcagcgagtatgatgaggcggggaggctgaaggcacagacggatgcggcggggcggcggacgg

SEQ ID NO: 680197 - DNA, 75 bp, synthetic construct
  source 1..75: mol_type = other DNA
ttacatggcgacgcacgttatctggtttatggcggcatcctgtttgccgcgtgggggaaatcggcccagctaccg

SEQ ID NO: 680198 - DNA, 75 bp, synthetic construct
  source 1..75: mol_type = other DNA
catcgtgaacatgtttttccgagcagaaatgatcccaaaaaaccgatgaacagccaaactgcgaatgctgctttg

SEQ ID NO: 680199 - DNA, 75 bp, synthetic construct
  source 1..75: mol_type = other DNA
gcaacaaaacaacggactatgatgggacttggtgcttttcctgccctttctcttgctgatgcccgagggttaaga

SEQ ID NO: 680200 - DNA, 75 bp, synthetic construct
  source 1..75: mol_type = other DNA
tttaattattttctcccggtaatgattcaacctgggattgaagctgtgtcgttcacagatgaatgttgggagggt

SEQ ID NO: 680201 - DNA, 75 bp, synthetic construct
  source 1..75: mol_type = other DNA
gttatctggtttatggcggcatcctgtttgccgcgtgggggaaatcggcccagctaccgatgcaagcgtggctac

SEQ ID NO: 680202 - DNA, 75 bp, synthetic construct
  source 1..75: mol_type = other DNA
cacgatctactccacgggttatctgacggataaaaatcgcgaacacccgcataacggcacgaatcgttattacgc

SEQ ID NO: 680203 - DNA, 75 bp, synthetic construct
  source 1..75: mol_type = other DNA
tgacagtagatgttcttaatttaaacgacagtgaacattacgttacggaacgctgtaaagttggcacccttattg

SEQ ID NO: 680204 - DNA, 75 bp, synthetic construct
  source 1..75: mol_type = other DNA
ctttcctggctggcatcccgaagaggatgccccgtaattgctcaggtaggaatgttgcgcccggaaaaagggcac

SEQ ID NO: 680205 - DNA, 75 bp, synthetic construct
  source 1..75: mol_type = other DNA
gattcattgcaggcttcgattgataatcgtcagcaggggtatgatattcagattgctggttatggggttggcgat

SEQ ID NO: 680206 - DNA, 75 bp, synthetic construct
  source 1..75: mol_type = other DNA
accactaccactacgacagccagcaccgtctggtgttctacacgcggatacagcacggtgagccgcaggtggaga

SEQ ID NO: 680207 - DNA, 75 bp, synthetic construct
  source 1..75: mol_type = other DNA
tggtgtcaggcttccaactattttatatagaacaagcaatgagcttaaggtcgatgatattgttttgttaataaa

SEQ ID NO: 680208 - DNA, 75 bp, synthetic construct
  source 1..75: mol_type = other DNA
tatatgtttgatggattgactaatattggaagtgattgtggatattctgaatgggctcgttcaggtgataataat

SEQ ID NO: 680209 - DNA, 75 bp, synthetic construct
  source 1..75: mol_type = other DNA
gtaagccagtggttttcattgccggtccaatgaccgggtatcacaactttaaccgcgatgaattcaacgctgagg

SEQ ID NO: 680210 - DNA, 75 bp, synthetic construct
  source 1..75: mol_type = other DNA
acgggtatgcggaaagagaggcgactaacgataacaatgccgaaaatctcaacatttcttatatatgtggcaatg

SEQ ID NO: 680211 - DNA, 75 bp, synthetic construct
  source 1..75: mol_type = other DNA
gcattattaacgaagtgcttagagattacaaaagctctgttaatggtactataattgaatggacaattccttgtg

SEQ ID NO: 680212 - DNA, 75 bp, synthetic construct
  source 1..75: mol_type = other DNA
ttactgatatggcgcgtttgggcgaccaggtagacggtcagcgtccgctggcggttatccacgcgaaagacgaaa

SEQ ID NO: 680213 - DNA, 75 bp, synthetic construct
  source 1..75: mol_type = other DNA
ggtagcggcacaaaaaggcccaaccgacttcgttgagaactacgcgaagtatctgccgacagcgatgctgacgaa

SEQ ID NO: 680214 - DNA, 75 bp, synthetic construct
  source 1..75: mol_type = other DNA
gcgcgtttatgccgacctacgaactctctgaagcccttgccgaagcgattgttggcgtggctaacggcgctggcg

SEQ ID NO: 680215 - DNA, 75 bp, synthetic construct
  source 1..75: mol_type = other DNA
gctgacggtggagcggctggcggcacagatagagccggtttatttgcctgagcgaaaaatacatctttaccactg

SEQ ID NO: 680216 - DNA, 75 bp, synthetic construct
  source 1..75: mol_type = other DNA
aataaaaagcacaggaataaatcagagcggtataagacttcaaataaaaacattctgcgatcagatgaatgctac

SEQ ID NO: 680217 - DNA, 75 bp, synthetic construct
  source 1..75: mol_type = other DNA
cggccgagttattaacggttgtattgaagtgttagatggttcccggcgccgggcggcatgtatcttcagtggcgc

SEQ ID NO: 680218 - DNA, 75 bp, synthetic construct
  source 1..75: mol_type = other DNA
acaggcgttacattcttcgtggctggagactttatcttgttggttcgaaaataagaaaattatcgcattttgtga

SEQ ID NO: 680219 - DNA, 75 bp, synthetic construct
  source 1..75: mol_type = other DNA
gttgttgagggagatatcaccgttgggttggaaccctataatcaggatgatgatatttcattaggtattattaat

SEQ ID NO: 680220 - DNA, 75 bp, synthetic construct
  source 1..75: mol_type = other DNA
tatctgtatgtctggctcataatattaatgagtattttggtatacaagaaaccaaatatattcttgatcaattag

SEQ ID NO: 680221 - DNA, 75 bp, synthetic construct
  source 1..75: mol_type = other DNA
gtcaccgcgccgccatgcttcaggctggaaactttcgggaaaataagaattcgtcaaccaataattttcgggaaa

SEQ ID NO: 680222 - DNA, 75 bp, synthetic construct
  source 1..75: mol_type = other DNA
tcaacaatgtcagtttgcttttagtacaccggattcagaaccaacaacctctgtattacaaggcacagcgcagtg

SEQ ID NO: 680223 - DNA, 75 bp, synthetic construct
  source 1..75: mol_type = other DNA
gcaaagagtttttgcagataatgaacgaaaatgttaaatcagaattaaaagcgcttatcccggataacagcgagg

SEQ ID NO: 680224 - DNA, 75 bp, synthetic construct
  source 1..75: mol_type = other DNA
cagtatttttccctgttctgaataatcctgttccggcagcgattaccagtattgccatggtatggttatttacgt

SEQ ID NO: 680225 - DNA, 75 bp, synthetic construct
  source 1..75: mol_type = other DNA
gtattatttatgataataaattatggttaaggctcacacatgaacaaatcaaggtcattgaacttctgtcagaat

SEQ ID NO: 680226 - DNA, 75 bp, synthetic construct
  source 1..75: mol_type = other DNA
attaccccaggcagcgagttacccactgctcgctgatcaattcacctgttttatatcccctggcacacagcacgt

SEQ ID NO: 680227 - DNA, 75 bp, synthetic construct
  source 1..75: mol_type = other DNA
gggtagttgtgatgatggtatccatgctgccgcaactggcgctatctggctgggggcgattcagggttttgccgg

SEQ ID NO: 680228 - DNA, 75 bp, synthetic construct
  source 1..75: mol_type = other DNA
gctgctcatgcggcagatgatgtaaagctgaaagcaaccaaaacaaacgttgctttctcagactttacgccggta

SEQ ID NO: 680229 - DNA, 75 bp, synthetic construct
  source 1..75: mol_type = other DNA
tccggtgggtattcgcgccgggattgcaggcctggggcagatcgacaaatcgctggatgaagcctcactcagcct

SEQ ID NO: 680230 - DNA, 75 bp, synthetic construct
  source 1..75: mol_type = other DNA
ggctcggtcattgctctaatgtatttgatttaattgaagaatcaaatatcgttgctttgccgtcggtctacgccg

SEQ ID NO: 680231 - DNA, 75 bp, synthetic construct
  source 1..75: mol_type = other DNA
aaaaatactgagtaataaaaatattcactttacgctgaatgttgccggtattttagttgagaatgataaagacgc

SEQ ID NO: 680232 - DNA, 75 bp, synthetic construct
  source 1..75: mol_type = other DNA
tggcaactatgtaaacctttggaagtagatgactcaccattacggattaatttgtatggtaaggaaaatactgtg

SEQ ID NO: 680233 - DNA, 75 bp, synthetic construct
  source 1..75: mol_type = other DNA
gcaacatttgagacgaatgtttttgtcgtgaaattgaaatctgaggttggtgcttctatagaagcaaaagctggg

SEQ ID NO: 680234 - DNA, 75 bp, synthetic construct
  source 1..75: mol_type = other DNA
gtgccatttttatggtctatatggtgctccatttttcaaagcatcattccgatttgatatcatctcatttatatg

SEQ ID NO: 680235 - DNA, 75 bp, synthetic construct
  source 1..75: mol_type = other DNA
tagaacgtgcggaggcaaaatctgataatatattgcatattgatttaattaaatgtattgcaatacttgaccttt

SEQ ID NO: 680236 - DNA, 75 bp, synthetic construct
  source 1..75: mol_type = other DNA
tggatgcactgactttccgtttgagctatatggcaaagcatcgcaccaagcgatacagcagtaccgaacgctcat

SEQ ID NO: 680237 - DNA, 75 bp, synthetic construct
  source 1..75: mol_type = other DNA
tgataagttttatgagcttatcaaggtggacccgatgccgcgcgatcagaatccttggcatacggggtatatagt

SEQ ID NO: 680238 - DNA, 75 bp, synthetic construct
  source 1..75: mol_type = other DNA
gacagcgccacgtcaatgacggttacgcctgccgcttccccggcgctgagcggccagaagtacggcattctgata

SEQ ID NO: 680239 - DNA, 75 bp, synthetic construct
  source 1..75: mol_type = other DNA
tcaccggaacccttccggcttgccgctgattttacgattgctttttactgtcagcacccggcaatcttcctcatt

SEQ ID NO: 680240 - DNA, 75 bp, synthetic construct
  source 1..75: mol_type = other DNA
ctcatacagctgcacctacatggagtgggtttatttatcaagggcatttagcgctttatcattccatagaatgtg

SEQ ID NO: 680241 - DNA, 75 bp, synthetic construct
  source 1..75: mol_type = other DNA
atggggtcagtatatatttttgcccccatcgccattgccgcctgtactagccttgggcttaacccgaccgctgcc

SEQ ID NO: 680242 - DNA, 75 bp, synthetic construct
  source 1..75: mol_type = other DNA
ggaaaccgaactcttggcacagtgcctgtagactccccacttttgccggagcagcacatcatcttcggcggacgg

SEQ ID NO: 680243 - DNA, 75 bp, synthetic construct
  source 1..75: mol_type = other DNA
atagttcggttcaggtaattcatgtatctgatcaggaatttgatcactatgctaacagtagtagttggaagagta

SEQ ID NO: 680244 - DNA, 75 bp, synthetic construct
  source 1..75: mol_type = other DNA
gaactgctggatatgaggcacatacagaggagggaaatgtaaatgttaaaaaattgctggaatctttaaactcta

SEQ ID NO: 680245 - DNA, 75 bp, synthetic construct
  source 1..75: mol_type = other DNA
taacaatgaatatattgattttaataagaatgaagtgctacttattaaaagaaatgatgttcagcattttattat

SEQ ID NO: 680246 - DNA, 75 bp, synthetic construct
  source 1..75: mol_type = other DNA
gctcatcagcgaagacggcaatacggcgtggagcggggagtatgatgaatggggcaacctgctgaatgaggaaaa

SEQ ID NO: 680247 - DNA, 75 bp, synthetic construct
  source 1..75: mol_type = other DNA
gtaagaatcctggagcgtagatatgtttctgacatgcatcgttttaaagatgcactacgtgatcaggctttgcac

SEQ ID NO: 680248 - DNA, 75 bp, synthetic construct
  source 1..75: mol_type = other DNA
ggcctaaaacaccggatctggagtcttatttctccgcgccagctaataagccaggcggcagtaaaattcccgaca

SEQ ID NO: 680249 - DNA, 75 bp, synthetic construct
  source 1..75: mol_type = other DNA
caaacagccagaacagcaagcagaaccagaacaccccgccgctaacaggcagagcggcccgaaaacgccggatct

SEQ ID NO: 680250 - DNA, 75 bp, synthetic construct
  source 1..75: mol_type = other DNA
tctgggtgttctctgtaccaatgtatctcatccgcattctggcgctttgtgcaggcgctgtttttatcttcccaa

SEQ ID NO: 680251 - DNA, 75 bp, synthetic construct
  source 1..75: mol_type = other DNA
atgaaacaaatgtcactaattgagatggatggttttctgaaaggtaaatgcatcccccgagatttaaaggttaac

SEQ ID NO: 680252 - DNA, 75 bp, synthetic construct
  source 1..75: mol_type = other DNA
gcgctggagcgggcccggggggctgcagttcagtccggttcgtctgagccatcccgttacttctttgattattcc

SEQ ID NO: 680253 - DNA, 75 bp, synthetic construct
  source 1..75: mol_type = other DNA
tgataattaattttggactaaatgccgttagtattgcctacagcatcacttatgcattgtattttatagtggtgt

SEQ ID NO: 680254 - DNA, 75 bp, synthetic construct
  source 1..75: mol_type = other DNA
aatacggtgattgtcaccattggcggcaatcaatacaccgccaccgtgcagccagatttaagctggagcgtcagc

SEQ ID NO: 680255 - DNA, 75 bp, synthetic construct
  source 1..75: mol_type = other DNA
tatcagcggctcagcaacgggcgcgaccaccggtaacacggtttccgtgacgattggcacgaccacctacaccac

SEQ ID NO: 680256 - DNA, 75 bp, synthetic construct
  source 1..75: mol_type = other DNA
atcacggtaagcggcaccaacagtgccggaacaacctccaccattacccatccggttaccgtcgatctggctggg

SEQ ID NO: 680257 - DNA, 75 bp, synthetic construct
  source 1..75: mol_type = other DNA
atgctgtgtctgaaatatccggagccggaagaggtttcacaggggcatcctgccggaagtgtgtttgtgctgccg

SEQ ID NO: 680258 - DNA, 75 bp, synthetic construct
  source 1..75: mol_type = other DNA
cgtgggctgattgacgggaaatatacgcgtcttcaggcgaacaccctgacgaattccggtaccgggcgaatctac

SEQ ID NO: 680259 - DNA, 75 bp, synthetic construct
  source 1..75: mol_type = other DNA
acgagctggtttgtcagcccaaatgagcattcgtgcgatagctactgcgctgaatcgcagtccttcgacgatctc

SEQ ID NO: 680260 - DNA, 75 bp, synthetic construct
  source 1..75: mol_type = other DNA
ggcaactggagcaccacggtgccagcttccgcagtcggtgcgctgggcgaagccagctacacggtgacggcgaac

SEQ ID NO: 680261 - DNA, 75 bp, synthetic construct
  source 1..75: mol_type = other DNA
tgtcgcagggcatcacacagagtacgggcagcacgcttgccggtaacggtgatgtcacgctgaccgccggacggg

SEQ ID NO: 680262 - DNA, 75 bp, synthetic construct
  source 1..75: mol_type = other DNA
cggtcaccggagcgcagctgctaacggtcgatacccagccgccaacacttgctatcaacaccatcgctcaggaca

SEQ ID NO: 680263 - DNA, 75 bp, synthetic construct
  source 1..75: mol_type = other DNA
gcaacagtattagccgatggcacatggagcgttggtgttccggcggcagacgtgagtaactggcctgcgggtacg

SEQ ID NO: 680264 - DNA, 75 bp, synthetic construct
  source 1..75: mol_type = other DNA
tccggcgtggagctggggcaaacggtcaccgttacctttggcgggaaaacctacaccgctaccgtagcgggcgat

SEQ ID NO: 680265 - DNA, 75 bp, synthetic construct
  source 1..75: mol_type = other DNA
ggcaactggagtctgggcgttccggcctcggtggtcagtgggctggcggagggcagttatcctgtcagcgtctca

SEQ ID NO: 680266 - DNA, 75 bp, synthetic construct
  source 1..75: mol_type = other DNA
acaactcgcatcgccgaagtgcccgcaagggccaacgccaattgaattactgaaacaggaatacgagcgccggaa

SEQ ID NO: 680267 - DNA, 75 bp, synthetic construct
  source 1..75: mol_type = other DNA
ggttgtttgccagcccagagcgcgatattgccgccagtcacggaaacaccgtattcatataccatgttgatgatg

SEQ ID NO: 680268 - DNA, 75 bp, synthetic construct
  source 1..75: mol_type = other DNA
gcccggagcgcgatattgctgccagtcacggaaacaccgtattcatataccatgttgatgatgataaaatagcca

SEQ ID NO: 680269 - DNA, 75 bp, synthetic construct
  source 1..75: mol_type = other DNA
ataaaaacctatgtcagattaagttataatcttactctaaagttcagaaataaacatggaaaacatacatataaa

SEQ ID NO: 680270 - DNA, 75 bp, synthetic construct
  source 1..75: mol_type = other DNA
atggcgtttggggtttatcctgaaacatcattagccgatgcgaggcagaagagggaagagggaagaggcaaggag

SEQ ID NO: 680271 - DNA, 75 bp, synthetic construct
  source 1..75: mol_type = other DNA
ttatctttggtgatccagttattatatttgacaacgattttgtcgtagccagatatgctttcaagatttctttcc

SEQ ID NO: 680272 - DNA, 75 bp, synthetic construct
  source 1..75: mol_type = other DNA
tggtgagttcgcaatgtctggcaataacgtttttgatgggttatttgccagtcacggaaacaccgtattcatata

SEQ ID NO: 680273 - DNA, 75 bp, synthetic construct
  source 1..75: mol_type = other DNA
gtcgacgcggttaccgtcctaatactcaggcaagaagactcaaaaccggtaaaaccgatgctgtcggtctggttt

SEQ ID NO: 680274 - DNA, 75 bp, synthetic construct
  source 1..75: mol_type = other DNA
agaaggctcaaaaccggtaaaaccgatgctgtcgggctggtttatccagaacatgatgtgccgtttaacagcagt

SEQ ID NO: 680275 - DNA, 75 bp, synthetic construct
  source 1..75: mol_type = other DNA
atgaatcctggcgatacgacgggagtgataaatacccgtggccacagcctgtgctgtaccacatctgcctcgaaa

SEQ ID NO: 680276 - DNA, 75 bp, synthetic construct
  source 1..75: mol_type = other DNA
aactctgacgcgttatcagaatttgaaaacgccttataacgatgaactggcaatgggattgcagcaaaaaatcgg

SEQ ID NO: 680277 - DNA, 75 bp, synthetic construct
  source 1..75: mol_type = other DNA
taaagaaaattttattgccatgagtcatacgaaaagcgagttaactggagggaaacgtcggtaccggattaaaaa

SEQ ID NO: 680278 - DNA, 75 bp, synthetic construct
  source 1..75: mol_type = other DNA
cctttagtattatgctggcaattatcctcagcgccttttttcattgccgcggtaatggtattaaacggtgctgcg

SEQ ID NO: 680279 - DNA, 75 bp, synthetic construct
  source 1..75: mol_type = other DNA
cccgcaaaccatcacagctaccattaccgacgcggcaggcaacagcgatgacgccagccgcacggtcaccgtgaa

SEQ ID NO: 680280 - DNA, 75 bp, synthetic construct
  source 1..75: mol_type = other DNA
agactccggaaattcccggtattgcgcgtcaggagctgagcaaaatggggccgatgtcgctggcggagaaaatcc

SEQ ID NO: 680281 - DNA, 75 bp, synthetic construct
  source 1..75: mol_type = other DNA
ttcttcgctattccggcaaccctgtcagcgtttgtcgggctggctatcctgttagtcagcaatatcatgtcgtgg

SEQ ID NO: 680282 - DNA, 75 bp, synthetic construct
  source 1..75: mol_type = other DNA
actcagattcgcaagatggtcggagatcgactttgaaaatgcgatgtggactatccctggagaacgcgaaccatt

SEQ ID NO: 680283 - DNA, 75 bp, synthetic construct
  source 1..75: mol_type = other DNA
atgcacgtgcattttgcgtgtatatttttgtctttttctggtccacttattgtctggtcagtgtccataagtgac

SEQ ID NO: 680284 - DNA, 75 bp, synthetic construct
  source 1..75: mol_type = other DNA
ctggcacaaatacaactgtggaagcatcgccggacgctggtttgacctgaccacgtttgatgatgagcgcgactt

SEQ ID NO: 680285 - DNA, 75 bp, synthetic construct
  source 1..75: mol_type = other DNA
acattgaagtcatcatttccgatgacgcttcaaaagataacaccttgttaatcgctaatgactggaaagacaaaa

SEQ ID NO: 680286 - DNA, 75 bp, synthetic construct
  source 1..75: mol_type = other DNA
ctggaacgcgccacccaggggttggtcgaggccggcaagccggtggacggcgagctgctgcaattcctgtcgccg

SEQ ID NO: 680287 - DNA, 75 bp, synthetic construct
  source 1..75: mol_type = other DNA
aactttttacaattacgcacgactccgcctgagaagctccctgaggtggctggaaaaatttattttctttccgca

SEQ ID NO: 680288 - DNA, 75 bp, synthetic construct
  source 1..75: mol_type = other DNA
tcgtccctttaagccgtcaggcactgatagtcttagaggagataaaacagatcagtggggactacgaattggtat

SEQ ID NO: 680289 - DNA, 75 bp, synthetic construct
  source 1..75: mol_type = other DNA
ccttattgcttcaggtgcccggcgcaatgtgccaatgcaggaatatatggatcgcggctatttcacagtgaaaga

SEQ ID NO: 680290 - DNA, 75 bp, synthetic construct
  source 1..75: mol_type = other DNA
tattgtatcccatagtgaaaataagggagtggccgctaactgtaatcaggcatggaaattagctaaaggtgaatg

SEQ ID NO: 680291 - DNA, 75 bp, synthetic construct
  source 1..75: mol_type = other DNA
gtggttttttgggtgcattatgcttagggatggctctagcgggatctgccattattggtgccggcgtcggaatga

SEQ ID NO: 680292 - DNA, 75 bp, synthetic construct
  source 1..75: mol_type = other DNA
ctacaccgccacggtgcaggctaatttaagctggagtgtggacgttccggcggcggatattcaggcgctgggcaa

SEQ ID NO: 680293 - DNA, 75 bp, synthetic construct
  source 1..75: mol_type = other DNA
accattaacgcggtggcgaccgatgacattattaacgctgccgaagcgggcaatgcgcaaaccatcagtgggtag

SEQ ID NO: 680294 - DNA, 75 bp, synthetic construct
  source 1..75: mol_type = other DNA
tggcgcgcggcgaactgaacctgatcggcgccaccacgctcaacgagtatcagaagtacatcgagaaggacgccg

SEQ ID NO: 680295 - DNA, 75 bp, synthetic construct
  source 1..75: mol_type = other DNA
agcgacaaagcgggcaacccggcaagcgccgatcatgcgctggcggtggacgttaccgctccggatctcaccatt

SEQ ID NO: 680296 - DNA, 75 bp, synthetic construct
  source 1..75: mol_type = other DNA
acctggagcgtgaacgttccggcaacggatttaagcggattaaccgccagcagttacaccgtgaccgccacggtg

SEQ ID NO: 680297 - DNA, 75 bp, synthetic construct
  source 1..75: mol_type = other DNA
cgatctggcggcggttgccatcaccattaacaccctttccggcgatgatgtgatcaacgccgtggagaaaggcga

SEQ ID NO: 680298 - DNA, 75 bp, synthetic construct
  source 1..75: mol_type = other DNA
cttgcagaacgtcagcaaaaagctaaaccgcgactgaaattcctggaaagctggctacgtgaaagactcagatga

SEQ ID NO: 680299 - DNA, 75 bp, synthetic construct
  source 1..75: mol_type = other DNA
atactggccttccgtcaattacctttaacgccatcagcggcgataacgtcctgaacgccgatgaaaaaggccagc

SEQ ID NO: 680300 - DNA, 75 bp, synthetic construct
  source 1..75: mol_type = other DNA
gccgaaaaaggtgcggcgctaacgctctccggcagcacgtccggcgtcgaagcggggcaaacagttaccattact

SEQ ID NO: 680301 - DNA, 75 bp, synthetic construct
  source 1..75: mol_type = other DNA
gcgtgtcgccgcgcgtgaaggatgcgctcagccgcgccttcgtagcctccaatgaactcggccattcttatgtcg

SEQ ID NO: 680302 - DNA, 75 bp, synthetic construct
  source 1..75: mol_type = other DNA
gacgtggccgaggcaccgcctggcgacgcgagcaagcctgcgcgcaagcctgcgcgcaagcctgcgcgcaagaag

SEQ ID NO: 680303 - DNA, 75 bp, synthetic construct
  source 1..75: mol_type = other DNA
ttattgacagaggtttcaaaaactttggcccatctcaaagtcgctaccgctacgtgtacgaattgttcattgccg

SEQ ID NO: 680304 - DNA, 75 bp, synthetic construct
  source 1..75: mol_type = other DNA
taatactattcgtaatcttgaatcatggggaattaataccacttatgttgagaaggtcccctgtaccagcagtgg

SEQ ID NO: 680305 - DNA, 75 bp, synthetic construct
  source 1..75: mol_type = other DNA
caaaattcatttgctagccaattagctaaagagttacatacaaatgtaataggacctgacacgctatggacgtgg

SEQ ID NO: 680306 - DNA, 75 bp, synthetic construct
  source 1..75: mol_type = other DNA
atgctgccgcagcatagcgatattgaaatagcctggtatgcttcgatacagcaggcgatacagcaggagccgaat

SEQ ID NO: 680307 - DNA, 75 bp, synthetic construct
  source 1..75: mol_type = other DNA
gacctgacggggtggatgtcgctgtcgcgtaaaccggaggagacatggtacggctgggacggcgacaggctgacg

SEQ ID NO: 680308 - DNA, 75 bp, synthetic construct
  source 1..75: mol_type = other DNA
cgcaaacttccaataacaagtaagccatacagcgataaccacgaaaaggaactcgttgcttttatcaaggggctg

SEQ ID NO: 680309 - DNA, 75 bp, synthetic construct
  source 1..75: mol_type = other DNA
ggcctgtacttaatcatttttttcataagctatttcacgctattcacaccagttaccacgtttaaattattaaaa

SEQ ID NO: 680310 - DNA, 75 bp, synthetic construct
  source 1..75: mol_type = other DNA
acttttcagcctgttagtcgatcagcttgggatgccactacaacgagtagtggtgtagcaacagagttgactggt

SEQ ID NO: 680311 - DNA, 75 bp, synthetic construct
  source 1..75: mol_type = other DNA
gggcgaaaccacggcccgctaccgcggatttttacgcagtcacggtctggcgtttgatggccaacaacaggagcc

SEQ ID NO: 680312 - DNA, 75 bp, synthetic construct
  source 1..75: mol_type = other DNA
aacttgcccccattaccgaaaatatcactcacgccttccctggcatcggtgctggggtgatgctgccaacttact

SEQ ID NO: 680313 - DNA, 75 bp, synthetic construct
  source 1..75: mol_type = other DNA
catcaacaagcgatcaaaatggaaaacgagcgcagagtaccttacagaagtttgtacaggataaaggatttcgta

SEQ ID NO: 680314 - DNA, 75 bp, synthetic construct
  source 1..75: mol_type = other DNA
tttatcgcttcgatggcatgcagctctggcgctatcacaccgcagatccccgagccgtgcgcgtcgtgaacgatc

SEQ ID NO: 680315 - DNA, 75 bp, synthetic construct
  source 1..75: mol_type = other DNA
ggatagttaatatttcaacggacagtctctggaatttaaagacatcatctactaacgcacaattgctacatagac

SEQ ID NO: 680316 - DNA, 75 bp, synthetic construct
  source 1..75: mol_type = other DNA
tcgtttgcgggagagggcgaaatcctacgctaaggctttggccaacgatattctccggtaagattgatgtgttcc

SEQ ID NO: 680317 - DNA, 75 bp, synthetic construct
  source 1..75: mol_type = other DNA
tcctggatcttgcagctcgcggccgcatcgacctggtgatcggcacccgagccttcatgccccctggtttgcgca

SEQ ID NO: 680318 - DNA, 75 bp, synthetic construct
  source 1..75: mol_type = other DNA
gggcgaagctttccgctatatctatatcggtgatgctggcgacggtgaacttaatgtctcgcgtgaaggtaaagt

SEQ ID NO: 680319 - DNA, 75 bp, synthetic construct
  source 1..75: mol_type = other DNA
aaactggcaatggggcttaacgcatccaaaggcaaaaaaacggcaatcgataaaatttatccgcgacattttttg

SEQ ID NO: 680320 - DNA, 75 bp, synthetic construct
  source 1..75: mol_type = other DNA
ttcttcgcagtcttcctggcgctgttcctgacagctgggctgggtagtggttccacttttccagatgatttccgt

SEQ ID NO: 680321 - DNA, 75 bp, synthetic construct
  source 1..75: mol_type = other DNA
atggctgatttcaccctgtcaaaatcgctgtttagcggaaaatatcgcaatgcctcttcaacgcctggcaacatt

SEQ ID NO: 680322 - DNA, 75 bp, synthetic construct
  source 1..75: mol_type = other DNA
aaaaatggttagcccgcgacgacaaatatgtttatcgcttcgatggcatgcagctctggcgctatcacaccgcag

SEQ ID NO: 680323 - DNA, 75 bp, synthetic construct
  source 1..75: mol_type = other DNA
ggttatgacggccacggcgaaatgaatatcagtaatgaggggcttgttgtcagcaacggaggaagctctctcggt

SEQ ID NO: 680324 - DNA, 75 bp, synthetic construct
  source 1..75: mol_type = other DNA
aatgttgggaaatgttgaaacacgaggtaaagggtacgcgcaagacgttgtaatgagtctgatgagatatgcctt

SEQ ID NO: 680325 - DNA, 75 bp, synthetic construct
  source 1..75: mol_type = other DNA
cgccaccgctattatgacccgctgcaggggaggtatatcactcaggatccgattgggctgaaggggggatggaat

SEQ ID NO: 680326 - DNA, 75 bp, synthetic construct
  source 1..75: mol_type = other DNA
ggatcctcggtgcattgttttactactctccggaacgaccggaggtgaaagcacttttcgactgtctgcccactc

SEQ ID NO: 680327 - DNA, 75 bp, synthetic construct
  source 1..75: mol_type = other DNA
gggttgttgaagtttccattagcggcgaagaggggcatatcaaagcccgtgcggagtacaccaacagctgcaatc

SEQ ID NO: 680328 - DNA, 75 bp, synthetic construct
  source 1..75: mol_type = other DNA
gcaggtcgtgaagcactgattaccgtattgagcaaagcgaaagaagggattgaaggcaaaacaggaacggtgatt

SEQ ID NO: 680329 - DNA, 75 bp, synthetic construct
  source 1..75: mol_type = other DNA
gccggagaccctgattgcccgcgaccgcgaggagtatatcacggcggtactgtccctgacggagacgccacgcct

SEQ ID NO: 680330 - DNA, 75 bp, synthetic construct
  source 1..75: mol_type = other DNA
gaccgggcaacggtacctggacggatacggcagtgatgaagagcagtttaaggcattaatggatgcgggtattgc

SEQ ID NO: 680331 - DNA, 75 bp, synthetic construct
  source 1..75: mol_type = other DNA
cggacaaccaggctgtttctctggacttcagcggtaaacgcccaaagctcaccattgctaacctgaacgggctgg

SEQ ID NO: 680332 - DNA, 75 bp, synthetic construct
  source 1..75: mol_type = other DNA
tattactcagtgaaaaaggtttttatggactggctttcttcttaagcttgtttggtgcagtagcggtgcagaaga

SEQ ID NO: 680333 - DNA, 75 bp, synthetic construct
  source 1..75: mol_type = other DNA
tctgcctcgccgggttctgcatgatgtttatatgcactgctcttacgcagacctgccggaaaagcatctgataaa

SEQ ID NO: 680334 - DNA, 75 bp, synthetic construct
  source 1..75: mol_type = other DNA
gtcatacctgagcgcacgccattcagggagaggtcaaaagctgcatggccgagggaactgccggtaagaatagcc

SEQ ID NO: 680335 - DNA, 75 bp, synthetic construct
  source 1..75: mol_type = other DNA
ctgataactgttctacaaaggaacagaacacagagcacttttgtcttgaaacttttgaatggcgggttcatttcg

SEQ ID NO: 680336 - DNA, 75 bp, synthetic construct
  source 1..75: mol_type = other DNA
ggaacgtctgcagaagcaactgatggaaaacgacgtggaaaaggtgctgtttgagggaaggccggaagcctttgc

SEQ ID NO: 680337 - DNA, 75 bp, synthetic construct
  source 1..75: mol_type = other DNA
cttgtgggtattgcccagccgggtgccacggatgagataacccggggggtgtttgatgagttccgggagttgtca

SEQ ID NO: 680338 - DNA, 75 bp, synthetic construct
  source 1..75: mol_type = other DNA
gaagtgcacacgcatattgatgaaggattgtttcgtcgtctgggtctgccggagtccctgatagccagagaccgt

SEQ ID NO: 680339 - DNA, 75 bp, synthetic construct
  source 1..75: mol_type = other DNA
ctggaaaaccagcaggggacggtggtcagcaacggtaacagcagactggatgtcacccgctctgataatcagggc

SEQ ID NO: 680340 - DNA, 75 bp, synthetic construct
  source 1..75: mol_type = other DNA
cggcaacccagtattgtatagataataaatctcaaacagcttttctggccagattcaaaccagattattttataa

SEQ ID NO: 680341 - DNA, 75 bp, synthetic construct
  source 1..75: mol_type = other DNA
accaaaaggtcgcttcaagttgacctccaaagtgataacgccatcgactttgatggttcatcaaatgctcttctg

SEQ ID NO: 680342 - DNA, 75 bp, synthetic construct
  source 1..75: mol_type = other DNA
caaaggtgccgggcgtatcgcagaagtgggtgcgcgctttgttctcgatggtatgccgggtaagcagatggcgat

SEQ ID NO: 680343 - DNA, 75 bp, synthetic construct
  source 1..75: mol_type = other DNA
tctgactggtcaatcccggatgaggagcagcatctctggcaattttctgttctttttgaaggacagggtgaaatg

SEQ ID NO: 680344 - DNA, 75 bp, synthetic construct
  source 1..75: mol_type = other DNA
aatattagatgtcgcttccctatactactataagtcactggtaaacatatataatgaaagaattgaggatgcaat

SEQ ID NO: 680345 - DNA, 75 bp, synthetic construct
  source 1..75: mol_type = other DNA
aatgacaatattttatcaaaagaaatgtctaacggaaaaaacgcactgaatgagttcacacctgaaagtattgtc

SEQ ID NO: 680346 - DNA, 75 bp, synthetic construct
  source 1..75: mol_type = other DNA
aaggattcaaacgtatccaaactgcagagataatatttggtgataccacgtttctcatcggtgctaataatgccg

SEQ ID NO: 680347 - DNA, 75 bp, synthetic construct
  source 1..75: mol_type = other DNA
gggatgcctctttaaaaaaagtggcgacttttgatggcaaggttttaagggatgcctctttaaaaaaagtagcaa

SEQ ID NO: 680348 - DNA, 75 bp, synthetic construct
  source 1..75: mol_type = other DNA
cagagcgaaagaaagttgaaacaagactcaagattatacttggtgcggaagttgctaaagctatgcattgcgata

SEQ ID NO: 680349 - DNA, 75 bp, synthetic construct
  source 1..75: mol_type = other DNA
tgttcactgccggattgctggggctggcctggtggatacgcggacgcgaacaaaaagcgcctgtcgaacccaaac

SEQ ID NO: 680350 - DNA, 75 bp, synthetic construct
  source 1..75: mol_type = other DNA
cgttacgcgtgtcagcaccgatcaggatgttggcgagcagatggtgaatcagcttttcagtaacccaagcgttat

SEQ ID NO: 680351 - DNA, 75 bp, synthetic construct
  source 1..75: mol_type = other DNA
tgttatccatgatcgtgatagcggaactcccggtgcggagagctttaatgcgccgattgctgctgctgttgggga

SEQ ID NO: 680352 - DNA, 75 bp, synthetic construct
  source 1..75: mol_type = other DNA
cctgaacctcaagaaatgcccgatatctgcaagagtgaagcattacttgagcttgaaaagaaatattacccacag

SEQ ID NO: 680353 - DNA, 75 bp, synthetic construct
  source 1..75: mol_type = other DNA
tgaatatgaatcacagaagaaaattgctatgcaggctgatattgagcagcttacgaagatttctcagaaatatag

SEQ ID NO: 680354 - DNA, 75 bp, synthetic construct
  source 1..75: mol_type = other DNA
cgattgttgatagaaaaccttgtgcatatgatttgcattttactgatgaaggagatgagtatgcacatatgaaac

SEQ ID NO: 680355 - DNA, 75 bp, synthetic construct
  source 1..75: mol_type = other DNA
gaggccggaaatattgagtccatgattgattatctggagtatcttgatagtgttagtgtatcgccagcacttctt

SEQ ID NO: 680356 - DNA, 75 bp, synthetic construct
  source 1..75: mol_type = other DNA
ctggcgcagcttggcctgctggatatcctctcttccgactactaccccgccagcctgctggatgcggcgttccgc

SEQ ID NO: 680357 - DNA, 75 bp, synthetic construct
  source 1..75: mol_type = other DNA
atgattatcaataacgttaagctggtgctggaaaacgaggtggtaagcggttcgctggaggtgcagaacggcgaa

SEQ ID NO: 680358 - DNA, 75 bp, synthetic construct
  source 1..75: mol_type = other DNA
gctggagccgaagtgggttatctccatgggcgcatgtgcgaactccggcggtatgtacgatatttattccgttgt

SEQ ID NO: 680359 - DNA, 75 bp, synthetic construct
  source 1..75: mol_type = other DNA
atggattatacgctcacccgcatagatcccaacggtgagaacgaccgttatcccctgcaaaagcaggagatcgta

SEQ ID NO: 680360 - DNA, 75 bp, synthetic construct
  source 1..75: mol_type = other DNA
agttcgcgatgataagccactcaatagctatgatgagtggctagcagacttcgacacccttgaacccgccgaata

SEQ ID NO: 680361 - DNA, 75 bp, synthetic construct
  source 1..75: mol_type = other DNA
acaaagtgattgacagcttcggtgactggtcgccacagactgaacatccagctatcgctattcagcgtaaagaac

SEQ ID NO: 680362 - DNA, 75 bp, synthetic construct
  source 1..75: mol_type = other DNA
gcggcggcgcgttttcaggcaaagatccgtcgaaagtcgatcgttccgccgcctacgctgctcgctatgtggcga

SEQ ID NO: 680363 - DNA, 75 bp, synthetic construct
  source 1..75: mol_type = other DNA
taataaaaatgctgcacaagatatctgtctgcatgattggtttttatattcatttgctcggacgagaaattattc

SEQ ID NO: 680364 - DNA, 75 bp, synthetic construct
  source 1..75: mol_type = other DNA
gaagaacgtttctcccaggggcgttttgacgatgccgcacgcttgatggaacagatcaccacttccgatgagtta

SEQ ID NO: 680365 - DNA, 75 bp, synthetic construct
  source 1..75: mol_type = other DNA
tcctggttgatgacgtagtgaagatagctcagggcataccattaaatgctgtggaagggaagaacgagcagactg

SEQ ID NO: 680366 - DNA, 75 bp, synthetic construct
  source 1..75: mol_type = other DNA
aacatggaaaggtgaattaacgagaagtgttttcctgtttaaatcgttccctatctcggttgttatgcgtcactg

SEQ ID NO: 680367 - DNA, 75 bp, synthetic construct
  source 1..75: mol_type = other DNA
aacttactggaatccaacgcgccggtggcagtcagtatgcgccatcaggtttacagcatggtggcggaggggaag

SEQ ID NO: 680368 - DNA, 75 bp, synthetic construct
  source 1..75: mol_type = other DNA
agcttgcggaaattgtttgtggattactggtgcaaccagcattattgaatgaattaaaaacaccagccacgcata

SEQ ID NO: 680369 - DNA, 75 bp, synthetic construct
  source 1..75: mol_type = other DNA
acatgatctttaaccagatgcaggagtatttttcaccaggctatttgcgtaaaatggagcaacgttcgaagaaag

SEQ ID NO: 680370 - DNA, 75 bp, synthetic construct
  source 1..75: mol_type = other DNA
aaaggcaacgatacgatgctgactccggaaagcatcatgcgtatacccgatgctgctgtagagcacctcggatca

SEQ ID NO: 680371 - DNA, 75 bp, synthetic construct
  source 1..75: mol_type = other DNA
agttctgtttgtatttgcctgtttagaaggcaattctggcagcaatcgttacggaaacgatccgaagtttggttc

SEQ ID NO: 680372 - DNA, 75 bp, synthetic construct
  source 1..75: mol_type = other DNA
atgcatttatggacttaagggtcgtgacggatcctgcgtataatgaagatgaaatacaatatgatgcgaataatt

SEQ ID NO: 680373 - DNA, 75 bp, synthetic construct
  source 1..75: mol_type = other DNA
atgcgcatgtttacaaatcttttgtatgatatttgtacagtttttgagttgtttaaggaaggagagagtccgagg

SEQ ID NO: 680374 - DNA, 75 bp, synthetic construct
  source 1..75: mol_type = other DNA
gacgctggcagaagtcattatggaaaacaaagtattatccagtcgcgaacgtaaagaaactatgatagggctttt

SEQ ID NO: 680375 - DNA, 75 bp, synthetic construct
  source 1..75: mol_type = other DNA
ggagctgatagccagagttctagcaatggcgcactgctcggcgactccacgctgcggacgattcagacgcagttg

SEQ ID NO: 680376 - DNA, 75 bp, synthetic construct
  source 1..75: mol_type = other DNA
tatccgtcgcttacacgataccgaccgttcaggtgcctgggccttgctcttttttgttccgtttattggctggct

SEQ ID NO: 680377 - DNA, 75 bp, synthetic construct
  source 1..75: mol_type = other DNA
gtttccgtttgcatcttgttggcgttggggatgaacagagccgcaacaagaccctggagagtattcaggcactct

SEQ ID NO: 680378 - DNA, 75 bp, synthetic construct
  source 1..75: mol_type = other DNA
tgctggtgaatcgtagccaggcggatgtcgacactgcacatcggctggcggaagatatcctgcgcttcgcccgct

SEQ ID NO: 680379 - DNA, 75 bp, synthetic construct
  source 1..75: mol_type = other DNA
tgcagcttttcagcgtgctgctgggcgataaccacgggctggacatcgacacgctggacaaagacgtggctcacg

SEQ ID NO: 680380 - DNA, 75 bp, synthetic construct
  source 1..75: mol_type = other DNA
attcacgactacactgcactcatcagcgaactaaaatcacgcaaaattgtggtcagcgtcgccgccgacattatg

SEQ ID NO: 680381 - DNA, 75 bp, synthetic construct
  source 1..75: mol_type = other DNA
atgagcaacactaccgacatcttaagcacgatagctgatatcactatggctggtactgctgtatgggctgcattc

SEQ ID NO: 680382 - DNA, 75 bp, synthetic construct
  source 1..75: mol_type = other DNA
tttatggtgcaggagcagatcgcccgtgctgaggatatcgatacgttgtttaaaacctgcttcgggcacaagatg

SEQ ID NO: 680383 - DNA, 75 bp, synthetic construct
  source 1..75: mol_type = other DNA
gagtaatgggaactggcgtcgctcataacatggcgcaatacggcatatcaactaacgttgtggatatttctcaat

SEQ ID NO: 680384 - DNA, 75 bp, synthetic construct
  source 1..75: mol_type = other DNA
tgcagcttttcagcgtactactgggggataaccacgggctggacatcgacacgctggacaaagacgtggctcacg

SEQ ID NO: 680385 - DNA, 75 bp, synthetic construct
  source 1..75: mol_type = other DNA
cggcttccgcgcatatggcaggaatgcaggtggtggttgtggcgtgtgataaaaatggcaacatcgatctgactg

SEQ ID NO: 680386 - DNA, 75 bp, synthetic construct
  source 1..75: mol_type = other DNA
gcagccgaactccggcgctcagggcgaatacgcgggcctgctggcgattcgtcattatcatgaaagccgcaacga

SEQ ID NO: 680387 - DNA, 75 bp, synthetic construct
  source 1..75: mol_type = other DNA
cggcattctttgcggcgaaagacgaatacaaacgctcaatgccgggccgtattatcggtgtatcgaaagatgcag

SEQ ID NO: 680388 - DNA, 75 bp, synthetic construct
  source 1..75: mol_type = other DNA
gtggcagacaaatactggccgacagtgaaacgtctggatgatgtttacggtgaccgtaacctgttctgttcctgc

SEQ ID NO: 680389 - DNA, 75 bp, synthetic construct
  source 1..75: mol_type = other DNA
gatgcagactcgcgagcaacatattcgtcgtgagaaagcgaactccaatatttgtacttcccaggtgctgctggc

SEQ ID NO: 680390 - DNA, 75 bp, synthetic construct
  source 1..75: mol_type = other DNA
tgcgctgatggcagcacgtaaccagttgctggctctggcggcggaaaatccggagttaacccgtgtacgccataa

SEQ ID NO: 680391 - DNA, 75 bp, synthetic construct
  source 1..75: mol_type = other DNA
tacagcaggcttacgatctggtgggcaagatccgcgacgacaggccgttgcacgcctacgaacactggctggcca

SEQ ID NO: 680392 - DNA, 75 bp, synthetic construct
  source 1..75: mol_type = other DNA
ctttccagacgattttaaattatcagtaacatttaagtctttaacttctcgcgagggtaatgaacgtctgcataa

SEQ ID NO: 680393 - DNA, 75 bp, synthetic construct
  source 1..75: mol_type = other DNA
ttggctgcgctgaaaggagttgccctggaagcgtggacaatgaagcagattgataccgacagttaccagcatatc

SEQ ID NO: 680394 - DNA, 75 bp, synthetic construct
  source 1..75: mol_type = other DNA
aatggatctacggcgatcacgatctgctggatgagaaaggcaaacgccactcgccggacttcaagccggactgga

SEQ ID NO: 680395 - DNA, 75 bp, synthetic construct
  source 1..75: mol_type = other DNA
gccgagctgtaccatcatgagtcggtctcccgcggcaaagatgtcacgccagagcagctggcgcgctcccagggt

SEQ ID NO: 680396 - DNA, 75 bp, synthetic construct
  source 1..75: mol_type = other DNA
atgcatagcgattaccactggcaccctctggcgctgccagacacctctttatcccgcgcgggctggttcctgatc

SEQ ID NO: 680397 - DNA, 75 bp, synthetic construct
  source 1..75: mol_type = other DNA
tggatggacttaaaaaggaagtggctaaagcctgtaatgccagtgccacagttgccgacaacctcccgaagatac

SEQ ID NO: 680398 - DNA, 75 bp, synthetic construct
  source 1..75: mol_type = other DNA
gccagatttcttcaatcatggacagcatcccgcttactatgcaaaggagctttccacacattaccccagccatgc

SEQ ID NO: 680399 - DNA, 75 bp, synthetic construct
  source 1..75: mol_type = other DNA
acaaaggcgagattgatgatgatgaacttttacgcgtaagaatcagattaatgacggcccaggcggaagcgcagg

SEQ ID NO: 680400 - DNA, 75 bp, synthetic construct
  source 1..75: mol_type = other DNA
ccaagatgatcgggtttcagaaccttcgtgactgtgcctggagctcaatgaggcggcatcatgtccaagctgtga

SEQ ID NO: 680401 - DNA, 75 bp, synthetic construct
  source 1..75: mol_type = other DNA
aaggctccggcaacgatcaacacctacctgtcagcgctcaaaggggtggctcttgaagcctggacgatgaagcaa

SEQ ID NO: 680402 - DNA, 75 bp, synthetic construct
  source 1..75: mol_type = other DNA
taaagcctgtaatgcttgcgcaggagttgctgacaacctcccgcagatactggctgattacctgatggaaactac

SEQ ID NO: 680403 - DNA, 75 bp, synthetic construct
  source 1..75: mol_type = other DNA
acgttcttgcagaagacacttccctgccgggaaaaatcagggaatgccatgtttatttccctgatgacagaacaa

SEQ ID NO: 680404 - DNA, 75 bp, synthetic construct
  source 1..75: mol_type = other DNA
ggccgatcagcaaaaaagcgcggcttacgactttacccacgaactgttaaccacgctggaagtggacgatccggc

SEQ ID NO: 680405 - DNA, 75 bp, synthetic construct
  source 1..75: mol_type = other DNA
acgcgaacagtgggaacgtgacaacggatttatcagcaacggaaacggcctggaagctgtgggagcttatggggg

SEQ ID NO: 680406 - DNA, 75 bp, synthetic construct
  source 1..75: mol_type = other DNA
tgacttcgtaagacaaacagcccctgccgggcagtttcctgtaagagaatgtttgccttctctgcatgatcttcc

SEQ ID NO: 680407 - DNA, 75 bp, synthetic construct
  source 1..75: mol_type = other DNA
cttctctgtcggaaaaaatcaggaaatgccctgtttatttccctgatgacagggtaaacagaaacaacggagata

SEQ ID NO: 680408 - DNA, 75 bp, synthetic construct
  source 1..75: mol_type = other DNA
gaatcaacgttgcaccgtgattttcacggatgctgaggggtatatcgaagacactaacaactcgctggaaagtct

SEQ ID NO: 680409 - DNA, 75 bp, synthetic construct
  source 1..75: mol_type = other DNA
ccattgccggtgagttgaagagcatcagctctgatcgagtaactatcagcaagggccccaataaaacgatgccga

SEQ ID NO: 680410 - DNA, 75 bp, synthetic construct
  source 1..75: mol_type = other DNA
ttactttggctgatgctattgacccgtcacctaagctgacctctattgcccttgttggaggcccggcgaatgaca

SEQ ID NO: 680411 - DNA, 75 bp, synthetic construct
  source 1..75: mol_type = other DNA
agaggaaatgcacggacctttaactcggcaacccatgttccagattacgtccgataaaactgccccaacactgac

SEQ ID NO: 680412 - DNA, 75 bp, synthetic construct
  source 1..75: mol_type = other DNA
cagagactgcaaaattaaatttattaaaagaaaatatagctgaaaaaaatatttatatagttggtaatactgtta

SEQ ID NO: 680413 - DNA, 75 bp, synthetic construct
  source 1..75: mol_type = other DNA
ttataatcaagtaaggatcggtcacgtagaagctggactacgtaccggagacttatactccccttggcctgagga

SEQ ID NO: 680414 - DNA, 75 bp, synthetic construct
  source 1..75: mol_type = other DNA
ttatgaaaaaatacccattgggcatgttgaagcgggcttaagaaccggaaatatatattcaccttggccggagga

SEQ ID NO: 680415 - DNA, 75 bp, synthetic construct
  source 1..75: mol_type = other DNA
gaaaaatgaaatgtatccgggtggtaaccgcagatgaacatctgaaggaagtttatacggaagacgcttccctgc

SEQ ID NO: 680416 - DNA, 75 bp, synthetic construct
  source 1..75: mol_type = other DNA
ctattttctccgagtggtatgcgctggatctggtgaaaaaccaggatggcgcggtggtgggttgtactgcactgt

SEQ ID NO: 680417 - DNA, 75 bp, synthetic construct
  source 1..75: mol_type = other DNA
gaatgatgattgcactaatcgccctgtccctgctggcgcagttaagcggctgcacgaatacgcgaacggtctacg

SEQ ID NO: 680418 - DNA, 75 bp, synthetic construct
  source 1..75: mol_type = other DNA
ttgttgcctcctttgttaccgtcatcggttctttcatctggtctgccgggcattactacagcaaatatcagcacg

SEQ ID NO: 680419 - DNA, 75 bp, synthetic construct
  source 1..75: mol_type = other DNA
tcgctgcattcttctttactgtcattggttctttcatctggtctgccaaccactactacagcaaatatcagcacg

SEQ ID NO: 680420 - DNA, 75 bp, synthetic construct
  source 1..75: mol_type = other DNA
ggatgatgattgtgcttcacgtcctgtgcctgctgccgctgctgaccggttgcggaagtacgcgaacagtttacg

SEQ ID NO: 680421 - DNA, 75 bp, synthetic construct
  source 1..75: mol_type = other DNA
atcaccgcgaatgttctgcgtactatggcaataacgaacatcattcaggaggcgaatcaacatgcaaaacagcag

SEQ ID NO: 680422 - DNA, 75 bp, synthetic construct
  source 1..75: mol_type = other DNA
aaaatacagacagctcgctggaaagtctggttttgatgttctggattacgctggcactgatgtttatgtcgtttg

SEQ ID NO: 680423 - DNA, 75 bp, synthetic construct
  source 1..75: mol_type = other DNA
gccgggaaaaatcaggaaatgccctgtttattttcctgatgacagaacaaacagaaacaacggagataaaaatga

SEQ ID NO: 680424 - DNA, 75 bp, synthetic construct
  source 1..75: mol_type = other DNA
atcaggaaataccctgtttattttcctgatgacagaacaaacagaaacaacggagataaaaatgaacatgcgtaa

SEQ ID NO: 680425 - DNA, 75 bp, synthetic construct
  source 1..75: mol_type = other DNA
ttttacttgctgaggatgaccgccttttgggataccagatcgaacctgtcaaatatgaggctaacaaaaatgaaa

SEQ ID NO: 680426 - DNA, 75 bp, synthetic construct
  source 1..75: mol_type = other DNA
ctccaaggcggaggtgctggaaaatatcaaaaacaatttcgacacgtttattgccctgacaccagaaacaaaagc

SEQ ID NO: 680427 - DNA, 75 bp, synthetic construct
  source 1..75: mol_type = other DNA
atggcaaataatacgtcgtcccgtcaggcgtgccatgccgcccggtatgttgtcgcccgggttctgcgtggagtg

SEQ ID NO: 680428 - DNA, 75 bp, synthetic construct
  source 1..75: mol_type = other DNA
gtctatggtacatacggacaggttattagcggtgatgtatggaaactcggcactgggggcgcagaggagaatgcc

SEQ ID NO: 680429 - DNA, 75 bp, synthetic construct
  source 1..75: mol_type = other DNA
ggctattcttatgttggtcgtcatactaatcccttgggttataatcggtgcgaaaatggtatttgataaagaaga

SEQ ID NO: 680430 - DNA, 75 bp, synthetic construct
  source 1..75: mol_type = other DNA
gcgcatgggtacgtgcgaaaaccgcctgtgaagtggctgaaatttcatacaaaaaatttcgccaattgattcagg

SEQ ID NO: 680431 - DNA, 75 bp, synthetic construct
  source 1..75: mol_type = other DNA
tgggacgcattctgaagatgctggaagatcagaacctgatctccgcacacggtaaaaccatcgtcgtttacggca

SEQ ID NO: 680432 - DNA, 75 bp, synthetic construct
  source 1..75: mol_type = other DNA
agggtggggttggtaaaagtacactggcggtatctatagctgcgtatctgatgtcactgggcaatcgagtgatca

SEQ ID NO: 680433 - DNA, 75 bp, synthetic construct
  source 1..75: mol_type = other DNA
cagcctgctcaacaatgccgggtttgccctgcttcctcctcctgaaagccacgactggccagtcagcgagacatt

SEQ ID NO: 680434 - DNA, 75 bp, synthetic construct
  source 1..75: mol_type = other DNA
catcccggcacattcacctgtcggcgcaggaaagtaaaatcccgtgggatgaaccggccttcagccagcgcatgc

SEQ ID NO: 680435 - DNA, 75 bp, synthetic construct
  source 1..75: mol_type = other DNA
ggtgcgttaaccattttgtttaatgccattgtcgatgtgctatatgcggttatcgacccgaaaatccgttactga

SEQ ID NO: 680436 - DNA, 75 bp, synthetic construct
  source 1..75: mol_type = other DNA
cgtaataagttgtttcctcatatcaaaaaagttggattattcaatttattcaaggatggtttgaaaggagttcgt

SEQ ID NO: 680437 - DNA, 75 bp, synthetic construct
  source 1..75: mol_type = other DNA
tccgcaaagatggaaaaatatgcggtgttaaagccggagatgacgaaattgagtctcgggcggtgattctggcag

SEQ ID NO: 680438 - DNA, 75 bp, synthetic construct
  source 1..75: mol_type = other DNA
gcgcaggcattgtgtaaagagattgatgcaacctgcactttctctaaccaggcgtttgacagcctgatcccaagc

SEQ ID NO: 680439 - DNA, 75 bp, synthetic construct
  source 1..75: mol_type = other DNA
agcacccggaagtgaaaactgtctcctatgacagttatcagaatgcctttatcgacctgaaaaatggtcgtattg

SEQ ID NO: 680440 - DNA, 75 bp, synthetic construct
  source 1..75: mol_type = other DNA
ggtccatcgtttaaatataaagattattcggtcaatgacctggttgcatccagttttcccgtttctgccaaactg

SEQ ID NO: 680441 - DNA, 75 bp, synthetic construct
  source 1..75: mol_type = other DNA
agccatgttaaaggaacacgaaaaatcctatgattttgttattgcagactgtgctggccgtgatagcgcagaaat

SEQ ID NO: 680442 - DNA, 75 bp, synthetic construct
  source 1..75: mol_type = other DNA
atttccgtgagcctgattcatttgacggttggggtgttaaccagtgggttatttctaacaactcaagtgcgtctg

SEQ ID NO: 680443 - DNA, 75 bp, synthetic construct
  source 1..75: mol_type = other DNA
gctactgtagaaacgaagtacaccacctggatcgaaggataccgagatcagggtgcagaagcctcgcatagccta

SEQ ID NO: 680444 - DNA, 75 bp, synthetic construct
  source 1..75: mol_type = other DNA
tttggacgaccgtcaggatctccgggctaccggccaggttgtgtgggaaaccagtaaggacgacggtaaaacctg

SEQ ID NO: 680445 - DNA, 75 bp, synthetic construct
  source 1..75: mol_type = other DNA
gttgacccaccagctccgaccgttgaactagcctccgactacaacttcaaagacaacatctacttggtgccgatg

SEQ ID NO: 680446 - DNA, 75 bp, synthetic construct
  source 1..75: mol_type = other DNA
acctgttcagtggtgacggttccaaggtaaaagttgggtctggctctcagaacctgacggtaactactgcctatg

SEQ ID NO: 680447 - DNA, 75 bp, synthetic construct
  source 1..75: mol_type = other DNA
ccctatgctatcgacctgcaatactctggctcgaacaaatacgagcgtgagcctctggatgtgctgttgcgaccg

SEQ ID NO: 680448 - DNA, 75 bp, synthetic construct
  source 1..75: mol_type = other DNA
aaacgataagcaggatgaaaaaaaggacggcgataaaccagagggtgcgcctgagaagtacgagtttcaggctgc

SEQ ID NO: 680449 - DNA, 75 bp, synthetic construct
  source 1..75: mol_type = other DNA
caatgacaatttttgaaacgcaaaatgataaagcccagcaagaaatcgaagcgttagtgaaagaggttattctgt

SEQ ID NO: 680450 - DNA, 75 bp, synthetic construct
  source 1..75: mol_type = other DNA
gcacatcgagatgcttgggccgaatcaatgacaatttttgaaacgcaaaatgataaagcccagcaagaaatcgaa

SEQ ID NO: 680451 - DNA, 75 bp, synthetic construct
  source 1..75: mol_type = other DNA
atggcgaatttctttattgatcgcccaatttttgcctgggtgctggcaatcctgttgtgtctgacaggtacccta

SEQ ID NO: 680452 - DNA, 75 bp, synthetic construct
  source 1..75: mol_type = other DNA
ggaagtttaccgacccccgcaaagacagggacagagtcacaactgtcaatgtgcaaaatgacggcaatgtgctga

SEQ ID NO: 680453 - DNA, 75 bp, synthetic construct
  source 1..75: mol_type = other DNA
atgtcatcagagcagtcaaatactggcagcggcgaccgacgatgccatccatgagttcctacctgctggaaacgc

SEQ ID NO: 680454 - DNA, 75 bp, synthetic construct
  source 1..75: mol_type = other DNA
tgtcggggttgttaaaactcatgcatcccgatggcgcgtacagcaaagaagatgtgcgagtctgcctgacctatg

SEQ ID NO: 680455 - DNA, 75 bp, synthetic construct
  source 1..75: mol_type = other DNA
gttcgatattgctggcaaaaccggtgcaggagcagatggtggtgttgggcagtatgacgcttggtggagtaatta

SEQ ID NO: 680456 - DNA, 75 bp, synthetic construct
  source 1..75: mol_type = other DNA
tctcgctgaatacatgcgcgagatgcgtaaacgtagcttctccgatgcaattgataaattcttcaagctgggaaa

SEQ ID NO: 680457 - DNA, 75 bp, synthetic construct
  source 1..75: mol_type = other DNA
gacctgcaaagccgataccctcagcagttgtggttacgtttatctggctgtttatccgacgaccgaaacggaaag

SEQ ID NO: 680458 - DNA, 75 bp, synthetic construct
  source 1..75: mol_type = other DNA
cccctggtgggggctgccctgtaccgtgacaccttgttttggcgcccgtctggtgcaggagggtaaccggttgca

SEQ ID NO: 680459 - DNA, 75 bp, synthetic construct
  source 1..75: mol_type = other DNA
gtgtcagacacactccccgacgacaacaacgacagcccctggtggggactgccctgcaccgtgacgccctgtttc

SEQ ID NO: 680460 - DNA, 75 bp, synthetic construct
  source 1..75: mol_type = other DNA
acgctatacgccaaaggactaacctgcgaagccaatacgctgggttcctgtggttacgtctatatcgttatttat

SEQ ID NO: 680461 - DNA, 75 bp, synthetic construct
  source 1..75: mol_type = other DNA
tttccggtgctgatgaaacaactggagctgaaactggctgacggtgaactctccgcctgccaaaaacgtaccgtc

SEQ ID NO: 680462 - DNA, 75 bp, synthetic construct
  source 1..75: mol_type = other DNA
tccctggtggggactaccctgcaccgtgacgccctgtttcggcgcccgtctggtgcaggagggcaatcagttgca

SEQ ID NO: 680463 - DNA, 75 bp, synthetic construct
  source 1..75: mol_type = other DNA
atcgctatggtttgattacggattatctcgctgaatacatgcgcgagatgcgtaaacgtagcttctccgatgcaa

SEQ ID NO: 680464 - DNA, 75 bp, synthetic construct
  source 1..75: mol_type = other DNA
tggtatctggcgggcaaaccacggtggcgaacttgttttacaacatggccagccggcagattggtcttgtgggaa

SEQ ID NO: 680465 - DNA, 75 bp, synthetic construct
  source 1..75: mol_type = other DNA
gttcgatattgctggcaaaaccagtgcaggaacagatggtggtgttgggcagtatgacgcttggtggagtaatta

SEQ ID NO: 680466 - DNA, 75 bp, synthetic construct
  source 1..75: mol_type = other DNA
cccgggacaacgcatcccgacaacaacaacgaccgcccctggtgggggctaccctgcaccgtgacgccctgtttc

SEQ ID NO: 680467 - DNA, 75 bp, synthetic construct
  source 1..75: mol_type = other DNA
agaggccggttcagcgatgcggatgcgaaccatctggaccaggcctttccgctgctgatgaaacaactggaactc

SEQ ID NO: 680468 - DNA, 75 bp, synthetic construct
  source 1..75: mol_type = other DNA
agaggcctgttcagcgacgcggatgcgtaccacctggaccaggcctttccgctgctgatgaaacaactggaactc

SEQ ID NO: 680469 - DNA, 75 bp, synthetic construct
  source 1..75: mol_type = other DNA
tggtgcaggagggtaaccgcctgcattaccttgccgaccgcgccggtatcagaggcctgttcagcgacgcagatg

SEQ ID NO: 680470 - DNA, 75 bp, synthetic construct
  source 1..75: mol_type = other DNA
agggctgacctgcgaagccgacaccctcggcagctgtggttacgtttatatggctgtttatccgacactggcacc

SEQ ID NO: 680471 - DNA, 75 bp, synthetic construct
  source 1..75: mol_type = other DNA
gcagaatgtcttaagctggatgtggcattcccacattttatcagccagatggaatcgatgctgacgactggtgaa

SEQ ID NO: 680472 - DNA, 75 bp, synthetic construct
  source 1..75: mol_type = other DNA
cgtaccacctggaccaggcctttccgctgctgatgaaacaactggagctcatgctcaccagtggtgaactgaatc

SEQ ID NO: 680473 - DNA, 75 bp, synthetic construct
  source 1..75: mol_type = other DNA
atgctcaccagcggtgaattgaatccccgccatcagcataccgtcacgctgtatgccagagggctgacctgcaaa

SEQ ID NO: 680474 - DNA, 75 bp, synthetic construct
  source 1..75: mol_type = other DNA
ccccgccatcagcataccgtgacactgtatgcgaaggggctgacctgtgaagccgacaccctcggctcctgtggt

SEQ ID NO: 680475 - DNA, 75 bp, synthetic construct
  source 1..75: mol_type = other DNA
cagaggccggttcagagatgcggatgcgtaccctctggaccaggcctttccgctgctgatgaaacaactgaaatt

SEQ ID NO: 680476 - DNA, 75 bp, synthetic construct
  source 1..75: mol_type = other DNA
ccaggcctttccgctgctgatgaaacaactgaaattaatgctcaccagtggtgaactgaatccccgccatcagca

SEQ ID NO: 680477 - DNA, 75 bp, synthetic construct
  source 1..75: mol_type = other DNA
ttaccttgcagaccgcgccggcatcagaggccggttcagcgacgcagatgcgtaccacccggaccaggcctttcc

SEQ ID NO: 680478 - DNA, 75 bp, synthetic construct
  source 1..75: mol_type = other DNA
cgtgcgagtgaccgctaactatcccggcgcatcggcccagacgctggaaaacaccgtgacccaggttatcgagca

SEQ ID NO: 680479 - DNA, 75 bp, synthetic construct
  source 1..75: mol_type = other DNA
gccgaaacccttggctcctgtggttacgtttatctggctgtttatcctgcgaccgaaacggaaaatgtagtggtc

SEQ ID NO: 680480 - DNA, 75 bp, synthetic construct
  source 1..75: mol_type = other DNA
aaggcttttttgcctggtttaaccagatgtttaaccgtaacgccgaacgctacgaaaaaggggtggcgaaaattc

SEQ ID NO: 680481 - DNA, 75 bp, synthetic construct
  source 1..75: mol_type = other DNA
gtgtcagacatactctccgggacaactcatcccgatgacaacaacagccacccctggtgggggctgccctgcacc

SEQ ID NO: 680482 - DNA, 75 bp, synthetic construct
  source 1..75: mol_type = other DNA
ctcatcccgatgacaatcacgaccgtccctggtggggactacccagtaccgtaacgccctgtttcggggcacgtt

SEQ ID NO: 680483 - DNA, 75 bp, synthetic construct
  source 1..75: mol_type = other DNA
tgcgtggcgggaaacagcttccggcgatgttgcgtctgttaaccagtgatttagtgctcgacgaacctgacgatt

SEQ ID NO: 680484 - DNA, 75 bp, synthetic construct
  source 1..75: mol_type = other DNA
accatcgcattgggattacgtacgctgactttacaaacgggtgatgctctgcgcagccggcttggactcggtgag

SEQ ID NO: 680485 - DNA, 75 bp, synthetic construct
  source 1..75: mol_type = other DNA
cggaaagcattgcgctgctggcggctattgctgggttatttcatgattttggtaaagcaggacgcagctttcagc

SEQ ID NO: 680486 - DNA, 75 bp, synthetic construct
  source 1..75: mol_type = other DNA
agaggcctgttcagcgatgcagatgcgtaccctctggaccaggcctttccgctgctgatgaaacaactgcaactc

SEQ ID NO: 680487 - DNA, 75 bp, synthetic construct
  source 1..75: mol_type = other DNA
agaggcctgttcagcgatgcagatgcgtaccctctggaccaggcctttcccctgctgatgaaacaactggaactc

SEQ ID NO: 680488 - DNA, 75 bp, synthetic construct
  source 1..75: mol_type = other DNA
agaggcctgttcagcgatgcagatgcgtaccctctggaccaggcttttccgctgctgatgaaacaactgtaactc

SEQ ID NO: 680489 - DNA, 75 bp, synthetic construct
  source 1..75: mol_type = other DNA
cccctggtgggggctgccctgcaccgtgacgccctgttttggcgcccgtctggtgcaggagggtaaccgcttgca

SEQ ID NO: 680490 - DNA, 75 bp, synthetic construct
  source 1..75: mol_type = other DNA
atgtatatgtcgtcacaaagcagtggcaccggtcaggcatctgtcaccttaagttttaaagccggaaccgacccg

SEQ ID NO: 680491 - DNA, 75 bp, synthetic construct
  source 1..75: mol_type = other DNA
agaggcctgttcagcgatgcagatgcgtaccctctggaccaggcgtttccgctgctgatgaaacaactggaactc

SEQ ID NO: 680492 - DNA, 75 bp, synthetic construct
  source 1..75: mol_type = other DNA
ctcgccgggcgtaaaatgtggcagatgtcttgtggtaccaacggcaggcccgtcaatatctgctgtgcctggttt

SEQ ID NO: 680493 - DNA, 75 bp, synthetic construct
  source 1..75: mol_type = other DNA
aaaataccggaaaacgatgttctcaccaataagaccaaggaacgaattaaggaaatcatgagtcagcaatccgcg

SEQ ID NO: 680494 - DNA, 75 bp, synthetic construct
  source 1..75: mol_type = other DNA
ggccgggagtgaagtcggacaaagtattaccgagtcatttaccaaccgtcctccggacagcatctctccggacgc

SEQ ID NO: 680495 - DNA, 75 bp, synthetic construct
  source 1..75: mol_type = other DNA
cattaccttgccgaccgcgccggtatcagagggcagttcagcgacgcggatgcataccatctggaccaggctttt

SEQ ID NO: 680496 - DNA, 75 bp, synthetic construct
  source 1..75: mol_type = other DNA
attcagcagcatatcgagactttaggtgtatcacttagcatggctgttgaccagttcgtggagagtaaatcatga

SEQ ID NO: 680497 - DNA, 75 bp, synthetic construct
  source 1..75: mol_type = other DNA
attcagcagcatatcgagactttaggtgtgtcacttagcatggctattgaccagttcgtggagagtaaatcatga

SEQ ID NO: 680498 - DNA, 75 bp, synthetic construct
  source 1..75: mol_type = other DNA
attatcaaagaaggcgagaatgcagggaaagaaacactaagccgtatcggttattacagcaagtttgagcatctg

SEQ ID NO: 680499 - DNA, 75 bp, synthetic construct
  source 1..75: mol_type = other DNA
tgcttctatttcatctgcatcaaacgcaattcaggatgttaccgaaagcgtggctcagacggtacatgcgcaaat

SEQ ID NO: 680500 - DNA, 75 bp, synthetic construct
  source 1..75: mol_type = other DNA
gcatcgcttccggcaattgcccgacataaaggttttagccagcgggccatagatgtgaattatcgctggcaagat

SEQ ID NO: 680501 - DNA, 75 bp, synthetic construct
  source 1..75: mol_type = other DNA
ttaccgaaagtgtggcccagacggtgcatacgcaaatgctgaagttgcatcaggcgcatcgccagcgacacgaaa

SEQ ID NO: 680502 - DNA, 75 bp, synthetic construct
  source 1..75: mol_type = other DNA
atgctcaccagcggtgaactcagcccccgccatcagcataccgtcacgctgtatgcaaaagggctgacctgcgaa

SEQ ID NO: 680503 - DNA, 75 bp, synthetic construct
  source 1..75: mol_type = other DNA
catcttatttccgcgaccgaaggtgtacgcggcgggaaacagcttccggcgatgttgcgtctgttaaccagcgat

SEQ ID NO: 680504 - DNA, 75 bp, synthetic construct
  source 1..75: mol_type = other DNA
tttctattcccgcacgggcgacaacgagcgtaaagcgcaggggaatttcaggcgagaagaggtgagatgcgccag

SEQ ID NO: 680505 - DNA, 75 bp, synthetic construct
  source 1..75: mol_type = other DNA
atgtgttttcctctgctgtccggtggcctccaggggatggtaccaccttctgctgtactctgttatcataatgag

SEQ ID NO: 680506 - DNA, 75 bp, synthetic construct
  source 1..75: mol_type = other DNA
ataatgcaggagcaaagcctgaatcaggaagagttattctgactgagtttggttttctggcgattcttgtgatgg

SEQ ID NO: 680507 - DNA, 75 bp, synthetic construct
  source 1..75: mol_type = other DNA
gaatcataaggatgtagaaattcaggtgttatcaggtaatcacgaccagtcaggaatgatctggctacgtgcggc

SEQ ID NO: 680508 - DNA, 75 bp, synthetic construct
  source 1..75: mol_type = other DNA
cggagtttttcgcccgttctgagcaatggctggagaacaaatacgggaaagatcgcgttgtggcggcggtggttc

SEQ ID NO: 680509 - DNA, 75 bp, synthetic construct
  source 1..75: mol_type = other DNA
gcaaaaagctgacgggaatgggaagcgtggccagcgcgttgcagcactgctaccgagagcgtgagacgccgaacg

SEQ ID NO: 680510 - DNA, 75 bp, synthetic construct
  source 1..75: mol_type = other DNA
ttagcactggctgggcctgataaaatttctcatcgtatatgctggaatggtctggagattgtgaaaaagatggca

SEQ ID NO: 680511 - DNA, 75 bp, synthetic construct
  source 1..75: mol_type = other DNA
ttgaaacattcattgatgaatcacatttccgtttcccatgcaattcttgcggcgcgatggtttatacaccgccac

SEQ ID NO: 680512 - DNA, 75 bp, synthetic construct
  source 1..75: mol_type = other DNA
agcattttatcggatggagctcactaaagttcctcaaggggagcccgcagaattcggaaaaaatcgtacgctaag

SEQ ID NO: 680513 - DNA, 75 bp, synthetic construct
  source 1..75: mol_type = other DNA
gaacgccagaaagcaatcaagttaccgcgcaaggaatccggcaaatacatcctccaccaaagcatcttcgattcc

SEQ ID NO: 680514 - DNA, 75 bp, synthetic construct
  source 1..75: mol_type = other DNA
aacaactgatcgctgagtacgagaaggggaaaacttacaagcaaatagccgaagaatatggaatggcaaaacgca

SEQ ID NO: 680515 - DNA, 75 bp, synthetic construct
  source 1..75: mol_type = other DNA
cggcaaaacatttcttgcttaccaccacgggcacactatcaaaaagccagaaaatttactttctgcctgcgtttc

SEQ ID NO: 680516 - DNA, 75 bp, synthetic construct
  source 1..75: mol_type = other DNA
cactctgatggaatggttccggttacaccaacaagcgggcacattcttgatcaagatagtcgctacgcaaaactt

SEQ ID NO: 680517 - DNA, 75 bp, synthetic construct
  source 1..75: mol_type = other DNA
ccaccgcgtaagactatcgggaagaaatcttgcgggtggttattaagtgaccttctctggtggattaccgagcgt

SEQ ID NO: 680518 - DNA, 75 bp, synthetic construct
  source 1..75: mol_type = other DNA
aatctttctgtcagcgtcaaaggctcaggctgaagtgttccggtcttacatcgtgaatattgcagagcagtattt

SEQ ID NO: 680519 - DNA, 75 bp, synthetic construct
  source 1..75: mol_type = other DNA
tacgtaaaaatgatgtcggcggactgacaaaagaaatatttgatgaaaaagcgaatggtcatctgtttgaatatc

SEQ ID NO: 680520 - DNA, 75 bp, synthetic construct
  source 1..75: mol_type = other DNA
ctcgccgtctggcagtggcagggatttaacttcacctggcaggccgatcagatccgcgaactgatgcagcgtttt

SEQ ID NO: 680521 - DNA, 75 bp, synthetic construct
  source 1..75: mol_type = other DNA
tgaagtctcccagggccgccttgaagcactgctcaacttccagcaggtaacgctggatttgactggactggatat

SEQ ID NO: 680522 - DNA, 75 bp, synthetic construct
  source 1..75: mol_type = other DNA
gccacgtttgtggtggtggcaccgccactggtcgaaggggaacgctttcgtgtactggaaaaacatcactggcgc

SEQ ID NO: 680523 - DNA, 75 bp, synthetic construct
  source 1..75: mol_type = other DNA
ctcaccatgtgaaactcatggcgcagcgcaacaaacacgccgaaaagctggcagaaattcaggcccagaaagcgg

SEQ ID NO: 680524 - DNA, 75 bp, synthetic construct
  source 1..75: mol_type = other DNA
tttcctgatttctataacgaagaaatattcagggaggtggccgaagagagcgagtcaacatttaaagagctttag

SEQ ID NO: 680525 - DNA, 75 bp, synthetic construct
  source 1..75: mol_type = other DNA
gggtttcattaacagatgaacagcgtctggtcattttgaaagcttatgggattgaatgcgacagactggtacgtg

SEQ ID NO: 680526 - DNA, 75 bp, synthetic construct
  source 1..75: mol_type = other DNA
agtttctcgtacacaagcgtggaaacttgaacgggagggaaaatttccaccacgtaagtctatcggaaagaaatc

SEQ ID NO: 680527 - DNA, 75 bp, synthetic construct
  source 1..75: mol_type = other DNA
cgcacgccgtgattaatgagcctgtagattatgactatgaacgcccgtccacatgggccttcgggaaagccgcat

SEQ ID NO: 680528 - DNA, 75 bp, synthetic construct
  source 1..75: mol_type = other DNA
gcgaaaaaaccgggcacgcagacatcttctttgccatagctcatgccgcaagtaatgaacccctgaactataagc

SEQ ID NO: 680529 - DNA, 75 bp, synthetic construct
  source 1..75: mol_type = other DNA
gaagttgttattcaacagatagataaatttgaaaaaaccataccaggtattaatgctcatcttgcagaacaagag

SEQ ID NO: 680530 - DNA, 75 bp, synthetic construct
  source 1..75: mol_type = other DNA
ccaaactattgtgcttatggctgaattagctctattcggtgctaataaaatttcacatcgtatacgctggaacgg

SEQ ID NO: 680531 - DNA, 75 bp, synthetic construct
  source 1..75: mol_type = other DNA
gtatgtaaaaaggctgacctgcgaagccgacaccctcggcagttgtggctacgtttatatggctgtttatccgac

SEQ ID NO: 680532 - DNA, 75 bp, synthetic construct
  source 1..75: mol_type = other DNA
gtgtcagacacactccccgggacaacacttcccgacgacaatcacgaccacccctggtggggactaccctgcaca

SEQ ID NO: 680533 - DNA, 75 bp, synthetic construct
  source 1..75: mol_type = other DNA
agaggcaggttcagcgacgtagatgcgtaccacctggaccaggcctttccgctgctgatgaaacaactggaactc

SEQ ID NO: 680534 - DNA, 75 bp, synthetic construct
  source 1..75: mol_type = other DNA
atctttttgatgcgcagaaagtcgccttctacattttgacggaagaaaaaacgcgtcacgcgcagatgagtgggc

SEQ ID NO: 680535 - DNA, 75 bp, synthetic construct
  source 1..75: mol_type = other DNA
aaattcaccgacaacacgctgggctttggtaaaaaaatgatttggctacgcgactcaggcaccgagcaggcgtaa

SEQ ID NO: 680536 - DNA, 75 bp, synthetic construct
  source 1..75: mol_type = other DNA
tcaccctgtactacaatggtttcacctgcgaagccgatacccttggtagttacggctacgtatacatcgccgttt

SEQ ID NO: 680537 - DNA, 75 bp, synthetic construct
  source 1..75: mol_type = other DNA
actcatgctcaccagcggtgaactgaatccccgccatcagcataccgtgacactgtatgcgaagggactgacctg

SEQ ID NO: 680538 - DNA, 75 bp, synthetic construct
  source 1..75: mol_type = other DNA
actcatgctcaccagcggtgaactgaatccccgccatcagcataccgtaacgctgtatgcgaagggactgacctg

SEQ ID NO: 680539 - DNA, 75 bp, synthetic construct
  source 1..75: mol_type = other DNA
atgctcaccagcggtgaactgaatccctgccatcagcataccgtcacactgtatgcaaaagggctgacctgcaaa

SEQ ID NO: 680540 - DNA, 75 bp, synthetic construct
  source 1..75: mol_type = other DNA
ctgaatccccgccatcagcataccgtcacgctgtatgcaaaagggctgacctgcgaagccgataccctcggcagc

SEQ ID NO: 680541 - DNA, 75 bp, synthetic construct
  source 1..75: mol_type = other DNA
actcatgctcaccagcggtgaactgaatccccgccatcagcataccgtgacgctgtatgcgaaaggactgacctg

SEQ ID NO: 680542 - DNA, 75 bp, synthetic construct
  source 1..75: mol_type = other DNA
actcatgctcaccagcggtgaactgaatccccgccatcagcataccgtgactctgtatgcgaatggactgacctg

SEQ ID NO: 680543 - DNA, 75 bp, synthetic construct
  source 1..75: mol_type = other DNA
tgcgaagctgacaccctcggtagcggtggttacgtttatctggctgtttatccgacgcccgaaacgaaaaagtaa

SEQ ID NO: 680544 - DNA, 75 bp, synthetic construct
  source 1..75: mol_type = other DNA
agtgattcagggtatgcgcttaagcggacgtttcagaagctagctgttttcaataacaaacgtatcatcgaaccg

SEQ ID NO: 680545 - DNA, 75 bp, synthetic construct
  source 1..75: mol_type = other DNA
ctgaaaacagctttattactggtcgagttggccagcgtgtaaggttgcgcgatcccttcatgaacggcaggccgg

SEQ ID NO: 680546 - DNA, 75 bp, synthetic construct
  source 1..75: mol_type = other DNA
gaagtctaccgcgctcttgatgtcagattcctgaacagtctcgataatcggaaaactcagagcacattatcctgt

SEQ ID NO: 680547 - DNA, 75 bp, synthetic construct
  source 1..75: mol_type = other DNA
tcgggcagaaaaattgcagcgatgtttcataaccagagaaatccggtggtggattatgtctggaacagtgttcgt

SEQ ID NO: 680548 - DNA, 75 bp, synthetic construct
  source 1..75: mol_type = other DNA
ttagcactggccgggcctgataaaatttcgcatcgtatacgctggaatggtctggagatagtggagaagatggca

SEQ ID NO: 680549 - DNA, 75 bp, synthetic construct
  source 1..75: mol_type = other DNA
gccctctgattaacataattcgcggcacccaaacactcgcacaaaagcatgtaccacaaggtatattgactggta

SEQ ID NO: 680550 - DNA, 75 bp, synthetic construct
  source 1..75: mol_type = other DNA
gacctgcgaagccgacaccctcggcagttgtggctacgtttatatggctgtttatccgacgcccgaaacgaaaaa

SEQ ID NO: 680551 - DNA, 75 bp, synthetic construct
  source 1..75: mol_type = other DNA
tcaccctgtaccacaatggtttcacctgcgaagccgatacccttggcagttacggctacgtatacatcgccgttt

SEQ ID NO: 680552 - DNA, 75 bp, synthetic construct
  source 1..75: mol_type = other DNA
atgaaacaactggaactcatgctcaccagcggtgaactgaatccccgacatcagcataccgtcacgctgtatgcg

SEQ ID NO: 680553 - DNA, 75 bp, synthetic construct
  source 1..75: mol_type = other DNA
gaagaatggaaagctctgttaatgaatgaaaaggtttttgactctaaaagtattgaggcgttaaaaaaatggtat

SEQ ID NO: 680554 - DNA, 75 bp, synthetic construct
  source 1..75: mol_type = other DNA
aaggggctgacctgtgaagccgacaccctcggctcctgtggttacgtttatctggctgtttatccgacacctgaa

SEQ ID NO: 680555 - DNA, 75 bp, synthetic construct
  source 1..75: mol_type = other DNA
cgcttcccgacgacaacaaagaccgcccctggtggggactgccctgcaccgtgacgccctgtttcggggcccgtc

SEQ ID NO: 680556 - DNA, 75 bp, synthetic construct
  source 1..75: mol_type = other DNA
gagttatatcaatgactacggtggacgtccggtactgcagttctcctgtgcaggaagtcgctgtactgcagtaaa

SEQ ID NO: 680557 - DNA, 75 bp, synthetic construct
  source 1..75: mol_type = other DNA
atgcagggagagtttgacatgagcgccgccacccacgcacagcaacctgcgctgtttacagccatgctgacacag

SEQ ID NO: 680558 - DNA, 75 bp, synthetic construct
  source 1..75: mol_type = other DNA
ccaaagaacgcgcggatttctccaccagcagcctggcgcaatacaaacgtgagctggaacagagttgcgtcatgc

SEQ ID NO: 680559 - DNA, 75 bp, synthetic construct
  source 1..75: mol_type = other DNA
gcgatatgcagcattttcgcaagatcccggcgctgatggaaaatccgcgcctgtttagtcagtatccgcgcatgg

SEQ ID NO: 680560 - DNA, 75 bp, synthetic construct
  source 1..75: mol_type = other DNA
gaaccgtggggcaagggctgcatatcgccaaaaaattgctgccgtttataccggcgaatgcgggcattctgctgg

SEQ ID NO: 680561 - DNA, 75 bp, synthetic construct
  source 1..75: mol_type = other DNA
caccaagcagagcaataaaacctggtccctgatgcatccggtggatgacgcaattaccctgctgacacagggcgg

SEQ ID NO: 680562 - DNA, 75 bp, synthetic construct
  source 1..75: mol_type = other DNA
ttataaaagacagtctgacactgggactgaatgcgctgacgctgacggatgttacaaaaaatgcagcgtatggcg

SEQ ID NO: 680563 - DNA, 75 bp, synthetic construct
  source 1..75: mol_type = other DNA
tgacggcctgatgggcggtggatttctctataccaatcgcgactccgtgtcgttgggtctggtttgtggattggg

SEQ ID NO: 680564 - DNA, 75 bp, synthetic construct
  source 1..75: mol_type = other DNA
ggaaagccggaaacacgaagctgggggagttcggcgattacggtaacgactggcagacgctggagctggtgttca

SEQ ID NO: 680565 - DNA, 75 bp, synthetic construct
  source 1..75: mol_type = other DNA
tggcgatgaccgggactggtaacccgttcctgatgtcgttcttcacccagaccacagacggcaaactgaatctga

SEQ ID NO: 680566 - DNA, 75 bp, synthetic construct
  source 1..75: mol_type = other DNA
tcgttcgctgggcatggttcccgcctccgatccgcatcattacgctgttggtgttaaagaggtcattggcctcac

SEQ ID NO: 680567 - DNA, 75 bp, synthetic construct
  source 1..75: mol_type = other DNA
ccagtacgcaaaatgatactcggacacgcgaagaaaatcggcctgatcaacctgctgaaagatggcattaaggga

SEQ ID NO: 680568 - DNA, 75 bp, synthetic construct
  source 1..75: mol_type = other DNA
ccgttcgctgggaatggttcccgcctccgatccgcatcattacgctgttggcgttaaagaagtcattggcatcac

SEQ ID NO: 680569 - DNA, 75 bp, synthetic construct
  source 1..75: mol_type = other DNA
ccttcctctctgaccgtgtttgcggcatctgcggcttcgcccacagcacggcgtacaccacctccgttgagaatg

SEQ ID NO: 680570 - DNA, 75 bp, synthetic construct
  source 1..75: mol_type = other DNA
atacggatgctcccgttcctgatggtgtggcgatgacgggtaccggtaatccgttcctgatgtcgtacttcactc

SEQ ID NO: 680571 - DNA, 75 bp, synthetic construct
  source 1..75: mol_type = other DNA
gtcgtggtggttcggcatttacccagggcgcggaggggacattcagcgagtccacgggggccagtcaggattcgg

SEQ ID NO: 680572 - DNA, 75 bp, synthetic construct
  source 1..75: mol_type = other DNA
ggggatattcagcgagtccacgggggccagccaggattcggcgcgctggggtgtgggtaaaccgttatatcagga

SEQ ID NO: 680573 - DNA, 75 bp, synthetic construct
  source 1..75: mol_type = other DNA
ggtgatgtggtggtcagtggcacaactgagccggagtggtactacgtggtcgtgctggccggacagtccaatgcc

SEQ ID NO: 680574 - DNA, 75 bp, synthetic construct
  source 1..75: mol_type = other DNA
gctgaccactgtctgcatgatgtgcaggatatgagtacgctgaatcatccgaaggcagacctgagcaaagggcag

SEQ ID NO: 680575 - DNA, 75 bp, synthetic construct
  source 1..75: mol_type = other DNA
cagggcagtcaaacggcatgtcgtatggtgaaggtcttccgctgccggagacatatgaccgtccggagccgcgta

SEQ ID NO: 680576 - DNA, 75 bp, synthetic construct
  source 1..75: mol_type = other DNA
gaagtggtggagtttctttactacaaacagggtggctggctgtcggtgctgtttggtaacgacgaacgcaaactg

SEQ ID NO: 680577 - DNA, 75 bp, synthetic construct
  source 1..75: mol_type = other DNA
gataagaaaaacaacgtggtgccgattggcccactgcacgttacctccgatgaaccgggtcacttccgcctgttc

SEQ ID NO: 680578 - DNA, 75 bp, synthetic construct
  source 1..75: mol_type = other DNA
ggcctgaacctgatcggcgggattcgtcgcgatctgctgaaagatgacatgatccagacccgtcaactggcgcaa

SEQ ID NO: 680579 - DNA, 75 bp, synthetic construct
  source 1..75: mol_type = other DNA
ggcatcgagaacgaatggaaaccaggtatcatcaaaccgcccgacacatttcagttcatgggcgcgcaggagcat

SEQ ID NO: 680580 - DNA, 75 bp, synthetic construct
  source 1..75: mol_type = other DNA
gccatgctgacacagtttcgtgctgacctctccgtgtttaacgcgcagtgccatggtggcagtgctgcagatgtg

SEQ ID NO: 680581 - DNA, 75 bp, synthetic construct
  source 1..75: mol_type = other DNA
gcctggcagaccaaagatcagctgactgtcaccgtaaaggtgaactatctgccggaagtggtggagttcctctac

SEQ ID NO: 680582 - DNA, 75 bp, synthetic construct
  source 1..75: mol_type = other DNA
gtgagtttgacatgagcgccgccacccacgcacagcaacctgcgctgtttacagccatgctgaagcagtttcgtg

SEQ ID NO: 680583 - DNA, 75 bp, synthetic construct
  source 1..75: mol_type = other DNA
gatattacagcgcactaagaccgcacgaatataatggtgggttaccaccaaacgaatgtaagcgtcgtctcagca

SEQ ID NO: 680584 - DNA, 75 bp, synthetic construct
  source 1..75: mol_type = other DNA
ttcaccgccggcagtgccacggttactccgaaactgaatggagtggctggcccggcattccaggtcataaaagac

SEQ ID NO: 680585 - DNA, 75 bp, synthetic construct
  source 1..75: mol_type = other DNA
gctgacgttaactgacatcacaaaaggtgccacgtacggcgttgagatagaaagtctggtgctggagataaatac

SEQ ID NO: 680586 - DNA, 75 bp, synthetic construct
  source 1..75: mol_type = other DNA
ctgacggatgttacaaaaaatgcagcgtatggcgttgagatagaaagtctggtgctggagataaatgcaccggca

SEQ ID NO: 680587 - DNA, 75 bp, synthetic construct
  source 1..75: mol_type = other DNA
accagctgatcgtgggtggtggtatcgctaacacctttatcgcggcacaaggccacgatgtgggtaaatccctgt

SEQ ID NO: 680588 - DNA, 75 bp, synthetic construct
  source 1..75: mol_type = other DNA
caggaaagccggaaacacgaagctgggggagttcggcgattacggtaacgactggcagacgctggagctggtgtt

SEQ ID NO: 680589 - DNA, 75 bp, synthetic construct
  source 1..75: mol_type = other DNA
gtcagcaacctgcgtaaatcctatggcgatcgtctgctgattgatgacctgagcttctcgatcccgaaaggagcg

SEQ ID NO: 680590 - DNA, 75 bp, synthetic construct
  source 1..75: mol_type = other DNA
aaagatcagcgtctggcgcaagaagcttcacaagaagcagcgcgtcgtaaatcgattgagaaagagctggaatgg

SEQ ID NO: 680591 - DNA, 75 bp, synthetic construct
  source 1..75: mol_type = other DNA
attatggcgggcattgataaagacatcgaaggtgaagcgcgtccgcagccagacatcaagattggttatctgccg

SEQ ID NO: 680592 - DNA, 75 bp, synthetic construct
  source 1..75: mol_type = other DNA
tgcctcggttgcagagaaatttatctgcatcgcggacgcctccaagcaggtcgatattctgggtaaattcccgtt

SEQ ID NO: 680593 - DNA, 75 bp, synthetic construct
  source 1..75: mol_type = other DNA
tcagttccgtgactcaatggataacagcaaaaccgtttgggaagaagtttccggcggactggatatcatgaagat

SEQ ID NO: 680594 - DNA, 75 bp, synthetic construct
  source 1..75: mol_type = other DNA
acgaactgtttattccacctggaccgcgtctgggcgacaaagtgctggaagtcagcaatctgcgtaaatcctatg

SEQ ID NO: 680595 - DNA, 75 bp, synthetic construct
  source 1..75: mol_type = other DNA
tgctggatgcagggagagtttgacatgagcgccgccacccacgcacagcaacctgcgctgtttacagccatgctg

SEQ ID NO: 680596 - DNA, 75 bp, synthetic construct
  source 1..75: mol_type = other DNA
atggcaaccgctattctgaacgcagccgggcgcacctcagccttcatcagtggtaaggcaccggaaatcaaaccc

SEQ ID NO: 680597 - DNA, 75 bp, synthetic construct
  source 1..75: mol_type = other DNA
gcatcacaggaaagccggaaacacgaagctgggggagttcggcgattacggtaacgactggcagacgctggagct

SEQ ID NO: 680598 - DNA, 75 bp, synthetic construct
  source 1..75: mol_type = other DNA
atcgggtccgtctgcagatacgtccgttcgcacaatctccctgctgccggcagccggagaggctgctgcgcaggg

SEQ ID NO: 680599 - DNA, 75 bp, synthetic construct
  source 1..75: mol_type = other DNA
attttagttcatgggcgcgcaggagcattattccggatcgtctggcaaccgctattctgaacgcagccgggcgca

SEQ ID NO: 680600 - DNA, 75 bp, synthetic construct
  source 1..75: mol_type = other DNA
ctggccgtctgctggatgcagggtgagtttgacatgagcgccgccacccacgtacagcaacctgcgctgtttaca

SEQ ID NO: 680601 - DNA, 75 bp, synthetic construct
  source 1..75: mol_type = other DNA
gacacagggcggcagactgacctgtgtcaggcgcactgaccaacaatcagttcgggctggggatttatctgtata

SEQ ID NO: 680602 - DNA, 75 bp, synthetic construct
  source 1..75: mol_type = other DNA
ggggtggcagactgagctgtaagtttcgactgtcaggcgcactgaccaacaaccagttcggtctgggaatttatc

SEQ ID NO: 680603 - DNA, 75 bp, synthetic construct
  source 1..75: mol_type = other DNA
cattattccggatcgtatggcaaccgctattctgaacgtagccggtcgcaccttagccttcatcagtggtaaggc

SEQ ID NO: 680604 - DNA, 75 bp, synthetic construct
  source 1..75: mol_type = other DNA
accaacgcaccaacggaagatccggatgctgcaagtgagggatattacggttcggcatcccgaacgaacaaaaac

SEQ ID NO: 680605 - DNA, 75 bp, synthetic construct
  source 1..75: mol_type = other DNA
ctcggctcccagggcaccgtgtgtgcaggcggtcgttatgacggtctggtggaacaactgggtggtcgtgcaaca

SEQ ID NO: 680606 - DNA, 75 bp, synthetic construct
  source 1..75: mol_type = other DNA
aacacgtaactcttgagctgaactctatcggttcgctggaagctcgcgccaattatcgcgatgcgctggttgcat

SEQ ID NO: 680607 - DNA, 75 bp, synthetic construct
  source 1..75: mol_type = other DNA
gtctacaaggtcctgatatcgacgctgaactgattatgctcaccgcccgctggtggcgtgcgctgggtatctctg

SEQ ID NO: 680608 - DNA, 75 bp, synthetic construct
  source 1..75: mol_type = other DNA
atttcgttagcaatgcccagcatgggactcctaaaaccacggatcatgtcggtgttaaatctggttatttcttca

SEQ ID NO: 680609 - DNA, 75 bp, synthetic construct
  source 1..75: mol_type = other DNA
cgggcacgctgaatgattttctcggagccatgacggaagaggatgtcatgccggaggcattgcgtcgttttgagg

SEQ ID NO: 680610 - DNA, 75 bp, synthetic construct
  source 1..75: mol_type = other DNA
ccggcacgctgaatgattttctcggagccatgacggaagacgatgtcatgccggaggcattgcgtcgttttgagg

SEQ ID NO: 680611 - DNA, 75 bp, synthetic construct
  source 1..75: mol_type = other DNA
aggtggatcaagtgcttcgtcatttattgtaactgatacaactgcaagcacccgcgcaagcgatatggttacagt

SEQ ID NO: 680612 - DNA, 75 bp, synthetic construct
  source 1..75: mol_type = other DNA
gaggcaacaattcaggcaattgatggggagttaaaaataggctctcagatacagtattctcctaagcagagcggg

SEQ ID NO: 680613 - DNA, 75 bp, synthetic construct
  source 1..75: mol_type = other DNA
atcaattgctgcaacaaagtcagttgatgtctcaggcgataataaacacgtgacaacctcatgtcgttttaaaac

SEQ ID NO: 680614 - DNA, 75 bp, synthetic construct
  source 1..75: mol_type = other DNA
caggcacgctgaatgattttctcggcgccatgacggaagacgatgtcatgccggaggcattgcgtcgttttgagg

SEQ ID NO: 680615 - DNA, 75 bp, synthetic construct
  source 1..75: mol_type = other DNA
caggcacgctgaatgattttctcggtgccatgacggaagatgatgtcatgccggaggcattgcgtcgttttgagg

SEQ ID NO: 680616 - DNA, 75 bp, synthetic construct
  source 1..75: mol_type = other DNA
caggcacgctgaatgattttctcggagccatgacggaagaagatgtcatgccggaggcattgcgtcgttttgagg

SEQ ID NO: 680617 - DNA, 75 bp, synthetic construct
  source 1..75: mol_type = other DNA
ctggcacgctgaatgattttctcggtgccatgacggaagaggatgtcatgccggaggcattgcgtcgttttgagg

SEQ ID NO: 680618 - DNA, 75 bp, synthetic construct
  source 1..75: mol_type = other DNA
ctggcacgctgaatgattttctcggagccatgacggaagatgatgtcatgccggaggcattgcgtcgttttgagg

SEQ ID NO: 680619 - DNA, 75 bp, synthetic construct
  source 1..75: mol_type = other DNA
caggcacgctgaatgattttctcggggccatgacggaagaggatgtcatgccggaggcattgcgtcgttttgagg

SEQ ID NO: 680620 - DNA, 75 bp, synthetic construct
  source 1..75: mol_type = other DNA
actgtattcgagtaccggaggggttgatacttcaggggacgaaaagcatgtaactatatcctgtcgggtaaaaag

SEQ ID NO: 680621 - DNA, 75 bp, synthetic construct
  source 1..75: mol_type = other DNA
cataacgacaactgagccagcgactcgtgcatcagatttatgtaaatttccgctgatgaaaaatatgtataccat

SEQ ID NO: 680622 - DNA, 75 bp, synthetic construct
  source 1..75: mol_type = other DNA
gaagatgcagccagagagtacgcaagccaggctgcggagccgtataaatatgtcttacagccgctgcctgatgtg

SEQ ID NO: 680623 - DNA, 75 bp, synthetic construct
  source 1..75: mol_type = other DNA
agattagaatgggtggatcgtctggtggcggagagcggcatctgttcggtcatttaagaaatctccgtctttggc

SEQ ID NO: 680624 - DNA, 75 bp, synthetic construct
  source 1..75: mol_type = other DNA
atctggccaccccacaagtagaagatgggccttgtgtatcatcttttattatatcaggagcgacggcggcgaccc

SEQ ID NO: 680625 - DNA, 75 bp, synthetic construct
  source 1..75: mol_type = other DNA
gcttagcagcgtcgctgaatggtaacatttcatcaaaagtcagtacttcatggggtggtgctataaaatcaacgg

SEQ ID NO: 680626 - DNA, 75 bp, synthetic construct
  source 1..75: mol_type = other DNA
gtaaagtttaaacgcgcatcgaaagcaacctatattaataaatctggtgtgctgacagaggctgccattgacgag

SEQ ID NO: 680627 - DNA, 75 bp, synthetic construct
  source 1..75: mol_type = other DNA
cacagactgcatcagcaaactccgcgacagcagccaaaaaatcagaaaccaacgcgaaaaacagcgagacagccg

SEQ ID NO: 680628 - DNA, 75 bp, synthetic construct
  source 1..75: mol_type = other DNA
caaaaaatatgtatgggcgttttgagtttggagcacatcaacgatcaatcaagtctggcgataaattaatgttaa

SEQ ID NO: 680629 - DNA, 75 bp, synthetic construct
  source 1..75: mol_type = other DNA
tgctgaaagatggtgcgggaaaaccaatacagaactgcactattcaactgaaggcaaagcgtaacagcactacgg

SEQ ID NO: 680630 - DNA, 75 bp, synthetic construct
  source 1..75: mol_type = other DNA
gaaactaacgcaaagtccagccagacggcagcgaagaccagcgaaacgaatgccaaagccagcgaaactgcggca

SEQ ID NO: 680631 - DNA, 75 bp, synthetic construct
  source 1..75: mol_type = other DNA
ggtagtgcaacaacttttcttggcgatgcgtacattgatacgcaaacgcttgaaattagtatgacaggtggtgct

SEQ ID NO: 680632 - DNA, 75 bp, synthetic construct
  source 1..75: mol_type = other DNA
aggggcagcagcaaataagatagcggtagtcaaaaatgatgcagttacaatatcctttagagcaaaaggggataa

SEQ ID NO: 680633 - DNA, 75 bp, synthetic construct
  source 1..75: mol_type = other DNA
aaatgcagcaccgcgtgtttttgataccggcggtcatcaaaccggagcggctattattcttggcttcggtcgttc

SEQ ID NO: 680634 - DNA, 75 bp, synthetic construct
  source 1..75: mol_type = other DNA
cgtatatcccgaataacgcggggatcctgctggtaccatgctgtcgtggtggttcggcatttacccagggcgcga

SEQ ID NO: 680635 - DNA, 75 bp, synthetic construct
  source 1..75: mol_type = other DNA
tcaaggcggcgtcgccgtcagagcttgcggaaaagctgacacacaaactgaaagagggctggcagccgtttggta

SEQ ID NO: 680636 - DNA, 75 bp, synthetic construct
  source 1..75: mol_type = other DNA
atgacgcaattactgctgacacagggcggcagactgacctgtaagttccgcctgtcaggcgcactgaccaacaat

SEQ ID NO: 680637 - DNA, 75 bp, synthetic construct
  source 1..75: mol_type = other DNA
aggccaaagatgagatgctgaccactatgaagaaagtgggtatggaagctgaatgtgatttagtaccacatccgg

SEQ ID NO: 680638 - DNA, 75 bp, synthetic construct
  source 1..75: mol_type = other DNA
aagtcgtagtaacgatgacgtacaagtttgggggaatggggcaagctttgataacgctatattggcagcggttta

SEQ ID NO: 680639 - DNA, 75 bp, synthetic construct
  source 1..75: mol_type = other DNA
ggggacattcagcgagtccacgggggccagtcaggattcggcacgctggggggtgggcaagccgttatatcagga

SEQ ID NO: 680640 - DNA, 75 bp, synthetic construct
  source 1..75: mol_type = other DNA
ctgacctgtaagttccgcctgtcaggcgcactgaccaacaatcagttcgggctggggatttatctgtatacggat

SEQ ID NO: 680641 - DNA, 75 bp, synthetic construct
  source 1..75: mol_type = other DNA
ttaactgacatcacaaaaggtgccacgtacggcgttgagatagaaagtctggtgctggagataaatacactggca

SEQ ID NO: 680642 - DNA, 75 bp, synthetic construct
  source 1..75: mol_type = other DNA
acgtactcacagcaacctccgctgtttgcggccatgctgaaacagtttcgtgcggacattaccgagtttaacacg

SEQ ID NO: 680643 - DNA, 75 bp, synthetic construct
  source 1..75: mol_type = other DNA
gcagtgccacggttactccgaaactgaatggagtggctggcccggcattccaggtcataaaagacagtctgacag

SEQ ID NO: 680644 - DNA, 75 bp, synthetic construct
  source 1..75: mol_type = other DNA
accggaaatcaaaccctcgcccggcggcgacacgccatcgggtccgtctgcagatacgtccgttcgcacaatctc

SEQ ID NO: 680645 - DNA, 75 bp, synthetic construct
  source 1..75: mol_type = other DNA
gagagttgtacgtataacgacatcatcccggctgaccactgcctgcatgatgtgcaggatatgagtacgctgaat

SEQ ID NO: 680646 - DNA, 75 bp, synthetic construct
  source 1..75: mol_type = other DNA
atgatgaaattacaaagttcttgttcatcttcacacaatgaactatttctaaagtatggagagttatctgcttct

SEQ ID NO: 680647 - DNA, 75 bp, synthetic construct
  source 1..75: mol_type = other DNA
caaagtacaacccttaatatggcagtagtttcaacctcgggggctgtcgatgtatcaggcgataataagtgtgtg

SEQ ID NO: 680648 - DNA, 75 bp, synthetic construct
  source 1..75: mol_type = other DNA
taggagcagcaaacctgaaccttaccacccgcataattagcaagacaggtcagacaagccgtgttacagcaaggt

SEQ ID NO: 680649 - DNA, 75 bp, synthetic construct
  source 1..75: mol_type = other DNA
gcgaaacaaaaaccacatgggaatatatccggagtacagcaaccattcgcattggtggacaaactacagcaggat

SEQ ID NO: 680650 - DNA, 75 bp, synthetic construct
  source 1..75: mol_type = other DNA
attgtaactgatataattgcaagcactcgcgcaagcgatatggtgacagtcccaatcaagaataacctttataat

SEQ ID NO: 680651 - DNA, 75 bp, synthetic construct
  source 1..75: mol_type = other DNA
agaacgaatgggtgccggtgacaggttacgtaagcttcagcgatgcagcccacgcaataacgggctatatcgttg

SEQ ID NO: 680652 - DNA, 75 bp, synthetic construct
  source 1..75: mol_type = other DNA
cgaatataacggtgggttatcaccaaacgaatcagaaaatcgatactggaaaaactctaacgtggtggccagttt

SEQ ID NO: 680653 - DNA, 75 bp, synthetic construct
  source 1..75: mol_type = other DNA
cattatgatggggaaaaaagctacctggtcacaatgcaaagatgaaagtggtgcggaatatttcggtaatgctgg

SEQ ID NO: 680654 - DNA, 75 bp, synthetic construct
  source 1..75: mol_type = other DNA
tcagttcagtcgctctgcttattccatctatatcttctgcattgacaattcacggagatatacatcccgaacgtt

SEQ ID NO: 680655 - DNA, 75 bp, synthetic construct
  source 1..75: mol_type = other DNA
atagaccctaatcaactaattccattgatgcggaaatatattgccatggatccacacaccaatgtaaacaaatcc

SEQ ID NO: 680656 - DNA, 75 bp, synthetic construct
  source 1..75: mol_type = other DNA
caatacaatacgcaccaaaaaaaggtggtgtcgttgaatctggtgactatatttatctggccacccctcaggttg

SEQ ID NO: 680657 - DNA, 75 bp, synthetic construct
  source 1..75: mol_type = other DNA
gaggcattgcgtcgttttgaggcaatggtggaagaagtggcacgcaacgccgaagccgcctctcagagcgcagcg

SEQ ID NO: 680658 - DNA, 75 bp, synthetic construct
  source 1..75: mol_type = other DNA
catgacggaggatgatgttcgtccggaggcactgcgccgttttgagctgatggtgaatgaagtggcacgtcatgc

SEQ ID NO: 680659 - DNA, 75 bp, synthetic construct
  source 1..75: mol_type = other DNA
gagcatatccgactcaaagaccatcaacgtgaaggcgtagcctggctccagcaactcttccttcgttcacctgag

SEQ ID NO: 680660 - DNA, 75 bp, synthetic construct
  source 1..75: mol_type = other DNA
tactgctgttatcgaaattgagccccatttcgaggaccagcctgctaactggctgggcagttttgacaaaaactc

SEQ ID NO: 680661 - DNA, 75 bp, synthetic construct
  source 1..75: mol_type = other DNA
caggaataccagtattgaaattgtatggcgagaccattaaagcggtgaaatatcccaaacaggccatccctgctc

SEQ ID NO: 680662 - DNA, 75 bp, synthetic construct
  source 1..75: mol_type = other DNA
tgggtggtggatatggatctggagaagttcattgaccgggtggatcacagactcctgatgacgcgtctggccaga

SEQ ID NO: 680663 - DNA, 75 bp, synthetic construct
  source 1..75: mol_type = other DNA
gggatatgctatgtgcaactcctgatttgagtagtgttgattttgaggtcatattgaaaggtgatcttacccagc

SEQ ID NO: 680664 - DNA, 75 bp, synthetic construct
  source 1..75: mol_type = other DNA
caaaaacctgcttaaacctggctggcaaggtgaggcaaaaatcatcctgacgacctacgaaacgcttcgcgacca

SEQ ID NO: 680665 - DNA, 75 bp, synthetic construct
  source 1..75: mol_type = other DNA
aatgatggcgtcagtagtgagccggtcagtcgtgccgttctgctgatagaacaaaatatcgagcaggcgctgtat

SEQ ID NO: 680666 - DNA, 75 bp, synthetic construct
  source 1..75: mol_type = other DNA
atgatacttttcgcgttttcattgataaatggacgcagcccgacgactatcgccccgtcggaataacttgcacgg

SEQ ID NO: 680667 - DNA, 75 bp, synthetic construct
  source 1..75: mol_type = other DNA
ttcacagcgcaatctgacggctcatcttgctgcaacaggaagcattagcgatgacacttttcgcgttttcattga

SEQ ID NO: 680668 - DNA, 75 bp, synthetic construct
  source 1..75: mol_type = other DNA
atgctaaaacgtctgttaagtaaactgacgggaaaccgtcagcagatagaacatcacctaaaaaatcagtaccag

SEQ ID NO: 680669 - DNA, 75 bp, synthetic construct
  source 1..75: mol_type = other DNA
ttgggtttggcgtcaatgtccaaaaagcaaatcacgtcatccactttacccgttgctggaatccggcgaaggaag

SEQ ID NO: 680670 - DNA, 75 bp, synthetic construct
  source 1..75: mol_type = other DNA
cgttgcgcgatcaggaattttcgctggctcgtcagccctggtccataatggtgtgcgacgaagcgcagaaaatta

SEQ ID NO: 680671 - DNA, 75 bp, synthetic construct
  source 1..75: mol_type = other DNA
ggaaatagtccgggacgggcaaagggagaaacggcaggagggcatgccgcagggcggcccgctgtcgccgttact

SEQ ID NO: 680672 - DNA, 75 bp, synthetic construct
  source 1..75: mol_type = other DNA
tcattctttcaacgtaaggggattgcagcagatgcagcaaaaaaaactgatagattattttaccttcaattcaaa

SEQ ID NO: 680673 - DNA, 75 bp, synthetic construct
  source 1..75: mol_type = other DNA
atcgctaaagaaattgttaaagcacgagttcgtgaaggcaagcttgatctggatattttaaaaaacataaaaggt

SEQ ID NO: 680674 - DNA, 75 bp, synthetic construct
  source 1..75: mol_type = other DNA
taataaagaccttgccaaagcacatatagattttctcggatcatggttagataaagttaataagttaacaaataa

SEQ ID NO: 680675 - DNA, 75 bp, synthetic construct
  source 1..75: mol_type = other DNA
ggaaaagtacaaacccagctactacgcggcggcctcttatagctgccactcaatgaatggcctcttcccccatat

SEQ ID NO: 680676 - DNA, 75 bp, synthetic construct
  source 1..75: mol_type = other DNA
cagagtggtttatcgggctgttccaaaagggcggagaggtgtttaccgggatggtgaccggcattcttccgctgt

SEQ ID NO: 680677 - DNA, 75 bp, synthetic construct
  source 1..75: mol_type = other DNA
tactacaactatgctcggtgggaaatatcatgtggatgatacatatgtagcggacaaatatgcattatctagttt

SEQ ID NO: 680678 - DNA, 75 bp, synthetic construct
  source 1..75: mol_type = other DNA
gctgaaggtctcggttgaagcaattccaagcctgatgttaattgttattattgtcggtggcatcgtgcagggaat

SEQ ID NO: 680679 - DNA, 75 bp, synthetic construct
  source 1..75: mol_type = other DNA
agccattcttatatttacgccaatcctgttgccaattatgattaaactaggtgttgatcccattcattttggtat

SEQ ID NO: 680680 - DNA, 75 bp, synthetic construct
  source 1..75: mol_type = other DNA
gcatattaattgccgtttttgttgttttactcgcaatgggctcaccaatcgggatatgcatcgttattgcctctt

SEQ ID NO: 680681 - DNA, 75 bp, synthetic construct
  source 1..75: mol_type = other DNA
gcgcggtgtggcgcagggtactgcaaacatctccttcaccagcaatagcggttctaagaaggctactaagtcagt

SEQ ID NO: 680682 - DNA, 75 bp, synthetic construct
  source 1..75: mol_type = other DNA
tttctcaagcaagtaaagggcgatttcatgagcaacaatttataaaacaagttcgtgatgcggggattaaagctc

SEQ ID NO: 680683 - DNA, 75 bp, synthetic construct
  source 1..75: mol_type = other DNA
cgtaaaaagccgtgagagttggttatcattctttcaacgtaaggggattgcagcagatgcagcaaaaaaactgat

SEQ ID NO: 680684 - DNA, 75 bp, synthetic construct
  source 1..75: mol_type = other DNA
ctcgtttatcgcagtcaaagcagttgaggcttggtttcttgccgattcagaggcaatgaaaaaatggcttaaagt

SEQ ID NO: 680685 - DNA, 75 bp, synthetic construct
  source 1..75: mol_type = other DNA
ggcaatgcacgcgtggtgaacagtaatgcgatgtcattcctggcgcaaaaaggtacgccgcataatatcgtattt

SEQ ID NO: 680686 - DNA, 75 bp, synthetic construct
  source 1..75: mol_type = other DNA
ttcacacccagcgcctgatcgcgatggcagaaaacatgccgattgatattctgcgcgtacgtgacgacgacattc

SEQ ID NO: 680687 - DNA, 75 bp, synthetic construct
  source 1..75: mol_type = other DNA
cgccctgctgccaggtgccgaacgcccaaccattctgccgctggcgggtgatcaacagcgcgtagcgatgcacat

SEQ ID NO: 680688 - DNA, 75 bp, synthetic construct
  source 1..75: mol_type = other DNA
cggccggaaggcttcgaccacctgcacctggtcggcgagaacttcgccaccctgcgccgttacacgccggccttg

SEQ ID NO: 680689 - DNA, 75 bp, synthetic construct
  source 1..75: mol_type = other DNA
tcacctggttgacctggctgcgccaggcaccgctgaaacccaactctcggcacatgctggaacacatcgagcggc

SEQ ID NO: 680690 - DNA, 75 bp, synthetic construct
  source 1..75: mol_type = other DNA
aagctcggcagctacccgcgccagaacggactggccgtggccctgcgcgagctgggccggatcgagcgcacgctg

SEQ ID NO: 680691 - DNA, 75 bp, synthetic construct
  source 1..75: mol_type = other DNA
gtgattctcttggtattgaagaggctattaaagaggctgttaaaacatctgacttagatgaccttgatagtgaag

SEQ ID NO: 680692 - DNA, 75 bp, synthetic construct
  source 1..75: mol_type = other DNA
ttgaatcgattgatgcaaacaaccagatcgttggttttgacgtcgacctggcgcaggcactgtgtaaagagattg

SEQ ID NO: 680693 - DNA, 75 bp, synthetic construct
  source 1..75: mol_type = other DNA
tatcgacggcgtcttcggtgacaccgcagtggtcactgagtggctgaaagataacccgaaactggcggcggtggg

SEQ ID NO: 680694 - DNA, 75 bp, synthetic construct
  source 1..75: mol_type = other DNA
gcgcgctgtggtattaaaatcaatcttcacacccagcgcctgatcgcgatggcagaaaacatgccgattgatatt

SEQ ID NO: 680695 - DNA, 75 bp, synthetic construct
  source 1..75: mol_type = other DNA
atgcaaaacagtctgtaccaggcactgcttgagccacactcaccccccccggtggggcttaccgtctggaatggc

SEQ ID NO: 680696 - DNA, 75 bp, synthetic construct
  source 1..75: mol_type = other DNA
attcacgttggatgagcgtccagaagtcttatcagaacctacccttgatgagcgtcgtagagtcaaattatcagg

SEQ ID NO: 680697 - DNA, 75 bp, synthetic construct
  source 1..75: mol_type = other DNA
taattccggtggttcacccgacggcgtttgtccatcccagtgccgtcttgattggcgatgtgattgtgggagccg

SEQ ID NO: 680698 - DNA, 75 bp, synthetic construct
  source 1..75: mol_type = other DNA
tgtggaacacggtgtacctggaacgcgccacccgaggggttggtcgaggccggcaagccggtggacggcgagctg

SEQ ID NO: 680699 - DNA, 75 bp, synthetic construct
  source 1..75: mol_type = other DNA
tgggctgggagcacatcaacctaaccggcgattacgtctggcggcagagccgcagactggaagacgggaagtttc

SEQ ID NO: 680700 - DNA, 75 bp, synthetic construct
  source 1..75: mol_type = other DNA
tcgccacgcctttgccgcccactggggcgacggcacgacctcatcctccgatggccagcgcttccgcgcgggtgg

SEQ ID NO: 680701 - DNA, 75 bp, synthetic construct
  source 1..75: mol_type = other DNA
atgaagctgacttataagattgtcattgcggcatttttcttcactgcctttggggcgctcgtctggcttgcaaac

SEQ ID NO: 680702 - DNA, 75 bp, synthetic construct
  source 1..75: mol_type = other DNA
tttatttattatatgggcgaaagagtattctgagtcaggtaaatgccactaccacatttgcctgttgttcaacaa

SEQ ID NO: 680703 - DNA, 75 bp, synthetic construct
  source 1..75: mol_type = other DNA
agttggccaccgtcacccgcctggccaaggacaacgagctgcccgatgccatcctcaccgagtcagggctgaaaa

SEQ ID NO: 680704 - DNA, 75 bp, synthetic construct
  source 1..75: mol_type = other DNA
tgggcacgccagcccgcgcggtacgcagtgttcgtgatgacgagttgcactggaagcggttgaataccaaagagt

SEQ ID NO: 680705 - DNA, 75 bp, synthetic construct
  source 1..75: mol_type = other DNA
tgcatcgttacatgaaacgcagccattgaggcaaatggaggaaaatcgcccccgtttgcaggggacgacggatgt

SEQ ID NO: 680706 - DNA, 75 bp, synthetic construct
  source 1..75: mol_type = other DNA
taattccggtggttcacccgacggcgtttgtccatcccagtgcagtattgattggcgatgtgattgtgggagccg

SEQ ID NO: 680707 - DNA, 75 bp, synthetic construct
  source 1..75: mol_type = other DNA
cactcgatctgcctaccggcatcgagcggctggttcaccagaaccgcctgctcaagattgcccgcgagggcggcc

SEQ ID NO: 680708 - DNA, 75 bp, synthetic construct
  source 1..75: mol_type = other DNA
tgcagcgttacatgaaacgcaaccgttgaggcaaatggaggaaaatcgtccccgtttgcaggggacgacggatgt

SEQ ID NO: 680709 - DNA, 75 bp, synthetic construct
  source 1..75: mol_type = other DNA
gtgacgacgagttacactggaaacggttgaataccaaagagtatcaggatcttgtcgggcgctgtcatgcatcgt

SEQ ID NO: 680710 - DNA, 75 bp, synthetic construct
  source 1..75: mol_type = other DNA
agatagtggaagcattaagcaaatggtttgatgttagtcgctatgatgcgttgaaagacctcactctggaacaaa

SEQ ID NO: 680711 - DNA, 75 bp, synthetic construct
  source 1..75: mol_type = other DNA
atcaatatctcggccacggcgtgttctgggtgatggcgctggtggcgcttccggcaatgtttttgcgcccgaaag

SEQ ID NO: 680712 - DNA, 75 bp, synthetic construct
  source 1..75: mol_type = other DNA
ttgcagggggcacatgcggcctattacggttttagcgccatttactggcaggcagctggctactcggcctcggcg

SEQ ID NO: 680713 - DNA, 75 bp, synthetic construct
  source 1..75: mol_type = other DNA
cagggcaaagtgctgctggttgggcagtcaccaaacgctgaactttcggctcgcgccaaacagattgcgatgggc

SEQ ID NO: 680714 - DNA, 75 bp, synthetic construct
  source 1..75: mol_type = other DNA
accgcgaaagctttgagacttgcccggaatgtaagcgccagaaatgtctggtgccgtccgaccgtattgaactga

SEQ ID NO: 680715 - DNA, 75 bp, synthetic construct
  source 1..75: mol_type = other DNA
aattatttcaagtcattgaatgattttttcataaaaaacaatctggtgaaaaactcgcctattcttgatgtcatc

SEQ ID NO: 680716 - DNA, 75 bp, synthetic construct
  source 1..75: mol_type = other DNA
agatactaagtactggtgatgaaggcacaacaaatgctctcataaaaacgaagatccttcttttctctatcggga

SEQ ID NO: 680717 - DNA, 75 bp, synthetic construct
  source 1..75: mol_type = other DNA
tgcagcagaaaattgccgacatggaagcagccagagatgaaatcccgttcggtctggacgaaggcgacagcaaca

SEQ ID NO: 680718 - DNA, 75 bp, synthetic construct
  source 1..75: mol_type = other DNA
tcgacaaaatgtttgccacagcattgcaatccatagtgatgatggcagaactggcaattcgtggtccggaaaagt

SEQ ID NO: 680719 - DNA, 75 bp, synthetic construct
  source 1..75: mol_type = other DNA
gtctggcatacgcggtttccgtctggctggctgccagaaacaatgtgcatacgtggtggatcggcataattggta

SEQ ID NO: 680720 - DNA, 75 bp, synthetic construct
  source 1..75: mol_type = other DNA
gcacaattcatgttgatgggaagacgtatcgaaaactggtacgtctggttagcggtgaataccctggcggtgcca

SEQ ID NO: 680721 - DNA, 75 bp, synthetic construct
  source 1..75: mol_type = other DNA
tgaccaatgctggtgatagccatgctcttcagcagccaattcctttagattacgcgttagttaagtactgcaaag

SEQ ID NO: 680722 - DNA, 75 bp, synthetic construct
  source 1..75: mol_type = other DNA
cgaatataatggtgggttaccgccaaacgaatcagaaaaccgatactggaaaaactctaacgcggtggccagttt

SEQ ID NO: 680723 - DNA, 75 bp, synthetic construct
  source 1..75: mol_type = other DNA
cggttcggatctgcatgttctgaaaggcggtcatccgtttgccaaaccacctgtcgtccccggtcatgaaattgc

SEQ ID NO: 680724 - DNA, 75 bp, synthetic construct
  source 1..75: mol_type = other DNA
accagtgaactggttaccgatttatttgccattgaggatgcagcggcggcattcgaacgcgcgcagcaaaatgac

SEQ ID NO: 680725 - DNA, 75 bp, synthetic construct
  source 1..75: mol_type = other DNA
aaggggttgatcagggtaaacgcgttggtgaactttccggtggtgagcgcggtcgtctgcatctggcgaagctgc

SEQ ID NO: 680726 - DNA, 75 bp, synthetic construct
  source 1..75: mol_type = other DNA
ttgatcagttccgtgactcaatggataacagcaaaaccgtttgggaagaagtttccggcgggctggatattatga

SEQ ID NO: 680727 - DNA, 75 bp, synthetic construct
  source 1..75: mol_type = other DNA
acgaactgtttattccacctggaccgcgtctgggcgataaagtgctggaagtcagcaacctgcgtaaatcttacg

SEQ ID NO: 680728 - DNA, 75 bp, synthetic construct
  source 1..75: mol_type = other DNA
accggaaatcaaaccctcgcccggcggcaacacaccatcgggtccgtctgcagatacgtccgttcgcacaatctc

SEQ ID NO: 680729 - DNA, 75 bp, synthetic construct
  source 1..75: mol_type = other DNA
gccgaccactgcctgcatgatgtgcaggatatgagtacgctgaatcatccgaaggcagacctgagcaaagggcag

SEQ ID NO: 680730 - DNA, 75 bp, synthetic construct
  source 1..75: mol_type = other DNA
ggagccagtcaggattcggctcgctggggtgtgggtaaacctttatatcaggacctgattttgcgcacgaaggcc

SEQ ID NO: 680731 - DNA, 75 bp, synthetic construct
  source 1..75: mol_type = other DNA
atggcggaattcagttgtcagagggtgtatttaagatcaccaagcagagcaataaaacctggtacctgatgcatc

SEQ ID NO: 680732 - DNA, 75 bp, synthetic construct
  source 1..75: mol_type = other DNA
aagtttcgactgtcaggcgcactgaccaacaatcagttcggtctgggaatttatctgtataccgatgtagcgtta

SEQ ID NO: 680733 - DNA, 75 bp, synthetic construct
  source 1..75: mol_type = other DNA
acggcggaattcagttgtcgggtggtgtatttaagatcgccaagcagagcaataaaacctggtccctgacgcgcc

SEQ ID NO: 680734 - DNA, 75 bp, synthetic construct
  source 1..75: mol_type = other DNA
accgagcttgcgcctggctggctgaaacgcccgctgggtatcgccattgagctgctggcagccattccaagtatc

SEQ ID NO: 680735 - DNA, 75 bp, synthetic construct
  source 1..75: mol_type = other DNA
tcgagctggatcgctatctgaatgaacatggcgtacagggatcggcgctgggacgcccgtggctacctccaacgg

SEQ ID NO: 680736 - DNA, 75 bp, synthetic construct
  source 1..75: mol_type = other DNA
tatagtgaaaggcagcattatggcgaaagcctgggaagcggggcgtttgaacggtattgaactggaggattacac

SEQ ID NO: 680737 - DNA, 75 bp, synthetic construct
  source 1..75: mol_type = other DNA
gttagatagtgctaatcaggccattgatggactaaaagaaacatttgcgggaggtgatccttggctatggatgga

SEQ ID NO: 680738 - DNA, 75 bp, synthetic construct
  source 1..75: mol_type = other DNA
gcgatgccctggatgcctggataagccgaccaggaatgacgcaggagcaggcgacgatattaatcactgaagcct

SEQ ID NO: 680739 - DNA, 75 bp, synthetic construct
  source 1..75: mol_type = other DNA
attgctttcaagcatgcgtatcgtcagcaatatcaacaaaaagccggatggaattatgagtcttctttttgctga

SEQ ID NO: 680740 - DNA, 75 bp, synthetic construct
  source 1..75: mol_type = other DNA
tgacgagctaatagaaaaagccatagctttcaagcgtgcgtatcgtcagcaatatcaacaaaaagccggatggaa

SEQ ID NO: 680741 - DNA, 75 bp, synthetic construct
  source 1..75: mol_type = other DNA
acagcatcagaaaacaatcttcttcaagggctccgtttgggaaacggaaaatattgtacgttaagattatttttt

SEQ ID NO: 680742 - DNA, 75 bp, synthetic construct
  source 1..75: mol_type = other DNA
cgggcgtggatatgggggcaacgcatatccgcttttgtctgcggacagcagaaggtgaaaagctacactgcgaaa

SEQ ID NO: 680743 - DNA, 75 bp, synthetic construct
  source 1..75: mol_type = other DNA
catcgtattgaacgctttgctcaacgttgcgccggtaaccctgtttcccgttacctactgcttccgtgcattggc

SEQ ID NO: 680744 - DNA, 75 bp, synthetic construct
  source 1..75: mol_type = other DNA
gacagggtgttaatattggagccaagagacttcgccaggctgctattgaaatggcgaaaaagaaatacgggggtt

SEQ ID NO: 680745 - DNA, 75 bp, synthetic construct
  source 1..75: mol_type = other DNA
actgtagttgttggaaaacagaaatcagccgttcaggattttttatggaatctatttagattctggatgattatg

SEQ ID NO: 680746 - DNA, 75 bp, synthetic construct
  source 1..75: mol_type = other DNA
accactgtagttgggaagcagaaaaccgcggttcaagattttctatggaatttatgtcgattctggctgattctc

SEQ ID NO: 680747 - DNA, 75 bp, synthetic construct
  source 1..75: mol_type = other DNA
cgctcggcgttaaccgggtgaagatatttgaacgctggaaagctattgacaccagggataagcgtgaaaaattca

SEQ ID NO: 680748 - DNA, 75 bp, synthetic construct
  source 1..75: mol_type = other DNA
ggacgccgtccggtaacggtgttgagcctcggttgtgtggtgattattgtcgccgctaacatcgtcggcatcggc

SEQ ID NO: 680749 - DNA, 75 bp, synthetic construct
  source 1..75: mol_type = other DNA
ttgatgtggtatctgcaattctttttctatgcctggggccacgcccgcattccggcgcagtatgactacatcagt

SEQ ID NO: 680750 - DNA, 75 bp, synthetic construct
  source 1..75: mol_type = other DNA
cggtaagaaaattgattatccggcgcgtcctctgctcggctttaccggtgaggatgtgcagatgattgaagagat

SEQ ID NO: 680751 - DNA, 75 bp, synthetic construct
  source 1..75: mol_type = other DNA
cgttgcgtttcctgtcaaaagtatgcgtagtgctgaacatttcgtgatgaatgccaccgaggaagaagcacggcg

SEQ ID NO: 680752 - DNA, 75 bp, synthetic construct
  source 1..75: mol_type = other DNA
tcacgcaatatattgagagtggctgtgcagattatgtgcaagcggatctgggacgcgtgggtggtattaccggct

SEQ ID NO: 680753 - DNA, 75 bp, synthetic construct
  source 1..75: mol_type = other DNA
gcgaccgcgttccgctgtacggcagcggcatcaacctgcatctgtccattgaggaagtgatcgaccaggtcaagc

SEQ ID NO: 680754 - DNA, 75 bp, synthetic construct
  source 1..75: mol_type = other DNA
taccaacattactttgcagataaacaaatatctgtctggggttcgtatgagtatcgatgcactacgatgggctaa

SEQ ID NO: 680755 - DNA, 75 bp, synthetic construct
  source 1..75: mol_type = other DNA
accggctgaccggaatgattgagtcgctgtcaccgtcagggcgtcggcgactggcggtagatattgcgaagaaac

SEQ ID NO: 680756 - DNA, 75 bp, synthetic construct
  source 1..75: mol_type = other DNA
actagggatatgaaccgccccgggtttcctggagagtgttttatctgtgaactcaggctgccagatcatcgtttc

SEQ ID NO: 680757 - DNA, 75 bp, synthetic construct
  source 1..75: mol_type = other DNA
cgttttttgcatatccgcgccagcccggagcaggcatcaatggaattttacggcgggaagtcaccgaaaatcgcc

SEQ ID NO: 680758 - DNA, 75 bp, synthetic construct
  source 1..75: mol_type = other DNA
cttatcaccagtcgttttttgcatatccgtgccagcccggagcaggcatcaatggaattttacggcgggaagtcg

SEQ ID NO: 680759 - DNA, 75 bp, synthetic construct
  source 1..75: mol_type = other DNA
ccgaaaatcgccagcgtgcatcagttcggtctgtcggaagaaaaccggaaagacggtaagaaaattgattatccg

SEQ ID NO: 680760 - DNA, 75 bp, synthetic construct
  source 1..75: mol_type = other DNA
tgtcgaagaaaacatggcgtgggggctgaaaattcgcggcatgggcaagcagcaaattgccgaacgcgttaaaga

SEQ ID NO: 680761 - DNA, 75 bp, synthetic construct
  source 1..75: mol_type = other DNA
tgcgcgccaaaattgatgagcagaccggatggcacaaaagcctgtctaacgtgggcgtgaacggtgtcaccggaa

SEQ ID NO: 680762 - DNA, 75 bp, synthetic construct
  source 1..75: mol_type = other DNA
atcggcgcagtgaccgccgagggtaaaaaaacaggcatgaaagccctgttatcttcccagtcacaactcggcgtt

SEQ ID NO: 680763 - DNA, 75 bp, synthetic construct
  source 1..75: mol_type = other DNA
cgttactcacgatcaggttgaggcgatgacgctcgcccagcgagtaatggtgatgaacggcggcgttgccgaaca

SEQ ID NO: 680764 - DNA, 75 bp, synthetic construct
  source 1..75: mol_type = other DNA
cacgcatttcgaactggacggcggtattgagctgccgctaaacggtggctaccgtcagtatgccgggcgtaaaat

SEQ ID NO: 680765 - DNA, 75 bp, synthetic construct
  source 1..75: mol_type = other DNA
catcaggagcgcccgacggcaggcagcacgctgtggctgcatctggcggaaaatcagctgcatctttttgatggt

SEQ ID NO: 680766 - DNA, 75 bp, synthetic construct
  source 1..75: mol_type = other DNA
ggaagaagaaaccacaaccaatatcattggcgcagtgaccgccgagggtaaaaaaacaggcatgaaagccctgtt

SEQ ID NO: 680767 - DNA, 75 bp, synthetic construct
  source 1..75: mol_type = other DNA
atcggtaacgatccggtcaccgatgaaacgatggttacggcgctgaatgcgttaaccgaaggtaagaaagatacc

SEQ ID NO: 680768 - DNA, 75 bp, synthetic construct
  source 1..75: mol_type = other DNA
ggtgaaggcggacaactcgatgtttatcggtaacgatccggtcaccgatgaaacaatggttacggcgctgaatgc

SEQ ID NO: 680769 - DNA, 75 bp, synthetic construct
  source 1..75: mol_type = other DNA
gcaggacccggcaaccgatgcaggactgcttaaccagaacgacgtcaccacgcttgtgcgcaaggatggtttccg

SEQ ID NO: 680770 - DNA, 75 bp, synthetic construct
  source 1..75: mol_type = other DNA
atcactgatgtgctgattgccagcggtaaagcgggtgagtccggcacactggcccgctcgctggatgccatcgct

SEQ ID NO: 680771 - DNA, 75 bp, synthetic construct
  source 1..75: mol_type = other DNA
tgagttgctgagtgtggcgcaaagcctgcgtgggtttgcttacctgtcagcgtatggctgcaatacggtgcagga

SEQ ID NO: 680772 - DNA, 75 bp, synthetic construct
  source 1..75: mol_type = other DNA
ttatcggcagtccggcgatgaacctgctgacaggtcgcgtgaataacgaaggtacgcacttcgagctggacggcg

SEQ ID NO: 680773 - DNA, 75 bp, synthetic construct
  source 1..75: mol_type = other DNA
gcggtaaaaatgctcacccgcggcatgtgcgtcgagctggcgcgccacaatattcaggtcaacggtattgcgccg

SEQ ID NO: 680774 - DNA, 75 bp, synthetic construct
  source 1..75: mol_type = other DNA
gtggctgtgcaattaatacagttaagtcgtcattcatatttatatcgtggcttcactattcagaaatgcccgcgt

SEQ ID NO: 680775 - DNA, 75 bp, synthetic construct
  source 1..75: mol_type = other DNA
tcgccagtgttccggatgccagcacatcacagaagggtgtggtgctgttgagcagtgccacagacagcactgagg

SEQ ID NO: 680776 - DNA, 75 bp, synthetic construct
  source 1..75: mol_type = other DNA
tgccttttctcccgcaggtttttgcgttgatgacgccgcgctctatttctcttttgaagaaaagtgccgcgattt

SEQ ID NO: 680777 - DNA, 75 bp, synthetic construct
  source 1..75: mol_type = other DNA
aatggctataaatcaaggatatattgcaattccttctgctaaacatttatcaccagagtataccatctactggct

SEQ ID NO: 680778 - DNA, 75 bp, synthetic construct
  source 1..75: mol_type = other DNA
tttattgctattgatgattatgatgactggatggttcgtgggttaccattggaaggcgacgtagtgctaactaca

SEQ ID NO: 680779 - DNA, 75 bp, synthetic construct
  source 1..75: mol_type = other DNA
caggctatgggttgccctgaatccgcgtattgccgaagcgatcctggggcatcgtccatatgcccgtatcgacat

SEQ ID NO: 680780 - DNA, 75 bp, synthetic construct
  source 1..75: mol_type = other DNA
cccggcacgacccggtgcattgtctggcacccggcctgttccgtagcctcaaacgtggcgaacgcaagcgtagca

SEQ ID NO: 680781 - DNA, 75 bp, synthetic construct
  source 1..75: mol_type = other DNA
aggtggcgtaccgctggtgatggatacgctggagatcctcggcgcagataacctggcgcacggacgctggggcga

SEQ ID NO: 680782 - DNA, 75 bp, synthetic construct
  source 1..75: mol_type = other DNA
cacggcgtacttcgcatccggataaaacggcagcgttatttaaacgtgcaatgggcagtaatataccaactggcg

SEQ ID NO: 680783 - DNA, 75 bp, synthetic construct
  source 1..75: mol_type = other DNA
aattccgaagttatcgctatgcatggaaatggttttatccttgttgaagcaaagcgcgaaacaaaaattcttccc

SEQ ID NO: 680784 - DNA, 75 bp, synthetic construct
  source 1..75: mol_type = other DNA
aggaagcggcagggcttccgcctgctgtccgagtacgccagcgacgagcaggacggaaagctgtatgtggccttg

SEQ ID NO: 680785 - DNA, 75 bp, synthetic construct
  source 1..75: mol_type = other DNA
actatcttcttccgtgcggataaaactgtcgattacgagacgttgatgaaggtaatggatacgctgcatcaggcg

SEQ ID NO: 680786 - DNA, 75 bp, synthetic construct
  source 1..75: mol_type = other DNA
cgggcggctgacgtagtggatttgcgcctcgaaggcacctgggttaaggctgacggtcagcagggatacttcctg

SEQ ID NO: 680787 - DNA, 75 bp, synthetic construct
  source 1..75: mol_type = other DNA
cggtataagcctgtataaagcagcggccaaatttaaatacggtccggtttgggcgagggcaggttatattcagcc

SEQ ID NO: 680788 - DNA, 75 bp, synthetic construct
  source 1..75: mol_type = other DNA
atgttcggccttgatattgccgcgtttacggcgattgaaatggcggaaaacggcgacagctctcacccgaacgaa

SEQ ID NO: 680789 - DNA, 75 bp, synthetic construct
  source 1..75: mol_type = other DNA
gaaggcacctgggttaaggctgacggtcagcagggatacttcctgcaacgtatgactccaacctacgcttcctcc

SEQ ID NO: 680790 - DNA, 75 bp, synthetic construct
  source 1..75: mol_type = other DNA
ctggggcggcggttacggcaacatcttccaggatgagcgtgacgtgaagtttatggttatcgcgccattcactat

SEQ ID NO: 680791 - DNA, 75 bp, synthetic construct
  source 1..75: mol_type = other DNA
gtcagcagggatacttcctgcaacgtatgactccaacctacgcttcctcaaacggtcgcctggatatctggtggg

SEQ ID NO: 680792 - DNA, 75 bp, synthetic construct
  source 1..75: mol_type = other DNA
aatgagcgatttcaaaaacgagggtgtcgtggcttccagcgcctggccgtatcaggccaacgcgttgaaagccga

SEQ ID NO: 680793 - DNA, 75 bp, synthetic construct
  source 1..75: mol_type = other DNA
gcggcaaagtttatggcacaccatatcagtgggggccgaatttgctgatgtacaacactaaaaccttcccgacgc

SEQ ID NO: 680794 - DNA, 75 bp, synthetic construct
  source 1..75: mol_type = other DNA
atgagcaagacatttgcccgcagcagcctgtgtgcgcttaccatgacattaatgaccgcccacgccgccgaacct

SEQ ID NO: 680795 - DNA, 75 bp, synthetic construct
  source 1..75: mol_type = other DNA
ggcgcttcctacgtttatgcatgggatgccaaaccagcgacatggcagagcaatccggatgcgtactacgacaaa

SEQ ID NO: 680796 - DNA, 75 bp, synthetic construct
  source 1..75: mol_type = other DNA
aaaaacgctcaatccgttggtgtatgatctggataccgaccggctggctgctcgctgggctgactttataggtgc

SEQ ID NO: 680797 - DNA, 75 bp, synthetic construct
  source 1..75: mol_type = other DNA
tgctgcctaccgcaagcttgaagcgtatggatatgcaccggccgttattgaacaattgaacacaggcgttgccta

SEQ ID NO: 680798 - DNA, 75 bp, synthetic construct
  source 1..75: mol_type = other DNA
taaaaccaccaaagttgattatctgcactcccttggggcgaaatacgacttcaaaaataacttcgtactggaagc

SEQ ID NO: 680799 - DNA, 75 bp, synthetic construct
  source 1..75: mol_type = other DNA
gaaaacctgaccctgcgccagcgtatcaccgataaatatctggcaaatctggtcacctcggttaacagcaattaa

SEQ ID NO: 680800 - DNA, 75 bp, synthetic construct
  source 1..75: mol_type = other DNA
cgaaggtatccgcgccaaaatgcgcagcctggtcagtcagggctatctcattggtggtgattgctggctggatga

SEQ ID NO: 680801 - DNA, 75 bp, synthetic construct
  source 1..75: mol_type = other DNA
gttattgatgaaatattgagtaaagaaaatctgtcatggtgttcgaaaaatactttgccaatattgcatgctttt

SEQ ID NO: 680802 - DNA, 75 bp, synthetic construct
  source 1..75: mol_type = other DNA
acaaccaatggtcacattatgccctataacaatatccatatcattaaattccccgcgaagtccaatagttactcc

SEQ ID NO: 680803 - DNA, 75 bp, synthetic construct
  source 1..75: mol_type = other DNA
ggcgctgacttaccgtgaaaactttagtcagcgtgaagggatgttgatctggcctgactttatcagctgggacac

SEQ ID NO: 680804 - DNA, 75 bp, synthetic construct
  source 1..75: mol_type = other DNA
cggatggcacaaaagcctgtccaatgtgggcgttaacggtgtcactggaatttctgctgatgtgttctgggatct

SEQ ID NO: 680805 - DNA, 75 bp, synthetic construct
  source 1..75: mol_type = other DNA
ttcctcgaacggtcgcctggatatctggtgggataaccgttctgacttcaacgccaacggcgaaaaagcggtctt

SEQ ID NO: 680806 - DNA, 75 bp, synthetic construct
  source 1..75: mol_type = other DNA
ggatacttcctgcaacgtatgactccaacctacgcttcctccaacggccgcctggatatctggtgggataaccgt

SEQ ID NO: 680807 - DNA, 75 bp, synthetic construct
  source 1..75: mol_type = other DNA
gccaggtacttatcagggtgcggaagccggagcgaattttgattacggcgatgccggtgcgttgagtttctccta

SEQ ID NO: 680808 - DNA, 75 bp, synthetic construct
  source 1..75: mol_type = other DNA
acggttattggattgaaatcagtattgatgcatatgcacaaaaagttaagggtatatcacgagatgaatacccac

SEQ ID NO: 680809 - DNA, 75 bp, synthetic construct
  source 1..75: mol_type = other DNA
catgaaatgcttaattataaggttacaggggacaaagagctggatttcctgaaaatgatgatccctcatcatcag

SEQ ID NO: 680810 - DNA, 75 bp, synthetic construct
  source 1..75: mol_type = other DNA
tggtgggataaccgttctgacttcaacgccaacggcgaaaaagcggtcttcttcggtgcgatgtatgacctgaaa

SEQ ID NO: 680811 - DNA, 75 bp, synthetic construct
  source 1..75: mol_type = other DNA
tgtttgcacagcagttatttgaagaactggataagttactggcacagttaagcgaattatttgacgctgttacgg

SEQ ID NO: 680812 - DNA, 75 bp, synthetic construct
  source 1..75: mol_type = other DNA
gacactggattttgatgaagatttccgcgaccggttcagcgaatacattgttaagggatatgcacgcgcgaacgg

SEQ ID NO: 680813 - DNA, 75 bp, synthetic construct
  source 1..75: mol_type = other DNA
tgttgatagcactggtatggacaggattattactaagcggatatggcgttctgattggaagcaaggaaaatgccg

SEQ ID NO: 680814 - DNA, 75 bp, synthetic construct
  source 1..75: mol_type = other DNA
tccagggaaatgaattgacatatattgcggaagcagtgtctaatggcaaaatatcaggcgatgggattttcacta

SEQ ID NO: 680815 - DNA, 75 bp, synthetic construct
  source 1..75: mol_type = other DNA
caggacatcaaccgctacaccttccctgaacaaatggctggctttgctaatgctagaggcggacggtgtgagtaa

SEQ ID NO: 680816 - DNA, 75 bp, synthetic construct
  source 1..75: mol_type = other DNA
aaaacgtcgccgttcgcgatgaactggaggtgatggtcaaatgcccggagctggcattacgcgaagtccagtcac

SEQ ID NO: 680817 - DNA, 75 bp, synthetic construct
  source 1..75: mol_type = other DNA
atgccgcactatgcctgctggcacaaccctgcgttgttattgcgggtcgcgcgatgcagttgggcgacgccatta

SEQ ID NO: 680818 - DNA, 75 bp, synthetic construct
  source 1..75: mol_type = other DNA
gcgacgacgttctgctgagccgtatttattccccggcaaacctcggcgttgtgagcggcgggaatgcccgctatt

SEQ ID NO: 680819 - DNA, 75 bp, synthetic construct
  source 1..75: mol_type = other DNA
tcggttcaccagccgaaaccgacgcagagctgcgcattcggcaggggcaaagcgtcgcgctaccatcgatcacac

SEQ ID NO: 680820 - DNA, 75 bp, synthetic construct
  source 1..75: mol_type = other DNA
gtacaatacctgcacactaaaagtggttttctggggataacagattgcccgttgttacgtaaaagcaatattgtg

SEQ ID NO: 680821 - DNA, 75 bp, synthetic construct
  source 1..75: mol_type = other DNA
acatctgtcacggtaccggacacctacggcaacccacacgtgatcagcttttcgcggtctactgatgtgccaatt

SEQ ID NO: 680822 - DNA, 75 bp, synthetic construct
  source 1..75: mol_type = other DNA
gttgatgacgccgcgctctatttcacgtttgaagaaaaatgccgcgaccttaacttatcaaaagaacaaaaagct

SEQ ID NO: 680823 - DNA, 75 bp, synthetic construct
  source 1..75: mol_type = other DNA
agtttcgctgcgcggcagcgtggcgtggcagaaagggagtgatgattttgcccagacggcagggtttttgtcgat

SEQ ID NO: 680824 - DNA, 75 bp, synthetic construct
  source 1..75: mol_type = other DNA
ggcgttactgcctaatcttacgctgcaatttgcgttggcgccggagggagaaaacacctttccggcgttaacatt

SEQ ID NO: 680825 - DNA, 75 bp, synthetic construct
  source 1..75: mol_type = other DNA
ggtgcgcgggtgcttcccgtcaacccacagcttccgcagccgttgcttgaggagttgctgcccaatcttacgctg

SEQ ID NO: 680826 - DNA, 75 bp, synthetic construct
  source 1..75: mol_type = other DNA
atgatcttctctgactggccgtggcgtcactggcggcaggtgcggggagatgccatcgccttgcgtctcaatgac

SEQ ID NO: 680827 - DNA, 75 bp, synthetic construct
  source 1..75: mol_type = other DNA
tatgactgcgtgatgcctgtttatcagttttcccgtgatttttctctggtgcaggcggtaccgcgtaacgtgccc

SEQ ID NO: 680828 - DNA, 75 bp, synthetic construct
  source 1..75: mol_type = other DNA
aaaatactttcccggcgttaacttcactgcatattcagatggttgaaggcacacattcagctctgtggcaaccaa

SEQ ID NO: 680829 - DNA, 75 bp, synthetic construct
  source 1..75: mol_type = other DNA
gagggcagcggcgtgatgttgcgggcgtggaatacgccgcaaacgctgctggcctggctggcgttactgcaatgc

SEQ ID NO: 680830 - DNA, 75 bp, synthetic construct
  source 1..75: mol_type = other DNA
atggcggatagcagcagcgaagaaaaaacagagaaaccctcggcgcaaaagctgcgtaaagcgcgtgaagagggg

SEQ ID NO: 680831 - DNA, 75 bp, synthetic construct
  source 1..75: mol_type = other DNA
tccggacgaaagcgtggtcatcaactgcggttctactgcgttcctgctcgggcgagaaatgtgcggcaagccagt

SEQ ID NO: 680832 - DNA, 75 bp, synthetic construct
  source 1..75: mol_type = other DNA
ttttagccgtgccgatcaaatcgatatgctgatcaccggcaaaaatgctaacccggaaatcctgcaacaactgga

SEQ ID NO: 680833 - DNA, 75 bp, synthetic construct
  source 1..75: mol_type = other DNA
ggaattgctccccaatcttacgctgcaatttgcgctggtgccggatggggaaaacacgtttccggcattaacttc

SEQ ID NO: 680834 - DNA, 75 bp, synthetic construct
  source 1..75: mol_type = other DNA
acgcttcctcctgaactgaaaaacggcggcattaagatctcacgccaggcgttgaaagagtgggttcaacgccag

SEQ ID NO: 680835 - DNA, 75 bp, synthetic construct
  source 1..75: mol_type = other DNA
cagtatgactcatcacgtgccgccgcgccgtttgtggtggcgaaaggcaccgatgaaatcgccctctatatccgc

SEQ ID NO: 680836 - DNA, 75 bp, synthetic construct
  source 1..75: mol_type = other DNA
ttattctccagccaaccttggtgtaatgagtggtggtgacagtaaatattatgatattaactcgctgaaaatcgg

SEQ ID NO: 680837 - DNA, 75 bp, synthetic construct
  source 1..75: mol_type = other DNA
tgtgctggatgtggcggtggccattgcggaggcagacggcgaaattgagccggaagagcgcaaggtgctggaaga

SEQ ID NO: 680838 - DNA, 75 bp, synthetic construct
  source 1..75: mol_type = other DNA
tgccaccgatggcgtgacgttgacaggtgagcttaataccaaccttgaaactgacagcctgacttatctttccga

SEQ ID NO: 680839 - DNA, 75 bp, synthetic construct
  source 1..75: mol_type = other DNA
gagttccagaacgagtacggcgcaagccgtgctgaagttatcagggcggcactggcagcgttacgtctgatttca

SEQ ID NO: 680840 - DNA, 75 bp, synthetic construct
  source 1..75: mol_type = other DNA
aaagtttgagaaacgcgatctggcacaggcggtgattaatgctgcctacctggtggcctatgcagatggtgaatg

SEQ ID NO: 680841 - DNA, 75 bp, synthetic construct
  source 1..75: mol_type = other DNA
atgtttggtattttcaaaaagaaaacccgcagagcagcaacggaaattaaaaagtttgagaaacgcgatctggca

SEQ ID NO: 680842 - DNA, 75 bp, synthetic construct
  source 1..75: mol_type = other DNA
acgtcagaaattaatgcgattagcgcaaccattatcggtcagctggatacgaactttaaaactggtcgtcgagcg

SEQ ID NO: 680843 - DNA, 75 bp, synthetic construct
  source 1..75: mol_type = other DNA
gcacgtttaaagaccctgtttgggggattcgtgcgctggcggtgactctaattacctaccacgacaaacgtcgcg

SEQ ID NO: 680844 - DNA, 75 bp, synthetic construct
  source 1..75: mol_type = other DNA
gagttccagaacgagtacggcgcaagccgtgctgaagttatcaggacggcactggcagcgttgcgtctgatttca

SEQ ID NO: 680845 - DNA, 75 bp, synthetic construct
  source 1..75: mol_type = other DNA
aaactcaaatattataaaggtgaaatcccaaaggattatatttttggagtagatgacatatttgtatccatgaca

SEQ ID NO: 680846 - DNA, 75 bp, synthetic construct
  source 1..75: mol_type = other DNA
actggcagcgttacgtctggtatcagcagaagaacgccggaggctgtttgatgatataaggaaaaacagcccgaa

SEQ ID NO: 680847 - DNA, 75 bp, synthetic construct
  source 1..75: mol_type = other DNA
tctgcgtcgagctggcgttgttaagccggtgaaaaccgtgaaggctgttcctgtaactaaagaaacagcaggcgc

SEQ ID NO: 680848 - DNA, 75 bp, synthetic construct
  source 1..75: mol_type = other DNA
caaaagacggctcaagtatcgataccattcgtgaagttattgaacgctgggcaccgccgaacgaaaataacactg

SEQ ID NO: 680849 - DNA, 75 bp, synthetic construct
  source 1..75: mol_type = other DNA
atgtttggtatttttggtaaaaaagcccgcagagcggcaacggaaattaaaaagtttgaaaaacgcgatctggca

SEQ ID NO: 680850 - DNA, 75 bp, synthetic construct
  source 1..75: mol_type = other DNA
atggacaatgacaaaatagataaacacagcgacgaacttgaagtagagagcgaagaaaaagagcgtggaaaaaaa

SEQ ID NO: 680851 - DNA, 75 bp, synthetic construct
  source 1..75: mol_type = other DNA
acgctggcggcaacgccaaaggcagtaaaatcagcctatgacaatgcagagaaacgtctgcagaaagaccagaac

SEQ ID NO: 680852 - DNA, 75 bp, synthetic construct
  source 1..75: mol_type = other DNA
tttggctttgtgattggtctgccggttggcgtcctgctttatgtcacgcgtccggggcaaattattgctaacgcg

SEQ ID NO: 680853 - DNA, 75 bp, synthetic construct
  source 1..75: mol_type = other DNA
aggatggtgaaaaagagctggaacgcgacgcaatggcgctactgtggtcagccattgcggcgggtctgtcgatgg

SEQ ID NO: 680854 - DNA, 75 bp, synthetic construct
  source 1..75: mol_type = other DNA
tctgtcgatgggcgcttcattactggcaaaagggatatttcatgtcgaactggaaggtgtgccgggcagcttctt

SEQ ID NO: 680855 - DNA, 75 bp, synthetic construct
  source 1..75: mol_type = other DNA
aactcgcgatgcatttgtcaaaatcggcatggatgtgatgaagaacaccccagcgagatgtttgccaacgcgatc

SEQ ID NO: 680856 - DNA, 75 bp, synthetic construct
  source 1..75: mol_type = other DNA
ggtaagacgcaaaacctgtccgttaatgtgggtggtcgggctgaagtgcatgccggtacgctggaaaatgcggta

SEQ ID NO: 680857 - DNA, 75 bp, synthetic construct
  source 1..75: mol_type = other DNA
cgtaatcagcctgcgctgtccgcgtttacgtcagaaattaatgcgattagcgcaaccattatcggtcagctggat

SEQ ID NO: 680858 - DNA, 75 bp, synthetic construct
  source 1..75: mol_type = other DNA
atgtttggaatcttcaaaaagaaaacccgcagagcggcagcggaaattaaaaagtttgagaaacgcgatctggca

SEQ ID NO: 680859 - DNA, 75 bp, synthetic construct
  source 1..75: mol_type = other DNA
cgggttaattgaagcttcccgcgcaatgggtgccacgccgatgcagatcgtccgtaaagtgctgttaccggaagc

SEQ ID NO: 680860 - DNA, 75 bp, synthetic construct
  source 1..75: mol_type = other DNA
tgtggcgacatactgttaatcgcatcatcctggacgcaacacatcagaaccgcattattgcagagctggttattc

SEQ ID NO: 680861 - DNA, 75 bp, synthetic construct
  source 1..75: mol_type = other DNA
gtgatatacacgttgagataacagatgccagtcggcaaactttgtgtaacgcactgaaattacagccagacgaag

SEQ ID NO: 680862 - DNA, 75 bp, synthetic construct
  source 1..75: mol_type = other DNA
gagcttgccggccactggggcggtggcgaggtggcttcagctgacggcatgcgctttgtcacgccggtgaaaacg

SEQ ID NO: 680863 - DNA, 75 bp, synthetic construct
  source 1..75: mol_type = other DNA
ttacggacaacgcggagagatcagaaagcgttatcgtgaagggcaggaagatcaactgggggcgctgggcctggt

SEQ ID NO: 680864 - DNA, 75 bp, synthetic construct
  source 1..75: mol_type = other DNA
ccatgctggccgttatcatccgtgacgccagaaagattgggcagaaaaaacggctccgctcgctgaaggatctgg

SEQ ID NO: 680865 - DNA, 75 bp, synthetic construct
  source 1..75: mol_type = other DNA
gaggactatcgccgcaggatcctaacacagcttaaccggggcgaaggtcgccatgccgtggcaagagccatttgc

SEQ ID NO: 680866 - DNA, 75 bp, synthetic construct
  source 1..75: mol_type = other DNA
gctatccagagatcatctcccgctatgctcaaagggaaaatacacgttgggagcaccacgggcttatcaggcagc

SEQ ID NO: 680867 - DNA, 75 bp, synthetic construct
  source 1..75: mol_type = other DNA
gcacgggcatatcaatatgctggggcattacacattcacgctgccggaggatattctgaagggagagcttcgccc

SEQ ID NO: 680868 - DNA, 75 bp, synthetic construct
  source 1..75: mol_type = other DNA
ctgacgtttattccggcgattttactgatgatgaccagtttcactcgcatcatcatcgtttttggtttactgcgt

SEQ ID NO: 680869 - DNA, 75 bp, synthetic construct
  source 1..75: mol_type = other DNA
atgtcgatgcgtaccagccattcagcgaagagaaaatactcaatgcaggaggcgctggaaaaaggggcgcagccg

SEQ ID NO: 680870 - DNA, 75 bp, synthetic construct
  source 1..75: mol_type = other DNA
tctcgccttcgcacaactgccgggtatcaccagtcagccgctgcctggcggtggacaaagttggtccctcccggt

SEQ ID NO: 680871 - DNA, 75 bp, synthetic construct
  source 1..75: mol_type = other DNA
ttaacatccgctatccagagatcatctcccgctatgctcaaagggaaaatacacgttgggagcaccacgggctta

SEQ ID NO: 680872 - DNA, 75 bp, synthetic construct
  source 1..75: mol_type = other DNA
ttcgcaacaggtcgaagaagggaaacgctggtttgacaatcttgccgctaacggaaaaatcgaaatggcctggca

SEQ ID NO: 680873 - DNA, 75 bp, synthetic construct
  source 1..75: mol_type = other DNA
gggatgcaatttcccgatactgccatcgcccatgctaacgtgcgcattgccggaagcgacatcatgatgagcgat

SEQ ID NO: 680874 - DNA, 75 bp, synthetic construct
  source 1..75: mol_type = other DNA
ttaaggaatattacggttaccatgaatttggtgatttcccctggtctttccgcctgaagcgcctgctgtacaccc

SEQ ID NO: 680875 - DNA, 75 bp, synthetic construct
  source 1..75: mol_type = other DNA
ccttaccgaactgaacggttcgaaaaaacgcatactggacgatgcgcctgaacacatcatcaccggcccctggaa

SEQ ID NO: 680876 - DNA, 75 bp, synthetic construct
  source 1..75: mol_type = other DNA
agccgttgatgtgcttgatatgctgatcctggacatcgcccgtgaggcaaagaaaacggggcagaaaaagcggct

SEQ ID NO: 680877 - DNA, 75 bp, synthetic construct
  source 1..75: mol_type = other DNA
atgcttttgctgtctggcctgcttttgttgactctggcgatcgcggtgttaaatacactcgtgccgctttggctc

SEQ ID NO: 680878 - DNA, 75 bp, synthetic construct
  source 1..75: mol_type = other DNA
cagcaggcaggcaactccgtgctgtctaaagcgaaccaggtaccgcagcaagttctgtcactgttacaaggctaa

SEQ ID NO: 680879 - DNA, 75 bp, synthetic construct
  source 1..75: mol_type = other DNA
cagatcatccagcaggcggggaactctgtgctgtccaaagctaaccaggtgccgcagcaggttctgtctctgcta

SEQ ID NO: 680880 - DNA, 75 bp, synthetic construct
  source 1..75: mol_type = other DNA
ctgaatccggtcgaaattatgacagacacggccggtgccagtgacatcatttttggcctgttctggctgctggga

SEQ ID NO: 680881 - DNA, 75 bp, synthetic construct
  source 1..75: mol_type = other DNA
aaacgctggtcagcgccaatgcccgcctggttgattttcagtccacactggagcttgctggccgctggggtggtg

SEQ ID NO: 680882 - DNA, 75 bp, synthetic construct
  source 1..75: mol_type = other DNA
cattcgttaaagcacaggaaataacggcattagacgatgccgttgatgtgcttgatatgctaattctggacatta

SEQ ID NO: 680883 - DNA, 75 bp, synthetic construct
  source 1..75: mol_type = other DNA
gcatttaccgaagcgctggagcggtatatccggctgcgaaacctggaattttcccgactgaattttaccggtctg

SEQ ID NO: 680884 - DNA, 75 bp, synthetic construct
  source 1..75: mol_type = other DNA
tatacgtttacgctaccggaggatattttgaagggggaactgagagaactaaatttcaatttaaacaatgaatta

SEQ ID NO: 680885 - DNA, 75 bp, synthetic construct
  source 1..75: mol_type = other DNA
ggcggtacgctactgctcgacagcgaattaaacggcgatgactcggcaagcgaccagttggtgttgaacggtaat

SEQ ID NO: 680886 - DNA, 75 bp, synthetic construct
  source 1..75: mol_type = other DNA
ggatcctgacgcagctaaaccggggggaaggccgccatgctgtggcgagggcgatctgctacgggcagcgcggtg

SEQ ID NO: 680887 - DNA, 75 bp, synthetic construct
  source 1..75: mol_type = other DNA
gcgctggaaaaaggggcgcagccgctgcgtgagtttatgctgcgtcagacccgtgaggcggatttagggttgttt

SEQ ID NO: 680888 - DNA, 75 bp, synthetic construct
  source 1..75: mol_type = other DNA
gttctttctggcaattgctgacaccgttcccattactgtgtggtttgctcagtctgggcatggtgattttacaag

SEQ ID NO: 680889 - DNA, 75 bp, synthetic construct
  source 1..75: mol_type = other DNA
aaatcgctgatgcgcgctggcgtaaaatgtgggatgccggtctggtcatcggtagcctggtgccgccggtagtct

SEQ ID NO: 680890 - DNA, 75 bp, synthetic construct
  source 1..75: mol_type = other DNA
gtaaccaggtctggttgatcctcgcgggtggggcattatttgctgcctggcccagagtctatgcagcggcgtttt

SEQ ID NO: 680891 - DNA, 75 bp, synthetic construct
  source 1..75: mol_type = other DNA
gtcgcggttgagaatgccccctcttcttctgaagacgaagaaaatgtaatgaacgcatcccacacaattaaacac

SEQ ID NO: 680892 - DNA, 75 bp, synthetic construct
  source 1..75: mol_type = other DNA
ttttcttctgaaatgtaccccaggctggcaaaggcttatccgaccaataaattaccggatttacggggcgaattt

SEQ ID NO: 680893 - DNA, 75 bp, synthetic construct
  source 1..75: mol_type = other DNA
gtctgctgccgctggtggcgcgtaatgatgatgaacgtcggatagtgataaacagcgttggcgcgcactgggaag

SEQ ID NO: 680894 - DNA, 75 bp, synthetic construct
  source 1..75: mol_type = other DNA
ttggctggattatctggacgcactggaactggtcgatacttccggtgcgccagatattgaatggcctacgcctcc

SEQ ID NO: 680895 - DNA, 75 bp, synthetic construct
  source 1..75: mol_type = other DNA
gccgaacagcgatccgctgatgatccttgctgattatcggatgcagcaaaaccagagcggatttgatctacgcca

SEQ ID NO: 680896 - DNA, 75 bp, synthetic construct
  source 1..75: mol_type = other DNA
gcggaactgctctataaaatcagcttcggcgaaatgccaaaatcagcgcaggacagcgccgaaggctgcccttcc

SEQ ID NO: 680897 - DNA, 75 bp, synthetic construct
  source 1..75: mol_type = other DNA
tgaaatatcaggcaacaccggaagggctgcgttatccggcctcaagaggtctgcgggctgaacagatgagggaac

SEQ ID NO: 680898 - DNA, 75 bp, synthetic construct
  source 1..75: mol_type = other DNA
ccaaaagcagaaaacggcgtcctcatcgtcgagcgatggcttcttgcccgcatccgtaatgaaaccttccacacg

SEQ ID NO: 680899 - DNA, 75 bp, synthetic construct
  source 1..75: mol_type = other DNA
ccgacaggatgcggtaagagctggatagccaatgcgctgggcgaacaggcatgtcgacagaaatacagcgtccgg

SEQ ID NO: 680900 - DNA, 75 bp, synthetic construct
  source 1..75: mol_type = other DNA
atgccagttagccgtaatctctgcattttcttaaacgttggtttgggagaaggttcggcattacccgcgggtgtg

SEQ ID NO: 680901 - DNA, 75 bp, synthetic construct
  source 1..75: mol_type = other DNA
aagcggtgaagcggcagaatggcagcaattacactgttgtctttacgattaacgccgatgcgccgccatcgcctc

SEQ ID NO: 680902 - DNA, 75 bp, synthetic construct
  source 1..75: mol_type = other DNA
tgctgaaggatagccaaggcatatcagcactgaagctgtactcatttttagcggagcatatcgatcctacgtgtg

SEQ ID NO: 680903 - DNA, 75 bp, synthetic construct
  source 1..75: mol_type = other DNA
ggtttgggagaaggttcggcattacccgttggtgtgcctgttccgtggccttccgctactccgccaacaggctgg

SEQ ID NO: 680904 - DNA, 75 bp, synthetic construct
  source 1..75: mol_type = other DNA
tacacctgccagaaaacattaaggtcactcgggagaaatcggcattccccccaccagaactgattacgcctaatc

SEQ ID NO: 680905 - DNA, 75 bp, synthetic construct
  source 1..75: mol_type = other DNA
atttaatcgacccggtagtgacctttgccaagagcccggaaagctacatgcagtatgtcgatcagcatccggaac

SEQ ID NO: 680906 - DNA, 75 bp, synthetic construct
  source 1..75: mol_type = other DNA
tgccaatagcccggaaagctacatgcagtatgtcgaccagcatccggaacagagcatcaaaatgggcgttacgtt

SEQ ID NO: 680907 - DNA, 75 bp, synthetic construct
  source 1..75: mol_type = other DNA
tcagactcggccagcaggtggttggtctggctcagcatcaggattaacatcattagaaagtggtgggaatgaatc

SEQ ID NO: 680908 - DNA, 75 bp, synthetic construct
  source 1..75: mol_type = other DNA
tcagggagttcttgattaccttggtttgggggaaggctctgcactgcccgttggtgtacctgttccgtggccctc

SEQ ID NO: 680909 - DNA, 75 bp, synthetic construct
  source 1..75: mol_type = other DNA
ggctaaaatgtaacggagcagcattttcttctgaaaagtatccaaaactggcaaaggcttacccaacgttaaaat

SEQ ID NO: 680910 - DNA, 75 bp, synthetic construct
  source 1..75: mol_type = other DNA
gcaaataaattgcctgatttacgtggtgaatttattcgtggctgggatgacgggcgtggagtggatagcggtcgt

SEQ ID NO: 680911 - DNA, 75 bp, synthetic construct
  source 1..75: mol_type = other DNA
ttttcataaacgttggtttgggagaaggttcggcattacccgttggcgtgcctgttccgtggccttccgccactc

SEQ ID NO: 680912 - DNA, 75 bp, synthetic construct
  source 1..75: mol_type = other DNA
taacaggaagtcattatcataatattcggtcatgggatgcgtgggataacacggtactggtgccaaatgacaaag

SEQ ID NO: 680913 - DNA, 75 bp, synthetic construct
  source 1..75: mol_type = other DNA
ggaagtgttaaaggtattcgagcaggaaaatctgctgcaaaaagccaacgacctggggcataagctgaaagacgg

SEQ ID NO: 680914 - DNA, 75 bp, synthetic construct
  source 1..75: mol_type = other DNA
gtattacaacgtgctgcgcatccttgtgccgctcactattgaagatgctcagattcgtcagggtctggagatcat

SEQ ID NO: 680915 - DNA, 75 bp, synthetic construct
  source 1..75: mol_type = other DNA
ctgggagcgatgattgccatcgagctgtttgaagatggcgatcacagcaaaccagacgcaaaactcaccgccgag

SEQ ID NO: 680916 - DNA, 75 bp, synthetic construct
  source 1..75: mol_type = other DNA
agatggcatggttgtatggaatgcgtttgcagacgtagaaaatcaccccgagcgaataaaccacgccgcctaccg

SEQ ID NO: 680917 - DNA, 75 bp, synthetic construct
  source 1..75: mol_type = other DNA
ttcgcagggcgttgtatatgcccgcaatggtagccaccagtaagacctcaagccacgtatatgtggctttatttt

SEQ ID NO: 680918 - DNA, 75 bp, synthetic construct
  source 1..75: mol_type = other DNA
acctgcttccaggtgctggcttacgagccgtatctggagctgtgcgagattatgaatcagaaggtgccgggcgat

SEQ ID NO: 680919 - DNA, 75 bp, synthetic construct
  source 1..75: mol_type = other DNA
tgaagcatggaatctggacacctttttacgttatccgcatatcagcatttgctgggaacagagcgatacctgggc

SEQ ID NO: 680920 - DNA, 75 bp, synthetic construct
  source 1..75: mol_type = other DNA
gacgacccgctctttgtgaactcaccgctgggcctgtctcccacaccgctaatggtcagcatggagcaaaatctg

SEQ ID NO: 680921 - DNA, 75 bp, synthetic construct
  source 1..75: mol_type = other DNA
tctgtggcataaacggaacagccgtaatccgaagatcgtctggttacgggaaaccattaaaaatctttacgcgtc

SEQ ID NO: 680922 - DNA, 75 bp, synthetic construct
  source 1..75: mol_type = other DNA
tttctcatacaggacagaaggatactctcaaatatattttagatttcattaacaacataaaacgaaagaaaccga

SEQ ID NO: 680923 - DNA, 75 bp, synthetic construct
  source 1..75: mol_type = other DNA
ccgatgccgcaggcagcgtgaagccgacaatgcaaaagttgattccggcggattcgctccgtttgcagttctacg

SEQ ID NO: 680924 - DNA, 75 bp, synthetic construct
  source 1..75: mol_type = other DNA
tcaagcattaatcactgacaaatcagataagaatgcagtaaacgatctacacactcaacagaacgttgatgtcac

SEQ ID NO: 680925 - DNA, 75 bp, synthetic construct
  source 1..75: mol_type = other DNA
gctggaaagcatcccgggtatcggagagaaaacatctgcggtattgctggcttatatcggtctgaaggaccgctt

SEQ ID NO: 680926 - DNA, 75 bp, synthetic construct
  source 1..75: mol_type = other DNA
tttattataaaatacgttcgataaaactaaagctgggtgcagaatccaccagaaagcttccagtcctacttaaaa

SEQ ID NO: 680927 - DNA, 75 bp, synthetic construct
  source 1..75: mol_type = other DNA
caacttgatcttttatttaatattatcgagccgggttcggaattaaatcctttctcagatttagttcaaccaaga

SEQ ID NO: 680928 - DNA, 75 bp, synthetic construct
  source 1..75: mol_type = other DNA
cggacacgatcaaaaactaaacctcatgcagcaaacgatgagttttctgacccacgatctgacacaaatgatgcc

SEQ ID NO: 680929 - DNA, 75 bp, synthetic construct
  source 1..75: mol_type = other DNA
agcgaaacatccggtttgcgcctacaaatggatgaactggtcattaacgccaaaagtgcagggcgatgtggcggc

SEQ ID NO: 680930 - DNA, 75 bp, synthetic construct
  source 1..75: mol_type = other DNA
cgccggatagctggcaagtggtttttgttgagcagaatctgccggacggcaagagcaataaaggccgggtacagg

SEQ ID NO: 680931 - DNA, 75 bp, synthetic construct
  source 1..75: mol_type = other DNA
gttaaaggcgactggtttaatgttggcggcaaagtttacggcacaccttaccaatgggggccgaacctgctgatg

SEQ ID NO: 680932 - DNA, 75 bp, synthetic construct
  source 1..75: mol_type = other DNA
aattacgtcaatgctaaaactccgtcaggcgcggcttggcgtgaatggctgcattatctcaggaatcgttctggg

SEQ ID NO: 680933 - DNA, 75 bp, synthetic construct
  source 1..75: mol_type = other DNA
tttaccggcaacctggttggtactttactgacagggtatgtcattaaacgctttgggtttaatcgcagctattac

SEQ ID NO: 680934 - DNA, 75 bp, synthetic construct
  source 1..75: mol_type = other DNA
aatggtagccaccagtaagactgagtggggacgggcgttccgcgaccgtctggcggcttgtagtggtcaagtaat

SEQ ID NO: 680935 - DNA, 75 bp, synthetic construct
  source 1..75: mol_type = other DNA
aagctgctgtttatcatgatcgccagcgtgtcgtttatctacttgctgatgctgcttcgcaacgccggtcatacg

SEQ ID NO: 680936 - DNA, 75 bp, synthetic construct
  source 1..75: mol_type = other DNA
tgaccctggcggggatcttgccgctgctgtttactcgtatcctgaatcaacaggctgaaaatcatgcttcgacgc

SEQ ID NO: 680937 - DNA, 75 bp, synthetic construct
  source 1..75: mol_type = other DNA
gttcatcctcggtgcagccggttttacgctctatccggtggcgatggcctgggcttgcgagaaagttgaacatca

SEQ ID NO: 680938 - DNA, 75 bp, synthetic construct
  source 1..75: mol_type = other DNA
cgcgggagctgctaagttcgctgccattagccattgattatgaagtactgtttagtgatgtgccctgcgtctggt

SEQ ID NO: 680939 - DNA, 75 bp, synthetic construct
  source 1..75: mol_type = other DNA
atatcttgaggaggctggtctggtatctataagtaaattcaaaaatggcaacggttcggtcagccaaatggtggg

SEQ ID NO: 680940 - DNA, 75 bp, synthetic construct
  source 1..75: mol_type = other DNA
aagcgtgccgaaacctctgaccgcaacagcaatccgatgctgcaggatgtggcggtcggctggctgcagaaatac

SEQ ID NO: 680941 - DNA, 75 bp, synthetic construct
  source 1..75: mol_type = other DNA
agtcggggtgggtgttaacggtacgattgcgagcaccaccgataccgccgctgatgatgagcgtaagaccgctga

SEQ ID NO: 680942 - DNA, 75 bp, synthetic construct
  source 1..75: mol_type = other DNA
aaagctggaatgaccattatcctgatgaagtatcgaaagcacagtcagcaatcagcaaagctcttggggatgagt

SEQ ID NO: 680943 - DNA, 75 bp, synthetic construct
  source 1..75: mol_type = other DNA
agcataggtacgtcaggtttaatctccgatgagggaggggtgatttttaatgggcgggcgatgggtaatacgcct

SEQ ID NO: 680944 - DNA, 75 bp, synthetic construct
  source 1..75: mol_type = other DNA
ctttcagaaaaaaaaattgaaggactatgaggaggaaatgaatatttatgaagcggactcacagtcatggtgctc

SEQ ID NO: 680945 - DNA, 75 bp, synthetic construct
  source 1..75: mol_type = other DNA
atcttacgctgctacagtcgctgccaatggtaatgttacgctgaacaaagcaaatgtaacctacagcgatgtcgc

SEQ ID NO: 680946 - DNA, 75 bp, synthetic construct
  source 1..75: mol_type = other DNA
caacaccaccaccaacctgtctgaagcgcagtcccgtattcaggacgccgactatgcgaccgaagtgtccaacat

SEQ ID NO: 680947 - DNA, 75 bp, synthetic construct
  source 1..75: mol_type = other DNA
atttgcagaaaattgattcttccacgctgggattgaatggtttctccgtttcgggtcagtcgctgaatgttagca

SEQ ID NO: 680948 - DNA, 75 bp, synthetic construct
  source 1..75: mol_type = other DNA
caaaaagaaatttgaagaaaaaacgaaaaaaggattatttcaaggccatacgtgactttgagcgcagtgaaattg

SEQ ID NO: 680949 - DNA, 75 bp, synthetic construct
  source 1..75: mol_type = other DNA
gtgctccagtaactgcttttggtgctaccaccacaaacaatattaaacttactggaattaccctttctacggaag

SEQ ID NO: 680950 - DNA, 75 bp, synthetic construct
  source 1..75: mol_type = other DNA
ttcgctgcacaacgtaactaaaggtggtgtcgcaacgtctacttatgttgttcagtatggcgataagagctatgc

SEQ ID NO: 680951 - DNA, 75 bp, synthetic construct
  source 1..75: mol_type = other DNA
agcaaaactggaatgaccattatcctgatgaagtatcgaaagcacagtcagcaatcagcaaagctcttggggaag

SEQ ID NO: 680952 - DNA, 75 bp, synthetic construct
  source 1..75: mol_type = other DNA
cattgaagttactgccagccataacccgatggattacaacggcatgaaactggtgcgcgaaggggctcgcccgat

SEQ ID NO: 680953 - DNA, 75 bp, synthetic construct
  source 1..75: mol_type = other DNA
atgaacgtatactgcgatgatggttcaacaacaatcaagttggcatggaatgacaatgggaaaatctgtaagtcg

SEQ ID NO: 680954 - DNA, 75 bp, synthetic construct
  source 1..75: mol_type = other DNA
gaattgattaaacgtcgtaatgccccggactttgttcggcaggttataaatgacgaaacaaaaactgatctggtc

SEQ ID NO: 680955 - DNA, 75 bp, synthetic construct
  source 1..75: mol_type = other DNA
aatggtcagcatggagcaaaatctggcggaatggatgcaaatgagcaacctgctgctggataaaccgcaccacca

SEQ ID NO: 680956 - DNA, 75 bp, synthetic construct
  source 1..75: mol_type = other DNA
tgataccagtttcctcgttgcagatgaattgattaaacgtcgtaatgacccggactttgttcggcaggttataaa

SEQ ID NO: 680957 - DNA, 75 bp, synthetic construct
  source 1..75: mol_type = other DNA
caacaacaatcaagttggcatggaatgataatgggaaaatctgtaagtcgttgtcgcaaaactcatttcgtcatg

SEQ ID NO: 680958 - DNA, 75 bp, synthetic construct
  source 1..75: mol_type = other DNA
gtgagtcagatgtccaggccgaaagcgcgctgcatggctataacagcagcgtgacaagtgcctggaatagtctgc

SEQ ID NO: 680959 - DNA, 75 bp, synthetic construct
  source 1..75: mol_type = other DNA
tgcggcgcagcgtgaagcactggcgcgtgaattcgtcaaagagcaggttgaacccagggttgatgccgcgtatca

SEQ ID NO: 680960 - DNA, 75 bp, synthetic construct
  source 1..75: mol_type = other DNA
gtctgggtctggcgattggtggcgctattggttatatcggtggcggctggctgtttgacctgggcaaatcggcgc

SEQ ID NO: 680961 - DNA, 75 bp, synthetic construct
  source 1..75: mol_type = other DNA
atgacaaaaaggctgaacagagagcacttcctggagcggatacaagagacgaactcctagctaaggcccaggaat

SEQ ID NO: 680962 - DNA, 75 bp, synthetic construct
  source 1..75: mol_type = other DNA
cgtaccaggagggcagaagaaacattggcgcaaatatgccatcagtttctgaaggtaaaggaagcggtacagtat

SEQ ID NO: 680963 - DNA, 75 bp, synthetic construct
  source 1..75: mol_type = other DNA
taatgttcctattggtcttgccattcctgcgtcgctgacaacgagggtgggaaacgcgcttatccagagttatga

SEQ ID NO: 680964 - DNA, 75 bp, synthetic construct
  source 1..75: mol_type = other DNA
ttatcagcgtgagagaacgccgcatcacttaccgccgtgaaggctacgaatatgactgcgttatgcctgtttatc

SEQ ID NO: 680965 - DNA, 75 bp, synthetic construct
  source 1..75: mol_type = other DNA
ggtgcagaaaccgctcaggctacggtcagagtctggatgcgatttcggcgcgatgtgacagcgacttcacgtctg

SEQ ID NO: 680966 - DNA, 75 bp, synthetic construct
  source 1..75: mol_type = other DNA
gaatataccttcaccgaagccggtctgcgcgccggctgccccgtcatcgttaaactatcattcaccgattttctg

SEQ ID NO: 680967 - DNA, 75 bp, synthetic construct
  source 1..75: mol_type = other DNA
gcaatgatttcaactcttggaatgtggtttgcttcaaaatggagaccacagtttaaggttaattggtctgaaatt

SEQ ID NO: 680968 - DNA, 75 bp, synthetic construct
  source 1..75: mol_type = other DNA
ttgcggctgtggtgaacggtaagcgctatgagtttaatccttgctttgctgcgatggctaaaatcggcaacgata

SEQ ID NO: 680969 - DNA, 75 bp, synthetic construct
  source 1..75: mol_type = other DNA
tttttcagaagagtataacagctcaaaagcgagaaaggaaaaacaatacctgcaatggtgcgcaaagaataagct

SEQ ID NO: 680970 - DNA, 75 bp, synthetic construct
  source 1..75: mol_type = other DNA
ccatagctataaataaaaaaatagaagcgattgcatcaaaggctagaaaccagctctttcttggcgaatcgctat

SEQ ID NO: 680971 - DNA, 75 bp, synthetic construct
  source 1..75: mol_type = other DNA
ttgcatggcaggctccagatacccatgactggcatgtcgtggggaatttacaggcacgtaatgctgaatatgtct

SEQ ID NO: 680972 - DNA, 75 bp, synthetic construct
  source 1..75: mol_type = other DNA
cgccggatgtggacatggctgacccgcaggcagacaacctgccgccggccaaaccgttcgatcagatcgaggagt

SEQ ID NO: 680973 - DNA, 75 bp, synthetic construct
  source 1..75: mol_type = other DNA
cgatgcagatgatccacgacgaattaccggggacgaccttctccaatcccggccagcgcggcgagtacgattccg

SEQ ID NO: 680974 - DNA, 75 bp, synthetic construct
  source 1..75: mol_type = other DNA
cttaccatcaggtattcagggaagggaaaatgttaaagactggattaaacaaaacttcctcaaattcaagttaat

SEQ ID NO: 680975 - DNA, 75 bp, synthetic construct
  source 1..75: mol_type = other DNA
agaggcggaaccaattgagatccttgctcgctctggcggtatgcgtagcactgaccaattgcaaatgtttaagcg

SEQ ID NO: 680976 - DNA, 75 bp, synthetic construct
  source 1..75: mol_type = other DNA
gcttatgacgagcaaatggaggccgctaaaaaggcactggaaagaatgaaaaatagcaagcaagaaaaagcccgg

SEQ ID NO: 680977 - DNA, 75 bp, synthetic construct
  source 1..75: mol_type = other DNA
tcggcggacgttatcattacacggctgcggggcaactggctcagcatgaagacacctctacggtgcagcttagcg

SEQ ID NO: 680978 - DNA, 75 bp, synthetic construct
  source 1..75: mol_type = other DNA
atgaacagtacccggaaagagaaatacagtgctttctgtcgtttactcaacgaaacacttaaatatgaattacgt

SEQ ID NO: 680979 - DNA, 75 bp, synthetic construct
  source 1..75: mol_type = other DNA
tttatccggccgggagtggaggtgacttacaggtaaccctgcaggaagctgatggcagtgtacagcgatttaatg

SEQ ID NO: 680980 - DNA, 75 bp, synthetic construct
  source 1..75: mol_type = other DNA
tttttgacagcgccagtcagaaacaactgtcagaagcgcagtcaaaagccctttcagcgcgttttaacacggcac

SEQ ID NO: 680981 - DNA, 75 bp, synthetic construct
  source 1..75: mol_type = other DNA
gcaggagcaccacgccgtcattctggtgtcgcctgccgtggtacagggagcgccggatatcacgcggcagatcca

SEQ ID NO: 680982 - DNA, 75 bp, synthetic construct
  source 1..75: mol_type = other DNA
gtggtacagggggcaccggatatcacccgggaaatccagcaggatattgcccggcgaatgagggcagaaccatga

SEQ ID NO: 680983 - DNA, 75 bp, synthetic construct
  source 1..75: mol_type = other DNA
tgaactgaaaggccaatggacgtggtttaaatacgccaatggtcaattatcagatacctttgctcatgatgacca

SEQ ID NO: 680984 - DNA, 75 bp, synthetic construct
  source 1..75: mol_type = other DNA
atgtagctttactccttcgggtaagttgaggctaaagcctggattaatgcccaccagcgacgttatcacactggc

SEQ ID NO: 680985 - DNA, 75 bp, synthetic construct
  source 1..75: mol_type = other DNA
gcaacactgcatgtaccacggtttaatcggtgacgggccggaagaaaatacaagcgagatccaggaaggtgaata

SEQ ID NO: 680986 - DNA, 75 bp, synthetic construct
  source 1..75: mol_type = other DNA
cctgatggtgctgattatctgggcgattgatccgcaatatcgcctgaatgcaatgattgccaccaccgtggtgtt

SEQ ID NO: 680987 - DNA, 75 bp, synthetic construct
  source 1..75: mol_type = other DNA
ggcccggtaaaagcgttctgggcatcgggcagcgaattgtttccatcatggttgaaatggtggagacacgtctgc

SEQ ID NO: 680988 - DNA, 75 bp, synthetic construct
  source 1..75: mol_type = other DNA
tatttcccggatattcatttaccgcaggtcaagtttaagcaacttcgccgcgtacccaacggcactgatgataaa

SEQ ID NO: 680989 - DNA, 75 bp, synthetic construct
  source 1..75: mol_type = other DNA
actatctacgtagtaacaagttgtttatacgcaaattttatccacaaacattgtttttatataatatgatgttaa

SEQ ID NO: 680990 - DNA, 75 bp, synthetic construct
  source 1..75: mol_type = other DNA
ctacaactgggcaccatcagcgatgaagacagagcagcacttacccaatggatggcatacatcagtcaggtgaag

SEQ ID NO: 680991 - DNA, 75 bp, synthetic construct
  source 1..75: mol_type = other DNA
tgccttttatcgatcagcagagaatttgtgcatcaatgcgagcgtcaacagtagagggaaaaaatgtttccccat

SEQ ID NO: 680992 - DNA, 75 bp, synthetic construct
  source 1..75: mol_type = other DNA
atgtatctggttgatgaaaggcgaaagttaatacttgaagacttaatgtcggcagggacggtctatgtcagtgat

SEQ ID NO: 680993 - DNA, 75 bp, synthetic construct
  source 1..75: mol_type = other DNA
atgaaaccatacattacacataacaatattcttgtggcaggttcaacactggagtatttcaaagaagttgttttc

SEQ ID NO: 680994 - DNA, 75 bp, synthetic construct
  source 1..75: mol_type = other DNA
tatagcagtatttcttcagcatgttatatgtgtgtcgacctgtagtcgtaaaaacaagaaaaaagcaaagattaa

SEQ ID NO: 680995 - DNA, 75 bp, synthetic construct
  source 1..75: mol_type = other DNA
gctttttgaagcaactatttccgggtaggcgtagcgactatctacagcgggaagatcgctatacctatctgacaa

SEQ ID NO: 680996 - DNA, 75 bp, synthetic construct
  source 1..75: mol_type = other DNA
cagtttcaaaacaatgcgcagttcagtctggcaggcagtggctacgtcaatatgggcgcttacgactatacgttg

SEQ ID NO: 680997 - DNA, 75 bp, synthetic construct
  source 1..75: mol_type = other DNA
ctaatcgcggtaacacttggttcgcaggtactcttgctactttagatctcgtaggattaactacagtgtttgttt

SEQ ID NO: 680998 - DNA, 75 bp, synthetic construct
  source 1..75: mol_type = other DNA
gcccacgctggcgcagcgctctttcatcattacattcagaaagataatactctgttacgaatgatgccccgccac

SEQ ID NO: 680999 - DNA, 75 bp, synthetic construct
  source 1..75: mol_type = other DNA
tgaaaacaagaaagatgctaatgaaactttagagttgaaaattattgagctccagatgaaaattaataatttaat

SEQ ID NO: 681000 - DNA, 75 bp, synthetic construct
  source 1..75: mol_type = other DNA
gattttcatcaccaagtcagatgtctggtgactcattaaaccgacagagaagacttattactgaatggctaaagg

SEQ ID NO: 681001 - DNA, 75 bp, synthetic construct
  source 1..75: mol_type = other DNA
ttttggctgcggaaaaattatatgctcaattgagaagcgggaaggccgcgaggccgaaattggctgctagctttt

SEQ ID NO: 681002 - DNA, 75 bp, synthetic construct
  source 1..75: mol_type = other DNA
cccaaaggggatgactttgaattcaatgagtactttattggtacaattgtattgtctggtgctgacagtgataat

SEQ ID NO: 681003 - DNA, 75 bp, synthetic construct
  source 1..75: mol_type = other DNA
ataatccatcggatgcatggcctattattgttgataataaaatcagtctaacctgccaccaatctcgcggtgagt

SEQ ID NO: 681004 - DNA, 75 bp, synthetic construct
  source 1..75: mol_type = other DNA
ataacaccaacaaatggtattacggaaatgctgatacaacttttgagccattaaaccctttacctgactactgca

SEQ ID NO: 681005 - DNA, 75 bp, synthetic construct
  source 1..75: mol_type = other DNA
tcgtgttggtgtttgtggttggttttcgggttctgacgtcaggcacccgacgggcgattcgccgtttaagcgaac

SEQ ID NO: 681006 - DNA, 75 bp, synthetic construct
  source 1..75: mol_type = other DNA
aaattggaattttagggagcaagttagtttattatcataataaaaatgtcattcaaggcttaggggggaaatatc

SEQ ID NO: 681007 - DNA, 75 bp, synthetic construct
  source 1..75: mol_type = other DNA
tataggggcaaatccagtcatcatttagccagatgtatgaagaattttaagacggatatctatttcgtttccacg

SEQ ID NO: 681008 - DNA, 75 bp, synthetic construct
  source 1..75: mol_type = other DNA
gttatttgcatcgcccggatgagtcgcacctgcaaaacgccgcgcaggtgttgctcatctggcaaattgtcattg

SEQ ID NO: 681009 - DNA, 75 bp, synthetic construct
  source 1..75: mol_type = other DNA
ccaatgcttttcaacgcgccgtttgccgtgtcgcagaaccaggcagatgcctcctacctgcaacagatggccctg

SEQ ID NO: 681010 - DNA, 75 bp, synthetic construct
  source 1..75: mol_type = other DNA
tggattggggattccaaaccctacagtgaaattaaaagctatgtcattcagttcagtcgtgtcgatggtgtcagc

SEQ ID NO: 681011 - DNA, 75 bp, synthetic construct
  source 1..75: mol_type = other DNA
gtgtggcagggcaacccaggtgaaacaaacatcctgccatcagcaagaatcaagtacatacgttctctggataga

SEQ ID NO: 681012 - DNA, 75 bp, synthetic construct
  source 1..75: mol_type = other DNA
acagaaatgaataatcgctctaactcttttggagagcgaattgtttccagtgaaaatgcgcgtgtcatttgcgcc

SEQ ID NO: 681013 - DNA, 75 bp, synthetic construct
  source 1..75: mol_type = other DNA
ggaataggagagaattcaagtttaattcgtcgtctggtcatggaacatttggctgtattaggcgtagagattgat

SEQ ID NO: 681014 - DNA, 75 bp, synthetic construct
  source 1..75: mol_type = other DNA
ttcgtcgtctggtcatggaacatttagccgtattaggcgttgagattgatgtggaaatgaataatcaatctaatt

SEQ ID NO: 681015 - DNA, 75 bp, synthetic construct
  source 1..75: mol_type = other DNA
tcggcagaaagaaggaagtgaaacaaaagagcgaaaagttaaaccagcggcagaattcgaacggtccatattcaa

SEQ ID NO: 681016 - DNA, 75 bp, synthetic construct
  source 1..75: mol_type = other DNA
cggtgctgacctacgcgaagctggacctgtgggcgaagtttcaggatttccaggtgcgcatccgtgacgccatcg

SEQ ID NO: 681017 - DNA, 75 bp, synthetic construct
  source 1..75: mol_type = other DNA
taccgctgcgcagcactggtggaaaacatccagattggagatttcagcgccgctgcagcagaagccggagcgtaa

SEQ ID NO: 681018 - DNA, 75 bp, synthetic construct
  source 1..75: mol_type = other DNA
cctgagcatatgagcggtacacaacatgctgcaactaagaatacttcaccatctctaatggctcaaaatccaaca

SEQ ID NO: 681019 - DNA, 75 bp, synthetic construct
  source 1..75: mol_type = other DNA
gtgactttgctagcgtcattgaggcggctggtgaagacgatgtgattttttgtgatccgccgtatgaaccgcttc

SEQ ID NO: 681020 - DNA, 75 bp, synthetic construct
  source 1..75: mol_type = other DNA
tgcgccgagccgaaaaaagaaggaaatcgcttccgccattattgcaaatggcgctgcaatcagtggcgaaagtct

SEQ ID NO: 681021 - DNA, 75 bp, synthetic construct
  source 1..75: mol_type = other DNA
actccgcaaccacgccggtggacccgtgtgttgccgagaaaatgatgcagtttatgacgatggacggaacctttg

SEQ ID NO: 681022 - DNA, 75 bp, synthetic construct
  source 1..75: mol_type = other DNA
tccatcggtcgtctgcgtgacctttctccgctgtgggaaatgtacaagcagggcgtggatctgaacagcatcgaa

SEQ ID NO: 681023 - DNA, 75 bp, synthetic construct
  source 1..75: mol_type = other DNA
tgacgacaccatccttgtttccatcatgcacgtaaataacgaaatcggcgtagtgcaggatatcgcggctatcgg

SEQ ID NO: 681024 - DNA, 75 bp, synthetic construct
  source 1..75: mol_type = other DNA
gaactgtccagcaagttcaccgtagagccgtccgtgcagcagacattggaagaccagatccagcagtccaccgct

SEQ ID NO: 681025 - DNA, 75 bp, synthetic construct
  source 1..75: mol_type = other DNA
ttaacgcttacctgcagcaactggcgcgcctgaatggtgtggaggttgaagaactctccagcaagttcaccgttg

SEQ ID NO: 681026 - DNA, 75 bp, synthetic construct
  source 1..75: mol_type = other DNA
agaccagatccagcagtccgcctctttcctgacgctgattaacgtcacaccagtgactgagcagtctggtcagtt

SEQ ID NO: 681027 - DNA, 75 bp, synthetic construct
  source 1..75: mol_type = other DNA
tacaaatagtggtgcgccaaacatccgtgaactatatgaaggaaacgggtttaaagtacatcatatggcagccag

SEQ ID NO: 681028 - DNA, 75 bp, synthetic construct
  source 1..75: mol_type = other DNA
gccataacggactatatcgttggatattacagcgcactaagaccgcacgaatataacggtgggttaccccaaacg

SEQ ID NO: 681029 - DNA, 75 bp, synthetic construct
  source 1..75: mol_type = other DNA
agaggcctgttcagcgatgcggatgcgtaccatccggaccaggcctttccgctgctgatgaaacaaccggaactc

SEQ ID NO: 681030 - DNA, 75 bp, synthetic construct
  source 1..75: mol_type = other DNA
tgtatttatggaccgcagcgaaaagtggcctggagaatccttgatgcccaatacttcggagtggcacaacgacgc

SEQ ID NO: 681031 - DNA, 75 bp, synthetic construct
  source 1..75: mol_type = other DNA
agaggcctgttcagcgatgcagatgcgtaccctctggaccaggcatttccgctgctgatgaaacaactgaaactc

SEQ ID NO: 681032 - DNA, 75 bp, synthetic construct
  source 1..75: mol_type = other DNA
agaggcctgttcagcgatgcagatgcgtaccctctggaccaggcatttccactgctgatgaaacaactggaactc

SEQ ID NO: 681033 - DNA, 75 bp, synthetic construct
  source 1..75: mol_type = other DNA
gtggcgcatcttggcaatggcgcgtcaatctgcgcagttcgcaacggtcagagtgttgatacctcaatgggaatg

SEQ ID NO: 681034 - DNA, 75 bp, synthetic construct
  source 1..75: mol_type = other DNA
tttgctgcactttattatccattcgacaaaccgcgtcgctggatcaattccggtggcctcggcacgatgggtttt

SEQ ID NO: 681035 - DNA, 75 bp, synthetic construct
  source 1..75: mol_type = other DNA
atgaccgaacgacgaataatctggcaaagtactgcccaaatgccactgttctgcatatcgatattgatcctactt

SEQ ID NO: 681036 - DNA, 75 bp, synthetic construct
  source 1..75: mol_type = other DNA
ttgaaagaaacggtggaggcgttgaatctgcccgttgtttcctcattgatgggcctgggggcatttccggcaacg

SEQ ID NO: 681037 - DNA, 75 bp, synthetic construct
  source 1..75: mol_type = other DNA
atgtacggcagcacgcaggctttttgccagaccggtaaagctgaccggtggctcataccatctgccgttactgat

SEQ ID NO: 681038 - DNA, 75 bp, synthetic construct
  source 1..75: mol_type = other DNA
caggtcctcgaacaaatgcttgaactcctgtcgcaagaatccgcccatcaaccactggatgagatccgcgactgg

SEQ ID NO: 681039 - DNA, 75 bp, synthetic construct
  source 1..75: mol_type = other DNA
atctgcccgttgtttcctcattgatggggctgggggcgtttccggcaacgcatcgtcaggcactgggcatgctgg

SEQ ID NO: 681040 - DNA, 75 bp, synthetic construct
  source 1..75: mol_type = other DNA
tgagcaaaatcaccgctgagggcggtagcgttatttctgacgtgattcgcgtcggtaagaatggcgactatgaga

SEQ ID NO: 681041 - DNA, 75 bp, synthetic construct
  source 1..75: mol_type = other DNA
cgaaagagcgtgaacctgtcgatcctacgctgatggtcgatgcggaatacaaatgcgagcagaccaactttgaca

SEQ ID NO: 681042 - DNA, 75 bp, synthetic construct
  source 1..75: mol_type = other DNA
gaagatgaagcgacctcatattgatccggaagcattgctgtttgtaaactggctctataatcattcctctgtgct

SEQ ID NO: 681043 - DNA, 75 bp, synthetic construct
  source 1..75: mol_type = other DNA
tgaatccggtatcccggggaccgcagttcatcactgtctctctgatcatcgcccttctcggcactgcatggtacg

SEQ ID NO: 681044 - DNA, 75 bp, synthetic construct
  source 1..75: mol_type = other DNA
atctggcacggcttcgtgctcggcggtagtgtgtgccactttctggcgatctatttgtatattgggcaggcgtaa

SEQ ID NO: 681045 - DNA, 75 bp, synthetic construct
  source 1..75: mol_type = other DNA
tggtgttactactggttcaggctgttgatctcaacgccagcgccacggcgataaccagttatagcctctatggcg

SEQ ID NO: 681046 - DNA, 75 bp, synthetic construct
  source 1..75: mol_type = other DNA
agggatattcgctggcagaggaaattgccaacagcgtcagtcacggcattgggttggtgtttggtatcgttgggc

SEQ ID NO: 681047 - DNA, 75 bp, synthetic construct
  source 1..75: mol_type = other DNA
gaaaggccgggtggcctggacattcgctttcggcgaagcttgcaaagttttggcgatgttggttttacttgtggt

SEQ ID NO: 681048 - DNA, 75 bp, synthetic construct
  source 1..75: mol_type = other DNA
aacgttttgtttatgatatttgcctggcgtcaccaggcgtatacaccagcgaaaggccgggtggcctggacattc

SEQ ID NO: 681049 - DNA, 75 bp, synthetic construct
  source 1..75: mol_type = other DNA
atgtttcgcaataacatcgctaatgatggcaaaggtggcgcaatttataccattaataatgacgtttatttaagt

SEQ ID NO: 681050 - DNA, 75 bp, synthetic construct
  source 1..75: mol_type = other DNA
agaagaacagcaaaggcgtaccgccatcgatcgaacaaccgcaggttttcgacccgactgaaacgccaaccagaa

SEQ ID NO: 681051 - DNA, 75 bp, synthetic construct
  source 1..75: mol_type = other DNA
taattcctgtacctcttctacatgggaaaaaggcctttctaactggtattgactggaataataaacctgcaagtt

SEQ ID NO: 681052 - DNA, 75 bp, synthetic construct
  source 1..75: mol_type = other DNA
tggcgatgttggtgttactggtggtggcgttggcggttttacaggcggtattcttgccgctgatcgttacgtggg

SEQ ID NO: 681053 - DNA, 75 bp, synthetic construct
  source 1..75: mol_type = other DNA
tggcggcagtatgatcctgctgttcctcgcttcgacgctctatcacgccattcctcatcaacgggcaaaaatgtg

SEQ ID NO: 681054 - DNA, 75 bp, synthetic construct
  source 1..75: mol_type = other DNA
gaggatgcaccggatcacgtaatgggcagcaccaccacgggcggtgaaaccacaccgggtgcggtgaaagtcggg

SEQ ID NO: 681055 - DNA, 75 bp, synthetic construct
  source 1..75: mol_type = other DNA
cgagctgaacggcatcgacgccggtgatgtgtcgaaaaaattcaccgttgaaccgtcggtcacccagaccctgat

SEQ ID NO: 681056 - DNA, 75 bp, synthetic construct
  source 1..75: mol_type = other DNA
tttctgacccgcatcaacattgtgccggtcagcgaaatgaaaggggaaaaaattggtattggtgtcaccggctcc

SEQ ID NO: 681057 - DNA, 75 bp, synthetic construct
  source 1..75: mol_type = other DNA
ggccgtcggctggctgcagaagtaccgcaacgaagctcctgcccgcgtgatgagcaacatcaccgacgctgacgg

SEQ ID NO: 681058 - DNA, 75 bp, synthetic construct
  source 1..75: mol_type = other DNA
tttctgaccaaaatcaatatcgtgccggtcgacgagctgaaaggcgaaaaagtcggggtcggcgtcaacggtacg

SEQ ID NO: 681059 - DNA, 75 bp, synthetic construct
  source 1..75: mol_type = other DNA
tcaatgcctatctgacccgcgtcgctgagctgaacggcatcagtactgatgatgtcagtaaaaaattcaccgtcg

SEQ ID NO: 681060 - DNA, 75 bp, synthetic construct
  source 1..75: mol_type = other DNA
ggatctcaatgccagcgccacggcgataaccagttacagcctttatggcggcagcatgatcctgctgtttctggc

SEQ ID NO: 681061 - DNA, 75 bp, synthetic construct
  source 1..75: mol_type = other DNA
tctacgtctgcaaacgcattccatacaaccatgccatctggcacggctttgtgctcggcggtagtgtgtgccact

SEQ ID NO: 681062 - DNA, 75 bp, synthetic construct
  source 1..75: mol_type = other DNA
atctggcacggctttgtgctcggcggcagcgtgtgccatttcctggcgatttatttgtatattgggcaggcgtaa

SEQ ID NO: 681063 - DNA, 75 bp, synthetic construct
  source 1..75: mol_type = other DNA
gtgggtaagggcggtgattatgtaagcctcgacgcactggtgatggatgcgaccaacaacctgattgaaccgtgg

SEQ ID NO: 681064 - DNA, 75 bp, synthetic construct
  source 1..75: mol_type = other DNA
tctccttcgctcaggctcgtgcttgtgcggaagcgggcgtgttcctgatctcgccatttgttggccgtattcttg

SEQ ID NO: 681065 - DNA, 75 bp, synthetic construct
  source 1..75: mol_type = other DNA
aagttatggttcagaagcccctcattaagcagggatattcgctggcagaggaaattgccaacagcgtcagtcacg

SEQ ID NO: 681066 - DNA, 75 bp, synthetic construct
  source 1..75: mol_type = other DNA
gtcaacaagtattcgaatgtgcggacgaaagcggttggcattggtatactcaacgtgcgggtggtcctggcactg

SEQ ID NO: 681067 - DNA, 75 bp, synthetic construct
  source 1..75: mol_type = other DNA
tctgactcccgtctgaaaattaacaaggaagaattacaggacggtgcattagagaaagtaaactccctgaaagta

SEQ ID NO: 681068 - DNA, 75 bp, synthetic construct
  source 1..75: mol_type = other DNA
tagtcaacgaattaacggaaggtaataactcattacgtctagatgatactggtcaagttacgttgtcagtaggta

SEQ ID NO: 681069 - DNA, 75 bp, synthetic construct
  source 1..75: mol_type = other DNA
tatcggcatcgccaaaaccggttattgatagcaccgataacagcggtctgcctgaaatgctcgtttcacccgtgg

SEQ ID NO: 681070 - DNA, 75 bp, synthetic construct
  source 1..75: mol_type = other DNA
attatccgtatgcgtggcgataacgccaacgggcagcaagcacgctgggaatttactatggatggtgactttacc

SEQ ID NO: 681071 - DNA, 75 bp, synthetic construct
  source 1..75: mol_type = other DNA
gatgctgatactaaaatcagtaaccttactggcactgtgaatagtaaccataccgctattaacaacaaggtagac

SEQ ID NO: 681072 - DNA, 75 bp, synthetic construct
  source 1..75: mol_type = other DNA
gtgattaaacgcgaagtcggtattattgctcaggatctggaagaagtattgccggaagcagtaggtattcaatcc

SEQ ID NO: 681073 - DNA, 75 bp, synthetic construct
  source 1..75: mol_type = other DNA
atgcaggaaatggacgccaaatataaagcgcagatcgaagcattacataaagagattgccgagctgaaagcaact

SEQ ID NO: 681074 - DNA, 75 bp, synthetic construct
  source 1..75: mol_type = other DNA
gaaaattaacaaggaagaattaaaggacggtgcattagagaaagtaaactcactgaaagtctacacctacgataa

SEQ ID NO: 681075 - DNA, 75 bp, synthetic construct
  source 1..75: mol_type = other DNA
taatcatcaaagcaatgcaggaaatggacgccaaatataaagcgcagatcgaagcattacagaaagagattgccg

SEQ ID NO: 681076 - DNA, 75 bp, synthetic construct
  source 1..75: mol_type = other DNA
atgctttaatcatcaaagctatgcaggaaatggacgccaaatataaagcccagatcgaagcattacagaaagaaa

SEQ ID NO: 681077 - DNA, 75 bp, synthetic construct
  source 1..75: mol_type = other DNA
tatctttaagcacaggtgctaccaaaattgtatacaccaatggtcaatatgtagctgctaacagtgatgcattcc

SEQ ID NO: 681078 - DNA, 75 bp, synthetic construct
  source 1..75: mol_type = other DNA
ctgaacctcccggaaaaacccgaaatcgccaacgagctggtaagccttgaatgttcgcaaactcattttcgctca

SEQ ID NO: 681079 - DNA, 75 bp, synthetic construct
  source 1..75: mol_type = other DNA
gcagcagaagcatttcaggagacacttaattatcagtctgaacctttaacacttggtaaggcaaataaaatcgca

SEQ ID NO: 681080 - DNA, 75 bp, synthetic construct
  source 1..75: mol_type = other DNA
accaaacgtagcggaactatcgcctttagcggcgcgtatcacgggcgcacgcattacacgctggcgctgaccggc

SEQ ID NO: 681081 - DNA, 75 bp, synthetic construct
  source 1..75: mol_type = other DNA
acctgcttccaggtgctggcttacgagccgtatctggagctgtgcgagatgatgaatcagaaggtgcctggagat

SEQ ID NO: 681082 - DNA, 75 bp, synthetic construct
  source 1..75: mol_type = other DNA
accagcgtggcgaggcagaatgaaacctgtaagcgtttgctggatattcctggcgttggaccacttattgcgacg

SEQ ID NO: 681083 - DNA, 75 bp, synthetic construct
  source 1..75: mol_type = other DNA
agagattacacaggataccccctgtgcagcagaaacatttaaggaagccattaagtctgacacttctgattatca

SEQ ID NO: 681084 - DNA, 75 bp, synthetic construct
  source 1..75: mol_type = other DNA
ttctggcttttatatttgttggcgttatggctatgttgatatgtggtcttttctacaatgattaccttgagcaac

SEQ ID NO: 681085 - DNA, 75 bp, synthetic construct
  source 1..75: mol_type = other DNA
taccatggcggctctgatctgtatcgcgcaaaatgacagccagcagttacttgatgaaatcgtgcaacaagaggg

SEQ ID NO: 681086 - DNA, 75 bp, synthetic construct
  source 1..75: mol_type = other DNA
gaaagctgctggcagcgttgcgccgacaaactcattgccgcagtgccaaagataccgaaagttcgccgtcctttt

SEQ ID NO: 681087 - DNA, 75 bp, synthetic construct
  source 1..75: mol_type = other DNA
acaaaaagctgcctgcacagcaaaaagcacgtgatgaatactggcatacgttgttacaaacgctgatggcatcgc

SEQ ID NO: 681088 - DNA, 75 bp, synthetic construct
  source 1..75: mol_type = other DNA
atccgaaagtggttgccgcggtggaagcgcagttgaaaaaactgtcgcacacctgcttccaggtgctggcttacg

SEQ ID NO: 681089 - DNA, 75 bp, synthetic construct
  source 1..75: mol_type = other DNA
gtaccgctcactattgaagacgctcagattcgtcaggggctggagatcatcggccagtgttttgctgaggcgaag

SEQ ID NO: 681090 - DNA, 75 bp, synthetic construct
  source 1..75: mol_type = other DNA
ctccgcagcggtcacatagaagcgttaattaacatatgggaaaatgacaactactcacgttatcgtccggaaaag

SEQ ID NO: 681091 - DNA, 75 bp, synthetic construct
  source 1..75: mol_type = other DNA
ttgcccccaatcaaaagattcagcacataacatctggaaagctactcattggggtcaatatcacattgcagcaat

SEQ ID NO: 681092 - DNA, 75 bp, synthetic construct
  source 1..75: mol_type = other DNA
ttaaacaacgtgtaatggctgccagagagcgccaatttaagcggcagaataagttgaacgcctggctggatagtc

SEQ ID NO: 681093 - DNA, 75 bp, synthetic construct
  source 1..75: mol_type = other DNA
ggttctttatgctctcgggcattctgagtctctaccccgggtagctgcccggttaagttcagtggcaaaacagtg

SEQ ID NO: 681094 - DNA, 75 bp, synthetic construct
  source 1..75: mol_type = other DNA
tctcacaccagcctctcacactggattaatctttttcttcttcacggtcctcgggcactggattgcagacacaag

SEQ ID NO: 681095 - DNA, 75 bp, synthetic construct
  source 1..75: mol_type = other DNA
ctggatgtgcggttacttgatcactttatcgtggcaggaactgaaacggtgtcgatggctgagcgaggactggtg

SEQ ID NO: 681096 - DNA, 75 bp, synthetic construct
  source 1..75: mol_type = other DNA
caggcttacggggatagctacagggttaggctagggaaggttgttcgtgaaatgggagatcctcgcgccagtcag

SEQ ID NO: 681097 - DNA, 75 bp, synthetic construct
  source 1..75: mol_type = other DNA
ttcacaggtcagcccttttgcatacagcgtgacggtatgctgatggcggggattcagttcaccgctggtgagcat

SEQ ID NO: 681098 - DNA, 75 bp, synthetic construct
  source 1..75: mol_type = other DNA
gtcaaaaacgcgcaaatagcctcagtaaaagtgcagtatcttgataaacagaaaaagctggctgtaatgggtgat

SEQ ID NO: 681099 - DNA, 75 bp, synthetic construct
  source 1..75: mol_type = other DNA
gttgaaatgacctgtatgcaaaatggtccagtacagagcaaaacgtattccagcaaagagttaatgagtggcaaa

SEQ ID NO: 681100 - DNA, 75 bp, synthetic construct
  source 1..75: mol_type = other DNA
accagcagggagaaagcacgcgccaatattcaggaaataaaaaagatgcttaacgtattcaggggtaagaaatga

SEQ ID NO: 681101 - DNA, 75 bp, synthetic construct
  source 1..75: mol_type = other DNA
ggttaaaaactggataaaaggctaccacaaatctggtgatgaggcctttatcaggcgcaggaaggagaaaagcat

SEQ ID NO: 681102 - DNA, 75 bp, synthetic construct
  source 1..75: mol_type = other DNA
ccgccgcagcggacacgttattgattctgggtgatagcctgagcgccgggtatcgaatgtctgccagcgcggcct

SEQ ID NO: 681103 - DNA, 75 bp, synthetic construct
  source 1..75: mol_type = other DNA
ctgccagcggccccgctcggcctgaaatccgccccggagatattttcagagataactacggtggcgttgttgaga

SEQ ID NO: 681104 - DNA, 75 bp, synthetic construct
  source 1..75: mol_type = other DNA
atggtttacgcgcatctttcgccagactatctgcaaaatgctgtctcactaaatccgcttgccggtggcgtatcg

SEQ ID NO: 681105 - DNA, 75 bp, synthetic construct
  source 1..75: mol_type = other DNA
agctaactatttggaagaccagacagcgagagatcttaactactttggtgctttccgtaccaatggtcaagatgg

SEQ ID NO: 681106 - DNA, 75 bp, synthetic construct
  source 1..75: mol_type = other DNA
acgaagatcaccaatcttacggggacagttaatagcaaccatacagcaattaacaacaaggtagaccagaataaa

SEQ ID NO: 681107 - DNA, 75 bp, synthetic construct
  source 1..75: mol_type = other DNA
aacgacgaaggatcgaaatctgtattctttgttaaatcttggggtaatgaaactcgcgctcaggtgtgggaactt

SEQ ID NO: 681108 - DNA, 75 bp, synthetic construct
  source 1..75: mol_type = other DNA
gtcgcactggtaataagcatatctggtttagagatccaactggattagaactaggtttgatgtattccgatgatg

SEQ ID NO: 681109 - DNA, 75 bp, synthetic construct
  source 1..75: mol_type = other DNA
ggatcggttatgccaatgctgatactaacgtttttgaatggtatagcgatgtgggtggtagttctattcgtcacc

SEQ ID NO: 681110 - DNA, 75 bp, synthetic construct
  source 1..75: mol_type = other DNA
agcgaaaacgtatctgcatatttcaaattggcaaccgcaacaattccacaaaacgggcgtagtgtgtttttccgt

SEQ ID NO: 681111 - DNA, 75 bp, synthetic construct
  source 1..75: mol_type = other DNA
gtggtttctttgaaaagctgattgatgttgaagagtttgtgggtgataacccgtttcacgagatacgcaagctaa

SEQ ID NO: 681112 - DNA, 75 bp, synthetic construct
  source 1..75: mol_type = other DNA
ggaaacaaaaaatgggaagcgtcgcgttatacctatatcgtcagaactggagtgcatgattaagactaaggctac

SEQ ID NO: 681113 - DNA, 75 bp, synthetic construct
  source 1..75: mol_type = other DNA
catcggtgacatacccgttagccgcgtgagcaaacggcttctgatggactaccgttctatgcgacttcgtgacgg

SEQ ID NO: 681114 - DNA, 75 bp, synthetic construct
  source 1..75: mol_type = other DNA
tactgtatatggtaactatggttcatggtggcgaaatgacggtagtaacgtttatctgatgagcacaaaatcagg

SEQ ID NO: 681115 - DNA, 75 bp, synthetic construct
  source 1..75: mol_type = other DNA
ccgatttacctaaaggtcaggcactgcatgttttgcggcacaccttcgcaactcatttcatgatcaatggcggga

SEQ ID NO: 681116 - DNA, 75 bp, synthetic construct
  source 1..75: mol_type = other DNA
accctgaccggcgatgatcggcgcgtggcgctgttatgcctcagcactggcgcacgttggggagaaggcagcacc

SEQ ID NO: 681117 - DNA, 75 bp, synthetic construct
  source 1..75: mol_type = other DNA
gttggcaatgccgcaatacattctggatatgctcgatgaaaaaggtatcgcctggagtctgcatagcgccatcga

SEQ ID NO: 681118 - DNA, 75 bp, synthetic construct
  source 1..75: mol_type = other DNA
atgaaaaagggatcgcatggagtctgcacagctctattgaagaagtgatggcggaagtagacatcctgtacatga

SEQ ID NO: 681119 - DNA, 75 bp, synthetic construct
  source 1..75: mol_type = other DNA
gtaccgatccagtcaagttcaacacatggtcgataaagtcaaaactcataatcataatcagaaagctgatgattg

SEQ ID NO: 681120 - DNA, 75 bp, synthetic construct
  source 1..75: mol_type = other DNA
catcgtatctgggatcacgtctgcgccgtatcaccgacattaaaactgaacgcctcgccgctctcgccgctgcac

SEQ ID NO: 681121 - DNA, 75 bp, synthetic construct
  source 1..75: mol_type = other DNA
aacgtcgtttatttctttgtggaaaaacgcagaccgctggcactggggaaaatcaccaaaaacatccgtatcact

SEQ ID NO: 681122 - DNA, 75 bp, synthetic construct
  source 1..75: mol_type = other DNA
agcatccgacgcaaactctgttggatctgttcactattcaggaaacccagggacgcctggacaatcttcgcgttg

SEQ ID NO: 681123 - DNA, 75 bp, synthetic construct
  source 1..75: mol_type = other DNA
caccgacgagctgcgcggcgtggatggcatgagcgagcagatagaatttcgtatcaggcagatgctgctgggtaa

SEQ ID NO: 681124 - DNA, 75 bp, synthetic construct
  source 1..75: mol_type = other DNA
cccggctgccggatcgttttacgcgctggccttcgttacgctgtgcggattcaacctcgccaaagccactgctca

SEQ ID NO: 681125 - DNA, 75 bp, synthetic construct
  source 1..75: mol_type = other DNA
gctgttttagttaagcctcttgtgcgtcgggctaaattgcttgaattgattgcaacacttccagcatgtctgatt

SEQ ID NO: 681126 - DNA, 75 bp, synthetic construct
  source 1..75: mol_type = other DNA
ccggaagagcagcagctttcaccggcggccatcagccgggaagcctcccgtaatgagctgattgcccgtaacctg

SEQ ID NO: 681127 - DNA, 75 bp, synthetic construct
  source 1..75: mol_type = other DNA
agaactgcgcgggcaggatggcatcagcgaagagctggagcagcgcatccgtgatgtgctgctgggtaaggcatg

SEQ ID NO: 681128 - DNA, 75 bp, synthetic construct
  source 1..75: mol_type = other DNA
ggtcaccgacgagctgcgcggcgtggacgggatgagcgagcagatcgaattccgtatcaggcagatgctgctggg

SEQ ID NO: 681129 - DNA, 75 bp, synthetic construct
  source 1..75: mol_type = other DNA
caccaatagttcgcaaaaaacaggttggtgaaaaaatagaatgggatctgattcaagacggtgttggcgggtacc

SEQ ID NO: 681130 - DNA, 75 bp, synthetic construct
  source 1..75: mol_type = other DNA
tgagattgagtgagattcttttccctgccagtaaatacggctctgatgctttctttaatgagttcgaagcaataa

SEQ ID NO: 681131 - DNA, 75 bp, synthetic construct
  source 1..75: mol_type = other DNA
atgaaatatcaggtgagagaatttattactgataaatatgcgaaggctgttaatattttaaaggataaccttaaa

SEQ ID NO: 681132 - DNA, 75 bp, synthetic construct
  source 1..75: mol_type = other DNA
ttaacgaaaaatattctaaggctgttaacattttaaaggataacctcaaagaacactaccatgttttttatggtt

SEQ ID NO: 681133 - DNA, 75 bp, synthetic construct
  source 1..75: mol_type = other DNA
cttcgctaatgcacatcatgctttatataaccttccttgcacttcctctgctggggattgctttaatggcttaca

SEQ ID NO: 681134 - DNA, 75 bp, synthetic construct
  source 1..75: mol_type = other DNA
atgacaaacatgatctcatatcagggacttgttcgcaccttccctaaaggtagtagtacttatctgctgatgcga

SEQ ID NO: 681135 - DNA, 75 bp, synthetic construct
  source 1..75: mol_type = other DNA
aaatataggctactttttaatcgtagctcacgctggcgcagcactctttcatcactacattcagaaagataatac

SEQ ID NO: 681136 - DNA, 75 bp, synthetic construct
  source 1..75: mol_type = other DNA
accaaccttgaaactgacagcctgacctatcttgccgacgtgacggttaatggcaatctgaccaatacgtccggt

SEQ ID NO: 681137 - DNA, 75 bp, synthetic construct
  source 1..75: mol_type = other DNA
catatggccacacggattacatatcaaaaaataacaaaggggcactggtaatggaaaaagaggcctccaaaaagt

SEQ ID NO: 681138 - DNA, 75 bp, synthetic construct
  source 1..75: mol_type = other DNA
ccctctcggattcagcgccgatattttcatgggcctgtacgacaatccggaataccgccagaggaataaagctga

SEQ ID NO: 681139 - DNA, 75 bp, synthetic construct
  source 1..75: mol_type = other DNA
tgaacagcttcggttaaaattagatgatctagggttaaagaatataaaaattagacgttccatatgtacctacaa

SEQ ID NO: 681140 - DNA, 75 bp, synthetic construct
  source 1..75: mol_type = other DNA
atttgttgtttctgttctgatggagatcgttccaacatgtggagcgagtatggtgataatggcaaaggcgttgct

SEQ ID NO: 681141 - DNA, 75 bp, synthetic construct
  source 1..75: mol_type = other DNA
taaatagtgattattaccttgataccgtaacgtatgaagatttggggttaagcgcattcaatggaaagcatgcac

SEQ ID NO: 681142 - DNA, 75 bp, synthetic construct
  source 1..75: mol_type = other DNA
ttcagggggataggcccgatgactgcaacagcaatcgttgccagcataggtaatggtcatgatttcaagaacgga

SEQ ID NO: 681143 - DNA, 75 bp, synthetic construct
  source 1..75: mol_type = other DNA
tatcaggatatgggcgtcaccatctacctgactccagatggtaagcacgctatctccggttacatgtacaacgag

SEQ ID NO: 681144 - DNA, 75 bp, synthetic construct
  source 1..75: mol_type = other DNA
atgttaaaaaagatacttttactggctctgcttcctgcaatcgccttcgcagaggaacttccttccccagtaaaa

SEQ ID NO: 681145 - DNA, 75 bp, synthetic construct
  source 1..75: mol_type = other DNA
tctgtggataaccgaactgaaaaaacgtcgtccggtcggcgtggcaaccgtcgccatggcaaacaagctggcacg

SEQ ID NO: 681146 - DNA, 75 bp, synthetic construct
  source 1..75: mol_type = other DNA
ccttacttcccggagccgctttcgcagaggaacttcccgcgcctgtaaaatcaattgaaaaacaaggcattacaa

SEQ ID NO: 681147 - DNA, 75 bp, synthetic construct
  source 1..75: mol_type = other DNA
aaacgtaagtacagagcaaatgaaagtgttaagcgacaacgagaaactgatggacgatctgggggcaaatgtcac

SEQ ID NO: 681148 - DNA, 75 bp, synthetic construct
  source 1..75: mol_type = other DNA
taagcgacaacgagaaactcatggacgatctgggggcaaatgtcacaccagctatctattacatgagtaaggaaa

SEQ ID NO: 681149 - DNA, 75 bp, synthetic construct
  source 1..75: mol_type = other DNA
attacggttctggaagaccagtacaaccgtctgagtgagctggactcactgatagatgatatcgaaaaacagctt

SEQ ID NO: 681150 - DNA, 75 bp, synthetic construct
  source 1..75: mol_type = other DNA
gaaagagagactgccactgtctctcattacagtgctggaaaatcagtacaacaggctgaatgaactggactcact

SEQ ID NO: 681151 - DNA, 75 bp, synthetic construct
  source 1..75: mol_type = other DNA
ataaacatgctggatgaacaatatcagcgaattactgaacttgatgaacatcttgaccacattgagaagcagctg

SEQ ID NO: 681152 - DNA, 75 bp, synthetic construct
  source 1..75: mol_type = other DNA
cctgtaagcggttgctggatattcccggcgttgggccacttattgcgacggcagcggtggccaccatgggggaag

SEQ ID NO: 681153 - DNA, 75 bp, synthetic construct
  source 1..75: mol_type = other DNA
cggtgtggggccgttaatcgctacggcggcggtcgccaccatgggaaaggcctcagcatttaaatccggacgtga

SEQ ID NO: 681154 - DNA, 75 bp, synthetic construct
  source 1..75: mol_type = other DNA
actggttctgcaccgtacccgcatgcaactggtgaagttccggaccgcacaaattaatgccctgcacgggacgtt

SEQ ID NO: 681155 - DNA, 75 bp, synthetic construct
  source 1..75: mol_type = other DNA
agcaagcgcgcccgtgggtagaatcaggtaaagttcagcttcgaactctgctggtcggcgtgataaaaccagaaa

SEQ ID NO: 681156 - DNA, 75 bp, synthetic construct
  source 1..75: mol_type = other DNA
acaacagatattaaagctttttttccatcaactacaagagggatgatattttcttttttcttttcggtgatgaaa

SEQ ID NO: 681157 - DNA, 75 bp, synthetic construct
  source 1..75: mol_type = other DNA
tttttctgccggtccccggacagagcacaaaggaagtcgccgccggctccgctttacccggccatgcaggcatgg

SEQ ID NO: 681158 - DNA, 75 bp, synthetic construct
  source 1..75: mol_type = other DNA
ctggccgactttcccgcagctgtgggttgacggcgagttggtaggcggctgtgatatcgtgatcgaaatgtatca

SEQ ID NO: 681159 - DNA, 75 bp, synthetic construct
  source 1..75: mol_type = other DNA
aaagcaaaattccccattctgctgggaaatatctactacaccgatacgaataaaccagtttgggatcatccgtgg

SEQ ID NO: 681160 - DNA, 75 bp, synthetic construct
  source 1..75: mol_type = other DNA
ttttcaggttcattactcctgtgcatactttctccaataataataagatatggagtcggagataaatatactgag

SEQ ID NO: 681161 - DNA, 75 bp, synthetic construct
  source 1..75: mol_type = other DNA
gcagtcgccggaaaagcgccccataattttagaggcgcagaatgtgtggataacctacaaaggaaagctaccggg

SEQ ID NO: 681162 - DNA, 75 bp, synthetic construct
  source 1..75: mol_type = other DNA
cagcagccggtaaaatccgtcgccgttaaaagcgaggagcaacaggctacgctggggttacaccgaatgcgccag

SEQ ID NO: 681163 - DNA, 75 bp, synthetic construct
  source 1..75: mol_type = other DNA
actgggcacgtgagctgaaaaaactggggcacgaagttcggctgttgcaggctcgcttcgttaaagcgttcgtta

SEQ ID NO: 681164 - DNA, 75 bp, synthetic construct
  source 1..75: mol_type = other DNA
gcgatctattacatgagtaaggaaaatacgctgcaacaggccgtggggttgcccgatcagaaaacgcttaatatc

SEQ ID NO: 681165 - DNA, 75 bp, synthetic construct
  source 1..75: mol_type = other DNA
gctgcggcgcattgattttgctgaagcagaaaatcttgcgcagcgtagtctggaagcgcaactggcgaccgaagt

SEQ ID NO: 681166 - DNA, 75 bp, synthetic construct
  source 1..75: mol_type = other DNA
gaatattctattgccgatggtcacaagcctcgatgaagttgacgaagcacgccgcctgattgaacgtgccggacg

SEQ ID NO: 681167 - DNA, 75 bp, synthetic construct
  source 1..75: mol_type = other DNA
atgatgtatcgcatcagaaattggttggtagcgacgctgctgctgctgtgcacgccggtgggtgccgcgacgctc

SEQ ID NO: 681168 - DNA, 75 bp, synthetic construct
  source 1..75: mol_type = other DNA
aacggaaacacatttattgctgatgctatgttggatcttgataccgctaaactagttagtgatgttttgtctagt

SEQ ID NO: 681169 - DNA, 75 bp, synthetic construct
  source 1..75: mol_type = other DNA
cggtgagggtaatccggtcagcgtggaggtccagtccgtcaccgacggcgtgaaggtgaaagtgagccgtgttcc

SEQ ID NO: 681170 - DNA, 75 bp, synthetic construct
  source 1..75: mol_type = other DNA
cgcgctgggatacgccgaaggtggtgaagggcgtgagctttatgcttcgcctgaccgtggcagcggatgacggca

SEQ ID NO: 681171 - DNA, 75 bp, synthetic construct
  source 1..75: mol_type = other DNA
ctgcgtcgtcgcctgttccgctgtgtctccatccgggaaaacacggacggcacctttgccatcacggcggtgcag

SEQ ID NO: 681172 - DNA, 75 bp, synthetic construct
  source 1..75: mol_type = other DNA
cggtaagccggtgagcgtggccatcactgcacaccccgcgccggaccggatacaggtcagcaccctgcctgatgg

SEQ ID NO: 681173 - DNA, 75 bp, synthetic construct
  source 1..75: mol_type = other DNA
aacgcggattaccgatatcaggcaggttgaaaccacagcccgctatcttggcacggcgctgtactggatagccac

SEQ ID NO: 681174 - DNA, 75 bp, synthetic construct
  source 1..75: mol_type = other DNA
gcttggcctcagcatggaggatacggaggaaggcaaactgagccagttcctggttgccgctaaccgtatcgcgtt

SEQ ID NO: 681175 - DNA, 75 bp, synthetic construct
  source 1..75: mol_type = other DNA
gtgcggcaattcagcagatacagaaggttcaggttgatacaaataataacctgaacagcatgtgggctgtgaagc

SEQ ID NO: 681176 - DNA, 75 bp, synthetic construct
  source 1..75: mol_type = other DNA
ggcagttatgccagcggtacaataacggtcactgtgtacgatgaccaggcttttgaccgtcagatagtcgtcccc

SEQ ID NO: 681177 - DNA, 75 bp, synthetic construct
  source 1..75: mol_type = other DNA
gaagggcgtgcgcttcagtctgcgcctgaccagtggtaagggaacggatgccagactggtgaccaccgccatcac

SEQ ID NO: 681178 - DNA, 75 bp, synthetic construct
  source 1..75: mol_type = other DNA
acatcaccgaacaccccgcgccggaccggatacaggtcagtaccctgcctgatggtgtggagacatacggggtgt

SEQ ID NO: 681179 - DNA, 75 bp, synthetic construct
  source 1..75: mol_type = other DNA
atgcgtttggctgtaccagccgcggtcaggcccaccgtgccggactgtgggtgataaagaccgaactgctggaaa

SEQ ID NO: 681180 - DNA, 75 bp, synthetic construct
  source 1..75: mol_type = other DNA
ctgggacacgccgaaggtggtgaagggggtgagctttatgcttcgcctgaccgtggcagcggatgacggcagtga

SEQ ID NO: 681181 - DNA, 75 bp, synthetic construct
  source 1..75: mol_type = other DNA
ggacgcaacctgctgaagatggacgcgttcggctgtaccagccgcggtcaggcccaccgtgccggactgtgggtg

SEQ ID NO: 681182 - DNA, 75 bp, synthetic construct
  source 1..75: mol_type = other DNA
gctattttcagataacagcggtcccgcgtcttgcggtgtatgacccgacggtacagtttgaattctggttttcgg

SEQ ID NO: 681183 - DNA, 75 bp, synthetic construct
  source 1..75: mol_type = other DNA
attgaaatctgtgataacgactatgccgggaccctgaccggcggacgtgtcctgtccattgatgccgccagccgc

SEQ ID NO: 681184 - DNA, 75 bp, synthetic construct
  source 1..75: mol_type = other DNA
cggattgcgatgattaatcctgcgaatggcaacacaaagccgatgtttgttggtcagggcgatcagatattcatg

SEQ ID NO: 681185 - DNA, 75 bp, synthetic construct
  source 1..75: mol_type = other DNA
gccagtatctggcgcaggcgaaatgggacacgccgcgggtggtgaagggcgtgcgcttcagtctgcgcctgacca

SEQ ID NO: 681186 - DNA, 75 bp, synthetic construct
  source 1..75: mol_type = other DNA
gctgcagcagatgcaggacggacgcctttatattgcgggtatcggtgccggtattgagaatacgccagcaggaat

SEQ ID NO: 681187 - DNA, 75 bp, synthetic construct
  source 1..75: mol_type = other DNA
ggcagcggtaagccagtgagtgtggacatcaccgaacaccccgcgccggaccggatacaggtcagtaccctgcct

SEQ ID NO: 681188 - DNA, 75 bp, synthetic construct
  source 1..75: mol_type = other DNA
atcagctgttcatgaacgacgtgttcctgaagcgtctgtttgcggcgagtatcacgtcatccggcaaccccccga

SEQ ID NO: 681189 - DNA, 75 bp, synthetic construct
  source 1..75: mol_type = other DNA
agccagccagttatttctctggcgtaagcaataccaggaaggaagtcttaccgctgtcgccgccggagaacaggt

SEQ ID NO: 681190 - DNA, 75 bp, synthetic construct
  source 1..75: mol_type = other DNA
aatgagaactgtcagattaaggggaaactgtcagccaaccagattgaaggcgatattgtcaaaacggtcagcaag

SEQ ID NO: 681191 - DNA, 75 bp, synthetic construct
  source 1..75: mol_type = other DNA
agggacgctcaacaatgtcacaattaatgagaactgtcagattaaggggaaactgtcagccaaccagattgaagg

SEQ ID NO: 681192 - DNA, 75 bp, synthetic construct
  source 1..75: mol_type = other DNA
ccaatatctccggtgtcacggtggtgttccgggcaggtgagcaggagcagtcaccgccggagggatttgaatcct

SEQ ID NO: 681193 - DNA, 75 bp, synthetic construct
  source 1..75: mol_type = other DNA
atgtcacgattaaccagaactgtacgattaagggcatgctggaggcgacccaggtcagaggggatttcgttaaag

SEQ ID NO: 681194 - DNA, 75 bp, synthetic construct
  source 1..75: mol_type = other DNA
tacggacgtaatgtcacccggatggaggcctttggctgtaccagccggggacaggcgcaccgcgccgggctgtgg

SEQ ID NO: 681195 - DNA, 75 bp, synthetic construct
  source 1..75: mol_type = other DNA
gtgccggtattgagaacacccctgacggcatgcagagtcaggtgcttctggctgctgaccggattgcgatgatta

SEQ ID NO: 681196 - DNA, 75 bp, synthetic construct
  source 1..75: mol_type = other DNA
cagtgcggttattgatatgccgagtggcaggggaagcgtcactctggagtttaaggttttccataaaggcaatca

SEQ ID NO: 681197 - DNA, 75 bp, synthetic construct
  source 1..75: mol_type = other DNA
gcgtggctggtgaatgactggtatcccacggcaagcatcagcgatttgctggttgtggtgatgaagaaatccaca

SEQ ID NO: 681198 - DNA, 75 bp, synthetic construct
  source 1..75: mol_type = other DNA
gttaacatcagtacgtcagggaatgacggcaggagaagtggctgcccactttggctggccgctggaaaaagccag

SEQ ID NO: 681199 - DNA, 75 bp, synthetic construct
  source 1..75: mol_type = other DNA
aacgacgtgttcctgaagcgcctgacagcccccgccattaccagcggtggcagtcctccggtattttccctgaca

SEQ ID NO: 681200 - DNA, 75 bp, synthetic construct
  source 1..75: mol_type = other DNA
gacggtcagtatctggcgcaggcgaaatgggacacgccgcgggtggtgaaaggtgtgagcttcagtctgcgcctg

SEQ ID NO: 681201 - DNA, 75 bp, synthetic construct
  source 1..75: mol_type = other DNA
tccagaaaggcaatcagggcgcaggtaacatcacagactgtacagtgattgtgaccaaaaaagctgcttccggta

SEQ ID NO: 681202 - DNA, 75 bp, synthetic construct
  source 1..75: mol_type = other DNA
ccgaacggttcgtgaaaacgatgaaagaagactatatcgcgttcatgccaaaaccggatgtgagaacagcactgc

SEQ ID NO: 681203 - DNA, 75 bp, synthetic construct
  source 1..75: mol_type = other DNA
cccgaatcagcagtcgtactggtattccacctgtcagctgcaggtattaaataacggtcgggtgatttttcatga

SEQ ID NO: 681204 - DNA, 75 bp, synthetic construct
  source 1..75: mol_type = other DNA
aaaatgcggatatcagtggtagtgtgaatgcgaactcaggaacgctcaacaatgtcacgattaaccagaactgta

SEQ ID NO: 681205 - DNA, 75 bp, synthetic construct
  source 1..75: mol_type = other DNA
ggtggcattcagcggcgctaaacatgagagagagcatactgatatttactcctcatgccgtctgatagtgcggaa

SEQ ID NO: 681206 - DNA, 75 bp, synthetic construct
  source 1..75: mol_type = other DNA
gggacgctgacactgacattcaccgtatcttcatcaggagcgaataactggacaccaacaaccagtatcagcgat

SEQ ID NO: 681207 - DNA, 75 bp, synthetic construct
  source 1..75: mol_type = other DNA
ctatgttgccggtattggagcggggattgaggatactgatggccagcccctgagcaacatactgctgctggctga

SEQ ID NO: 681208 - DNA, 75 bp, synthetic construct
  source 1..75: mol_type = other DNA
ctggactgttgtgatcgtgaagccatcgactgggcagccagtacgggaggttacgataaagcgacagtacaggat

SEQ ID NO: 681209 - DNA, 75 bp, synthetic construct
  source 1..75: mol_type = other DNA
gccatgaagcagattaaagaactccagcgcctgatcggcaaaaaaacgatggaaaatgaactccttaaagaagcc

SEQ ID NO: 681210 - DNA, 75 bp, synthetic construct
  source 1..75: mol_type = other DNA
aaagtgagccgggttcctgacggcgttgccgaatacagcgtgtgggggctgaagctgccgacgctgcgccagcgc

SEQ ID NO: 681211 - DNA, 75 bp, synthetic construct
  source 1..75: mol_type = other DNA
cacggacggcacctttgccatcacggcggtgcagcacgtaccggaaaaagaagccatcgtggataacggtgcccg

SEQ ID NO: 681212 - DNA, 75 bp, synthetic construct
  source 1..75: mol_type = other DNA
ccgggctgtggctgattaaaacggagctgctggaaacgcagaccgtggacttcagcgtgggtgccgaagggcttc

SEQ ID NO: 681213 - DNA, 75 bp, synthetic construct
  source 1..75: mol_type = other DNA
ctccggcccgcacattaagccggggaaggatttctggttttatgtgcgcagcgtcaacctggtggggaaatctgc

SEQ ID NO: 681214 - DNA, 75 bp, synthetic construct
  source 1..75: mol_type = other DNA
agaaacccgcaatgaaatcacacagacggtcagtaaaaccctggaagaccagagtgccaccatacagcagataca

SEQ ID NO: 681215 - DNA, 75 bp, synthetic construct
  source 1..75: mol_type = other DNA
ctttacatgctgaaggtacagaaaacaaaaaatggcataccctatgttgccggtattggagcggggattgaggat

SEQ ID NO: 681216 - DNA, 75 bp, synthetic construct
  source 1..75: mol_type = other DNA
tcaacagtaataaccaacagtcatactggtattcaacctgccggttaagagtgacccgcaatggtcaggagattt

SEQ ID NO: 681217 - DNA, 75 bp, synthetic construct
  source 1..75: mol_type = other DNA
ctatctggattttttcaaaggcgagatagggaaaacccatctggctcaggagctgtggacgcagattgataacgg

SEQ ID NO: 681218 - DNA, 75 bp, synthetic construct
  source 1..75: mol_type = other DNA
cagtggcggtaatcctccggcattttccctgacatcggacgggcggctgacggctaaaaatgcggatatcagtgg

SEQ ID NO: 681219 - DNA, 75 bp, synthetic construct
  source 1..75: mol_type = other DNA
gattgaaggcgatatagtcaaaacagtgggtaaggcttttccgcgggactcccgggcaccggagcggtggccatc

SEQ ID NO: 681220 - DNA, 75 bp, synthetic construct
  source 1..75: mol_type = other DNA
agaacattattggtgatcttgtgaaatgtgcaggggtggcttttccggtggatggtagttaccttgcgaacggta

SEQ ID NO: 681221 - DNA, 75 bp, synthetic construct
  source 1..75: mol_type = other DNA
tggcaaatcggcatttgtggaggccgtcggccagccgagtgatgatgcatccggctatctggattttttcaaagg

SEQ ID NO: 681222 - DNA, 75 bp, synthetic construct
  source 1..75: mol_type = other DNA
aatagtctgttgttgttacatgacaaaccatcacgacggcagcgggaacataaaggccgaatatcggtgaaggaa

SEQ ID NO: 681223 - DNA, 75 bp, synthetic construct
  source 1..75: mol_type = other DNA
gaaaacaaaaaacggtattccctatgtggccgggattggagcggggattgaggatgttgatggtcagacgctgag

SEQ ID NO: 681224 - DNA, 75 bp, synthetic construct
  source 1..75: mol_type = other DNA
gaaaaacggtgctgaaatttataaccgtaccgcggtggataatacgctggtttacagtggtgttattgatatgcc

SEQ ID NO: 681225 - DNA, 75 bp, synthetic construct
  source 1..75: mol_type = other DNA
acagtttgagttctggttttcggaaaagcggattaccgatatcaggcaggttgaaaccacagcccgctatcttgg

SEQ ID NO: 681226 - DNA, 75 bp, synthetic construct
  source 1..75: mol_type = other DNA
cgccagatagtggtacttccgctgacatttcgcggaagcaggcgtaccgacagcggcagaacaacatattcgatg

SEQ ID NO: 681227 - DNA, 75 bp, synthetic construct
  source 1..75: mol_type = other DNA
atcccgccgataatctatgtcgggtcaaaacaggaatcccgcaccagtaatgacatctggacagagtgcttcctg

SEQ ID NO: 681228 - DNA, 75 bp, synthetic construct
  source 1..75: mol_type = other DNA
gtattcctgccggacagggtgatgcgcgggttgaaattacattcaggtatgaagcaggtgtgcttttttacaggg

SEQ ID NO: 681229 - DNA, 75 bp, synthetic construct
  source 1..75: mol_type = other DNA
aaatccaccggcattttccctgacaccggacgggcggctgacggcgaaaaacgctgatatcagcggtaacgtgaa

SEQ ID NO: 681230 - DNA, 75 bp, synthetic construct
  source 1..75: mol_type = other DNA
ctcccacaattaccagcggtggcagtcctccggtattttccctgacatcagacggaaagctgaccgctaaaaatg

SEQ ID NO: 681231 - DNA, 75 bp, synthetic construct
  source 1..75: mol_type = other DNA
acggtgggaaaatcctttccgagaaatggcagttatgccagcggtacaataacggtcactgtgtacgatgaccag

SEQ ID NO: 681232 - DNA, 75 bp, synthetic construct
  source 1..75: mol_type = other DNA
gcggctgacggcgagaaatgctgatatcagcggtaacgtgaatgcgaactccgggacgctcaataatgtcacggt

SEQ ID NO: 681233 - DNA, 75 bp, synthetic construct
  source 1..75: mol_type = other DNA
ccagaaagtggaccgggtgagcagtgaaatctcacagactgtcagccaggggcagtcagaaaatgcccgacagat

SEQ ID NO: 681234 - DNA, 75 bp, synthetic construct
  source 1..75: mol_type = other DNA
gaccggcagtcagtggactgtccaggggagccggattaagccggggacggatttctggttttacgtgcgcagcgt

SEQ ID NO: 681235 - DNA, 75 bp, synthetic construct
  source 1..75: mol_type = other DNA
gcatggctggtgaatgactggtatcccacagcaagtatcagcgatttgctggttgtggtgatgaagaaagccacc

SEQ ID NO: 681236 - DNA, 75 bp, synthetic construct
  source 1..75: mol_type = other DNA
ctgcgcctgaccagcggaagcggagaagacagccgtctggtgaccaccgccatcactgcggatacagagcatcgt

SEQ ID NO: 681237 - DNA, 75 bp, synthetic construct
  source 1..75: mol_type = other DNA
tgatagacaacagccagcttgcggatgagatggcggagatgaagaccaccatcaccgaaacccgcaatgaaatca

SEQ ID NO: 681238 - DNA, 75 bp, synthetic construct
  source 1..75: mol_type = other DNA
cggctgacggcgaaaaatgccgatatcagcggtaacgtgaatgcgaactccgggacgctcaagaaggtcacgatt

SEQ ID NO: 681239 - DNA, 75 bp, synthetic construct
  source 1..75: mol_type = other DNA
cgaagacggcaaacattatgtcgcggggcttggcctcagcatggaggatacagaggaaggcaaactgagccagtt

SEQ ID NO: 681240 - DNA, 75 bp, synthetic construct
  source 1..75: mol_type = other DNA
cagttcggcggtcagcagatgacggtgaactaccatatccgcggtcgcatcatccaggtgccgtcaaactacgac

SEQ ID NO: 681241 - DNA, 75 bp, synthetic construct
  source 1..75: mol_type = other DNA
tgatgatcagaaatttgaccggcaggtcatgataccaccagtgttattccgcggtggtaagcatgagaatttcaa

SEQ ID NO: 681242 - DNA, 75 bp, synthetic construct
  source 1..75: mol_type = other DNA
gtcaacctggtgggaaaatctgcttttgtggaagccagcgggcagcccagcaatgatggtgaagggtatctggaa

SEQ ID NO: 681243 - DNA, 75 bp, synthetic construct
  source 1..75: mol_type = other DNA
atcgcgatgattaccccggagaacggcaacaccacgccgctgtttgtggcgcaggggaatcagctgttcatgaac

SEQ ID NO: 681244 - DNA, 75 bp, synthetic construct
  source 1..75: mol_type = other DNA
acaggaaaagatcgcaattgttcagcagagctttgaaccggggatgacggtctccctcgttgcccggcaacatgg

SEQ ID NO: 681245 - DNA, 75 bp, synthetic construct
  source 1..75: mol_type = other DNA
gaacttgctgccgccatgaagcagattaaagaactccagcgtctgctcggcaaaaaaacgatggaaaatgaactc

SEQ ID NO: 681246 - DNA, 75 bp, synthetic construct
  source 1..75: mol_type = other DNA
aacgcagacggcgtactacacaggaaaagatcgctattgttcagcagagttttgagccgggaatgacggtctccc

SEQ ID NO: 681247 - DNA, 75 bp, synthetic construct
  source 1..75: mol_type = other DNA
gtatcccacagcaagcatcagcgatttgctggttgtggtgatgaagaaggccacagcaggcatcacgattagctg

SEQ ID NO: 681248 - DNA, 75 bp, synthetic construct
  source 1..75: mol_type = other DNA
agcgtaggcggcgaagtgttcaggaaaaaatcgccattgttcagcagagctttgagcccggaatgaccgtgtcgc

SEQ ID NO: 681249 - DNA, 75 bp, synthetic construct
  source 1..75: mol_type = other DNA
atcgcgatgataaatccggagagcggcaacagcactccgttatttgtggcgcaggggaatcagctgttcatgaac

SEQ ID NO: 681250 - DNA, 75 bp, synthetic construct
  source 1..75: mol_type = other DNA
gcagcacgtaccggaaaaagaagccatcgtggataacggtgcccgctttgagccgcagtcaggttccctgaacag

SEQ ID NO: 681251 - DNA, 75 bp, synthetic construct
  source 1..75: mol_type = other DNA
ccggtgctggacagtgaggggaataccaacatctccggcgtcacggtggtgttccgggccggtgagcaggagcag

SEQ ID NO: 681252 - DNA, 75 bp, synthetic construct
  source 1..75: mol_type = other DNA
atacagcaacaacccggcctggtgtctgtgggatatgctgacgcatccacgttatggtatgggaaagcgcctcgg

SEQ ID NO: 681253 - DNA, 75 bp, synthetic construct
  source 1..75: mol_type = other DNA
ccctttaatatccggatagtcagggagacggcggacagtaccacggaccagctgcagaacagagcgctctggtcg

SEQ ID NO: 681254 - DNA, 75 bp, synthetic construct
  source 1..75: mol_type = other DNA
cacggtttacgatgaccagggcttcgaccggcagattatcattccaccggtactgtttcgcgggacgaaacacca

SEQ ID NO: 681255 - DNA, 75 bp, synthetic construct
  source 1..75: mol_type = other DNA
tatttagtctattaacactgtgtggcggcacaatttataaattaccgtcattgaaagatgcgttttatatcccga

SEQ ID NO: 681256 - DNA, 75 bp, synthetic construct
  source 1..75: mol_type = other DNA
aacgacgtgttcctgaaacgcctgacggcccccaccattaccagtggtggaaatccaccggtattttccctgaca

SEQ ID NO: 681257 - DNA, 75 bp, synthetic construct
  source 1..75: mol_type = other DNA
ctatatttccagacacctgttatcacttaacccattactggcctgctgccgcagatattcccgtggcgagcgata

SEQ ID NO: 681258 - DNA, 75 bp, synthetic construct
  source 1..75: mol_type = other DNA
aagcggattaccgatatcaggcaggttgaaaccacagcccgctatcttggcacggggctgtactggatagccgcc

SEQ ID NO: 681259 - DNA, 75 bp, synthetic construct
  source 1..75: mol_type = other DNA
ttggagtcattacctggcagtggcttattaggttttaaagcaggcatctggttctattcccttattgtgattgcc

SEQ ID NO: 681260 - DNA, 75 bp, synthetic construct
  source 1..75: mol_type = other DNA
cggtgctgaaagacaaaactatctggcttatcgctttcaacgtcttcttcgtttacgcggtttactgtggcctga

SEQ ID NO: 681261 - DNA, 75 bp, synthetic construct
  source 1..75: mol_type = other DNA
gagggcaggctgaccgcaagaaatgctgatatcagcggtaacgtgaatgcgaattccgggacgctcaacaacgtc

SEQ ID NO: 681262 - DNA, 75 bp, synthetic construct
  source 1..75: mol_type = other DNA
gtgttcctgaagcgcctgacggcccccaccattaccagcggtggaaatccaccggtattttccctgacatcagac

SEQ ID NO: 681263 - DNA, 75 bp, synthetic construct
  source 1..75: mol_type = other DNA
ggtaagccggtgagcgtggccatcacctcacaccctgcgccggaccggatacaggtcagtaccctgccggatggt

SEQ ID NO: 681264 - DNA, 75 bp, synthetic construct
  source 1..75: mol_type = other DNA
gatagctgccagtatcaatatcaggccgggccatgattattatttttacatctgcagtgtgaacaccgttggcaa

SEQ ID NO: 681265 - DNA, 75 bp, synthetic construct
  source 1..75: mol_type = other DNA
cctgcaaatggcaacacaaaaccgatgtttgttggtcagggtgatcagatattcatgaatgaagtgttcctgaaa

SEQ ID NO: 681266 - DNA, 75 bp, synthetic construct
  source 1..75: mol_type = other DNA
ccggacaggggacgctgacactgacattcaccgtatcttcatcaggagcgaataactggacaccaacaaccagta

SEQ ID NO: 681267 - DNA, 75 bp, synthetic construct
  source 1..75: mol_type = other DNA
gttacagcgcttgctgggtaaagttgagctcctcaaagatgcggtggtgtatggtcagtcgcgaaaatggataac

SEQ ID NO: 681268 - DNA, 75 bp, synthetic construct
  source 1..75: mol_type = other DNA
agtgcggttattgatatgccgagtggcaggggaagcgtcactctggagtttaaggttttccataaaggcaatcag

SEQ ID NO: 681269 - DNA, 75 bp, synthetic construct
  source 1..75: mol_type = other DNA
ttattatttttacgttcgcagtgtgaacaccgttggcaaatcggcattcgtggaggctgttggtcagccgagtga

SEQ ID NO: 681270 - DNA, 75 bp, synthetic construct
  source 1..75: mol_type = other DNA
agtgtgaatgcgaacgccgggacgctcaacaatgtcacggtaaatgaaaactgtacgattaagggcatgctggag

SEQ ID NO: 681271 - DNA, 75 bp, synthetic construct
  source 1..75: mol_type = other DNA
tggccgcaggagagcaggtcgttcctgcctctgaacttgctgctgccatgaagcagattaaagaactccagcgcc

SEQ ID NO: 681272 - DNA, 75 bp, synthetic construct
  source 1..75: mol_type = other DNA
gatgtttgttggtcagggtgatcagatattcatgaatgaagtgttcctgaaatatctgacggctcccaccattac

SEQ ID NO: 681273 - DNA, 75 bp, synthetic construct
  source 1..75: mol_type = other DNA
aaagaagccgttgaatatgggcgtgcaaaaaagtggatagcgcacgcgcccttattgcccggggatggggggtaa

SEQ ID NO: 681274 - DNA, 75 bp, synthetic construct
  source 1..75: mol_type = other DNA
gaacccgccaccaccacgttccggattaatgcgcctgcagcaccggccaccattgagctgacgccggggtatttt

SEQ ID NO: 681275 - DNA, 75 bp, synthetic construct
  source 1..75: mol_type = other DNA
gcggtgaaaacagccgcctggtgaccaccgccatcaccgcagacacggcgcaccgtttcagtggcctgccgctcg

SEQ ID NO: 681276 - DNA, 75 bp, synthetic construct
  source 1..75: mol_type = other DNA
gaccgtatagcgatgattaacccgcaggacggcaacaccacgccgttatttgtggcgcaggggaatcagttgttc

SEQ ID NO: 681277 - DNA, 75 bp, synthetic construct
  source 1..75: mol_type = other DNA
aacgtcacgattaacgagaactgtcggtttacgagaactcggcacaagcggggagaaaataccgttactcagtac

SEQ ID NO: 681278 - DNA, 75 bp, synthetic construct
  source 1..75: mol_type = other DNA
tacgggcgcaatctgctgaagatggatgcgttcggctgtaccagccgcggtcaggcccaccgtgccggactgtgg

SEQ ID NO: 681279 - DNA, 75 bp, synthetic construct
  source 1..75: mol_type = other DNA
ggtgacattattgaaatctgtgataacgactatgccgggaccatgaccggcggacgtatcctgtccatcgatgcc

SEQ ID NO: 681280 - DNA, 75 bp, synthetic construct
  source 1..75: mol_type = other DNA
aagcaataccaggagggaagtcttagtgctgtggccgcaggagaacaggtcgttcctgcctctgaacttgctgct

SEQ ID NO: 681281 - DNA, 75 bp, synthetic construct
  source 1..75: mol_type = other DNA
caccgctatcactgcagacacggagcaccgtttcagtggcctgccgctcggggaatacaccctgacggtcagggc

SEQ ID NO: 681282 - DNA, 75 bp, synthetic construct
  source 1..75: mol_type = other DNA
aacgcagacggcgtactacacaggaaaagagcgctattgttcagcagagctttgaaccgggaatgacggtctccc

SEQ ID NO: 681283 - DNA, 75 bp, synthetic construct
  source 1..75: mol_type = other DNA
cacattaagcccgggaaggatttctggttttacgtgcgcagcgtcaacctggtggggaaatctgctttttgtgga

SEQ ID NO: 681284 - DNA, 75 bp, synthetic construct
  source 1..75: mol_type = other DNA
caccgtttcagtggcctgccgctcggggaatacaccctgacagtcagggcaattaacagttatggccagcagggc

SEQ ID NO: 681285 - DNA, 75 bp, synthetic construct
  source 1..75: mol_type = other DNA
caccgccatcaccgcagacacggcgcaccgtttcagtggcctgccgctcggggaatacaccctgacagtcagggc

SEQ ID NO: 681286 - DNA, 75 bp, synthetic construct
  source 1..75: mol_type = other DNA
gataaacagctatggccagcagggtgaacctgccaccaccaccttccggattgccgcaccggcagcaccgtcgcg

SEQ ID NO: 681287 - DNA, 75 bp, synthetic construct
  source 1..75: mol_type = other DNA
tcctccgacgttttccctgacgccggatggcaggctgacagcccgcaatgcggatatcagtggagccatcacggc

SEQ ID NO: 681288 - DNA, 75 bp, synthetic construct
  source 1..75: mol_type = other DNA
caagaaatgctgatatcagcggagcaattaccgcgaataccggcacgctcaataatgtcaccattaacgagaact

SEQ ID NO: 681289 - DNA, 75 bp, synthetic construct
  source 1..75: mol_type = other DNA
gacacgccgatcacccggaccatcacgtcggcaaacattgaccgactgcgttttaccttcggcgtgcaggcactg

SEQ ID NO: 681290 - DNA, 75 bp, synthetic construct
  source 1..75: mol_type = other DNA
tgatagtgaagaaaaacggggctgaaatttataaccgaacggctctggataatactctgatttacacgggtgtta

SEQ ID NO: 681291 - DNA, 75 bp, synthetic construct
  source 1..75: mol_type = other DNA
tgatagtacgaaaaaacggtgctgaaatttataaccgaacggctctggataatacgctgatatatacgggtgtta

SEQ ID NO: 681292 - DNA, 75 bp, synthetic construct
  source 1..75: mol_type = other DNA
acaggtcagtaccctgccggatggcgtggagacatacggtgtatggggactctccctgccgtcactgcgtcgtcg

SEQ ID NO: 681293 - DNA, 75 bp, synthetic construct
  source 1..75: mol_type = other DNA
cggtggatttcacgctcgggtcacaggggctgcgtcacacacccggtgacattattgaaatctgtgataacgact

SEQ ID NO: 681294 - DNA, 75 bp, synthetic construct
  source 1..75: mol_type = other DNA
ctgtgggatatgctgacccacccgcgctatggtatgggaaaacgtcttggtgcggcagatgtggacaaatgggcg

SEQ ID NO: 681295 - DNA, 75 bp, synthetic construct
  source 1..75: mol_type = other DNA
ccggtgctggacagcaaggggaataccaacatctccggcgtcacggtggtgttccgtgccggtgagcaggagcag

SEQ ID NO: 681296 - DNA, 75 bp, synthetic construct
  source 1..75: mol_type = other DNA
ccgctgtcgccgccggagaacaggttgttcctgcctctgaacttgttgccgccatgaagcagattaaagaactcc

SEQ ID NO: 681297 - DNA, 75 bp, synthetic construct
  source 1..75: mol_type = other DNA
aatgaactcctcaaagaagccgttgaatatggacgggcaaaaaggtggatagcgcacgcgcccttattgcccggg

SEQ ID NO: 681298 - DNA, 75 bp, synthetic construct
  source 1..75: mol_type = other DNA
cactggccatatcccaggtgagtcagaaagtggacaacgtcagtagcgaactcacgcaaacggtcagtcagagta

SEQ ID NO: 681299 - DNA, 75 bp, synthetic construct
  source 1..75: mol_type = other DNA
cgacggatgtcagcagggtattttcatccgtcattgatatgcctgccggacacggccatgtcaccctgactttca

SEQ ID NO: 681300 - DNA, 75 bp, synthetic construct
  source 1..75: mol_type = other DNA
ccaggcactggccatcgcgcaggtgaaccagaaagtggaccgggtgagcagtgaaatctcacagactgtcagcca

SEQ ID NO: 681301 - DNA, 75 bp, synthetic construct
  source 1..75: mol_type = other DNA
ccggatggaaaactgactgccagaaatgcggatatcagcggggcaatcagtgcgaatacagggacgctgaataat

SEQ ID NO: 681302 - DNA, 75 bp, synthetic construct
  source 1..75: mol_type = other DNA
cgttgtatgacccgacggtacagtttgaattctggttctcagaaaaacgcatcacgaacacggcacaggtggaaa

SEQ ID NO: 681303 - DNA, 75 bp, synthetic construct
  source 1..75: mol_type = other DNA
ttaacgcaccggcagcacctgccaccattgaactgacccccggttatttccagataacagcagtgccgcgtcttg

SEQ ID NO: 681304 - DNA, 75 bp, synthetic construct
  source 1..75: mol_type = other DNA
ggaaaatgaactccttaaagaagccgttgaatacgggcgtgcaaaaaagtggattgaaccgccccgggaatcctg

SEQ ID NO: 681305 - DNA, 75 bp, synthetic construct
  source 1..75: mol_type = other DNA
acacttcttctttgatctgccttctttcagcgaaatgttgcaggcatggacccgcagcggtgcgttgcaggagca

SEQ ID NO: 681306 - DNA, 75 bp, synthetic construct
  source 1..75: mol_type = other DNA
gcatagatatgaagcaggttgaagcactggtggaagcgtctaaagaagaagtgaaagcagctgccgcgccagtta

SEQ ID NO: 681307 - DNA, 75 bp, synthetic construct
  source 1..75: mol_type = other DNA
atgactcaagtcgcgaagaaaattctggtgacgtgcgcactgccgtacgctaacggctcaatccacctcggccat

SEQ ID NO: 681308 - DNA, 75 bp, synthetic construct
  source 1..75: mol_type = other DNA
tgcggcggatgtggacaaatgggcgctgtatgtcatcggacagtattgcgaccagtcggtgccggacggttttgg

SEQ ID NO: 681309 - DNA, 75 bp, synthetic construct
  source 1..75: mol_type = other DNA
gcaaccgctgctgggccataaagtgaatccgttcaaggcactgtataaccgtatcgatatgaaacaggtggaagc

SEQ ID NO: 681310 - DNA, 75 bp, synthetic construct
  source 1..75: mol_type = other DNA
ttaccagcggcggtaatcctccggcattttccctgacaccggacgggcgactgacggcgaaaaatgcggatatca

SEQ ID NO: 681311 - DNA, 75 bp, synthetic construct
  source 1..75: mol_type = other DNA
gatgaatactggaagaaagattccaccgccgagctgtatcacttcatcggtaaagatatcgtttacttccacagc

SEQ ID NO: 681312 - DNA, 75 bp, synthetic construct
  source 1..75: mol_type = other DNA
gtcactgtgtacgatgaccaggcttttgaccgtcagatagtcgtcccccccgttctgtttcgcggtggtaagcat

SEQ ID NO: 681313 - DNA, 75 bp, synthetic construct
  source 1..75: mol_type = other DNA
gcaaccgctgctgggccacaaagtgaatccgttcaaggcgctgtataaccgtattgacatgaagcaggttgaagc

SEQ ID NO: 681314 - DNA, 75 bp, synthetic construct
  source 1..75: mol_type = other DNA
aaagccgcgaatttggtaaagctatccgtgaaatcatggcactggctgacctggctaaccgctatgtcgatgaac

SEQ ID NO: 681315 - DNA, 75 bp, synthetic construct
  source 1..75: mol_type = other DNA
ggcggcggatgtggacaaatgggcgctgtatgccatcgggcagtactgcgaccagacggtcccggatggtttcgg

SEQ ID NO: 681316 - DNA, 75 bp, synthetic construct
  source 1..75: mol_type = other DNA
ggggactctccctgccgttactgcgtcgtcgcctgttccgctgtgtttccatccgggaaaacacggacggcacct

SEQ ID NO: 681317 - DNA, 75 bp, synthetic construct
  source 1..75: mol_type = other DNA
gccagccgcaccctgacactggaccgtgaggtgaccctgccggagacaggtacttcgacggtgaacctgattaac

SEQ ID NO: 681318 - DNA, 75 bp, synthetic construct
  source 1..75: mol_type = other DNA
aagcggagaagacagccgtctggtgaccaccgccatcaccgcggatacagagcaccgtttcagcggtctgccgcc

SEQ ID NO: 681319 - DNA, 75 bp, synthetic construct
  source 1..75: mol_type = other DNA
cctccggcagtgcagcatctcacggtggaggtgagcgccgctgacgggcagtatctggcgcaggtgaaatgggac

SEQ ID NO: 681320 - DNA, 75 bp, synthetic construct
  source 1..75: mol_type = other DNA
aaggatttcaccattaacggcaagactacctcgcagtacctgacgtcggtgattctgaataatctccctgagcgc

SEQ ID NO: 681321 - DNA, 75 bp, synthetic construct
  source 1..75: mol_type = other DNA
aaggcggaggtatctcttgctgatgatgtttcgtttgatcgcaagctgatactccttcccttctttttctattca

SEQ ID NO: 681322 - DNA, 75 bp, synthetic construct
  source 1..75: mol_type = other DNA
agattgaaggcgatatagtcaaaacagtgggtaaggcttttccgcgggactcccgggcaccggagcggtggccat

SEQ ID NO: 681323 - DNA, 75 bp, synthetic construct
  source 1..75: mol_type = other DNA
cggcaaccccccgacgttttccctgacgccggagggcaggctgaccgcaagaaatgctgatatcagcggtaacgt

SEQ ID NO: 681324 - DNA, 75 bp, synthetic construct
  source 1..75: mol_type = other DNA
ccacctcgcagtacctgacgtcagtgattctgaataatctccctgagcgcccctttaacatccggatggtcaggg

SEQ ID NO: 681325 - DNA, 75 bp, synthetic construct
  source 1..75: mol_type = other DNA
gcgtaacggaaactgggtgacggagaaggatatcaccattaacggcaagaccacctcgcagtacctgacgtcagt

SEQ ID NO: 681326 - DNA, 75 bp, synthetic construct
  source 1..75: mol_type = other DNA
atgagcgtgattgatgcgattggtgaagggccgattgaaggtccggtgaaggggctgcagagtattctggtgaac

SEQ ID NO: 681327 - DNA, 75 bp, synthetic construct
  source 1..75: mol_type = other DNA
tccctgccgtcactgcgtcgtcgcctgttccgctgtgtctccatccgggaaaacacggacggcacctttgccatc

SEQ ID NO: 681328 - DNA, 75 bp, synthetic construct
  source 1..75: mol_type = other DNA
gcacaccccgcgccggaccggatacaggtcagcaccctgcctgatggtgtggagacatacggtgtatggggactc

SEQ ID NO: 681329 - DNA, 75 bp, synthetic construct
  source 1..75: mol_type = other DNA
gctacgggatggggaaacgcctgggggccgcggacgtggacaaatgggcgctgtatgccatcgggcagtactgtg

SEQ ID NO: 681330 - DNA, 75 bp, synthetic construct
  source 1..75: mol_type = other DNA
cattgaactgacgccgggctattttcagataacggtggtcccgcatcctgcggtgtatgacccgacggtacagtc

SEQ ID NO: 681331 - DNA, 75 bp, synthetic construct
  source 1..75: mol_type = other DNA
gtttattgatccgtctaatggcaacacaagaccaatgtttgttggtcagggcgatcagatattcatgaacgacgt

SEQ ID NO: 681332 - DNA, 75 bp, synthetic construct
  source 1..75: mol_type = other DNA
cacgcagaccgtcaataagaaactggaagaccagagtgcggcaattcagcagatacagaaggttcaggttgatac

SEQ ID NO: 681333 - DNA, 75 bp, synthetic construct
  source 1..75: mol_type = other DNA
catatgacgctggagttttctgtgtctgcctggctggtgaatggatggtacccgacagcgagtattagcgatctg

SEQ ID NO: 681334 - DNA, 75 bp, synthetic construct
  source 1..75: mol_type = other DNA
aaactgtccgcgaaccagattgaaggcgatctcgttaaaacagtgggcaaagctttcccccgggactcccgtgca

SEQ ID NO: 681335 - DNA, 75 bp, synthetic construct
  source 1..75: mol_type = other DNA
cattatttttaacggtatagcgtatgacgatccggggagcggaaataacccaggaggcacgcgatacacgggtta

SEQ ID NO: 681336 - DNA, 75 bp, synthetic construct
  source 1..75: mol_type = other DNA
gacggcatgcagagtcaggtgctgctggcggcagacaggattgcgatgattaatcctgcgaatggcaatacaaag

SEQ ID NO: 681337 - DNA, 75 bp, synthetic construct
  source 1..75: mol_type = other DNA
ccccaccattaccagcggcggcaatcccccggcattctccctgacgccggacggcaggctgacggcccgtaatgc

SEQ ID NO: 681338 - DNA, 75 bp, synthetic construct
  source 1..75: mol_type = other DNA
gtgatgcgcgggttgaaattacattcaggtatgaagcaggtgtgcttttttacatgggtggttcaatacttcatg

SEQ ID NO: 681339 - DNA, 75 bp, synthetic construct
  source 1..75: mol_type = other DNA
tgattaatcctgcgaatggcaacacaaagccgatgtttgttggtcagggcgatcagatatttatgaatgaagtgt

SEQ ID NO: 681340 - DNA, 75 bp, synthetic construct
  source 1..75: mol_type = other DNA
atggcgtattcattttccagaggtgaattcatcatgaagataaatgacaaagttgtcgttcatgccaggtcaggc

SEQ ID NO: 681341 - DNA, 75 bp, synthetic construct
  source 1..75: mol_type = other DNA
cgctcaataatgtcacgattaaccagaactgtcggattctgggaaaactgtcagctaaccagattgaaggtgata

SEQ ID NO: 681342 - DNA, 75 bp, synthetic construct
  source 1..75: mol_type = other DNA
agtatctggcgcaggtgaaatgggacacgccgcgggtggtgaagggcgtgcgcttcagtctgcgcctgaccagtg

SEQ ID NO: 681343 - DNA, 75 bp, synthetic construct
  source 1..75: mol_type = other DNA
gcgtgcgcttcagtctgcgcctgaccagtggaagcggtgaggacagccgtctggtgaccaccgccatcaccgcgg

SEQ ID NO: 681344 - DNA, 75 bp, synthetic construct
  source 1..75: mol_type = other DNA
cccggaataacagttatgccagcgggacggtaaccgtcacagtttacgatgaccagggcttcgaccggcagatta

SEQ ID NO: 681345 - DNA, 75 bp, synthetic construct
  source 1..75: mol_type = other DNA
gaaaacacggacggcacctttgccatcacggcggtgcagcacgtaccggaaaaagaagccatcgtggataacggt

SEQ ID NO: 681346 - DNA, 75 bp, synthetic construct
  source 1..75: mol_type = other DNA
gaactgtgtcatcagagggaaactgtctgcaaaccagattgaaggcgacctggtgaagacggtggggaaagcctt

SEQ ID NO: 681347 - DNA, 75 bp, synthetic construct
  source 1..75: mol_type = other DNA
atccgggaaaacacggacggcacctttgccatcacggcggtgcagcatgtgccggaaaaagaagccattgtggat

SEQ ID NO: 681348 - DNA, 75 bp, synthetic construct
  source 1..75: mol_type = other DNA
tttgagttctggttttcggagacaaaaatcgcagacacatctcaggtggaaacctctgcccgttatctggggacc

SEQ ID NO: 681349 - DNA, 75 bp, synthetic construct
  source 1..75: mol_type = other DNA
atctggggaccggcagtcagtggagtgtatccggcccgcacattaagcccgggaaggatttctggttttacgtgc

SEQ ID NO: 681350 - DNA, 75 bp, synthetic construct
  source 1..75: mol_type = other DNA
cattttccctgacgccggacgggcgactgacggcgaaaaatgcggatatcagtggcagtgtgaatgcgaactcag

SEQ ID NO: 681351 - DNA, 75 bp, synthetic construct
  source 1..75: mol_type = other DNA
agccatcgtggataacggtgcccgctttgagccgcagtcaggttccctgaacagcgtcatcccaccggcagtaca

SEQ ID NO: 681352 - DNA, 75 bp, synthetic construct
  source 1..75: mol_type = other DNA
gtttgaattctggttttcggaggcaaaaatcgcagacacatctcaggtggaaacctctgcccgttatctggggac

SEQ ID NO: 681353 - DNA, 75 bp, synthetic construct
  source 1..75: mol_type = other DNA
tggagttttcggtgtcagcatggctggtaaataactggtatcccacagcaagcatcagcgatttgctggttgtgg

SEQ ID NO: 681354 - DNA, 75 bp, synthetic construct
  source 1..75: mol_type = other DNA
ggtgtggagacatacggtgtatggggactatccctgccgtcactgcgccgtcgcctgttccgctgtgtctccgtc

SEQ ID NO: 681355 - DNA, 75 bp, synthetic construct
  source 1..75: mol_type = other DNA
tcacctcatccggcaatcccccgacgttctccctgacgccggagggcaggctgacggcccgcaatgcggatatca

SEQ ID NO: 681356 - DNA, 75 bp, synthetic construct
  source 1..75: mol_type = other DNA
gagcatcgtttcagtggtctgcctctcggggaatacaccctgacggtcagggcgattaacagctatggccagcag

SEQ ID NO: 681357 - DNA, 75 bp, synthetic construct
  source 1..75: mol_type = other DNA
cggacgtgtcctgtccattgatgctgccacccgcaccctgacgctggaccgtgaggttaccctgccggagacagg

SEQ ID NO: 681358 - DNA, 75 bp, synthetic construct
  source 1..75: mol_type = other DNA
acacacctcgtgaggcgaaggacaatctcaaatccacgcagatgatgagcgtgattgatgcgattggtgagggac

SEQ ID NO: 681359 - DNA, 75 bp, synthetic construct
  source 1..75: mol_type = other DNA
tgtcagcatggctggtaaataactggtatcccacagcaagtatcagcgatctgctggttgtggtgatgaaaaaat

SEQ ID NO: 681360 - DNA, 75 bp, synthetic construct
  source 1..75: mol_type = other DNA
agattaaggggaaactgtcagccaatcagattgaaggcgatattgtcaaaacggtcagcaagtctttcccccgca

SEQ ID NO: 681361 - DNA, 75 bp, synthetic construct
  source 1..75: mol_type = other DNA
cccagcattttccctgacgccggaaggaaagctgacggcaaggaacgcggatatcagcggagcaattaccgcgaa

SEQ ID NO: 681362 - DNA, 75 bp, synthetic construct
  source 1..75: mol_type = other DNA
agtggtctgccgctcggggaatacaccctgacagtcagggcaattaacagttatggccagcagggcgaaccggcc

SEQ ID NO: 681363 - DNA, 75 bp, synthetic construct
  source 1..75: mol_type = other DNA
gattctggataatctgcctccccgcccctttaacatccggatggtcagggagacggcggacagcacctcggacca

SEQ ID NO: 681364 - DNA, 75 bp, synthetic construct
  source 1..75: mol_type = other DNA
cgtatcgcgatgataaatccggagaacggcaacagcacgccgttatttgtggcgcaggggaatcagctgttcatg

SEQ ID NO: 681365 - DNA, 75 bp, synthetic construct
  source 1..75: mol_type = other DNA
gttattgatatgcctgccggtcacggtcacatgacgctggagttttcggtgtcagcatggctggtaaatgactgg

SEQ ID NO: 681366 - DNA, 75 bp, synthetic construct
  source 1..75: mol_type = other DNA
ggcgatattgtcaaaacagtggggaaggcctttccccgaaataacagttatgccagtggcaagataactgtcacg

SEQ ID NO: 681367 - DNA, 75 bp, synthetic construct
  source 1..75: mol_type = other DNA
ggcgcgaacaaatggacgccgacaacgtacatcagcgatttactggtggtggtcatgaaaaaatccacggcagga

SEQ ID NO: 681368 - DNA, 75 bp, synthetic construct
  source 1..75: mol_type = other DNA
gatgacggcacgcatgccatcactgccgtgcagcatgtaccggaaaaagaagccatcgtggataacggggcgcac

SEQ ID NO: 681369 - DNA, 75 bp, synthetic construct
  source 1..75: mol_type = other DNA
gcactgaaagagcgcattgatgcttcagcgctgcgtacggaggtcacgcaactggaagaagacatccgtcagcgg

SEQ ID NO: 681370 - DNA, 75 bp, synthetic construct
  source 1..75: mol_type = other DNA
agggcaggctgaccgcaagaaatgctgatatcagcggtaacgtgaatgcgaattccgggacgctcaacaacgtca

SEQ ID NO: 681371 - DNA, 75 bp, synthetic construct
  source 1..75: mol_type = other DNA
agaaggacacaaatgatgacctggctgcgctgtacatgctgaaggttcaaaaaacgaaagacggcattccctatg

SEQ ID NO: 681372 - DNA, 75 bp, synthetic construct
  source 1..75: mol_type = other DNA
tatcttcatcaggagcgaataactggacaccaacaaccagtatcagcgatctgctggttgtggtgatgaaaaaat

SEQ ID NO: 681373 - DNA, 75 bp, synthetic construct
  source 1..75: mol_type = other DNA
aaataataatctgaacagcatgtgggctgtgaagctgcagcagatgcaggacggacgcctttatattgcgggtat

SEQ ID NO: 681374 - DNA, 75 bp, synthetic construct
  source 1..75: mol_type = other DNA
ctgtcagattaaggggaaaatgccagccaaccagattgaaggcgatatagtcaaaacagtgggtaaggcttttcc

SEQ ID NO: 681375 - DNA, 75 bp, synthetic construct
  source 1..75: mol_type = other DNA
gcccattatttttaacggtatagcgtatgacgatccggggagcggaaataacccaggaggcacgcgatacacggg

SEQ ID NO: 681376 - DNA, 75 bp, synthetic construct
  source 1..75: mol_type = other DNA
atcaggacgtccattacggatgtcagcaatgaaatcacacagaccgtcaataagaaactggaagaccagagtgca

SEQ ID NO: 681377 - DNA, 75 bp, synthetic construct
  source 1..75: mol_type = other DNA
gcgtgggggcagcagggcgatccggcatcggtatcgttccggattgccgcacctgcagtgccgtcgcggcttgag

SEQ ID NO: 681378 - DNA, 75 bp, synthetic construct
  source 1..75: mol_type = other DNA
gaaggcgatctcgttaaaacagtgggcaaagctttcccccgggactcccgtgcaccggagcggtggccatcaggg

SEQ ID NO: 681379 - DNA, 75 bp, synthetic construct
  source 1..75: mol_type = other DNA
ccgtttaacgtcagactgctccgggtgacggaagacagcacctcagaccagttacagaacagaaccctgtggtct

SEQ ID NO: 681380 - DNA, 75 bp, synthetic construct
  source 1..75: mol_type = other DNA
gaaaacgcccgacagatagcacaggtccgccagtacgtggataaaaaagggagtgaaattacctcgaccacggat

SEQ ID NO: 681381 - DNA, 75 bp, synthetic construct
  source 1..75: mol_type = other DNA
ctgatagtgcggaaaaacggtgctgaaatttataaccgtaccgcgctggataatacgctgatttacagtggcgtt

SEQ ID NO: 681382 - DNA, 75 bp, synthetic construct
  source 1..75: mol_type = other DNA
cgcacaccccgcgccggaccggatacaggtcagcaccctgcctgatggtgtggagacatacggtgtatggggact

SEQ ID NO: 681383 - DNA, 75 bp, synthetic construct
  source 1..75: mol_type = other DNA
ccggtgcgaacaactggacgccgacaacgtacatcagcgatttactggttgtggtgatgaagaaatccacagcag

SEQ ID NO: 681384 - DNA, 75 bp, synthetic construct
  source 1..75: mol_type = other DNA
atcaggagcgaataactggacaccaacaaccagtatcagcgatctgctggttgtggtgatgaagaaatccacagc

SEQ ID NO: 681385 - DNA, 75 bp, synthetic construct
  source 1..75: mol_type = other DNA
cagtggcaccatcacggtaagaatcagtgatgatcagaagtttgaccggcaggtcatgataccgccagtgttatt

SEQ ID NO: 681386 - DNA, 75 bp, synthetic construct
  source 1..75: mol_type = other DNA
gtacatgctgaaggttcaaaaaacgaaagacggcattccctatgtggccgggattggtgcagggattgaggatac

SEQ ID NO: 681387 - DNA, 75 bp, synthetic construct
  source 1..75: mol_type = other DNA
gcaccggagcgttggccatcaggaaccattaccgtcagggtttatgacgatcagccgtttaaccggcagattgtt

SEQ ID NO: 681388 - DNA, 75 bp, synthetic construct
  source 1..75: mol_type = other DNA
agccgatgtttgttggtcagggcgatcagatattcatgaatgaagtgttcctgaaacgcctgacggcccccacca

SEQ ID NO: 681389 - DNA, 75 bp, synthetic construct
  source 1..75: mol_type = other DNA
tggaggtgagcgcggcgtacggtcagtatctggcgcaggcgaaatgggacacgccgcgggtggtgaagggtgtgc

SEQ ID NO: 681390 - DNA, 75 bp, synthetic construct
  source 1..75: mol_type = other DNA
actggtatcccacagcaagtatcagcgatctgctggttgtggtgatgaaaaaatccacagcaggtatcagtatca

SEQ ID NO: 681391 - DNA, 75 bp, synthetic construct
  source 1..75: mol_type = other DNA
atgatgcagaagggtatctggggctgtttcgggaaaaaataggaaaactgcatctggctcaggggctgtgggagc

SEQ ID NO: 681392 - DNA, 75 bp, synthetic construct
  source 1..75: mol_type = other DNA
accggaaaaagaagccatcgtggataacggggcccgctttgagccgcagtcaggcaccctgaacagcgtcatccc

SEQ ID NO: 681393 - DNA, 75 bp, synthetic construct
  source 1..75: mol_type = other DNA
catcacgtcatccggcaatcctccggcattttccctgacgccggacgggcgactgacggcgaaaaatgcggatat

SEQ ID NO: 681394 - DNA, 75 bp, synthetic construct
  source 1..75: mol_type = other DNA
agttttcggtatcagcgtggctggtaaatgactggtatcccacagccagtatcagtgatttgctggttgtggtga

SEQ ID NO: 681395 - DNA, 75 bp, synthetic construct
  source 1..75: mol_type = other DNA
ggaaagctgaccgctaaaaatgcggatatcagtggcagtgtgaatgcgaactccgggacgctcaacagcgtcacg

SEQ ID NO: 681396 - DNA, 75 bp, synthetic construct
  source 1..75: mol_type = other DNA
cggtgtcagcatggctggtaaataactggtatcccacagcaagtatcagcgatttgctggttgtggtgatgaaga

SEQ ID NO: 681397 - DNA, 75 bp, synthetic construct
  source 1..75: mol_type = other DNA
aatgcgaactccgggacgctcaacaacgtcacgataaatgaaaactgtacgattaagggtatgctggaggcgaat

SEQ ID NO: 681398 - DNA, 75 bp, synthetic construct
  source 1..75: mol_type = other DNA
cgccccggaccggatacaggtcagcgtcctgcctgatggcgtggagacatacggtgtgtggggactctccctgcc

SEQ ID NO: 681399 - DNA, 75 bp, synthetic construct
  source 1..75: mol_type = other DNA
taaatggctggtatcccacagcaagtatcagcgatttgctggttgtggtgatgaagaaagccactgcaggcatca

SEQ ID NO: 681400 - DNA, 75 bp, synthetic construct
  source 1..75: mol_type = other DNA
agtcagggcaattaacagttatggccagcagggcgaaccggccaccaccaccttccggattaacgcgccagcaaa

SEQ ID NO: 681401 - DNA, 75 bp, synthetic construct
  source 1..75: mol_type = other DNA
acccggcgaatggtaacaccactcctgcactggtcacacagggcggacagacgtttattaatgaggcgctgatca

SEQ ID NO: 681402 - DNA, 75 bp, synthetic construct
  source 1..75: mol_type = other DNA
ggggaatcagctgttcatgaacgacgtgttcctgaagcgactgtttgcagtgagcatcacctcgtccggcaatcc

SEQ ID NO: 681403 - DNA, 75 bp, synthetic construct
  source 1..75: mol_type = other DNA
tcaccattaacggcaagaccacctcgcagtacctgacgtcggtgattctgaataatctccctgagcgccccttta

SEQ ID NO: 681404 - DNA, 75 bp, synthetic construct
  source 1..75: mol_type = other DNA
tctgcgggtcaccttcggggtgcagtcactggtggagaccacctcaaagggtgaccgtaatccctcttctgtccg

SEQ ID NO: 681405 - DNA, 75 bp, synthetic construct
  source 1..75: mol_type = other DNA
acggcacctttgccatcacggcggtgcagcacgtaccggaaaaagaagccatcgtggataacggggccagctttg

SEQ ID NO: 681406 - DNA, 75 bp, synthetic construct
  source 1..75: mol_type = other DNA
atgcgttcggctgtaccagccgcggtcaggctcaccgtgccggactgtgggtgataaagaccgaactgctggaaa

SEQ ID NO: 681407 - DNA, 75 bp, synthetic construct
  source 1..75: mol_type = other DNA
tgagttctggttctcggaaaatcagattacggatatccggcaggttgaaaccacagcccgctatctcggtacggc

SEQ ID NO: 681408 - DNA, 75 bp, synthetic construct
  source 1..75: mol_type = other DNA
gacggcgttgccgaatacagcgtgtgggggctgaagctgccgacgctgcgccagcgcctgttccgctgcgtgagt

SEQ ID NO: 681409 - DNA, 75 bp, synthetic construct
  source 1..75: mol_type = other DNA
cacgggttatggttttgaagttcgcaaaaacggtgtattaatcgcatccagagaaactaaaggggccattcccgg

SEQ ID NO: 681410 - DNA, 75 bp, synthetic construct
  source 1..75: mol_type = other DNA
gaccgctaaaaatgcagatatcagtggcagtgtgaatgcgaacgccgggacgctcaacaatgtcacaattaatga

SEQ ID NO: 681411 - DNA, 75 bp, synthetic construct
  source 1..75: mol_type = other DNA
ctgcgaatggcaacacaaagccgatgtttgttggtcagggcgatcagatattcatgaacgacgtgttcctgaaac

SEQ ID NO: 681412 - DNA, 75 bp, synthetic construct
  source 1..75: mol_type = other DNA
ccacctcgcagtatctggcatcggtggtggtgggtaacctgccgccgcgcccgttcaatatcggatgcgcaggat

SEQ ID NO: 681413 - DNA, 75 bp, synthetic construct
  source 1..75: mol_type = other DNA
gtattgagaacacccctgacggcatgcagagtcaggtgctgctggcggcagacaggattgcgatgattaatcctg

SEQ ID NO: 681414 - DNA, 75 bp, synthetic construct
  source 1..75: mol_type = other DNA
gctcagggcgtattttcctcagttatagatatgcctgccggacaggggacgctgacactgacattcaccgtatct

SEQ ID NO: 681415 - DNA, 75 bp, synthetic construct
  source 1..75: mol_type = other DNA
aacggtgcccgctttgagccgcagtcaggctccctgaacagcgtcatcccaccggcagtacagcacctgacggtg

SEQ ID NO: 681416 - DNA, 75 bp, synthetic construct
  source 1..75: mol_type = other DNA
atacagaaggttcaggttgatacaaataatagcctgaacagcatgtgggcagtgaagctgcagcagatgcaggac

SEQ ID NO: 681417 - DNA, 75 bp, synthetic construct
  source 1..75: mol_type = other DNA
agattgataacggtcagcttgcgcctgacctgactgaaatcaggacgtccataacggatgtcagcaatgaaataa

SEQ ID NO: 681418 - DNA, 75 bp, synthetic construct
  source 1..75: mol_type = other DNA
agcggcaacagcacgccgttatttgtggcgcaggggaatcagctgttcatgaacgacgtgttcctgaagcgcctg

SEQ ID NO: 681419 - DNA, 75 bp, synthetic construct
  source 1..75: mol_type = other DNA
catctgataacaagccagataaacggcgtcagaggcgcgatgaggctgcggatgcagaagtcttatcgcgcatcc

SEQ ID NO: 681420 - DNA, 75 bp, synthetic construct
  source 1..75: mol_type = other DNA
gcagcagacaggattgcgatgattaatcctgcgaatggcaacacaaaagccgatgtttgttggtcagggcgatca

SEQ ID NO: 681421 - DNA, 75 bp, synthetic construct
  source 1..75: mol_type = other DNA
acgactatgccgggaccctgaccggcggacgtatcctgtccattgatgccgccagccgcaccctgacactggacc

SEQ ID NO: 681422 - DNA, 75 bp, synthetic construct
  source 1..75: mol_type = other DNA
acgactatgccgggactctgaccggcggacgtgtcctgtccattgatgctgccacccgcaccctgacgctggacc

SEQ ID NO: 681423 - DNA, 75 bp, synthetic construct
  source 1..75: mol_type = other DNA
acgcagaccgtggacttcagcgtgggtgcggaagggcttcgccatgtgccgggcgatgtcattgaaatctgcgat

SEQ ID NO: 681424 - DNA, 75 bp, synthetic construct
  source 1..75: mol_type = other DNA
actggctgtatatgacccgacggtacagtttgaattctggttttcggaggcaaaaatcgcagacacatctcaggt

SEQ ID NO: 681425 - DNA, 75 bp, synthetic construct
  source 1..75: mol_type = other DNA
gcccgctatcttggcacggcgctgtactggatagctgccagtatcaatatcaggccgggccatgattattatttt

SEQ ID NO: 681426 - DNA, 75 bp, synthetic construct
  source 1..75: mol_type = other DNA
tgagaacacccctgacggcatgcagagtcaggtgctgctggcagcagacaggattgcgatgattaatcctgcgaa

SEQ ID NO: 681427 - DNA, 75 bp, synthetic construct
  source 1..75: mol_type = other DNA
tacagcgcgtgcagaaggacacaaatgatgaccttgctgcactttacatgctgaaggtacagaaaacgaaaaatg

SEQ ID NO: 681428 - DNA, 75 bp, synthetic construct
  source 1..75: mol_type = other DNA
ctgattaaaactgaactgctggagacgcagaccgtggatttcagcgtcggagctgaagggcttcgccatgtaccg

SEQ ID NO: 681429 - DNA, 75 bp, synthetic construct
  source 1..75: mol_type = other DNA
ctgattaaaactgaactgctggagacgcagaccgtggatttcagcgttggggcggaagggcttcgccatgtaccg

SEQ ID NO: 681430 - DNA, 75 bp, synthetic construct
  source 1..75: mol_type = other DNA
ctgattaaaactgaactgctggagacgcagaccgtggatttcagcgtaggtgcggaagggcttcgccatgtaccg

SEQ ID NO: 681431 - DNA, 75 bp, synthetic construct
  source 1..75: mol_type = other DNA
taccacgctgataagcctggttgacgggcagggtagtccggtcagcgtggaggtacagtccgtcaccgacggcgt

SEQ ID NO: 681432 - DNA, 75 bp, synthetic construct
  source 1..75: mol_type = other DNA
taccacgctgataagcctggttgacggtcagggcaatccggtcagcgtggaggtacagtccgtcaccgacggcgt

SEQ ID NO: 681433 - DNA, 75 bp, synthetic construct
  source 1..75: mol_type = other DNA
taccacgctgataagcctggttgacggacagggcattccggtcagcgtggaggtacagtccgtcaccgacggcgt

SEQ ID NO: 681434 - DNA, 75 bp, synthetic construct
  source 1..75: mol_type = other DNA
aaggatgtcaccattaacggcaagaccacctcgcagttcctggcgtcggtgattctggataatctgcctccccgt

SEQ ID NO: 681435 - DNA, 75 bp, synthetic construct
  source 1..75: mol_type = other DNA
atgacggcacgtatgctatcaccgccgtgcagcatgtaccggaaaaagaagccatcgtggataacggggcgcact

SEQ ID NO: 681436 - DNA, 75 bp, synthetic construct
  source 1..75: mol_type = other DNA
tcgggcagtactgcgaccagacggtcccggatggtttcggggggaccgagccgcggatgacctttaatgcgtacc

SEQ ID NO: 681437 - DNA, 75 bp, synthetic construct
  source 1..75: mol_type = other DNA
accgcgtggcattcattaacccggaaaatggtaacaccacaccggctctggtcacgcagggtggacagaccttta

SEQ ID NO: 681438 - DNA, 75 bp, synthetic construct
  source 1..75: mol_type = other DNA
aacggtgctgaaatttataaccgtaccgcgctggataatacgctgatttacagtggcgttattgatatgcctgcc

SEQ ID NO: 681439 - DNA, 75 bp, synthetic construct
  source 1..75: mol_type = other DNA
gcgaaccagattgaaggcgatctcgttaaaacagtgggcaaagctttcccccgggactcccgtgcaccggagcgg

SEQ ID NO: 681440 - DNA, 75 bp, synthetic construct
  source 1..75: mol_type = other DNA
ggtgcagaaaacgaaaaacggcattccgtatgttgccggtattggtgcggggattgaggatgctgatggccagcc

SEQ ID NO: 681441 - DNA, 75 bp, synthetic construct
  source 1..75: mol_type = other DNA
aaaacaggaatcccgcaccagtaatgacatctggacagagtgcttcctgcatgttgatcagaacggacgccggat

SEQ ID NO: 681442 - DNA, 75 bp, synthetic construct
  source 1..75: mol_type = other DNA
ttccgggaaaaaataggaaaactgcatctggctcaggggttgtgggaactgatagataacagccagcttgcagat

SEQ ID NO: 681443 - DNA, 75 bp, synthetic construct
  source 1..75: mol_type = other DNA
attactgacatgcagcagcgccagcgagatgtcgctgcgcttgatgccagatacccgaacacggccattgtgggg

SEQ ID NO: 681444 - DNA, 75 bp, synthetic construct
  source 1..75: mol_type = other DNA
tgaataactggtatcccacagcaagtatcagcgatctgctggttgtggtgatgaaaaaatccacagcaggtatca

SEQ ID NO: 681445 - DNA, 75 bp, synthetic construct
  source 1..75: mol_type = other DNA
cgcagacacggagcaccgtttcagcggcctgccgctcggggaatacaccctgacggtgcgggcgataaacagcta

SEQ ID NO: 681446 - DNA, 75 bp, synthetic construct
  source 1..75: mol_type = other DNA
ctggactgttgcgatcgtgaagccatagactgggccgcaagcacgagggttatgacaaagcaacggtgcaggatg

SEQ ID NO: 681447 - DNA, 75 bp, synthetic construct
  source 1..75: mol_type = other DNA
acagcgtcatcccaccggcagtgcagcacctgacggtggaggtgagcgcagctgacggccagtatctggcgcagg

SEQ ID NO: 681448 - DNA, 75 bp, synthetic construct
  source 1..75: mol_type = other DNA
ggaaggcggaaaacagcctcacgcagctggttgcgaaaaagaatgaggaccagacactggccatcgcgcaggtga

SEQ ID NO: 681449 - DNA, 75 bp, synthetic construct
  source 1..75: mol_type = other DNA
tctggattttttcaaaggcgagatagggaaaacccatctggctcaggagctgtggacgcagattgataacggtca

SEQ ID NO: 681450 - DNA, 75 bp, synthetic construct
  source 1..75: mol_type = other DNA
ccgctaaaaatgcagatatcagtggcagtgtgaatgcgaacgccgggacgctcaacaatgtcacaattaatgaga

SEQ ID NO: 681451 - DNA, 75 bp, synthetic construct
  source 1..75: mol_type = other DNA
tgtttgcggtgagtatcacgtcatccgccaatcccccgacgttttccctgacgccggagggcaggctgaccgcaa

SEQ ID NO: 681452 - DNA, 75 bp, synthetic construct
  source 1..75: mol_type = other DNA
acagtgggcaaagctttcccccgtgactcccgtgcaccggagcggtggccatcagggaccattaccgtcagggtt

SEQ ID NO: 681453 - DNA, 75 bp, synthetic construct
  source 1..75: mol_type = other DNA
aggcaggttgaaaccgcagcccgctatcttggctcggcgctgtactggatagctgccagtatcaatatcaaaccg

SEQ ID NO: 681454 - DNA, 75 bp, synthetic construct
  source 1..75: mol_type = other DNA
aatactctgatttacacgggtgttattgatatgcctgcaggcagtggtgtaatgacactggagttttctgtatca

SEQ ID NO: 681455 - DNA, 75 bp, synthetic construct
  source 1..75: mol_type = other DNA
atgatgcatccggctatctggattttttcaaaggcgagatagggaaaacccatctggctcaggagctgtggacgc

SEQ ID NO: 681456 - DNA, 75 bp, synthetic construct
  source 1..75: mol_type = other DNA
gttattgatatgcctgccggtcacggtcacatgacactggagttttcggtgtcagcatggctggtaaataactgg

SEQ ID NO: 681457 - DNA, 75 bp, synthetic construct
  source 1..75: mol_type = other DNA
atttatgaatgaagtgttcctgaaatatctgacggctcccaccattaccagcggcggcaatcccccgacgttttc

SEQ ID NO: 681458 - DNA, 75 bp, synthetic construct
  source 1..75: mol_type = other DNA
gaaggttcaggttgatacaaataataacctgaacagcatgtgggctgtgaagctgcagcagatgcaggacggacg

SEQ ID NO: 681459 - DNA, 75 bp, synthetic construct
  source 1..75: mol_type = other DNA
tactgcgctgtactggatagccgccagtagcaatattaagccgggttatgattattacttttatatccgcagcgt

SEQ ID NO: 681460 - DNA, 75 bp, synthetic construct
  source 1..75: mol_type = other DNA
tgacgccggggtattttcagataacggcggtaccggtgctggcggtgtatgacccgacggtacagtttgaattct

SEQ ID NO: 681461 - DNA, 75 bp, synthetic construct
  source 1..75: mol_type = other DNA
cctttatattgcgggtatcggtgccggtattgagaatacgccagcaggaatgcagagtcaggtgctgctggcggc

SEQ ID NO: 681462 - DNA, 75 bp, synthetic construct
  source 1..75: mol_type = other DNA
gctgcaggtctgccggacgatgacagtgatatggatggtgcggtgtttgcagcgtcatacggttatggtctggag

SEQ ID NO: 681463 - DNA, 75 bp, synthetic construct
  source 1..75: mol_type = other DNA
ggtggtaccgctgaacagctatgactggaacacggtgacgattgatgcgggtacgctgccgctgagcaccgaact

SEQ ID NO: 681464 - DNA, 75 bp, synthetic construct
  source 1..75: mol_type = other DNA
cagcagcacttcggtgagcgccggtaaagatggtagtacgggcttcagtacaggggtttccggctcgctgaatga

SEQ ID NO: 681465 - DNA, 75 bp, synthetic construct
  source 1..75: mol_type = other DNA
gcagccggtttgcctgacgatgacagtgacctgaaagggggggtgtttgctgcgtcatacggttacggtctggac

SEQ ID NO: 681466 - DNA, 75 bp, synthetic construct
  source 1..75: mol_type = other DNA
gtgcgtgcaggggggggagtcgctggagcgattttgtctgtactttttagggctgtatttgtgcttgccgtatca

SEQ ID NO: 681467 - DNA, 75 bp, synthetic construct
  source 1..75: mol_type = other DNA
ccggtggaaccagtggttctgtatctgtcaatggttctgtgctggcagtcccggccgcgaaagacatcatgttca

SEQ ID NO: 681468 - DNA, 75 bp, synthetic construct
  source 1..75: mol_type = other DNA
gatgcgggcacactgccgctgagcaccgaactgacgaacaccagtcagaaggtggtaccgacggacaaggcggtg

SEQ ID NO: 681469 - DNA, 75 bp, synthetic construct
  source 1..75: mol_type = other DNA
gcaagacagagaaggcgatatcatttccatcccacgttgggaaaaccaaacgccaccgacagtatctttagtttg

SEQ ID NO: 681470 - DNA, 75 bp, synthetic construct
  source 1..75: mol_type = other DNA
cagagggaaagaagctgaggtcgtctggacattgagtacgactcgcgctcagtataatacgggactgcgtgaaga

SEQ ID NO: 681471 - DNA, 75 bp, synthetic construct
  source 1..75: mol_type = other DNA
acgagttcagtgtggcagccggtttgcctgacgatgacagtgacctgaaaggcggtgtgtttgcggcgtcatacg

SEQ ID NO: 681472 - DNA, 75 bp, synthetic construct
  source 1..75: mol_type = other DNA
aatggtgtgctgatgattaacacggtggatgcgccgggtgatatcaccctgggccagtgccggatacctgcggcg

SEQ ID NO: 681473 - DNA, 75 bp, synthetic construct
  source 1..75: mol_type = other DNA
tcgcgtgaactataacgcgaacgccaacaccggccgtaataacacctcggcctttggctcagcggacctgaaggc

SEQ ID NO: 681474 - DNA, 75 bp, synthetic construct
  source 1..75: mol_type = other DNA
cagttatcctggagtaaacaactggagatgacgaacaccggactgcgggtgagctggtcacggcagagtgaggaa

SEQ ID NO: 681475 - DNA, 75 bp, synthetic construct
  source 1..75: mol_type = other DNA
tgtcgcttgggattattggcgttgtcgtggcggtcggtattgtcgccagcgtcgtgctgttcttacgtaaacgtg

SEQ ID NO: 681476 - DNA, 75 bp, synthetic construct
  source 1..75: mol_type = other DNA
gacgttggcgccggccccgcctccggcgttgggtatgcgacggccatcggcgccatgattatcccggtgattttt

SEQ ID NO: 681477 - DNA, 75 bp, synthetic construct
  source 1..75: mol_type = other DNA
ttacccctcgctgacctgccggtcgctccgttctttatctgtatggcgacggttatccaccgtggagacctgatc

SEQ ID NO: 681478 - DNA, 75 bp, synthetic construct
  source 1..75: mol_type = other DNA
tcttggctgaagtgaagactgaagcacgcaaggagggcgcttactttgtggcgaacagaatgctggctgcctggg

SEQ ID NO: 681479 - DNA, 75 bp, synthetic construct
  source 1..75: mol_type = other DNA
ggccgacggctctatccgctggagaccatgctgcgtattcactgcatgcagcattggtacaacctgagcgacggt

SEQ ID NO: 681480 - DNA, 75 bp, synthetic construct
  source 1..75: mol_type = other DNA
aaaagagttgcagatggtggtaaaggttcggcaaaaaatactcagttaactcacccgtattgcaatatgtctgtc

SEQ ID NO: 681481 - DNA, 75 bp, synthetic construct
  source 1..75: mol_type = other DNA
cgaaggggaagaaatttctctttggtttattggcagttttcattattgcggcgtcggtagtgactcgcgcaacca

SEQ ID NO: 681482 - DNA, 75 bp, synthetic construct
  source 1..75: mol_type = other DNA
gcagtgacagtggggatggctacggctcgataaacatgttcacggctacccgtgccattcgtgcactgagtgcgg

SEQ ID NO: 681483 - DNA, 75 bp, synthetic construct
  source 1..75: mol_type = other DNA
gggggcggtatctgctgacggggcttatgccacggcgaaataccgtgacggcagccacagtgggaataaggtgca

SEQ ID NO: 681484 - DNA, 75 bp, synthetic construct
  source 1..75: mol_type = other DNA
cccctatcaaagtgatgattgagcgtttcggcctagccctgcatgtctttgacgttggcgcaggccctgcctccg

SEQ ID NO: 681485 - DNA, 75 bp, synthetic construct
  source 1..75: mol_type = other DNA
gagttctgtttgatcattgcagaacttagcgggaggcgccatgcgtacatcactaatgttatttccttctatcat

SEQ ID NO: 681486 - DNA, 75 bp, synthetic construct
  source 1..75: mol_type = other DNA
tgattcttgtttatagtctggtctttactgtattgctggcaatcccgctgggaatttatttcctcggtggtgatg

SEQ ID NO: 681487 - DNA, 75 bp, synthetic construct
  source 1..75: mol_type = other DNA
gcggagaagagaagggaatttctggttcgctgaatacgcagatccggggagtgaatgtaagccttggtgcttctg

SEQ ID NO: 681488 - DNA, 75 bp, synthetic construct
  source 1..75: mol_type = other DNA
ccattcagagaagtggcgttagagtggcacaaaatgaaatcacccaaatggtctgagggctatgcttccgacatc

SEQ ID NO: 681489 - DNA, 75 bp, synthetic construct
  source 1..75: mol_type = other DNA
aagtatgctgttgtgactggcagggccgagtacaatccagcacctgatctagccagcgccgtgagtcctcatgag

SEQ ID NO: 681490 - DNA, 75 bp, synthetic construct
  source 1..75: mol_type = other DNA
gcagggatttaattcagcttggatcgagctacagttggctcacgtcgataagaactcaattcgtgggacctataa

SEQ ID NO: 681491 - DNA, 75 bp, synthetic construct
  source 1..75: mol_type = other DNA
gcaggggtataactccgcatggatagaaacgcagctggcgcacgtcgataaaaactcgatccgtggcacatacaa

SEQ ID NO: 681492 - DNA, 75 bp, synthetic construct
  source 1..75: mol_type = other DNA
tcgtgtagctggtaaagagaagctattggcactaggtgtgtatcctgaggttactctagccgatgcgcgagctaa

SEQ ID NO: 681493 - DNA, 75 bp, synthetic construct
  source 1..75: mol_type = other DNA
gtctgagggctatgcttccgacatcattgaggcattcgagaaagacattttcccgcatattgggcacagacctat

SEQ ID NO: 681494 - DNA, 75 bp, synthetic construct
  source 1..75: mol_type = other DNA
cccacgttagtgtggccagttccacttctgcacggtttttccagctcttacggtgtattacctccgctttgtaaa

SEQ ID NO: 681495 - DNA, 75 bp, synthetic construct
  source 1..75: mol_type = other DNA
aggagtatggcccagccttcccagcaatcgtcgattgttataccagtccacccacgttagtgtggccagttccac

SEQ ID NO: 681496 - DNA, 75 bp, synthetic construct
  source 1..75: mol_type = other DNA
gaaataatatacgtggtacttataatcatgctcaatatttagaaaaaagaataagcatgatgcaatggtattcaa

SEQ ID NO: 681497 - DNA, 75 bp, synthetic construct
  source 1..75: mol_type = other DNA
tcatgctcactatttagaaagaagaaggcatatgcttgaaaattatagtaatttattattaggtaaggtttcaaa

SEQ ID NO: 681498 - DNA, 75 bp, synthetic construct
  source 1..75: mol_type = other DNA
ctacaagctggcagatggtgctggtttgtatcttgaagtcgttccctctggttctcgatactggcgaatgaaata

SEQ ID NO: 681499 - DNA, 75 bp, synthetic construct
  source 1..75: mol_type = other DNA
gaacgaaggtgagccggtggtcagaaggttatgcctccgacattatcgaagccttcaataaagatattttccctt

SEQ ID NO: 681500 - DNA, 75 bp, synthetic construct
  source 1..75: mol_type = other DNA
gcaggggcgggcggatattgttatcgcgccggatatgcattttcgttcttcgtcggagatcaactcgcgcaagct

SEQ ID NO: 681501 - DNA, 75 bp, synthetic construct
  source 1..75: mol_type = other DNA
ccggatgtgtgggctgccttaaatagtaattatgcaccggggcgttatcttgttgagttatccctgaacgggaaa

SEQ ID NO: 681502 - DNA, 75 bp, synthetic construct
  source 1..75: mol_type = other DNA
acagcttcctgatgtctgaatctgacattccagtgccaggaatacggcgaatgattcagataaaaaagacgtatc

SEQ ID NO: 681503 - DNA, 75 bp, synthetic construct
  source 1..75: mol_type = other DNA
cctggggtacaccccggtgttcagcggcattgcgaacgggccgtcgagggtgaccctgacacagaacggacgctt

SEQ ID NO: 681504 - DNA, 75 bp, synthetic construct
  source 1..75: mol_type = other DNA
tatccggttcactgaatgatcgcttcagttatggtcttggtggtggtcgtgatggtgatggtggtgccagcggtt

SEQ ID NO: 681505 - DNA, 75 bp, synthetic construct
  source 1..75: mol_type = other DNA
tggtcgccatacaaaggatgaatggaatatgggtatcagtcagccggtgggcggactgtttaatctgtcagtatc

SEQ ID NO: 681506 - DNA, 75 bp, synthetic construct
  source 1..75: mol_type = other DNA
ggaatatccctgagccggaataacagtatgaagcccggcaacttgggatacagcccggtgttcagtggcatagcg

SEQ ID NO: 681507 - DNA, 75 bp, synthetic construct
  source 1..75: mol_type = other DNA
accgcccaatcaagaaggttcatccaatttatagcagcagcggggtgcagatggtgattgcacctcatattgtcc

SEQ ID NO: 681508 - DNA, 75 bp, synthetic construct
  source 1..75: mol_type = other DNA
agaactcaattcgtggcacatacaaccatgcgcaatatctggatggaaggcgggagatgcttcaatggtatgccg

SEQ ID NO: 681509 - DNA, 75 bp, synthetic construct
  source 1..75: mol_type = other DNA
agctctctctggctatacaggcagcccgttagttgttcttgccgcacgtttgctgatccttacgggagttcgtac

SEQ ID NO: 681510 - DNA, 75 bp, synthetic construct
  source 1..75: mol_type = other DNA
gcgttacctgctgcaggtgaagcagcgtgacggtgagtttgtaccgggtggaacctgggcgcgggacagtaagaa

SEQ ID NO: 681511 - DNA, 75 bp, synthetic construct
  source 1..75: mol_type = other DNA
tggctgacgaaggccggtgtttatgtcagtgcagattactttcgtgagggatatgacgccacacgacagtgctat

SEQ ID NO: 681512 - DNA, 75 bp, synthetic construct
  source 1..75: mol_type = other DNA
accggagagtgggtgttgctggtgagtggcagttccgcccgccaggcgcataaaagcgaaacatcgccggtcgac

SEQ ID NO: 681513 - DNA, 75 bp, synthetic construct
  source 1..75: mol_type = other DNA
acgggatcgatgttgtttcgtttggtaactctctgcatgacccggactgctattacctgattcgcgcctttgtca

SEQ ID NO: 681514 - DNA, 75 bp, synthetic construct
  source 1..75: mol_type = other DNA
cagttctcttcactacaaatggaagtgcaaccgctggcggagacggaatacgccgagttaaaacagcttggtctg

SEQ ID NO: 681515 - DNA, 75 bp, synthetic construct
  source 1..75: mol_type = other DNA
tcgaagttcagtcaacgccagaaggccaacaaaaagtcggtacaatcagtgctaacgcggggacaaatctgggat

SEQ ID NO: 681516 - DNA, 75 bp, synthetic construct
  source 1..75: mol_type = other DNA
cgatggcctgatgggcggcggctttctttataccaatgaaaacactctgtcgctggggttggtttgtggtctcca

SEQ ID NO: 681517 - DNA, 75 bp, synthetic construct
  source 1..75: mol_type = other DNA
tatattttgcgcatggtgcctaaaggtacgcatgatgtgaagaagtttattaaaccggcagaattgctgggctgg

SEQ ID NO: 681518 - DNA, 75 bp, synthetic construct
  source 1..75: mol_type = other DNA
cgacgctttttacgcaagcgatgactggcgcagcggcccgcgcgaagacatcattggcaacatagaggccagcat

SEQ ID NO: 681519 - DNA, 75 bp, synthetic construct
  source 1..75: mol_type = other DNA
ttcatggttgttacgatgaactgatcgcattgctgcataaagtagaatttacccctgggaaagataccctctggc

SEQ ID NO: 681520 - DNA, 75 bp, synthetic construct
  source 1..75: mol_type = other DNA
aaacggccacgggaccactccgaccgcgcacagaagctctctcatggctgaaaacgggtatggtctggcagggca

SEQ ID NO: 681521 - DNA, 75 bp, synthetic construct
  source 1..75: mol_type = other DNA
atgagatgggcgcaaaatcattccgtattacttctgtaaccggtccaaataccctccatggaacagcagtaattt

SEQ ID NO: 681522 - DNA, 75 bp, synthetic construct
  source 1..75: mol_type = other DNA
atcaccaacgcctttacccggatgcgtttttgcttcccgaacggtcaactggatatgtacagcaaagaatcgccg

SEQ ID NO: 681523 - DNA, 75 bp, synthetic construct
  source 1..75: mol_type = other DNA
ggtacattaacctgcctgcgctgggaagataaacactattttgtccagccgtcgaaccggcataaagatatgggt

SEQ ID NO: 681524 - DNA, 75 bp, synthetic construct
  source 1..75: mol_type = other DNA
aaaccgacgtcgcaggcgaagcagaaaaactgcgtgaacgcctggcgcgcatcaacgcccgtgcaccggtctaca

SEQ ID NO: 681525 - DNA, 75 bp, synthetic construct
  source 1..75: mol_type = other DNA
acacctttccaatgctgaacccgaaaaccattgttaaattgtttgattcgattgacgcctggcgtaaaccacagc

SEQ ID NO: 681526 - DNA, 75 bp, synthetic construct
  source 1..75: mol_type = other DNA
aaggtgtagagattcgcgaggagctgactcgccgccggattgcagcggtcaccaactggaaggaacagcgttgcc

SEQ ID NO: 681527 - DNA, 75 bp, synthetic construct
  source 1..75: mol_type = other DNA
ggcagacatggctgctgccggtgacggcagatacgccggtcggggaagaccccggctaccacgacgattttctgc

SEQ ID NO: 681528 - DNA, 75 bp, synthetic construct
  source 1..75: mol_type = other DNA
aaagcggtcgttgaagcgggatttaaaggcgtggagattcgcgaagagttgacccgacgccggattgcggcggta

SEQ ID NO: 681529 - DNA, 75 bp, synthetic construct
  source 1..75: mol_type = other DNA
tatgccagcgtctgcgcgtgccaaatgaaattcgcgatttagccagactggtggctgagtttcacgatctcatcc

SEQ ID NO: 681530 - DNA, 75 bp, synthetic construct
  source 1..75: mol_type = other DNA
gcaggcgtgaaattagtagaacaattgtgccagcgcctgcgcgtccctaatgaaatccgcgatttagccaaactg

SEQ ID NO: 681531 - DNA, 75 bp, synthetic construct
  source 1..75: mol_type = other DNA
ccgaaaaatggatgccctgctgggtacactggtggcaatcaatccggtgcgggcagcggtattgtgtgatacgca

SEQ ID NO: 681532 - DNA, 75 bp, synthetic construct
  source 1..75: mol_type = other DNA
ctgtatgcgcagcagaactggacggaactgctggagcaggccgacctgatgttcagcaccggcgtcagccatttc

SEQ ID NO: 681533 - DNA, 75 bp, synthetic construct
  source 1..75: mol_type = other DNA
aagggatgctgtggattgacggcgaacctaaccgcctgctgttccagggcgtccagcgcctctacagcgccgact

SEQ ID NO: 681534 - DNA, 75 bp, synthetic construct
  source 1..75: mol_type = other DNA
ggcgctgttagccgggctggtggaacgcttcggtacgcaactgctgccctcgcgcccggcaagccgaaaaatggc

SEQ ID NO: 681535 - DNA, 75 bp, synthetic construct
  source 1..75: mol_type = other DNA
ccatcacctccgggcgtgacctgctcgaccaggcgaaagtgctggcccgttatctgaacgaacagccgcagggct

SEQ ID NO: 681536 - DNA, 75 bp, synthetic construct
  source 1..75: mol_type = other DNA
gcgtgaaggaactgatcgagttaccgaagtcggttatcgaagaccgttttcagttgcagggtaatcagggcgcgg

SEQ ID NO: 681537 - DNA, 75 bp, synthetic construct
  source 1..75: mol_type = other DNA
attcgtcgtttttctgacattccgatcgtgatggtgacagcaaaaatcgaagagatcgaccgcctgctggggctg

SEQ ID NO: 681538 - DNA, 75 bp, synthetic construct
  source 1..75: mol_type = other DNA
cgggtatcaacatgttgccggaactggttggtgacggcgtgctgattgccggtgatgccgccggaatgtgtatga

SEQ ID NO: 681539 - DNA, 75 bp, synthetic construct
  source 1..75: mol_type = other DNA
aatcgctggctggccaaagcaggcgtcatgatgacccaaggcactttggtggatgccaccatcattgaggcaccc

SEQ ID NO: 681540 - DNA, 75 bp, synthetic construct
  source 1..75: mol_type = other DNA
tcgcctccatgcgcctgtttgcccgcttatccctggatagcgccgtgccggagcgcaccaccatcatgaatttcc

SEQ ID NO: 681541 - DNA, 75 bp, synthetic construct
  source 1..75: mol_type = other DNA
gaactcatgggggaggtttattcgaaccgctggacccagaaaaacggggccgcaccttcgaagctctggattgca

SEQ ID NO: 681542 - DNA, 75 bp, synthetic construct
  source 1..75: mol_type = other DNA
acagccgaacctgaatacctggacggccttagcgaacccatcgggaaatttccgatgactggtgactggcatccg

SEQ ID NO: 681543 - DNA, 75 bp, synthetic construct
  source 1..75: mol_type = other DNA
aaaacaagagagagatttaacaggcgttcaaacaaatgttggtgttgtgtttgaacatgacgcaaacacaaaagc

SEQ ID NO: 681544 - DNA, 75 bp, synthetic construct
  source 1..75: mol_type = other DNA
gagcaggatgaactatctgatgcgtatatctgtgcaatagacggaaggatgccgcaaatcccagccaccgacgct

SEQ ID NO: 681545 - DNA, 75 bp, synthetic construct
  source 1..75: mol_type = other DNA
tttgtcaggtacgaaaaagttgcaggactggatgatagcgatacagtaacgcttaaggaagcgacagaagcattg

SEQ ID NO: 681546 - DNA, 75 bp, synthetic construct
  source 1..75: mol_type = other DNA
aataagcgattcatagcggcagccaatccggctaccgtgctggcagtgcttgatgaacgggaagcccaaagcaaa

SEQ ID NO: 681547 - DNA, 75 bp, synthetic construct
  source 1..75: mol_type = other DNA
agcaggatgaactatctgatgcgtatatctgcgcaatagacggaaggatgccgcaaatcccagccaccgacgctt

SEQ ID NO: 681548 - DNA, 75 bp, synthetic construct
  source 1..75: mol_type = other DNA
agcggcggagcgggaacaagttcagtatctggcccgcagggcgatattcttcccgtcagcaattcgacgctgaaa

SEQ ID NO: 681549 - DNA, 75 bp, synthetic construct
  source 1..75: mol_type = other DNA
ctggaaggcagtgaaccgacgccgacaccacagccagtggtcacagcaccggcttcaacgcctgcaacaacacct

SEQ ID NO: 681550 - DNA, 75 bp, synthetic construct
  source 1..75: mol_type = other DNA
tccgatggccggtggctggcatccgtcgccggattttcgacggcgggctgcactgtggggagtggctctgccgga

SEQ ID NO: 681551 - DNA, 75 bp, synthetic construct
  source 1..75: mol_type = other DNA
atgtggactggctgatcgccgagcgtcccggcaaggtaaaaaccttgaagcagcatccgcgcaagaacaaaacgg

SEQ ID NO: 681552 - DNA, 75 bp, synthetic construct
  source 1..75: mol_type = other DNA
gcaacacacttccgcctctctgacacttaatgagaattgcgaccccacggtacgccaggacatggagcgtttttt

SEQ ID NO: 681553 - DNA, 75 bp, synthetic construct
  source 1..75: mol_type = other DNA
agtgagtcgaatggcgcgccgttgcaggcagcggaacctgattacctggaaggtctgagcgaacccatcggaaaa

SEQ ID NO: 681554 - DNA, 75 bp, synthetic construct
  source 1..75: mol_type = other DNA
tgcactgtggggagtggctctgccggagcctgaatttacacctgctgaacttgccgccttcagggactactgggc

SEQ ID NO: 681555 - DNA, 75 bp, synthetic construct
  source 1..75: mol_type = other DNA
gcgcgtgcgcgagagtgctccgaccagtgaaccgaacggtacgccgttgcaggtggcggaaactgaatttccgga

SEQ ID NO: 681556 - DNA, 75 bp, synthetic construct
  source 1..75: mol_type = other DNA
cccatcgggaaatttccgatgactggtgactggcatccgtcgctggattttcgacggcgggctgcgctgtggggg

SEQ ID NO: 681557 - DNA, 75 bp, synthetic construct
  source 1..75: mol_type = other DNA
atggccaacgcctggctcagattatggcatgacatgccaaatgaccctaagtggcgaacaatttcaagggtgtca

SEQ ID NO: 681558 - DNA, 75 bp, synthetic construct
  source 1..75: mol_type = other DNA
accagtcagcaagggggtaagccatgcagcaccaggtggcacggcatcacgggcagttcaggaaatccgggcagc

SEQ ID NO: 681559 - DNA, 75 bp, synthetic construct
  source 1..75: mol_type = other DNA
atgagtcacgacgcgtcacgcatatgtcacgacaaatcacgacagatacagatacagataaagaattaaacccca

SEQ ID NO: 681560 - DNA, 75 bp, synthetic construct
  source 1..75: mol_type = other DNA
ttcttggtgatgcgtatattgatacacaaacgcttgaaattaatatgacaggcggtgctgcctcaaggattacag

SEQ ID NO: 681561 - DNA, 75 bp, synthetic construct
  source 1..75: mol_type = other DNA
taacgattcgctggatatgattacgggcttttcgccatcatataaaaaaattgttattggtgacgatgaaataac

SEQ ID NO: 681562 - DNA, 75 bp, synthetic construct
  source 1..75: mol_type = other DNA
aaattaacaaatctggtgtgctgacagaggctgccattgacgagccacgatttgaacgtgatggcctgcttattg

SEQ ID NO: 681563 - DNA, 75 bp, synthetic construct
  source 1..75: mol_type = other DNA
tactagattcacctaacagtcgtctatatgttgagcttaaaaataatcttaacgttagtcgaggacatcgtttgt

SEQ ID NO: 681564 - DNA, 75 bp, synthetic construct
  source 1..75: mol_type = other DNA
caactagaaaagttgatatcaataattgatagtccggtaaagaatcgactttgtgataagatagctaacaacctc

SEQ ID NO: 681565 - DNA, 75 bp, synthetic construct
  source 1..75: mol_type = other DNA
aggttctgcctggcgtggtgggattgggcaattgttggttttgcattcttactaagcaattatttggtgtttgca

SEQ ID NO: 681566 - DNA, 75 bp, synthetic construct
  source 1..75: mol_type = other DNA
aagattgttaagtttaagcgggcatctgaagcgacatatattgataaatccggggggctttgtattgcgtctgta

SEQ ID NO: 681567 - DNA, 75 bp, synthetic construct
  source 1..75: mol_type = other DNA
tgtgctgacagaggctgccattgacgagccacgatttgaacgtgatggcctgcttattgaggggcaaagaacaaa

SEQ ID NO: 681568 - DNA, 75 bp, synthetic construct
  source 1..75: mol_type = other DNA
aatggttatggggatgcgtgtaaagtcagatcagtctacgtgctcagtaagtaacgggcgtatatccagcgaaaa

SEQ ID NO: 681569 - DNA, 75 bp, synthetic construct
  source 1..75: mol_type = other DNA
gctaacagtcaaaaagcagcaaaaaccagtgaaaccaacgcaaaggtgagcgaaacagcggctgcgaactcagcg

SEQ ID NO: 681570 - DNA, 75 bp, synthetic construct
  source 1..75: mol_type = other DNA
ctcgggggctgtcgatgtatcaggcgataataagtgtgtgacgacatcgtgcagatttaaaacggatttggaact

SEQ ID NO: 681571 - DNA, 75 bp, synthetic construct
  source 1..75: mol_type = other DNA
gcgaaaaacagtgagacagccgcaaagacgagcgaaaccaacgcgaagtccagccagacggcagcgaaaaccagc

SEQ ID NO: 681572 - DNA, 75 bp, synthetic construct
  source 1..75: mol_type = other DNA
tatcttgttatattaggttgaaaaggaataaaaaattaaaagacgtcgctgactcattattaattttcaccacta

SEQ ID NO: 681573 - DNA, 75 bp, synthetic construct
  source 1..75: mol_type = other DNA
ttgttgcctttaccggcagtcagggcggcgggcagttaagtccggtgcgtttaaccctggcgggcgtggcgctgg

SEQ ID NO: 681574 - DNA, 75 bp, synthetic construct
  source 1..75: mol_type = other DNA
gcgtttctgtagtcagtgcctttattggtgcaccagtgctgatcttcctcgtacgacgtaaaacgcgaggtggcg

SEQ ID NO: 681575 - DNA, 75 bp, synthetic construct
  source 1..75: mol_type = other DNA
gccagctgtgaccgtctccgggagctgcatgtgtcagaggttttcaccgtcatccccgaagcgtgcgaggcagct

SEQ ID NO: 681576 - DNA, 75 bp, synthetic construct
  source 1..75: mol_type = other DNA
ggtgttaatggccaaaaaaacaactggttgttattaccagaagattatattaaaaatattattacagccgatttc

SEQ ID NO: 681577 - DNA, 75 bp, synthetic construct
  source 1..75: mol_type = other DNA
cccgtctgccgcgcacccttgccggtttactggcaggcggtgcgcttggccttgccggggcgttaatgcaaaccc

SEQ ID NO: 681578 - DNA, 75 bp, synthetic construct
  source 1..75: mol_type = other DNA
tctgtggtcagtgcgtttattggcgcaccggtgctgatcttcctcgtgcgacgtaaaacgcgaggtggcgcatga

SEQ ID NO: 681579 - DNA, 75 bp, synthetic construct
  source 1..75: mol_type = other DNA
aatgatgaacaactggtattggctttcaggacgcctacaagtccggatgtagaacctttaccttatgttcagttt

SEQ ID NO: 681580 - DNA, 75 bp, synthetic construct
  source 1..75: mol_type = other DNA
atcaggggcagcagcaaataagatagcggtagtcaaaaatgatgcagttacaatatcctttagagcaaaagggga

SEQ ID NO: 681581 - DNA, 75 bp, synthetic construct
  source 1..75: mol_type = other DNA
agccaggcagctgagccgtataaacaagttttgcagccgttgcctgatgtgtggataccgtttaatgactcgatg

SEQ ID NO: 681582 - DNA, 75 bp, synthetic construct
  source 1..75: mol_type = other DNA
gcgaagaccagcgaaacgaatgccaaagccagcgaaactgcggcgaaaaacagtcaggatgcagcagcccaaagc

SEQ ID NO: 681583 - DNA, 75 bp, synthetic construct
  source 1..75: mol_type = other DNA
tagatgcagtgcatcccgggggattgatgttagtggcgataataagtattgcactgtttcatgcagggttaaagc

SEQ ID NO: 681584 - DNA, 75 bp, synthetic construct
  source 1..75: mol_type = other DNA
cgacagcagccaaaaaatcagaaaccaacgcgaaaaatagcgagacagccgcaaagacgagcgaaaccaacgcaa

SEQ ID NO: 681585 - DNA, 75 bp, synthetic construct
  source 1..75: mol_type = other DNA
gttattggtcgggtgattgtcagtgaagcgttgcgtggcgaaaaagtggggcagcaactgatgagtaaaaccctc

SEQ ID NO: 681586 - DNA, 75 bp, synthetic construct
  source 1..75: mol_type = other DNA
accggtggtcatcaaaccggagcggctattattcttggcttcggtcgttcaacagattatgacggatttccttat

SEQ ID NO: 681587 - DNA, 75 bp, synthetic construct
  source 1..75: mol_type = other DNA
atgattacgggcttttcgccgtcatataaaaagattgttattggtgatgatgaaataacgatgcctggcgacaag

SEQ ID NO: 681588 - DNA, 75 bp, synthetic construct
  source 1..75: mol_type = other DNA
ggttaaggctgacggcatgacatgctcatttgcaaataagaatataagcactgaaaccaaaacagtatggaaata

SEQ ID NO: 681589 - DNA, 75 bp, synthetic construct
  source 1..75: mol_type = other DNA
aggctacaattactgcactagatacagagagcatgattggtgcgatggttcaatacgctccagtaaaaggttcag

SEQ ID NO: 681590 - DNA, 75 bp, synthetic construct
  source 1..75: mol_type = other DNA
gcactgtttcatgcagggttaaagctcctgatggtcttcgttgtcgtttgcgttttgaaaaatacgatgggtcgg

SEQ ID NO: 681591 - DNA, 75 bp, synthetic construct
  source 1..75: mol_type = other DNA
ttaacagcaaactttgaaatcgatccaggtagtggatggatatattttcaggcaacactgaaatgtctgccagaa

SEQ ID NO: 681592 - DNA, 75 bp, synthetic construct
  source 1..75: mol_type = other DNA
attgttggtacaagtaaagcgcataccattatcgggctgtattcgagtaccggaggggttgatacttcaggggac

SEQ ID NO: 681593 - DNA, 75 bp, synthetic construct
  source 1..75: mol_type = other DNA
gtaactgaagcgggagattatatttaccttgcaacaccacaatttgaaaacggcggatgtgcttcatcttttgtt

SEQ ID NO: 681594 - DNA, 75 bp, synthetic construct
  source 1..75: mol_type = other DNA
tcatttatttggttatatcaggaattttagaatatggcataaagaattaaccgatgcgcaaatgggagagataat

SEQ ID NO: 681595 - DNA, 75 bp, synthetic construct
  source 1..75: mol_type = other DNA
gcggcggctaactcggcgaaagcatccgctgcaagccagacggctgcaaaagcaagtgaagacgcagccagagag

SEQ ID NO: 681596 - DNA, 75 bp, synthetic construct
  source 1..75: mol_type = other DNA
tccagaccaggtacgctgaatgattttctcggcgccatgacggaagatgatgtcatgccggaggcactgcgccgt

SEQ ID NO: 681597 - DNA, 75 bp, synthetic construct
  source 1..75: mol_type = other DNA
cgttgaaaaaaatggttatggggatgcgtgtaaagtcagatcagtctacatgtgcagtaagtaacgggcgtatat

SEQ ID NO: 681598 - DNA, 75 bp, synthetic construct
  source 1..75: mol_type = other DNA
cagcaggattacgccatttatttgggcatgtgaggaattttcgtctctggcataaagagctaacagatgcgcagc

SEQ ID NO: 681599 - DNA, 75 bp, synthetic construct
  source 1..75: mol_type = other DNA
ttccttttacggttctttgtgaggtacataagaactggtataaaacgccaaatgcagcaccgcgtgtttttgaca

SEQ ID NO: 681600 - DNA, 75 bp, synthetic construct
  source 1..75: mol_type = other DNA
ttctcagccatcacatgttgggaccattaccgtctatgaaggttccagtccggggacgctgaatgattttctcgg

SEQ ID NO: 681601 - DNA, 75 bp, synthetic construct
  source 1..75: mol_type = other DNA
tgtgctgacagaggctaccattgacgagccacgatttgaacgtgatggcctgcttattgaggggcaaagaacgaa

SEQ ID NO: 681602 - DNA, 75 bp, synthetic construct
  source 1..75: mol_type = other DNA
gcagctgagccgtataaacaagttttgcagccgttgcctgatgtgtggataccgtttaatgactcgatggatatg

SEQ ID NO: 681603 - DNA, 75 bp, synthetic construct
  source 1..75: mol_type = other DNA
ggacgctgaatgattttctcggtgccatgacggaagatgatgtcatgccggaggcattgcgtcgttttgaggcaa

SEQ ID NO: 681604 - DNA, 75 bp, synthetic construct
  source 1..75: mol_type = other DNA
caacaacagcgacaagcgcagccgattcagctaagacatacagagacgaagcccacgaatacgccaatcagacgg

SEQ ID NO: 681605 - DNA, 75 bp, synthetic construct
  source 1..75: mol_type = other DNA
ggctgcgaactcagcgaaagcatcggcagcaagccagacggcagctaaagcaagcgaagatgcagccagagagta

SEQ ID NO: 681606 - DNA, 75 bp, synthetic construct
  source 1..75: mol_type = other DNA
tatgattacgggcttttcgccatcatataaaaagattgttattggcgacgacgaaataacaatgcctggcgacaa

SEQ ID NO: 681607 - DNA, 75 bp, synthetic construct
  source 1..75: mol_type = other DNA
agaactgcaggtaaggttgcgtatccggtttgataaatatgacggtagcgcaacaacttttcttggtgatgcgta

SEQ ID NO: 681608 - DNA, 75 bp, synthetic construct
  source 1..75: mol_type = other DNA
gattacgccatttatttgggcatgtgaggaattttcgtctctggcataaagagctaacagatgcgcagcttggga

SEQ ID NO: 681609 - DNA, 75 bp, synthetic construct
  source 1..75: mol_type = other DNA
attgttggtacaagttggatttgcccctatatttccagacacctgttatcacttaacccatcactggcccactgc

SEQ ID NO: 681610 - DNA, 75 bp, synthetic construct
  source 1..75: mol_type = other DNA
aaactgcggcgaaaaacagccaggatgcagcggcccaaagcgagagtgacgcagctggttctgcaagtgcggcgg

SEQ ID NO: 681611 - DNA, 75 bp, synthetic construct
  source 1..75: mol_type = other DNA
gatcggcgtttatcttgggcaatttgcggtggcttctacactgtggtttttcttaacctggttcccgaactattt

SEQ ID NO: 681612 - DNA, 75 bp, synthetic construct
  source 1..75: mol_type = other DNA
atgtcattaattggtctgcgcgcgataaccggtattttcgaagcgcccgctttcccgaccaataaccggatggtg

SEQ ID NO: 681613 - DNA, 75 bp, synthetic construct
  source 1..75: mol_type = other DNA
agccggggcgtcggcgttatctgacgctggtgatgatctttattacggtggtcatttgttatgttgaccgcgcca

SEQ ID NO: 681614 - DNA, 75 bp, synthetic construct
  source 1..75: mol_type = other DNA
gccacgggattaatgtcattaattggtctgcgcgcgataaccggtattttcgaagcgcccgctttcccgaccaat

SEQ ID NO: 681615 - DNA, 75 bp, synthetic construct
  source 1..75: mol_type = other DNA
ggctgaccccatgctgattgtggtggagcgcgataaagcgtccggccagaacgacgcggcccggggtgatgagct

SEQ ID NO: 681616 - DNA, 75 bp, synthetic construct
  source 1..75: mol_type = other DNA
atgtcatctcaaaactacacagagaaagcagtaaaggctgcgggaaagtctttatctgaagtagcccgtcgcttt

SEQ ID NO: 681617 - DNA, 75 bp, synthetic construct
  source 1..75: mol_type = other DNA
tataggtaggaattctgatgctaaaaattacccatttattttctcaatagctcactcattgcgagagtacgaaaa

SEQ ID NO: 681618 - DNA, 75 bp, synthetic construct
  source 1..75: mol_type = other DNA
ccattgtcgacccaagcgttagatttacttaatgaactcaagataatgacagggaactatcgttatgtttttccg

SEQ ID NO: 681619 - DNA, 75 bp, synthetic construct
  source 1..75: mol_type = other DNA
gtgctgcgtcgaattgaaagccgtggcgcgacagagaaggccaagaaggttcgccagcgttgcagcgaagtcttt

SEQ ID NO: 681620 - DNA, 75 bp, synthetic construct
  source 1..75: mol_type = other DNA
gaaacccagcttgcgcatgttgataagaatgcgattcgtgggacgtataaccatgcgttgtatctggaagggcga

SEQ ID NO: 681621 - DNA, 75 bp, synthetic construct
  source 1..75: mol_type = other DNA
acgttgtcaggtaaaactaagctattttaccgatgcaactaaaaaagaaggtttctttgtaatttatacctgctt

SEQ ID NO: 681622 - DNA, 75 bp, synthetic construct
  source 1..75: mol_type = other DNA
ctaacctaaaggtagagttaggcacttatacagcaggtagtgataccccagcaatcgattttaaagagattccag

SEQ ID NO: 681623 - DNA, 75 bp, synthetic construct
  source 1..75: mol_type = other DNA
ggctgagcgcgtagctatagctgaaggccatcttttccgggtggcttttgcgatattttttcagctcagtcaggc

SEQ ID NO: 681624 - DNA, 75 bp, synthetic construct
  source 1..75: mol_type = other DNA
tctgaaagagctgggaaatcattgttttatggtagttttataacacattattgtggtgttcctgatataatgctg

SEQ ID NO: 681625 - DNA, 75 bp, synthetic construct
  source 1..75: mol_type = other DNA
ccagataatgaagtacaccaaaagttagaacagcttgccgatgatcaaaaacgttgtcagatcaaactcagctat

SEQ ID NO: 681626 - DNA, 75 bp, synthetic construct
  source 1..75: mol_type = other DNA
tgacggtgataaagatgaagtagtaactaaatctttcaacctagctgtagacggtgcagccgttgaagcaggtac

SEQ ID NO: 681627 - DNA, 75 bp, synthetic construct
  source 1..75: mol_type = other DNA
ccgcacgcattattttcaggatgcacaactggatatgcattttgccgggctgacgtatgccgtactcagcctgtt

SEQ ID NO: 681628 - DNA, 75 bp, synthetic construct
  source 1..75: mol_type = other DNA
attccgcgatcccattctggcgcgactgggccgttttgctggacgattaggtaaaagctcgcgccgtcgtgcgtt

SEQ ID NO: 681629 - DNA, 75 bp, synthetic construct
  source 1..75: mol_type = other DNA
aatacattcctgagtttgataaatcctttcgccacccgcgctactggggagcatggctgggcgtagcagcgatgg

SEQ ID NO: 681630 - DNA, 75 bp, synthetic construct
  source 1..75: mol_type = other DNA
gtgttcacagaatggcatctgcatcagaccgtagtattggaatactacgtgatgtgaatgacaaattcattcgtc

SEQ ID NO: 681631 - DNA, 75 bp, synthetic construct
  source 1..75: mol_type = other DNA
atgagcgagttaaatcatcagggcaattaaccccagaactgatcgcgcgcttatatcatgttgaacctgacttta

SEQ ID NO: 681632 - DNA, 75 bp, synthetic construct
  source 1..75: mol_type = other DNA
tctctttctctgtcgaggatcccggagattttcaatggcatagagcgcttacgccaacaactcgcaagccgcccg

SEQ ID NO: 681633 - DNA, 75 bp, synthetic construct
  source 1..75: mol_type = other DNA
tccagagcaatacacctggattttaaaattgctcaagactcgcaagccgggcgaaatccagccatataaacgcaa

SEQ ID NO: 681634 - DNA, 75 bp, synthetic construct
  source 1..75: mol_type = other DNA
atccgtaagccaatgagcgaaatcgaaatggttgctgcgatggctcttgaagccgttcgtcagcaaaaacgcctc

SEQ ID NO: 681635 - DNA, 75 bp, synthetic construct
  source 1..75: mol_type = other DNA
atgaacaccgcaatttttaacggcaaagcatccatgaccagccttgaaatcgcagagttggtgggcagccaacac

SEQ ID NO: 681636 - DNA, 75 bp, synthetic construct
  source 1..75: mol_type = other DNA
tgttaatataaggagtttacgattaataaaagatcttgagtcttacggtcttacccctgaaattgttcgagagtg

SEQ ID NO: 681637 - DNA, 75 bp, synthetic construct
  source 1..75: mol_type = other DNA
cttcgttgatagtaacattgaagacagcatcccttttggatatgttcgtgaaaaggttttttcacttatatcgaa

SEQ ID NO: 681638 - DNA, 75 bp, synthetic construct
  source 1..75: mol_type = other DNA
atggcggcgttagacatcatgagggtagcggtgaccatcgaaatttcgaaccaactatcagaggtgctaagcgtc

SEQ ID NO: 681639 - DNA, 75 bp, synthetic construct
  source 1..75: mol_type = other DNA
tccccgtagatacattccaccttcagcgaatgaaagaaggtaagcgtcaacggagcaccgtattgacgcttattt

SEQ ID NO: 681640 - DNA, 75 bp, synthetic construct
  source 1..75: mol_type = other DNA
ttatatcatgttgaacctgactttattcatcgtattgtctggtttgatccttctaacgcagtaaaaatcgtcatg

SEQ ID NO: 681641 - DNA, 75 bp, synthetic construct
  source 1..75: mol_type = other DNA
gttgatcggcggcgtaacggcgattggcgtggcgatgatgctggtgccaaaagaagacgcgaccgcgactaaaac

SEQ ID NO: 681642 - DNA, 75 bp, synthetic construct
  source 1..75: mol_type = other DNA
attggcgtggcgatgatgctggtgccaaaagaagacgcgagcgcggctaaaaccgaagcggaggcgcaatcgtga

SEQ ID NO: 681643 - DNA, 75 bp, synthetic construct
  source 1..75: mol_type = other DNA
gcctggcgatggtcggtatgaccgcactggcaccggtactggcccacgttctcggaccggtgattatcccggttt

SEQ ID NO: 681644 - DNA, 75 bp, synthetic construct
  source 1..75: mol_type = other DNA
ggcagaggaagggcaggcggatacgccggacgaaaatgatgtactgatgcagaaggcggcgggcctcgccggtgg

SEQ ID NO: 681645 - DNA, 75 bp, synthetic construct
  source 1..75: mol_type = other DNA
tttgccgatccacagatgcatccgtctgacttcagtctcctgcgagcgacggagaacggggaggaagaggacgat

SEQ ID NO: 681646 - DNA, 75 bp, synthetic construct
  source 1..75: mol_type = other DNA
agaaaaaatgatcaacggcttccagatcttcgccaaattcctcgttgcattgatcaccctcggtcttgccgctgc

SEQ ID NO: 681647 - DNA, 75 bp, synthetic construct
  source 1..75: mol_type = other DNA
gctatgtactccggtgtgcagatcaacggtcagccggtggaattcactttcgccctgatcctgatgaacatgatc

SEQ ID NO: 681648 - DNA, 75 bp, synthetic construct
  source 1..75: mol_type = other DNA
gctgcgcgatatgcgtatgtaccagaaactaccggcgttccttgataacccacgcatgtttagcggctacccgga

SEQ ID NO: 681649 - DNA, 75 bp, synthetic construct
  source 1..75: mol_type = other DNA
tgccatgatcttcccaatgattgtcggcaagttgatcggcggcgtaacggcgattggcgtggcgatgatgctggt

SEQ ID NO: 681650 - DNA, 75 bp, synthetic construct
  source 1..75: mol_type = other DNA
ccggtgatcatcgttgccgttctggtggcgctggggctgaaattcatcccggaaaaaatgatcaacggcttccag

SEQ ID NO: 681651 - DNA, 75 bp, synthetic construct
  source 1..75: mol_type = other DNA
ccaaagagctggcgggcggctatgtggcggcgtggctatactctggtttgattctgggctcgatgatgggaccaa

SEQ ID NO: 681652 - DNA, 75 bp, synthetic construct
  source 1..75: mol_type = other DNA
aaggtgtggagattcgcgaggagctgacccgacggcggattgcggcggtggctggctggaaggaacagcgttgcc

SEQ ID NO: 681653 - DNA, 75 bp, synthetic construct
  source 1..75: mol_type = other DNA
ttgatgactttggtacgggtttgtcaaacctgaaacgtttttatgaaattaatcctgatagcataaaagtggact

SEQ ID NO: 681654 - DNA, 75 bp, synthetic construct
  source 1..75: mol_type = other DNA
cgaattgccgagaaatatgcacaatgctgcgatatcgtgacatttaatgccgatttatatttattattgtgtcgg

SEQ ID NO: 681655 - DNA, 75 bp, synthetic construct
  source 1..75: mol_type = other DNA
tcaccgctgaagttcattaccattgctggtaatgactccaacttactgatagtgttttatgttcagataatgccc

SEQ ID NO: 681656 - DNA, 75 bp, synthetic construct
  source 1..75: mol_type = other DNA
ttcaggcccaagggtatctgtaccagaaacccatgccattctccgcctgggataaaagtggaaaattagtaaaag

SEQ ID NO: 681657 - DNA, 75 bp, synthetic construct
  source 1..75: mol_type = other DNA
tcttttacgctacgaattaacggcaaagatcgtgatttgctggctgttgataaaattcacgtcgatttaaattgg

SEQ ID NO: 681658 - DNA, 75 bp, synthetic construct
  source 1..75: mol_type = other DNA
atcttcgacctggcacgctataaccggatcccggtgattgcagaaggtgttgagagcgaagaggttgcgcgtgaa

SEQ ID NO: 681659 - DNA, 75 bp, synthetic construct
  source 1..75: mol_type = other DNA
gtatctggctgtggggatcatcaaactgtgtggtctggaagccgtggaagcggtgtttggtgctgagagatcccc

SEQ ID NO: 681660 - DNA, 75 bp, synthetic construct
  source 1..75: mol_type = other DNA
aattttctgaaatgactgagctggtcaatacgctggagtttttgccagactctacggatcaaatgcaggcgctta

SEQ ID NO: 681661 - DNA, 75 bp, synthetic construct
  source 1..75: mol_type = other DNA
tccgtcggcaattttctgaaatgacagagctggttaatacgctggcgtttttgcctgactcaacggatcaaatcg

SEQ ID NO: 681662 - DNA, 75 bp, synthetic construct
  source 1..75: mol_type = other DNA
tttcattattgtcgtattgctggcggtttacttaatgacgacccgtgtgttccgtcgccaattttcagaaatgac

SEQ ID NO: 681663 - DNA, 75 bp, synthetic construct
  source 1..75: mol_type = other DNA
gtcagcgtgcgtcgctgaaggatgatttcttactgcatattaatgtttcgccctggcagttaaacgaaccacact

SEQ ID NO: 681664 - DNA, 75 bp, synthetic construct
  source 1..75: mol_type = other DNA
ttggtacaggtctgtctaacctgaaacgtttttatgaaattaaccctgacagcataaaagtagattcacaattta

SEQ ID NO: 681665 - DNA, 75 bp, synthetic construct
  source 1..75: mol_type = other DNA
attaattgttgagagaacactggccggactggcagctgcacgcgaacagggacgcattggcggacgtcgcccgaa

SEQ ID NO: 681666 - DNA, 75 bp, synthetic construct
  source 1..75: mol_type = other DNA
ttactggcgacggtatgggcatggcactgagccacggcgttccgctgcgtgacatggaattcgttcaatatcacc

SEQ ID NO: 681667 - DNA, 75 bp, synthetic construct
  source 1..75: mol_type = other DNA
atgcttattggttatgttcgcgtatcaacaaatgaccagaacacggaattgcagcgtaacgcgctggagtgcgca

SEQ ID NO: 681668 - DNA, 75 bp, synthetic construct
  source 1..75: mol_type = other DNA
aaatcagcggaacgaaatcagccagaccgggattgaaaaaactgctcagaacgctatcagaaggagatacgctgg

SEQ ID NO: 681669 - DNA, 75 bp, synthetic construct
  source 1..75: mol_type = other DNA
tcggtctgcacggcgcaaaccgtctgggctccaactcactggcggaactggtggtcttcggtcgtctggctggtg

SEQ ID NO: 681670 - DNA, 75 bp, synthetic construct
  source 1..75: mol_type = other DNA
gttgagccatggcgttccactgcgtgatatggaattcgttcagtaccacccgacgggtctgccaggttccggtat

SEQ ID NO: 681671 - DNA, 75 bp, synthetic construct
  source 1..75: mol_type = other DNA
cctgatgaccgaaggttgccgtggtgaaggcggtattctggtcaataaaaacggctaccgttatctgcaagacta

SEQ ID NO: 681672 - DNA, 75 bp, synthetic construct
  source 1..75: mol_type = other DNA
ggacgtttcttttttcatgtcatgggggccctggctgaaatggagcgcgaactgatagttgaacgtaccagggcg

SEQ ID NO: 681673 - DNA, 75 bp, synthetic construct
  source 1..75: mol_type = other DNA
gcactgatttttgatgtaggcgtttctacaatttatcgaaaatttccggcaaataagagcaatgaatctccctga

SEQ ID NO: 681674 - DNA, 75 bp, synthetic construct
  source 1..75: mol_type = other DNA
cggcttcaaaaaggtgacacgctggttgtctggaaactggatcgcctcgggcgaagcatgaaacatctgatttct

SEQ ID NO: 681675 - DNA, 75 bp, synthetic construct
  source 1..75: mol_type = other DNA
ggatgtgagcggatttttgaggataaaatcagtggcaccaagtcagacagaccggggctgaaaaagctgctcagg

SEQ ID NO: 681676 - DNA, 75 bp, synthetic construct
  source 1..75: mol_type = other DNA
aggtggctggagttttgttagggaaagaggtgcgtaaacgtaaaacacctcaggaaaaaatcgcaattattcaac

SEQ ID NO: 681677 - DNA, 75 bp, synthetic construct
  source 1..75: mol_type = other DNA
cagcattgacacatcaacacccatggggcgtttcttttttcacgtcatgggagctttagcagaaatggaacgtga

SEQ ID NO: 681678 - DNA, 75 bp, synthetic construct
  source 1..75: mol_type = other DNA
ggatcccggtgattgcggaaggcgtagagagcgaagacgttgcgcgcgaattaatcaaattaggatgtgttcagg

SEQ ID NO: 681679 - DNA, 75 bp, synthetic construct
  source 1..75: mol_type = other DNA
tcgtatggaagttagatcgtcttgggcgcagcatgcgtcacttagttgtgctggtggaagagctgcgtgacagag

SEQ ID NO: 681680 - DNA, 75 bp, synthetic construct
  source 1..75: mol_type = other DNA
atgctgatcggctatgtacgcgtatcaacaaatgaacaaaacactgctttgcaacgaaatgcccttgaaagcgca

SEQ ID NO: 681681 - DNA, 75 bp, synthetic construct
  source 1..75: mol_type = other DNA
actaaccaaagcggaatgggagcaggccgggcgtttattagcacaaggaatcccccgcaagcaggtcgcattgat

SEQ ID NO: 681682 - DNA, 75 bp, synthetic construct
  source 1..75: mol_type = other DNA
ctacgatgtggccctgtcaactctgtataaaaaacaccccgcgaaacgaacgcacatagaaaacgacgatcgaat

SEQ ID NO: 681683 - DNA, 75 bp, synthetic construct
  source 1..75: mol_type = other DNA
cagtattgatacgtcatccccaatggggcgttttttcttccacgttatgggtgccctagctgaaatggaacgaga

SEQ ID NO: 681684 - DNA, 75 bp, synthetic construct
  source 1..75: mol_type = other DNA
tcccccgtaagcaggttgcaatcatctatgatgtggctgtttccacgctttataagaagtttccggcgtcatcat

SEQ ID NO: 681685 - DNA, 75 bp, synthetic construct
  source 1..75: mol_type = other DNA
cttctggagatgctggaaatggtcactgatatggaatcaacctacctgaccaaagtggatgtcgaagcgcgcctg

SEQ ID NO: 681686 - DNA, 75 bp, synthetic construct
  source 1..75: mol_type = other DNA
gccatgtcgttctcgccggacagcaggcttaccatgaaagcactggaaatggcatgggaaacccgtggtaagccc

SEQ ID NO: 681687 - DNA, 75 bp, synthetic construct
  source 1..75: mol_type = other DNA
atgcttattggctatgtacgcgtgtcgacaaatgaccagaacacggaattgcagcgtaacgcgctgaagtgcgca

SEQ ID NO: 681688 - DNA, 75 bp, synthetic construct
  source 1..75: mol_type = other DNA
gaaactgctgggataacagcccaatggagcgcttcttcaggagtctgaagaacgaatgggtgccagcgacgggct

SEQ ID NO: 681689 - DNA, 75 bp, synthetic construct
  source 1..75: mol_type = other DNA
ttttgatattggcctgtccacgctctataagaaattcccctcatcagcgacaaagaataaattgtgtcatccctt

SEQ ID NO: 681690 - DNA, 75 bp, synthetic construct
  source 1..75: mol_type = other DNA
cagcatattatgtttgcccgtaatagccagaaaatgcacatcccggagaattttaccgtctcgtgggattactcg

SEQ ID NO: 681691 - DNA, 75 bp, synthetic construct
  source 1..75: mol_type = other DNA
gtgtggtgcggtgatgtgacctatatctggacgggcacgcgctgggcgtacctcgccgttgttctcgacctgttc

SEQ ID NO: 681692 - DNA, 75 bp, synthetic construct
  source 1..75: mol_type = other DNA
ggatgtgagcagatttttgaggacaaaatcagtggcactaagtccgacaggccggggctgaaaaaactactcagg

SEQ ID NO: 681693 - DNA, 75 bp, synthetic construct
  source 1..75: mol_type = other DNA
gggctttagccgaaatggaacgtgaattaattgtagagcgtacactggccggactggcagcagcacgtgcacagg

SEQ ID NO: 681694 - DNA, 75 bp, synthetic construct
  source 1..75: mol_type = other DNA
ggctgaaatggagcgcgaactaatagttgaacgtaccagggcggggcttgctgcagctcgcgccaaaggcagagt

SEQ ID NO: 681695 - DNA, 75 bp, synthetic construct
  source 1..75: mol_type = other DNA
caggaaaaaatcgcaattattcaacagactatggagcctggcatgacggtgtcccatgtggctcgtttgcatggt

SEQ ID NO: 681696 - DNA, 75 bp, synthetic construct
  source 1..75: mol_type = other DNA
cagtattgataccagtacccctatgggccgtttcttttttcatgtcatgggggccctggctgaaatggagcgcga

SEQ ID NO: 681697 - DNA, 75 bp, synthetic construct
  source 1..75: mol_type = other DNA
gtgccctggctgaaatggaacgagaactgattgttgaacgaacaaaagctggactggaagctgctcgcgtacagg

SEQ ID NO: 681698 - DNA, 75 bp, synthetic construct
  source 1..75: mol_type = other DNA
atgcagattttctcgttaactattggcgaagtggccatatttttctgttttttaaaaaactatcttcaactatat

SEQ ID NO: 681699 - DNA, 75 bp, synthetic construct
  source 1..75: mol_type = other DNA
caacaaatgaccagaatacggaattgcagcgtaatgcgctggagtgtgcaggatgtgagctgatttttgaagata

SEQ ID NO: 681700 - DNA, 75 bp, synthetic construct
  source 1..75: mol_type = other DNA
acattatcggcaggtgacactctggttgtctggaagctggatcggctggggtgtagtatgcggcatctggtcatt

SEQ ID NO: 681701 - DNA, 75 bp, synthetic construct
  source 1..75: mol_type = other DNA
attgcactgatttttgatgtgggtgtttccacaatttatagaaaatttccggcaaataagagtaatgaatcgtaa

SEQ ID NO: 681702 - DNA, 75 bp, synthetic construct
  source 1..75: mol_type = other DNA
aaaccaacgtttatgaaaatgcagagataatggctaactggcatcatccccggtttttattcagggggatgatca

SEQ ID NO: 681703 - DNA, 75 bp, synthetic construct
  source 1..75: mol_type = other DNA
gcgcagtatgcgccaccttgttgcgctgacagatgaattacagcaacaggggataaattttcgtagtcttactga

SEQ ID NO: 681704 - DNA, 75 bp, synthetic construct
  source 1..75: mol_type = other DNA
gctgccgccatgaagcagattaaagaactccagcgcctgctcggcaagaaaacgatggaaaatgaactcctcaaa

SEQ ID NO: 681705 - DNA, 75 bp, synthetic construct
  source 1..75: mol_type = other DNA
gcttctggcacgtcctggatgcctctgccggaaaagatcaggctgccaactggattatcgcgacctatcaacaat

SEQ ID NO: 681706 - DNA, 75 bp, synthetic construct
  source 1..75: mol_type = other DNA
aacggggccagctttgagccgcagtcaggcaccctgaacagcgtcatccctccggcagtgcagcatctcacggtg

SEQ ID NO: 681707 - DNA, 75 bp, synthetic construct
  source 1..75: mol_type = other DNA
gattaacagttatggccagcagggcgaacctgcgaccaccaccttcaggattaacgcgcctgcggcaccggtcac

SEQ ID NO: 681708 - DNA, 75 bp, synthetic construct
  source 1..75: mol_type = other DNA
aggctttccctcgtgactcccgtgcaccgaagcgttggccatcaggaaccattaccgtcagggtttatgacgatc

SEQ ID NO: 681709 - DNA, 75 bp, synthetic construct
  source 1..75: mol_type = other DNA
aggaaagacctctgcgaggtgcgaatccgaaccggtcagacggaggtcgctgtcttcgtagactacgaatctgag

SEQ ID NO: 681710 - DNA, 75 bp, synthetic construct
  source 1..75: mol_type = other DNA
taacgaggaaagacctctgcgaggtgcgaatccgaaccggtcagacggaggtcgctgtcttcgtagactacgaat

SEQ ID NO: 681711 - DNA, 75 bp, synthetic construct
  source 1..75: mol_type = other DNA
atgttaatcgccctgatcgtcatctgtttaaccgtcattgtgacggcactggtaacgaggaaagacctctgcgag

SEQ ID NO: 681712 - DNA, 75 bp, synthetic construct
  source 1..75: mol_type = other DNA
acgtggcaatattcgctggagcaggattcgaagtaagcacttacccctggtatgatgaagcgaccaacggcgtga

SEQ ID NO: 681713 - DNA, 75 bp, synthetic construct
  source 1..75: mol_type = other DNA
ggtaacgaggaaagacctctgtgaggtacgaatccgaaccggccagacggaggttgctgtcttcgtggactacga

SEQ ID NO: 681714 - DNA, 75 bp, synthetic construct
  source 1..75: mol_type = other DNA
ggtaacgaggaaagacctctgcgagttacgaatccgaaccggccagacggaggtcgctgtcttcacagtttacga

SEQ ID NO: 681715 - DNA, 75 bp, synthetic construct
  source 1..75: mol_type = other DNA
gataatacgctgatttacagtggcgttattgatatgcctgccggtcacggtcacatgacgctgagttttcggtat

SEQ ID NO: 681716 - DNA, 75 bp, synthetic construct
  source 1..75: mol_type = other DNA
aaagaagcggtggagtatgcgcagtcgcgaaaatggatagcgcatgtgcccttgttaccttcggacaaggaatag

SEQ ID NO: 681717 - DNA, 75 bp, synthetic construct
  source 1..75: mol_type = other DNA
gtggaagcggtgaaaacagccgcctggtgaccaccgccatcaccgcagacacggcgcaccgtttcagtggcctgc

SEQ ID NO: 681718 - DNA, 75 bp, synthetic construct
  source 1..75: mol_type = other DNA
actgcgtcgtcgcctgttccgctgtgtctccatccgggaaaacacggacggcacctttgccatcacggcggtgca

SEQ ID NO: 681719 - DNA, 75 bp, synthetic construct
  source 1..75: mol_type = other DNA
gacggcgtaccacacaggaaaagatcgcaattgttcagcagagctttgaaccggggatgacggtctccctcgttg

SEQ ID NO: 681720 - DNA, 75 bp, synthetic construct
  source 1..75: mol_type = other DNA
cgcccggtgacatcattgaaatctgtgataacgactatgccgggaccctgaccggcggacgcatcctgtccattg

SEQ ID NO: 681721 - DNA, 75 bp, synthetic construct
  source 1..75: mol_type = other DNA
gatggatgcgttcggctgtaccagccgcggtcaggctcaccgtgccggactgtgggtgataaagactgaactgct

SEQ ID NO: 681722 - DNA, 75 bp, synthetic construct
  source 1..75: mol_type = other DNA
aagcaataccaggaaggaagtcttctgctgtggccgccggagaacaggttgttcctgcctctgagcttgctgccg

SEQ ID NO: 681723 - DNA, 75 bp, synthetic construct
  source 1..75: mol_type = other DNA
caccgtttcagtggcctgccgcccggggaatacaccctgacggtcagggcgataaacagctacggccagcagggc

SEQ ID NO: 681724 - DNA, 75 bp, synthetic construct
  source 1..75: mol_type = other DNA
tgaacagcgtcatcccgccggcagtgcagcacctcacggtggaggtgagtgcctcagacggccagtatctggcgc

SEQ ID NO: 681725 - DNA, 75 bp, synthetic construct
  source 1..75: mol_type = other DNA
aaagatcgcaattgttcagcagagctttgaaccagggatgacggtctccctcgttgcccggcaacatggtgtagc

SEQ ID NO: 681726 - DNA, 75 bp, synthetic construct
  source 1..75: mol_type = other DNA
gacctctgcgaggtacgaatccgaaccggccagatggaggtcgctgtcttcacagtctacgaacctgaggagtaa

SEQ ID NO: 681727 - DNA, 75 bp, synthetic construct
  source 1..75: mol_type = other DNA
caacaaatgaccagaatacagacttgcaacgaaacgctcttgtttgtgcaggatgtgaacaaatatttgaagata

SEQ ID NO: 681728 - DNA, 75 bp, synthetic construct
  source 1..75: mol_type = other DNA
gaacacgggctggcttagctgctgcgcgcgaagatggtcggatcggcggcagacgaccaaagttaaccgcagaag

SEQ ID NO: 681729 - DNA, 75 bp, synthetic construct
  source 1..75: mol_type = other DNA
tgggattgatcatgcttataggctatgtacgggtgtcaacaaatgaccagaacacagcattgcaaagaaacgcgc

SEQ ID NO: 681730 - DNA, 75 bp, synthetic construct
  source 1..75: mol_type = other DNA
gcaaagaaacgcgctcgagtgtgcaggatgtgagctgattttcgaagacaagataagtggaaaaacgtctgacag

SEQ ID NO: 681731 - DNA, 75 bp, synthetic construct
  source 1..75: mol_type = other DNA
gcagagtaggtggacgtcgtcctaagttgaccaccgaacagtgggcacagattggacgtttactcgaggccggag

SEQ ID NO: 681732 - DNA, 75 bp, synthetic construct
  source 1..75: mol_type = other DNA
gccgtatcggtggtcgaccacctaaactaaccaaagcggaatgggagcaggccgggcgtttattagcacaaggaa

SEQ ID NO: 681733 - DNA, 75 bp, synthetic construct
  source 1..75: mol_type = other DNA
cgattaccgacgatcagcgtttgcaggtgttgctgattggtttctcctttggtgcgttgttagaaggagccgcgg

SEQ ID NO: 681734 - DNA, 75 bp, synthetic construct
  source 1..75: mol_type = other DNA
ttcaaaccgttatacgcggcggggctgtgtctgattgccaacactgcgccagtggcgtttggtgcgttgggcgtg

SEQ ID NO: 681735 - DNA, 75 bp, synthetic construct
  source 1..75: mol_type = other DNA
ttcctcgccagaaggtagcgatcatctatgatattggtgtatcgactttgtataagaggtttcctgcaggggata

SEQ ID NO: 681736 - DNA, 75 bp, synthetic construct
  source 1..75: mol_type = other DNA
acgccctgtttggttcactgcaatcgaccacggcgcagcaaatcaacgtctctgacactctgctggtggcagcaa

SEQ ID NO: 681737 - DNA, 75 bp, synthetic construct
  source 1..75: mol_type = other DNA
gattggcatggtgctggcgttcgccttcgtcaccaactattccggtatgtccaccacgctggcgctggtactggc

SEQ ID NO: 681738 - DNA, 75 bp, synthetic construct
  source 1..75: mol_type = other DNA
ggcgcactgctggaaggggcggctggctttggcgcaccggtggcgattaccggtgcgttgctggtggggctgggt

SEQ ID NO: 681739 - DNA, 75 bp, synthetic construct
  source 1..75: mol_type = other DNA
aaatcagtggcactaagtccgacagaccggggctgaaaaaactgctcaggacactatcggcaggagacacgctgg

SEQ ID NO: 681740 - DNA, 75 bp, synthetic construct
  source 1..75: mol_type = other DNA
gacctctgcgaggtacgaatccgaaccggccagacggaggtcgctgtcttcacagcttacgaatctgagaagtaa

SEQ ID NO: 681741 - DNA, 75 bp, synthetic construct
  source 1..75: mol_type = other DNA
gacctctgcgaggtacgagtccgaaccggccagacggaggtcgctggcttcacagcttacgaacctgaggagtaa

SEQ ID NO: 681742 - DNA, 75 bp, synthetic construct
  source 1..75: mol_type = other DNA
aggaaagacctctgcgaggtacgaatccgaaccggccagatggaggtcgctgtcttcgtagcctacgaatctgag

SEQ ID NO: 681743 - DNA, 75 bp, synthetic construct
  source 1..75: mol_type = other DNA
aggaaagacctctgcgaggtacgaatccgaaccggccagacggaggtcactgtcttcacagcttacgaacctgag

SEQ ID NO: 681744 - DNA, 75 bp, synthetic construct
  source 1..75: mol_type = other DNA
cgaggaaagacctctgcgaggtacgaatccgaaccggccagacggaggtcgctgtcttcacagcttacgaacctg

SEQ ID NO: 681745 - DNA, 75 bp, synthetic construct
  source 1..75: mol_type = other DNA
ggcgcaagcaataccaggagggaagtcttactgctgtggccgcaggagagcaggtcgttcctgcctctgaacttg

SEQ ID NO: 681746 - DNA, 75 bp, synthetic construct
  source 1..75: mol_type = other DNA
gtgccctggctgaaatggaacgtgaattaattgtagagcgtacactggccggtctggcagcagcacgcgcacaag

SEQ ID NO: 681747 - DNA, 75 bp, synthetic construct
  source 1..75: mol_type = other DNA
ctacgatgtggccctgtcaactctgtataaaaaacaccctgcgaaacgaacgcatatagaaaacgacgatcgaat

SEQ ID NO: 681748 - DNA, 75 bp, synthetic construct
  source 1..75: mol_type = other DNA
gcaacgaaacgcactggagtgcgcaggatgtgaactgatattcgaggataagatcagcggcagaacgtctgaccg

SEQ ID NO: 681749 - DNA, 75 bp, synthetic construct
  source 1..75: mol_type = other DNA
gccgggcgattaattgcatcaggcgttcctcgccagaaggtggctattatctatgatgttggtgtgtcaactttg

SEQ ID NO: 681750 - DNA, 75 bp, synthetic construct
  source 1..75: mol_type = other DNA
ggatgtgaacaaatatttgaagataaattaagcgggacaaagacagaccgaccgggattaaaacgcgctttaaag

SEQ ID NO: 681751 - DNA, 75 bp, synthetic construct
  source 1..75: mol_type = other DNA
acattatcggcaggtgacactctggttgtctggaagctggatcggctagggcgtagcatgcggcatctggtcatt

SEQ ID NO: 681752 - DNA, 75 bp, synthetic construct
  source 1..75: mol_type = other DNA
atgaaaatcatcaggtgtacggtgtgcgtaaagtctggcgtcagttgttacggaaggaatcagggtggccagatg

SEQ ID NO: 681753 - DNA, 75 bp, synthetic construct
  source 1..75: mol_type = other DNA
gggtctcatcgtccatggaaacgacattcgtgctggatgcactggagcaggcgttatgggcccgtcgaccgtccg

SEQ ID NO: 681754 - DNA, 75 bp, synthetic construct
  source 1..75: mol_type = other DNA
atgacgccactgctggataagctgcgtaagcagtacgggatcggaccggtatgcagcgaactgcatattgccccg

SEQ ID NO: 681755 - DNA, 75 bp, synthetic construct
  source 1..75: mol_type = other DNA
gaacgtcctgaccagctgtgggtggctgattttactctacgtcagcacatggcagggcttcgtctatgtggcgtt

SEQ ID NO: 681756 - DNA, 75 bp, synthetic construct
  source 1..75: mol_type = other DNA
ccgtaagagctggaaaacccgtgcagaagtggaactggccacactaacgtgggtggactggtataacaatcgacg

SEQ ID NO: 681757 - DNA, 75 bp, synthetic construct
  source 1..75: mol_type = other DNA
gataaaggttctcagtatgtatcgctggcctacacacagcggcttaaggaagccggattactggcatcaacaggg

SEQ ID NO: 681758 - DNA, 75 bp, synthetic construct
  source 1..75: mol_type = other DNA
agctgtacggggtcggaccggtatgcagtgaactgcatattgccccgtcaacgtattaccactgtcagcagcagc

SEQ ID NO: 681759 - DNA, 75 bp, synthetic construct
  source 1..75: mol_type = other DNA
cagaagtggaactggccacactcacgtgggtggactggtataacaatcgaggattgctggaaaggctgggccata

SEQ ID NO: 681760 - DNA, 75 bp, synthetic construct
  source 1..75: mol_type = other DNA
cagaagtggaactggccacactcacgtgggtggactggtataacaatcgacgattgctggtaaggccgggccata

SEQ ID NO: 681761 - DNA, 75 bp, synthetic construct
  source 1..75: mol_type = other DNA
aagcggaggtaatacaccgtaagagctggaaaaaccggacagaagtggaactggccacactaacgtgggtggact

SEQ ID NO: 681762 - DNA, 75 bp, synthetic construct
  source 1..75: mol_type = other DNA
ctaacgtgggtggactggtataacaatcgacgattgctgggaaggctgggccatactcctccggcagaagcagaa

SEQ ID NO: 681763 - DNA, 75 bp, synthetic construct
  source 1..75: mol_type = other DNA
ccgtgcgcagcgcgatgactggctgaagagagagatacggcgcgtatacgatgaaaatcatcaggtgtacggtgt

SEQ ID NO: 681764 - DNA, 75 bp, synthetic construct
  source 1..75: mol_type = other DNA
ccgtgcgcagcgcgatgactggctgaagaaagagatacagcgcgtatacgatgaaaaatcacaaggtatacggtg

SEQ ID NO: 681765 - DNA, 75 bp, synthetic construct
  source 1..75: mol_type = other DNA
ctgattttacttacgtcagcacatggcagggcttcgtctatgtggcgttcatcattgatgtgttttccggatgta

SEQ ID NO: 681766 - DNA, 75 bp, synthetic construct
  source 1..75: mol_type = other DNA
cgaccatcagccggaaagccgttgccgcaggcgaccgcgtaaaccgtcagttcgtggcagggcttcgtctatgtg

SEQ ID NO: 681767 - DNA, 75 bp, synthetic construct
  source 1..75: mol_type = other DNA
tatgggacttgccgatgttctccggggtaaaaaggtccgtacgaccatcagccggaaagccgttgccgcaggcga

SEQ ID NO: 681768 - DNA, 75 bp, synthetic construct
  source 1..75: mol_type = other DNA
ctttacaaagcggaggtaatacaccgtaagagctggaaaaaccgtgcagaagtggaactggccacactaacgtgg

SEQ ID NO: 681769 - DNA, 75 bp, synthetic construct
  source 1..75: mol_type = other DNA
ctgattttacttacgtcagcacatggcagggcttcgtctatgtggcgtttatcattgatgtgtttgctggataca

SEQ ID NO: 681770 - DNA, 75 bp, synthetic construct
  source 1..75: mol_type = other DNA
catggagacgacattcgtgctggatgcactggagcaggcgttatgggcccgtcgcgtccggcacggtccatcaca

SEQ ID NO: 681771 - DNA, 75 bp, synthetic construct
  source 1..75: mol_type = other DNA
gcaagaaaaccagtgggctgggccatgtcgttctcgccggacagcaggctcaccatgaaagcactggaaatggca

SEQ ID NO: 681772 - DNA, 75 bp, synthetic construct
  source 1..75: mol_type = other DNA
acgtattaccactgtcagcaacagcgacatcatcctgataaacgcagtgcccgtgctcagcgtgatgactggctg

SEQ ID NO: 681773 - DNA, 75 bp, synthetic construct
  source 1..75: mol_type = other DNA
atggcggttatgggacttgccggtgttctccggggtaaaaaggtccgcactaccgtcagccggaaagccgttgcc

SEQ ID NO: 681774 - DNA, 75 bp, synthetic construct
  source 1..75: mol_type = other DNA
gtacagtggcacgtctcatggcggttatggggcttgccggggttctccgggggaaaaaggtccgtacgaccatca

SEQ ID NO: 681775 - DNA, 75 bp, synthetic construct
  source 1..75: mol_type = other DNA
gcggggcttcgtctatgtggcgttcatcattgatgtgtttgccggatacatcgtggggtgcgggtctcatcgtcc

SEQ ID NO: 681776 - DNA, 75 bp, synthetic construct
  source 1..75: mol_type = other DNA
cagaagtggaactggccacactcacgtgggtggactggtataacaatcgatgattgctggaaaggcggggccata

SEQ ID NO: 681777 - DNA, 75 bp, synthetic construct
  source 1..75: mol_type = other DNA
atgatttcattatgttttgaaatcgaaagcaatcgacatgatgtgaaaatgtacgtggtatcgacaaagcagatg

SEQ ID NO: 681778 - DNA, 75 bp, synthetic construct
  source 1..75: mol_type = other DNA
gaagcgaccgatccccgggattatttgcagtcggctaaatccgcaatgcgcgatgtggtgagcaaagtgattgcc

SEQ ID NO: 681779 - DNA, 75 bp, synthetic construct
  source 1..75: mol_type = other DNA
tcaacacaccatgaacgcctataaagcagcggtagaagagaaatatcgcttttttagttacggtgatgcgatgtt

SEQ ID NO: 681780 - DNA, 75 bp, synthetic construct
  source 1..75: mol_type = other DNA
aagacgggcaatggagcagttgcgcgagattggataccttgattacacggagatcctgcgggggcgaacaaaatt

SEQ ID NO: 681781 - DNA, 75 bp, synthetic construct
  source 1..75: mol_type = other DNA
cagaaaacttactggcgctggttagcgcgatggcgaagcagtatcaccatccgctggcgattcaccttgaccatc

SEQ ID NO: 681782 - DNA, 75 bp, synthetic construct
  source 1..75: mol_type = other DNA
atttgcagtcggctaaattcgcaatgcgcgatgtggtgagcaaagtgattgccgattgtggctgcgagggcaggg

SEQ ID NO: 681783 - DNA, 75 bp, synthetic construct
  source 1..75: mol_type = other DNA
ctgttaaaggctgcagggctggccagaagcacgctgtactaccagctgtcactgcagaaggctaaggacaagtat

SEQ ID NO: 681784 - DNA, 75 bp, synthetic construct
  source 1..75: mol_type = other DNA
ataagggtctggaaagccttgctgaaggggagaaaccgctgctccacagtgatcaaggatggcattaccggataa

SEQ ID NO: 681785 - DNA, 75 bp, synthetic construct
  source 1..75: mol_type = other DNA
tgaactggaacacctgacgcctgaacgggtgtggaaagagacggaaagtgccctcaccacccgcaatccacaagt

SEQ ID NO: 681786 - DNA, 75 bp, synthetic construct
  source 1..75: mol_type = other DNA
ccaaactctgcgggatcccttccagtcagtcatcccgcaagcttcgggagcgcatcagcccctcgctaaagcgta

SEQ ID NO: 681787 - DNA, 75 bp, synthetic construct
  source 1..75: mol_type = other DNA
gaggcgtgccatggagcagctacgggagattggctacctggattacactgagatccagcggggacgcaccaaact

SEQ ID NO: 681788 - DNA, 75 bp, synthetic construct
  source 1..75: mol_type = other DNA
agcgattaaaagaagcaaaactgctggcatcaacagggagtacaggcgactcgtatggcagcgcgatggcggaga

SEQ ID NO: 681789 - DNA, 75 bp, synthetic construct
  source 1..75: mol_type = other DNA
tgactgtggtgcggttttgcataacattgaaaccaaatggctttatgattttctgaccctggaaaaatgtcgcaa

SEQ ID NO: 681790 - DNA, 75 bp, synthetic construct
  source 1..75: mol_type = other DNA
tatgacaacgcgatggcggagagcatcaatggtctttacaaagcggaggtaatacaccgtaagatctggaaaaac

SEQ ID NO: 681791 - DNA, 75 bp, synthetic construct
  source 1..75: mol_type = other DNA
acgtattaccactgtcagcaacagcgacatcatcctgataaacgccgtgcacatgcacagcgcgatgactggctg

SEQ ID NO: 681792 - DNA, 75 bp, synthetic construct
  source 1..75: mol_type = other DNA
acgtattaccactgtcagcaacagcgacatcatcctgataaacgccgttcacatgctcagcgcgatgactggctg

SEQ ID NO: 681793 - DNA, 75 bp, synthetic construct
  source 1..75: mol_type = other DNA
cgtctgggcgtctttgtaccgacccttaagtcactgaagaacagtaaaaaaaatacactgtcacgtactgatgcc

SEQ ID NO: 681794 - DNA, 75 bp, synthetic construct
  source 1..75: mol_type = other DNA
tcttttctgttctggtgctttcaacagtattaactgcctgcaacaccacgcgtggcgttggtgaagatatctctg

SEQ ID NO: 681795 - DNA, 75 bp, synthetic construct
  source 1..75: mol_type = other DNA
agtattaactgcctgcaacaccacgcgtggcgttggtgaagacatttctgatggcggtaacgcgatttctggtgc

SEQ ID NO: 681796 - DNA, 75 bp, synthetic construct
  source 1..75: mol_type = other DNA
accagcagaaatttcagacagttactgtggagatatcagataaaacaaagcctgagtcgccggggaaattgctgg

SEQ ID NO: 681797 - DNA, 75 bp, synthetic construct
  source 1..75: mol_type = other DNA
tgcggaaaaagtcagtccggagatggcggagaagcttgccctgcttgaaaaactgggcatcacgctggatgacct

SEQ ID NO: 681798 - DNA, 75 bp, synthetic construct
  source 1..75: mol_type = other DNA
gccatccaacaagaaattcgcagcgggcagctcgttgtactgaatcgggacgaactggtgatcccgattcaggcc

SEQ ID NO: 681799 - DNA, 75 bp, synthetic construct
  source 1..75: mol_type = other DNA
acgtattaccactgtcagcaacagcgacatcatcctgataaacgccgtacacatgcgcagcgcgatgactggctg

SEQ ID NO: 681800 - DNA, 75 bp, synthetic construct
  source 1..75: mol_type = other DNA
acgtattaccactgtcagcaacagcgacatcatcctgataaacgcagtccacatgcccagcgcgatgactggctg

SEQ ID NO: 681801 - DNA, 75 bp, synthetic construct
  source 1..75: mol_type = other DNA
agctgaaccgtcttcactattcctgaaaaccagggcgaaccgcgagcagcctctcatctctgatgtggaagagca

SEQ ID NO: 681802 - DNA, 75 bp, synthetic construct
  source 1..75: mol_type = other DNA
tttggcggcgagcaaaaactgcaactgaaagaaacgaccgcccagcccgaaggcgaacgcgcgaatctgcgcgtg

SEQ ID NO: 681803 - DNA, 75 bp, synthetic construct
  source 1..75: mol_type = other DNA
cgctcagcgacggcgaaaccggcaaaaattacctctccgacgcgtttaaatttggcggcgagcaaaaactgcaac

SEQ ID NO: 681804 - DNA, 75 bp, synthetic construct
  source 1..75: mol_type = other DNA
gatgcactggagcaggcgttatgggcccgtcgaccgtccggcacggtccatcacagtgataaaggttctcagtat

SEQ ID NO: 681805 - DNA, 75 bp, synthetic construct
  source 1..75: mol_type = other DNA
ccggcgggcgatgagtggcaactggcgctcagcgacggcgaaaccggcaaaaattacctctccgacgcttttaaa

SEQ ID NO: 681806 - DNA, 75 bp, synthetic construct
  source 1..75: mol_type = other DNA
gtccattccagaacttctttaagattacgctgccgctgctgattaaaccgctgacgccgctgatgatcgccagct

SEQ ID NO: 681807 - DNA, 75 bp, synthetic construct
  source 1..75: mol_type = other DNA
gaagcctcagcaatggatggcgcaggtccattccagaacttctttaagattacgctgccgctgctgattaaaccg

SEQ ID NO: 681808 - DNA, 75 bp, synthetic construct
  source 1..75: mol_type = other DNA
gttatgggcccgtcgaccgtccggcacagtccatcacagtgataaaggttctcagtatgtatcgctggcctacac

SEQ ID NO: 681809 - DNA, 75 bp, synthetic construct
  source 1..75: mol_type = other DNA
atgttgggtggagcggacaatccaaatggtgaattactgtcttatatcattggcgctgacaatattgccccgtca

SEQ ID NO: 681810 - DNA, 75 bp, synthetic construct
  source 1..75: mol_type = other DNA
actaccgtcagccggaaagccattaccgcaggcgaccgcgtaaaccgtcagttcggggcagaacgtcctgaccag

SEQ ID NO: 681811 - DNA, 75 bp, synthetic construct
  source 1..75: mol_type = other DNA
atggtgtttttgatgatgccaatgtacaaaacccgaacgctcagtgactgggatggagtctggcaatccgtttat

SEQ ID NO: 681812 - DNA, 75 bp, synthetic construct
  source 1..75: mol_type = other DNA
aatggaaaactggccaacgtattacccatatcagctgagtactgatgaagtggtccatgaaatgatatctcattg

SEQ ID NO: 681813 - DNA, 75 bp, synthetic construct
  source 1..75: mol_type = other DNA
cgattcgtcttcacaaactggctgttgctttaggtgtctttattgttagcgctcctgccttttcgcatggtcatc

SEQ ID NO: 681814 - DNA, 75 bp, synthetic construct
  source 1..75: mol_type = other DNA
atgccactgctggataagctgcgtaagctgtacggggttggaccggtatgcagtgaactacatattgccccgtca

SEQ ID NO: 681815 - DNA, 75 bp, synthetic construct
  source 1..75: mol_type = other DNA
agactcgccagcgggttgccttgctttttgatgtcgggatatcgacgttatacaaaaaattccccgccacggtga

SEQ ID NO: 681816 - DNA, 75 bp, synthetic construct
  source 1..75: mol_type = other DNA
atgggaatcatcaggtatacggtgtgcgtaaagtctggcgtcagttgttacgggaaggaatcagggtagccagat

SEQ ID NO: 681817 - DNA, 75 bp, synthetic construct
  source 1..75: mol_type = other DNA
acacgctgattatctggaaactggactggctgggattatataaaaccgcagacacgtcgtatgcaagaacgcgct

SEQ ID NO: 681818 - DNA, 75 bp, synthetic construct
  source 1..75: mol_type = other DNA
ggatgtgagctgatttttgaggataaaatcagcggcacgaagtccgaccgaccgggactgaaaaaactgctcaga

SEQ ID NO: 681819 - DNA, 75 bp, synthetic construct
  source 1..75: mol_type = other DNA
aaatcagtggcactaagtccaacagaccggggctgaaaaagctgctcaggacactatcggcaggagacacgctgg

SEQ ID NO: 681820 - DNA, 75 bp, synthetic construct
  source 1..75: mol_type = other DNA
cagattgccacacgaatcagtaaaactggtttaactaacggcattaccctgaacagtactgctcacagtgatgga

SEQ ID NO: 681821 - DNA, 75 bp, synthetic construct
  source 1..75: mol_type = other DNA
ctggcctacacacagcggcttaaggaagccggattactggcatcaacaggaagtacaggcgactcgtatgacaac

SEQ ID NO: 681822 - DNA, 75 bp, synthetic construct
  source 1..75: mol_type = other DNA
taacaatcgacgattgctggaaaggctgggccatattcctccggcagaagcagaaaaagcttattatgcttccat

SEQ ID NO: 681823 - DNA, 75 bp, synthetic construct
  source 1..75: mol_type = other DNA
gaacgtccagaccagttgtgggtagctgattttacctgggtaagcacatggcagggcttcgtttatgtggcgttc

SEQ ID NO: 681824 - DNA, 75 bp, synthetic construct
  source 1..75: mol_type = other DNA
tcacgtgggtggactggtataacaagcgacgattgctggaaaggctgggccatatcccaccggcagaagcagaaa

SEQ ID NO: 681825 - DNA, 75 bp, synthetic construct
  source 1..75: mol_type = other DNA
cttaaggaagccggattactggcatcaacaggaagtacaggcgactcgtatgacaacgcgatggcggagagcatc

SEQ ID NO: 681826 - DNA, 75 bp, synthetic construct
  source 1..75: mol_type = other DNA
tgtatcgctggcctacacacagcggcttaaggaagccggattactggcatcaacaggaagtacaggcgactcgta

SEQ ID NO: 681827 - DNA, 75 bp, synthetic construct
  source 1..75: mol_type = other DNA
gtggccaggtgcactgtggcacgtctcatggcggttatggggcttgccggtgttctccggggtaaaaaggtccgc

SEQ ID NO: 681828 - DNA, 75 bp, synthetic construct
  source 1..75: mol_type = other DNA
ctcatcgtctatggaaacgacattcgtgctggatgccctggagcaggcgttttgggcccggcgaccgtccggcac

SEQ ID NO: 681829 - DNA, 75 bp, synthetic construct
  source 1..75: mol_type = other DNA
ctcatcgtctatggaaacgacattcgtgctggatgccctggagcaggcgttttgggcccgacggccgtccggcac

SEQ ID NO: 681830 - DNA, 75 bp, synthetic construct
  source 1..75: mol_type = other DNA
ctcatcgtctatggaaacgacattcgtgctggatgctctggagcaggcgttttgggcccgtcgcccgtccggcac

SEQ ID NO: 681831 - DNA, 75 bp, synthetic construct
  source 1..75: mol_type = other DNA
actactggcatcaacaggtagtacgggcgactcgtatgacaacgcgatggcggagagcatcaatggcctttacaa

SEQ ID NO: 681832 - DNA, 75 bp, synthetic construct
  source 1..75: mol_type = other DNA
ctcatcgtctatggaaacgacattcgtgctggatgcgctggagcaggcgttttgggcccgccgaccgtccggcac

SEQ ID NO: 681833 - DNA, 75 bp, synthetic construct
  source 1..75: mol_type = other DNA
ctcatcgtctatggaaacgacattcgtgctggatgcgctggagcaggcgttttgggcccgacgcccgtccggcac

SEQ ID NO: 681834 - DNA, 75 bp, synthetic construct
  source 1..75: mol_type = other DNA
gcgtaaagtctggagtcagttgttacgggaaggaatcagggtagccagatgtacagtggcgcgcctcatggcggt

SEQ ID NO: 681835 - DNA, 75 bp, synthetic construct
  source 1..75: mol_type = other DNA
gccggaaaaccattgccacaggtgaccgcgtaaaccgtcagttcgtggcagaacgacctgaccagctgtgggtgg

SEQ ID NO: 681836 - DNA, 75 bp, synthetic construct
  source 1..75: mol_type = other DNA
cggtgttctccggggtaaaaaggtccgtacgaccatcagccggaaagcctttgccgcaggcgaccgcgtaaaccg

SEQ ID NO: 681837 - DNA, 75 bp, synthetic construct
  source 1..75: mol_type = other DNA
ctcatcgtctatggaaacgacattcgtgctggatgcactggagcaggcgttttgggcccggcgcccgtccggcac

SEQ ID NO: 681838 - DNA, 75 bp, synthetic construct
  source 1..75: mol_type = other DNA
ctcatcgtctatggaaacgacattcgtgctggatgcactggagcaggcgttttgggcccgccggccgtccggcac

SEQ ID NO: 681839 - DNA, 75 bp, synthetic construct
  source 1..75: mol_type = other DNA
agggataacagcccaatagaacgcttcttcaggagtctgaagaacgaatggatgccggtggtgggttacgtaagc

SEQ ID NO: 681840 - DNA, 75 bp, synthetic construct
  source 1..75: mol_type = other DNA
acttctggcatcaacaggaagtacaggcgactcgtatgacaacgcgatggcggagagcatcaatggcctttacaa

SEQ ID NO: 681841 - DNA, 75 bp, synthetic construct
  source 1..75: mol_type = other DNA
gcagggcttcgtctatgtggcgttcatcattgatgtatttgccggatacatcgtggggtggcgagtctcatcgtc

SEQ ID NO: 681842 - DNA, 75 bp, synthetic construct
  source 1..75: mol_type = other DNA
ggctgggccatactcctccggcagaagcagaaaaagcttattatgcttccatcggaaacgatgatctggcagcct

SEQ ID NO: 681843 - DNA, 75 bp, synthetic construct
  source 1..75: mol_type = other DNA
agcagtacagggtcggaccgctatgcagcgaactgcatattgccccgtcaacgtattaccactgtcagcaacagc

SEQ ID NO: 681844 - DNA, 75 bp, synthetic construct
  source 1..75: mol_type = other DNA
ataaaggttctcagtatgtatcgctggcctacacacagcggcttaaggaagccggattactggcatcaacaggaa

SEQ ID NO: 681845 - DNA, 75 bp, synthetic construct
  source 1..75: mol_type = other DNA
tctcatcgtccatggaaacgacattcgtgctggatgcactggagcaggcgttgtgggcccgtcggccgtccggca

SEQ ID NO: 681846 - DNA, 75 bp, synthetic construct
  source 1..75: mol_type = other DNA
tcaacgtattaccactgtcagcaacagcgacatcatcctgataaacgcagtgcccgtgcgcagcgcgatgactgg

SEQ ID NO: 681847 - DNA, 75 bp, synthetic construct
  source 1..75: mol_type = other DNA
actgctggcatcaacaggtagtacaggcgactcgtatgacaacgcgatggcggagagcatcaatggcctttacaa

SEQ ID NO: 681848 - DNA, 75 bp, synthetic construct
  source 1..75: mol_type = other DNA
acttctggcatcaacagggagtacgggcgactcgtatgacaacgcgatggcggagagcatcaatggcctttacaa

SEQ ID NO: 681849 - DNA, 75 bp, synthetic construct
  source 1..75: mol_type = other DNA
acttctggcatcaacaggcagtaccggcgactcgtatgacaacgcgatggcggagagcatcaatggcctttacaa

SEQ ID NO: 681850 - DNA, 75 bp, synthetic construct
  source 1..75: mol_type = other DNA
ccggtatgcagcgaactgcatgttgccccgtcaacgtattaccactgtcagcaacagcgacatcatccggagaaa

SEQ ID NO: 681851 - DNA, 75 bp, synthetic construct
  source 1..75: mol_type = other DNA
gggtggactggtataacaatcggcgattgctggaaaggctgggccatactcctccggcagaagcagaaaaagctt

SEQ ID NO: 681852 - DNA, 75 bp, synthetic construct
  source 1..75: mol_type = other DNA
ccgtgcgcagcacgatgactggctgaagagagagatacagcgcgtatacgatgaaaatcatcaggtgtacggtgt

SEQ ID NO: 681853 - DNA, 75 bp, synthetic construct
  source 1..75: mol_type = other DNA
gttgcccgcactcactgatgcccagcaggcaatcccagggattaagtttgactgggtggtggaagaagggttcgc

SEQ ID NO: 681854 - DNA, 75 bp, synthetic construct
  source 1..75: mol_type = other DNA
gggcgctggcagaactggaaggcggtgcaggtgcggtgctaaccaataccggcatgtcagctattcacctggtca

SEQ ID NO: 681855 - DNA, 75 bp, synthetic construct
  source 1..75: mol_type = other DNA
atgacgcgtaaacaggccaccattgcagtgcgtagtgggttaaatgacgacgagcagtatggttgtgttgtcccg

SEQ ID NO: 681856 - DNA, 75 bp, synthetic construct
  source 1..75: mol_type = other DNA
gaatcaggtagtttgcatggcaccgggaaaaagtttaattaatctcaacggtcaagcagttttggaaaaactatc

SEQ ID NO: 681857 - DNA, 75 bp, synthetic construct
  source 1..75: mol_type = other DNA
gttgagcaggtgattccggtggcaatacgccgctggcgcaaagcatggttttctgcgcccattaaggcggagcgg

SEQ ID NO: 681858 - DNA, 75 bp, synthetic construct
  source 1..75: mol_type = other DNA
ttgcaaaacagcagcacgccgtagagcgcacccgtgagctgttcgccaaaagcctgggttacagcaaaccacaga

SEQ ID NO: 681859 - DNA, 75 bp, synthetic construct
  source 1..75: mol_type = other DNA
cgcgcatgattactcgcgtcgtggcaacccaacgcgcgatgtggttcagcgagcactggcagaactggaaggcgg

SEQ ID NO: 681860 - DNA, 75 bp, synthetic construct
  source 1..75: mol_type = other DNA
gcctgctatttaacctatcgtaagttttataattcgcgccaccagttggtggtgacgcaattgaagaagaaatga

SEQ ID NO: 681861 - DNA, 75 bp, synthetic construct
  source 1..75: mol_type = other DNA
ggtatataccgctaaggattcaatccctggtgtgaatacaaccggtaatcagaatactactggtaatgccgcaac

SEQ ID NO: 681862 - DNA, 75 bp, synthetic construct
  source 1..75: mol_type = other DNA
acgcgggttgcgaacgctggtgccgcgtatggagctggcccagcgtaacgcgcaggcgattgtgaaatatctgca

SEQ ID NO: 681863 - DNA, 75 bp, synthetic construct
  source 1..75: mol_type = other DNA
caatattggcgtgacgggcggcgcgtttgacagctatctgctgctacgcgggttgcgaacgctggtgccgcgtat

SEQ ID NO: 681864 - DNA, 75 bp, synthetic construct
  source 1..75: mol_type = other DNA
ttacgcgtcgtggatattgcgaaaatctgccatctggcaagggaagtcggggcggtgagcgtggtggataacacc

SEQ ID NO: 681865 - DNA, 75 bp, synthetic construct
  source 1..75: mol_type = other DNA
ctggccggagcgaaattcgtggtatcggtagacactgggttaagtcatttaactgcagcactggatcgaccgaat

SEQ ID NO: 681866 - DNA, 75 bp, synthetic construct
  source 1..75: mol_type = other DNA
ggcaatcaacaagggacaacaaacatcattaacggtgcggggaatcgtgaattaatgttgttgcctggcaaactg

SEQ ID NO: 681867 - DNA, 75 bp, synthetic construct
  source 1..75: mol_type = other DNA
aggaacaaccaacatcattaatggcgcgggaaatcgcgagttaatgctgttgccgggcaaattacgttatcgcga

SEQ ID NO: 681868 - DNA, 75 bp, synthetic construct
  source 1..75: mol_type = other DNA
agtatcagtcaatggtactgacctaccgacaactacattcccttcgcaggggttcaccggggcgtattatcagtt

SEQ ID NO: 681869 - DNA, 75 bp, synthetic construct
  source 1..75: mol_type = other DNA
accgcacatgttgctagctttatcgctgatccgtcgactatcgccgccaccaacagtgatttaagtaccttaaag

SEQ ID NO: 681870 - DNA, 75 bp, synthetic construct
  source 1..75: mol_type = other DNA
tgggatgggcaatacggaaatgtctacgctaccgtatctgatagttatgaccgtaagaatcatgatcatctttcg

SEQ ID NO: 681871 - DNA, 75 bp, synthetic construct
  source 1..75: mol_type = other DNA
tcccttatcctggatttcagtctggttttgttgaggttaacgacagtagccagggcaatcagcaggggacaacaa

SEQ ID NO: 681872 - DNA, 75 bp, synthetic construct
  source 1..75: mol_type = other DNA
gcatcgggtcactgtacagtgaatggggagatatggggcattacacgactgacgctggttttcaatcaaatatgt

SEQ ID NO: 681873 - DNA, 75 bp, synthetic construct
  source 1..75: mol_type = other DNA
cgggaaaggagttgtttgtgtgggagatcccctttcttgtggctcagtcatcgccaatggtgaggcaatttttca

SEQ ID NO: 681874 - DNA, 75 bp, synthetic construct
  source 1..75: mol_type = other DNA
tgcgcaaggactggtaaaaagtgccgcgctggtgacacgtctggcgcatggcgttaagcatggaatggactggca

SEQ ID NO: 681875 - DNA, 75 bp, synthetic construct
  source 1..75: mol_type = other DNA
tttcaacaccaaatgtcagtgccagattttaggtgaaggaattggttttttgccggattacatggtccgtgaggc

SEQ ID NO: 681876 - DNA, 75 bp, synthetic construct
  source 1..75: mol_type = other DNA
ttttttgccagattacatggttcgtgaagcgatggcgcaatcactgctggttacccgacaaattcataatccgcg

SEQ ID NO: 681877 - DNA, 75 bp, synthetic construct
  source 1..75: mol_type = other DNA
atgcgctgtgaatagcggtttacatcaaccacctgctttcattacccattcagagataaatttattacccggaac

SEQ ID NO: 681878 - DNA, 75 bp, synthetic construct
  source 1..75: mol_type = other DNA
cagcaaggaaaattgctggtgtggcgtttgatggctctgccgatattactttgactgcggctaaccttaatgctt

SEQ ID NO: 681879 - DNA, 75 bp, synthetic construct
  source 1..75: mol_type = other DNA
cgaatacggtgaaacggcggtttatatggtgatgaaacaccgcgacagcacccgccttgacgagctcaatgccat

SEQ ID NO: 681880 - DNA, 75 bp, synthetic construct
  source 1..75: mol_type = other DNA
gccagctggctccctaccaggaaaagctgacatcgatgcagcgtctgatcactgaaatgatggacgcaaaaggaa

SEQ ID NO: 681881 - DNA, 75 bp, synthetic construct
  source 1..75: mol_type = other DNA
tgaagttgtagatggacaacaacgtcttacaacgttaagcattattgtctccgagctaaaaaaaatcatcccgat

SEQ ID NO: 681882 - DNA, 75 bp, synthetic construct
  source 1..75: mol_type = other DNA
aaaaacaggtgtgagagcaatcgcctttattgaaagtgaggtggatgcgtggattgaacgagctattcaggcatc

SEQ ID NO: 681883 - DNA, 75 bp, synthetic construct
  source 1..75: mol_type = other DNA
aaaaatcggtgaaagagctgttgctttcattgaaagcgaagttgatgagtggatttataaagctataaccgcttc

SEQ ID NO: 681884 - DNA, 75 bp, synthetic construct
  source 1..75: mol_type = other DNA
tacctgaagttatcaacagaactggctatggcaaaacatggatttatcaccttatcaagcggggtgaattccctg

SEQ ID NO: 681885 - DNA, 75 bp, synthetic construct
  source 1..75: mol_type = other DNA
ccgccgaaaaatggttgatgaacttgcccttgaaccgttccggaccggcgcactggatcgcagcctcacgcctcg

SEQ ID NO: 681886 - DNA, 75 bp, synthetic construct
  source 1..75: mol_type = other DNA
gggattagctccggcgcagcgtttggcgtggtactgatgctgtttctggtaccgggtaatgcttttggctggctg

SEQ ID NO: 681887 - DNA, 75 bp, synthetic construct
  source 1..75: mol_type = other DNA
gtattattcagcggctgaccggaaacccgatggcaagccccgaagtgctggggatcagctctggtgcggcgtttg

SEQ ID NO: 681888 - DNA, 75 bp, synthetic construct
  source 1..75: mol_type = other DNA
ctttaagtaatgcagatcttttaaaaaatgcactgtttgaatcagcttctacacataataaaaaatcagagcaaa

SEQ ID NO: 681889 - DNA, 75 bp, synthetic construct
  source 1..75: mol_type = other DNA
atatgagcctcgtccgaatcaagtgaacttaataaaagcaattttgcttcgcttagatatggagcaacaagatga

SEQ ID NO: 681890 - DNA, 75 bp, synthetic construct
  source 1..75: mol_type = other DNA
agcgactggaaaacccatatgctggagtgcctgtcctcctacgccgaccgcttaacatcaatgcaacatatcatc

SEQ ID NO: 681891 - DNA, 75 bp, synthetic construct
  source 1..75: mol_type = other DNA
aaagcatctcaagcgtctcaaagtgcatccgctgcggcatcctcacaaagtgccgcaagtgcgagtgcaactgct

SEQ ID NO: 681892 - DNA, 75 bp, synthetic construct
  source 1..75: mol_type = other DNA
atcaactcagcaacaatgtcttttagtggtggtgccggatggttcaagctggcaactgtaaccatgccacaagcc

SEQ ID NO: 681893 - DNA, 75 bp, synthetic construct
  source 1..75: mol_type = other DNA
ctggtaaccagaacacaaccggtaatgcagcgacagcgaccaagttacaaaccgctagaactataaatggggtgt

SEQ ID NO: 681894 - DNA, 75 bp, synthetic construct
  source 1..75: mol_type = other DNA
atgttgtgggcatccgccatatctcattatactgttttacaaaatacggtacctgaatggacaacatatttttgc

SEQ ID NO: 681895 - DNA, 75 bp, synthetic construct
  source 1..75: mol_type = other DNA
gctttggcgatgctatgggattcaatgctggcagtatcaacaatataacgggatttggtgctgtagaattagcag

SEQ ID NO: 681896 - DNA, 75 bp, synthetic construct
  source 1..75: mol_type = other DNA
tacatcgcattgattggtggcgcgggatttaacgtggggtcacctcaacaggcaggcatttcagaactggttcta

SEQ ID NO: 681897 - DNA, 75 bp, synthetic construct
  source 1..75: mol_type = other DNA
gtcatcttcgggaggaacgctgtaagtacaagctctgcacaagcgttgttgagacaagaccacgcggatcgcaaa

SEQ ID NO: 681898 - DNA, 75 bp, synthetic construct
  source 1..75: mol_type = other DNA
aggttggagcggtacaagtggtgctcatgcacctgtacatgtacgttcgcgacgagatacggatacatccagttg

SEQ ID NO: 681899 - DNA, 75 bp, synthetic construct
  source 1..75: mol_type = other DNA
gtgcaaccataccaaacagtgaaactggttgtggcgttattccattggcaggagctgttatagaggtatttaata

SEQ ID NO: 681900 - DNA, 75 bp, synthetic construct
  source 1..75: mol_type = other DNA
gaatcaggctacagctgctaaaaattcagcatcggcagcaaaatcctctgaaacaaatgcaaaggcttctgaaga

SEQ ID NO: 681901 - DNA, 75 bp, synthetic construct
  source 1..75: mol_type = other DNA
gatataatgttaactcccctatgcaggctggtatatctgaacttgttcttcgtgcgggaaatggaaatccaaaag

SEQ ID NO: 681902 - DNA, 75 bp, synthetic construct
  source 1..75: mol_type = other DNA
ccgctgcgacccgtgcggaagctgctgctgatcgtgctgaagagattgccggtgcagttgcgatggaagacgcaa

SEQ ID NO: 681903 - DNA, 75 bp, synthetic construct
  source 1..75: mol_type = other DNA
ttgattttaacaatgggcgagggttttattgttctcactcaatattcggtattaatgccatttttagcggaaatc

SEQ ID NO: 681904 - DNA, 75 bp, synthetic construct
  source 1..75: mol_type = other DNA
atgaaaaacggccctgaactgaaagcgccagtaagtgatgacatcagcagagcgctggcttttgctattaagtgg

SEQ ID NO: 681905 - DNA, 75 bp, synthetic construct
  source 1..75: mol_type = other DNA
tgcgccgccagcagtgagaagcgccagtggagtgaacgcgcggaacaggttttacagttattcgccggactgatt

SEQ ID NO: 681906 - DNA, 75 bp, synthetic construct
  source 1..75: mol_type = other DNA
ccgcatgcgcgtgtctggtcggtggtaaaagccaacgcgtatggtcacggtgtcgagcgtatctggagcgcgctc

SEQ ID NO: 681907 - DNA, 75 bp, synthetic construct
  source 1..75: mol_type = other DNA
aatcattggcactggcattaatgctggtggtggtggtggcaatcttaattagccataaagaaaaactggcgctgg

SEQ ID NO: 681908 - DNA, 75 bp, synthetic construct
  source 1..75: mol_type = other DNA
gacagtattcgcgcggctttaattccgacggtcgattcagcaaaaacggttggcttagtgagtttaccaggaatg

SEQ ID NO: 681909 - DNA, 75 bp, synthetic construct
  source 1..75: mol_type = other DNA
tggcgaatcaggcggcggcagtgatgtcctggacatcaaagcgcaagcgaagggagcaacagagtcatcaactca

SEQ ID NO: 681910 - DNA, 75 bp, synthetic construct
  source 1..75: mol_type = other DNA
gccttcaccagcttggcatcgagaataagtggttctgaccacgttgacgaaaagatgcaaacgccagatctactc

SEQ ID NO: 681911 - DNA, 75 bp, synthetic construct
  source 1..75: mol_type = other DNA
gaaagcatgatcagcaccttctcgcttggctccactctggcatcaggtgtgagctccgcacaggcattacaaagc

SEQ ID NO: 681912 - DNA, 75 bp, synthetic construct
  source 1..75: mol_type = other DNA
tggaatttccagcgcgatggcgcgtattgagcaggcggcggaagggctggagtgtcggcgttcgttgtccaattc

SEQ ID NO: 681913 - DNA, 75 bp, synthetic construct
  source 1..75: mol_type = other DNA
atgatccggctgaacagagcgatggttatcgcgtactggtcgaccgcctctggccgcgcggtatcaaaaaaaccg

SEQ ID NO: 681914 - DNA, 75 bp, synthetic construct
  source 1..75: mol_type = other DNA
tggtcagtattggcctgcttcttgggatcttgatgatctgtatccagtccgtctttcaaggcgcgaagcaaatca

SEQ ID NO: 681915 - DNA, 75 bp, synthetic construct
  source 1..75: mol_type = other DNA
tgaataatcttgcgaaattaggcattgccagggtgctgacatcggggcaaaaatcagacgcgctgcaaggtttat

SEQ ID NO: 681916 - DNA, 75 bp, synthetic construct
  source 1..75: mol_type = other DNA
ttcatcaagaactcgcgtttacctcaaaaggtgaacgaattttaaaggccaatatgctttatgtcggaggaattc

SEQ ID NO: 681917 - DNA, 75 bp, synthetic construct
  source 1..75: mol_type = other DNA
gagcttgggggatatgaaaatgcaatgatttcagcgatgcgttataatccaagatatattttcctgggtgagatt

SEQ ID NO: 681918 - DNA, 75 bp, synthetic construct
  source 1..75: mol_type = other DNA
gatggaaaatgcataccgtcagatgcagatgaatgcgcaagctgaaaaggtagcgaagattatcgctgctaacag

SEQ ID NO: 681919 - DNA, 75 bp, synthetic construct
  source 1..75: mol_type = other DNA
atatatgtcaccctggcgttttgtgcgtttattgaatggattccctgtattattgccgcgttcggcgttgatggt

SEQ ID NO: 681920 - DNA, 75 bp, synthetic construct
  source 1..75: mol_type = other DNA
aagggtggcattgaagcgatctcccgcctgatggggttcctgctggtatgtatgggtgtgcagtttattattaac

SEQ ID NO: 681921 - DNA, 75 bp, synthetic construct
  source 1..75: mol_type = other DNA
ggaggatatgaaaatgccatgatttcagcaatgcggtataacccaaagtatatatttatgggagaaataagaaca

SEQ ID NO: 681922 - DNA, 75 bp, synthetic construct
  source 1..75: mol_type = other DNA
taacgataattagtgaacgttaccctgagctaaaggcccaggaactctatcaaaatttgatggtacagctcgaag

SEQ ID NO: 681923 - DNA, 75 bp, synthetic construct
  source 1..75: mol_type = other DNA
ctgggtgccggggactcgtgaagaggtcattgagggaatcagactgctcggtgacgcacaacgtgaactggtcag

SEQ ID NO: 681924 - DNA, 75 bp, synthetic construct
  source 1..75: mol_type = other DNA
tggcaacaagcccaggcgcaggtgtctcgcactctcggtcagttaacgataattagtgaacgttaccctgagtta

SEQ ID NO: 681925 - DNA, 75 bp, synthetic construct
  source 1..75: mol_type = other DNA
ccgccacagtttatcgcccgaaatgcagaataaagccttagaaaaagcgggattgccatttacctatatggcctt

SEQ ID NO: 681926 - DNA, 75 bp, synthetic construct
  source 1..75: mol_type = other DNA
acaggttatggggaatctgctccggcggataagctgttcccgttctttggctttaccgccgagaatattgtggca

SEQ ID NO: 681927 - DNA, 75 bp, synthetic construct
  source 1..75: mol_type = other DNA
ctatggtcgtcagtttgctcccgagctatgggaaattttagtgaaaataacacactggactgataaagatgttga

SEQ ID NO: 681928 - DNA, 75 bp, synthetic construct
  source 1..75: mol_type = other DNA
tacagcaaaccctgacggcgctgactacacatgtactgacggatgggtggctattagcactgcaaccgccaacct

SEQ ID NO: 681929 - DNA, 75 bp, synthetic construct
  source 1..75: mol_type = other DNA
atgacaaaaacagtctcaaccagtatgtggcgcagtaaactgcagcaacagatgacctcgtctgagcgtgaaagt

SEQ ID NO: 681930 - DNA, 75 bp, synthetic construct
  source 1..75: mol_type = other DNA
agccgtcagaacccgttcattcgttttgagcaggataagaagctgttccgtaatgcgctggaagtagaaggcctg

SEQ ID NO: 681931 - DNA, 75 bp, synthetic construct
  source 1..75: mol_type = other DNA
ttctgatcatggacgaaccgaccaaccacctggatatggaatccatcgagtcgctgaacatggcgctggaactgt

SEQ ID NO: 681932 - DNA, 75 bp, synthetic construct
  source 1..75: mol_type = other DNA
tagtcgtgacctcgtggacgcttatgaagccacctttcatgatttaccgttcagtcaccgacaatggtggcggga

SEQ ID NO: 681933 - DNA, 75 bp, synthetic construct
  source 1..75: mol_type = other DNA
ttcttctaggatgatgaaagagctagagtgcaatatggtgtgcctgaatataaaactggctcaatacatacttaa

SEQ ID NO: 681934 - DNA, 75 bp, synthetic construct
  source 1..75: mol_type = other DNA
gtgacatcaggggcatatgctggcccacttgaagaatacttaattaagagttcttctaggatgatgaaagagcta

SEQ ID NO: 681935 - DNA, 75 bp, synthetic construct
  source 1..75: mol_type = other DNA
tttcgttagccgctttagtgccaacgcctcgaaatctcgccaggcaacttcgcgcgcgcgccagattgataaaat

SEQ ID NO: 681936 - DNA, 75 bp, synthetic construct
  source 1..75: mol_type = other DNA
ccctgcagtgggtgaaacctggtactggccgtgtgggcatcctgttaccagatggcttgttgggcaaccctggcg

SEQ ID NO: 681937 - DNA, 75 bp, synthetic construct
  source 1..75: mol_type = other DNA
gtcactgtacagtgaatggggagatatggggcattacacgactgaagctggttttcaatcaaatatgtattggtc

SEQ ID NO: 681938 - DNA, 75 bp, synthetic construct
  source 1..75: mol_type = other DNA
gaaatcaccccggaacgcgtgatcgactttagcggtaattacgaagattacctgcgtagtaaagggatcgagtaa

SEQ ID NO: 681939 - DNA, 75 bp, synthetic construct
  source 1..75: mol_type = other DNA
cgatctgcaaccggacagcggcaccgtaaaatggtctgaaaacgcgcgcattggttactacgctcaggaccacga

SEQ ID NO: 681940 - DNA, 75 bp, synthetic construct
  source 1..75: mol_type = other DNA
cgatctgcaaccggacagcggcaccgtaaaatggtctgagaatgcgcgcatcggttactatgcgcaggaccacga

SEQ ID NO: 681941 - DNA, 75 bp, synthetic construct
  source 1..75: mol_type = other DNA
atgtatcacgacgtcagctatctgctctcccgcctgatcaacggcccgctgtcgctgcgccagatttactttgcc

SEQ ID NO: 681942 - DNA, 75 bp, synthetic construct
  source 1..75: mol_type = other DNA
ctcggcctggacgactccgcgcttgatgcgagctttgtcatggggggcgcagttcgtgagctgttcctgaagtat

SEQ ID NO: 681943 - DNA, 75 bp, synthetic construct
  source 1..75: mol_type = other DNA
tttttacggtgtttgtggatggtgaaaacgaagtgggtaaggtgacctccgtcactctgcccaaactgacgcgca

SEQ ID NO: 681944 - DNA, 75 bp, synthetic construct
  source 1..75: mol_type = other DNA
tttttacggtgtttgtggatggtgaaaacgaagtgggtaatgtgacctccgtcactcagcccaaactgacgcgca

SEQ ID NO: 681945 - DNA, 75 bp, synthetic construct
  source 1..75: mol_type = other DNA
tctacggaacccggttgtatttgtccacatccaaccctgacggcactgactacacatgtaccgatggatgggtgg

SEQ ID NO: 681946 - DNA, 75 bp, synthetic construct
  source 1..75: mol_type = other DNA
cgtacagcgctaagcagtcttgcggatactttttttgagaataatgttaacaatataaacatgaataaattacgt

SEQ ID NO: 681947 - DNA, 75 bp, synthetic construct
  source 1..75: mol_type = other DNA
aaactgaaagctatcgtggcggtggcatgatgggggcggtgagtatcgacctcggtcttgatgattctgcgcttg

SEQ ID NO: 681948 - DNA, 75 bp, synthetic construct
  source 1..75: mol_type = other DNA
accgtctcctgatgtctgatattcgcgaatacctgcaagaaagaggctatgtgaatccaccagaacagcactacg

SEQ ID NO: 681949 - DNA, 75 bp, synthetic construct
  source 1..75: mol_type = other DNA
ttaaaaagcggctccaccacattaacgtcattaacagcggtgaccgatcaaaacggaatcgcgacaacaagcgtg

SEQ ID NO: 681950 - DNA, 75 bp, synthetic construct
  source 1..75: mol_type = other DNA
gcaggcgttctacatttcaccaaactatctctctcacctgtttcaaaaaacaggcgctattggctttaacgaata

SEQ ID NO: 681951 - DNA, 75 bp, synthetic construct
  source 1..75: mol_type = other DNA
tttttacgttgtttgtggatggtgaaaacgaagtgggtaaggtgacctccgtcactcagcccaaactgacgcgca

SEQ ID NO: 681952 - DNA, 75 bp, synthetic construct
  source 1..75: mol_type = other DNA
aggagtcggtggatgacagcgatgtgacagaaatcgacctgctgaacttcatctacaaaaaagacggccagaacg

SEQ ID NO: 681953 - DNA, 75 bp, synthetic construct
  source 1..75: mol_type = other DNA
ccgcaagatttattgacaataccaatacctgaaattgaaacactaccatttgacgagtttatttatactgttgcg

SEQ ID NO: 681954 - DNA, 75 bp, synthetic construct
  source 1..75: mol_type = other DNA
ggtttgtacccacatggcggatctggattacggcgagctgcgcgtttatccgggcaactacgatgagtacatgac

SEQ ID NO: 681955 - DNA, 75 bp, synthetic construct
  source 1..75: mol_type = other DNA
ctgggtaccaacggcgtcggtaaatcaacgctgctgaaaacgctggtgggcgatctgcaaccggacatcggcacc

SEQ ID NO: 681956 - DNA, 75 bp, synthetic construct
  source 1..75: mol_type = other DNA
atggtgcggtgccgctggataataatgtgtgtgaacgggccatcaaaaacgtggtcctgggcagaaaatcgtggc

SEQ ID NO: 681957 - DNA, 75 bp, synthetic construct
  source 1..75: mol_type = other DNA
ggtaaatatcaaacgccagatttcggtgagtatatcggtacgtcatgggctggctgtgcaaaagaggcgcgcaag

SEQ ID NO: 681958 - DNA, 75 bp, synthetic construct
  source 1..75: mol_type = other DNA
gctgcaagggcaccagttgaagtcgtgagagcgatggcagcagagctacagaagcggcgcgaagctgatagtgca

SEQ ID NO: 681959 - DNA, 75 bp, synthetic construct
  source 1..75: mol_type = other DNA
gccgaactggaaagcgcggcgctgaatgcgcgcctggcggcggaaactattgatgtctccctgcctggtcgccgt

SEQ ID NO: 681960 - DNA, 75 bp, synthetic construct
  source 1..75: mol_type = other DNA
ttatcaacgaagcgaaagagcaggtgcagcaggcgttgaatgcgcgtaaagccgaactggaaagcgcggcgctga

SEQ ID NO: 681961 - DNA, 75 bp, synthetic construct
  source 1..75: mol_type = other DNA
aatgtgcgcgtcgaatatttgggtaaaaaagggcacttaacccttcagatgacgaccctgcgtgaactgccgcca

SEQ ID NO: 681962 - DNA, 75 bp, synthetic construct
  source 1..75: mol_type = other DNA
gtgggaagtgaagcaggaacgtgaccgcatctatgctttgccggaaatgagtgaagaagacggctataaagtggc

SEQ ID NO: 681963 - DNA, 75 bp, synthetic construct
  source 1..75: mol_type = other DNA
tttgaagagttcactgtgctggatacggtgatcatggggcataaagagttgtgggaagtgaagcaggaacgtgac

SEQ ID NO: 681964 - DNA, 75 bp, synthetic construct
  source 1..75: mol_type = other DNA
ccagtgcgaaggcggccattagccaggcgtcagatgttgccgcgttagataatgtgcgcgtcgaatatttgggta

SEQ ID NO: 681965 - DNA, 75 bp, synthetic construct
  source 1..75: mol_type = other DNA
ggacctgattttgcgcacgaaggccgcattgcagaaaacccaaaaacatgctgctggccgtatgctggatgcagg

SEQ ID NO: 681966 - DNA, 75 bp, synthetic construct
  source 1..75: mol_type = other DNA
ggcgaagagaaaccagcctgtaagcagtgtccggtgcactgttaccagccagcaaagcgtgaagagatgaaacag

SEQ ID NO: 681967 - DNA, 75 bp, synthetic construct
  source 1..75: mol_type = other DNA
gtaagcgcaccctgaaaggcggacaggtcaggggcacctgtcacaccttgaaggacagaatcaggccggaaaacg

SEQ ID NO: 681968 - DNA, 75 bp, synthetic construct
  source 1..75: mol_type = other DNA
ataactcggttacccgcgtttgcccgaaaccaacgcatatgattggcggttacgcgcagctggcctggggcttta

SEQ ID NO: 681969 - DNA, 75 bp, synthetic construct
  source 1..75: mol_type = other DNA
ggcacaaaacgtggttaacgcgctggaaaaagcgaaagaaaccacctttgctcgcttcctctatgcacttggcat

SEQ ID NO: 681970 - DNA, 75 bp, synthetic construct
  source 1..75: mol_type = other DNA
gactggagcgcatggggccgaaatcggcacaaaacgtggttaacgcgctggaaaaagcgaaagaaaccacctttg

SEQ ID NO: 681971 - DNA, 75 bp, synthetic construct
  source 1..75: mol_type = other DNA
tcgacggcgtggtgattaaagtcaactcactggcgcagcaggaacagcttggctttgtttcacgtgccccgcgct

SEQ ID NO: 681972 - DNA, 75 bp, synthetic construct
  source 1..75: mol_type = other DNA
ataagaaatttgatcattccgtgcgtgattttctgaatgattacatgaaggaaaagagtaatatagatgaagctg

SEQ ID NO: 681973 - DNA, 75 bp, synthetic construct
  source 1..75: mol_type = other DNA
agcaggtctctggacacgtacaaatatcccccggatgacgcaagagattgaccgctgcattgggcttaaagagca

SEQ ID NO: 681974 - DNA, 75 bp, synthetic construct
  source 1..75: mol_type = other DNA
acttgaacaagccgaagcgcataaagacgtcatcactcagcggttaacgcaagtgctactgcaaaatgagcgcga

SEQ ID NO: 681975 - DNA, 75 bp, synthetic construct
  source 1..75: mol_type = other DNA
gaggacgaattccttgcggacaagactggtaaccgtcgctggctccccgtggaagtgtcgaaagtcgacgtgaaa

SEQ ID NO: 681976 - DNA, 75 bp, synthetic construct
  source 1..75: mol_type = other DNA
gggcgatccaacaagcacagtttattttcctgcgggaaccgcgggctttgagcaggggcattttaaatgcctgca

SEQ ID NO: 681977 - DNA, 75 bp, synthetic construct
  source 1..75: mol_type = other DNA
taaactgaaagcgttgggtaagacgccgagtcgctataaccgggaccgccaggtcaccggtattgctcaatggac

SEQ ID NO: 681978 - DNA, 75 bp, synthetic construct
  source 1..75: mol_type = other DNA
tcacaaacttggacctaaatcatcaaatattgcaaaattgcaagcattagaaaatatttcaatgggtattgactg

SEQ ID NO: 681979 - DNA, 75 bp, synthetic construct
  source 1..75: mol_type = other DNA
gcctgattgataaattatcccgcccgttaaaacaggtgcagggtaacgtcaccggctttgcggaaaaatcaaaag

SEQ ID NO: 681980 - DNA, 75 bp, synthetic construct
  source 1..75: mol_type = other DNA
aacctacggcgccagcgcggtggagtttgtccagtccacggaaagtattaacgccgccatcgcgggactgaccgg

SEQ ID NO: 681981 - DNA, 75 bp, synthetic construct
  source 1..75: mol_type = other DNA
ctgcgcattctcggcatcgagggcgacacgccgcaggatacgctgcgtacgctggttggacgtattaaaaccatt

SEQ ID NO: 681982 - DNA, 75 bp, synthetic construct
  source 1..75: mol_type = other DNA
gcctgattgataagctgacgcgcccgttaaaacaggcgcagggcagcgtcaccggctttgcggaaaaatcaaaag

SEQ ID NO: 681983 - DNA, 75 bp, synthetic construct
  source 1..75: mol_type = other DNA
tttcactggcgaacgaatctcaaccggcactgacaacgaataccctttctactggcggtgaattaaaaggcgttg

SEQ ID NO: 681984 - DNA, 75 bp, synthetic construct
  source 1..75: mol_type = other DNA
gcgtttaccgccgtggctggtgtggtggaatggcttgccggcctgttttccgctgcgtggcaatggatcacggac

SEQ ID NO: 681985 - DNA, 75 bp, synthetic construct
  source 1..75: mol_type = other DNA
cgttgccgggttaaacggctggaaaatcccggaactgaacaaagaaacgctggcggccatcgctgaacctgatag

SEQ ID NO: 681986 - DNA, 75 bp, synthetic construct
  source 1..75: mol_type = other DNA
ggataacccgttgatgggtaatcctgctttctgggaagccgctcgctggttagtcgattacgacggtatcaccaa

SEQ ID NO: 681987 - DNA, 75 bp, synthetic construct
  source 1..75: mol_type = other DNA
cacactgaataaatccggtgcgtttattctcaatgtgctgggatggcagccggaaaatatcgccagccagttgaa

SEQ ID NO: 681988 - DNA, 75 bp, synthetic construct
  source 1..75: mol_type = other DNA
gttttgctgggcagtctggttgctggtgttagttacgctcatttttctgtcattgacacaccatgaagagagcga

SEQ ID NO: 681989 - DNA, 75 bp, synthetic construct
  source 1..75: mol_type = other DNA
cggctggccaaaaatcagcgcacgctgtccggcacagcggacggggaggcccataccgaaccggcttacacgata

SEQ ID NO: 681990 - DNA, 75 bp, synthetic construct
  source 1..75: mol_type = other DNA
agccgggatgagcttgagccggacacgccccgtcttattgaagtatccggtaacaccctgaccctgttaccggtg

SEQ ID NO: 681991 - DNA, 75 bp, synthetic construct
  source 1..75: mol_type = other DNA
ccgtgctggttaaaaccggtgaaacggtggattgctggatgatttttctaaagagcaagtgtcaaaggttcctct

SEQ ID NO: 681992 - DNA, 75 bp, synthetic construct
  source 1..75: mol_type = other DNA
tggcgagtggctgccgctatcgcccgccgagcctcttcctgcgccgcaaacgcattatcaatggcgctacgcccc

SEQ ID NO: 681993 - DNA, 75 bp, synthetic construct
  source 1..75: mol_type = other DNA
gcgctctctttcccccagcaggcaggctaccgctaccagcccggaatgattttctctcctgatggtcactgtcgt

SEQ ID NO: 681994 - DNA, 75 bp, synthetic construct
  source 1..75: mol_type = other DNA
aggttttcaggctattcccgacaccatcgcccgtgccggcgatcggttatatgaaatgatgagcggcgcggaaga

SEQ ID NO: 681995 - DNA, 75 bp, synthetic construct
  source 1..75: mol_type = other DNA
tgaacttgcacggtggtttggaattccgctggagaaagtaggattagcgccttcaggctgctgcggtggtaatac

SEQ ID NO: 681996 - DNA, 75 bp, synthetic construct
  source 1..75: mol_type = other DNA
cggctatgtgttgcagtaccggtgtctgcggtacagatatcgatcaggttctggttgatttttctgcggatgtgc

SEQ ID NO: 681997 - DNA, 75 bp, synthetic construct
  source 1..75: mol_type = other DNA
ggttgaacgttacaacctggtgcagcagcccatgagctttgttcacaatgagaaagcgaaagcattcctcgaagc

SEQ ID NO: 681998 - DNA, 75 bp, synthetic construct
  source 1..75: mol_type = other DNA
cttcgcatctccggcaaagggcgtgcgcttcttgcgcggtacatacagcagaaccagcctcatgcgcagttctgg

SEQ ID NO: 681999 - DNA, 75 bp, synthetic construct
  source 1..75: mol_type = other DNA
gctgggttctgaagccagtagtgcctatgaaggctttatgaccggggcgattgaaggcggcaaaaagctggggct

SEQ ID NO: 682000 - DNA, 75 bp, synthetic construct
  source 1..75: mol_type = other DNA
atgtagaagagagcgaggaaggaaatacccgggtctattacctgaaatatgctaaagccacgaatctggtggaag

SEQ ID NO: 682001 - DNA, 75 bp, synthetic construct
  source 1..75: mol_type = other DNA
gcgcgtctccccggcctgcgagcctgccgacgcagcgctgtctgccgggctggaggtggcgagtcgcgccgcgac

SEQ ID NO: 682002 - DNA, 75 bp, synthetic construct
  source 1..75: mol_type = other DNA
gctgcccggtcaggcggttagcgccgtaacattcaccgcgccatcagaacccgtgttggggcaggcgctgacgga

SEQ ID NO: 682003 - DNA, 75 bp, synthetic construct
  source 1..75: mol_type = other DNA
cccgattcggcgcagctggacaatatggcctgggcgcagccggcgattgtcgcgtttgaaatcgcgatggcggcg

SEQ ID NO: 682004 - DNA, 75 bp, synthetic construct
  source 1..75: mol_type = other DNA
ctggacaggcaggtgaacgccttcatccgtagatacgaaagcgagcatggtagctacgaagttccgcttccgtta

SEQ ID NO: 682005 - DNA, 75 bp, synthetic construct
  source 1..75: mol_type = other DNA
gccgaaataaacatgctgcttccgaaaaatatgagtgaatcttattcattgagtaacgcatgtattaaagagtat

SEQ ID NO: 682006 - DNA, 75 bp, synthetic construct
  source 1..75: mol_type = other DNA
aggatattatcgatagctaccatcaggagatgcaggaatttggtgatatttatccccctatgcaccgtaaggcga

SEQ ID NO: 682007 - DNA, 75 bp, synthetic construct
  source 1..75: mol_type = other DNA
atgagtcacaccggcagaatgccggaggtgaagaatcgaatgttcacccttcacccattattcaccacctatcac

SEQ ID NO: 682008 - DNA, 75 bp, synthetic construct
  source 1..75: mol_type = other DNA
ctggacaggcaggtgaacgctttcatccgtagatacgaaagcgagcatggtagctacgaagttccactcccgttg

SEQ ID NO: 682009 - DNA, 75 bp, synthetic construct
  source 1..75: mol_type = other DNA
ggccatggtgataacactgtataatttctttgaacatcaagttaaaacattatgcgccgaaattaataaacttct

SEQ ID NO: 682010 - DNA, 75 bp, synthetic construct
  source 1..75: mol_type = other DNA
cagtgcgtagcgggttaaatgacgacgaacagtatggttgcgttgtcccacccatccatctttccagtacctata

SEQ ID NO: 682011 - DNA, 75 bp, synthetic construct
  source 1..75: mol_type = other DNA
gtggcggagcaaatccccaatggctcgacgctgtttatcgatatcggcaccacgccggaagcggtggcgcacgcg

SEQ ID NO: 682012 - DNA, 75 bp, synthetic construct
  source 1..75: mol_type = other DNA
aaagagctataaagcgtcttgctacagggataaataaagagctggatattgcatttaatcatctcgaaattatat

SEQ ID NO: 682013 - DNA, 75 bp, synthetic construct
  source 1..75: mol_type = other DNA
accgcaggtttcttcggcgcgaagccggttttgatatgaatcaggggagcaccttgtggaaactgtgggaagata

SEQ ID NO: 682014 - DNA, 75 bp, synthetic construct
  source 1..75: mol_type = other DNA
ggcaatggttatcactttatatgattttttcgaacgccaaattaaaactttgtgcacagaaataaacaagctgct

SEQ ID NO: 682015 - DNA, 75 bp, synthetic construct
  source 1..75: mol_type = other DNA
cgatgttgcgatgtatcaggagaaaaaacacaaagagaaaacaccttttgtcgcgcattcagctttgcattcctg

SEQ ID NO: 682016 - DNA, 75 bp, synthetic construct
  source 1..75: mol_type = other DNA
gttggcgaaatgactctgatgtcgcattttgccgaggcggagcatcctgatgggattgccggcgcaatggcgcgt

SEQ ID NO: 682017 - DNA, 75 bp, synthetic construct
  source 1..75: mol_type = other DNA
ttattttaatccacggtttttaagcaatgatcttgctgagtctgttgatttatctgcctttgctaagggacgcga

SEQ ID NO: 682018 - DNA, 75 bp, synthetic construct
  source 1..75: mol_type = other DNA
cttaattatcgtggagcttatggtaatactatgtcggttacagtcggagtggtgacagcagccagatttattacg

SEQ ID NO: 682019 - DNA, 75 bp, synthetic construct
  source 1..75: mol_type = other DNA
atattaccatttgcgacagaatatagagaaaatcgtgtcgctcttaacgcgaattcccttgcagataatgttgaa

SEQ ID NO: 682020 - DNA, 75 bp, synthetic construct
  source 1..75: mol_type = other DNA
ggtgggggcgggcctggggctggtgggcgtgctgtttcagcaagtgttacgtaacccgctggcggagccgaccac

SEQ ID NO: 682021 - DNA, 75 bp, synthetic construct
  source 1..75: mol_type = other DNA
gtcgccggatatcgatgtcatcgagcagatgatttttcactacagcttgttgccgcgtctggcgatttcgctgct

SEQ ID NO: 682022 - DNA, 75 bp, synthetic construct
  source 1..75: mol_type = other DNA
ttttaatggtaattctatcaacaatcgtagtaaccataacgccagcaaaaccaactatgcatatctgaatttgca

SEQ ID NO: 682023 - DNA, 75 bp, synthetic construct
  source 1..75: mol_type = other DNA
agagagttccagttaattcatgcccgtgtaatggtgactcgcaacgctgggtgactaaaggctggcacgaaacaa

SEQ ID NO: 682024 - DNA, 75 bp, synthetic construct
  source 1..75: mol_type = other DNA
aattcatgcccgtgcaatggtgactcgcaatgctgggtgactaaaggctggcatgaaacgaaattaatagtgtga

SEQ ID NO: 682025 - DNA, 75 bp, synthetic construct
  source 1..75: mol_type = other DNA
attaatcaacgaccgatttggccacaatagtggcgatctgtttcttattcaggttggcgagcgcctcaccaggct

SEQ ID NO: 682026 - DNA, 75 bp, synthetic construct
  source 1..75: mol_type = other DNA
ggacaccttatggcggaatgcaaattgcagaagattatcaggccttcaaccttggtattggtaaagatttaggac

SEQ ID NO: 682027 - DNA, 75 bp, synthetic construct
  source 1..75: mol_type = other DNA
aaaagcggtgcgcaggcggtaaccgttgaagattcaatgtcgatgattcatgcctcgcgtggtgtgttaaaaccc

SEQ ID NO: 682028 - DNA, 75 bp, synthetic construct
  source 1..75: mol_type = other DNA
gtctggcaccagtggttacagttctcttaattatcgtggagcactaatgtcggttacagtcggagtggtgacagc

SEQ ID NO: 682029 - DNA, 75 bp, synthetic construct
  source 1..75: mol_type = other DNA
aaataattgattcgttaccgtgtgtaattgttgatgttggttcatctaatattgaggtttttatgaataaactga

SEQ ID NO: 682030 - DNA, 75 bp, synthetic construct
  source 1..75: mol_type = other DNA
ggaaggctatttcacccacaacacggtcactctgcaatgcagtggcaacacatctattaaccgcagcaatatctc

SEQ ID NO: 682031 - DNA, 75 bp, synthetic construct
  source 1..75: mol_type = other DNA
cgcacaccagaaggctatttcactcataacacggtaaccctgcaatgcagcggtaatacatcgatcaaccgtagc

SEQ ID NO: 682032 - DNA, 75 bp, synthetic construct
  source 1..75: mol_type = other DNA
accagtcagtaggaggtttgcttggtggtattagcgctgcggctggctctcttgcagatacgcttcagaccgcaa

SEQ ID NO: 682033 - DNA, 75 bp, synthetic construct
  source 1..75: mol_type = other DNA
gaatctctggagcttaaagcgttagctgatgaatttggtgtctcagaacgcaccctacagcgggattttcagcaa

SEQ ID NO: 682034 - DNA, 75 bp, synthetic construct
  source 1..75: mol_type = other DNA
atgaaaacacagcatgatcatcatgaccgcctgtctgtcaggttatcgatcattatcagccgcttaatggctggc

SEQ ID NO: 682035 - DNA, 75 bp, synthetic construct
  source 1..75: mol_type = other DNA
ctaatctcggtcaggcacgcgcctatatggcgaagaccctgctgggcgcggcggcgcgaaaagcaaaactggaaa

SEQ ID NO: 682036 - DNA, 75 bp, synthetic construct
  source 1..75: mol_type = other DNA
tacacggagagaatatcccggcgcgtctggaagtgcgtggtgaagtgttcctgccgcaggcggggttcgaaaaga

SEQ ID NO: 682037 - DNA, 75 bp, synthetic construct
  source 1..75: mol_type = other DNA
atggtgcgatatggaatcatcgaacaacaactgacagaactgcgaacgacgcttcgccatcatgaatatctttat

SEQ ID NO: 682038 - DNA, 75 bp, synthetic construct
  source 1..75: mol_type = other DNA
gcgcgagctggaagcaaaacatccggaactcattaccccggattcaccaacccagcgcgtaggtgcagcgccgct

SEQ ID NO: 682039 - DNA, 75 bp, synthetic construct
  source 1..75: mol_type = other DNA
ctgaatgattttcacgccatcaaacgtagcatagatactatttcgcagggcatagaagcacgggtgcgcatttgt

SEQ ID NO: 682040 - DNA, 75 bp, synthetic construct
  source 1..75: mol_type = other DNA
tgacacggcagatccgcaacccacgtcaggattcacgaatgctgttggcaaccaggcattcggcaagcggtcaag

SEQ ID NO: 682041 - DNA, 75 bp, synthetic construct
  source 1..75: mol_type = other DNA
aatgcggcagctggttcactgcgtcagcttgatccgcgtattacagcgaagcgaccgctcactttcttctgctac

SEQ ID NO: 682042 - DNA, 75 bp, synthetic construct
  source 1..75: mol_type = other DNA
caggtgtttcggatggaagacgttaacgccgtaaccgttctggatacctctttccgcagaaagcctgaacttgat

SEQ ID NO: 682043 - DNA, 75 bp, synthetic construct
  source 1..75: mol_type = other DNA
cttccagttccgttaacacgccgtggcacgatcgtaaggccacccagaccgaagaaaaagagcgtattgctcgta

SEQ ID NO: 682044 - DNA, 75 bp, synthetic construct
  source 1..75: mol_type = other DNA
tctgagtctgcttcacaatgtgccggaaggcgggtattacgcggattaccgtgatgaaatattccacgtaattat

SEQ ID NO: 682045 - DNA, 75 bp, synthetic construct
  source 1..75: mol_type = other DNA
gatgccgtctacaccgacgccccgccaccagcgagcgtgatgcaggtgctgacagaccatcatattcagctggag

SEQ ID NO: 682046 - DNA, 75 bp, synthetic construct
  source 1..75: mol_type = other DNA
tttcgccttcgggatggggatggagcgtctgaccatgttgcgttacagcgtcaccgacctgcgttcattcttcga

SEQ ID NO: 682047 - DNA, 75 bp, synthetic construct
  source 1..75: mol_type = other DNA
tctgattgttgataccaacatcagctttaccaacctgaaaggcacgctgcacgacttcctgcgtaacttctttga

SEQ ID NO: 682048 - DNA, 75 bp, synthetic construct
  source 1..75: mol_type = other DNA
gtattatcgaactggttaaacagcagggttatgtcagtactgaagagctggtagagcatttctccgtcagcccgc

SEQ ID NO: 682049 - DNA, 75 bp, synthetic construct
  source 1..75: mol_type = other DNA
gcctggggctggtggtgttactgccgttagctaacccgctgacgaccgtagcactgtttctcggtctggctggca

SEQ ID NO: 682050 - DNA, 75 bp, synthetic construct
  source 1..75: mol_type = other DNA
aagagctggaagatgaacccagcgccaatattgcttttgtaccactggcaatgccaagtaccgccggtccgggaa

SEQ ID NO: 682051 - DNA, 75 bp, synthetic construct
  source 1..75: mol_type = other DNA
gtatttgccatcatgatggtggcgtattacgccgggcaactggtgatggatacatttggcatttcgattcccggt

SEQ ID NO: 682052 - DNA, 75 bp, synthetic construct
  source 1..75: mol_type = other DNA
aggttatgtcagtaccgaggaactggtggagcacttctccgtcagcccgcagactattcgtcgtgacctcaatga

SEQ ID NO: 682053 - DNA, 75 bp, synthetic construct
  source 1..75: mol_type = other DNA
ggcttcttgctggtttgtatgggcgtgcaatttattattaacggcatcctggaaattattaaaacttaccattaa

SEQ ID NO: 682054 - DNA, 75 bp, synthetic construct
  source 1..75: mol_type = other DNA
cgcagttctggtgcgattatgcggctggttgggaaaggggggatagaagccatttcccgcctgatgggattcctt

SEQ ID NO: 682055 - DNA, 75 bp, synthetic construct
  source 1..75: mol_type = other DNA
tgataccgaacccggttcggacaatcattcaggctgtacgcgacaccgttgtgtcggttgcccgtaccgtctgga

SEQ ID NO: 682056 - DNA, 75 bp, synthetic construct
  source 1..75: mol_type = other DNA
cgctgccaacatgaacaccgcgcggctggtcatcacaccggccatggacaccacggaggccgtcatggaaagcga

SEQ ID NO: 682057 - DNA, 75 bp, synthetic construct
  source 1..75: mol_type = other DNA
cctgaatggcgaggacgtcagaccggtggccgaccgcgtgaccgtgcagtccgccgccatcgttgaataccagat

SEQ ID NO: 682058 - DNA, 75 bp, synthetic construct
  source 1..75: mol_type = other DNA
acctgctggctgtggtgcgtaacgcccttaatggcgaggacgtcaggccggtggccgaccgcgtgaccgtgcagt

SEQ ID NO: 682059 - DNA, 75 bp, synthetic construct
  source 1..75: mol_type = other DNA
gtgtgagcgcctggaactgcatgcccgcaacgtgaacaaaaccattgtggtggattgccatgataaccgtatcag

SEQ ID NO: 682060 - DNA, 75 bp, synthetic construct
  source 1..75: mol_type = other DNA
cccattgccgcgcgtttctttgcggtggtgaatttcacgccagcaacgccattttcaaacccatcgattttcagc

SEQ ID NO: 682061 - DNA, 75 bp, synthetic construct
  source 1..75: mol_type = other DNA
gcgtagaactgcggatgcaattctttggcctgaaagacaaaaagcacgacgaaagcatggatgttgttcctggca

SEQ ID NO: 682062 - DNA, 75 bp, synthetic construct
  source 1..75: mol_type = other DNA
ttatgaatacgatgaggacggcaacctgacggcggtgacggacgcggaagggaaaacggtacgtatccgctataa

SEQ ID NO: 682063 - DNA, 75 bp, synthetic construct
  source 1..75: mol_type = other DNA
gtgatggacaaccgcctgccgggctacgggcgtgaccgttaccgctataacgaatggggtgaactgacagagcgg

SEQ ID NO: 682064 - DNA, 75 bp, synthetic construct
  source 1..75: mol_type = other DNA
cggcgaggctgcgctggtgcacgatgcgcgcggccagctgaggcgttacaccgactgttcagggcgcgccacggg

SEQ ID NO: 682065 - DNA, 75 bp, synthetic construct
  source 1..75: mol_type = other DNA
cgcggtcagggtgcggtctggtataaatggaataactggctgacaacccgaacgggtattgcctttgcggataat

SEQ ID NO: 682066 - DNA, 75 bp, synthetic construct
  source 1..75: mol_type = other DNA
ggctcagcgtggctggtccggtcggcgcatatgaataccacgggcgcagcgccgacggtcgggtcgctgatatct

SEQ ID NO: 682067 - DNA, 75 bp, synthetic construct
  source 1..75: mol_type = other DNA
cggtcagccgcacggatgcgcggggcggcgaggctgcgctggtgcacgatgcgcgcggtcaactgaggcgttaca

SEQ ID NO: 682068 - DNA, 75 bp, synthetic construct
  source 1..75: mol_type = other DNA
cgatcatgccattattttacggcgaaatggttggcaataatatgcgcgcaaatgatttaggtgtacaggtagcta

SEQ ID NO: 682069 - DNA, 75 bp, synthetic construct
  source 1..75: mol_type = other DNA
cagcagcagcgcgtcgtggggcgttgattaaaggcggtgcggcgctggaacaactaggtcgtgttacccaggtgg

SEQ ID NO: 682070 - DNA, 75 bp, synthetic construct
  source 1..75: mol_type = other DNA
caactgggtcgtgttacccaggtggcgtttgataaaaccggtacgctgaccgtcggtaaaccgcgcgttaccgcg

SEQ ID NO: 682071 - DNA, 75 bp, synthetic construct
  source 1..75: mol_type = other DNA
gaaagggatcttcctcgtcaccacgctgttaggaatgaccggactatggctggcggtgctggcagatacgggtgc

SEQ ID NO: 682072 - DNA, 75 bp, synthetic construct
  source 1..75: mol_type = other DNA
ccgtttgggcaactggcgtttatcgcgaccacgctggttgggctgtacccgattgctcgtcaggcattacggctg

SEQ ID NO: 682073 - DNA, 75 bp, synthetic construct
  source 1..75: mol_type = other DNA
ctggcagtgctggcagatacgggtgcgacggtgctggtgacagcgaatgcgttaagattgttgcgcaggagataa

SEQ ID NO: 682074 - DNA, 75 bp, synthetic construct
  source 1..75: mol_type = other DNA
atgtcgactcctgacaatcacggcaagaaagcccctcaatttgctgcgttcaaaccgctaaccacggtacagaac

SEQ ID NO: 682075 - DNA, 75 bp, synthetic construct
  source 1..75: mol_type = other DNA
aatgatctaggtgtacaggcggctattgcggtgcttaatgatgcacggaaaaactcacagccaatgcctgaaccg

SEQ ID NO: 682076 - DNA, 75 bp, synthetic construct
  source 1..75: mol_type = other DNA
aatgatttcggtgtgcaggcggctatcgctgtgcttaatgatgcacggaaaaacgcacagccgatgcctgaacag

SEQ ID NO: 682077 - DNA, 75 bp, synthetic construct
  source 1..75: mol_type = other DNA
ggacacgaagaagtgaacgttaaggcgtttattccggtgctttacggaaattttgttggcgatgatatgcgcgct

SEQ ID NO: 682078 - DNA, 75 bp, synthetic construct
  source 1..75: mol_type = other DNA
ctgttaggtatgaccggcctgtggctggcggtgctggcagatacaggtgcgacggtgctggtgacggcgaatgcg

SEQ ID NO: 682079 - DNA, 75 bp, synthetic construct
  source 1..75: mol_type = other DNA
ggaagaagattttggacgtgtaccagtaccggaagaactggatccgcttgcatatggtagcgcggtgattgtccc

SEQ ID NO: 682080 - DNA, 75 bp, synthetic construct
  source 1..75: mol_type = other DNA
gatgttgcagaaatgcattaaggaaggccacaaagaggaagaagtaaaagcgctcatgccattgttttacggtga

SEQ ID NO: 682081 - DNA, 75 bp, synthetic construct
  source 1..75: mol_type = other DNA
tggtaaccggcaggccggagcataagtggcattggtggtttgatgaagacacgtatgtgactgctcaccggacgc

SEQ ID NO: 682082 - DNA, 75 bp, synthetic construct
  source 1..75: mol_type = other DNA
catcaaccagttcggtaagaaagggcagggtgataggtggttactggatgaaaaagtttcggcaccacacagcca

SEQ ID NO: 682083 - DNA, 75 bp, synthetic construct
  source 1..75: mol_type = other DNA
ggctgatccagatcagccacccgttccgcaacggtcggaatcgccacggcagaatgatccagaagcagaccagat

SEQ ID NO: 682084 - DNA, 75 bp, synthetic construct
  source 1..75: mol_type = other DNA
aaaaagtttcggcaccacacagcccctatgaacttcgtgcgggctgggtcattccgggcgtcatgattagcggca

SEQ ID NO: 682085 - DNA, 75 bp, synthetic construct
  source 1..75: mol_type = other DNA
gctataacctggcattcgggaaatatcgctcaagttctactttgaataatagtgtgtctgagcctcagtttgttc

SEQ ID NO: 682086 - DNA, 75 bp, synthetic construct
  source 1..75: mol_type = other DNA
acgcctcaacagttggaacgttggggaattgatacaaataagctctccgtatcttccccatcggcttaccagcaa

SEQ ID NO: 682087 - DNA, 75 bp, synthetic construct
  source 1..75: mol_type = other DNA
atagtgttaaggataatgttgagctgctaaatacagatgttactgtcatcccttctcgaggagctttagtttccg

SEQ ID NO: 682088 - DNA, 75 bp, synthetic construct
  source 1..75: mol_type = other DNA
ccggagccgtgcagccgggaagtcgggtcacctggcgctataaattcggcggcaacgagaaccagctcgacggct

SEQ ID NO: 682089 - DNA, 75 bp, synthetic construct
  source 1..75: mol_type = other DNA
gttcctgctgctttcggcgcttctgaccttgctgctggcagtggcagcggtggcggtagcgatgaatcattactg

SEQ ID NO: 682090 - DNA, 75 bp, synthetic construct
  source 1..75: mol_type = other DNA
gccaaccagggcgcgtctgatacggcagaaacgactgttcaacgtggcagcagccgcgatacctcagcaatggca

SEQ ID NO: 682091 - DNA, 75 bp, synthetic construct
  source 1..75: mol_type = other DNA
gttaataaccattacttccgcatttttggcaatgccttactgctatctggtatcaccgcgacaattgcttattct

SEQ ID NO: 682092 - DNA, 75 bp, synthetic construct
  source 1..75: mol_type = other DNA
cattaactcggatcttccagggcagattattggtcaggttgctcaggacgtttatgactcagcaacaggcaaata

SEQ ID NO: 682093 - DNA, 75 bp, synthetic construct
  source 1..75: mol_type = other DNA
tgggtaccatgacggtcatctcgctgctggtggggctacgaccgtaccgcctgttgctggcaacgcagcctttac

SEQ ID NO: 682094 - DNA, 75 bp, synthetic construct
  source 1..75: mol_type = other DNA
acggaattagcggtggtattacgttgcatccacatggattaaccttatcccagccattaagtctggacagtgcca

SEQ ID NO: 682095 - DNA, 75 bp, synthetic construct
  source 1..75: mol_type = other DNA
atatgcgaagaccattccccggaaatccgcattgctcagggatccggcaacatctacatcaacagccagcccgcc

SEQ ID NO: 682096 - DNA, 75 bp, synthetic construct
  source 1..75: mol_type = other DNA
gggtgctacaactgggagaagccatcgggcgctcgatacattccactgcgggaaaaattctgaccggctctccca

SEQ ID NO: 682097 - DNA, 75 bp, synthetic construct
  source 1..75: mol_type = other DNA
cgcagcatacatattggctaatacgcaaactttccagcaaattgaggattacggtattgcgcatggctggagcga

SEQ ID NO: 682098 - DNA, 75 bp, synthetic construct
  source 1..75: mol_type = other DNA
cgacggtgaggattaccggttccactatgattttgctggtgggcagacggtggtaaccggcaggccggagcataa

SEQ ID NO: 682099 - DNA, 75 bp, synthetic construct
  source 1..75: mol_type = other DNA
gctgggctggatcgatccgcttggattaagtggcgaagatgtctttattcattatacggataaagaaggttttga

SEQ ID NO: 682100 - DNA, 75 bp, synthetic construct
  source 1..75: mol_type = other DNA
tggtcgccagcctgagcaacggcaacggggcgcagtaccggttcagccacgatgcggacgggcggctgacgggag

SEQ ID NO: 682101 - DNA, 75 bp, synthetic construct
  source 1..75: mol_type = other DNA
ttccaaccaacaccaaacgctataccggtaatgcagcattcgatgcggcatctcctgaggcgcaggcaagtttta

SEQ ID NO: 682102 - DNA, 75 bp, synthetic construct
  source 1..75: mol_type = other DNA
ctaaagatgctgatcttcgccttgagttttctgacatggtgaaggatgcatttgctggtgatgctcagggggcat

SEQ ID NO: 682103 - DNA, 75 bp, synthetic construct
  source 1..75: mol_type = other DNA
ctttttgcgaaatggctactctggctaccgactccatgaaaattactggtgatttaagtatcaagaagataggaa

SEQ ID NO: 682104 - DNA, 75 bp, synthetic construct
  source 1..75: mol_type = other DNA
ctaaccgtttctcgtcgcaggaaagcttacgcgcgttgggaattaatgccccaatcctcaacagtgaagaggcgg

SEQ ID NO: 682105 - DNA, 75 bp, synthetic construct
  source 1..75: mol_type = other DNA
acagcagcaggctgaatatagaacgatgctcgatagcagggttcgcgatgcgacggctgcgtttatgcgtggcgt

SEQ ID NO: 682106 - DNA, 75 bp, synthetic construct
  source 1..75: mol_type = other DNA
cgtgccaatattgccttggttcaggaggcatcccttaaactcagtcagacaggcagtgatctgctgaataatcct

SEQ ID NO: 682107 - DNA, 75 bp, synthetic construct
  source 1..75: mol_type = other DNA
gagattgcagcacgcatgggagttagccaaccagctgtcagccgtcttgagaggaatgtatcaagtgccagcctt

SEQ ID NO: 682108 - DNA, 75 bp, synthetic construct
  source 1..75: mol_type = other DNA
tgagcttccccgtgggcgtctgacgtatcgcattctgcgagatctgtccatcgtgatcggtaaagaagttacacc

SEQ ID NO: 682109 - DNA, 75 bp, synthetic construct
  source 1..75: mol_type = other DNA
tctgtatcaccgcaaaaagtgtcactaacccctgtaaagattaattcgcctttctccccgggcaatagttccctt

SEQ ID NO: 682110 - DNA, 75 bp, synthetic construct
  source 1..75: mol_type = other DNA
cgccgctgaccgacaccatcaacagcatggcgtcgcagtttgccgatgcggtcaacaatcaactggcgcagggct

SEQ ID NO: 682111 - DNA, 75 bp, synthetic construct
  source 1..75: mol_type = other DNA
cagacacgatattaatgtcattcgatattgttgatcaagagattgtaaaaatatcaagaacgacatatttcaaag

SEQ ID NO: 682112 - DNA, 75 bp, synthetic construct
  source 1..75: mol_type = other DNA
aatgagaatacgggagagcaagttggtaatggtggtttctttcagtctatggaagtagacaagacacagttcgta

SEQ ID NO: 682113 - DNA, 75 bp, synthetic construct
  source 1..75: mol_type = other DNA
gcagttttttttcacgatgataaatcagcgtcagttgttgcctggtgaaactttttctgagctgcaactggcgcg

SEQ ID NO: 682114 - DNA, 75 bp, synthetic construct
  source 1..75: mol_type = other DNA
tacgccctggggaaactttttctgaactgcaactggctcgggccgcgggtgtcagcccggttgtagtaagagaat

SEQ ID NO: 682115 - DNA, 75 bp, synthetic construct
  source 1..75: mol_type = other DNA
atgatccccgctggctgcaggcgaaaaccatgctcgaacgtcatcggctactgcgtgacaacatcggcaatagct

SEQ ID NO: 682116 - DNA, 75 bp, synthetic construct
  source 1..75: mol_type = other DNA
tttccgccacgactgaagatgctcatgaaggcagtcaggcatttactgagaagcgtcaaccgcactttcaggcac

SEQ ID NO: 682117 - DNA, 75 bp, synthetic construct
  source 1..75: mol_type = other DNA
cgcactggcacaactgccacagcccgtaattgctctgatgcacggcctcgcctatggcggtggcctggaactggc

SEQ ID NO: 682118 - DNA, 75 bp, synthetic construct
  source 1..75: mol_type = other DNA
tttccgccacgactgaagatgctcatgaaggcagtcaggcatttactgagaagcgtcaaccgcactttagtgctc

SEQ ID NO: 682119 - DNA, 75 bp, synthetic construct
  source 1..75: mol_type = other DNA
gctggaaaccaacgccgatggtacagcaagcatgacgctgaccttcgctggcaccacctcgaccatgaccaccga

SEQ ID NO: 682120 - DNA, 75 bp, synthetic construct
  source 1..75: mol_type = other DNA
ggttttatactcgcgcacggacgcgaatgcagcctgaacggcagcggcagaaacatgctgtcacgcattcttcat

SEQ ID NO: 682121 - DNA, 75 bp, synthetic construct
  source 1..75: mol_type = other DNA
ccgaacctccgcgcctcctgccggcgcatggaaaacgcgggctggctgcgcaccctgcgcgcgccgaacctgcag

SEQ ID NO: 682122 - DNA, 75 bp, synthetic construct
  source 1..75: mol_type = other DNA
cgaccccctgcaggtggcggagtggttacaggcctgtcacgatgcaggcattgatatccgcatgcagatcaacga

SEQ ID NO: 682123 - DNA, 75 bp, synthetic construct
  source 1..75: mol_type = other DNA
aatctctcgaccattatttaaatgaaattgaaaacgacaccacattacgattagtcgaattaacggcaaccggcg

SEQ ID NO: 682124 - DNA, 75 bp, synthetic construct
  source 1..75: mol_type = other DNA
ctggttgaatgccatgctctgcaagatgctgcatcagacgctgagccacatcaggtagaggccgatgtaaagcgt

SEQ ID NO: 682125 - DNA, 75 bp, synthetic construct
  source 1..75: mol_type = other DNA
gacaatatcggcgggatttattatcgaccggttcagtattgtatcaacggtacatggtacacagcagcatcagta

SEQ ID NO: 682126 - DNA, 75 bp, synthetic construct
  source 1..75: mol_type = other DNA
cttgctatcagagataataaggatactgatactattttaatgtcatatgatattgtagatcaagatatcgtgaag

SEQ ID NO: 682127 - DNA, 75 bp, synthetic construct
  source 1..75: mol_type = other DNA
ggaagtagacaagacacagtttgtgaagctttatgtggatggcgtatcagctattgagggtttatcctcatccgg

SEQ ID NO: 682128 - DNA, 75 bp, synthetic construct
  source 1..75: mol_type = other DNA
catcgacaacacgctggattacatcgactcgcaaagcacggaaatcatcagtcagcagcaggcgatggtatcgca

SEQ ID NO: 682129 - DNA, 75 bp, synthetic construct
  source 1..75: mol_type = other DNA
cgaacgcgaacgtgtgcagactgagctgcgcgtgacgacggtccgggttctgcctctggtccggctaaagccggt

SEQ ID NO: 682130 - DNA, 75 bp, synthetic construct
  source 1..75: mol_type = other DNA
tggcggaccatctggccagggtgattgtgtggaacgatgccggagcagtggccggtacgtcttcattccctcgtc

SEQ ID NO: 682131 - DNA, 75 bp, synthetic construct
  source 1..75: mol_type = other DNA
tatcgttgatcaggatatcgtaaaaatatcaagaactacttatttcaaaggtatgaaagaacttgctgataagaa

SEQ ID NO: 682132 - DNA, 75 bp, synthetic construct
  source 1..75: mol_type = other DNA
ttccttattgctttcagccactgacaatatctttttcaatcaatccattgatattatctccgtcatcttccactt

SEQ ID NO: 682133 - DNA, 75 bp, synthetic construct
  source 1..75: mol_type = other DNA
ctgattaaccgtgcgaccgttgagcgcatggtatcccgggttgtggcgctcaatcagccggtaaaaattgactac

SEQ ID NO: 682134 - DNA, 75 bp, synthetic construct
  source 1..75: mol_type = other DNA
cataacgccagcgttctctgttcctacatttcatcaattcatcaggtctggctgcagcagctttatcctatgttg

SEQ ID NO: 682135 - DNA, 75 bp, synthetic construct
  source 1..75: mol_type = other DNA
ggttgattacgcgaacggaggcgggtagctgtgtattcgaggttgagtttgaggatgatggcggcaatgaggaaa

SEQ ID NO: 682136 - DNA, 75 bp, synthetic construct
  source 1..75: mol_type = other DNA
agattggcgtggcggcactctcggctcagcttgacgcccgtcagccggttgcggccctgaccggccttcagaccg

SEQ ID NO: 682137 - DNA, 75 bp, synthetic construct
  source 1..75: mol_type = other DNA
gtcgtttccccttctcaggagcaatcccccatgaatgagcaattacgccagttgctgacggcgctcggtctgacc

SEQ ID NO: 682138 - DNA, 75 bp, synthetic construct
  source 1..75: mol_type = other DNA
ctgcatatatgcattatttcgctgacaccggggaaccctacctgttgcgcatggcttccctgacgaatgatccgg

SEQ ID NO: 682139 - DNA, 75 bp, synthetic construct
  source 1..75: mol_type = other DNA
ccaccgaaaaactggtggtggatgccgacaatgacatccgggcacaagttgaatctgcggtgcaaaaagcgggct

SEQ ID NO: 682140 - DNA, 75 bp, synthetic construct
  source 1..75: mol_type = other DNA
cgctgctgtttgccgccagctggcaggagtggatttataaagggctgacgctgctgctgattggctgcccgtgtg

SEQ ID NO: 682141 - DNA, 75 bp, synthetic construct
  source 1..75: mol_type = other DNA
aaacgttaatgagcgtagccgccatcggcgcgctgtttattggcgcaacggcagaagccgcgatggtattgctgc

SEQ ID NO: 682142 - DNA, 75 bp, synthetic construct
  source 1..75: mol_type = other DNA
ttgacaccaccctgctcgcccgcgccgccgaagcgctggcagcacggtttggcgcgcaggccacgaccgttaagc

SEQ ID NO: 682143 - DNA, 75 bp, synthetic construct
  source 1..75: mol_type = other DNA
gtgaagtcagcggctaagttgatttttttattcctatttacactttatagtctccagttgtatggggttatcata

SEQ ID NO: 682144 - DNA, 75 bp, synthetic construct
  source 1..75: mol_type = other DNA
ctggcggtgctggcagatacgggtgcgacggtgctggtaacagcgaatgcgttaagattgttgcgcaggagataa

SEQ ID NO: 682145 - DNA, 75 bp, synthetic construct
  source 1..75: mol_type = other DNA
agtattgatctgacgaaatacgtgcccgttgaaacgtataacgccctgcgtaccgaatacgttgcgctgtcggca

SEQ ID NO: 682146 - DNA, 75 bp, synthetic construct
  source 1..75: mol_type = other DNA
atgaaaaaattgattctcatcgccatgatggcatcggggctggtggcttgtgcacaatccaccgcgccacaggaa

SEQ ID NO: 682147 - DNA, 75 bp, synthetic construct
  source 1..75: mol_type = other DNA
tgatggcatcggggctggtagcttgtgcgcaatcaaccgcaccgcaggaagacagtcgtctgaaagaggcttaca

SEQ ID NO: 682148 - DNA, 75 bp, synthetic construct
  source 1..75: mol_type = other DNA
ttcgccagaaaaaattgaagcctgccagagcgtgttaaacgtgctgaagaaagagaaacaacatcagcagtttgc

SEQ ID NO: 682149 - DNA, 75 bp, synthetic construct
  source 1..75: mol_type = other DNA
cgctcaagtatggataatgcgattgcctgtagttcttcgttagtcattgtctgcacctggaaagcaatttaccgg

SEQ ID NO: 682150 - DNA, 75 bp, synthetic construct
  source 1..75: mol_type = other DNA
tccggcagcgcaccatgaagaaagagctggaaaagctgaccagtgcggatgagatactggcatacagggttggct

SEQ ID NO: 682151 - DNA, 75 bp, synthetic construct
  source 1..75: mol_type = other DNA
gagaagtttttctggacagacgcagacaacaacgacgtccccatgactgcggaagaactgattgcgctgagtgaa

SEQ ID NO: 682152 - DNA, 75 bp, synthetic construct
  source 1..75: mol_type = other DNA
gatgaccgtgaatatgcctatctgtctgcatatatgcattatttcgctgacaccggggaaccctacctgttgcgc

SEQ ID NO: 682153 - DNA, 75 bp, synthetic construct
  source 1..75: mol_type = other DNA
atgcgcagaaaaacggattcaaggctattgctgcaggatgggttaagccggaaaacatcgaatggcgtgagggtc

SEQ ID NO: 682154 - DNA, 75 bp, synthetic construct
  source 1..75: mol_type = other DNA
cggtcagattggcgtggcggcactgtcggcacagcttgagaaaaaacagcctatcgctgcgttatctgccatgca

SEQ ID NO: 682155 - DNA, 75 bp, synthetic construct
  source 1..75: mol_type = other DNA
ttaaaaaagacccggtaactggtcagtacacactcagaatgcacatgtcgttgcatccattttatgtactgaaac

SEQ ID NO: 682156 - DNA, 75 bp, synthetic construct
  source 1..75: mol_type = other DNA
agaaggcgttatccgcgagggcgaagaaatctctgttcactcggctcgtaaacgctggtatgcgcagcgttctct

SEQ ID NO: 682157 - DNA, 75 bp, synthetic construct
  source 1..75: mol_type = other DNA
aaagcagcggagcgcaaacgtgctaatcgcctggcaaaactgccgtatgatgaacagcgaaacgaaattgcgcgg

SEQ ID NO: 682158 - DNA, 75 bp, synthetic construct
  source 1..75: mol_type = other DNA
atgaattctacagtcgattaattcatgaaggcaaagtgggcattatggcggggcatgtctatggaacggaggggg

SEQ ID NO: 682159 - DNA, 75 bp, synthetic construct
  source 1..75: mol_type = other DNA
tggtcacagaatataaagggaatataggtgatactcagaacagtatccgtggcgaggaaaatattgtaagagggc

SEQ ID NO: 682160 - DNA, 75 bp, synthetic construct
  source 1..75: mol_type = other DNA
taagtgcaattcgtggtaatttctcctccatccaagagcttgaagatatcgatggattggggacgagctacgggc

SEQ ID NO: 682161 - DNA, 75 bp, synthetic construct
  source 1..75: mol_type = other DNA
cgttctggtgcgttgcggcaaagcctttctgatggcgaacagcacctcagacccggtcacgcaatcgcaggttgg

SEQ ID NO: 682162 - DNA, 75 bp, synthetic construct
  source 1..75: mol_type = other DNA
acggccagctgtttgccgtcccggttgcggcagccactgaactctttggcggccacattattgcggccaacgcag

SEQ ID NO: 682163 - DNA, 75 bp, synthetic construct
  source 1..75: mol_type = other DNA
aatcataagttcagaacgatatcgaggtatcgcgattttgtaaactccccatcagtactgaatataattgcaact

SEQ ID NO: 682164 - DNA, 75 bp, synthetic construct
  source 1..75: mol_type = other DNA
cggagctataggtactgacgttacggcaggtactgttgacgcaactggtgttttgaccattcgtgcggcggatgc

SEQ ID NO: 682165 - DNA, 75 bp, synthetic construct
  source 1..75: mol_type = other DNA
agtttggtcgcaaaacgctctattccagcgaacgtccgtcgtttattgaactggaagagcatgtgcgtgcggtga

SEQ ID NO: 682166 - DNA, 75 bp, synthetic construct
  source 1..75: mol_type = other DNA
tcgtactcggtactgttttcggcggttatttgatgactggcggaagtcttggagcactctatcaacccgcagaac

SEQ ID NO: 682167 - DNA, 75 bp, synthetic construct
  source 1..75: mol_type = other DNA
tccaacagtaagcactatttcttatgttatccgtgatcagaacggttctgtagatacagcaggtggaacctctgc

SEQ ID NO: 682168 - DNA, 75 bp, synthetic construct
  source 1..75: mol_type = other DNA
agtaccagtgatctgactaaaacaatttctctgggggaagcgtcagcagcagctttagcaagtggtggtcagtca

SEQ ID NO: 682169 - DNA, 75 bp, synthetic construct
  source 1..75: mol_type = other DNA
acagggattcgaattctgtcgcgctgtaactacaccaccaaccgttacaacctctatattgtggcgatcagtctc

SEQ ID NO: 682170 - DNA, 75 bp, synthetic construct
  source 1..75: mol_type = other DNA
cacggcctcacagattacgctgggcgtgtctgatggctgggcggataacagtaccggcagcgatggcgatgtcac

SEQ ID NO: 682171 - DNA, 75 bp, synthetic construct
  source 1..75: mol_type = other DNA
ccataatgaatggatgtcatttttgttgccacgacttttttatgcacaaaaaatgctaaaagatacaggtgttat

SEQ ID NO: 682172 - DNA, 75 bp, synthetic construct
  source 1..75: mol_type = other DNA
tatacagaaagagcgacgaatgaaatgaaaaaaatatttggctctaaggtttttgatacgccaaaggctcttaat

SEQ ID NO: 682173 - DNA, 75 bp, synthetic construct
  source 1..75: mol_type = other DNA
atgatctggcagcctgagttcacagataaaacactctccaggaaacccggggcggttcagatcgtcgatatttac

SEQ ID NO: 682174 - DNA, 75 bp, synthetic construct
  source 1..75: mol_type = other DNA
gggtggcaaaagcaaagcggaagtgtaccatatcattcaactgaagttggttgagctaattaatgactctgttcc

SEQ ID NO: 682175 - DNA, 75 bp, synthetic construct
  source 1..75: mol_type = other DNA
tttaaatcaatggtctttaaaaaatgaagatgtaaaacaagctttcgatagcgctgttcgtagaaaaaaaagaag

SEQ ID NO: 682176 - DNA, 75 bp, synthetic construct
  source 1..75: mol_type = other DNA
tcaaatctggctttaaaaaaatttcagatataaccttgtcgaggttaaattatgtttcggatagttatcctgaat

SEQ ID NO: 682177 - DNA, 75 bp, synthetic construct
  source 1..75: mol_type = other DNA
ggttatcgctacactaaatattacgatgatgtcgaagtcgatgcctggcaaggcggcatatcactctatactggc

SEQ ID NO: 682178 - DNA, 75 bp, synthetic construct
  source 1..75: mol_type = other DNA
tttgtgccgttatttctggtgcagaaggctgggaagatatagggtttttgggaaactcatctcgattttttgaag

SEQ ID NO: 682179 - DNA, 75 bp, synthetic construct
  source 1..75: mol_type = other DNA
atgtctgaaatcacagtctcccgtccggaagtggtcaacgagaatacggacgttgtctgctccacctcagtcagg

SEQ ID NO: 682180 - DNA, 75 bp, synthetic construct
  source 1..75: mol_type = other DNA
atgataaagcatacgttattagtgccggctttttttagcgcattgcccgcttatgccggcttaacttccattacc

SEQ ID NO: 682181 - DNA, 75 bp, synthetic construct
  source 1..75: mol_type = other DNA
aacctagccctgttgccaaaaacgcttttcacgaccggttatcgctacactaaatattacgatgatgtcgaagtc

SEQ ID NO: 682182 - DNA, 75 bp, synthetic construct
  source 1..75: mol_type = other DNA
gttgaaagatcaacattgcttttgaatatttctcaggggcaacgcgattatggaactgagcgcttcaatgcaact

SEQ ID NO: 682183 - DNA, 75 bp, synthetic construct
  source 1..75: mol_type = other DNA
gggcttgcgcgccttgcgagtgtaattaaaaatattaatcaggaaaaagaaaatgaacaatacggatcttatcca

SEQ ID NO: 682184 - DNA, 75 bp, synthetic construct
  source 1..75: mol_type = other DNA
gtccacggcgcagaagcagaatatcagccgcaaaatctgcctgctgcatgagctgttccagcccgtacatccggt

SEQ ID NO: 682185 - DNA, 75 bp, synthetic construct
  source 1..75: mol_type = other DNA
tgatacccgccccggtacgggctgtcattcaggccgtgcgcaccacggtggtgtcagtggcccgcgccgtctggg

SEQ ID NO: 682186 - DNA, 75 bp, synthetic construct
  source 1..75: mol_type = other DNA
tgataccgtccccggttcgggcagtcatccagtctgtacgcgacatcgtggtatcggtcgcccgtgcagtctgga

SEQ ID NO: 682187 - DNA, 75 bp, synthetic construct
  source 1..75: mol_type = other DNA
ggatgattaagtgtctgccacgcgaggccagcagcccggtggtggcacaactgcaatcttcctttcgtacgacca

SEQ ID NO: 682188 - DNA, 75 bp, synthetic construct
  source 1..75: mol_type = other DNA
gttatatgacgctggtggacctgcccggtgtgggtgaaagtggcgttcgcgatactgagtatactgcgctgtacc

SEQ ID NO: 682189 - DNA, 75 bp, synthetic construct
  source 1..75: mol_type = other DNA
acttttatcatcaggtgattggggaggcataccggcataaggtgctgtttgttatcagccagtcggataaggtcg

SEQ ID NO: 682190 - DNA, 75 bp, synthetic construct
  source 1..75: mol_type = other DNA
ttgtctggagattcagggggccagtctactaaccattttgatgccgcgccgcgccttgaattgttggatggcgat

SEQ ID NO: 682191 - DNA, 75 bp, synthetic construct
  source 1..75: mol_type = other DNA
acagcgactgaaatattggtttaagctggccgatccgcaaacgcgcaatactttcctgcaatgggctgaaaaaca

SEQ ID NO: 682192 - DNA, 75 bp, synthetic construct
  source 1..75: mol_type = other DNA
caccgcagtctcaggtgctcacagaacaacggctgaagtattggtttaaactggctgacccacaaacgcgaaata

SEQ ID NO: 682193 - DNA, 75 bp, synthetic construct
  source 1..75: mol_type = other DNA
cactgcagcaatcgctttccggtctgccgcaatgggcatcagagcgtattctgcagcagataaaccagcttattc

SEQ ID NO: 682194 - DNA, 75 bp, synthetic construct
  source 1..75: mol_type = other DNA
agcctcaaaatctgtctgctgcatgagttgttccaacctgtaaaccctgtttgtgcggtgtcgatacgtttgcag

SEQ ID NO: 682195 - DNA, 75 bp, synthetic construct
  source 1..75: mol_type = other DNA
gtcaacagaacagaaacaaaatatcagccgcaaaatctgtctattgcatgagttgttccaacctgtaaaccctgt

SEQ ID NO: 682196 - DNA, 75 bp, synthetic construct
  source 1..75: mol_type = other DNA
agccgcaaaatctgcctgctgcatgagctattccagcccgtgcatccggtgtgtgccgtgtcggttcgcctgcag

SEQ ID NO: 682197 - DNA, 75 bp, synthetic construct
  source 1..75: mol_type = other DNA
gaaatccatagtgattttgtttttaatcgtagctttacatccgcgcttaaaataaaaaaagaaaaagtagtagta

SEQ ID NO: 682198 - DNA, 75 bp, synthetic construct
  source 1..75: mol_type = other DNA
cacattcaagcactagaccttgcaactatagcatcacgattgatagatcttgaacgcgatgttgagacgctaaag

SEQ ID NO: 682199 - DNA, 75 bp, synthetic construct
  source 1..75: mol_type = other DNA
tttctggtgaggtcggatcaggattttttgttataatatctaccattcttctccattatctcgtcatcaatatga

SEQ ID NO: 682200 - DNA, 75 bp, synthetic construct
  source 1..75: mol_type = other DNA
acaaaaaatctggctatgttcagatgaaattcacagtgattttgtttttaaccatggtttcacgtccgcgttaaa

SEQ ID NO: 682201 - DNA, 75 bp, synthetic construct
  source 1..75: mol_type = other DNA
tggtatcatcaacaatataaaacagagattcaaccagaatggatcacctatagcccaagcgtgatgtattcaata

SEQ ID NO: 682202 - DNA, 75 bp, synthetic construct
  source 1..75: mol_type = other DNA
agtgattttgtttttaatcgtagctttacatctgcgcttaaaataaaaaaagaaaaagtagtggtgtttaattcg

SEQ ID NO: 682203 - DNA, 75 bp, synthetic construct
  source 1..75: mol_type = other DNA
ccagcgtatttcctggctagccgctgtgcgtatcaggcataaattatcgcttgctgaagtaagtaaaatgttagg

SEQ ID NO: 682204 - DNA, 75 bp, synthetic construct
  source 1..75: mol_type = other DNA
taaactggtcagcgatgcataaggcggtttcggcaactggtttgcgggttattggcgtaagtggctgcaaagatg

SEQ ID NO: 682205 - DNA, 75 bp, synthetic construct
  source 1..75: mol_type = other DNA
atgagtcattctgaaggtctgcagcccctgcagcactcgctttccggcctgccacaatgggtgtctgaacgcata

SEQ ID NO: 682206 - DNA, 75 bp, synthetic construct
  source 1..75: mol_type = other DNA
atagcgaaatgaagggcattgccgaggtaattatcggaaagcaacgaaatggcccaattggcacggtgagattgg

SEQ ID NO: 682207 - DNA, 75 bp, synthetic construct
  source 1..75: mol_type = other DNA
taccggtggtggcattgtcacaacttaatcgatcgcttgaacagcgtgcggacaaacgaccggtaaattcagatt

SEQ ID NO: 682208 - DNA, 75 bp, synthetic construct
  source 1..75: mol_type = other DNA
ctgattgatgaaagtcagtttacccaggatgcaggtgttgcaacggataatatcgttgccgttggtatgacttat

SEQ ID NO: 682209 - DNA, 75 bp, synthetic construct
  source 1..75: mol_type = other DNA
ctgcgtgtgcctgccgcctttgaagggctttcagttgcggggccaactgcagcttatgagtttcatgcacgaagc

SEQ ID NO: 682210 - DNA, 75 bp, synthetic construct
  source 1..75: mol_type = other DNA
cgatgggcggcaatctggaccagctcgctgccaattacaacgtgaaacgcctgacggtgacgcctgctgataatg

SEQ ID NO: 682211 - DNA, 75 bp, synthetic construct
  source 1..75: mol_type = other DNA
cggttgtcagcccgtcaccggcctgtgtgaccatcaccgtgctgtcacgcgaggatgacggcaccgcatccgatg

SEQ ID NO: 682212 - DNA, 75 bp, synthetic construct
  source 1..75: mol_type = other DNA
ctgtcaccagtccgtctccggcctgcgtcactatctccgtgctgtctcgcgaaaataacggtgtcgcatccgaag

SEQ ID NO: 682213 - DNA, 75 bp, synthetic construct
  source 1..75: mol_type = other DNA
gattgagcgtggcgggtccggtcggcgcatatgagtatcacggtcgcagcgccgacgggcgggtcgctgacgtct

SEQ ID NO: 682214 - DNA, 75 bp, synthetic construct
  source 1..75: mol_type = other DNA
ggtgcagcgtgtcgagctggcatcaccgcaggccgacatagtgctgagtaagtcgcaggcgtcgaactgcaccga

SEQ ID NO: 682215 - DNA, 75 bp, synthetic construct
  source 1..75: mol_type = other DNA
agcatacgagtatcacggtcgcagcgccgacgggcgggtcgctgacgtttcggtcgcaaccccgtccccagcctg

SEQ ID NO: 682216 - DNA, 75 bp, synthetic construct
  source 1..75: mol_type = other DNA
accaaggggaatattagaagggcaagggataaatatgttagtgatgcaaagcgatatcattttgatgttgcggtg

SEQ ID NO: 682217 - DNA, 75 bp, synthetic construct
  source 1..75: mol_type = other DNA
ggcaaagcgggcgttccgggaattccaccgaattctacgctggtgtttgatgtagaactgctggatgtgaagccg

SEQ ID NO: 682218 - DNA, 75 bp, synthetic construct
  source 1..75: mol_type = other DNA
atggcaaacatcgacctgagccagctccccgcgcctgacgtcgtggaaacgctggattttgagactattctcgcg

SEQ ID NO: 682219 - DNA, 75 bp, synthetic construct
  source 1..75: mol_type = other DNA
ggctgagcgtggcgggtccggtcggggcatatgaatatcacggccgcagcgctgacgggcgtgtcgctgacgtct

SEQ ID NO: 682220 - DNA, 75 bp, synthetic construct
  source 1..75: mol_type = other DNA
tacctgttcccgatgtggtagaggaactggattatgaaaccatccttgcggaacgtatcacgacgctgatttcgc

SEQ ID NO: 682221 - DNA, 75 bp, synthetic construct
  source 1..75: mol_type = other DNA
ccgccggtaatgaccttgatgtgattggtgccaattacaacaccacacgcctgattatcaccccggcagatgatt

SEQ ID NO: 682222 - DNA, 75 bp, synthetic construct
  source 1..75: mol_type = other DNA
ggtcgcccgtaccctgacgctggaatccgagcctctcgtcaaactgctggaggaaaatgcttatcgtgagcttat

SEQ ID NO: 682223 - DNA, 75 bp, synthetic construct
  source 1..75: mol_type = other DNA
tttatgccgctttgcatgtggaaggcgtgcagcgtgtcgaactgactgcaccgctggccgacatcgtgctcaaca

SEQ ID NO: 682224 - DNA, 75 bp, synthetic construct
  source 1..75: mol_type = other DNA
cctgaatggcgaggacgtcagaccggtggccgaccgcgtgaccgtgcagtctgctgccatcgttgaataccagat

SEQ ID NO: 682225 - DNA, 75 bp, synthetic construct
  source 1..75: mol_type = other DNA
caaacgatccagaagcagaccagattcgccgcaataaaatgcgtgattttattgaagctgtaaaagcaaaaacag

SEQ ID NO: 682226 - DNA, 75 bp, synthetic construct
  source 1..75: mol_type = other DNA
gccaaccaaggcatgtcagatacggcagaaacaactattcagcgtgggagcagccgagatacctcggcaatggca

SEQ ID NO: 682227 - DNA, 75 bp, synthetic construct
  source 1..75: mol_type = other DNA
tattcacgcggtacagcaaattcttccagacccaaccaaaccaatcaatcaaataactcagcagagacttaaaga

SEQ ID NO: 682228 - DNA, 75 bp, synthetic construct
  source 1..75: mol_type = other DNA
tctatgccgcgcttcacgtcgagggggtgcagcgtgtcgaacttgtcgcgccggtcgctgacatcgtactcaatg

SEQ ID NO: 682229 - DNA, 75 bp, synthetic construct
  source 1..75: mol_type = other DNA
gcgcaggcggtgatggtggcttacgcgatgggcggcgatcttgaccagctcgctgctaactacaacgtgaaacgc

SEQ ID NO: 682230 - DNA, 75 bp, synthetic construct
  source 1..75: mol_type = other DNA
gtttaagcgttgccgggtcggtgggtgcctatcagtatcatggtcgcagtgccgacgggcgtgtcgcggatatct

SEQ ID NO: 682231 - DNA, 75 bp, synthetic construct
  source 1..75: mol_type = other DNA
ctgcgtattcagcaggcgtttgaaggtttaagcgtcgccgggtcggtgggggcctatcagtatcatggtcgcagt

SEQ ID NO: 682232 - DNA, 75 bp, synthetic construct
  source 1..75: mol_type = other DNA
gcagtgccgacgggcgtgtcgcggatatctctgtcaccagtccgtctccggcctgcgtcaccatctccgtgctgt

SEQ ID NO: 682233 - DNA, 75 bp, synthetic construct
  source 1..75: mol_type = other DNA
acagcaacggaggtgttgcttaataccgttcgcgccgttctgaatgcagaggatacccgcccggtggccgaccgc

SEQ ID NO: 682234 - DNA, 75 bp, synthetic construct
  source 1..75: mol_type = other DNA
gaagccggtaaaggcgaagcaccgaaagacagcgatactgttgtagtgaactacaaaggtacgctgatcgacggt

SEQ ID NO: 682235 - DNA, 75 bp, synthetic construct
  source 1..75: mol_type = other DNA
gccgcgcccacagcatttatggcagccagagctggttgagatattcgaagagaaattagccagacgcgcaacaac

SEQ ID NO: 682236 - DNA, 75 bp, synthetic construct
  source 1..75: mol_type = other DNA
gattaccgcgacatgcatcctctcatggccacctgtctttttacggaggcatacaaacgtcagtactcaaatatc

SEQ ID NO: 682237 - DNA, 75 bp, synthetic construct
  source 1..75: mol_type = other DNA
tcgacaacgaccagtacgacttcatgacagagtggaataccgctgttatggacaagtgggtcgctgaaaacattg

SEQ ID NO: 682238 - DNA, 75 bp, synthetic construct
  source 1..75: mol_type = other DNA
cgtttttttttagtgcattgcccgcttatgccgggttaacttccattaccgcgggctacgattttaccgattatt

SEQ ID NO: 682239 - DNA, 75 bp, synthetic construct
  source 1..75: mol_type = other DNA
gaagcgctggcactggttgatgtgaacacgctcgatcatctggtcatcggttcagagggcattgtgtcgttcgca

SEQ ID NO: 682240 - DNA, 75 bp, synthetic construct
  source 1..75: mol_type = other DNA
gaagcattagcagtggttgatgtgagcacgctcgatcatctggtcatcggctcagagagcattgtttcgtttgca

SEQ ID NO: 682241 - DNA, 75 bp, synthetic construct
  source 1..75: mol_type = other DNA
aacaagagaagaaaaccaacgagctttctgcaaaagaagcaaacagccttgtatggttatgggattatgccaacc

SEQ ID NO: 682242 - DNA, 75 bp, synthetic construct
  source 1..75: mol_type = other DNA
agcaaacagccttgtatggttatgggattatgccaaccgttcacaggcattattccgcgaactgtatccggcgct

SEQ ID NO: 682243 - DNA, 75 bp, synthetic construct
  source 1..75: mol_type = other DNA
tgtgttattattctgggagagacttctcggccaagaaaagagcgggtcttcattacatttgacctttcccatccg

SEQ ID NO: 682244 - DNA, 75 bp, synthetic construct
  source 1..75: mol_type = other DNA
ctgtgtgctaacgttcctgcgcaacacgccattcagaccgcactaggcggttatcagagcatcagtgaatttatt

SEQ ID NO: 682245 - DNA, 75 bp, synthetic construct
  source 1..75: mol_type = other DNA
ccagatgaaatcctcgttgacgtgatacgcaacctgcctaccgctcaagggtattgcgattccaaagggctttac

SEQ ID NO: 682246 - DNA, 75 bp, synthetic construct
  source 1..75: mol_type = other DNA
agttaataataaaattactacagtaggggagcttattaagattttgtggcaaatagcatcaggtatttgcgagat

SEQ ID NO: 682247 - DNA, 75 bp, synthetic construct
  source 1..75: mol_type = other DNA
aggcggcatatcactctatactggcccggtgatcaccagttaccgctatacccactatgactccagcgatgcagg

SEQ ID NO: 682248 - DNA, 75 bp, synthetic construct
  source 1..75: mol_type = other DNA
gaatgatttgtttactggtgataagttgttttgcccaggccacggtttcaccggacaggacgcgcattattttta

SEQ ID NO: 682249 - DNA, 75 bp, synthetic construct
  source 1..75: mol_type = other DNA
tgccaaagaacagaatgtcatgcaaatcgccatgcaaagccgtctgaaactgttctggcgaccgaaagcgattga

SEQ ID NO: 682250 - DNA, 75 bp, synthetic construct
  source 1..75: mol_type = other DNA
tggcgattatggcgggctggagatgtttaaagtggaatgtaactccatccagtctctctgccaaagcacacccgc

SEQ ID NO: 682251 - DNA, 75 bp, synthetic construct
  source 1..75: mol_type = other DNA
atcgacggtaaagagttcgacaactcttacacccgtggtgaaccgctctctttccgtctggacggtgttatcccg

SEQ ID NO: 682252 - DNA, 75 bp, synthetic construct
  source 1..75: mol_type = other DNA
ctgctgacagcaaagcagcgttcaaaaatgacgatcagaaatcagcttatgcactgggtgcttcgctgggtcgtt

SEQ ID NO: 682253 - DNA, 75 bp, synthetic construct
  source 1..75: mol_type = other DNA
aaagatcagctgatcgctggtgttcaggatgcatttgctgataagagcaaactctccgaccaagagatcgaacag

SEQ ID NO: 682254 - DNA, 75 bp, synthetic construct
  source 1..75: mol_type = other DNA
gtgtcgggcgtatttatcagcagacgttcctcgaaagtggctcactgtaagctttacgtcaccaaaacaccgatt

SEQ ID NO: 682255 - DNA, 75 bp, synthetic construct
  source 1..75: mol_type = other DNA
aggcggcctatcactctatactggcccggtgatcaccagctaccgctatacccattatgactccagcgatgcagg

SEQ ID NO: 682256 - DNA, 75 bp, synthetic construct
  source 1..75: mol_type = other DNA
aggcggcttatcactctatactggcccggtgatcaccagataccgctatacccactatgactccagcgatgcagg

SEQ ID NO: 682257 - DNA, 75 bp, synthetic construct
  source 1..75: mol_type = other DNA
atgtgcaatgggcggacgccaatggaaacgttacttgatggaaagcgcatctgggccgagaaaaatttaagccag

SEQ ID NO: 682258 - DNA, 75 bp, synthetic construct
  source 1..75: mol_type = other DNA
aagcgtaaagccagtgatgacgaggcctgtggcgaaagcgaaacggctcatccgggatatctgggttcgcaggac

SEQ ID NO: 682259 - DNA, 75 bp, synthetic construct
  source 1..75: mol_type = other DNA
tcaaaagcctgtaaaatcatgggcgtttcgcgtgatacgttttatcgttaccgcgaactggccaatgaaggcggt

SEQ ID NO: 682260 - DNA, 75 bp, synthetic construct
  source 1..75: mol_type = other DNA
gatatggtcgtctgtcacggcgatccttgtatgcccaattttatagtggaccctcgtagcctgcaatgtgccggg

SEQ ID NO: 682261 - DNA, 75 bp, synthetic construct
  source 1..75: mol_type = other DNA
catgccttcgcgaaaatcgcacctgcttcccgccgcggtgagctcgctggagagcgtgaccgcctcatttggctc

SEQ ID NO: 682262 - DNA, 75 bp, synthetic construct
  source 1..75: mol_type = other DNA
tcgcattgtggtgcaaccgcaatatctgggcgacgggctgaacaatacgctaacctggctgtgggataactggta

SEQ ID NO: 682263 - DNA, 75 bp, synthetic construct
  source 1..75: mol_type = other DNA
atcaaaaagacaccatcgcccaccaagagtatttaaaaatctccgacaccaatttacttggacatatgcatattg

SEQ ID NO: 682264 - DNA, 75 bp, synthetic construct
  source 1..75: mol_type = other DNA
aacttcatgccgcgtttctggatggcgatttcctccatccgcgctgcaatatcgaaaaaatggcgtccggccaac

SEQ ID NO: 682265 - DNA, 75 bp, synthetic construct
  source 1..75: mol_type = other DNA
ggtaatccgaatctctctttcatctacctgaaaggcgattttgatgtgattgaaagccgcctgaaagcgcgcaaa

SEQ ID NO: 682266 - DNA, 75 bp, synthetic construct
  source 1..75: mol_type = other DNA
ttgcggaaatggcgcagaccgatatgggatattttattccttcgcgggttctggtcggtttgggagcggtatgct

SEQ ID NO: 682267 - DNA, 75 bp, synthetic construct
  source 1..75: mol_type = other DNA
gctgatttctctggcagccatatgcctggcattattcactaccgcatttattatcatttcgcagctcacgcgcgg

SEQ ID NO: 682268 - DNA, 75 bp, synthetic construct
  source 1..75: mol_type = other DNA
aaggtggtcttggtggtacggcgaccgtcagcgttaaatctggcaagcatgagctcattggtgacagtggtgcag

SEQ ID NO: 682269 - DNA, 75 bp, synthetic construct
  source 1..75: mol_type = other DNA
tgccggaattaacgcgctgttgacgtcagcacaaattaacggagttacaccacgaattattatagcgccggatta

SEQ ID NO: 682270 - DNA, 75 bp, synthetic construct
  source 1..75: mol_type = other DNA
tgcaggcagtcagaaaaaagctggattgctcggtgggtctggcacccttcctcccgctgtatctgaaatactaaa

SEQ ID NO: 682271 - DNA, 75 bp, synthetic construct
  source 1..75: mol_type = other DNA
gagcaattagtgtttgagcgtgatccgtacatggattcaatccccgaaaattcaaacttggcaaagattcgggat

SEQ ID NO: 682272 - DNA, 75 bp, synthetic construct
  source 1..75: mol_type = other DNA
actggcaggaggaacaggagggggcatgcttggtgataacggcaattccgggagtaccggcggctgatctgtctg

SEQ ID NO: 682273 - DNA, 75 bp, synthetic construct
  source 1..75: mol_type = other DNA
tggggcaattcaggcattaagcgcgcaaggtttatcagggaaagtagcaatttccggccaggatgcggatctcgc

SEQ ID NO: 682274 - DNA, 75 bp, synthetic construct
  source 1..75: mol_type = other DNA
tcaggtattaagtaacgttgtaaaagaagccaaacaagaaggtattaaagtattagcttacgaccgtatgattaa

SEQ ID NO: 682275 - DNA, 75 bp, synthetic construct
  source 1..75: mol_type = other DNA
acaacgccaagctgttccgcgccggacaaatgaaagtgttaaaaccttacgttgattccggaaaaattaaagtcg

SEQ ID NO: 682276 - DNA, 75 bp, synthetic construct
  source 1..75: mol_type = other DNA
ctgagtattggctggagcgcgagtatcggggcagtgctggcgcttggaaccggtgtcatccatatcgctgatatt

SEQ ID NO: 682277 - DNA, 75 bp, synthetic construct
  source 1..75: mol_type = other DNA
gcgatagcagctgctggcgcagcagtactgtttatcgtggcgaaaagaggtcatggcatcaacacagggaaagtc

SEQ ID NO: 682278 - DNA, 75 bp, synthetic construct
  source 1..75: mol_type = other DNA
acaccgatcgatgtgaataaaaacaacatcaaagatacggtaattaaagacggattccacaaagagagcgagctg

SEQ ID NO: 682279 - DNA, 75 bp, synthetic construct
  source 1..75: mol_type = other DNA
tcctgaccatcgtgttggttatctggcagccgaaggggttagggattggctggagcgccatatttggcgcaatac

SEQ ID NO: 682280 - DNA, 75 bp, synthetic construct
  source 1..75: mol_type = other DNA
gcctcggtgatggtgccggtggatatcgctgcaatactggctaccctggtgatgttgcatctctatttccgcaaa

SEQ ID NO: 682281 - DNA, 75 bp, synthetic construct
  source 1..75: mol_type = other DNA
atgttcaaattcaaatttgcggcagtcgttcgcacagacaaaaagtcacacatccatcatctttccactatcgcg

SEQ ID NO: 682282 - DNA, 75 bp, synthetic construct
  source 1..75: mol_type = other DNA
gcaaatactgccgcagaaattgccgttgagttgggcaatggtcaggaaccaaaagcagataccacactgaataat

SEQ ID NO: 682283 - DNA, 75 bp, synthetic construct
  source 1..75: mol_type = other DNA
ggttggtgctctctctattgatggcagcactgcaacaggcgttatcaaagaggcgatgatttttgccaacgtgat

SEQ ID NO: 682284 - DNA, 75 bp, synthetic construct
  source 1..75: mol_type = other DNA
cacgttggggtaacggtcgcgggcgtttgctgtttacctatatcgttttgctcggcgcagcggtggcggcactgt

SEQ ID NO: 682285 - DNA, 75 bp, synthetic construct
  source 1..75: mol_type = other DNA
cactgagtgagcgggtttattcaggtacgcatggtaatgagtcggtggcagaaggtgtgtttacagtgaacgctg

SEQ ID NO: 682286 - DNA, 75 bp, synthetic construct
  source 1..75: mol_type = other DNA
atgatatttcagctcaaaaaatatctcttttaagttttcaaaaatacgctataggatggagtgcgacaattcatt

SEQ ID NO: 682287 - DNA, 75 bp, synthetic construct
  source 1..75: mol_type = other DNA
ggggagaacgtcatccacctgcgcaccctgcgtcgggtcaacggcgtcgcgctctgtttaatcgaccactacttc

SEQ ID NO: 682288 - DNA, 75 bp, synthetic construct
  source 1..75: mol_type = other DNA
gaatctgctggatcagggcagccatcccaccagcgaaaaactgctgtcggtgctgcgcccggcgtctggtcacgt

SEQ ID NO: 682289 - DNA, 75 bp, synthetic construct
  source 1..75: mol_type = other DNA
tggctggctgtgaaaagagtgatgaaacagtgtctctctatcaaaatgctgacgactgttcagctgcaaacccag

SEQ ID NO: 682290 - DNA, 75 bp, synthetic construct
  source 1..75: mol_type = other DNA
cgaataatcaaagaatgtatcgaaaatggcattaattcaactccctcgacaggataccaacctcttatcctgcaa

SEQ ID NO: 682291 - DNA, 75 bp, synthetic construct
  source 1..75: mol_type = other DNA
ttaattcaactccctcgacaggataccaacctcttatcctgcaaagcattaaaaccaaattactttcatcaagac

SEQ ID NO: 682292 - DNA, 75 bp, synthetic construct
  source 1..75: mol_type = other DNA
ctactttaaacttaagaaagctcgccgttggtaccgctcaacaatatttaaccacaacacaaataaaaaatgtag

SEQ ID NO: 682293 - DNA, 75 bp, synthetic construct
  source 1..75: mol_type = other DNA
gtaaaaccgggggataatccgttgttactaaaacgactttatatcttaagaacggattcgctcgagacgatgtcg

SEQ ID NO: 682294 - DNA, 75 bp, synthetic construct
  source 1..75: mol_type = other DNA
aagatcaatctccctgcgcgagcggtggtaattacctttgatgatggcctcaagtcggtgagccgctatgcgtat

SEQ ID NO: 682295 - DNA, 75 bp, synthetic construct
  source 1..75: mol_type = other DNA
gaattatgcgaggtcgttttgtagaaggtctgggtggcgcgcaattcgctgaacgtctgactattgaccgattgc

SEQ ID NO: 682296 - DNA, 75 bp, synthetic construct
  source 1..75: mol_type = other DNA
gatccggctaatgtgtggggaaatcttctgccctggcctgcacatccggcaacgctggttccaacgcgtcgggcg

SEQ ID NO: 682297 - DNA, 75 bp, synthetic construct
  source 1..75: mol_type = other DNA
gatcgctaaaacaaaagtgcaatttgtggcaatgttgttattccatgaccgtacaatcttgcattcagtgtaaat

SEQ ID NO: 682298 - DNA, 75 bp, synthetic construct
  source 1..75: mol_type = other DNA
gtttacgatcgatgttaaatttgacgagcatcacctgggcgctgacggcgctgatcgtattgagtttcgggtaac

SEQ ID NO: 682299 - DNA, 75 bp, synthetic construct
  source 1..75: mol_type = other DNA
ggtaaaaaaacagctgcttatcgtcaagtcggtaacgctttccccccccctgttgccgaggcaacaggaaggcaa

SEQ ID NO: 682300 - DNA, 75 bp, synthetic construct
  source 1..75: mol_type = other DNA
tattccgctcattttcgttggccgagtgaaacgttgataccaccgactgtgggtgatgctctctttgacttaatg

SEQ ID NO: 682301 - DNA, 75 bp, synthetic construct
  source 1..75: mol_type = other DNA
gaatgtggcgctgaacatcaagtcactggatgatttttcaccggatagcgtggctcgacaggttccggaagtaaa

SEQ ID NO: 682302 - DNA, 75 bp, synthetic construct
  source 1..75: mol_type = other DNA
aaaaggggtttactgggtatattggaagagacggaaatattcgagcaggtcttgaaaatatgcctcgtttgacgg

SEQ ID NO: 682303 - DNA, 75 bp, synthetic construct
  source 1..75: mol_type = other DNA
tatagcccctacacttgttggcggttcccataagcatggaggtccagaccttggaccgacgagagccaaaaaagc

SEQ ID NO: 682304 - DNA, 75 bp, synthetic construct
  source 1..75: mol_type = other DNA
atccgtaaagcactcgaagctgttgacatcatgaaaaaacaacagttggcgttaccactcgagtcaaatgatatt

SEQ ID NO: 682305 - DNA, 75 bp, synthetic construct
  source 1..75: mol_type = other DNA
agcttgagcccggcagcgttattcagctgattgagatcgacggcactgaattcggtatggatcaggtgctgcgtt

SEQ ID NO: 682306 - DNA, 75 bp, synthetic construct
  source 1..75: mol_type = other DNA
cggttacaagagttagcgcgcctgcttggtggcagtgaagtcacacgtaacacactggcgaatgcgaaagaactg

SEQ ID NO: 682307 - DNA, 75 bp, synthetic construct
  source 1..75: mol_type = other DNA
acgaaacatcatcagcaggcactggaaacggcgcgcgcattacaccagcaacgccagcattatgcagaagaactt

SEQ ID NO: 682308 - DNA, 75 bp, synthetic construct
  source 1..75: mol_type = other DNA
agggaagcacaacggacgatgaaatgaatgtggcgctgaatatcaagtcactggatgatttttcaccagatagcg

SEQ ID NO: 682309 - DNA, 75 bp, synthetic construct
  source 1..75: mol_type = other DNA
cagacggctgaagtggaacttccgcttaacatgctcgttgtcggcgataccggaaatacgcaggaaacatcccca

SEQ ID NO: 682310 - DNA, 75 bp, synthetic construct
  source 1..75: mol_type = other DNA
cctgtctgcacctggtgtatgcggggctggtaccgaagcgggaccggatgcgattacaacggcacgaaatacttt

SEQ ID NO: 682311 - DNA, 75 bp, synthetic construct
  source 1..75: mol_type = other DNA
ggggctatggcggtaaggccgagtcgtatccgatgttattgtcggcagagaccaccacagcacaggcgggtgatg

SEQ ID NO: 682312 - DNA, 75 bp, synthetic construct
  source 1..75: mol_type = other DNA
cataaaactggcacccgatggtatgttactggatatcaaacctgaaggtggcgatcccgcactttgtcaggctgc

SEQ ID NO: 682313 - DNA, 75 bp, synthetic construct
  source 1..75: mol_type = other DNA
tgcttgatagcttccgcaaagagccgtggttaggttttgaagtggttgggagctaccacgacgcgaaaccgggtg

SEQ ID NO: 682314 - DNA, 75 bp, synthetic construct
  source 1..75: mol_type = other DNA
atgtttggctatcgtagtaacgtgccaaaagtgcgcttaaccacagaccgactggtcgtgcgtctggtgcatgat

SEQ ID NO: 682315 - DNA, 75 bp, synthetic construct
  source 1..75: mol_type = other DNA
gtatccgttgttactgtcggcagataccaccacggcacaggcgggtgatgaaccggtgcttatttatcagcgcac

SEQ ID NO: 682316 - DNA, 75 bp, synthetic construct
  source 1..75: mol_type = other DNA
tggtatttgcccgttgacgcacagcttgcgggcgatgaaccagagaaactactcgcacaactttcctcgctggct

SEQ ID NO: 682317 - DNA, 75 bp, synthetic construct
  source 1..75: mol_type = other DNA
gaattatacttgccatccataagaataaagtcaacgtttctgagatttacagaaaacgttttagcccccggaagc

SEQ ID NO: 682318 - DNA, 75 bp, synthetic construct
  source 1..75: mol_type = other DNA
aagctttacgtcttcactttgaagaacatttaccccaggttgtggtcgggcgtcgcctgggcgtaccaaaatcaa

SEQ ID NO: 682319 - DNA, 75 bp, synthetic construct
  source 1..75: mol_type = other DNA
gctcggcattatgctggaagtgccgtcggtgatgttcatcatcgatcaatgctgcgaagagattgatttctttag

SEQ ID NO: 682320 - DNA, 75 bp, synthetic construct
  source 1..75: mol_type = other DNA
taccgctgtatgacacgccgctttccggcgtaaaccgcatcatcaaacggctggaagatattgtgctggccagca

SEQ ID NO: 682321 - DNA, 75 bp, synthetic construct
  source 1..75: mol_type = other DNA
ctcgcggtgatactcgaaaacccacgttttgcgaaatatacgctttggctgatgaccggtaacaccgcaccagaa

SEQ ID NO: 682322 - DNA, 75 bp, synthetic construct
  source 1..75: mol_type = other DNA
gataaatttatttatgatggtgaattatacttgccatccataaaaataaaatcaacgtttctgagatttacagaa

SEQ ID NO: 682323 - DNA, 75 bp, synthetic construct
  source 1..75: mol_type = other DNA
actggtcgtgcgtctggtgcatgatcgtgatgcctggcgtctggcggattattacgcagagaatcgccatttcct

SEQ ID NO: 682324 - DNA, 75 bp, synthetic construct
  source 1..75: mol_type = other DNA
cggttacaagagctggcgcgcctgcttggtggcagtgaagtcacacgtaatacactggcgaatgcgaaagaactg

SEQ ID NO: 682325 - DNA, 75 bp, synthetic construct
  source 1..75: mol_type = other DNA
tttcgctggcacgtaaacatcacgtcagccctgaggcattgccacagtattaccagtcgctactggaagaacagc

SEQ ID NO: 682326 - DNA, 75 bp, synthetic construct
  source 1..75: mol_type = other DNA
cggttacaggagttggcgcgcttacttggtggtagcgaagttacccgcaacaccctggcgaacgcgaaagaactg

SEQ ID NO: 682327 - DNA, 75 bp, synthetic construct
  source 1..75: mol_type = other DNA
cagcgatgaactggcaaaaaacggcccgcatttctgggggctggcctgcggtgtgcctgcctttatctggtcgct

SEQ ID NO: 682328 - DNA, 75 bp, synthetic construct
  source 1..75: mol_type = other DNA
ggatttagtgattgctggattccataagcaggtgtttgcgccagcggacattaccaccaataccgatgcgctgat

SEQ ID NO: 682329 - DNA, 75 bp, synthetic construct
  source 1..75: mol_type = other DNA
gtttacgattgatgttaaatttgacgagcatcacctgggcgctgacggtgctgatcgtattgagtttcgggtaac

SEQ ID NO: 682330 - DNA, 75 bp, synthetic construct
  source 1..75: mol_type = other DNA
tcctggcgatattcctgtagtgtggaatatcgtctggaatgcaactgccgcatttattgccgttattatcatcag

SEQ ID NO: 682331 - DNA, 75 bp, synthetic construct
  source 1..75: mol_type = other DNA
gcgtcggtgatggtgccagtggatatcgccgccattgtcgccacgctggtgatgctgcatctttttttccgcaaa

SEQ ID NO: 682332 - DNA, 75 bp, synthetic construct
  source 1..75: mol_type = other DNA
aatatgaattcttataacaataatgtaggtcttattaataaaaatacgttgccgataatcattaattggcttaat

SEQ ID NO: 682333 - DNA, 75 bp, synthetic construct
  source 1..75: mol_type = other DNA
tgctggtgggatttttcgtcctggaaccactcggcattccggtaagcgccattgcggcggtgggtgcgctgattt

SEQ ID NO: 682334 - DNA, 75 bp, synthetic construct
  source 1..75: mol_type = other DNA
gtgggccgcgacgctgggcaccggattcctcaccgccttcctctcttcgatcatgaacaatatgcctacggtact

SEQ ID NO: 682335 - DNA, 75 bp, synthetic construct
  source 1..75: mol_type = other DNA
tgtttgcggtggccaaaaaaggtcatgggattaacaccggtaaagtgctgcgcggtgcgccctggcagatcgtga

SEQ ID NO: 682336 - DNA, 75 bp, synthetic construct
  source 1..75: mol_type = other DNA
cagttcagttgcaccggtaacacctccccgtccgttaagaacgggtgagcagacggcagcattatggatagcacc

SEQ ID NO: 682337 - DNA, 75 bp, synthetic construct
  source 1..75: mol_type = other DNA
ggggcggagcaatccgcgccgggttcttcgttaaccggttacgccaaccctgtacagtccaccgccagcgaaatt

SEQ ID NO: 682338 - DNA, 75 bp, synthetic construct
  source 1..75: mol_type = other DNA
aagggcgggattcgcacaacctgaataaatacatctggcgttttatcgccctgagcacggcacaaccgcgcgtga

SEQ ID NO: 682339 - DNA, 75 bp, synthetic construct
  source 1..75: mol_type = other DNA
tgctggtgggatttttcgtcctggaaccgctcggcattccggtcagcgccattgcggcagtgggcgcgctgatat

SEQ ID NO: 682340 - DNA, 75 bp, synthetic construct
  source 1..75: mol_type = other DNA
agcgagattggaacctccagcggtgggtatatcccaacgataaaggaggctgccatcatggctactacccctgcc

SEQ ID NO: 682341 - DNA, 75 bp, synthetic construct
  source 1..75: mol_type = other DNA
cgaacgcgtctttttttgtatcggcgcacacgcacaccttatcaatggtgggctgtatggggctgacttcggtca

SEQ ID NO: 682342 - DNA, 75 bp, synthetic construct
  source 1..75: mol_type = other DNA
tctcaaactgcctttatctggcgctttatcatctttggcgcgtcagagtcccaaatcatccacgtcaccgcctgg

SEQ ID NO: 682343 - DNA, 75 bp, synthetic construct
  source 1..75: mol_type = other DNA
tcctgaccattgttctggttatctggcagcctaaaggcttagggatcggctggagcgcgatgctgggcgcgggac

SEQ ID NO: 682344 - DNA, 75 bp, synthetic construct
  source 1..75: mol_type = other DNA
aggtccaataatttatagcgattataatgcattcattttaatgtctttattgattgcaccatcgttctatatttt

SEQ ID NO: 682345 - DNA, 75 bp, synthetic construct
  source 1..75: mol_type = other DNA
ggtcggggcgctgtcgattgatggcagcacagcgaccggtgttatcaaagaagcgatgatttacgccaacgtcat

SEQ ID NO: 682346 - DNA, 75 bp, synthetic construct
  source 1..75: mol_type = other DNA
ttacgagcatcacattctccatcctcatgcgcttctgacgcgtggctttgatgattcattcctggcaccgcattc

SEQ ID NO: 682347 - DNA, 75 bp, synthetic construct
  source 1..75: mol_type = other DNA
tgatccgcaaaacaaaccgcgagcgagctggcgtagtcacggtaatttgctgtttaccaactggctcaactatta

SEQ ID NO: 682348 - DNA, 75 bp, synthetic construct
  source 1..75: mol_type = other DNA
gataagcgcattgcctttgtgacgggccatcccgaatatgatgcgcaaacgctggcgcaggaatttttccgcgat

SEQ ID NO: 682349 - DNA, 75 bp, synthetic construct
  source 1..75: mol_type = other DNA
ccctgtacagtccaccgccagcgagattaccacctccggcggtggggatatcccaacgtctaaggaggctgccaa

SEQ ID NO: 682350 - DNA, 75 bp, synthetic construct
  source 1..75: mol_type = other DNA
cggtcacctgcttgagcaggcgcagccagaggcctacgacagccgctatgcgcgctggaatcttgcggatttgcc

SEQ ID NO: 682351 - DNA, 75 bp, synthetic construct
  source 1..75: mol_type = other DNA
gagcgaagcgtgtgagccgtaccaggatgaagaagggcgcttgctgcatcgtccactggcggagcatgtggttaa

SEQ ID NO: 682352 - DNA, 75 bp, synthetic construct
  source 1..75: mol_type = other DNA
gcatgaagccagcgaaatcgttcacgccggggacccggatcgcgaagggcaattgctggtggatgaagtgctgga

SEQ ID NO: 682353 - DNA, 75 bp, synthetic construct
  source 1..75: mol_type = other DNA
cgagaaggccaaaaagctggaacagcctgcagatgcaaagccggctgcggcatcactgccgcgcctggctgaagg

SEQ ID NO: 682354 - DNA, 75 bp, synthetic construct
  source 1..75: mol_type = other DNA
atgaaacagatttctttatttattcctctgctggggacgttattactttccggctgtgccggaactaatacggaa

SEQ ID NO: 682355 - DNA, 75 bp, synthetic construct
  source 1..75: mol_type = other DNA
aagaaaaaggcttcaccacgcaagcgagcggtgaaaaaaagcccgccatcagaagacgcgggcagtggagcgata

SEQ ID NO: 682356 - DNA, 75 bp, synthetic construct
  source 1..75: mol_type = other DNA
gctgataagaaaaaggctgcaccgcgtaaacgtagtgcgaaaaaaagtccgccagcagatgaagccggaagcggg

SEQ ID NO: 682357 - DNA, 75 bp, synthetic construct
  source 1..75: mol_type = other DNA
atcacttatccgcgttccgattgtcgctatttgccagaagaacattttgccggacgccacgcggtgatgaatgcc

SEQ ID NO: 682358 - DNA, 75 bp, synthetic construct
  source 1..75: mol_type = other DNA
agtgtccggttacgccaaccctgtacagtccgccaccagcgaaattggcgtttccggtggcggttatcttaacca

SEQ ID NO: 682359 - DNA, 75 bp, synthetic construct
  source 1..75: mol_type = other DNA
accgggatcgcgcgctttgtgcaggataaagatctgaaaaaagatcctccgtgcgaccgatggtctggggacaga

SEQ ID NO: 682360 - DNA, 75 bp, synthetic construct
  source 1..75: mol_type = other DNA
gccgggattattgaactgttgttcaagcgtggtttcctgaccaaaaaagggcgctatatccactccaccgacgcc

SEQ ID NO: 682361 - DNA, 75 bp, synthetic construct
  source 1..75: mol_type = other DNA
tggcaccggaaaagcgccagcaggtgcagcgttgcttgataaacgacctgaacccgcaggcggttgagcgggcga

SEQ ID NO: 682362 - DNA, 75 bp, synthetic construct
  source 1..75: mol_type = other DNA
atgtattcgcgttttattactggttactggcatcttcagagtcagtccgctttgctggcacatctctgtcagctg

SEQ ID NO: 682363 - DNA, 75 bp, synthetic construct
  source 1..75: mol_type = other DNA
acgcccactcgtttcgtgagcaagcgctggggcaaacgctgggtttagttgtggcctatattctgtttgcggtcg

SEQ ID NO: 682364 - DNA, 75 bp, synthetic construct
  source 1..75: mol_type = other DNA
gggccttatatatatataaggtattgcccaaaaatatgagtgggaatgaaataatatcaataacgttttctttta

SEQ ID NO: 682365 - DNA, 75 bp, synthetic construct
  source 1..75: mol_type = other DNA
tgttgatcgactgcgatatgcgcaaaggctacacccacgagctgttgggcaccaataacgtcaatggcctgtcgg

SEQ ID NO: 682366 - DNA, 75 bp, synthetic construct
  source 1..75: mol_type = other DNA
gaatgggtatgtaacgatcccgttaattatttcaggttcccggagaacactgattattcagtgggggcaggcgag

SEQ ID NO: 682367 - DNA, 75 bp, synthetic construct
  source 1..75: mol_type = other DNA
gatcaacctgacggagaacgaagcgaaggtctataacctgattgcccgtcagtacttgatgcagttctgcccgga

SEQ ID NO: 682368 - DNA, 75 bp, synthetic construct
  source 1..75: mol_type = other DNA
gcttcatcaggggcaacattagccataactaataaacatgaatttcctatattagttcaatcagatgtgttatca

SEQ ID NO: 682369 - DNA, 75 bp, synthetic construct
  source 1..75: mol_type = other DNA
gtcggttaggcgaacctttctggcaggatcattttttgggtgcgcggcggattttgacggaagagacgattttgt

SEQ ID NO: 682370 - DNA, 75 bp, synthetic construct
  source 1..75: mol_type = other DNA
aaaacagcatccagaatggtttcctgcgccgctcaaggcgagtgacagacgctggcaggcgctggcggaaaacaa

SEQ ID NO: 682371 - DNA, 75 bp, synthetic construct
  source 1..75: mol_type = other DNA
gaagaatgttgaaggacgccacttcattgcaccattttcttcgcatgagtacaagttacctccaggaagttcagg

SEQ ID NO: 682372 - DNA, 75 bp, synthetic construct
  source 1..75: mol_type = other DNA
gaattccaccaaaagcgaatgataaatgggcagaagatggagataataataaaaaaatagcagacaacgtatccc

SEQ ID NO: 682373 - DNA, 75 bp, synthetic construct
  source 1..75: mol_type = other DNA
tatgttaaacctaaagctgaccatccctggcttacgcgccgaacgcaaagtcatcagcaagttaagcccccgaag

SEQ ID NO: 682374 - DNA, 75 bp, synthetic construct
  source 1..75: mol_type = other DNA
tgccagcatcccgctgtcggaatggcagaaagcgcgcgatagcgtcaaaaccatcaaaggggttaaacgctataa

SEQ ID NO: 682375 - DNA, 75 bp, synthetic construct
  source 1..75: mol_type = other DNA
ggtttttttatgggcctgaatatcgctctgcatggagtggcgctcaatggtatggcccatcacaaggccaattag

SEQ ID NO: 682376 - DNA, 75 bp, synthetic construct
  source 1..75: mol_type = other DNA
aatcgggtatccctcagtacgagcagatcgataaccatgatgataacacccaagaaatggggaatggctccatag

SEQ ID NO: 682377 - DNA, 75 bp, synthetic construct
  source 1..75: mol_type = other DNA
aaggggcgtgcgtgggcgcatgtctgttcgaaggctgggcgaaagatgaagcgcaggcacaggcaatgctggagt

SEQ ID NO: 682378 - DNA, 75 bp, synthetic construct
  source 1..75: mol_type = other DNA
tgcacccggaacaactggatgcgcctgcaccgcataccgaagtggccagtctgcaacccaatcatgtctggcaga

SEQ ID NO: 682379 - DNA, 75 bp, synthetic construct
  source 1..75: mol_type = other DNA
taccgccagttaacggcacagtatccggacggcgtaccggaagctgcactggatgaagtcatggccacgctgacc

SEQ ID NO: 682380 - DNA, 75 bp, synthetic construct
  source 1..75: mol_type = other DNA
agcgaggtcaggcctctgacgtacgcgggccgcgcactgaacaacgtcccatgactcatgtggaggccgcgaaag

SEQ ID NO: 682381 - DNA, 75 bp, synthetic construct
  source 1..75: mol_type = other DNA
gcctgcagcggaacaggcggcgctggtgcaactgtcggcgtggggagttgtgccgcaacgggcggaggaatcgcg

SEQ ID NO: 682382 - DNA, 75 bp, synthetic construct
  source 1..75: mol_type = other DNA
ctgtctcaattatgactgtctgtcgatggaaaattacgaaggcattcgtttgcgccagtacctgattagacttga

SEQ ID NO: 682383 - DNA, 75 bp, synthetic construct
  source 1..75: mol_type = other DNA
agacggtgaaagtgaccacctttaaccgcccgaaagagatggcggatcaggtgtttacgcttaatgtgctggacg

SEQ ID NO: 682384 - DNA, 75 bp, synthetic construct
  source 1..75: mol_type = other DNA
gcttcacgccgggccgccaatgcgctggcaggagatgaccgggccaatgaaaggggcatgtatgggcgcatgtct

SEQ ID NO: 682385 - DNA, 75 bp, synthetic construct
  source 1..75: mol_type = other DNA
gcgaactaaacaagggcaaaacactgcttcacgccgggccgccaatgcgctggcaggagatgaccggacccatga

SEQ ID NO: 682386 - DNA, 75 bp, synthetic construct
  source 1..75: mol_type = other DNA
aatgagcctgcatcagaacagtttctccgaagtgctggcgctggcagatatccgcggacatctgccagcacatat

SEQ ID NO: 682387 - DNA, 75 bp, synthetic construct
  source 1..75: mol_type = other DNA
cagcacaaccgggagcagataaaacagcatccagaatggtttcctgcaccgctcaaggcgagtgacagacgctgg

SEQ ID NO: 682388 - DNA, 75 bp, synthetic construct
  source 1..75: mol_type = other DNA
acaaccatttcttaagcagcgaccatctgcataacatcaccgaagtagcgattcaccgtctggagcagcagcttg

SEQ ID NO: 682389 - DNA, 75 bp, synthetic construct
  source 1..75: mol_type = other DNA
gcgccggggagatttgctgtttttccatattcacagccgcgagatagccgatcatatgggggtgtatctgggaga

SEQ ID NO: 682390 - DNA, 75 bp, synthetic construct
  source 1..75: mol_type = other DNA
agaagaggggttatggcgtgaacgccgtcgtaaaattgcccgtatatatcaacgccgcatgcgacgaccatctta

SEQ ID NO: 682391 - DNA, 75 bp, synthetic construct
  source 1..75: mol_type = other DNA
actattttgctatttatttaaaatttcgcgaaagcgcgtaaattgtatgttggtattcctgctggcgtgtattct

SEQ ID NO: 682392 - DNA, 75 bp, synthetic construct
  source 1..75: mol_type = other DNA
catgatttagcggctccggtcattgctggcattcttgccagtctgatcgtgaactggctgaacaagcggaagtaa

SEQ ID NO: 682393 - DNA, 75 bp, synthetic construct
  source 1..75: mol_type = other DNA
tgctggcattcttgccaagtatgatcgtgaactggctgaacaagcggaagtaacgtgtcatgcgggcgtcaggct

SEQ ID NO: 682394 - DNA, 75 bp, synthetic construct
  source 1..75: mol_type = other DNA
actcatggaaaatagcgatcgctgccaggatatacgtaatctggcatttctggggattgcttataacaccctgtt

SEQ ID NO: 682395 - DNA, 75 bp, synthetic construct
  source 1..75: mol_type = other DNA
tcgtgggcggcatggtgcaagttgaataaccggaagtggtttcccgcagaacctgaagatgttcgcgattatctt

SEQ ID NO: 682396 - DNA, 75 bp, synthetic construct
  source 1..75: mol_type = other DNA
cggtcgttctgttggctgggttaagtctgaggttatggaatgggttaaaagcagggatcgtattaattcaggtaa

SEQ ID NO: 682397 - DNA, 75 bp, synthetic construct
  source 1..75: mol_type = other DNA
ggaaaagtatgttgatggcccggagcctataccactggatgatgaaaagagtgtccatgaacgagtggataatgc

SEQ ID NO: 682398 - DNA, 75 bp, synthetic construct
  source 1..75: mol_type = other DNA
aaaacgctggttagcaccgcaggtgtagagaaggcacttagcctgggggtaactaaactggttgagcgatggatt

SEQ ID NO: 682399 - DNA, 75 bp, synthetic construct
  source 1..75: mol_type = other DNA
cggtccgggctgccacgaccaagtgacagcaatgctgtttcactggtcatgcgacggatccgaaaagaaaacgtt

SEQ ID NO: 682400 - DNA, 75 bp, synthetic construct
  source 1..75: mol_type = other DNA
gcctgagttcacagataaaacactctccaggaaacccggggcggttcaccctcatctggatatgagttttctggg

SEQ ID NO: 682401 - DNA, 75 bp, synthetic construct
  source 1..75: mol_type = other DNA
aggttgcagaggatgcgcgtcggatacaggctgcactgactacgtgcggggcaaccctgttttgccgccagaccc

SEQ ID NO: 682402 - DNA, 75 bp, synthetic construct
  source 1..75: mol_type = other DNA
acaaatattgtaaatctgctgcctttactttgtaccggagaagtacccgcagagctgcaaagtgccatgacaaaa

SEQ ID NO: 682403 - DNA, 75 bp, synthetic construct
  source 1..75: mol_type = other DNA
cgcgcccgaagcgcaaaatgatccacgttttgtgttggcgaacgtaaaactttcatctctcaccgaattgaccgc

SEQ ID NO: 682404 - DNA, 75 bp, synthetic construct
  source 1..75: mol_type = other DNA
gtgcaaaccggctatgccgggggaggcgatggtaatagcggaagcacaggctacgccacgctgaattatcgcggt

SEQ ID NO: 682405 - DNA, 75 bp, synthetic construct
  source 1..75: mol_type = other DNA
cccggctgacgttgggtgatggttatacccagggcgatattttcgatggtattaactttcgcggcgcacaattgg

SEQ ID NO: 682406 - DNA, 75 bp, synthetic construct
  source 1..75: mol_type = other DNA
cgatccctcaggcatttatgagtaatcgcgcgcgtggttatattcctcctgagttatgggatcccggtattaatg

SEQ ID NO: 682407 - DNA, 75 bp, synthetic construct
  source 1..75: mol_type = other DNA
ggtgagcaaacacggcttcgatcgtcagcaactgcaagaaatcctttcccaggcgaaacgtctggattcggtact

SEQ ID NO: 682408 - DNA, 75 bp, synthetic construct
  source 1..75: mol_type = other DNA
atcgacaaaatggtgaacaaacacggtttcgatcgtcagcagttgcaggaaattctctcccaggcgaaacgtctg

SEQ ID NO: 682409 - DNA, 75 bp, synthetic construct
  source 1..75: mol_type = other DNA
cgcctggatgttggcaccggttaccagtactggtacggtttgccgaacttctacactatcacccgttacaatcac

SEQ ID NO: 682410 - DNA, 75 bp, synthetic construct
  source 1..75: mol_type = other DNA
ttgcgttgataatggtgatgatgattagtgatgtggaggcaacaaactctactactgcagtgctgacgattaacg

SEQ ID NO: 682411 - DNA, 75 bp, synthetic construct
  source 1..75: mol_type = other DNA
acgctaacaccggtgacagaggttaccggtcagggggcattaggaccggcatccgccacgctgcgttttgaggtg

SEQ ID NO: 682412 - DNA, 63 bp, synthetic construct
  source 1..63: mol_type = other DNA
aaaatatccgcagctgaccatccgtgtatctggctacgcagtacgtttcaactcgctgactaa

SEQ ID NO: 682413 - DNA, 75 bp, synthetic construct
  source 1..75: mol_type = other DNA
ttgggagaagcggcaaaacggaatgtgggcaacggggaaaaccaaatccctgatatgtctttctggacggttact

SEQ ID NO: 682414 - DNA, 75 bp, synthetic construct
  source 1..75: mol_type = other DNA
aaaaaagcggactgcgccatgcttactcattctggtgatggcggtgcgcctttaggcgctgggcgagggttcgtg

SEQ ID NO: 682415 - DNA, 75 bp, synthetic construct
  source 1..75: mol_type = other DNA
cgggtgtcattggcctgaatgggtatgtaacgatcccgttaattatttcaggttcccggagaacactgattattc

SEQ ID NO: 682416 - DNA, 75 bp, synthetic construct
  source 1..75: mol_type = other DNA
atgccatttgctcgttatttctgcattttcataaacgttggtttgggagaagcagcaacgaggcacgtcggaacg

SEQ ID NO: 682417 - DNA, 75 bp, synthetic construct
  source 1..75: mol_type = other DNA
ggtttgggagaagccagatatgtcattcagcgaggagctaatgccaatggtgcgtggatacgctggtcagatggt

SEQ ID NO: 682418 - DNA, 75 bp, synthetic construct
  source 1..75: mol_type = other DNA
atggtgcatggattagctggtcttctcacataccttggtttgggagaagccagatatgtcattcagcgaggagct

SEQ ID NO: 682419 - DNA, 75 bp, synthetic construct
  source 1..75: mol_type = other DNA
actaactggacgaaaacaggtttcgttgctcattgtaactatggctttgaaggtggagccttctacgcgaaaggg

SEQ ID NO: 682420 - DNA, 75 bp, synthetic construct
  source 1..75: mol_type = other DNA
acgcaggagccagacgtagtgattgtatatgacggcggttttggtggtgggaatatgtggggcgcaactaactgg

SEQ ID NO: 682421 - DNA, 75 bp, synthetic construct
  source 1..75: mol_type = other DNA
gttatattgcctgtgcaggttttagttccgacccggttaaatttatatccagagccagtactcctggcctcggcg

SEQ ID NO: 682422 - DNA, 75 bp, synthetic construct
  source 1..75: mol_type = other DNA
ccgcatttggtatgtcgcgaaacggacaaactgcctgggatattctcccaaatggtatgattcgacaggctggca

SEQ ID NO: 682423 - DNA, 75 bp, synthetic construct
  source 1..75: mol_type = other DNA
tcaggcggtataggtggtgcaagttcttcatcattcagcggacgtggtggtggtaaagctgagggctttggtgct

SEQ ID NO: 682424 - DNA, 75 bp, synthetic construct
  source 1..75: mol_type = other DNA
ggatgatcaggtaacaaataccggcttttatgcccgctgccagatgtacgacggcagaccatcatcaaatgcttt

SEQ ID NO: 682425 - DNA, 75 bp, synthetic construct
  source 1..75: mol_type = other DNA
tttccgaacagatgtctgcgggtatttgcgactcaggattacactcccggcagtgcaaatgttggctatatagct

SEQ ID NO: 682426 - DNA, 75 bp, synthetic construct
  source 1..75: mol_type = other DNA
aaacggctttatatcttaagaacggattcgctggagacgatgtcgcggctggtgagtaaccagccgcagggatga

SEQ ID NO: 682427 - DNA, 75 bp, synthetic construct
  source 1..75: mol_type = other DNA
gggggatctgaataaaccgctgagtaaccaaaatcttattacctggaaagatactccgatatacaacgcgcctga

SEQ ID NO: 682428 - DNA, 75 bp, synthetic construct
  source 1..75: mol_type = other DNA
catcaataggcatcatcaacacgctcatccattgggttgtgttcgccatatgcatctacgcattccatactggtc

SEQ ID NO: 682429 - DNA, 75 bp, synthetic construct
  source 1..75: mol_type = other DNA
tgggacccaaaatcgctgcaatttatgagcgtttctgaacttaacgaaattcgcgatgtatttgatttccagtca

SEQ ID NO: 682430 - DNA, 75 bp, synthetic construct
  source 1..75: mol_type = other DNA
actcattttttacatcgggttgatggctatcgccgaccaatattactcagccgcagtgagcataatattctgttt

SEQ ID NO: 682431 - DNA, 75 bp, synthetic construct
  source 1..75: mol_type = other DNA
catattttacgcgatgaagagaacacccgttttcgtcatacttcgaccacgacgtcggtgcgagctttcaataac

SEQ ID NO: 682432 - DNA, 75 bp, synthetic construct
  source 1..75: mol_type = other DNA
ttacacagacaccgggcattgtaattgtgtgcgatggtggtttcgggggcgggaatatgtggggggcgaccaact

SEQ ID NO: 682433 - DNA, 75 bp, synthetic construct
  source 1..75: mol_type = other DNA
cccgtggtaacccccagaccggcacgcctgccaccgatctggatgatgactactttgacatgttgcaggaggagc

SEQ ID NO: 682434 - DNA, 75 bp, synthetic construct
  source 1..75: mol_type = other DNA
agcggctaaaaggaatgtagggacaggggcgaatcagatacctgatatgggtagcttcacgctttctgtttcagg

SEQ ID NO: 682435 - DNA, 75 bp, synthetic construct
  source 1..75: mol_type = other DNA
cctctattggtgtgctgaacacacttatacactgggtggtttttggtgtatgtatctatgccgcgcataccaatc

SEQ ID NO: 682436 - DNA, 75 bp, synthetic construct
  source 1..75: mol_type = other DNA
aagcatcgactacagcgatgcgctacatgttatacgtgggatttatgggaatattgagtgtgattgttggttggg

SEQ ID NO: 682437 - DNA, 75 bp, synthetic construct
  source 1..75: mol_type = other DNA
ttcgcgaatgcaaaattcacattcaaagcatcgactacaacgatgcgttacttgttatatgtgggattcatggga

SEQ ID NO: 682438 - DNA, 75 bp, synthetic construct
  source 1..75: mol_type = other DNA
atggggtttaaaatgaatatatatatcggatggttgtttaaattaattcctttactgatgggtataatatgcatc

SEQ ID NO: 682439 - DNA, 75 bp, synthetic construct
  source 1..75: mol_type = other DNA
gaagctccgacagaatggcatgactggaaaaatcgcattagttacagcaaatcaagacatggccgtgcggcttaa

SEQ ID NO: 682440 - DNA, 75 bp, synthetic construct
  source 1..75: mol_type = other DNA
aatgcagaacaggtgccgggggtgctgcaggcaatgttcagtggagaggggccctcctggctgcagacaatgaca

SEQ ID NO: 682441 - DNA, 75 bp, synthetic construct
  source 1..75: mol_type = other DNA
gcacattcactttcaggatgcaggctgcgggcgtgctgcgccacgaacagaacggacaggcagtgtataagggaa

SEQ ID NO: 682442 - DNA, 75 bp, synthetic construct
  source 1..75: mol_type = other DNA
ctcgatggcgaaggcaaggaaaagcacgttcatgtgcctgtgtcagacattgaacttctgagtgttgaaggctaa

SEQ ID NO: 682443 - DNA, 75 bp, synthetic construct
  source 1..75: mol_type = other DNA
ctccgatcatcgtgtttccgaagaacgaagaaggcaagttcgttatccaaaagggggagcggcgttggagggctt

SEQ ID NO: 682444 - DNA, 75 bp, synthetic construct
  source 1..75: mol_type = other DNA
tgagttatacgataatgaagtatgttctgatacagagaccttgaataaccttcgtctcttgttcgatctgaatga

SEQ ID NO: 682445 - DNA, 75 bp, synthetic construct
  source 1..75: mol_type = other DNA
actgtggcaggcagtggtgaattacgtctcagcggcacgatgccggaacattggagggtgtcactgtcaataaac

SEQ ID NO: 682446 - DNA, 75 bp, synthetic construct
  source 1..75: mol_type = other DNA
agaacggtaagcgtctctattccatcgcggatgcagtggaaaccctgcgggctaacggctttatatccgcaggca

SEQ ID NO: 682447 - DNA, 75 bp, synthetic construct
  source 1..75: mol_type = other DNA
ctgggaggaagcggtcagggccagcggactgacggtcgacgaactggaccggcgtctgcgacgtcgcaggatgtt

SEQ ID NO: 682448 - DNA, 75 bp, synthetic construct
  source 1..75: mol_type = other DNA
gctgcgcaggctgaaggaggtatctgtgactgataaacgcaaaaaccgcgccgatgccgggcgcagcgccctgac

SEQ ID NO: 682449 - DNA, 75 bp, synthetic construct
  source 1..75: mol_type = other DNA
caggggggacatctggtgtataccggtgtttatgacgacctgaatgcgaatggtctgccggagcagacgcagatg

SEQ ID NO: 682450 - DNA, 75 bp, synthetic construct
  source 1..75: mol_type = other DNA
actgtggcaggcagtggtgaattacgtctgaacggcatgatgccggaacgctggcgggtgtcactgccggtaagt

SEQ ID NO: 682451 - DNA, 75 bp, synthetic construct
  source 1..75: mol_type = other DNA
ggcgcgtttatcgataacctgactgcggcattaaccagcgccaataacgtttcgcgccagatgattaatgacgtg

SEQ ID NO: 682452 - DNA, 75 bp, synthetic construct
  source 1..75: mol_type = other DNA
ttaaattaatccctttgataatgggtataatatgcatcgcgttaggtgattttgtattagcaggttctgggcaaa

SEQ ID NO: 682453 - DNA, 75 bp, synthetic construct
  source 1..75: mol_type = other DNA
gggcgcaggcgtacaggcgcgcgttgactatgacgcgatcccgaaactgccgggcgtggaagagtacattaagct

SEQ ID NO: 682454 - DNA, 75 bp, synthetic construct
  source 1..75: mol_type = other DNA
gcgggtgaagaaaaacagtaccgcacaagccggatgcaaactgttcctgacgaaaccgctggggatcggcgttct

SEQ ID NO: 682455 - DNA, 75 bp, synthetic construct
  source 1..75: mol_type = other DNA
ttttgcctgttcctcgcggcattccttgcagagattgcgcaaaacgatatggcttactttattccctcgcgggtt

SEQ ID NO: 682456 - DNA, 75 bp, synthetic construct
  source 1..75: mol_type = other DNA
ttggttggcttaggtgcagtgtgttttacactgttttccatcgtttctatattagaagcaggttcagcgaaaaaa

SEQ ID NO: 682457 - DNA, 75 bp, synthetic construct
  source 1..75: mol_type = other DNA
taattgccgttccccttctgcttactctctttggtttcatttggtcagtcgcgctgttacgtagtgcaaatatca

SEQ ID NO: 682458 - DNA, 75 bp, synthetic construct
  source 1..75: mol_type = other DNA
cacaaaccttggtttgggagaagcggcaacgaggaacgtcggaacgggtaccggccaagtaccagatatgagcag

SEQ ID NO: 682459 - DNA, 75 bp, synthetic construct
  source 1..75: mol_type = other DNA
gtaaatctggatggagtaaggggccggatggggtaattacacaatggggtattttcggtttccccgttggacaga

SEQ ID NO: 682460 - DNA, 75 bp, synthetic construct
  source 1..75: mol_type = other DNA
cggggtttgctgttgaatacctgagccgcaagaatccgtttggtgatatcaaatcggatggcacggtgaaaacag

SEQ ID NO: 682461 - DNA, 75 bp, synthetic construct
  source 1..75: mol_type = other DNA
taaagctacagccgccgagtttggcattgaactgacggcgattggcgaactggtgccagcgcgcggcggtcgtgc

SEQ ID NO: 682462 - DNA, 75 bp, synthetic construct
  source 1..75: mol_type = other DNA
aaaagctaccgctgctgaatttggtatcgaactgacggcgattggcgaactggtgcctgcgcgcggcggtcgtgc

SEQ ID NO: 682463 - DNA, 75 bp, synthetic construct
  source 1..75: mol_type = other DNA
ccgcaagaatccgtttggcgatatcaaatcggatggcacggtgaaaacggctctcgaaaaccttggtttaggaga

SEQ ID NO: 682464 - DNA, 75 bp, synthetic construct
  source 1..75: mol_type = other DNA
gagccggggctggccgccgtggacgactggctggacaactttattcaggaaaaggccgtactgctggtgatttcc

SEQ ID NO: 682465 - DNA, 75 bp, synthetic construct
  source 1..75: mol_type = other DNA
aactgaaagacggctactacctcgaaccgacgatcctgtttggtcagaataatatgcgcgtcttccaggaagaga

SEQ ID NO: 682466 - DNA, 75 bp, synthetic construct
  source 1..75: mol_type = other DNA
ccagaacctgacgccggtgaccgggcagctgctgtgcgaagtggcgtcttcgggcaaacgagacatcgatctggc

SEQ ID NO: 682467 - DNA, 75 bp, synthetic construct
  source 1..75: mol_type = other DNA
gtatttgaagctgttgccagattgcttgaaccttacattggtaaagctgttgctgtgcgtacaaacaaagcaaaa

SEQ ID NO: 682468 - DNA, 75 bp, synthetic construct
  source 1..75: mol_type = other DNA
atccgagtggtaatgaaagtgacccgtcaaccgtgacgtcaaaaaccgatggtgtggcagatgccccggtcctga

SEQ ID NO: 682469 - DNA, 75 bp, synthetic construct
  source 1..75: mol_type = other DNA
accaaaaggcagtgctgccggtgataccctgacactgacagtcaccagaccggacggcacgacggacacagtgga

SEQ ID NO: 682470 - DNA, 75 bp, synthetic construct
  source 1..75: mol_type = other DNA
gtgaaacccataagatgatgctggagcattatcagcaaactaagtgtctgctggtgagctactcggataaaccgt

SEQ ID NO: 682471 - DNA, 75 bp, synthetic construct
  source 1..75: mol_type = other DNA
aaggatttcacgttacgaaacattaaccgcttttaccctcaaaacaggccaacatttggtgaattattagatcat

SEQ ID NO: 682472 - DNA, 75 bp, synthetic construct
  source 1..75: mol_type = other DNA
gggcgtaagcaagaaaaactcgctcgggcgcgcgcatggtttcgaatgtgaggctcagggaacacttttcttcga

SEQ ID NO: 682473 - DNA, 75 bp, synthetic construct
  source 1..75: mol_type = other DNA
taactatacatttcgttttattgatttattcgcagggattggtggtattcgtaaaggcttcgaaagtattggtgg

SEQ ID NO: 682474 - DNA, 75 bp, synthetic construct
  source 1..75: mol_type = other DNA
aaaaatgagtggagccgcgaaacccttaaccgctggataaatggcaagtgtgagccaaaatcgcttaccatggct

SEQ ID NO: 682475 - DNA, 75 bp, synthetic construct
  source 1..75: mol_type = other DNA
gaagactgacacctcacgaatgtgccaggctaatgggttttgaaaaaccagggggaagaccttttagaatacctg

SEQ ID NO: 682476 - DNA, 75 bp, synthetic construct
  source 1..75: mol_type = other DNA
atttgggaactcagttgttgtgccagtatttgaagctgtagcaagattactagaaccgtacatacaaaaggctgt

SEQ ID NO: 682477 - DNA, 75 bp, synthetic construct
  source 1..75: mol_type = other DNA
gaccattcctgcggataaagtgacggcagatggccagtattctgtaactgcggaaatcacagacccggcaggtaa

SEQ ID NO: 682478 - DNA, 75 bp, synthetic construct
  source 1..75: mol_type = other DNA
gtggaatccatagtggatataaagcaggtcttagagcttagccgagtaaatggagatcttggccgattaggaggg

SEQ ID NO: 682479 - DNA, 75 bp, synthetic construct
  source 1..75: mol_type = other DNA
tgtttatgctgcgcaccgtgccgtatcaggagctgcagtatcaacgcaactggcgacatgcggcaaacagccggg

SEQ ID NO: 682480 - DNA, 75 bp, synthetic construct
  source 1..75: mol_type = other DNA
tccctgtccggtatgttcggtgatctcagtacgcaactgaataatctgcaggacacggcaacatctgccttaagt

SEQ ID NO: 682481 - DNA, 75 bp, synthetic construct
  source 1..75: mol_type = other DNA
ctgtttgatgacgtggttaagttgtttgagtttgatacaaccactcagaagttcgaaagcccagcaaaggaggca

SEQ ID NO: 682482 - DNA, 75 bp, synthetic construct
  source 1..75: mol_type = other DNA
caatatggcctcttgtacctagaaccgcattttatgattggttatatttaagtgcactaaaacaaaataaaaact

SEQ ID NO: 682483 - DNA, 75 bp, synthetic construct
  source 1..75: mol_type = other DNA
ttcactgataaaaacattgttaagtaaaatagaatcaactcagcaagagttgagaaatattatggagaaaatact

SEQ ID NO: 682484 - DNA, 75 bp, synthetic construct
  source 1..75: mol_type = other DNA
ctgaataatctgcaggacacggcaacgtctgctttaagcgatatcagtaaaacggttggagggctgctgtcgtga

SEQ ID NO: 682485 - DNA, 75 bp, synthetic construct
  source 1..75: mol_type = other DNA
gcaaactgctggatgtgacgcgcctgcatcagcttggctggtatcacgaaatctcactggaagcggggcttgcca

SEQ ID NO: 682486 - DNA, 75 bp, synthetic construct
  source 1..75: mol_type = other DNA
tgtttatgctgcgcaccgtgccgtatcaggaactgcagtatcagcgcagctggcgacatgcggctaacagtcggg

SEQ ID NO: 682487 - DNA, 75 bp, synthetic construct
  source 1..75: mol_type = other DNA
caggggaaagcatggcctctgattgaaggcagcggcacgatttacggcatgtatgtgattgagggactgaatcag

SEQ ID NO: 682488 - DNA, 75 bp, synthetic construct
  source 1..75: mol_type = other DNA
ccagacatcagatgttaattgatcagaatatttttaaacccagagatttgaagaataaaccgggaaaaaatatct

SEQ ID NO: 682489 - DNA, 75 bp, synthetic construct
  source 1..75: mol_type = other DNA
atgcaattggaagaagtcgctaaagcgctgaaagagttaggtcatccgacccgtttgttcatatttaagcacctg

SEQ ID NO: 682490 - DNA, 75 bp, synthetic construct
  source 1..75: mol_type = other DNA
gtggatgtcacctttgaagatgaaaagggtggtaaccacaccgtgacgctggagaacggtgataacggctggaca

SEQ ID NO: 682491 - DNA, 75 bp, synthetic construct
  source 1..75: mol_type = other DNA
ttcaaggcagggttaagacgtaagatgcgaaaagcagccatggacagaaactacctggcggcagtccttgcgggg

SEQ ID NO: 682492 - DNA, 75 bp, synthetic construct
  source 1..75: mol_type = other DNA
attatatcagttctgctgatttaaccgcagagaagttcgccacagcaatccgaaaccactggcatgtggagaata

SEQ ID NO: 682493 - DNA, 75 bp, synthetic construct
  source 1..75: mol_type = other DNA
cagcgatccgaaatcactggcacgtggagaataagctgcactggcgtctggacgtggtaatgaatgaagacgact

SEQ ID NO: 682494 - DNA, 75 bp, synthetic construct
  source 1..75: mol_type = other DNA
cggtggtgctcttcatcattattttcgctgtcattctgctgaccaggaaacgggtgaacctcaatggcaacaaat

SEQ ID NO: 682495 - DNA, 75 bp, synthetic construct
  source 1..75: mol_type = other DNA
tgcctttatctcgtttctggcgattttgcagaccatcgacaaatcgctgtacgaagcggcagagatggatggcgc

SEQ ID NO: 682496 - DNA, 75 bp, synthetic construct
  source 1..75: mol_type = other DNA
attattcccgaagatttcgtgcctcaggaaagacgtaaagtcttttatccgctgaatgctaaagcggcagatcgc

SEQ ID NO: 682497 - DNA, 75 bp, synthetic construct
  source 1..75: mol_type = other DNA
attaagccacgctgctgaagtcggttcaggcgataactggcatccgggtgaagaacttacgcagcgcagtacgca

SEQ ID NO: 682498 - DNA, 75 bp, synthetic construct
  source 1..75: mol_type = other DNA
cgcgtgcgcgaagaacttgcgttagcgaagcagcaggccgaccggcgcaagcgttcccaactgaccgatcacgtc

SEQ ID NO: 682499 - DNA, 75 bp, synthetic construct
  source 1..75: mol_type = other DNA
agccgatccagttttccagtgaagcgctggcatcctgcaccagtgcaggggaaaccttcggtaaggtggttgggg

SEQ ID NO: 682500 - DNA, 75 bp, synthetic construct
  source 1..75: mol_type = other DNA
aaggtattcaaggcagggttaagacgtaagatgcgaaaagctgccatggacagaaactatctcgcgtcagtcctt

SEQ ID NO: 682501 - DNA, 75 bp, synthetic construct
  source 1..75: mol_type = other DNA
tattttgacgaatgataaggtattcaaggcagggttaagatgtaagatgcgaaaagcagctatggacagaaacta

SEQ ID NO: 682502 - DNA, 75 bp, synthetic construct
  source 1..75: mol_type = other DNA
agtattccaggactaatggcacccgttgcgcataacggctactggctggttgatggcgctgtagttaacccaatt

SEQ ID NO: 682503 - DNA, 75 bp, synthetic construct
  source 1..75: mol_type = other DNA
tctcgcgcccagcttattactgctgggcggtctggtggcgtggccgatggtgtcgaatatcgaaatcagtttttt

SEQ ID NO: 682504 - DNA, 75 bp, synthetic construct
  source 1..75: mol_type = other DNA
gtggatgtcacctttgaagatgaaaagggtgttaagcacaccgtgacgctggagaacggcgataacggctggaca

SEQ ID NO: 682505 - DNA, 75 bp, synthetic construct
  source 1..75: mol_type = other DNA
gtggatgtcacctttgaagatgaaaagggtgttaaccacaccgtgacgctggagaacggggataacggctggaca

SEQ ID NO: 682506 - DNA, 75 bp, synthetic construct
  source 1..75: mol_type = other DNA
tggtcagtattctgtaactgcggaaatcacagacccggcaggcaacaccagtggtcagggccagctggcagactt

SEQ ID NO: 682507 - DNA, 75 bp, synthetic construct
  source 1..75: mol_type = other DNA
gtggatgtcacctttgaagatgaaaagggtggtaatcacaccgtgacgctggagaacggcgataacggctggaca

SEQ ID NO: 682508 - DNA, 75 bp, synthetic construct
  source 1..75: mol_type = other DNA
gtggatgtcacctttgaagatgaaaagggtgctaagcacaccgtgacgctggagaacggtgataacggctggaca

SEQ ID NO: 682509 - DNA, 75 bp, synthetic construct
  source 1..75: mol_type = other DNA
gtggatgtcacctttgaagatgaaaagggtgctaatcacaccgtgacgctggagaacggggataacggctggaca

SEQ ID NO: 682510 - DNA, 75 bp, synthetic construct
  source 1..75: mol_type = other DNA
agaaaggggacaacggctggacatccgacaattctgcactgatcccggacagccagggtgatacagccacaatcg

SEQ ID NO: 682511 - DNA, 75 bp, synthetic construct
  source 1..75: mol_type = other DNA
atgagtctatacaggcgtcaaggaaagaccctgaatttttggcatcagaatcaataaaaaatgattctgcgcgcg

SEQ ID NO: 682512 - DNA, 75 bp, synthetic construct
  source 1..75: mol_type = other DNA
aaggtattcaaggcagggttaagacgtaagatgcgaaaagcagccatggacagaaactatctggcgtcagtcttt

SEQ ID NO: 682513 - DNA, 75 bp, synthetic construct
  source 1..75: mol_type = other DNA
atgcggctgagctgaaagatggtttacaggcagaagtcatgttgccggcaggaacagtggaaggtgcggtcatta

SEQ ID NO: 682514 - DNA, 75 bp, synthetic construct
  source 1..75: mol_type = other DNA
cagataatgtgaaggataacagtgaagttacaggggttgccaaagatccgagcggtaatgaaagtgacccgtcaa

SEQ ID NO: 682515 - DNA, 75 bp, synthetic construct
  source 1..75: mol_type = other DNA
gtggatatgactgttggtagcgatctgaaagctgacaatgcagctcagttagtcaagttaacggcatcggatgta

SEQ ID NO: 682516 - DNA, 75 bp, synthetic construct
  source 1..75: mol_type = other DNA
cagtaaacaatggcccggtaaagccgctattggtcgtctgaaaggtgacgagctggcgcaatataatttgtggct

SEQ ID NO: 682517 - DNA, 75 bp, synthetic construct
  source 1..75: mol_type = other DNA
tgtcagtgcgtgcccgtttgggatgatcactgttcagtctttgcccggacatactcgccaactcatcgtgaaatg

SEQ ID NO: 682518 - DNA, 75 bp, synthetic construct
  source 1..75: mol_type = other DNA
atgctcgcagatatcagatgttgggaaaacgatgccacaaataaacgttatgctattgcccattttaatgtatgg

SEQ ID NO: 682519 - DNA, 75 bp, synthetic construct
  source 1..75: mol_type = other DNA
gtacaggctgaatttaatctggttgaagaatttgacgccaccgaccgcggtgaaggcggatttggtcactctggt

SEQ ID NO: 682520 - DNA, 75 bp, synthetic construct
  source 1..75: mol_type = other DNA
aattatggtttactgaaggcgatctccatcttgctattcgcgcatcatgcagtattccaggactcatggcacccg

SEQ ID NO: 682521 - DNA, 75 bp, synthetic construct
  source 1..75: mol_type = other DNA
gcaggatgttcaatcggttcgctggtgggcgcagcctatgcatgtgatcgcctgtccgcgctggaagagtgggtc

SEQ ID NO: 682522 - DNA, 75 bp, synthetic construct
  source 1..75: mol_type = other DNA
gtttgccggtacttgtgttcactacagtaattttgggggccattccagggtggggggctgaattttcggccaact

SEQ ID NO: 682523 - DNA, 75 bp, synthetic construct
  source 1..75: mol_type = other DNA
tttgaaacaaagagggcatgaacttggggccttaagttcaagtacctttgcagttggtggtttaccaacacttac

SEQ ID NO: 682524 - DNA, 75 bp, synthetic construct
  source 1..75: mol_type = other DNA
tggaagtaacaccggaacgcaatctcttaatatagatcttactctagatttttggcaggatttagaaaaaaacct

SEQ ID NO: 682525 - DNA, 75 bp, synthetic construct
  source 1..75: mol_type = other DNA
aaacgtcggcggtgccggtagctagtgatgccagccctgggactggtgatgaggttgttacccgggtggtccccg

SEQ ID NO: 682526 - DNA, 75 bp, synthetic construct
  source 1..75: mol_type = other DNA
aacagataagacagctatacctgcttggatgacggcgaaactggttgcagacgagaggacaaactcagtgctcgt

SEQ ID NO: 682527 - DNA, 75 bp, synthetic construct
  source 1..75: mol_type = other DNA
gataatgctggcgcaggaagcgtggtgcattatgaaccttctaatgttttgttgatgaccggacgtgctgcagtg

SEQ ID NO: 682528 - DNA, 75 bp, synthetic construct
  source 1..75: mol_type = other DNA
gtacaggctgaatttaatctggtggaagatttcgacgctaccgaccgcggtgaaggcggctttggtcactctggt

SEQ ID NO: 682529 - DNA, 75 bp, synthetic construct
  source 1..75: mol_type = other DNA
agaatatgatcgaaaatattaatcacaccatgtcattaactattgctgaagggcgtgattctgaaataaaaagag

SEQ ID NO: 682530 - DNA, 75 bp, synthetic construct
  source 1..75: mol_type = other DNA
gtaaaaggcaccatgttgacgcttcagggctctgcaatgacacagataaaaggtggaatagtgaatatcggataa

SEQ ID NO: 682531 - DNA, 75 bp, synthetic construct
  source 1..75: mol_type = other DNA
gcataatgatgtacatggtaatattgatataaaagttttagatggaaactataacctcagagtgaccggaggaag

SEQ ID NO: 682532 - DNA, 75 bp, synthetic construct
  source 1..75: mol_type = other DNA
tcaacaatgatatccacgacacaatcaagtgtgctagatcctgttattgtgatttgtatgcttcagataataaaa

SEQ ID NO: 682533 - DNA, 75 bp, synthetic construct
  source 1..75: mol_type = other DNA
gaaataaaatgtctcagtcaggatgattctcattctctgggtaagttacacggtaagcggctcagttgtgagatc

SEQ ID NO: 682534 - DNA, 75 bp, synthetic construct
  source 1..75: mol_type = other DNA
acaccatcagatattgtaaccacaatattaaaagacagttttttaaatactccacaaatcatgttatataaagag

SEQ ID NO: 682535 - DNA, 75 bp, synthetic construct
  source 1..75: mol_type = other DNA
gaaataaaatgttttagtaagactgatcatcactctctggataagttacacggtacgcagctgagttgtgagatc

SEQ ID NO: 682536 - DNA, 75 bp, synthetic construct
  source 1..75: mol_type = other DNA
gtcattaactgttgctgaagggcgtaatactgagataaaaaaaggaaatgataatcttattcttaaaaaaggcaa

SEQ ID NO: 682537 - DNA, 75 bp, synthetic construct
  source 1..75: mol_type = other DNA
acggctattataaatgccaagatcaacattttattagattacatggttgtaatttatccttatttccactagaaa

SEQ ID NO: 682538 - DNA, 75 bp, synthetic construct
  source 1..75: mol_type = other DNA
tgataatagcatgctgtatacctgcattattgtgttacagccagaaatagctgagttggcatatagtagacgaac

SEQ ID NO: 682539 - DNA, 75 bp, synthetic construct
  source 1..75: mol_type = other DNA
tatacagatgagtatgggcgtgtaaaaataagatttctctggggtgaaaagtcaacgtcaggtacagataaaacc

SEQ ID NO: 682540 - DNA, 75 bp, synthetic construct
  source 1..75: mol_type = other DNA
tttttgaatctattaataaatcttttaatacatattctcctgtatctgacgattattataaacaccaggataaac

SEQ ID NO: 682541 - DNA, 75 bp, synthetic construct
  source 1..75: mol_type = other DNA
agataaccggacagcgcattggcgcgcccggtcgctgtcgcctgctgctgagttccatcactccgatagcaaaga

SEQ ID NO: 682542 - DNA, 75 bp, synthetic construct
  source 1..75: mol_type = other DNA
gccacttcgcattgctctgcaaaaccatgtcgaatgggaattcattgaaaaatatggcgaagctgaaggtatggg

SEQ ID NO: 682543 - DNA, 75 bp, synthetic construct
  source 1..75: mol_type = other DNA
acggcgtggagaagggttcaatgatggcccttcgcatgtaccagaacatggtgatagcagatccagaagacggat

SEQ ID NO: 682544 - DNA, 75 bp, synthetic construct
  source 1..75: mol_type = other DNA
tccgccgtctggatgcaggtgaattcgatcatcctaatgtgaaaggtttgcaaatccttcaatgcctcgcacaag

SEQ ID NO: 682545 - DNA, 75 bp, synthetic construct
  source 1..75: mol_type = other DNA
ttaagcaaattatctcctataaatagcggaatgatattagatgttgaggctgctcttaagtgtggtggatataat

SEQ ID NO: 682546 - DNA, 75 bp, synthetic construct
  source 1..75: mol_type = other DNA
aaactggaatgagaaagcaaactctccagagatccgtgctcgcatgggatgcgtatgtgagacgttccccctgct

SEQ ID NO: 682547 - DNA, 75 bp, synthetic construct
  source 1..75: mol_type = other DNA
gtgagtacgacaatccatgctggcacggtttaagaatcatgcaatgtattgcagaagccgatgatgccggattcc

SEQ ID NO: 682548 - DNA, 75 bp, synthetic construct
  source 1..75: mol_type = other DNA
ctgtttgatgacgtggttaagttgtttgagtttgatacaaccactcagaagttagaaagcacagcaaaggaggca

SEQ ID NO: 682549 - DNA, 75 bp, synthetic construct
  source 1..75: mol_type = other DNA
tactggcgctgaatttatcaaatatcgcgaacctgaagcgatacgagcttgatatgggaggttgcgactcgtgtg

SEQ ID NO: 682550 - DNA, 75 bp, synthetic construct
  source 1..75: mol_type = other DNA
aagaaatcatatcccgcattgaaatgtatgggcatggtgcagggtataccgcagacgaggttaatgatctggctg

SEQ ID NO: 682551 - DNA, 75 bp, synthetic construct
  source 1..75: mol_type = other DNA
cgtatgtttttgtggaaagataacggtggtgatggtgttcatattaataacggttcagatggtggtggtgatttc

SEQ ID NO: 682552 - DNA, 75 bp, synthetic construct
  source 1..75: mol_type = other DNA
ggactgcgccatgcttacccattctggtgatggtggtgcgcctttaggcgctggacggggattcgtgatgactgc

SEQ ID NO: 682553 - DNA, 75 bp, synthetic construct
  source 1..75: mol_type = other DNA
ctgggggcaacgatagggcaagcatggagcggtggtgtgtggagcggcaagtattttctattggcagaagcccat

SEQ ID NO: 682554 - DNA, 75 bp, synthetic construct
  source 1..75: mol_type = other DNA
ttgaggacaaaccaaaaaggaacaaagtcaaatatcagtgtcgggggtgcggtgctgccgtgtggggcaaagccg

SEQ ID NO: 682555 - DNA, 75 bp, synthetic construct
  source 1..75: mol_type = other DNA
cgctgggatgaagtggtgctgatgctgagtcctgacgatttttatgtggctcagcaccgggccattttccgtgcc

SEQ ID NO: 682556 - DNA, 75 bp, synthetic construct
  source 1..75: mol_type = other DNA
tgaaaaaagtggtcgctacacttaacgaattacagatctcgacggatggcgctattgctgatagtaaaattgcct

SEQ ID NO: 682557 - DNA, 75 bp, synthetic construct
  source 1..75: mol_type = other DNA
ccagtggcagtgatgaagatgatcctacggcgattaataaaacggtacgcgtagtcacgaccgtaacctatgcgt

SEQ ID NO: 682558 - DNA, 75 bp, synthetic construct
  source 1..75: mol_type = other DNA
acgcacaccgggatcgcgattcgcagaaatggtgagcggcaagtgaaactccacgaaacagcgacaacctggtgt

SEQ ID NO: 682559 - DNA, 75 bp, synthetic construct
  source 1..75: mol_type = other DNA
atgtccgaactggcggtgagtggccagcctctggacctgattaccctgtcagagcacctggaacatcagggcagg

SEQ ID NO: 682560 - DNA, 75 bp, synthetic construct
  source 1..75: mol_type = other DNA
tggtattcagcattgagatgccgaaggagcaactgattctgcgcatgctttccatgctgggacgtgtggaactga

SEQ ID NO: 682561 - DNA, 75 bp, synthetic construct
  source 1..75: mol_type = other DNA
ttccagacgccgtcatcgctgcgtgccagcgcccgtcgttatgtccgtctgtatggcagaccttccctgataatg

SEQ ID NO: 682562 - DNA, 75 bp, synthetic construct
  source 1..75: mol_type = other DNA
ccgttgatgcagagcaggccgtgctgggcggcctgatgctcgataatgaacgctgggatgaggtggtactgatgc

SEQ ID NO: 682563 - DNA, 75 bp, synthetic construct
  source 1..75: mol_type = other DNA
gaatcaataagctatctttttacatatataattccgtttgtatttcaggatctatccactttaactaatgttata

SEQ ID NO: 682564 - DNA, 75 bp, synthetic construct
  source 1..75: mol_type = other DNA
gcaggcttcgtagtgcatcactgggtgatgaagaatgggcccgtctttcacaggctatgaaggagattattcagt

SEQ ID NO: 682565 - DNA, 75 bp, synthetic construct
  source 1..75: mol_type = other DNA
cactggaacaggatgccgacctcattatgtttatctaccgggatgaggtgtataacccgggcacaatgacgccgg

SEQ ID NO: 682566 - DNA, 75 bp, synthetic construct
  source 1..75: mol_type = other DNA
ggagcagctgattctgcgtaccctgtcgatgctgtcccgggtggagctgactcgtcttcgcagcagcatgatgga

SEQ ID NO: 682567 - DNA, 75 bp, synthetic construct
  source 1..75: mol_type = other DNA
ttccttatccgggtaaccgaatggtggcaactgcgcccggaaggtattcccggcaccttcgcgctggaagtcggc

SEQ ID NO: 682568 - DNA, 75 bp, synthetic construct
  source 1..75: mol_type = other DNA
atcgttggattaagtcgtatcttgctggatacggaactcaccgctgagcaggaaaaatatctcaaaactatccat

SEQ ID NO: 682569 - DNA, 75 bp, synthetic construct
  source 1..75: mol_type = other DNA
aaaaaggcatcgttgaggaagggcataaaattaaaggcgctgccggttcagtggggttacgccatctgcaacagc

SEQ ID NO: 682570 - DNA, 75 bp, synthetic construct
  source 1..75: mol_type = other DNA
gaagagatgaacggcgttccggtggtgccgctgtacgatacgccgctttccggggttaaccgcctgataaaacgt

SEQ ID NO: 682571 - DNA, 75 bp, synthetic construct
  source 1..75: mol_type = other DNA
cgcgcgagtgaaaaaactggtccatcaactggcggacaccacctgttcggtgctgctgatccccgacgtctttac

SEQ ID NO: 682572 - DNA, 75 bp, synthetic construct
  source 1..75: mol_type = other DNA
gctggggtacctcattcgcgtgtctgagtggtgggagttcggaggagaaccgggaacatttaccgttgaagtcgg

SEQ ID NO: 682573 - DNA, 75 bp, synthetic construct
  source 1..75: mol_type = other DNA
ctataaaggcgcgatgggcttgtttcatgaagttgacgagcaacgtaccgctgaaaatcaacgcgaactgctggc

SEQ ID NO: 682574 - DNA, 75 bp, synthetic construct
  source 1..75: mol_type = other DNA
tggcgctgacaacgcaaagttgaaaaaatttatgacaatggattcaaagctgttcacggcattgatctcgatata

SEQ ID NO: 682575 - DNA, 75 bp, synthetic construct
  source 1..75: mol_type = other DNA
tgggaatcggcatctatattttatatagcgcgttacgcatggggtatgaggcggtacagtcattactggatcgcg

SEQ ID NO: 682576 - DNA, 75 bp, synthetic construct
  source 1..75: mol_type = other DNA
gctgatgtttactcaccggaagccgccgcaaaagtcattgaaaccgatgaaaaagtgttccgtcataatgtgtca

SEQ ID NO: 682577 - DNA, 75 bp, synthetic construct
  source 1..75: mol_type = other DNA
ttgccattgtggtacaaatggcggtaaccatggtgctgcatggtcaggtcgaaagcattgatgttattcgttcta

SEQ ID NO: 682578 - DNA, 75 bp, synthetic construct
  source 1..75: mol_type = other DNA
gccacctttgtcacggcgagcagcaacctggagctgggatttggtatcgccctggccgtagcgttgcacaatatt

SEQ ID NO: 682579 - DNA, 75 bp, synthetic construct
  source 1..75: mol_type = other DNA
gtggccaaaaattgaggcatttattacctggctaagagagcaggtatgtcagtcttgtcagtaactgggataccg

SEQ ID NO: 682580 - DNA, 75 bp, synthetic construct
  source 1..75: mol_type = other DNA
aaacatatcaacgactctaactatttgactgagaaagaaaaaaccaagtatgcgaaattagttagagcacaaata

SEQ ID NO: 682581 - DNA, 75 bp, synthetic construct
  source 1..75: mol_type = other DNA
gctaataactgaggtttttgtgacgattgcaatgcttattgttgtgcttgcaaaaaaagtccctatttttaaaag

SEQ ID NO: 682582 - DNA, 75 bp, synthetic construct
  source 1..75: mol_type = other DNA
atcatacagtattttatacttttgaccgattatggttttaacctatctgcaacacaaaaaatttcagttatatgt

SEQ ID NO: 682583 - DNA, 75 bp, synthetic construct
  source 1..75: mol_type = other DNA
gactgcttcgctcatgtgctgggttcccaatccagaagccgttcccatgaatatgacctgttggcaattctggtc

SEQ ID NO: 682584 - DNA, 75 bp, synthetic construct
  source 1..75: mol_type = other DNA
taggcacctcttcgatgcggccaatgaatattgttcggggcagaagatcgcaatccctgcctacagcacgctgca

SEQ ID NO: 682585 - DNA, 75 bp, synthetic construct
  source 1..75: mol_type = other DNA
cgcggtcgccaactggctggcaggcgtcgtggcacagcagacgacagagtcgcaaattagcggtatggcaattgc

SEQ ID NO: 682586 - DNA, 75 bp, synthetic construct
  source 1..75: mol_type = other DNA
ctcattgccctgaaaacaacattggtgtcggatgtaccgggccgcagacattgcgctccgtcatttgtgcggcac

SEQ ID NO: 682587 - DNA, 75 bp, synthetic construct
  source 1..75: mol_type = other DNA
gtggccaaaaattgaggcatttattacctggctaagagagcaggtatgtcagtcttgtcagtagctgagataccg

SEQ ID NO: 682588 - DNA, 75 bp, synthetic construct
  source 1..75: mol_type = other DNA
gtggccaaaaattgaggcatttattacctggctaagagagcaggtatgtcagtcttgtcagtatctgtgataccg

SEQ ID NO: 682589 - DNA, 75 bp, synthetic construct
  source 1..75: mol_type = other DNA
ctttctgatggatgaagaaatcttgccagtttgcagcccggagtacgctcatagacatgatttaaccaacacggt

SEQ ID NO: 682590 - DNA, 75 bp, synthetic construct
  source 1..75: mol_type = other DNA
accacattaccgggcaggcagtggccaaaaattgaggcatttattacttggttaagagaacaggtaaaaaccact

SEQ ID NO: 682591 - DNA, 75 bp, synthetic construct
  source 1..75: mol_type = other DNA
agttgggcgcaacattatgcggttaatttgccgacatcttcgggaattggctttgatcgttctgatttagctgtt

SEQ ID NO: 682592 - DNA, 75 bp, synthetic construct
  source 1..75: mol_type = other DNA
cctgaaggtctggcggttgcaggcccggtttacgcggcaacggggtctaaacgcaccgcgattctgtgggcgggg

SEQ ID NO: 682593 - DNA, 75 bp, synthetic construct
  source 1..75: mol_type = other DNA
gaagagatgaacggcgttccggtggtgccgctgtatgacacgccgctttccggggttaaccgcctgctaaaacgt

SEQ ID NO: 682594 - DNA, 75 bp, synthetic construct
  source 1..75: mol_type = other DNA
aactgggccaacgttgaatcccgtagcattagccactctattaatacacaaacgtttaccaaagaacttcataga

SEQ ID NO: 682595 - DNA, 75 bp, synthetic construct
  source 1..75: mol_type = other DNA
atcctttcttaaaccgagcgatacgttatacatcgttgctcatggcaacacatcagttattggatctggttcagc

SEQ ID NO: 682596 - DNA, 75 bp, synthetic construct
  source 1..75: mol_type = other DNA
atgattatttactttttcccatttcaaatggatgaaaatgacacttttcttgatgccgaagttaagtatcagaaa

SEQ ID NO: 682597 - DNA, 75 bp, synthetic construct
  source 1..75: mol_type = other DNA
cagtggcgcataacgaacagtatcgccagctcattgaaggctacatgctgcgccataaggtgaaaccgggcatta

SEQ ID NO: 682598 - DNA, 75 bp, synthetic construct
  source 1..75: mol_type = other DNA
tatcaatgtgctgactggcgggatgtcgattgtcggtccgcgtccgcatgcggtggcgcataacgaacagtatcg

SEQ ID NO: 682599 - DNA, 75 bp, synthetic construct
  source 1..75: mol_type = other DNA
attaaatgacttttacacttatgtatttggaaatatcaaacatgtctcatctattttagattttggttgtggctt

SEQ ID NO: 682600 - DNA, 75 bp, synthetic construct
  source 1..75: mol_type = other DNA
gtgcatataataagccatcccggaaatccgaaatatgaaatagatgttaaagccgttgctgaagcagctgcgaaa

SEQ ID NO: 682601 - DNA, 75 bp, synthetic construct
  source 1..75: mol_type = other DNA
ggcgctggagccggaagcactggagatggcagacagtcagggcgtggaggcggcgctgggctggatacagacccg

SEQ ID NO: 682602 - DNA, 75 bp, synthetic construct
  source 1..75: mol_type = other DNA
acaaagcgaccaatacacaagcgatgatcgccactatcgccagcggcaatgtgcatataataagtcatcccggaa

SEQ ID NO: 682603 - DNA, 75 bp, synthetic construct
  source 1..75: mol_type = other DNA
acgcggttttgatattcatactcacaacgcttatcggtctgtcggcagtcaatcaaagtcgcgtaagaaggaaat

SEQ ID NO: 682604 - DNA, 75 bp, synthetic construct
  source 1..75: mol_type = other DNA
tgattccgcagcaagttgaaaacctgttggtttgcggacgggcaatcgatgcagataatttcgcctacgcgacaa

SEQ ID NO: 682605 - DNA, 75 bp, synthetic construct
  source 1..75: mol_type = other DNA
gggatacattcgagaaccccagccttcgcacaacggctgaaagaaattatgaatgaacatgggtatcatagtctg

SEQ ID NO: 682606 - DNA, 75 bp, synthetic construct
  source 1..75: mol_type = other DNA
atgtacaaacaagctgttattctcctactgatgctgtttaccgcaagcgtcagtgccgcattacctgctcattat

SEQ ID NO: 682607 - DNA, 75 bp, synthetic construct
  source 1..75: mol_type = other DNA
tcgtgatgtatttgatttccagtcacatactcattttttgcatcggatagatggttaccgtcggcctatattact

SEQ ID NO: 682608 - DNA, 75 bp, synthetic construct
  source 1..75: mol_type = other DNA
aagcaacggcgtttattatcacctcgcgcatcaaacgtcatccgcagaaatgggacccgaaatcgctacagttta

SEQ ID NO: 682609 - DNA, 75 bp, synthetic construct
  source 1..75: mol_type = other DNA
ttaagtttgattaccaggaatatcccggcctgaaccatgaaatggatgtctggcggcctgcctatgcagccttcg

SEQ ID NO: 682610 - DNA, 75 bp, synthetic construct
  source 1..75: mol_type = other DNA
atgcaatcctggtatttactgtactgcaagcgcgggcaacttcaacgtgcccaggaacacctcgaaagacaggcg

SEQ ID NO: 682611 - DNA, 75 bp, synthetic construct
  source 1..75: mol_type = other DNA
tagatgtatccagagactggagattaaaaaatactgatgatatgtctttttattcatcgaaaaaaaaaggaataa

SEQ ID NO: 682612 - DNA, 75 bp, synthetic construct
  source 1..75: mol_type = other DNA
ctgctgatgctgtttaccgcaagcgttagtgccgcgttacctgcccgttatatgcaaaccatcgaaaatgctgcg

SEQ ID NO: 682613 - DNA, 75 bp, synthetic construct
  source 1..75: mol_type = other DNA
gcgcattttgaatgtttctccgcgccgcttgctgagtttccttgaatctcgcggtatgtcgccgattgcggaatt

SEQ ID NO: 682614 - DNA, 75 bp, synthetic construct
  source 1..75: mol_type = other DNA
atgaagaataaagaatgttatggtgtgaaagcttcacacaaaacacctttatcctttcttcaaccgagcgatacg

SEQ ID NO: 682615 - DNA, 75 bp, synthetic construct
  source 1..75: mol_type = other DNA
ggggatacgcgacactgagcatggcgcagctggaaggttacgtgaagaataagatcaatctccctgcgcgagcgg

SEQ ID NO: 682616 - DNA, 75 bp, synthetic construct
  source 1..75: mol_type = other DNA
caccacattttacgcgatgaagaaaatacccgttttcgccacacttcgaccactacctcggtacgtgcatttaat

SEQ ID NO: 682617 - DNA, 75 bp, synthetic construct
  source 1..75: mol_type = other DNA
ggacaaatcctcgctgtagaaccaggggccgccagttactacgagtttaattttggtttcggcaaagggttcatc

SEQ ID NO: 682618 - DNA, 75 bp, synthetic construct
  source 1..75: mol_type = other DNA
cccgcctggatattgaagtgaatggctttaacggcggtgttctgaacggtgttccttctgcatatcactggtata

SEQ ID NO: 682619 - DNA, 75 bp, synthetic construct
  source 1..75: mol_type = other DNA
atctggggtaacgaggatgtatcggtgtggtggaaccgtctgtgtgacaacgtactgccggaaaaaaccatgccg

SEQ ID NO: 682620 - DNA, 75 bp, synthetic construct
  source 1..75: mol_type = other DNA
gatgctgcatgaactctggctgcagagcggtactggacagcgtcgctgggaaggattaccggacgatgtcaggga

SEQ ID NO: 682621 - DNA, 75 bp, synthetic construct
  source 1..75: mol_type = other DNA
atggcggtgcactgaacgatgttccttctgcatatcactggtatacagaacggtatggcgtgaagtggcctgtgg

SEQ ID NO: 682622 - DNA, 75 bp, synthetic construct
  source 1..75: mol_type = other DNA
aaagcgacgttattgcagaattaagccgccgtttcagttgcacactggagcactggtatgccgagcagggctgca

SEQ ID NO: 682623 - DNA, 75 bp, synthetic construct
  source 1..75: mol_type = other DNA
agcttatccacagcattttgtgcacggttctgtggacaaaatacctggttacccaggccgcatgtgagaggagaa

SEQ ID NO: 682624 - DNA, 75 bp, synthetic construct
  source 1..75: mol_type = other DNA
cgacagatgacgatgagctgccggaagtcaccggacctgcgtggatagtctacaaggtggcgcattacggtggat

SEQ ID NO: 682625 - DNA, 75 bp, synthetic construct
  source 1..75: mol_type = other DNA
gctcagtcatgccgaccaacctgtacgggccacacgacaacttccacccgagtaattcgcatgtgatcccagcat

SEQ ID NO: 682626 - DNA, 75 bp, synthetic construct
  source 1..75: mol_type = other DNA
aaccgccagtacggacgcgattaccgctcggtcatgccgaccaacctgtatggcccgcatgacaacttccacccg

SEQ ID NO: 682627 - DNA, 75 bp, synthetic construct
  source 1..75: mol_type = other DNA
accatcaccgtgcatttcaccgccaaaagaggtgactggtgtggcttctggagtaacgaggatgtatcggtgtgg

SEQ ID NO: 682628 - DNA, 75 bp, synthetic construct
  source 1..75: mol_type = other DNA
atgctgcatgaactctggctgcagagtggtactggccagcgtcgctgggaaggattaccggacgatgtcagggat

SEQ ID NO: 682629 - DNA, 75 bp, synthetic construct
  source 1..75: mol_type = other DNA
acgaggatgtatcggtgtggtggaaccgtctgtgtgacaatgtactgccggaaaaaaccatgccgtttgacctgc

SEQ ID NO: 682630 - DNA, 75 bp, synthetic construct
  source 1..75: mol_type = other DNA
tgtatttttctggtgaacccgcacagatcgctgagattaaacgactggccagcggtgcagtcacaccgctttatc

SEQ ID NO: 682631 - DNA, 75 bp, synthetic construct
  source 1..75: mol_type = other DNA
catgaactctggctgcagagtggtactggccagcgtcgctgggaaggattaccggatgaggtcagagaaaccatc

SEQ ID NO: 682632 - DNA, 75 bp, synthetic construct
  source 1..75: mol_type = other DNA
gcaaactgcgggcacattaacgctgcttcctgtcgcgctacgtgcatctgtaactgtgggtcaattagcggttga

SEQ ID NO: 682633 - DNA, 75 bp, synthetic construct
  source 1..75: mol_type = other DNA
gcggacaaaatttggtattgccgaaccgcgcattctggtctgcgggctgaatccgcacgcgggcgaaggcggtca

SEQ ID NO: 682634 - DNA, 75 bp, synthetic construct
  source 1..75: mol_type = other DNA
gacgcttggatcacctgccgaagttgcagccagcgccaccaatgcaatggtgcgtgaactgtcgatcgccacagt

SEQ ID NO: 682635 - DNA, 75 bp, synthetic construct
  source 1..75: mol_type = other DNA
actcgtacctgtcgccgctgcggtgaaatcctacagcagcctcgaagacgcgatgaagggcgtagccaaacaggt

SEQ ID NO: 682636 - DNA, 75 bp, synthetic construct
  source 1..75: mol_type = other DNA
ttgtcagaaagcctgggtaagattgcaggcctgtacaaagtaccaatacagaatattggcgaattaggcgacgcc

SEQ ID NO: 682637 - DNA, 75 bp, synthetic construct
  source 1..75: mol_type = other DNA
atggttaaaacccaacgtgttgtgatcactcccggcgagcccgccgggattggcccggacttagttgtccagctt

SEQ ID NO: 682638 - DNA, 75 bp, synthetic construct
  source 1..75: mol_type = other DNA
cattaacgtcggcacgggcgttgactgcaccatccgtgaactggcgcaaaccatcgccaaagtggtgggttacaa

SEQ ID NO: 682639 - DNA, 75 bp, synthetic construct
  source 1..75: mol_type = other DNA
aaaccggatggtacgccgcgcaaactgcttgatgtgacgcgcctgcatcagcttggctggtatcacgaaatctca

SEQ ID NO: 682640 - DNA, 75 bp, synthetic construct
  source 1..75: mol_type = other DNA
acgcgggcgaaggcggtcatatgggtacggaagagatagacaccattattccggtgctcgacgagctgcgggcgc

SEQ ID NO: 682641 - DNA, 75 bp, synthetic construct
  source 1..75: mol_type = other DNA
cacatcagtggaccacggcaccgcacttgaactggcgggacgtggcgaagccgatgtcggcagttttattacggc

SEQ ID NO: 682642 - DNA, 75 bp, synthetic construct
  source 1..75: mol_type = other DNA
ccgcgcattctggtctgcgggctgaatccgcacgcgggcgaaggcggtcatatgggtacggaagagatagacacc

SEQ ID NO: 682643 - DNA, 75 bp, synthetic construct
  source 1..75: mol_type = other DNA
aaccagaattcataaggctgcgcaactgcgcggcctttttcgtattgcgggctgtagtcttcctcctgccattgt

SEQ ID NO: 682644 - DNA, 75 bp, synthetic construct
  source 1..75: mol_type = other DNA
gattatgttgctcatctcattaatggagatgcttcctgccgcattagccgccgaagggatgtcgcctgtgctggg

SEQ ID NO: 682645 - DNA, 75 bp, synthetic construct
  source 1..75: mol_type = other DNA
tgtgctggcgtggttaatcctcggtagcatgatttccccggtggtcatggcggcaatcatggcggcggttgcagg

SEQ ID NO: 682646 - DNA, 75 bp, synthetic construct
  source 1..75: mol_type = other DNA
gcgcttgatcgggccagaacggcgtcccttcaggccacgccccatgacgggcgttattttttcgactatccgcgt

SEQ ID NO: 682647 - DNA, 75 bp, synthetic construct
  source 1..75: mol_type = other DNA
gcgtggagagcttgttgatgtgctgtggggggaactggaatggtcttccccgacagatgatgatgagctgccgga

SEQ ID NO: 682648 - DNA, 75 bp, synthetic construct
  source 1..75: mol_type = other DNA
aaaaatatagccaataagggggatgcttatgggcaaagtattacagccagtgagttgcgatggatttatcgtaat

SEQ ID NO: 682649 - DNA, 75 bp, synthetic construct
  source 1..75: mol_type = other DNA
gtggagcggtaaaaactgatgcaggaaaatggagtaaaagtaaagttgataactcaactccaatcattatgaaag

SEQ ID NO: 682650 - DNA, 75 bp, synthetic construct
  source 1..75: mol_type = other DNA
ttttaatactgggtcattgataattagaaataatatagcaatgaacaatgcacgctataattatattttaagaac

SEQ ID NO: 682651 - DNA, 75 bp, synthetic construct
  source 1..75: mol_type = other DNA
agcaatgctggtaagaaagttgtctggttacccttctggacacccaatattacaggctctgacggagtataatcg

SEQ ID NO: 682652 - DNA, 75 bp, synthetic construct
  source 1..75: mol_type = other DNA
atggcatggcgcagatctccgatcgaagctatgaacacctgagtacggtgcaggccaactatatccggcctgaaa

SEQ ID NO: 682653 - DNA, 75 bp, synthetic construct
  source 1..75: mol_type = other DNA
gtaacggcgctggggacggacagttttagtcagcagatgctggacgcctggcacggcgagaacgtcgatacttcc

SEQ ID NO: 682654 - DNA, 75 bp, synthetic construct
  source 1..75: mol_type = other DNA
gtcaacagccggtggaagacgtcattgcgcgcacccataacgcgggcgtgaaagaagtggtggtgaaacgcgggg

SEQ ID NO: 682655 - DNA, 75 bp, synthetic construct
  source 1..75: mol_type = other DNA
ccaccgcagctggcgactctttcagtgccggttatctggcggtacgcctgactggcggcaatgcagaagacgccg

SEQ ID NO: 682656 - DNA, 75 bp, synthetic construct
  source 1..75: mol_type = other DNA
actatccgtcatcacgcaaaaagaggtgactggtgtgacatctgggtaacgaggatgtatcgtgtggtggacctc

SEQ ID NO: 682657 - DNA, 75 bp, synthetic construct
  source 1..75: mol_type = other DNA
cgctcaccgtgctcactggtaatgacaatgtcaatttgcaacgtgccggaatcgatttggcgatctactttgatg

SEQ ID NO: 682658 - DNA, 75 bp, synthetic construct
  source 1..75: mol_type = other DNA
aatcagctggaagaagaattgggcattcagttgtttgtccgttcccatcgcaaagtggaattaacgcacgagggg

SEQ ID NO: 682659 - DNA, 75 bp, synthetic construct
  source 1..75: mol_type = other DNA
gatgtatcggtgtggtggaaccgtctgtgtgacaacgtactgccggaaaaaaccatgccgtttgacctgctgacg

SEQ ID NO: 682660 - DNA, 75 bp, synthetic construct
  source 1..75: mol_type = other DNA
cgcccgtttcttttccgacaaaggatgtcgccgtgctcctctttttactgcgccggctgacgcggcgcggcataa

SEQ ID NO: 682661 - DNA, 75 bp, synthetic construct
  source 1..75: mol_type = other DNA
tggggggaactggaatgctcttccccgacagatgacgatgagctgccggaagtcaccggacctgcgtggatagtc

SEQ ID NO: 682662 - DNA, 75 bp, synthetic construct
  source 1..75: mol_type = other DNA
atcaaaactgcatacttttgaagtggctgccaggcatcagtccttcgccctggcggcagaggaattgtcgctgag

SEQ ID NO: 682663 - DNA, 75 bp, synthetic construct
  source 1..75: mol_type = other DNA
tgcactatccgtgagctggcgcaaaccatcgccaaagtggtgggttacaaaggtcgggtggtttttgatgccagc

SEQ ID NO: 682664 - DNA, 75 bp, synthetic construct
  source 1..75: mol_type = other DNA
gggtatcgggcgacgacggtggtgtttgtttccgataccgtggcgcttagcaaagtgtcaggcaaagagcttctg

SEQ ID NO: 682665 - DNA, 75 bp, synthetic construct
  source 1..75: mol_type = other DNA
gatttctgtggctggcagttgtatgagcgcggagagctcgttgatgtgctgtggggggaactggaatggtcttcc

SEQ ID NO: 682666 - DNA, 75 bp, synthetic construct
  source 1..75: mol_type = other DNA
gctgtttctggccggaagtgccggacttctgcagaccactgaagatgtgcggtttgaaccatgtcccggactgac

SEQ ID NO: 682667 - DNA, 75 bp, synthetic construct
  source 1..75: mol_type = other DNA
cagtatggcgtgaagtggcctgtggggtatgaggtgaatatcagtagtcagggagacaacttcattcaggttgat

SEQ ID NO: 682668 - DNA, 75 bp, synthetic construct
  source 1..75: mol_type = other DNA
ggctgccggacgtggtgttgtatcgccggagaatatcgcgttcacccgctggctgacgcacctgcagaacggtgt

SEQ ID NO: 682669 - DNA, 75 bp, synthetic construct
  source 1..75: mol_type = other DNA
ccgcaccagctactggccggattaatgtccgccactcaggattgccagcaggcgacgcgcgcctttgccgaaaaa

SEQ ID NO: 682670 - DNA, 75 bp, synthetic construct
  source 1..75: mol_type = other DNA
cccgaccaaacgtactcacatggcggtgcatccgatgggcaaaccagcggtgactcactatcgcatcatggaaca

SEQ ID NO: 682671 - DNA, 75 bp, synthetic construct
  source 1..75: mol_type = other DNA
tgaagtttggcctgaaagcaaagaattgctaccaaaagaagcagataaagcaagtacagcacttcctgctttacg

SEQ ID NO: 682672 - DNA, 75 bp, synthetic construct
  source 1..75: mol_type = other DNA
aagaaaactgaggaagtggatcagttatcatccaagttggtagctataagtgaagaacttgaaaagatgggatgt

SEQ ID NO: 682673 - DNA, 75 bp, synthetic construct
  source 1..75: mol_type = other DNA
catcatcgtcattaataaaccgcgcgacctggtggttcatcctggcgcgggtaacccggatggcacggtactgaa

SEQ ID NO: 682674 - DNA, 75 bp, synthetic construct
  source 1..75: mol_type = other DNA
ccggtttatggtggccgtccgcgtccgccaaaaggtgcttcggaagcgtttatctccacgctgcgtaagtttgac

SEQ ID NO: 682675 - DNA, 75 bp, synthetic construct
  source 1..75: mol_type = other DNA
cggtggacgagccaatcagccgccatcccaccaaacgcacccatatggcggtgcatccgatgggcaaaccagcgg

SEQ ID NO: 682676 - DNA, 75 bp, synthetic construct
  source 1..75: mol_type = other DNA
acctattttgtcagggcgattggcaactcaatgactgatattggcctctattccggcgatctgatggtcgtggat

SEQ ID NO: 682677 - DNA, 75 bp, synthetic construct
  source 1..75: mol_type = other DNA
atgttcgctttgattaatcagggacaactgtataccgacagtgccggttacccggtaaaaattattcgctgcata

SEQ ID NO: 682678 - DNA, 75 bp, synthetic construct
  source 1..75: mol_type = other DNA
ggatacattgactgaaattaacgagttgaataattacctgactcgcgacggttttttgctcaccatgacggatga

SEQ ID NO: 682679 - DNA, 75 bp, synthetic construct
  source 1..75: mol_type = other DNA
tgaggaacttcaaaagctgggatgttcattttactcatgcgatgtccgttcaagttcgatttatcttactgtctc

SEQ ID NO: 682680 - DNA, 75 bp, synthetic construct
  source 1..75: mol_type = other DNA
tgttgaaatacgacgacgagctgcgtcagttgggcattcggtggatggcagaagaagccatcaagtttgtcgata

SEQ ID NO: 682681 - DNA, 75 bp, synthetic construct
  source 1..75: mol_type = other DNA
gcgtttttccctgaagtaaacaatgcaatcaaaaagcggcttgaaactaaaaccctgaaacgccgagactgggcc

SEQ ID NO: 682682 - DNA, 75 bp, synthetic construct
  source 1..75: mol_type = other DNA
catcgaaatggaatggcatgcgcctatcccacaagatatggtggaactggttgaggcgatgcgtgcggattttga

SEQ ID NO: 682683 - DNA, 75 bp, synthetic construct
  source 1..75: mol_type = other DNA
agacatggcgtttttacagcatatgtttcatcacctggaagatgacggcactatggcagtggttctgcctcatgg

SEQ ID NO: 682684 - DNA, 75 bp, synthetic construct
  source 1..75: mol_type = other DNA
gacaaactaagctttaacctgagcgaagcgagttccgacattctgggggatgcctatgagtacctgatcggccaa

SEQ ID NO: 682685 - DNA, 75 bp, synthetic construct
  source 1..75: mol_type = other DNA
ggattggtaatatcaactacggcctgaccatgcgttatctcggcatgtcgatggggattggtatcgccattggta

SEQ ID NO: 682686 - DNA, 75 bp, synthetic construct
  source 1..75: mol_type = other DNA
cggagatcgataagaccattgctggattctgtaaggaactaggaattgataagccgtttgtgttggctgaggggg

SEQ ID NO: 682687 - DNA, 75 bp, synthetic construct
  source 1..75: mol_type = other DNA
agcagctgaactgtattgacgccgtcatcggcctgcctgccaatatattctacggcacaagtatcccaacctgtg

SEQ ID NO: 682688 - DNA, 75 bp, synthetic construct
  source 1..75: mol_type = other DNA
agatatggcatttgtgcagcatatgttttatcacctggaagatgacggtaccatggctgtggtgctgccgcatgg

SEQ ID NO: 682689 - DNA, 75 bp, synthetic construct
  source 1..75: mol_type = other DNA
tcgcactattaatagaatagtgtatgaaaaaggattatcgatcgaagaaagtataaaggctggtaaatattccca

SEQ ID NO: 682690 - DNA, 75 bp, synthetic construct
  source 1..75: mol_type = other DNA
attagtcatcaagagcgactggctgaattattagaacaaagcaatcagcttaaactgcgaacacaagaaattatt

SEQ ID NO: 682691 - DNA, 75 bp, synthetic construct
  source 1..75: mol_type = other DNA
attggtcatatgaccgctggcggtacggtggatgagccaatcagtcgccacccgaccaaacgtactcacatggcg

SEQ ID NO: 682692 - DNA, 75 bp, synthetic construct
  source 1..75: mol_type = other DNA
aaacacatgaatacccgtgccatgttcgacaatcacaatttcatgaaaatcatgatgatgttcaggaaaatccgc

SEQ ID NO: 682693 - DNA, 75 bp, synthetic construct
  source 1..75: mol_type = other DNA
gtgctggcggtaatgtgcggcattttctctgccgggatgtcttttgcgatgaacgccgcaaaaccgatgcatgaa

SEQ ID NO: 682694 - DNA, 75 bp, synthetic construct
  source 1..75: mol_type = other DNA
gagcgcttcttcaggagtctgaaaaacgagtggataccggtgacgggttacatgaacttcagcgatgctgcccat

SEQ ID NO: 682695 - DNA, 75 bp, synthetic construct
  source 1..75: mol_type = other DNA
tccgcccgtttatcccgcccgttgttgatggcaaattgtggcaggattatccgacatcagtgttagccagcgacc

SEQ ID NO: 682696 - DNA, 75 bp, synthetic construct
  source 1..75: mol_type = other DNA
caggcgggggcgacgccggtctatctggaagcttcacgcaacccgtttggtttcattggcggtattgatgcgcac

SEQ ID NO: 682697 - DNA, 75 bp, synthetic construct
  source 1..75: mol_type = other DNA
tgagaacggcattgtgccggagaagtgcgatctcaactccattctgttcttattaactccggcggaaagccacga

SEQ ID NO: 682698 - DNA, 75 bp, synthetic construct
  source 1..75: mol_type = other DNA
ggcgcgtttacactggctggcaacgttgctgatggatgcgctaaaacgccatcatggtgctgcgcaggtgaccaa

SEQ ID NO: 682699 - DNA, 75 bp, synthetic construct
  source 1..75: mol_type = other DNA
catcagtgaattcaacaaccagtttgaacatattgatcaccaggaataccgacaaatactggcagaaacagagca

SEQ ID NO: 682700 - DNA, 75 bp, synthetic construct
  source 1..75: mol_type = other DNA
tgctcctgttcatctgttttctttttcttcctgcacacacgaaggctaccgtgcagccatcaacgagaatgtgtt

SEQ ID NO: 682701 - DNA, 75 bp, synthetic construct
  source 1..75: mol_type = other DNA
caatggctcattttgggcgctgtaattgcgatcattatgtttggcgggattattcgtaactctgtcgctgcatat

SEQ ID NO: 682702 - DNA, 75 bp, synthetic construct
  source 1..75: mol_type = other DNA
agaacaaacaccacaggcgttgtgggggatctgcctgttaatgacgatcattcccgcgatacttaacctgattac

SEQ ID NO: 682703 - DNA, 75 bp, synthetic construct
  source 1..75: mol_type = other DNA
atgaaactgacaataaatgaaaagataggttttggtgccggtgatatggctattgcgatagtaatgatgtcttta

SEQ ID NO: 682704 - DNA, 75 bp, synthetic construct
  source 1..75: mol_type = other DNA
tccagaaagagctctcgaagatgggtcacgggtacaacctgaacgaaatcaaggaagcaatccaggtttgtcgtg

SEQ ID NO: 682705 - DNA, 75 bp, synthetic construct
  source 1..75: mol_type = other DNA
atggaccaccagctagaaagtatcgacggaacaatcatgagcaagagaaccaaagacaaagacctggagaaactc

SEQ ID NO: 682706 - DNA, 75 bp, synthetic construct
  source 1..75: mol_type = other DNA
ttactcgtctctatgacaaaataaaaatatttcgttatacccaattactggcgttcgtggtgggtggtgcgatgt

SEQ ID NO: 682707 - DNA, 75 bp, synthetic construct
  source 1..75: mol_type = other DNA
ttgctgatggatgcgctaaaacgccatcatggtgctgcgcaggtgaccaatgttgatgtgccgggcctggtcgcc

SEQ ID NO: 682708 - DNA, 75 bp, synthetic construct
  source 1..75: mol_type = other DNA
atgtgtaacgctgacgtaaaattgggcgatctgcttattcatgaaggatcggcgaaagatgcgcagaaattcgca

SEQ ID NO: 682709 - DNA, 75 bp, synthetic construct
  source 1..75: mol_type = other DNA
gctgttcgccgcgctggacgttaacgccaaaattcatgaaggggagagtgggcgtcggctgtgggctgagtgcgt

SEQ ID NO: 682710 - DNA, 75 bp, synthetic construct
  source 1..75: mol_type = other DNA
tgagtgaatctcaggcgcagcgccttgcgaacgccgggctggattactacaaccacaacctcgacacctcgccgg

SEQ ID NO: 682711 - DNA, 75 bp, synthetic construct
  source 1..75: mol_type = other DNA
gaacaacagcagcgtctggagcaggcactgatgaccccggacactgacgaatattacaacgcggcagcactatga

SEQ ID NO: 682712 - DNA, 75 bp, synthetic construct
  source 1..75: mol_type = other DNA
ggcgaattggcacggctttgaaggatatgccgcggatcagtattttgttgatccgtgcaagctgttactcactac

SEQ ID NO: 682713 - DNA, 75 bp, synthetic construct
  source 1..75: mol_type = other DNA
tgttgatgttccgggtgtcgttatctcgctggcaaatcgtctttctccctcgcgcctgcaagctatgctggggga

SEQ ID NO: 682714 - DNA, 75 bp, synthetic construct
  source 1..75: mol_type = other DNA
atgtcagttgatgcaggctggcacgcatcccgattactacaccctggctcccgaaaaaggaaaaatacgctgggc

SEQ ID NO: 682715 - DNA, 75 bp, synthetic construct
  source 1..75: mol_type = other DNA
gaactggcaaaccatctttctccctcgcgcctgcaggctatactgggggatgtttgccacattcgtgaacagtta

SEQ ID NO: 682716 - DNA, 75 bp, synthetic construct
  source 1..75: mol_type = other DNA
ctggctttcatctactgcgttgctacacagtttgtctttgacacgtcagcggggaattttccgtcactggtcgct

SEQ ID NO: 682717 - DNA, 75 bp, synthetic construct
  source 1..75: mol_type = other DNA
ttgcgctggcctgccatgatgcgactcacttgcatcggcactctggcacagttcgcgctcctgctgatcgctttt

SEQ ID NO: 682718 - DNA, 75 bp, synthetic construct
  source 1..75: mol_type = other DNA
cggcgagtttgatgcggccagcgcccgaatttgctggcgctgggcactacctggctggagcgcattaacggcggg

SEQ ID NO: 682719 - DNA, 75 bp, synthetic construct
  source 1..75: mol_type = other DNA
gctgtccccaaccttgcaaatgaccgctgtgaattttcaccttatcgcctggcaacagtggcacgacattattca

SEQ ID NO: 682720 - DNA, 75 bp, synthetic construct
  source 1..75: mol_type = other DNA
ttccggcactttcccaccaggaggtggggggctgggggggggggtttctgcggggggaatatttggccggtggcc

SEQ ID NO: 682721 - DNA, 75 bp, synthetic construct
  source 1..75: mol_type = other DNA
aacatgcccagtgcacaggatttacatgctgtccggttacagaccgcagaaaccaatggtgaagtgaaagcgatg

SEQ ID NO: 682722 - DNA, 75 bp, synthetic construct
  source 1..75: mol_type = other DNA
gtcgctggtatcgacctttcggttggcgcgattctggcgctttccggtatggtgaccgccaaactgatgttggca

SEQ ID NO: 682723 - DNA, 75 bp, synthetic construct
  source 1..75: mol_type = other DNA
aaaagttcagtttgacgagcacggaattacgattggtaaatatattcatatagataagcgtcgttgccagcgttg

SEQ ID NO: 682724 - DNA, 75 bp, synthetic construct
  source 1..75: mol_type = other DNA
ctgtttaattattgcggtgataatccgttttatcaggcgttaaataaagagttacagattaaaagacgtcgtgta

SEQ ID NO: 682725 - DNA, 75 bp, synthetic construct
  source 1..75: mol_type = other DNA
gtaagagacattcgacttggtagcgcagaatcaatatcagcatggcgaggccctggttactgggatacttctgga

SEQ ID NO: 682726 - DNA, 75 bp, synthetic construct
  source 1..75: mol_type = other DNA
acggtaaacaaggctggtaacgccgttcagcgttccggtgataaaatgaccggagaactgaaaattggcacggtg

SEQ ID NO: 682727 - DNA, 75 bp, synthetic construct
  source 1..75: mol_type = other DNA
cggtgaagccacgacccagctgccgtttgtggtggcgctgtttactgccatcaaaaacgatccgcaactgtgcca

SEQ ID NO: 682728 - DNA, 75 bp, synthetic construct
  source 1..75: mol_type = other DNA
aggccgggaaacgctaccttattgcccctgagcttctgaaaaccattgcacagcaggaaagcagtctggtcgcca

SEQ ID NO: 682729 - DNA, 75 bp, synthetic construct
  source 1..75: mol_type = other DNA
atgagtagaaataacgaaacaagcggcgttgaactggttgtcgtcggcgtatttgctttctgtctggcagttgtt

SEQ ID NO: 682730 - DNA, 75 bp, synthetic construct
  source 1..75: mol_type = other DNA
gtgcgccagcgtgtctttcagactgggtgcagcactttcgaagcaattcaatactattgctctaaaaaacaataa

SEQ ID NO: 682731 - DNA, 75 bp, synthetic construct
  source 1..75: mol_type = other DNA
agccgatcttgattactactggttacaggaacgtggaagcatgtgtcagccagtgtacatggtacttgatagaac

SEQ ID NO: 682732 - DNA, 75 bp, synthetic construct
  source 1..75: mol_type = other DNA
gcaggacaagccgcgcgctgatgcgattatggcgcttcatgaacataacgactatcagccgctgttacgtgcaat

SEQ ID NO: 682733 - DNA, 75 bp, synthetic construct
  source 1..75: mol_type = other DNA
atgaaacaggcaggccacatctatcagagaattgatggtagtcagtggcgacatatttggctggtgggtgatatt

SEQ ID NO: 682734 - DNA, 75 bp, synthetic construct
  source 1..75: mol_type = other DNA
tgtctatttaaataaaatattaaaaagaaatagcgatatagttaatgaagtttacggtgagtcaaatgttaaaag

SEQ ID NO: 682735 - DNA, 75 bp, synthetic construct
  source 1..75: mol_type = other DNA
tgaccatagagcaggaacgcccgaaggttccgccggagcttactgcagcctttgaaaactttatggatatgcaca

SEQ ID NO: 682736 - DNA, 75 bp, synthetic construct
  source 1..75: mol_type = other DNA
gtcagtcgagtacttatcgacaggctggagccagtgtttcagggggcattgtcgcctggtcgggtggcgttaatc

SEQ ID NO: 682737 - DNA, 75 bp, synthetic construct
  source 1..75: mol_type = other DNA
actatcagccgctgttacgtgcaatggcaaacgtgccttgtatcgatgttggtacggctaaaagcatccttagca

SEQ ID NO: 682738 - DNA, 75 bp, synthetic construct
  source 1..75: mol_type = other DNA
ggaaagccacagccgtcgccccaagcgttcaccatcaacgaaaaccggcacttgcgaagtcgctctgattctgga

SEQ ID NO: 682739 - DNA, 75 bp, synthetic construct
  source 1..75: mol_type = other DNA
agaaaccagcgcctttatcgaacggcgtggcagatatcagtcagcatatggccgcgctggcgctggaacaggaaa

SEQ ID NO: 682740 - DNA, 75 bp, synthetic construct
  source 1..75: mol_type = other DNA
gaaaccagcgcctttatcgaacgcgtggcagatatcagtcagcatatggccgcgctggcgctggaacaggaaaaa

SEQ ID NO: 682741 - DNA, 75 bp, synthetic construct
  source 1..75: mol_type = other DNA
tgaaagaattactgatttatatattccgatcccaccataccaagagcaaataaatatcggaacttatatatctaa

SEQ ID NO: 682742 - DNA, 75 bp, synthetic construct
  source 1..75: mol_type = other DNA
gcgctgggtgagcacagcgtatcagtgggcctttgtggacagtggcttccttgactgggtccggcagcagtatgc

SEQ ID NO: 682743 - DNA, 75 bp, synthetic construct
  source 1..75: mol_type = other DNA
atcgccttcttctggccggaagccggggcggcgcacagtgaagcggttatgaacaccgagctggggtggctgtcc

SEQ ID NO: 682744 - DNA, 75 bp, synthetic construct
  source 1..75: mol_type = other DNA
ccaggtggattatttgcaacacatcgaagaactggcggcgttaatcaagggacttggcgatgttccggtacgcct

SEQ ID NO: 682745 - DNA, 75 bp, synthetic construct
  source 1..75: mol_type = other DNA
cgcaaactcgattttctacggttgcaaactgctgaccacgccgaatccggaagaagataaagacctgcaactgtt

SEQ ID NO: 682746 - DNA, 75 bp, synthetic construct
  source 1..75: mol_type = other DNA
cgcgaatgccgggctggattactacaaccacaaccttgatacctcgccggagttttacggcaacatcatcactac

SEQ ID NO: 682747 - DNA, 75 bp, synthetic construct
  source 1..75: mol_type = other DNA
ccaggagatgcgcgaccccgcctccctcgaactggtgcaaagccgcctgcaaatcctctttccttgtgccaaaaa

SEQ ID NO: 682748 - DNA, 75 bp, synthetic construct
  source 1..75: mol_type = other DNA
gatatcggccagtcgatcagccgctgcatgaaccaggtcaccagcctggaacatcagcaatccgcccgcgcgtta

SEQ ID NO: 682749 - DNA, 75 bp, synthetic construct
  source 1..75: mol_type = other DNA
catcacctacttaatgccgtttaaacagccggtcggcctgatggcgggcgcgcgcgtcttcccggaagaaaaagc

SEQ ID NO: 682750 - DNA, 75 bp, synthetic construct
  source 1..75: mol_type = other DNA
atgagtttacctgcaggctgttaccggattgacccggacatccgtgcactggtgtccgcgatgaacgtgcatgga

SEQ ID NO: 682751 - DNA, 75 bp, synthetic construct
  source 1..75: mol_type = other DNA
gcttcagcccgacacccctcattactggtataaccggtattgtcgtcactcgttatgtgccgatttcagaacact

SEQ ID NO: 682752 - DNA, 75 bp, synthetic construct
  source 1..75: mol_type = other DNA
ttgcactcattcttgttagcagcagtatggtatcctccgctgccacaaaagaaatctcaaaaacagcttatgtct

SEQ ID NO: 682753 - DNA, 75 bp, synthetic construct
  source 1..75: mol_type = other DNA
aaacagaatggagacggtattcttgatgtttatgctaatagtcagcgtgtattccgctttcagaatggagtggct

SEQ ID NO: 682754 - DNA, 75 bp, synthetic construct
  source 1..75: mol_type = other DNA
ttcgttcaaggagaaacattctgctgatttttttgtgaggttgtatgtgcggcaggagatgatgagtgatgcgta

SEQ ID NO: 682755 - DNA, 75 bp, synthetic construct
  source 1..75: mol_type = other DNA
gacgctggtgggacatcggctgcaccgctacccgcatgggcagaagagaagggcggcaaaattctcactgcgggc

SEQ ID NO: 682756 - DNA, 75 bp, synthetic construct
  source 1..75: mol_type = other DNA
ctggtttcgcgaccgcgggcatcacgtcttactgctggtggattccctgacccgctacgcgatggcgcagcggga

SEQ ID NO: 682757 - DNA, 75 bp, synthetic construct
  source 1..75: mol_type = other DNA
agctctattgttcttggtgataatgacaccggattcaaacagaatggtgatggtattctggatgtttacgctaat

SEQ ID NO: 682758 - DNA, 75 bp, synthetic construct
  source 1..75: mol_type = other DNA
cgcgccagattttcaacggagggatcaccggggcactgacagggaacgccgacaccgcgacgaaattgaaaacag

SEQ ID NO: 682759 - DNA, 75 bp, synthetic construct
  source 1..75: mol_type = other DNA
tattcatcagggaataattcctgatggaagtggcgcatttgcagaccagttaaataatgccaccgcgccttttgt

SEQ ID NO: 682760 - DNA, 75 bp, synthetic construct
  source 1..75: mol_type = other DNA
gaggtgcttagccatgtccgcaaagcggtgctgtttattgaagggataacggtaagcggcggcgaagccacgacc

SEQ ID NO: 682761 - DNA, 75 bp, synthetic construct
  source 1..75: mol_type = other DNA
tgcagattgtcgacggcaaagtggcgtggagcgcggctgtctgcgagcaatgtgatacctgcctgaagatgtgcc

SEQ ID NO: 682762 - DNA, 75 bp, synthetic construct
  source 1..75: mol_type = other DNA
cggcgaagccacgacccagctgccgtttgtggtggcgctgtttactgctatcaaaaatgatccgcaactgcgcca

SEQ ID NO: 682763 - DNA, 75 bp, synthetic construct
  source 1..75: mol_type = other DNA
gcatttgggcttcaacccgcatctgctgatttttataagcgggttgcatatactcatcagggaatagttcctgaa

SEQ ID NO: 682764 - DNA, 75 bp, synthetic construct
  source 1..75: mol_type = other DNA
atggtgggctggcgcttggtacggataacgcactgggcggtaattcaattactctcggagataacgataccggta

SEQ ID NO: 682765 - DNA, 75 bp, synthetic construct
  source 1..75: mol_type = other DNA
acgccctgcgctcgctggagtcgatcccgctggcccgcgtcgccgggcggctggtgcgtctgaacggcattctgc

SEQ ID NO: 682766 - DNA, 75 bp, synthetic construct
  source 1..75: mol_type = other DNA
gtaaacagggctggtaacgccgttcagcgttccggcgataaaatgaccggagaactgaaaattggcacgatgaat

SEQ ID NO: 682767 - DNA, 75 bp, synthetic construct
  source 1..75: mol_type = other DNA
cggaagtattcgtatgtttttgtggaaagataacggtggtgatggtgttcatattaataacggttcagatggtgg

SEQ ID NO: 682768 - DNA, 75 bp, synthetic construct
  source 1..75: mol_type = other DNA
tcagacacggtttgcctggaatcccgctcctggtggtcattacgtgccgatagctaagggcctgtctattcgcaa

SEQ ID NO: 682769 - DNA, 75 bp, synthetic construct
  source 1..75: mol_type = other DNA
ttctggtgtgcgctgggcgcgttatgttttttgtttattagtagcttgttcaggccacaacacagaaaaaatcaa

SEQ ID NO: 682770 - DNA, 75 bp, synthetic construct
  source 1..75: mol_type = other DNA
tctttattagcagattccggcgggaaatcccgacttccagaaataaccatgtgtcacgtgtggatgtggataaaa

SEQ ID NO: 682771 - DNA, 75 bp, synthetic construct
  source 1..75: mol_type = other DNA
aatcccgctttccagaaataatcatgtgtcatgtatggatgttgataaaaaactacaggaactgaaaaacatgat

SEQ ID NO: 682772 - DNA, 75 bp, synthetic construct
  source 1..75: mol_type = other DNA
acgaaaaagtacagatcattatgacgattgaaaatggtcaggtaataaatacccgtaaagttcacaataacgaga

SEQ ID NO: 682773 - DNA, 75 bp, synthetic construct
  source 1..75: mol_type = other DNA
tttcatacggctgtcagaaagagcgggatatcagataacagcacctgctcaggaggaaaccggtgacattaacag

SEQ ID NO: 682774 - DNA, 75 bp, synthetic construct
  source 1..75: mol_type = other DNA
gcgcaatcatcgtaaatggtcttactggtttttccggcaatatcccgaatattttcgatctcacattcacaagcc

SEQ ID NO: 682775 - DNA, 75 bp, synthetic construct
  source 1..75: mol_type = other DNA
atgatcacaagtgtcacgcttcaggtgcagcatcctgatttcaagtgcggaatgcttcgctataaagtggcacta

SEQ ID NO: 682776 - DNA, 75 bp, synthetic construct
  source 1..75: mol_type = other DNA
atgtaccacattcccggcgtgttatcgccacaggacgtcgcccggtttcgcgaacaactggaacaagccgaatgg

SEQ ID NO: 682777 - DNA, 75 bp, synthetic construct
  source 1..75: mol_type = other DNA
agaacaggctctactgcaactattcagaggactgcctgagagcgaaaaaaataaattaatcaatgagctaaaaga

SEQ ID NO: 682778 - DNA, 75 bp, synthetic construct
  source 1..75: mol_type = other DNA
aatcccgccttccagaaataaccatgtgtcatgtatggatgttgataaaaaactacaggaactgaaaaacatgat

SEQ ID NO: 682779 - DNA, 75 bp, synthetic construct
  source 1..75: mol_type = other DNA
acgccaccgctcaatcacgcgaaatcggaattgcctcagtaaaaaacaatggcgtaagccagactgtgaaagata

SEQ ID NO: 682780 - DNA, 75 bp, synthetic construct
  source 1..75: mol_type = other DNA
aaaaaatgatagggatgaagtcaacatcccactattcgaatatcaaaaaaataacaaaattaagaaacagttgtg

SEQ ID NO: 682781 - DNA, 75 bp, synthetic construct
  source 1..75: mol_type = other DNA
tcgttggctctgcgcttggcgcgctggtcggcataataatgaccgttgcaggtatttttaccagtaaagcgtcaa

SEQ ID NO: 682782 - DNA, 75 bp, synthetic construct
  source 1..75: mol_type = other DNA
atgagtcagccattattatctgttaacggcctgatgatgcgcttcggcggcctgctggcggtgaacaacgtcaat

SEQ ID NO: 682783 - DNA, 75 bp, synthetic construct
  source 1..75: mol_type = other DNA
cttgaactgtacccgcaggagatcgtctcgttaatcggccctaacggtgccggaaaaaccacggtttttaactgc

SEQ ID NO: 682784 - DNA, 75 bp, synthetic construct
  source 1..75: mol_type = other DNA
gttgaaaacgccttctttccgtcgcgcccagagtgaggcgctcgaccgcgccgcaacctggctggaacgcattgg

SEQ ID NO: 682785 - DNA, 75 bp, synthetic construct
  source 1..75: mol_type = other DNA
gaattaggctggtttaaggaaggtgcgaataagcaggtcatttcttcccaagctgactcgctgattaaaatttcg

SEQ ID NO: 682786 - DNA, 75 bp, synthetic construct
  source 1..75: mol_type = other DNA
caacgcgaggttttttacccttcgcaccagaggcagacttctgggtcggcaaacataaactcccgcaatatgaga

SEQ ID NO: 682787 - DNA, 75 bp, synthetic construct
  source 1..75: mol_type = other DNA
ggatgagctgattgccgaactgcgtaatcatcacaacaccactatcttgttgattgaacacgatatgaagctggt

SEQ ID NO: 682788 - DNA, 75 bp, synthetic construct
  source 1..75: mol_type = other DNA
taccggcaacaaaaccactaagccgccaaatacctcgctgctgaaaagcatcacgggtaacgcggcgtcattact

SEQ ID NO: 682789 - DNA, 75 bp, synthetic construct
  source 1..75: mol_type = other DNA
cggggatataaggcgaaaagcccgcagggctttaaagatcaatcaggtgttgactgactctgaacgtaggctctg

SEQ ID NO: 682790 - DNA, 75 bp, synthetic construct
  source 1..75: mol_type = other DNA
ggtgtacaaatcagggcatcgtgcaacgcacgctggcgtcaaaaagcctggcggaagggggatgcggacgatttc

SEQ ID NO: 682791 - DNA, 75 bp, synthetic construct
  source 1..75: mol_type = other DNA
gcgagtaacctggcctatggtgaccagcgccgtctggagattgcccgctgcatggtgacgcagccggagatttta

SEQ ID NO: 682792 - DNA, 75 bp, synthetic construct
  source 1..75: mol_type = other DNA
ccgcattttcagcttgaagggttaacaggatcactgcgtctggtgacaaaactgccgtcagtaaaacagggtaat

SEQ ID NO: 682793 - DNA, 75 bp, synthetic construct
  source 1..75: mol_type = other DNA
atggaggtgtccgagctgctggagcacgatcttggtcacggccaggttgatgacctggacaccgcgccaccactg

SEQ ID NO: 682794 - DNA, 75 bp, synthetic construct
  source 1..75: mol_type = other DNA
tatctagcttaatatatttgatttcaaaaattgagaataatgaaaaaataatagaatcaatttatatatcatctg

SEQ ID NO: 682795 - DNA, 75 bp, synthetic construct
  source 1..75: mol_type = other DNA
ggtgtcgtttctgcgatgggattccgaccaaaaaatggcgagattatttttgccgatagccaggggatttcacgt

SEQ ID NO: 682796 - DNA, 75 bp, synthetic construct
  source 1..75: mol_type = other DNA
atacgtgttgtcggcatgatggatgggttaccagatgcttcattgccgtgggcagaagctatattgtccaatgca

SEQ ID NO: 682797 - DNA, 75 bp, synthetic construct
  source 1..75: mol_type = other DNA
gacgttaacccgtcagatcctttttattacagctggctgcactattgtgggcgccgccgtgggtgccgcgatagc

SEQ ID NO: 682798 - DNA, 75 bp, synthetic construct
  source 1..75: mol_type = other DNA
aatcctgcatacctttacagcgcccatagcgaaagaaaagtcagtcaaacattgtggtggctgtaaagatcaggg

SEQ ID NO: 682799 - DNA, 75 bp, synthetic construct
  source 1..75: mol_type = other DNA
aggacgcgctcgcttgatccgcaggcaattattcggcatccccaatatggcgatgtggcttgtatccctgaaccg

SEQ ID NO: 682800 - DNA, 75 bp, synthetic construct
  source 1..75: mol_type = other DNA
tgcgatagcaacacagcttgcttcaggtgcgggcacataccataaaaaccagcggcgagtattttctctgttggg

SEQ ID NO: 682801 - DNA, 75 bp, synthetic construct
  source 1..75: mol_type = other DNA
ttaacgtcaccgaagaacaactctttaatccatgcgaaaacctgaaggttttcgaaaaaatattttctaattgtt

SEQ ID NO: 682802 - DNA, 75 bp, synthetic construct
  source 1..75: mol_type = other DNA
atgcagaagatggggatgtcgcctgagagtattcaggagatcctgcagctttctgatgacgagctgcagaaagcg

SEQ ID NO: 682803 - DNA, 75 bp, synthetic construct
  source 1..75: mol_type = other DNA
ggcgatgatggaaacccctgcggttgcaagggattttctggaggctgcgttgccgccggcacagttacagcggtg

SEQ ID NO: 682804 - DNA, 75 bp, synthetic construct
  source 1..75: mol_type = other DNA
aagttctgatggattggtttttaggtgacgcgaaggaaatcaccgcaagtcagaaagaaatgactgagatacttt

SEQ ID NO: 682805 - DNA, 75 bp, synthetic construct
  source 1..75: mol_type = other DNA
taatgatggcaaaggtggcgcaatttataccattaataatgacgtttatttaagtgatgttatttttgataacaa

SEQ ID NO: 682806 - DNA, 75 bp, synthetic construct
  source 1..75: mol_type = other DNA
atgaaatacgaattcttcgcaacaagtagcagtagtttggatgtatacatagtcactgtatcaaacgattctagc

SEQ ID NO: 682807 - DNA, 75 bp, synthetic construct
  source 1..75: mol_type = other DNA
tgcgatagcaacacagcttgcttcaggtgcgggcacacaccataaaaaccagcggcgagtatttcctctgttggg

SEQ ID NO: 682808 - DNA, 75 bp, synthetic construct
  source 1..75: mol_type = other DNA
cgtgttcagccgggcgatatggttctgctctccccggcctgtgccagccttgatcagttcaagaactttgaacaa

SEQ ID NO: 682809 - DNA, 75 bp, synthetic construct
  source 1..75: mol_type = other DNA
ggttaccgcgagccagcagcctgaaagcgttaaccacattcactggtctgccgcatcgctttgaagttgtgctgg

SEQ ID NO: 682810 - DNA, 75 bp, synthetic construct
  source 1..75: mol_type = other DNA
tcgctggtggtgtggagcgcattaattccggttgttccgttcttcgttgcatcgctgcttcttgatggttccggg

SEQ ID NO: 682811 - DNA, 75 bp, synthetic construct
  source 1..75: mol_type = other DNA
cagttggcagcgctacgcccggacgtggcagaacaaaccgaaaccatggagcaggcgatgcgtctattggcgccg

SEQ ID NO: 682812 - DNA, 75 bp, synthetic construct
  source 1..75: mol_type = other DNA
aacgatgccaattcgcggcgcggatgaacgctgcgttagctttggtgtcaatatgggcgactatcacctgaatca

SEQ ID NO: 682813 - DNA, 75 bp, synthetic construct
  source 1..75: mol_type = other DNA
gtattgtttcggtcgtgacggcgcacagctggcggcactgcgcccggaagtggcagaacaaaccgaaaccatgga

SEQ ID NO: 682814 - DNA, 75 bp, synthetic construct
  source 1..75: mol_type = other DNA
cggctggacgccggtcagtgaatcccgtcttgacgactggcttacgcaagcgccagacggcgtggtgttattaag

SEQ ID NO: 682815 - DNA, 75 bp, synthetic construct
  source 1..75: mol_type = other DNA
ttgctcgctgagattgccgatatccatgatatggcgatcagtcgggatggtaatacgttgtatgccgcaattgaa

SEQ ID NO: 682816 - DNA, 75 bp, synthetic construct
  source 1..75: mol_type = other DNA
aggacgcgctcgcttgatccacaggcaattattcagcatccccaatatggcgatgtggcttgtatccctgaaccg

SEQ ID NO: 682817 - DNA, 75 bp, synthetic construct
  source 1..75: mol_type = other DNA
atttgctgctggggtatggtttaaccatcagttttgcgcagtttgcctttctcttctgcgccattaacttcggta

SEQ ID NO: 682818 - DNA, 75 bp, synthetic construct
  source 1..75: mol_type = other DNA
gctaaattttgtggtcatcaaagtggggcttcataacatgccaccgctgatgctggccggtttgcgctttatgct

SEQ ID NO: 682819 - DNA, 75 bp, synthetic construct
  source 1..75: mol_type = other DNA
gcgatcgctttggcgtctttcgctttcccgccacattagtgtttaccggcggaaactatcgcggcgtgctgaatg

SEQ ID NO: 682820 - DNA, 75 bp, synthetic construct
  source 1..75: mol_type = other DNA
ctgccttccatctacaaacagcatgaagagcgctacgccggttataccctgcgtcagttgtgtcaagaaatgcat

SEQ ID NO: 682821 - DNA, 75 bp, synthetic construct
  source 1..75: mol_type = other DNA
ggaaattcgggattccctgacatgttgtccgtggtgcagcgcagttttctttaagcaggtaaaaggcgcgaaggt

SEQ ID NO: 682822 - DNA, 75 bp, synthetic construct
  source 1..75: mol_type = other DNA
gcttcttcaggagtctgaagaacgaatgggtgccggcgacgggctatgtaagcttcagcgatgcagctcacgcaa

SEQ ID NO: 682823 - DNA, 75 bp, synthetic construct
  source 1..75: mol_type = other DNA
tgacgatgcgctggaacaatccgcgccagccaccgatgaacgctggcgcgaggcgattgtcacccgcagcccgct

SEQ ID NO: 682824 - DNA, 75 bp, synthetic construct
  source 1..75: mol_type = other DNA
gctgtttgaccgcaataaccacaaatctaaccaccacggagcgttgctacaggctggcgcgacaccggtttatct

SEQ ID NO: 682825 - DNA, 75 bp, synthetic construct
  source 1..75: mol_type = other DNA
cttatcctccgggtgtgctgtgcgttgttccgggtgaaatctggggtggtgctgttctgcgttacttcagcgctc

SEQ ID NO: 682826 - DNA, 75 bp, synthetic construct
  source 1..75: mol_type = other DNA
atcctcaaaacgctgggggcagggcgagcgcaactgcgtaagttaattgtcggtcagtggttgatggtgctggta

SEQ ID NO: 682827 - DNA, 75 bp, synthetic construct
  source 1..75: mol_type = other DNA
gtctggccgctcaagttttatctgccgattgtcagtgtggtggttgtgctgctgctcgccggattaatgggcggc

SEQ ID NO: 682828 - DNA, 75 bp, synthetic construct
  source 1..75: mol_type = other DNA
cggtaactggccgccaaaagccgatgaagtgtcgatggaagaggggctggcgaaacgcttaaacgttgccctcgg

SEQ ID NO: 682829 - DNA, 75 bp, synthetic construct
  source 1..75: mol_type = other DNA
tcaccattaacgatgaatccctgcgccggagcctccgtgcgctggatcttgctgccacagacctggaacccgcga

SEQ ID NO: 682830 - DNA, 75 bp, synthetic construct
  source 1..75: mol_type = other DNA
gatgaggggcgtccggggtggactccctcgctggcagcggaaaagcgcgacgggcaaacactgcaggataccggg

SEQ ID NO: 682831 - DNA, 75 bp, synthetic construct
  source 1..75: mol_type = other DNA
cgtccactaacccggcggcaaccgtaattaataacgccatcagcctgattgccgcgggcaacagcgtcatttttg

SEQ ID NO: 682832 - DNA, 75 bp, synthetic construct
  source 1..75: mol_type = other DNA
tggatgaaatggacggtatgcagctgtttgctgaaatccagaaagtgcagccgggaatgccagtaattattctta

SEQ ID NO: 682833 - DNA, 75 bp, synthetic construct
  source 1..75: mol_type = other DNA
gacggcgttgaagtgaacgaatggatgcgctcactgaaacgacacgaacgccgggcgctgatgcgttcgcttcgt

SEQ ID NO: 682834 - DNA, 75 bp, synthetic construct
  source 1..75: mol_type = other DNA
cttattgcaaaagtatggcctgttgttgtcgctgtcgttggtgcgggtcttgccattcgtttgtttaaaaagttc

SEQ ID NO: 682835 - DNA, 75 bp, synthetic construct
  source 1..75: mol_type = other DNA
cacgcacaacgcatcagtgcaaccacaaagcatgtacgccgcaaagctgaccttctacagtcttggttaaacaat

SEQ ID NO: 682836 - DNA, 75 bp, synthetic construct
  source 1..75: mol_type = other DNA
gtacgtatccttgatgctgtgattgatccagttgtgggaacaatgacagacagaacgaatacacgttggggaaaa

SEQ ID NO: 682837 - DNA, 75 bp, synthetic construct
  source 1..75: mol_type = other DNA
cgcaaaccggatacccgcccggacagccgaatcacgcagctctggcagcgcctgagccgtaatcacggcgtaagc

SEQ ID NO: 682838 - DNA, 75 bp, synthetic construct
  source 1..75: mol_type = other DNA
ccgcaaacagcagcggcctttgcctgataaccacgaattactcgctaaagaatggcgggagtctgctgaatctct

SEQ ID NO: 682839 - DNA, 75 bp, synthetic construct
  source 1..75: mol_type = other DNA
tgtataacaaagcgggtgttaatggactgtttacggacttcccggataaagcagtaaaattcctcaataaagagt

SEQ ID NO: 682840 - DNA, 75 bp, synthetic construct
  source 1..75: mol_type = other DNA
cgctgggcagtaaccgcgatattgatatcgacgtgcggattatttctgccactcaccgcgacctgccaaaagcga

SEQ ID NO: 682841 - DNA, 75 bp, synthetic construct
  source 1..75: mol_type = other DNA
ggttgccgcgacacagcagggcgtgttcagtttcctcaccaagcctgtcgataaagacgcgctgtatcaggcaat

SEQ ID NO: 682842 - DNA, 75 bp, synthetic construct
  source 1..75: mol_type = other DNA
atgggcatggatctcaatctggtacagctgattgcctataccgactggaatgaaacgcagcagaaacagccggac

SEQ ID NO: 682843 - DNA, 75 bp, synthetic construct
  source 1..75: mol_type = other DNA
tttgccggagcatacgctgccagcaaaagcgatggcgtatgcgcagggagcggattatctggaacaggatttggt

SEQ ID NO: 682844 - DNA, 75 bp, synthetic construct
  source 1..75: mol_type = other DNA
gcatggcgatcatgatgagtggaatgatcatgggaagcagtgcaatggcggcagacaatagcgagaaaattgtaa

SEQ ID NO: 682845 - DNA, 75 bp, synthetic construct
  source 1..75: mol_type = other DNA
gatctgctcgaccgctggcagcagcagctaccgccagaaagcccgaactactttttaattaacatcgccacagaa

SEQ ID NO: 682846 - DNA, 75 bp, synthetic construct
  source 1..75: mol_type = other DNA
tggccgttagctgagcaatggcgttggttaacaacctggctggtctggcgtcgcggtgcgaaaacgcgtccgctt

SEQ ID NO: 682847 - DNA, 75 bp, synthetic construct
  source 1..75: mol_type = other DNA
tggccgttggctgagcaatggcgttggttaacaacctggctggtctggcgtcgcggtgcgaaaacgcgcccgcta

SEQ ID NO: 682848 - DNA, 75 bp, synthetic construct
  source 1..75: mol_type = other DNA
cctcggttcactggaaagtactgctgcggtacgaattccggcaacgctggcggaatttaatcgtcgctatcccaa

SEQ ID NO: 682849 - DNA, 75 bp, synthetic construct
  source 1..75: mol_type = other DNA
gtcgcaggagcaggcattgcgcttattccgcgctctatgctggaaagtatgccggggcatcaccaggttgaagcg

SEQ ID NO: 682850 - DNA, 75 bp, synthetic construct
  source 1..75: mol_type = other DNA
cgccggagactattcatgagatggagtcatatcacggcatgttggcttgtgttatcgcgggtgcaggcattgcgc

SEQ ID NO: 682851 - DNA, 75 bp, synthetic construct
  source 1..75: mol_type = other DNA
cggggactattcatgagatggagtcgtatcacgggatgttggcctgtgtggtcgcgggtgcgggcattgcgctta

SEQ ID NO: 682852 - DNA, 75 bp, synthetic construct
  source 1..75: mol_type = other DNA
aacactggaagctttccataaattcacatcgaaacacgcccccggcgttcactcttcagaaggtatcccgtggca

SEQ ID NO: 682853 - DNA, 75 bp, synthetic construct
  source 1..75: mol_type = other DNA
atcactgttaaacgttatggctgcacttcacaggatattccgtggcaaagcctgcctgcgtctcaccggggtgat

SEQ ID NO: 682854 - DNA, 75 bp, synthetic construct
  source 1..75: mol_type = other DNA
gtgtggtgcggtgatgtgaactatatccggacgggtaagcgctgggcgtacctcgccgttgttctcgacctgttc

SEQ ID NO: 682855 - DNA, 75 bp, synthetic construct
  source 1..75: mol_type = other DNA
gcgatgagccacaaggtctgttttctctcggatcgctggaaagcaccgccgcagtgcgtattccggcaacgctgg

SEQ ID NO: 682856 - DNA, 75 bp, synthetic construct
  source 1..75: mol_type = other DNA
gctcggtgttgagctgtttatccgcgaaaatcagcgtttacggctttctcccgccgggcataactttttacgcta

SEQ ID NO: 682857 - DNA, 75 bp, synthetic construct
  source 1..75: mol_type = other DNA
actcttcagaaggtatcccgtggcatgagctgccagctttgaggtgtactggcaatagcggacactaccatttgt

SEQ ID NO: 682858 - DNA, 75 bp, synthetic construct
  source 1..75: mol_type = other DNA
tcaacgcagttgccgaggcaggcagcattacccaggctgcggctaaagtacatcgtgtgccgtcgaatctcacga

SEQ ID NO: 682859 - DNA, 75 bp, synthetic construct
  source 1..75: mol_type = other DNA
cgtcttttcgatgggcgtgctttaccatcgccgttcaccgctggagcatctctggcagttgaaagatcaactggt

SEQ ID NO: 682860 - DNA, 75 bp, synthetic construct
  source 1..75: mol_type = other DNA
gtgggtatcgaccctacgcaactgtttctgtgccagtttgaagcagtgcgtaaattgttaggtaacgatcaacgt

SEQ ID NO: 682861 - DNA, 75 bp, synthetic construct
  source 1..75: mol_type = other DNA
gacgcactgaatggatggttaccgagtctctgtccgatttcctcgacccacatgatccgagtaagacagttgaag

SEQ ID NO: 682862 - DNA, 75 bp, synthetic construct
  source 1..75: mol_type = other DNA
acctgaaaacgggcgacaccattgacgtgggcgatgccaccttgcggattgccggagaagtgattcaggaaccgg

SEQ ID NO: 682863 - DNA, 75 bp, synthetic construct
  source 1..75: mol_type = other DNA
tggcggtggcgatgaatcattactgtcgcagtcgctacgatctgatggcgatcctcaaaacgctgggagcagggc

SEQ ID NO: 682864 - DNA, 75 bp, synthetic construct
  source 1..75: mol_type = other DNA
atcgacccgacccaactcttcctctgccagttcgaggcggtacgcaaactgctgggtaacgatcagcgcgcacat

SEQ ID NO: 682865 - DNA, 75 bp, synthetic construct
  source 1..75: mol_type = other DNA
ggacgaatttatcggcatgtggatcacgctcatggcattgccgaccaatgactggcagtgggtcactgccggatt

SEQ ID NO: 682866 - DNA, 75 bp, synthetic construct
  source 1..75: mol_type = other DNA
tctattcgctggtggtgatgctggggatctgtatcggcgtctatctttgtcatcaaacggcgaaagacatgggcg

SEQ ID NO: 682867 - DNA, 75 bp, synthetic construct
  source 1..75: mol_type = other DNA
gagtaatccgtggcatctgcttgctgtcggattcggaagtggattaagcccaatcgttcctggcacgatgggatc

SEQ ID NO: 682868 - DNA, 75 bp, synthetic construct
  source 1..75: mol_type = other DNA
gaatgaaggtgaactggtactggaaacgctggttattgatggcgatgagaacaccgtactggtgccaggcgatcg

SEQ ID NO: 682869 - DNA, 75 bp, synthetic construct
  source 1..75: mol_type = other DNA
gttatcacatgtggcgcatgattggcgcaggcgcgcacctcgcggtggggatcgaccctacgcaactgtttctgt

SEQ ID NO: 682870 - DNA, 75 bp, synthetic construct
  source 1..75: mol_type = other DNA
gccgttctcgctgtatggcgtcaacattgacaccgaatggcgttctgactggaaatgggatcgtgttctgccgca

SEQ ID NO: 682871 - DNA, 75 bp, synthetic construct
  source 1..75: mol_type = other DNA
gccccaaagcagtgtcaggtggcatggaatacgatggaagaaatccgggtgatgacgacgacatcgatcgcatac

SEQ ID NO: 682872 - DNA, 75 bp, synthetic construct
  source 1..75: mol_type = other DNA
ctattgatgaaagcctgaaaacagctcacacgttaagtaaggcaggtgtgagcagcaagaaaattatcttcgttc

SEQ ID NO: 682873 - DNA, 75 bp, synthetic construct
  source 1..75: mol_type = other DNA
cgtaacgcgaagaaagagaaagaagggaataagccgccgaaatccgcacgccagattttccagtatctgcgcgag

SEQ ID NO: 682874 - DNA, 75 bp, synthetic construct
  source 1..75: mol_type = other DNA
aatcctgcctttcctcatattcccctggatggtctgatatgcgctccacagttcattaccctaaccctcccggcg

SEQ ID NO: 682875 - DNA, 75 bp, synthetic construct
  source 1..75: mol_type = other DNA
catggcaggaaagtattaagaccgctctcgcgttaagcgctgctggcgttccaaaatccaaaattgttcttctgc

SEQ ID NO: 682876 - DNA, 75 bp, synthetic construct
  source 1..75: mol_type = other DNA
aactcgttgaagaaatcgtatttgaagataatgccatcgtggatattggcgcgtcgaacgttgagcggtttcttt

SEQ ID NO: 682877 - DNA, 75 bp, synthetic construct
  source 1..75: mol_type = other DNA
aaaaactggcccgccgttacacatacatgaaacaggcgattccggtaaaggctaatctcgataaagcatatgcgg

SEQ ID NO: 682878 - DNA, 75 bp, synthetic construct
  source 1..75: mol_type = other DNA
gaagtcactgacaaaaataatcagcttattcaaaagggcgaggtgctttttaaactcgacccggtccgttaccag

SEQ ID NO: 682879 - DNA, 75 bp, synthetic construct
  source 1..75: mol_type = other DNA
aaggtatatgctcagttagtgattagctttattttactgacatatgtgttgaagaaactaaaaaagatagctgta

SEQ ID NO: 682880 - DNA, 75 bp, synthetic construct
  source 1..75: mol_type = other DNA
agtattgttagccgctttaagtatatattttgctgttccgcttggaatgttattgagtattagcaaatatgatgt

SEQ ID NO: 682881 - DNA, 75 bp, synthetic construct
  source 1..75: mol_type = other DNA
gttttccttttgcaccgcgaccggaaatcctgcctttcctcatattcccctggatggtctgatatgcgctccaca

SEQ ID NO: 682882 - DNA, 75 bp, synthetic construct
  source 1..75: mol_type = other DNA
aagtcgaaagcaaggagtagattatgtatatctcttatttggaaaaactggcggtgtacccgatgctaaatgggg

SEQ ID NO: 682883 - DNA, 75 bp, synthetic construct
  source 1..75: mol_type = other DNA
acttactcacgaaggcgactgaaagactctctcaggatctgaatacatcaagtaaatatcacaactcgagaggat

SEQ ID NO: 682884 - DNA, 75 bp, synthetic construct
  source 1..75: mol_type = other DNA
gtggcagtgtcggcaaaactattatttcgtcatacctgctgtatcctcgcatggctggcgctaaattctttgcca

SEQ ID NO: 682885 - DNA, 75 bp, synthetic construct
  source 1..75: mol_type = other DNA
tatcgataattttcaacacagatgcatctttttggatgaaattgcaagagctacatgagacatggtttaataaac

SEQ ID NO: 682886 - DNA, 75 bp, synthetic construct
  source 1..75: mol_type = other DNA
cctcccgcaagacttgctgaactgatggatacatcatatgaaaaaatttgggaaataattaaaaatgagcgaaat

SEQ ID NO: 682887 - DNA, 75 bp, synthetic construct
  source 1..75: mol_type = other DNA
caatagcaattgcctattcatcttcagttttttctgccgggattcctgtagttgatactgttggtaatgcgcagg

SEQ ID NO: 682888 - DNA, 75 bp, synthetic construct
  source 1..75: mol_type = other DNA
gatccttggataaggctaaatactatgtttactgtctctatgatacagaagacaagatgaaaagaccgttttaca

SEQ ID NO: 682889 - DNA, 75 bp, synthetic construct
  source 1..75: mol_type = other DNA
ggtaactgcaaagaaacttctttcacaaagtattgctctagaactataccagagcgtatttcaattgaagaaatt

SEQ ID NO: 682890 - DNA, 75 bp, synthetic construct
  source 1..75: mol_type = other DNA
tgaacgccatcattcataactacgaggcaacgattgcgcccggtaaagcaggtaactgcaaagaaactcctctca

SEQ ID NO: 682891 - DNA, 75 bp, synthetic construct
  source 1..75: mol_type = other DNA
gactcttatgaaataaagggcaataaagttgagtttgaggtgttcaatcctggctaccgtacatacgacaaagtg

SEQ ID NO: 682892 - DNA, 75 bp, synthetic construct
  source 1..75: mol_type = other DNA
tggctaccgtacatacgacaaagtgaccgtcactgttggcgctgacggcaatgccaccgacgccagtgttgaatt

SEQ ID NO: 682893 - DNA, 75 bp, synthetic construct
  source 1..75: mol_type = other DNA
gcattactaggtacaagtacaattagtattgttggtttggttggtttcgttgttagtggattgttcaaatcaaga

SEQ ID NO: 682894 - DNA, 75 bp, synthetic construct
  source 1..75: mol_type = other DNA
gctttgtcgctgcgcaaaacgtgagcacggtggtggcgtatgacttatctgccatatgctggatgtcgtggcaca

SEQ ID NO: 682895 - DNA, 75 bp, synthetic construct
  source 1..75: mol_type = other DNA
gcgtacgacaaagtgaccgtcacggttggtgctgacggtaatgccaccagtgccagcgttgaatttatcggaaaa

SEQ ID NO: 682896 - DNA, 75 bp, synthetic construct
  source 1..75: mol_type = other DNA
atttgtcacatcacttgccggtttttccccgaaacagacgaccactattaataaagactccgtcctgcaggctgc

SEQ ID NO: 682897 - DNA, 75 bp, synthetic construct
  source 1..75: mol_type = other DNA
tttttatctattcttttttcaaaacagatggttgaagtccttgcggacaatcgctatagggaaagtatatccgtg

SEQ ID NO: 682898 - DNA, 75 bp, synthetic construct
  source 1..75: mol_type = other DNA
cctgaaagtgtggatgaacacaaaaaggccaacgcctttaccggcagtgccctgagtcacgcggcgctgccgtaa

SEQ ID NO: 682899 - DNA, 75 bp, synthetic construct
  source 1..75: mol_type = other DNA
cggtaatgatccggctcataccgccacaggcagcagcgggatttctcaggcaacaccggcactgacgcccctgat

SEQ ID NO: 682900 - DNA, 75 bp, synthetic construct
  source 1..75: mol_type = other DNA
ctgacctattacaagtcggggacctttgcgacggaggcaatccgctggcctgacagtgtggatgaacacaaaaag

SEQ ID NO: 682901 - DNA, 75 bp, synthetic construct
  source 1..75: mol_type = other DNA
ttatgttgccgatcgtccgggacacgatcgccgttatgcgattgatgctgagaagattagccgcgaattgggctg

SEQ ID NO: 682902 - DNA, 75 bp, synthetic construct
  source 1..75: mol_type = other DNA
aaagcgggtgaaacttataacattggtggacacaacgaaaagaaaaacatcgatgtagtgctcactatttgtgat

SEQ ID NO: 682903 - DNA, 75 bp, synthetic construct
  source 1..75: mol_type = other DNA
tataccgacagcacgggtggtcacgacctgaacatgcgtctctcccagcaacgtgcggattccgttgccagcgcg

SEQ ID NO: 682904 - DNA, 75 bp, synthetic construct
  source 1..75: mol_type = other DNA
cctgaaagtgtggatgaacacaaaaaggccaacgcctttgtcggcacagccctgagtcacgcggcgctgccgtaa

SEQ ID NO: 682905 - DNA, 75 bp, synthetic construct
  source 1..75: mol_type = other DNA
ttatgcctcaaagttggtattcctgttggcctctcgaaaatggtcatatggtgacaaattcagatgctacggtaa

SEQ ID NO: 682906 - DNA, 75 bp, synthetic construct
  source 1..75: mol_type = other DNA
cgtgggtggagtttcccgctggtccgcaaatgttggaggcgttaaacgtcggcagtatcgatctgggcagtacgg

SEQ ID NO: 682907 - DNA, 75 bp, synthetic construct
  source 1..75: mol_type = other DNA
caacaccggcactgacgcccctgatgctggatgatgccatcgggaaactggtggtctgggacggacataaagccg

SEQ ID NO: 682908 - DNA, 75 bp, synthetic construct
  source 1..75: mol_type = other DNA
gccaaacgcctttgccggcagtgccctgagtcacgcggcgctgccgtaacacgttatcaggccaccgcggtggcc

SEQ ID NO: 682909 - DNA, 75 bp, synthetic construct
  source 1..75: mol_type = other DNA
gctggatgaagccagcgggaaactggtggtctgggacggacagaaagccggtagtgcggttggcatactggtact

SEQ ID NO: 682910 - DNA, 75 bp, synthetic construct
  source 1..75: mol_type = other DNA
ataaaattagccgcgaattgggctggaaaccgcaagaaacgtttgagagcggtattcgtaaaacggtggaatggt

SEQ ID NO: 682911 - DNA, 75 bp, synthetic construct
  source 1..75: mol_type = other DNA
cacagtcaccgcgtaccagacatcctgtatcccctgaaaacggagaaaaaagaatgcaaaggcaaccagcaacca

SEQ ID NO: 682912 - DNA, 75 bp, synthetic construct
  source 1..75: mol_type = other DNA
gagacaggcacgctgataacaacggccacctggcaggtcaacgtgccggagcgaccgccttttgatatacagcat

SEQ ID NO: 682913 - DNA, 75 bp, synthetic construct
  source 1..75: mol_type = other DNA
ctatgttgccgatcgtcctgggcatgatcgccgttatgcgattgatgctgagaagattggtcgcgaattgggctg

SEQ ID NO: 682914 - DNA, 75 bp, synthetic construct
  source 1..75: mol_type = other DNA
taaagaaggccctctgggtccatggctatgttttggccatgtccttttgctgctggataatctttatcaaccact

SEQ ID NO: 682915 - DNA, 75 bp, synthetic construct
  source 1..75: mol_type = other DNA
ctggtataagacacacactgcagttctgtcaggaatatggctatatagtatagctgtggcattaattattttatc

SEQ ID NO: 682916 - DNA, 75 bp, synthetic construct
  source 1..75: mol_type = other DNA
gcatgatgatcccgatggtcaacgaagtggtgcgctgtctggaagaaagcattatcgccactccggcagaagcgg

SEQ ID NO: 682917 - DNA, 75 bp, synthetic construct
  source 1..75: mol_type = other DNA
gatagtgttgttaatgtcgataaattaacatacgccgggaacctggaatcactcgctgatgtttctgattctgaa

SEQ ID NO: 682918 - DNA, 75 bp, synthetic construct
  source 1..75: mol_type = other DNA
gtgaagatacttgttactggtggcgcaggatttattggttctgctgttgttcgtcacataataaataatacgcaa

SEQ ID NO: 682919 - DNA, 75 bp, synthetic construct
  source 1..75: mol_type = other DNA
tcctgacgaagtaaataataaagaagaattacccctctttactgagacgacagcttacgcgccaagtagcccata

SEQ ID NO: 682920 - DNA, 75 bp, synthetic construct
  source 1..75: mol_type = other DNA
cattggttattcttaatgctctggaaggtaaggcattacctatttatggcaaaggggatcaaattcgtgactggc

SEQ ID NO: 682921 - DNA, 75 bp, synthetic construct
  source 1..75: mol_type = other DNA
taattgctctaacaattatggtccttatcatttcccggaaaaattgattccattggttattcttaatgctctgga

SEQ ID NO: 682922 - DNA, 75 bp, synthetic construct
  source 1..75: mol_type = other DNA
atgaaaataattgtaacgggtggaggcggttttatcggaactgctttgattcattatattatatataatacgcag

SEQ ID NO: 682923 - DNA, 75 bp, synthetic construct
  source 1..75: mol_type = other DNA
ctgacccgctaataaatgatgcgttgatttatataagagatgagtgtattgatgagcggaaattacgaggtgaat

SEQ ID NO: 682924 - DNA, 75 bp, synthetic construct
  source 1..75: mol_type = other DNA
ggcgagcagaagaggctgaagccagcggcaacctgcaggtgagtgtggaagatcttgtcagaaccggcgcgtttc

SEQ ID NO: 682925 - DNA, 75 bp, synthetic construct
  source 1..75: mol_type = other DNA
gcctgccgatgccattgcccgggcggaagacgtggtgttgtgtctgtccgggatgatcgaagctgttcgtccgga

SEQ ID NO: 682926 - DNA, 75 bp, synthetic construct
  source 1..75: mol_type = other DNA
ggatgagcgggcctgttcatgtggatacggatatcaccgaagtggcgaaaaataacgcgcttactgatgatgatt

SEQ ID NO: 682927 - DNA, 75 bp, synthetic construct
  source 1..75: mol_type = other DNA
tagataattcaagtcgcagcacatgcaacttgaagtatgacgagtatagctttattaaagggggaaacggtattc

SEQ ID NO: 682928 - DNA, 75 bp, synthetic construct
  source 1..75: mol_type = other DNA
gatgagcgaaaattacgaggtgaatcaccagaaactgtaatcgccatttttaatcgcgaactacagaacatattc

SEQ ID NO: 682929 - DNA, 75 bp, synthetic construct
  source 1..75: mol_type = other DNA
acgcagttgcgtaatctggaaacgcgtctgagctacctgcgtgaactggaagagagacgtcaggcgatcctcaag

SEQ ID NO: 682930 - DNA, 75 bp, synthetic construct
  source 1..75: mol_type = other DNA
tggcctgctgatgccattgcccgggcggaagatgtggtgttgcgtctgtccgggatgagcgggcctgttcatgtg

SEQ ID NO: 682931 - DNA, 75 bp, synthetic construct
  source 1..75: mol_type = other DNA
agcggcaacctgcaggtaagcgtggaagatctcgtcagaaccggcgcgtttctggtggcgatgtccctgtggcat

SEQ ID NO: 682932 - DNA, 75 bp, synthetic construct
  source 1..75: mol_type = other DNA
ccatccgcagaaaacggggtcaccgtcaatgaatgacgccgtgatgcagattgagcaggaagtcctgaccacctg

SEQ ID NO: 682933 - DNA, 75 bp, synthetic construct
  source 1..75: mol_type = other DNA
ccgcccggcagccaaaccgcgcggtcgtgaagcgcagacagccggtaacagtgcgatgatggatgcgctggcagc

SEQ ID NO: 682934 - DNA, 75 bp, synthetic construct
  source 1..75: mol_type = other DNA
ggtgccttctcaccgcgcgctggcgatgttccgtgggcgtaacgaaggcatacttcagctttcgctgaatgccga

SEQ ID NO: 682935 - DNA, 75 bp, synthetic construct
  source 1..75: mol_type = other DNA
aaccgcgacgcgattgtcggcgcgtttgtcgccgcactcctgttcgaagcaggaaagaaaggtttcgcgctttat

SEQ ID NO: 682936 - DNA, 75 bp, synthetic construct
  source 1..75: mol_type = other DNA
ccaggcgggcggtgcgatttttgataacctcgcattaatcttcgccatcggcgtggcatccagctggtcgaaaga

SEQ ID NO: 682937 - DNA, 75 bp, synthetic construct
  source 1..75: mol_type = other DNA
atggcagtacggtaaaaggtgacaatgtcacttttcgtgttggtgaattaaaccttgatggcggaaaagtttggc

SEQ ID NO: 682938 - DNA, 75 bp, synthetic construct
  source 1..75: mol_type = other DNA
aaaaaatcatcctcgaccagggcggtggtctgctggtcaacgggacaacgtttgcagccgtggtagatgacggcg

SEQ ID NO: 682939 - DNA, 75 bp, synthetic construct
  source 1..75: mol_type = other DNA
ctccgaccatttcagccatgtttcggtgatgcggaaagtgctgctaagaatgaccagctggatgcattatcttta

SEQ ID NO: 682940 - DNA, 75 bp, synthetic construct
  source 1..75: mol_type = other DNA
aactgacggaggcggaatataacctggcgcaaaccatcgtgcgggcgccaagtaatggatatgtcactcaggtct

SEQ ID NO: 682941 - DNA, 75 bp, synthetic construct
  source 1..75: mol_type = other DNA
cagcgcaggtgcggcggcactggcgggggggggggggtactttttgtttaaccaaagcgatggtgaccatcaacc

SEQ ID NO: 682942 - DNA, 75 bp, synthetic construct
  source 1..75: mol_type = other DNA
tcgtaatttttactgtgtcctggctgacagcacctgcgtatgcatctgacccttgcgcttcggtactttgcttat

SEQ ID NO: 682943 - DNA, 75 bp, synthetic construct
  source 1..75: mol_type = other DNA
cgctggttgccgttgtttttgcgcttttcgccgcttttcccatgttttccgacgtcagcattcagttacgtcact

SEQ ID NO: 682944 - DNA, 75 bp, synthetic construct
  source 1..75: mol_type = other DNA
tgcactcctgttcgaagcaggaaagaaaggtttcgtgctttatatcaccatgttcccgtcatatcagctcattta

SEQ ID NO: 682945 - DNA, 75 bp, synthetic construct
  source 1..75: mol_type = other DNA
aatatcaataaatgctaatgccgctgatccctgtaaatctgttttttgtctttatggtaaagctgtcggtagtag

SEQ ID NO: 682946 - DNA, 75 bp, synthetic construct
  source 1..75: mol_type = other DNA
gatttttttaatattctgaaaaagaaaaaaggaagcattcgctggagtaaaacttttgatgcccgtaaagcattt

SEQ ID NO: 682947 - DNA, 75 bp, synthetic construct
  source 1..75: mol_type = other DNA
aaggacttttttaatattctgaaaaagaaaaaaggaaacattcgctggagtaaaacatttgatgcccgcaaggca

SEQ ID NO: 682948 - DNA, 75 bp, synthetic construct
  source 1..75: mol_type = other DNA
actgcgccgggccacacaccgctgccgccgccgctgactattttgccggaacaccttaaccagcagatttgcctg

SEQ ID NO: 682949 - DNA, 75 bp, synthetic construct
  source 1..75: mol_type = other DNA
cccgatggccggatcgagcttgacaaagatttgatcccgccagtggtgaactaccaggcaagttcactgatatgc

SEQ ID NO: 682950 - DNA, 75 bp, synthetic construct
  source 1..75: mol_type = other DNA
gtagcgagcgcaacggataaggataaagctgagcttggtggtgcaggtgctggaataccgggggggatggggacc

SEQ ID NO: 682951 - DNA, 75 bp, synthetic construct
  source 1..75: mol_type = other DNA
acagaagcattcaggacatacagcaagggagctgggatgcaagagttatcgagacatgttgagttagtcaaatat

SEQ ID NO: 682952 - DNA, 75 bp, synthetic construct
  source 1..75: mol_type = other DNA
ccaactcgttggggcgtggcgcacaattgttgcagctcagccacctgcgtctgcggctactgccggaaaaggcag

SEQ ID NO: 682953 - DNA, 75 bp, synthetic construct
  source 1..75: mol_type = other DNA
ggaacatatcgcccgctatggtggtatggcaatgcataccgccggagagtttccagggctggagctggagctgtg

SEQ ID NO: 682954 - DNA, 75 bp, synthetic construct
  source 1..75: mol_type = other DNA
aaatcaccagaacggggaggcgcaaaaaaagcgagtattccccagacagccggagagcgaaaagccgcccttgtt

SEQ ID NO: 682955 - DNA, 75 bp, synthetic construct
  source 1..75: mol_type = other DNA
tgctttacctagcttgcttttatgcagttggatacggcgctggatatatagcagaaggaataacgtggcgcactc

SEQ ID NO: 682956 - DNA, 75 bp, synthetic construct
  source 1..75: mol_type = other DNA
gactctcccaaatccatgcggatcaaagaacttttggctaataaaaaattaggcatagatattcttcgtcatggt

SEQ ID NO: 682957 - DNA, 75 bp, synthetic construct
  source 1..75: mol_type = other DNA
agaacgcacagaacgcaggccagcgccggagcgccaacaggaactggagcaaaaacaaaaaacaaaaatcaaggc

SEQ ID NO: 682958 - DNA, 75 bp, synthetic construct
  source 1..75: mol_type = other DNA
gagtatcgggatgttgcccggaaagtgatcacactggagacaagacagaatgagagtcaggaactggcgctaaaa

SEQ ID NO: 682959 - DNA, 75 bp, synthetic construct
  source 1..75: mol_type = other DNA
cggtcacgagtcgcgcgtagatcatcgttcgctgaaagaacagggtatcaatcgcacgccggaagttcatcttgg

SEQ ID NO: 682960 - DNA, 75 bp, synthetic construct
  source 1..75: mol_type = other DNA
tttaagttctgcttttgcaaaacgattgatgaatgaactggcggtcaggccaattttcatgattgtgcccacatt

SEQ ID NO: 682961 - DNA, 75 bp, synthetic construct
  source 1..75: mol_type = other DNA
acttcgaagatcagctggcatcagtgaagaaatgcggtcatatgggcggcaaagtgctggtgccaactcaggaag

SEQ ID NO: 682962 - DNA, 75 bp, synthetic construct
  source 1..75: mol_type = other DNA
tggttacaccttcgtttctcaccagcaggaagtgggtacaggttatttcgataaagtgacgaccattattcaggg

SEQ ID NO: 682963 - DNA, 75 bp, synthetic construct
  source 1..75: mol_type = other DNA
ggttcaacatgtttgacctggcaaacgcctatgcccagggcgagggtatgaagcactatgttgagaaagtgcagc

SEQ ID NO: 682964 - DNA, 75 bp, synthetic construct
  source 1..75: mol_type = other DNA
agtgattgtctggcttttactgcgacaactaccgattcgcaccacacgccattttccaatgatggccgccgtgcg

SEQ ID NO: 682965 - DNA, 75 bp, synthetic construct
  source 1..75: mol_type = other DNA
atggcgcgtcgccacttttccagtcaggcactggtgttgatcgttatctctatcgccatcaatatgatcggcggg

SEQ ID NO: 682966 - DNA, 75 bp, synthetic construct
  source 1..75: mol_type = other DNA
atggctctttccgacatcgccttaaaacgctctgtaacgcgttctgagcgtttttcccgtttcgttgtagtcggc

SEQ ID NO: 682967 - DNA, 75 bp, synthetic construct
  source 1..75: mol_type = other DNA
tgcctttgaactgatgaaagcgatgattgaagccggtgcagcggcagttcacttcgaagatcagctggcgtcagt

SEQ ID NO: 682968 - DNA, 75 bp, synthetic construct
  source 1..75: mol_type = other DNA
atgaaaacccgtacacaacaaattgaagaattacagaaagagtggactcaaccgcgctgggaaggtattacccgc

SEQ ID NO: 682969 - DNA, 75 bp, synthetic construct
  source 1..75: mol_type = other DNA
aagcactacgttgagaaagtgcagcagccggaatttgccgctataccttcgtatctcaccagcaggaagtgggta

SEQ ID NO: 682970 - DNA, 75 bp, synthetic construct
  source 1..75: mol_type = other DNA
ctccgattgcgacccgtatgacagcgaatttattaccggcgagcgtactaacgaaggctttttccgtactcatgc

SEQ ID NO: 682971 - DNA, 75 bp, synthetic construct
  source 1..75: mol_type = other DNA
ccagcttccagcagcaattgtcggatatgggttacaaattccagtttatcaccctggcgggtatccacagcatgt

SEQ ID NO: 682972 - DNA, 75 bp, synthetic construct
  source 1..75: mol_type = other DNA
cgatccagaaactggtcgcggcgcgtctggctgcggatgttacaggagttccgaccctgttggttgctcgtaccg

SEQ ID NO: 682973 - DNA, 75 bp, synthetic construct
  source 1..75: mol_type = other DNA
gacccgcctgcaggacgagctgcgcacggaatctgtccgcgctcaggcccgtgaacagtttaccggtgcggtgga

SEQ ID NO: 682974 - DNA, 75 bp, synthetic construct
  source 1..75: mol_type = other DNA
ccgaccatgccgccagtcccctgatgacccgcctgcaggacgagctgcgcacggaatctgtccgcgctcaggccc

SEQ ID NO: 682975 - DNA, 75 bp, synthetic construct
  source 1..75: mol_type = other DNA
ctgaatcctatgttgaaatgctgctgccggaatccgttctgggtcgtctgggtgtgaccgttctgtctggcctga

SEQ ID NO: 682976 - DNA, 75 bp, synthetic construct
  source 1..75: mol_type = other DNA
ctctgttgcacgcacggttctgcgtgccgtccgtgactcagtggtctctgttgcccgcgctgtatggaactggat

SEQ ID NO: 682977 - DNA, 75 bp, synthetic construct
  source 1..75: mol_type = other DNA
ctctgttgcacgcacggttctgcgagccgtccgtgactcggtggtctctgttgcccgcgcagtatggaactggat

SEQ ID NO: 682978 - DNA, 75 bp, synthetic construct
  source 1..75: mol_type = other DNA
ctctgttgcacgcacggttctgcgagccgtccgtgactcagtggtctctgttgcccgcgcggtatggaactggat

SEQ ID NO: 682979 - DNA, 75 bp, synthetic construct
  source 1..75: mol_type = other DNA
taatgctcgtggtccggctggtgtgattaaacaactggttgatgcaagccgtgttgagaagaaagctgctttctc

SEQ ID NO: 682980 - DNA, 75 bp, synthetic construct
  source 1..75: mol_type = other DNA
cggtctggaactggatatggacgacaccacctaccgtgcacagtccgctatcgttccgcgtatctgggtagatct

SEQ ID NO: 682981 - DNA, 75 bp, synthetic construct
  source 1..75: mol_type = other DNA
cgacgaagaattagaacgcgcattggcaattaaagacatgacgccggaagcattccgcactaaggcactaaataa

SEQ ID NO: 682982 - DNA, 75 bp, synthetic construct
  source 1..75: mol_type = other DNA
gcgtatctgggtagatctggattacgttgtaacccagccggaagctctgaaagttctccagattggcggtgaatg

SEQ ID NO: 682983 - DNA, 75 bp, synthetic construct
  source 1..75: mol_type = other DNA
ggttttgttgatgaaaatggaagtgcccccgagtcgaaggctaccttttcgaacgtgaaaatgtctcctaagacg

SEQ ID NO: 682984 - DNA, 75 bp, synthetic construct
  source 1..75: mol_type = other DNA
tttgctggtggcaacccgatcagccgtcagagcattaaaaccgttccgggtatcgctaccctgatcactgatcac

SEQ ID NO: 682985 - DNA, 75 bp, synthetic construct
  source 1..75: mol_type = other DNA
ctctgttgcacgcacggttctgcgcgccgtccgtgactccgtggtctctgttgcccgcgccgtatggaactggat

SEQ ID NO: 682986 - DNA, 75 bp, synthetic construct
  source 1..75: mol_type = other DNA
tgctggaaaacggccatgtagtgctctccgataccggcgacgcgctgctggcgaatgaagcagtgagaagtgcat

SEQ ID NO: 682987 - DNA, 75 bp, synthetic construct
  source 1..75: mol_type = other DNA
ctcgcggatgacggtggaagaaaacctggcgatggggggcttttttgccgaacgcgaccagtttcaggagcgtat

SEQ ID NO: 682988 - DNA, 75 bp, synthetic construct
  source 1..75: mol_type = other DNA
gcgggcgaattgtgtttgatgataaagacattaccgactggcagacggcgaaaatcatgcgcgaagcggtggcga

SEQ ID NO: 682989 - DNA, 75 bp, synthetic construct
  source 1..75: mol_type = other DNA
aagtactggctctgcagagttcagctgcgggtagcgcaacaaatgttggtgtgcagatactggacagaacgggtg

SEQ ID NO: 682990 - DNA, 75 bp, synthetic construct
  source 1..75: mol_type = other DNA
gcgacttactttccatccccttcagtgccaccacggatttcaccgatctggccgactactgcgatcgcttcgctg

SEQ ID NO: 682991 - DNA, 75 bp, synthetic construct
  source 1..75: mol_type = other DNA
gtctggtattttgctgacagtctgaaagccccgcactggatacgtaccgctgacggcgtacaggttatcgacggg

SEQ ID NO: 682992 - DNA, 75 bp, synthetic construct
  source 1..75: mol_type = other DNA
atcaggcgtttatgatggagcgacgcgatcatgcaggtggcaatggtcagacgctgaatttacgtgttatcggcg

SEQ ID NO: 682993 - DNA, 75 bp, synthetic construct
  source 1..75: mol_type = other DNA
aaatagcccgatcaaaaccgtagccgatcttaaaggtcacaaagttgcctttcagaaaggttccagttcgcacaa

SEQ ID NO: 682994 - DNA, 75 bp, synthetic construct
  source 1..75: mol_type = other DNA
ctctgttgcacgcacggttctgcgggccgtccgtgactcagtggtctctgttgcccgcgcagtatggaactggat

SEQ ID NO: 682995 - DNA, 75 bp, synthetic construct
  source 1..75: mol_type = other DNA
gtgaaattggcatttccggtggtggagatcatcatcactcactggaggctgcccctatggcaactaccctcactt

SEQ ID NO: 682996 - DNA, 75 bp, synthetic construct
  source 1..75: mol_type = other DNA
tgcctggcgctggcgcaggtactgctgggacggtcactgttgccggaaaccgaaacgacgctgaccgggttactg

SEQ ID NO: 682997 - DNA, 75 bp, synthetic construct
  source 1..75: mol_type = other DNA
tgctgccacagattttaccgtactggctgaccactgtgaaaacttcgccgaaaccctgatcgaaagcgacgatcc

SEQ ID NO: 682998 - DNA, 75 bp, synthetic construct
  source 1..75: mol_type = other DNA
gcagcgtggtcgtgctgctcgtggtggctctgtattcgttccggctgctgctctgcgtgctgctgctgatggtaa

SEQ ID NO: 682999 - DNA, 75 bp, synthetic construct
  source 1..75: mol_type = other DNA
gacgagaatctcgactatgcccgcacaggccatgatatttcctgcaatttaggttcgttgaatattgcccacacc

SEQ ID NO: 683000 - DNA, 75 bp, synthetic construct
  source 1..75: mol_type = other DNA
aggcggtgccgccgaccggttccatctcttatatcaaccatgccacatcgagtattcatccgattgtggcgaaag

SEQ ID NO: 683001 - DNA, 75 bp, synthetic construct
  source 1..75: mol_type = other DNA
tttgccgatcgagtcacgatggtggcgctgacgctggcacaaggcgatgaaacactggcgacgcaactgactgat

SEQ ID NO: 683002 - DNA, 75 bp, synthetic construct
  source 1..75: mol_type = other DNA
cgaagcttatcggcattatgagccggaccttcggcgaagccgcctgtcagcaagagctggaggcctttttagccc

SEQ ID NO: 683003 - DNA, 75 bp, synthetic construct
  source 1..75: mol_type = other DNA
aggcggtgccgccaaccggttccatctcttatatcaaccatgccacgtcgagtattcatccgattgtggcgaaag

SEQ ID NO: 683004 - DNA, 75 bp, synthetic construct
  source 1..75: mol_type = other DNA
ttcctcaactgcggtaagcagcagcgcggcgaactggtttcctgttttttgctgcgtattgaagacaatatggag

SEQ ID NO: 683005 - DNA, 75 bp, synthetic construct
  source 1..75: mol_type = other DNA
gacggcagacgggctgtattacgcagtcaggtacttgagctacatggcatcagccacggttcggccggagcaaga

SEQ ID NO: 683006 - DNA, 75 bp, synthetic construct
  source 1..75: mol_type = other DNA
agaacgaatggatgccggtggtgggttacgtaagcttcagcgaggcagctcacgccataacggattatatcgttg

SEQ ID NO: 683007 - DNA, 75 bp, synthetic construct
  source 1..75: mol_type = other DNA
atcctcaaaacgctgggggcagggcgagcgcaactgcgtaagcaaatcgtcggtcagtggttgatggtgctggcg

SEQ ID NO: 683008 - DNA, 75 bp, synthetic construct
  source 1..75: mol_type = other DNA
cgcgctgaatgcgatgcttaacctctacgatagcgcaggtcgcattcagttcgataaagaccgccaggccgttga

SEQ ID NO: 683009 - DNA, 75 bp, synthetic construct
  source 1..75: mol_type = other DNA
caaagccgctgttgccttcttaggtacaacaattgacactacccataccaatgtactggctctgcagagttctgc

SEQ ID NO: 683010 - DNA, 75 bp, synthetic construct
  source 1..75: mol_type = other DNA
tgagcgacaactcgcagcttggagatacccattataaccgccaggttatctttaccgataagcaacaagaaagcg

SEQ ID NO: 683011 - DNA, 75 bp, synthetic construct
  source 1..75: mol_type = other DNA
ggttgccgcacctttggcgtacaagcgaaactcatcgggattatgagccggacttttggcgaagccgcctgccag

SEQ ID NO: 683012 - DNA, 75 bp, synthetic construct
  source 1..75: mol_type = other DNA
agcccacttacctgacgcctgccgatgcccgcgccgcgttccagcaaggtaacgttgacgcctgggctatctggg

SEQ ID NO: 683013 - DNA, 75 bp, synthetic construct
  source 1..75: mol_type = other DNA
gtgaggccgatgcgttaacccgcagccagcgcgagcaaagcatcgctttactggcaaaaacgatgggcttaccgg

SEQ ID NO: 683014 - DNA, 75 bp, synthetic construct
  source 1..75: mol_type = other DNA
aaacagcccgatcaaaaccgtagccgatcttaaaggtcacaaagttgcctttcagaaaggttccagctcgcacaa

SEQ ID NO: 683015 - DNA, 75 bp, synthetic construct
  source 1..75: mol_type = other DNA
tgaaggtacgatggaaaaaatttctgtcggctatgacattaaagaatatcacatcgactacaccaaagggcaatt

SEQ ID NO: 683016 - DNA, 75 bp, synthetic construct
  source 1..75: mol_type = other DNA
ggcggtagtgcctagaatctttgtagatttggactacgttgtagcacagccggaagctctgaaagttcttcacat

SEQ ID NO: 683017 - DNA, 75 bp, synthetic construct
  source 1..75: mol_type = other DNA
ttcgttgatgaaaacggtgctgcaccggaaagcaaagctgaatttgcaaacgtgaaactgtctcctaagactttt

SEQ ID NO: 683018 - DNA, 75 bp, synthetic construct
  source 1..75: mol_type = other DNA
tgccgttacttctgctggcctggctaccactgttaagcagctgcgcgccgaagcaacaaaactcgctacccacat

SEQ ID NO: 683019 - DNA, 75 bp, synthetic construct
  source 1..75: mol_type = other DNA
gttaccgtcgataccaccattcaggaacatcgcgatcgcggtgacacctataacggtcagttctttaccagtgga

SEQ ID NO: 683020 - DNA, 75 bp, synthetic construct
  source 1..75: mol_type = other DNA
tgtcgccgcgtggcatttgaaaacattgaagatgcagcccgtaacggcctgcactatgtcgagctgcgtttttca

SEQ ID NO: 683021 - DNA, 75 bp, synthetic construct
  source 1..75: mol_type = other DNA
gtatgcagaaaaaaacggcgcttttattcagggtgtgctgacaacctttagtgaggccgatgcgttaacccgcag

SEQ ID NO: 683022 - DNA, 75 bp, synthetic construct
  source 1..75: mol_type = other DNA
ttttcgacttgtacggcctatggctatgccggtcgtttatccgaaaaatgatggatcgttaatagaagccggtat

SEQ ID NO: 683023 - DNA, 75 bp, synthetic construct
  source 1..75: mol_type = other DNA
aagatcatggacatgtttccggtcgaggaaaccgtgtcagatggcgtttacttccggttggtacgaccaatgtcg

SEQ ID NO: 683024 - DNA, 75 bp, synthetic construct
  source 1..75: mol_type = other DNA
aaattctgtgccgattctaaacgcggctttgtattcggctactcacaccggatgtacgaaaagaccggagatcgc

SEQ ID NO: 683025 - DNA, 75 bp, synthetic construct
  source 1..75: mol_type = other DNA
agctcctcaatataatgaaatcattgctgatgatgactggcgtacctcaacattgcttgatacaacaataaatct

SEQ ID NO: 683026 - DNA, 75 bp, synthetic construct
  source 1..75: mol_type = other DNA
aatacaaaaagcagcgcccaaacaagggcaaggtaaacctacctgggttgcaggagaaaaactaaaccaaacaat

SEQ ID NO: 683027 - DNA, 75 bp, synthetic construct
  source 1..75: mol_type = other DNA
caacagctttggttgaagcaaaatcaggtaagtacgcgatacttgaactggaacacagcaaaccacaaaatgaat

SEQ ID NO: 683028 - DNA, 75 bp, synthetic construct
  source 1..75: mol_type = other DNA
ctgctcgccgtcgttcaactggcagaaaaacctcgacgacaaaactattgccagcttccagcagcagctgtcgga

SEQ ID NO: 683029 - DNA, 75 bp, synthetic construct
  source 1..75: mol_type = other DNA
aaccgaactgatgggtaccgtgcgcgaacgcgcggaagatgaagcaatcaacgtctttgcccgtaacctgcacga

SEQ ID NO: 683030 - DNA, 75 bp, synthetic construct
  source 1..75: mol_type = other DNA
acgcagctgcgtaatctggaaacgcgtctgagctatttgcgcgagctggaagagagacgtcaggcaatcctcaag

SEQ ID NO: 683031 - DNA, 75 bp, synthetic construct
  source 1..75: mol_type = other DNA
attatgatgtgaacgattaccttataattgctgcgttaagggctaaactatatgaagaagcattaaatcgggtta

SEQ ID NO: 683032 - DNA, 75 bp, synthetic construct
  source 1..75: mol_type = other DNA
tatgtaccatatgattttgaatcgcatggaagggattatatagaaaactccggcatttatccgatttcgagttta

SEQ ID NO: 683033 - DNA, 75 bp, synthetic construct
  source 1..75: mol_type = other DNA
tatataccatatgattttgaattgcatggaaggggatatatagaaaactccggcatttatccgatttcgagttta

SEQ ID NO: 683034 - DNA, 75 bp, synthetic construct
  source 1..75: mol_type = other DNA
aaaatgatccgcaacgcgcatccgaagcaggtaaaaaaggcggtcaacaaagcggtggtaataaatcaggaaaat

SEQ ID NO: 683035 - DNA, 75 bp, synthetic construct
  source 1..75: mol_type = other DNA
tatccgcttgctttgttcatttcgatagctaacatcgctgatgatgagaaagcagccatgtataatgatcttgtc

SEQ ID NO: 683036 - DNA, 75 bp, synthetic construct
  source 1..75: mol_type = other DNA
ctgagcatgaaaatattaatgctattgaattatatgaaaatgagtggaagagctttgaagataaatactggtcgg

SEQ ID NO: 683037 - DNA, 75 bp, synthetic construct
  source 1..75: mol_type = other DNA
gcattccttcggaataccagattatggatatgctggaagtgagtcggggaaccgttaaaaaagcggtcgcccaac

SEQ ID NO: 683038 - DNA, 75 bp, synthetic construct
  source 1..75: mol_type = other DNA
tcttttactgcgcgcattacgccaggctgggcttaaatttacggatatccagcccacttacctgacgcccgctga

SEQ ID NO: 683039 - DNA, 75 bp, synthetic construct
  source 1..75: mol_type = other DNA
cgatctcaatcaaactggatcgttttatctggcagctcgcccctatgcagaaaaaaacggcgcttttattcaggg

SEQ ID NO: 683040 - DNA, 75 bp, synthetic construct
  source 1..75: mol_type = other DNA
tggcgggattgcttagcgtctctacttttgcggttgctgcagaatcctcgcctgaagcgttacgtataggctatc

SEQ ID NO: 683041 - DNA, 75 bp, synthetic construct
  source 1..75: mol_type = other DNA
ggattctgctgcccggggaagtatcagaaaggcatttctggttattgattgaaatatccgggatgcacagtgaga

SEQ ID NO: 683042 - DNA, 75 bp, synthetic construct
  source 1..75: mol_type = other DNA
ttcaggtctgaaggaaaattgcttacagaccggcctgtaaaaacagttgaaactgagaagttgaaagagttttct

SEQ ID NO: 683043 - DNA, 75 bp, synthetic construct
  source 1..75: mol_type = other DNA
gatcgcaatcagtttgcacgtaagaaaactgattcaaaaaaacgactggttgtttatgagttctcacgtatctcg

SEQ ID NO: 683044 - DNA, 75 bp, synthetic construct
  source 1..75: mol_type = other DNA
gagtttggcaacgtctggttaaaaggaaataaatattatctgggcaccgtgctgcaacggcgggaagtgagttaa

SEQ ID NO: 683045 - DNA, 75 bp, synthetic construct
  source 1..75: mol_type = other DNA
gcgtcatttttgtgattagtgaatttatctcaatgtggcgcactggagggagttttattcaattaatgcagggta

SEQ ID NO: 683046 - DNA, 75 bp, synthetic construct
  source 1..75: mol_type = other DNA
cacggttgtcttgagcagttgcgccgcaaattatggcattgtcgttttgatccgtggcgagatttacttatctca

SEQ ID NO: 683047 - DNA, 75 bp, synthetic construct
  source 1..75: mol_type = other DNA
gaattacccttatttactgagacgacagcttacgcgccaagcagtccttattccgcatccaaagcatccagcgat

SEQ ID NO: 683048 - DNA, 75 bp, synthetic construct
  source 1..75: mol_type = other DNA
gctttatacaacaaagcaccaaagatatcagtagttacgaaaaaacgattgaaagcctattcaaagtggttgcct

SEQ ID NO: 683049 - DNA, 75 bp, synthetic construct
  source 1..75: mol_type = other DNA
aaattattagagcgagcggggcctgcgccaaaaggttcaataaccgcgatttatacggtgttgttagaaagcgat

SEQ ID NO: 683050 - DNA, 75 bp, synthetic construct
  source 1..75: mol_type = other DNA
gtgaagtaaatgaatttcttgcgcttttacctcaatccacgctttctaaatgcgtactggttgtaacaacttcag

SEQ ID NO: 683051 - DNA, 75 bp, synthetic construct
  source 1..75: mol_type = other DNA
gcgaagtaaatgaattcctcgcgcttttacctcaatccacgctttctaaatgtgtactggtcgtcacaacgtcag

SEQ ID NO: 683052 - DNA, 75 bp, synthetic construct
  source 1..75: mol_type = other DNA
gcgaagtaaatgaattccttgcgctcttacctcaatccacgctttctaaatgtgtgctggtcgtcacaacgtcag

SEQ ID NO: 683053 - DNA, 75 bp, synthetic construct
  source 1..75: mol_type = other DNA
aattaaacggcgatgactcggcaagtgaccaactggtattgaacggtaatactgctggcaacacggccgtggtaa

SEQ ID NO: 683054 - DNA, 75 bp, synthetic construct
  source 1..75: mol_type = other DNA
tgtgactcattgcgtaagatgaattcaacaaaatgcaatgagatggcatcacttattgaaagtgcaattgatttt

SEQ ID NO: 683055 - DNA, 75 bp, synthetic construct
  source 1..75: mol_type = other DNA
atttagttcagaaacaaccctgaataacggaaccaacaccattccgttccaggcgcgttattttgcaaccggtgc

SEQ ID NO: 683056 - DNA, 75 bp, synthetic construct
  source 1..75: mol_type = other DNA
tctccccgttatccgaaaaactggaagacatccggcgatccggcgcgagagttcaccatgattcagtcagcaccg

SEQ ID NO: 683057 - DNA, 75 bp, synthetic construct
  source 1..75: mol_type = other DNA
ggcagtgacgcagacaatgactcaatccgcgccagcaatggtgctcacggacgctgatgcattcgtcgtcgtaaa

SEQ ID NO: 683058 - DNA, 75 bp, synthetic construct
  source 1..75: mol_type = other DNA
ggcagtgacgcagacaatgacccaatccgcgccagcgatggtcctcaccgacgccgacgcgtttgtcgtcgtaaa

SEQ ID NO: 683059 - DNA, 75 bp, synthetic construct
  source 1..75: mol_type = other DNA
gcggatcgtgactcttttctactgtcctggaaagctggtgcgcgcgaagcacgtttggggaatggtattggttac

SEQ ID NO: 683060 - DNA, 75 bp, synthetic construct
  source 1..75: mol_type = other DNA
gccaaaatccatgaaggggagagtgggcgtcggctatgggctgagtgcgttgagttggggattgaagcgcgcaag

SEQ ID NO: 683061 - DNA, 75 bp, synthetic construct
  source 1..75: mol_type = other DNA
gaagatactgattttacggacgtcgcggcagtcgtcattaccgctgcggatagtcgtagtggcattcttgcgtta

SEQ ID NO: 683062 - DNA, 75 bp, synthetic construct
  source 1..75: mol_type = other DNA
gtaatgaactggtttcccgactttctacccatcgtcgcgtggtggcgctggaagatactgattttacggacgtcg

SEQ ID NO: 683063 - DNA, 75 bp, synthetic construct
  source 1..75: mol_type = other DNA
tcagtctgtgcacaaacagcaagcggggttctcacagacttcgcagatccataaaaaagataaccatattcgtgg

SEQ ID NO: 683064 - DNA, 75 bp, synthetic construct
  source 1..75: mol_type = other DNA
gtcgaatcatcatggcgcgctgattcaggctggtgcgacgcctgtgtatctggaagccgcacgtaacccgtttgg

SEQ ID NO: 683065 - DNA, 75 bp, synthetic construct
  source 1..75: mol_type = other DNA
gtttatcccgatgatggcggatagctcgccgctgctgttagaacttaacgaaaacgatccggggatctttgtgac

SEQ ID NO: 683066 - DNA, 75 bp, synthetic construct
  source 1..75: mol_type = other DNA
ggcagcaaacaaagtggttaccaatgcgctgttaacgcgtggcgatctggtactgttcgatcgtaacaatcataa

SEQ ID NO: 683067 - DNA, 75 bp, synthetic construct
  source 1..75: mol_type = other DNA
atgaagtgtatggcgatttgccgcacccggacgagcatccggtttctaccgatctgccgctctttaccgaaacca

SEQ ID NO: 683068 - DNA, 75 bp, synthetic construct
  source 1..75: mol_type = other DNA
ccgggttcatcggttcggcattaacgcgatacattattaactcaacaaatgactctgttgtgaatgttgataagt

SEQ ID NO: 683069 - DNA, 75 bp, synthetic construct
  source 1..75: mol_type = other DNA
tgcgatctcaactccattctgttcttattaactccggcggaaagccacgagaagctggcacaactggtggcgatg

SEQ ID NO: 683070 - DNA, 75 bp, synthetic construct
  source 1..75: mol_type = other DNA
gctgtttgctgcactggacgttaacgccaaaattcatgaaggggagagtgggcgtcggctgtgggctgagtgcgt

SEQ ID NO: 683071 - DNA, 75 bp, synthetic construct
  source 1..75: mol_type = other DNA
gccgttttttcagttttgagccgggggcgaagtggcacggctttgaaggatatgccgcggatcagtattttgttg

SEQ ID NO: 683072 - DNA, 75 bp, synthetic construct
  source 1..75: mol_type = other DNA
caactcttgaccacccagtaccagatgctccgtaacgccattattaaagttaagcgagacaggccttttgaaatc

SEQ ID NO: 683073 - DNA, 75 bp, synthetic construct
  source 1..75: mol_type = other DNA
ttgttctgattattgcagcgctacttatccggattatcctcagaagtgtaaatcagcattctcctttgctgatgc

SEQ ID NO: 683074 - DNA, 75 bp, synthetic construct
  source 1..75: mol_type = other DNA
ctggaaaaagccctcgcactggacccgcacagcagcaacaacgacaaatggaacagtctgctgaaagtaaaccgc

SEQ ID NO: 683075 - DNA, 75 bp, synthetic construct
  source 1..75: mol_type = other DNA
cgaaaaccaaacctctgcacaacagcaacaactcaccagttggcaggaacaggggcacgatattttcccgcttgg

SEQ ID NO: 683076 - DNA, 75 bp, synthetic construct
  source 1..75: mol_type = other DNA
tgaaaaccagtctcccgcccagcagcagcagctcaccaactggcaggaacaaggccatgatattttcccactcgg

SEQ ID NO: 683077 - DNA, 75 bp, synthetic construct
  source 1..75: mol_type = other DNA
cgacggcgtactgatcaactacatcgccatttgcctggcttcggcacgtaaaaaacagggtaaagatgcgctggt

SEQ ID NO: 683078 - DNA, 75 bp, synthetic construct
  source 1..75: mol_type = other DNA
caccgctaagttcggcagatcgcgaaaaactggaacgcttttcgcattctgaaggcctggatctgtatctcgccc

SEQ ID NO: 683079 - DNA, 75 bp, synthetic construct
  source 1..75: mol_type = other DNA
ccaacttgaagcattgctgcccaaagtcagagcatgtctgacgagcttacagggaatgcgccaccttgggcatgt

SEQ ID NO: 683080 - DNA, 75 bp, synthetic construct
  source 1..75: mol_type = other DNA
cgatcgggaacggcatcagaaagtgatgtactaccgacaggtcaagaaactgagcatccgtgaaacggcagaggc

SEQ ID NO: 683081 - DNA, 75 bp, synthetic construct
  source 1..75: mol_type = other DNA
gccgccggaaggtgacattgctgtcgagtactggagtacggtggcgaaaattccggctcgccgtggcgaagcgat

SEQ ID NO: 683082 - DNA, 75 bp, synthetic construct
  source 1..75: mol_type = other DNA
ttctaaaatctggtacgggcagattaaagacatgcccgtgagcgacgccagcgtgtcggcactgaaaaaatatct

SEQ ID NO: 683083 - DNA, 75 bp, synthetic construct
  source 1..75: mol_type = other DNA
gcaaatatttaccgccagcaatcgccagaaaaagctgaagcgtttatcgcctcgctctctgccagtcagcggcgt

SEQ ID NO: 683084 - DNA, 75 bp, synthetic construct
  source 1..75: mol_type = other DNA
acgtacgatgctgacagatatctttaacagtaattaccagtgttatggctatcgtcgcctgcatgcgatgctcag

SEQ ID NO: 683085 - DNA, 75 bp, synthetic construct
  source 1..75: mol_type = other DNA
tttgctgtagttttcgatgaaacacacgattttttcaaaatatatcggccgtgtgatgttagttataatccagaa

SEQ ID NO: 683086 - DNA, 75 bp, synthetic construct
  source 1..75: mol_type = other DNA
cacgttgttccttgggtattccgtcgctggccagcgtcttaaagcgcaatttgcccagcaaggccgtatcgtcga

SEQ ID NO: 683087 - DNA, 75 bp, synthetic construct
  source 1..75: mol_type = other DNA
caaagacaaaagagaatgattgttatttacttttcaaaaaaaaagtgtcatattgtccatataaagtcaagaggt

SEQ ID NO: 683088 - DNA, 75 bp, synthetic construct
  source 1..75: mol_type = other DNA
gccggtgcggttgtggtttcgctctgttccacctctgatgaaaccattgaagaagccgagaaagatctgccgcgc

SEQ ID NO: 683089 - DNA, 75 bp, synthetic construct
  source 1..75: mol_type = other DNA
caggaaggcattaagtgggctttcgtcagcaaagaagctcgcgatgtggccaacgataacgagatatgggaggtc

SEQ ID NO: 683090 - DNA, 75 bp, synthetic construct
  source 1..75: mol_type = other DNA
tcctgcgccatcgaggaatatagatataaagaataaagataatacattgcatgggatcttaaatcgagattcagt

SEQ ID NO: 683091 - DNA, 75 bp, synthetic construct
  source 1..75: mol_type = other DNA
gaaaataaaaaaagtgacaacagcaactcatcaattatacctgagcgaaaaaccccagagtttgcagatgcaatt

SEQ ID NO: 683092 - DNA, 75 bp, synthetic construct
  source 1..75: mol_type = other DNA
ctgcaattagcaattgcacgtggaaaaacatcactaaaatggaagaacgcatcacaaaggcatttgaggccataa

SEQ ID NO: 683093 - DNA, 75 bp, synthetic construct
  source 1..75: mol_type = other DNA
ggccatgcaagacgcagaggcagaagagcgccgttataaaaaagcaattgaagctgcaagaaaggaaatggaaaa

SEQ ID NO: 683094 - DNA, 75 bp, synthetic construct
  source 1..75: mol_type = other DNA
actggcgtttggcgatcatgttcactgcttttttgccgaaccaacacactccccgtgtatgttattaggcgtcca

SEQ ID NO: 683095 - DNA, 75 bp, synthetic construct
  source 1..75: mol_type = other DNA
cgggcgatggagcgtctgctggatggcttctatacccttagcgatcaaaccatgtatgacatgcttggctggctg

SEQ ID NO: 683096 - DNA, 75 bp, synthetic construct
  source 1..75: mol_type = other DNA
tcctgaaactgctgccactggggggattattgaatcagaactggttgccattccgactatgcaaaaacggctgga

SEQ ID NO: 683097 - DNA, 75 bp, synthetic construct
  source 1..75: mol_type = other DNA
tggggaaatatcggggaaaacaggccgatcgggaacggcatcagaaagtgatgtactaccgacaggtcaagaaac

SEQ ID NO: 683098 - DNA, 75 bp, synthetic construct
  source 1..75: mol_type = other DNA
ctttgcccgcgccagtgcctttacccatgtgttgctgctgaaaagcccgcaggagatccgtccgaccatcgacac

SEQ ID NO: 683099 - DNA, 75 bp, synthetic construct
  source 1..75: mol_type = other DNA
aggagatccgcccaaccatcgacacacaaaaggcgttactactggtgcgtttcccggctgacttctcgcgcaaac

SEQ ID NO: 683100 - DNA, 75 bp, synthetic construct
  source 1..75: mol_type = other DNA
aaaatatataaaaacattattggttttttaaatggacccgctaacggtgttttagcacttgatgccgaaggtgcc

SEQ ID NO: 683101 - DNA, 75 bp, synthetic construct
  source 1..75: mol_type = other DNA
ccactatcggcgtaatgatcgtcacttcactttccgtcgcccgcgaacgtgaacagggtacgctcgatcagttac

SEQ ID NO: 683102 - DNA, 75 bp, synthetic construct
  source 1..75: mol_type = other DNA
ggtgggattcggtctgttgatttcatcactctgctcaacacaacagcaggcgtttatcggcgtgtttgtttttat

SEQ ID NO: 683103 - DNA, 75 bp, synthetic construct
  source 1..75: mol_type = other DNA
tggataccttccagaccgcgccgttgcagttgatcctcgacgggcgtaactccaacagtgcgcaaatcgccgcca

SEQ ID NO: 683104 - DNA, 75 bp, synthetic construct
  source 1..75: mol_type = other DNA
gataatgtgtttttttctcagacagaactctccggagtctgtttatctggtgaactcgtgtcgggtaaagataaa

SEQ ID NO: 683105 - DNA, 75 bp, synthetic construct
  source 1..75: mol_type = other DNA
caacaatatgccatgtacttgatgatgcattgagtgatcaggaaaaaaacgagatcctgttgctccctgataaat

SEQ ID NO: 683106 - DNA, 75 bp, synthetic construct
  source 1..75: mol_type = other DNA
attcagaagttatcccaaaaaataagaaattttatagaacaactgtcgtcaaacttacatcataatattccggtc

SEQ ID NO: 683107 - DNA, 75 bp, synthetic construct
  source 1..75: mol_type = other DNA
cggaataaagcgtcaaatagaacaatttgatctcatgttacgtatatacctgatttctgtttttaataacagtca

SEQ ID NO: 683108 - DNA, 75 bp, synthetic construct
  source 1..75: mol_type = other DNA
gatacaaaaaaacaatggaagtaaaaatattgatgtgttcagaaaactcctgaccgagtttattcagagtgaccc

SEQ ID NO: 683109 - DNA, 75 bp, synthetic construct
  source 1..75: mol_type = other DNA
gtgctttattggatatagtgcatattgttcatataacatatatgatgtcagacaaggtcctgttgataccagccc

SEQ ID NO: 683110 - DNA, 75 bp, synthetic construct
  source 1..75: mol_type = other DNA
ggtgggattcggtctgttgatttcatcactctgttcaacacaacagcaggcgtttatcggcgtgtttgtctttat

SEQ ID NO: 683111 - DNA, 75 bp, synthetic construct
  source 1..75: mol_type = other DNA
ggattggtatctatagatcgtaaaaatttgttgctgttatctatattcataattatttttttattttgtttggtt

SEQ ID NO: 683112 - DNA, 75 bp, synthetic construct
  source 1..75: mol_type = other DNA
atgatatcgatcagtgttgccgatggtgcgggactgcagaattacgatgccgtgcttgagcatatttttaacacg

SEQ ID NO: 683113 - DNA, 75 bp, synthetic construct
  source 1..75: mol_type = other DNA
gcgacgcatccattctcgaaaatgtatgatgttaacgccagtgatgatgctattaacgttacgcataaccgccct

SEQ ID NO: 683114 - DNA, 75 bp, synthetic construct
  source 1..75: mol_type = other DNA
cgtcaacagaagatcagtttgcagatcgggcaaaagagatgctggaacagttcgtccaggaacgggggcataaaa

SEQ ID NO: 683115 - DNA, 75 bp, synthetic construct
  source 1..75: mol_type = other DNA
cagccggactggaagtgacttcccgccctgttggccccggaaatacagtctgtcgttaccgtaccacccgggcca

SEQ ID NO: 683116 - DNA, 75 bp, synthetic construct
  source 1..75: mol_type = other DNA
ccggcctgtatgacacatggttagttctcgggggacgttcgttcgaactggagcagttgtctgataaaccggagt

SEQ ID NO: 683117 - DNA, 75 bp, synthetic construct
  source 1..75: mol_type = other DNA
agatgtcaccacggaaaatggtgatattcagccggagccaccggtgacggatatgacagacacacaacccgaacc

SEQ ID NO: 683118 - DNA, 75 bp, synthetic construct
  source 1..75: mol_type = other DNA
ggcgcaccggcagctccggagccggaaggcatcgcgggagaggggagtgcttcagatagcggtgaccccacacct

SEQ ID NO: 683119 - DNA, 75 bp, synthetic construct
  source 1..75: mol_type = other DNA
atttcatcactctgctcgacacaacagcaggcgtttatcggcgtgtttgtttttttgatgcccgccattctcctt

SEQ ID NO: 683120 - DNA, 75 bp, synthetic construct
  source 1..75: mol_type = other DNA
aaaagttaaaagttacgattgctcaccttgaggaatactgtgatgaagttattcaaggcgcgacagttaatttcc

SEQ ID NO: 683121 - DNA, 75 bp, synthetic construct
  source 1..75: mol_type = other DNA
cacctcagaaaacggcgatattcagcccgaatcaccggtggttgatgcgactgaagcacaacccgaaccgggcac

SEQ ID NO: 683122 - DNA, 75 bp, synthetic construct
  source 1..75: mol_type = other DNA
ttcgatatgttcaaagtgaagacaggatgatgacgattaacgacccgattatttccgagcaagggatgtgtgaag

SEQ ID NO: 683123 - DNA, 75 bp, synthetic construct
  source 1..75: mol_type = other DNA
ggtgatgatgccggtgaaaaatccgatgtccggcaccggtctgcgctggaagccgctgcgcgatcagatcttttt

SEQ ID NO: 683124 - DNA, 75 bp, synthetic construct
  source 1..75: mol_type = other DNA
cgtaaaataaagcgactggaaaaccagctttcacctgcgactggtgtgacggtagcgcctgattcgtcagtggcg

SEQ ID NO: 683125 - DNA, 75 bp, synthetic construct
  source 1..75: mol_type = other DNA
ctgaacggccaaaatggcgcatccgataccatgctgcgcgccagcgcctcattctttaatggcggcaaatacagc

SEQ ID NO: 683126 - DNA, 75 bp, synthetic construct
  source 1..75: mol_type = other DNA
ggaagttagcgttgaagaagagttgcaacgtgttattcctgtggttgaggcaattgctcaacgcttcgaagtctg

SEQ ID NO: 683127 - DNA, 75 bp, synthetic construct
  source 1..75: mol_type = other DNA
tgaagaatacttcagtacccataaaaaagcggttcaggcgttcaccactggtgcctggactcaacgtgagtgggc

SEQ ID NO: 683128 - DNA, 75 bp, synthetic construct
  source 1..75: mol_type = other DNA
atattggtgagcaagttttgtgtatctttcatcccgcagggccgcaacaaggttttattcttggtagtttttatg

SEQ ID NO: 683129 - DNA, 75 bp, synthetic construct
  source 1..75: mol_type = other DNA
ctcactggctgtcacccttgcggaaccgggtgaagatgtttatcagctttcgggtaacgatctcgcgctgcgact

SEQ ID NO: 683130 - DNA, 75 bp, synthetic construct
  source 1..75: mol_type = other DNA
tattatcattgtcattatttgttggggtggttacagagttttttctccccggcgtaacaacgttgcacatgggga

SEQ ID NO: 683131 - DNA, 75 bp, synthetic construct
  source 1..75: mol_type = other DNA
ggctacgccagctatgcgcggcttaaaaatgtgaatgccgatctgcttaaaattgaatccgcaatattgtgtcaa

SEQ ID NO: 683132 - DNA, 75 bp, synthetic construct
  source 1..75: mol_type = other DNA
attgtctcaaatagtctggattatcagatagtggcgtcgatatgccatctggcgcgaatgaagaaaatgcaagta

SEQ ID NO: 683133 - DNA, 75 bp, synthetic construct
  source 1..75: mol_type = other DNA
aggtattgattatctgcaaggatttttgattggtgaacctcagccgttagtggcgatactgggtgaaagagagcc

SEQ ID NO: 683134 - DNA, 75 bp, synthetic construct
  source 1..75: mol_type = other DNA
cacactggctgacaccgttgctggaaccgggcgaagctgtttatcagctttccggtaacgaccttgcgttgcgac

SEQ ID NO: 683135 - DNA, 75 bp, synthetic construct
  source 1..75: mol_type = other DNA
ataactcgctgatagatgcggtgaaacatgcgaatctgatgatcaacgctggcgcgacgatcattgacgttggtg

SEQ ID NO: 683136 - DNA, 75 bp, synthetic construct
  source 1..75: mol_type = other DNA
tgacaggaaaggtgactggcgaatgaaatgggcgacttacataccgggacatcctgacgctaatgatggttggat

SEQ ID NO: 683137 - DNA, 75 bp, synthetic construct
  source 1..75: mol_type = other DNA
tttgttcaaccctcaacgccgccattactgggttaccgccgcggataacgatacgctggcaattaccaccccgaa

SEQ ID NO: 683138 - DNA, 75 bp, synthetic construct
  source 1..75: mol_type = other DNA
atttattcctacgtaagcattatcggtcatttcagcttcctggtgttcgccacctacttgctgatcctcttcccg

SEQ ID NO: 683139 - DNA, 75 bp, synthetic construct
  source 1..75: mol_type = other DNA
caaaagatttccgcaacgagattgttaacttcgtactgcgcgccagagcgaataacagcggacgcaatccgaact

SEQ ID NO: 683140 - DNA, 75 bp, synthetic construct
  source 1..75: mol_type = other DNA
aaatatctcaggattttatgcttcaattatcttcaaatataggatggaaaaaaggggccgaaaacgcccttaaaa

SEQ ID NO: 683141 - DNA, 75 bp, synthetic construct
  source 1..75: mol_type = other DNA
agccttttcagggaacaattccgttccgtattttgcagtgtggtcgtgttcttgttgaaggttcgttcagtggta

SEQ ID NO: 683142 - DNA, 75 bp, synthetic construct
  source 1..75: mol_type = other DNA
gggatgaattcagcattccaaaagaggtcgctcgccagctgattgatatgcatgtacgcgcggtgacgcgatctt

SEQ ID NO: 683143 - DNA, 75 bp, synthetic construct
  source 1..75: mol_type = other DNA
gatctcggtagatacatccaaaccagaagtcatccgtgagtcagcgaaagttggcgctcacattattaacgatat

SEQ ID NO: 683144 - DNA, 75 bp, synthetic construct
  source 1..75: mol_type = other DNA
cactggatcttagccatcctcacgtgatggggatactcaacgtcacgccagattctttttctgatggtggtacgc

SEQ ID NO: 683145 - DNA, 75 bp, synthetic construct
  source 1..75: mol_type = other DNA
atacaccactccgccagcgccgatagcgttagaggccattgaaaacgcaattgaatacattcgtagtatcgcttt

SEQ ID NO: 683146 - DNA, 75 bp, synthetic construct
  source 1..75: mol_type = other DNA
tgcgttggcctcttcaccttcaccgcttaatcccggcactaatgttgccagactcgctgaacaggctcctgtcca

SEQ ID NO: 683147 - DNA, 75 bp, synthetic construct
  source 1..75: mol_type = other DNA
acaaaatcgcaatggctgcaggataaaaatatccgaattttttatggcgattccgataacgatattaccgctgca

SEQ ID NO: 683148 - DNA, 75 bp, synthetic construct
  source 1..75: mol_type = other DNA
ggcgcattttcctttgaacgtcagtcattttttagctaaatatcaaatagaagcgtggcagcttatttttgaggt

SEQ ID NO: 683149 - DNA, 75 bp, synthetic construct
  source 1..75: mol_type = other DNA
ccggtgcgctggcgcaactacaaacctcctttacgttattcgccgatcgtgtcggtcagacgggctatctggatt

SEQ ID NO: 683150 - DNA, 75 bp, synthetic construct
  source 1..75: mol_type = other DNA
cctgtaacgctcagtaccgatggtatgagtggaggaggaaatgttctttctcctgtatcaattgagatcaacgtc

SEQ ID NO: 683151 - DNA, 75 bp, synthetic construct
  source 1..75: mol_type = other DNA
tttgcaaatggtggcatattcggaaaagacggcgtgatcccgctccgggcataccagaaaggcggtatcgccaac

SEQ ID NO: 683152 - DNA, 75 bp, synthetic construct
  source 1..75: mol_type = other DNA
tttccggctggctggtcgcttccgtcgcgctgtttgtcgtgatcggctggacctcttcagcacagatcccggtcg

SEQ ID NO: 683153 - DNA, 75 bp, synthetic construct
  source 1..75: mol_type = other DNA
tgggcctaaacaactcaagacgcagcttaatttgcagaaagcatccagtgccagctctctggagaaaatgagcga

SEQ ID NO: 683154 - DNA, 75 bp, synthetic construct
  source 1..75: mol_type = other DNA
tatgggccgggtatggccggaactacagtaaagattaatcaggatgaacgtaagcgtatagaaaatgagctaaat

SEQ ID NO: 683155 - DNA, 75 bp, synthetic construct
  source 1..75: mol_type = other DNA
ccggcacgatagctcttggtgacggcgctgtagcaaagcgtttggctaaagaggctgccgaatctcagattgaga

SEQ ID NO: 683156 - DNA, 75 bp, synthetic construct
  source 1..75: mol_type = other DNA
gcgcaattggcacagcaacaaatgcgattggtagctgggtatcagggctatttgatagcactgaagccaaagatg

SEQ ID NO: 683157 - DNA, 75 bp, synthetic construct
  source 1..75: mol_type = other DNA
ctacagtaaagattaatcatgatgaacgtaagcgaatagaaaatgagctaaatgaacttcgtaagaaacgcgatg

SEQ ID NO: 683158 - DNA, 75 bp, synthetic construct
  source 1..75: mol_type = other DNA
aaaccaggggactgtgaaccgccccgggtttcctggagagtattttatctgtgaactcaggctgccagatcatcg

SEQ ID NO: 683159 - DNA, 75 bp, synthetic construct
  source 1..75: mol_type = other DNA
ccattattagtgctggctatacgccgtctcgcgaagagaaagttgctgatttcgaagacacctacaaccgcaatc

SEQ ID NO: 683160 - DNA, 75 bp, synthetic construct
  source 1..75: mol_type = other DNA
agagatgatcgacaaggcgaaaaaacgtcttgaagacctcaaaaatgcgacacctgaatatcgcgagatgtttaa

SEQ ID NO: 683161 - DNA, 75 bp, synthetic construct
  source 1..75: mol_type = other DNA
cccctgttaaaaaacctcgcctcagcggctggctgctgacctcagtgctgttgctgggcatcatcgctctggtct

SEQ ID NO: 683162 - DNA, 75 bp, synthetic construct
  source 1..75: mol_type = other DNA
ccgttgattgtgcaattctttacctggtatctggtgatcccggagctgctgccagagaaaatcggcatgtggttt

SEQ ID NO: 683163 - DNA, 75 bp, synthetic construct
  source 1..75: mol_type = other DNA
cattacgctggcgtatgtgttgattaacgcttttatcatgctggtgatgacgctggttgaacgtaaagttcgcct

SEQ ID NO: 683164 - DNA, 75 bp, synthetic construct
  source 1..75: mol_type = other DNA
aatgacgccgaaaagcccgtcatcatcgctggcggtggcattattaacgccgaagcgagtgaattgttgcgtgag

SEQ ID NO: 683165 - DNA, 75 bp, synthetic construct
  source 1..75: mol_type = other DNA
ccagtgaatcatatctacctgctgctgggagagctaaatacggtcgccgaactttccatcgtgaccaacgccccg

SEQ ID NO: 683166 - DNA, 75 bp, synthetic construct
  source 1..75: mol_type = other DNA
accgggtgaagatgtttatcagctttcgggtaacgatctcgcgctgcggctgaatacagaatcgcaccaggagcg

SEQ ID NO: 683167 - DNA, 75 bp, synthetic construct
  source 1..75: mol_type = other DNA
tgccttttaacctcgggactttaatcaattatcaggccttactggtgggtaatctgatcggtgtcccgctgtgct

SEQ ID NO: 683168 - DNA, 75 bp, synthetic construct
  source 1..75: mol_type = other DNA
ccacggccaaacctacttttggtgacgggattattttcacgtcttatccttcggatagttactatgagaaatttg

SEQ ID NO: 683169 - DNA, 75 bp, synthetic construct
  source 1..75: mol_type = other DNA
ctcccgttaaaaaaccccgtctcatcggatggctgctgaccgctttactgctgctcggtattatcggtcttgtat

SEQ ID NO: 683170 - DNA, 75 bp, synthetic construct
  source 1..75: mol_type = other DNA
cagacgtacaaaaaacccgcctgcgtggctggcttgttgccgccgtactgctgctcctcatcatcgcgctggtct

SEQ ID NO: 683171 - DNA, 75 bp, synthetic construct
  source 1..75: mol_type = other DNA
cgttcaggccgccctggcccggttcttttagatctcccttttgatgttcagatgaccgaaattgagtttgatatc

SEQ ID NO: 683172 - DNA, 75 bp, synthetic construct
  source 1..75: mol_type = other DNA
gagatttatcaacgtcagcgggagatgaaagagaggttgagcaacctggatgatttacgctcaatccgagcgatg

SEQ ID NO: 683173 - DNA, 75 bp, synthetic construct
  source 1..75: mol_type = other DNA
aatctgacacggcgcgggacgttatggcgtggggggacgccgataatcaacaggtgaaactgtcgatgccggaac

SEQ ID NO: 683174 - DNA, 75 bp, synthetic construct
  source 1..75: mol_type = other DNA
atttcaggtcggggatcttgaaaacgtcaatatcactcattgggcagtaatgccgaaagcaccggaggctggagc

SEQ ID NO: 683175 - DNA, 75 bp, synthetic construct
  source 1..75: mol_type = other DNA
gggccagcggatctctcagcgtcgttgggttacccggataatgccgggcacccggaagtgcagcgtattattgaa

SEQ ID NO: 683176 - DNA, 75 bp, synthetic construct
  source 1..75: mol_type = other DNA
gtgacgggaaatggagtaagccgggtcgcggtgccaacgaagcttttgacctgatggtgtatgccgaggctctgg

SEQ ID NO: 683177 - DNA, 75 bp, synthetic construct
  source 1..75: mol_type = other DNA
tactggcccagcgccccgtcaatcaggacgggctgattggcgagtggcctgaagaggggctgatcgccatggaca

SEQ ID NO: 683178 - DNA, 75 bp, synthetic construct
  source 1..75: mol_type = other DNA
cgtttcctgatgcaatttctgccaggcaccgactttatctcttccggtttttccgctgtgccgaactacgacaac

SEQ ID NO: 683179 - DNA, 75 bp, synthetic construct
  source 1..75: mol_type = other DNA
ccgcgtgagccgctctcccgcgataagctgatgaaccttgcccgtggtcgtgaatattccgcaatggaacgctcc

SEQ ID NO: 683180 - DNA, 75 bp, synthetic construct
  source 1..75: mol_type = other DNA
atgagtgaccaacccgttctgttcagcagagcggcggcttcctgccgtctgacgttgaaccgtgaagataaatgt

SEQ ID NO: 683181 - DNA, 75 bp, synthetic construct
  source 1..75: mol_type = other DNA
ccacaccagttactggctggattaatgtccgccactcaggattgccagcaggcgacgcaggcatttgccgaaaaa

SEQ ID NO: 683182 - DNA, 75 bp, synthetic construct
  source 1..75: mol_type = other DNA
gtcgccagatgctgatgctgggtaaacgcctgacggcgcaggaagcccaggcggcgaatttaattgatgaagtgg

SEQ ID NO: 683183 - DNA, 75 bp, synthetic construct
  source 1..75: mol_type = other DNA
caacatcacgcagtcattgcgcggtgacagcgacggggagagccagcgaattgatccggccagctatccggaaga

SEQ ID NO: 683184 - DNA, 75 bp, synthetic construct
  source 1..75: mol_type = other DNA
gcgggcagagccagttccttcccgcagtgtgccggatggcgttaatttccttgtggcgacagtggatgtgcaggc

SEQ ID NO: 683185 - DNA, 75 bp, synthetic construct
  source 1..75: mol_type = other DNA
acgcctgacggcgcaggaagccctggcggcgaatttgattgatgaagtggtagaaaaagaacagatagaaagctg

SEQ ID NO: 683186 - DNA, 75 bp, synthetic construct
  source 1..75: mol_type = other DNA
gtgcccgccggaccccctccaaccagtgccacgtcaccaatctcaaagataatccggtgcagattgccgctgacg

SEQ ID NO: 683187 - DNA, 75 bp, synthetic construct
  source 1..75: mol_type = other DNA
tctcgcggcttaaaaatgcgctttacttccggctccggctctgaagtacagatgggttacgcggaaggcaaatca

SEQ ID NO: 683188 - DNA, 75 bp, synthetic construct
  source 1..75: mol_type = other DNA
tatgcgtcgtaccgcacgtctgctgatgcagttcctgccaggcactgactttatctcttcgggttactcagctgt

SEQ ID NO: 683189 - DNA, 75 bp, synthetic construct
  source 1..75: mol_type = other DNA
cgatccgaatgtgaaacgcagcgagatcgtgccgctcactaccgccatgaccccagcaaaaatcgtcgaagtggt

SEQ ID NO: 683190 - DNA, 75 bp, synthetic construct
  source 1..75: mol_type = other DNA
cttccggctccggttctgaagtgcagatgggctatgcggaaggaaaatcaatgctttatcttgaggcacgttgca

SEQ ID NO: 683191 - DNA, 75 bp, synthetic construct
  source 1..75: mol_type = other DNA
ctggatggaaaacccgccagccagtttgacctgatcgaccactttatcgcccgctacggcatcaatctcgcgcgt

SEQ ID NO: 683192 - DNA, 75 bp, synthetic construct
  source 1..75: mol_type = other DNA
tttatatcaccaaagctgcaggtgttcaggggttgcagaatggttcggtaagttgcattggcgttccatcggcgg

SEQ ID NO: 683193 - DNA, 75 bp, synthetic construct
  source 1..75: mol_type = other DNA
tgaacaaaaacgcgagctgaacggacgtggggtctggttacgggatggtgaatccatcaatgcggatggcagtcg

SEQ ID NO: 683194 - DNA, 75 bp, synthetic construct
  source 1..75: mol_type = other DNA
tagcaggcagcgctctctttctgctggtagcggcggtgttctggggcttcaactgtctgaatgccttgacgctgg

SEQ ID NO: 683195 - DNA, 75 bp, synthetic construct
  source 1..75: mol_type = other DNA
ctgtgccgtcgggcattcgggcggtgctggcggaaaacctgatcgcctctatgctcgacctcgaagtggcgtccg

SEQ ID NO: 683196 - DNA, 75 bp, synthetic construct
  source 1..75: mol_type = other DNA
ttaagcgtggaaaaccagagccgggtgcatatctgttaggggcgcaactgcttggtctggcaccgcaggaatgtg

SEQ ID NO: 683197 - DNA, 75 bp, synthetic construct
  source 1..75: mol_type = other DNA
gtcgatttggtcctccacagtctggagcaaattactgtgatcaaacagccaaatggcgatgttattattcagtga

SEQ ID NO: 683198 - DNA, 75 bp, synthetic construct
  source 1..75: mol_type = other DNA
caatcatttgaataaagcgggtattccgtgggcaattgtcacttcaggttctatgccagttgcgcgagcgcgcca

SEQ ID NO: 683199 - DNA, 75 bp, synthetic construct
  source 1..75: mol_type = other DNA
ttaaacgcggtaatgacgtttttaatcgcctgcgaaacataccccaattaaccgttgcgaatctcaacggtcata

SEQ ID NO: 683200 - DNA, 75 bp, synthetic construct
  source 1..75: mol_type = other DNA
ccgttctgcatggttacgaaaagatccgctggccctccgcaccggactgggcacagcgggaaacgtggctcgtct

SEQ ID NO: 683201 - DNA, 75 bp, synthetic construct
  source 1..75: mol_type = other DNA
tttacttcttcctggatggaagggccagctgctgcgtatcagacctgggcgcaactggtttacaaattactgact

SEQ ID NO: 683202 - DNA, 75 bp, synthetic construct
  source 1..75: mol_type = other DNA
ggcaccggagaaaaaggtacttttctggtatgacccgatgaaaccggatactaaatttgataaacccggaaaatc

SEQ ID NO: 683203 - DNA, 75 bp, synthetic construct
  source 1..75: mol_type = other DNA
aacgctggattattgatcgttacaacatcacgcagtcattgcgcggtgacagcgacggggagagcctagcgaatt

SEQ ID NO: 683204 - DNA, 75 bp, synthetic construct
  source 1..75: mol_type = other DNA
agcgtaaaagtgaattgctcgagcagcgtgccgaagacgtcccaaaacgttcggtaccgaacggcgtgcagtttc

SEQ ID NO: 683205 - DNA, 75 bp, synthetic construct
  source 1..75: mol_type = other DNA
gcaccctatgtgattgagccgatgaactgtctggcatcgcgtgaatacgatgcggttgtgtttgtgggcccagcg

SEQ ID NO: 683206 - DNA, 75 bp, synthetic construct
  source 1..75: mol_type = other DNA
ccaaatttgataaacccggaaaatcgccttttatggatatggaccttgtgccgaaatatgctgatgaaagtggcg

SEQ ID NO: 683207 - DNA, 75 bp, synthetic construct
  source 1..75: mol_type = other DNA
agaaaagcggtggcgggatccgtattgatccaacgcaggttcagaacctgggattaaaaacgcaaaaagtcacgc

SEQ ID NO: 683208 - DNA, 75 bp, synthetic construct
  source 1..75: mol_type = other DNA
aattacacaagggacactttccttccgtgattggaaactctcaaatcacgggaggaagattgaaaaggcgggtaa

SEQ ID NO: 683209 - DNA, 75 bp, synthetic construct
  source 1..75: mol_type = other DNA
tgacccgactcaggtgcagaatctgggactgaaaacacaaaaagtctcgcgcggaatgctgaattattcccagac

SEQ ID NO: 683210 - DNA, 75 bp, synthetic construct
  source 1..75: mol_type = other DNA
ggcgcacttgaacgtatgcgtcaccctgaaaaaacagaaaacagtatgccagccatgcctgatcagcctgtcaat

SEQ ID NO: 683211 - DNA, 75 bp, synthetic construct
  source 1..75: mol_type = other DNA
agtgtatcccctgacgattggcgatcatgtgaagaaaggcactccgcttatcgatatcaccattcctgaatgggt

SEQ ID NO: 683212 - DNA, 75 bp, synthetic construct
  source 1..75: mol_type = other DNA
ttattcgcgacatgacctacaactacgagggcaacccggagttggggcagcttattgccgatgaagccttaaagc

SEQ ID NO: 683213 - DNA, 75 bp, synthetic construct
  source 1..75: mol_type = other DNA
tcgacgaaaactgctgaatctaaattcgtcgcggatgataaaaacgcggtgctcgccgcatctccagaacgtgta

SEQ ID NO: 683214 - DNA, 75 bp, synthetic construct
  source 1..75: mol_type = other DNA
gaacactactttgaacttgctgagaaaacaccatactccgatgccgttcatgcaaattgtcagcccaatgaaggt

SEQ ID NO: 683215 - DNA, 75 bp, synthetic construct
  source 1..75: mol_type = other DNA
ccggggaagagaattttttgccgttaaagtgcaggaaagattaaaagaatacggcatcaagtttcgtccaaataa

SEQ ID NO: 683216 - DNA, 75 bp, synthetic construct
  source 1..75: mol_type = other DNA
atgtcatcacccgtaatattgcagggcggctatgtgctgcctctctcccggtcgttcacccaactgcttctggat

SEQ ID NO: 683217 - DNA, 75 bp, synthetic construct
  source 1..75: mol_type = other DNA
tcatatcgagcctaaaccggccagtgctgccgctggcgtgctgcgattcttcaagctgaatgcggcggatgtggt

SEQ ID NO: 683218 - DNA, 75 bp, synthetic construct
  source 1..75: mol_type = other DNA
ctgatttcgaagattgtcaccacgccggtgttatggctgcgtgcggcgctgatcgatgtggttctgcgcaatatg

SEQ ID NO: 683219 - DNA, 75 bp, synthetic construct
  source 1..75: mol_type = other DNA
gttaagcgatcaaaaatcccgcctggtggaagaaaaacgccgggcggcaaaactggctgcgacgctggtagaacc

SEQ ID NO: 683220 - DNA, 75 bp, synthetic construct
  source 1..75: mol_type = other DNA
cgatcagactctcttttttgattgtggaaccaccacgccatggattattgaagcaatagatgatgaaacgccatt

SEQ ID NO: 683221 - DNA, 75 bp, synthetic construct
  source 1..75: mol_type = other DNA
tgacctacaactacgagggcaacccggagttggggcagcttattgccgatgaagccttaaagctcggcgtgcggg

SEQ ID NO: 683222 - DNA, 75 bp, synthetic construct
  source 1..75: mol_type = other DNA
ttgttaaatttcggcggctacagagtcctgaggctctactcttgtcgcacggcggcaaactcactggattttatt

SEQ ID NO: 683223 - DNA, 75 bp, synthetic construct
  source 1..75: mol_type = other DNA
cggtgaatttcatgccagtaacgccatttttaaacccgtcgattttcaattgacgttgaataatttctgtccaga

SEQ ID NO: 683224 - DNA, 75 bp, synthetic construct
  source 1..75: mol_type = other DNA
tcgggcaattactgcaagaattaaaacgcagcgataagttacatctgaaggacgccgccaccctgctcggggttt

SEQ ID NO: 683225 - DNA, 75 bp, synthetic construct
  source 1..75: mol_type = other DNA
cgtcccatctcccggagctttgcctgtaaacgaccctgactacataatgatttgcccactgaacccgggcaacac

SEQ ID NO: 683226 - DNA, 75 bp, synthetic construct
  source 1..75: mol_type = other DNA
caatattgctcgtgttgaatggggaacctgtcgtactaacccagttgaactggttcgcaagccgaaagtatcctc

SEQ ID NO: 683227 - DNA, 75 bp, synthetic construct
  source 1..75: mol_type = other DNA
gtccctgtatgtcgcctttcatctcgcgctggaaaccgccatgcgacagggcgagattctgtcactccgctggga

SEQ ID NO: 683228 - DNA, 75 bp, synthetic construct
  source 1..75: mol_type = other DNA
ttggtagcatcaccaaaaatgtctggtataataagaatatcatcaataaaattgagtgttgctctgtggataact

SEQ ID NO: 683229 - DNA, 75 bp, synthetic construct
  source 1..75: mol_type = other DNA
gaaataacaaccgttgatattgctacatacagagacgttcgtttagcagaaatcaacccccgaacgggtaaagct

SEQ ID NO: 683230 - DNA, 75 bp, synthetic construct
  source 1..75: mol_type = other DNA
gaaagcacgtaactacctgcaaattctgccacaacagataaacggcaatgtgttcagttacacctcgtccggttt

SEQ ID NO: 683231 - DNA, 75 bp, synthetic construct
  source 1..75: mol_type = other DNA
gaacgcttcttgcctgttcgtttggggtaatcaccgcgctggcgcttgaacacgtcgaatcaggcaaagccggtc

SEQ ID NO: 683232 - DNA, 75 bp, synthetic construct
  source 1..75: mol_type = other DNA
attcaaaacaatttcagacagatattatctccgtgaatcccccgccacctttccggtgcgcggggttttgtcttt

SEQ ID NO: 683233 - DNA, 75 bp, synthetic construct
  source 1..75: mol_type = other DNA
ttttagcatcgattcgcgatgtggcgaaaattgttgaagttgcccgctccggcgttgtcggactttcacgcggcg

SEQ ID NO: 683234 - DNA, 75 bp, synthetic construct
  source 1..75: mol_type = other DNA
aaaacgctaacgtcgtaatggtaatgggcggtaacgctgctgaagcgcatcccgtcggtttccgctgggcgatgg

SEQ ID NO: 683235 - DNA, 75 bp, synthetic construct
  source 1..75: mol_type = other DNA
tgaatattccgcaatggaacgttccatcgacgtgcagatctcgcgtctgcgccgcatggtggaagaagatccggc

SEQ ID NO: 683236 - DNA, 75 bp, synthetic construct
  source 1..75: mol_type = other DNA
ttgacaatttaaaaacccagtataggaaactatttcttgcctacgacttgttgattcatggaaatgttgaaaaga

SEQ ID NO: 683237 - DNA, 75 bp, synthetic construct
  source 1..75: mol_type = other DNA
gttacttcttttatctctattgctatctgatctattgagttcattgttgacaattccaaataattgggtatacct

SEQ ID NO: 683238 - DNA, 75 bp, synthetic construct
  source 1..75: mol_type = other DNA
aaattacttgtggattgtatacgtaattactttttggcaggaaaatacagacactttataatgttgttttttcgt

SEQ ID NO: 683239 - DNA, 75 bp, synthetic construct
  source 1..75: mol_type = other DNA
acgatttcaggtcatcatggcgttaaaccaacaggtacaactctgactcttgagtgcaaaacaggtaatagcagt

SEQ ID NO: 683240 - DNA, 75 bp, synthetic construct
  source 1..75: mol_type = other DNA
gaggaattctgttttaggccggtttaactcaggaaaacataatctcagttattctgagatgcagggaaaagtata

SEQ ID NO: 683241 - DNA, 75 bp, synthetic construct
  source 1..75: mol_type = other DNA
gaaaaattctgttttaagccagttaaattcagataaacacaattccagtcattctgaaactcaaggtaaaatata

SEQ ID NO: 683242 - DNA, 75 bp, synthetic construct
  source 1..75: mol_type = other DNA
ctttacgtaatgctataaactcagtgttacatacatcatcaactgttgagtttaccaggcatgttatgcattcag

SEQ ID NO: 683243 - DNA, 75 bp, synthetic construct
  source 1..75: mol_type = other DNA
tttctggttataagtggatgcgagcacatcagtgggtattcattgctggcacaaaaaattcatcaaaaaaataat

SEQ ID NO: 683244 - DNA, 75 bp, synthetic construct
  source 1..75: mol_type = other DNA
caataggtaccactcttattctcgagtgcaaaacagttaacaatactctacgaagtatgaattttgcagattcag

SEQ ID NO: 683245 - DNA, 75 bp, synthetic construct
  source 1..75: mol_type = other DNA
aattaaattcagatgagcattatttgggccatactgaaatgcaaagtagaatatataaaaaaattgttggttttt

SEQ ID NO: 683246 - DNA, 75 bp, synthetic construct
  source 1..75: mol_type = other DNA
tggttttttttgatgcgttaaataaagcattagtgccttggttgtttaatgctctatctttaaatgacgtaaaca

SEQ ID NO: 683247 - DNA, 75 bp, synthetic construct
  source 1..75: mol_type = other DNA
catagctgggagaaaagtggctggatttccagattgcctagcaaaataacaatatgtccagcagtacaggagtga

SEQ ID NO: 683248 - DNA, 75 bp, synthetic construct
  source 1..75: mol_type = other DNA
cctataaattcacaggtgaaacagcctggattgattttatcaacaagttttcggatggagaggatgagttaatga

SEQ ID NO: 683249 - DNA, 75 bp, synthetic construct
  source 1..75: mol_type = other DNA
acgataaacgaatccgccatttgggaggaattatacgtcctgtactggatctgaattctgggtatgaacaactgg

SEQ ID NO: 683250 - DNA, 75 bp, synthetic construct
  source 1..75: mol_type = other DNA
cattatcgcaaggtcgccccactaatcagtattgagcgttttatctggttggtgggatatttgaacaaccgttgg

SEQ ID NO: 683251 - DNA, 75 bp, synthetic construct
  source 1..75: mol_type = other DNA
tttgttgtccggcagaacttgtgactggaggaccagaattacttcatcagtttgtgcatcacctcactgagcaag

SEQ ID NO: 683252 - DNA, 75 bp, synthetic construct
  source 1..75: mol_type = other DNA
aggcacgtgcgtaaaatccagcagggaatactgcccaggggcagtggaatgacccttcatccgtttgttgtgcga

SEQ ID NO: 683253 - DNA, 75 bp, synthetic construct
  source 1..75: mol_type = other DNA
ccctctttaaaagcgaagctgtcgctgggggaagattatctcaattccgatattttcgacggctttaactatatc

SEQ ID NO: 683254 - DNA, 75 bp, synthetic construct
  source 1..75: mol_type = other DNA
agagagtatagagaaataatcagtaaagaagaaagtaaatttaaacaagatgtagagttatttataaggaaatac

SEQ ID NO: 683255 - DNA, 75 bp, synthetic construct
  source 1..75: mol_type = other DNA
cgcaatctggcacaatattgagtcggtaatagtggaaaccacaaatcaggcaccgccacaatggccaatgatttt

SEQ ID NO: 683256 - DNA, 75 bp, synthetic construct
  source 1..75: mol_type = other DNA
cgaaactctagccgattttggtgaggctgaaacacagatccgagaaatgctggcggatgcgttggcgatgaaact

SEQ ID NO: 683257 - DNA, 75 bp, synthetic construct
  source 1..75: mol_type = other DNA
gcgatccataatctcgagatacttaaagcagaactcttgcgccaggttgctgaatctacgccagacatcccgaag

SEQ ID NO: 683258 - DNA, 75 bp, synthetic construct
  source 1..75: mol_type = other DNA
ttgccgaacgtattgatattgtgttagatatccttgtggcaggcgattaccactctgcgatccataatctcgaga

SEQ ID NO: 683259 - DNA, 75 bp, synthetic construct
  source 1..75: mol_type = other DNA
cgtctgacgggcgcccgtactgcacaggccgcaccttatgctcactacacctgccacttgtgtggcagtgcactc

SEQ ID NO: 683260 - DNA, 75 bp, synthetic construct
  source 1..75: mol_type = other DNA
ctgcgcgaaatcgaagaaggtttgatcaacaaccagatcctcgacgttcgcgaacgccaggaacagcaagagcag

SEQ ID NO: 683261 - DNA, 75 bp, synthetic construct
  source 1..75: mol_type = other DNA
cgatcgtcaggaacagcaagagcaggaagccgctgaaattaatgccgttgccgctattgctgaaggtcgtcgtta

SEQ ID NO: 683262 - DNA, 75 bp, synthetic construct
  source 1..75: mol_type = other DNA
ttcgtggcgcatttaataaattaagttcactgactgatgcggaaaaacgtaaaggtgtagtggcctgttctgcgg

SEQ ID NO: 683263 - DNA, 75 bp, synthetic construct
  source 1..75: mol_type = other DNA
gagaacagaagatattgatttaattaatgtaattaataaagaaacattattgcaacaacctgaagaacgttttgc

SEQ ID NO: 683264 - DNA, 75 bp, synthetic construct
  source 1..75: mol_type = other DNA
gaacaacgcaggtagtcaaagatggcgatactgccttcgttttggggcatgaatttagtgtaattgctacgccag

SEQ ID NO: 683265 - DNA, 75 bp, synthetic construct
  source 1..75: mol_type = other DNA
gtcacactttaggacatatctgttacttcagtaaaccttatctattttgcggcgacacgctgttttctggtgggt

SEQ ID NO: 683266 - DNA, 75 bp, synthetic construct
  source 1..75: mol_type = other DNA
cccgggtaatttaacttacgaaatcgttcgtgaattagtcgatgacatcgtgctggtcagcgaagatgaaatcag

SEQ ID NO: 683267 - DNA, 75 bp, synthetic construct
  source 1..75: mol_type = other DNA
ccgactattcgtgttattggcgtacagtcagaaaacgttcacggcatggcggcttctttccactccggagaaata

SEQ ID NO: 683268 - DNA, 75 bp, synthetic construct
  source 1..75: mol_type = other DNA
cgtgttggcgatgatcctttcgggcgttttatgtacaaaactatgacaaacgaaggcgtcgatgtcacgtatatg

SEQ ID NO: 683269 - DNA, 75 bp, synthetic construct
  source 1..75: mol_type = other DNA
atgctggtgttcctgtttgcgggtgagaaaattctggcatttctcagcctgcgagcagaaaccgtctccatttct

SEQ ID NO: 683270 - DNA, 75 bp, synthetic construct
  source 1..75: mol_type = other DNA
gtttaagtggaaaaaacaatacctggaaggaagcctcactgctgttgctgccggtgaagacgttgttcctgcttc

SEQ ID NO: 683271 - DNA, 75 bp, synthetic construct
  source 1..75: mol_type = other DNA
gtgaaaacctgtcaactgaaaaaaaatgaaagtgtgcagttgctttcccttagaaccattgacggtgatacatta

SEQ ID NO: 683272 - DNA, 75 bp, synthetic construct
  source 1..75: mol_type = other DNA
cttcgcgtaccagcgcatttactgcgatgacggcgatccggcatgccggaggttttgtcagcttcgatcctaata

SEQ ID NO: 683273 - DNA, 75 bp, synthetic construct
  source 1..75: mol_type = other DNA
atgaatgatgaaagtaaaagaccaagaacagaaaaaacattaaagcaaaaggttgcttttgctcaactagaactt

SEQ ID NO: 683274 - DNA, 75 bp, synthetic construct
  source 1..75: mol_type = other DNA
gaatacgtcgaagactctgctgcagaaacggatatgaacgtggtgatgaccgaagatgggcgcatcattgaggtt

SEQ ID NO: 683275 - DNA, 75 bp, synthetic construct
  source 1..75: mol_type = other DNA
actgcacgctctgtaccggataaaagcgtatcagatgattttatgcatgctgttctcagtaactgcaccacaaaa

SEQ ID NO: 683276 - DNA, 75 bp, synthetic construct
  source 1..75: mol_type = other DNA
atgatccgtacggggataacataccgttttaagcaacgagtaacagaagccggagcaatccggcttttttatggg

SEQ ID NO: 683277 - DNA, 75 bp, synthetic construct
  source 1..75: mol_type = other DNA
cttcacccgcacactggctgtctacgtcacaacccagcaacttcaccggctcagtgttgttcagggtatgctgaa

SEQ ID NO: 683278 - DNA, 75 bp, synthetic construct
  source 1..75: mol_type = other DNA
attgatgccacaccgtgggcgttcagtccgtggatggtcatgcaggcgacaaacagcgaagccagaaaaatgttg

SEQ ID NO: 683279 - DNA, 75 bp, synthetic construct
  source 1..75: mol_type = other DNA
gtgaatagctcgctgtcattttctataaataaaaatccttctatttctgaagttgataaagcgatctttatatct

SEQ ID NO: 683280 - DNA, 75 bp, synthetic construct
  source 1..75: mol_type = other DNA
atccgaatgattaccttcctgttccattgcaggaagggttcgggttaaagccagttagcccattactgagaaccg

SEQ ID NO: 683281 - DNA, 75 bp, synthetic construct
  source 1..75: mol_type = other DNA
tgtatatcgatggacagtttgttacctggcgtggagacgtatggattgatgtggtaaaccctgctacagaggctg

SEQ ID NO: 683282 - DNA, 75 bp, synthetic construct
  source 1..75: mol_type = other DNA
gatcgcgtcaaaattctggcaatgattcaggagcaggtgacatggcttgccggcagtttcctgctgaccggacat

SEQ ID NO: 683283 - DNA, 75 bp, synthetic construct
  source 1..75: mol_type = other DNA
ggagcaacaatgggcggtggattccattaccgactgcgcgcgtcgttttatggcacatcctcaggtgaaaggacg

SEQ ID NO: 683284 - DNA, 75 bp, synthetic construct
  source 1..75: mol_type = other DNA
cgtatttcaggatagccagcgctgctggatacaggcggggcgggaatcatcgcgcaatctacgccggaacgcgaa

SEQ ID NO: 683285 - DNA, 75 bp, synthetic construct
  source 1..75: mol_type = other DNA
atgaagtgatcgattatcaatggtgtgatttagcggaagtattacgcagtattgatgccacaccgtgggcgttca

SEQ ID NO: 683286 - DNA, 75 bp, synthetic construct
  source 1..75: mol_type = other DNA
cgttctccagttggctgtttaatgccaaggggcaattattagttacccgccgcgcactgagcaaaaaagcatggc

SEQ ID NO: 683287 - DNA, 75 bp, synthetic construct
  source 1..75: mol_type = other DNA
tatcatcaggcaacgccccgtcatggaatatgatgcatcccatctcggcaatatggttaaccgactggaagaagc

SEQ ID NO: 683288 - DNA, 75 bp, synthetic construct
  source 1..75: mol_type = other DNA
tcaaacctttaattataagaatgatgatatatctggtgggctggatgcatcgtatgtaggtacatatggagcttt

SEQ ID NO: 683289 - DNA, 75 bp, synthetic construct
  source 1..75: mol_type = other DNA
gcgtcgccctcattattggcaatactgcgctatctaccttttcttcacgtttgatgaacgttaatgaattaaccg

SEQ ID NO: 683290 - DNA, 75 bp, synthetic construct
  source 1..75: mol_type = other DNA
ggtcgcccgggaagaaggttgtgctgatgactttattctgacggtagaaacaggcccaattggcggtattacttc

SEQ ID NO: 683291 - DNA, 75 bp, synthetic construct
  source 1..75: mol_type = other DNA
taggcattgccgacggcattggtctggtcgcccgggaagaaggttgtgctgatgactttattctgacagtcgaaa

SEQ ID NO: 683292 - DNA, 75 bp, synthetic construct
  source 1..75: mol_type = other DNA
caaaaatatctcaatacctattttgccgacctgaaatccaccactgacaggctccagccgcttaccttagatacc

SEQ ID NO: 683293 - DNA, 75 bp, synthetic construct
  source 1..75: mol_type = other DNA
tccctgcccgcacaccatttccagattgtactggaaattaccgaacgcgatatgctgaaagagcatgaagcatca

SEQ ID NO: 683294 - DNA, 75 bp, synthetic construct
  source 1..75: mol_type = other DNA
ttgagttaattgcccgcgatgccgcagaattagaaaaagtgctgccggtaggcgtcaaatttggcattaacattg

SEQ ID NO: 683295 - DNA, 75 bp, synthetic construct
  source 1..75: mol_type = other DNA
tttgccatacaaatatccagtatttattacggaatgggccaacccagcaagcaaactgaaaacaatattattata

SEQ ID NO: 683296 - DNA, 75 bp, synthetic construct
  source 1..75: mol_type = other DNA
cagctcgaattacagcgagagcgcctggatgtgctggaatggcaaattaactgtgctgcacgtgaatgcatttac

SEQ ID NO: 683297 - DNA, 75 bp, synthetic construct
  source 1..75: mol_type = other DNA
gagctaactcctccagtaaaaagctggtactcaaaggaaattgatggggtttggcattgggttgagggttgcgat

SEQ ID NO: 683298 - DNA, 75 bp, synthetic construct
  source 1..75: mol_type = other DNA
tgccaaccacgtcaggtggcaaattttcgacattaaccgcgacgatgctaaatttcatggagaagtgcgtgggtg

SEQ ID NO: 683299 - DNA, 75 bp, synthetic construct
  source 1..75: mol_type = other DNA
ctctggcagcgtgaagggcgggtctgtcggccccgaaaaaactcatcgtcgcttcctgccctgatacccgtgctg

SEQ ID NO: 683300 - DNA, 75 bp, synthetic construct
  source 1..75: mol_type = other DNA
aggatgcctgggatgcgtttaccgtgctgtttccgtcgattaccgcctcaggtatccctaaaaatgctgctctga

SEQ ID NO: 683301 - DNA, 75 bp, synthetic construct
  source 1..75: mol_type = other DNA
gggagatctgagggaatttgaactggcagacggaaactggctactggacaatgcctggtatgaaagaaacatggc

SEQ ID NO: 683302 - DNA, 75 bp, synthetic construct
  source 1..75: mol_type = other DNA
cggtgttctggggggaatgattgcctccgctgtatcaggaaaaattgccggagcgctggttgaagaagatcgcgt

SEQ ID NO: 683303 - DNA, 75 bp, synthetic construct
  source 1..75: mol_type = other DNA
tagcactgaccgctggatttacgctgtccggatgtgtaagccatacccaaaaaaattcacaaccagatccggctg

SEQ ID NO: 683304 - DNA, 75 bp, synthetic construct
  source 1..75: mol_type = other DNA
atgcctggtatgaaagaaacatggcagggtttaacgaacagttgaaagagaacctgtcattcacacctgatgaac

SEQ ID NO: 683305 - DNA, 75 bp, synthetic construct
  source 1..75: mol_type = other DNA
caccatgaaagcgctggaaatggcatgggaaacccgtggtaaacccggcggggtgatgttccacagcgatcaggg

SEQ ID NO: 683306 - DNA, 75 bp, synthetic construct
  source 1..75: mol_type = other DNA
gtgcaggaaatatcagtgccctgaacaaagtgatgaagggttcgctggtgacatctctggcactggtagctgtca

SEQ ID NO: 683307 - DNA, 75 bp, synthetic construct
  source 1..75: mol_type = other DNA
cttaccagacagtgaagatgcgcctcaccccagaataaaacaactggcaagatttacacagacgcatcccggtgg

SEQ ID NO: 683308 - DNA, 75 bp, synthetic construct
  source 1..75: mol_type = other DNA
tgattgaggccgatcactgtctccatgacgttgaagacatgagtgccaaaaatcaccccaacgcggacctttccc

SEQ ID NO: 683309 - DNA, 75 bp, synthetic construct
  source 1..75: mol_type = other DNA
cgcactggcacacctacggcccggcgtggatggtgaaagacaaagcctacagccaggcgcatttgcccatcgcac

SEQ ID NO: 683310 - DNA, 75 bp, synthetic construct
  source 1..75: mol_type = other DNA
caagattatggtgttgccgtcgaggaaggacgtaaagcagcgcagtctgacccgaactgtttctttattgatgac

SEQ ID NO: 683311 - DNA, 75 bp, synthetic construct
  source 1..75: mol_type = other DNA
tgatgcccgggcatggaaaaaagcgaaactgcgcagccatggcgttacggtcgtggaatatgagcaagattatgg

SEQ ID NO: 683312 - DNA, 75 bp, synthetic construct
  source 1..75: mol_type = other DNA
cagcttctgaatactaacacttccgctgctccgtggttctgcggcgataccacctggtactggaaagaaaattat

SEQ ID NO: 683313 - DNA, 75 bp, synthetic construct
  source 1..75: mol_type = other DNA
gtggtcggtattgatacctggtacgacgctgaaaccggtaaatatcatgtgaatcaatataccggcgatgaaagc

SEQ ID NO: 683314 - DNA, 75 bp, synthetic construct
  source 1..75: mol_type = other DNA
agtgttgttcagggtatgctgaagcatattgatttttcgacggccagcccgactgtccggcaggcgcttcagaag

SEQ ID NO: 683315 - DNA, 75 bp, synthetic construct
  source 1..75: mol_type = other DNA
ggaatatgatgcatcccatctcggcaatatggttaaccgactggaagaagcattccccccggagttaccggcata

SEQ ID NO: 683316 - DNA, 75 bp, synthetic construct
  source 1..75: mol_type = other DNA
aggccgccgttttgtatcattccaccacgtggatgagcttcgtatctgtgcctcctgcgggctgacagaagtaca

SEQ ID NO: 683317 - DNA, 75 bp, synthetic construct
  source 1..75: mol_type = other DNA
gtgaaagatgaaaaaccacagttaagtttgttattgcaagtgctgacagacgagaagcgttttatcgctaactga

SEQ ID NO: 683318 - DNA, 75 bp, synthetic construct
  source 1..75: mol_type = other DNA
atgcagcgcgccaacctgccgctttcgtacccgatgacggcgcgacgttttcttgagaagcatggcctgcttgat

SEQ ID NO: 683319 - DNA, 75 bp, synthetic construct
  source 1..75: mol_type = other DNA
attactgcgcttaatcagcaaggctatcagctggggttattctcatcagatggctttaccagcccgctgtatcgc

SEQ ID NO: 683320 - DNA, 75 bp, synthetic construct
  source 1..75: mol_type = other DNA
gagcaggtgacatggcttgccggcagtttcctgctgaccggacatgagattgaaaatctgaacgcgaatctggcc

SEQ ID NO: 683321 - DNA, 75 bp, synthetic construct
  source 1..75: mol_type = other DNA
gtccggcaggcgcttcagaaggggaccggtgcaggaaatatcagtgccctgaacaaagtgatgaagggtacgctg

SEQ ID NO: 683322 - DNA, 75 bp, synthetic construct
  source 1..75: mol_type = other DNA
ttgccctgacggcatcggtcttctggctcagcaccggcgatcgcgatgctgccctgcagacagctgctgtccagg

SEQ ID NO: 683323 - DNA, 75 bp, synthetic construct
  source 1..75: mol_type = other DNA
acagtaaatcgtggctgagcagtttgcaaaacgattacagccttcctgaaacgctgacggagcgcatctggctga

SEQ ID NO: 683324 - DNA, 75 bp, synthetic construct
  source 1..75: mol_type = other DNA
aaaactgacctgtgccatcagccagacactggaagaacaaccggtgctcaacagtaaatcgtggctgaccagttt

SEQ ID NO: 683325 - DNA, 75 bp, synthetic construct
  source 1..75: mol_type = other DNA
tcaggcaacgccccgtcatggaatatgatgcatcccatctcggcaatatggttaaccgactggaagaaacattac

SEQ ID NO: 683326 - DNA, 75 bp, synthetic construct
  source 1..75: mol_type = other DNA
tttacagcatccggaataactatcgaaaagaaagccgggaggcggaaaagcacgctttatctatggggcaagctg

SEQ ID NO: 683327 - DNA, 75 bp, synthetic construct
  source 1..75: mol_type = other DNA
gtactccgcctgaataccgtatcgcgagcatgctaaacagctgttccgcgcagataagcagcctgatcaacacca

SEQ ID NO: 683328 - DNA, 75 bp, synthetic construct
  source 1..75: mol_type = other DNA
agccgtaagccaaataagcctgtcagaaaaccactaaaaagcatgatcattgatcacgctaatgatcaacgtgca

SEQ ID NO: 683329 - DNA, 75 bp, synthetic construct
  source 1..75: mol_type = other DNA
agcggtggtgaccaaacgtattcgtacgctgaaagcgaacggcaaagatatcgataccatcggtattccgattca

SEQ ID NO: 683330 - DNA, 75 bp, synthetic construct
  source 1..75: mol_type = other DNA
tgaaggccttctttggtgataaagcgacggcggaaaatagctggggctttgactggttgccgaagtgggataaag

SEQ ID NO: 683331 - DNA, 75 bp, synthetic construct
  source 1..75: mol_type = other DNA
actggcaggttaatggtgtgaaaggtgacaacctgcataaaatcggcgaaggaaccctggttgtacgtaagcgta

SEQ ID NO: 683332 - DNA, 75 bp, synthetic construct
  source 1..75: mol_type = other DNA
ctgggccatactcctccggcagaagcagaaaaagcttattatgcttccatcggaaacaatgatctggcagcctga

SEQ ID NO: 683333 - DNA, 75 bp, synthetic construct
  source 1..75: mol_type = other DNA
attgctggaaaggcagggccatatcccaccggcagaagcagaaaaagcttattatgcttccatcggaaacgatga

SEQ ID NO: 683334 - DNA, 75 bp, synthetic construct
  source 1..75: mol_type = other DNA
acggtaatttcaggccatgacaagccgcagccgccaggctgcctactcgggcggcagttcgcagtgacagagcca

SEQ ID NO: 683335 - DNA, 75 bp, synthetic construct
  source 1..75: mol_type = other DNA
catatcaaacgaagcatggcttgaacaggatctggacgaagacgaggaggaagacgaagaagttacccgcaaact

SEQ ID NO: 683336 - DNA, 75 bp, synthetic construct
  source 1..75: mol_type = other DNA
gtgttctccggggtaaaaaggtccgtactaccgtcagccggaaagccgtttccgcaggcgaccgcgtaaaccgtc

SEQ ID NO: 683337 - DNA, 75 bp, synthetic construct
  source 1..75: mol_type = other DNA
tatggggcttgccggtgttctccggggtaaaaaggtccgcactaccgtcagccggaaagccattaccgcaggcga

SEQ ID NO: 683338 - DNA, 75 bp, synthetic construct
  source 1..75: mol_type = other DNA
ggcccggaggcttcgaccgttctgattttctgggggaaaagctttacctgcatactgccccgttttatgtagaag

SEQ ID NO: 683339 - DNA, 75 bp, synthetic construct
  source 1..75: mol_type = other DNA
gtggtcggcattgatacctggtacgacgccgaaaccggtaaatatcatgtgaatcaatataccggcgatgaaagc

SEQ ID NO: 683340 - DNA, 75 bp, synthetic construct
  source 1..75: mol_type = other DNA
acccggagctgatcacccgcctggcggatcgttttggcgtgcagtgcatcgtggtcgggatcgacacctggtttg

SEQ ID NO: 683341 - DNA, 75 bp, synthetic construct
  source 1..75: mol_type = other DNA
ccgttttgcgtggcgggtgggattaaatcgctggatgacgccgcgaaaattctttcttttggcgcggataaaata

SEQ ID NO: 683342 - DNA, 75 bp, synthetic construct
  source 1..75: mol_type = other DNA
tgccgccggcacagttacagcggtgcgatatgaacaccctgaagctggagccggccacgtttgtggatccggatc

SEQ ID NO: 683343 - DNA, 75 bp, synthetic construct
  source 1..75: mol_type = other DNA
atgccttatctggcatcagggtgcacccataccgccttcccgcccgggcatcttcacccgactggtcagggcggt

SEQ ID NO: 683344 - DNA, 75 bp, synthetic construct
  source 1..75: mol_type = other DNA
gttctcgccaaaccggaattactcagagcccttccccattttcacgtttttcactcactgctcgccagaaccggc

SEQ ID NO: 683345 - DNA, 75 bp, synthetic construct
  source 1..75: mol_type = other DNA
agctcattactaagcggtaggggcaccccaccatgtcttatctggcatcagggtgcacccataccgccttcccgc

SEQ ID NO: 683346 - DNA, 75 bp, synthetic construct
  source 1..75: mol_type = other DNA
cccgacgaagcccagcgcaacccgctgcaccaagtcgtcaacatcaacctgccgctgaacctgaagctcaccgtt

SEQ ID NO: 683347 - DNA, 75 bp, synthetic construct
  source 1..75: mol_type = other DNA
cggtcagcccccatcccttgcgcagtttatgcttatcgatcaggacacacacgatatcaaacgggatgatggacg

SEQ ID NO: 683348 - DNA, 75 bp, synthetic construct
  source 1..75: mol_type = other DNA
tctttcctttggcgcggataaaatctccatcaactcccctgcgctggcagacccaacattaattactcgcctggc

SEQ ID NO: 683349 - DNA, 75 bp, synthetic construct
  source 1..75: mol_type = other DNA
cttctgggcggtcctggggattctccctgccttatctggcagggagattctgcacagaccgttatcgacagtggg

SEQ ID NO: 683350 - DNA, 75 bp, synthetic construct
  source 1..75: mol_type = other DNA
gagcccttccccattttcacgttttttattcactgctcgccagaaccggcgacggtcttttacctcataaggaat

SEQ ID NO: 683351 - DNA, 75 bp, synthetic construct
  source 1..75: mol_type = other DNA
tcgtgctggatgcactggagcaggcgttgtgggcccgtcggccgtccggcacaatccatcacagtgataaaggtt

SEQ ID NO: 683352 - DNA, 75 bp, synthetic construct
  source 1..75: mol_type = other DNA
gcaaaaggggatgataagtttatcaccaccgactatttgcaacagtgccgtcgcgattatatatctaatgccgct

SEQ ID NO: 683353 - DNA, 75 bp, synthetic construct
  source 1..75: mol_type = other DNA
acaagattgttaaatgggtatgagaatgtccatgtaaaatcatgcgataatttttctaaggccataaatgcatct

SEQ ID NO: 683354 - DNA, 75 bp, synthetic construct
  source 1..75: mol_type = other DNA
ttttttattagatgtaccttcacgatcacctttatttgtaacaggttttagaaaatacttgggaagacattgttt

SEQ ID NO: 683355 - DNA, 75 bp, synthetic construct
  source 1..75: mol_type = other DNA
ctggataacgttaacttcacgctcaataaaggcgaagttcgtgcgctgttaggtaaaaacggcgcgggcaaatcg

SEQ ID NO: 683356 - DNA, 75 bp, synthetic construct
  source 1..75: mol_type = other DNA
ggtgacgaagctacgttgactcgccgtgccgctgaactgggggtacgcgcggtttatcaggagttaagtctggtg

SEQ ID NO: 683357 - DNA, 75 bp, synthetic construct
  source 1..75: mol_type = other DNA
atctccgaccacaggggtttttggggcgcgcgtggggcagaaatttagccggacaactgaatctgactgaagata

SEQ ID NO: 683358 - DNA, 75 bp, synthetic construct
  source 1..75: mol_type = other DNA
accccgaactgaccgcccgcgcggcgtttagcatgaatgtccgtacgtttgtgctggtgaaagataaaaaaacat

SEQ ID NO: 683359 - DNA, 75 bp, synthetic construct
  source 1..75: mol_type = other DNA
ccgtgcgtatgcgccctggcagagaaatcatgacggccatcaaacgcgagcaattttacgtggtttatcaaccag

SEQ ID NO: 683360 - DNA, 75 bp, synthetic construct
  source 1..75: mol_type = other DNA
caaaaatatctgctcacctattttgccgatctgaaagcgacaaccgatcgtcttcagccactaacgataactacc

SEQ ID NO: 683361 - DNA, 75 bp, synthetic construct
  source 1..75: mol_type = other DNA
caacgtgaagcgccacgacgcacaccgattttacctgcgcgaaggctacgagcagagtcacttccgcttcaccaa

SEQ ID NO: 683362 - DNA, 75 bp, synthetic construct
  source 1..75: mol_type = other DNA
atagaagccttgagtgaatataaccatgttattgtcaattcatacgattgtagttataaatacataaatacttca

SEQ ID NO: 683363 - DNA, 75 bp, synthetic construct
  source 1..75: mol_type = other DNA
atggggggaatattattaccctgcagcgtattttaggacatagcacaatccagcaaacaatgacctatgcgcact

SEQ ID NO: 683364 - DNA, 75 bp, synthetic construct
  source 1..75: mol_type = other DNA
caggtggcgggcgatgtgatgctcgaaaacacctccacgcatcatattgtgtcgctaatgctagggcgcgatcac

SEQ ID NO: 683365 - DNA, 75 bp, synthetic construct
  source 1..75: mol_type = other DNA
taaattaaataatgcgctttataatggcatcattgattacaatcgtggtgctggtcgccgtggccctgctggtac

SEQ ID NO: 683366 - DNA, 75 bp, synthetic construct
  source 1..75: mol_type = other DNA
caaagtaatgaagggtacgctggtgacatctctggcactggtagctgtcacaaccggccctgacatgatcaaaat

SEQ ID NO: 683367 - DNA, 75 bp, synthetic construct
  source 1..75: mol_type = other DNA
agggtttaacgaacagttgaaagagaacctgtcattcacacctgatgaactgaaaacgctcttccggaaccgcct

SEQ ID NO: 683368 - DNA, 75 bp, synthetic construct
  source 1..75: mol_type = other DNA
cgatggtacaccgctgtgggttactggcagtggcaccagcaaaacggtactaacccgttatgcgacggtgcttaa

SEQ ID NO: 683369 - DNA, 75 bp, synthetic construct
  source 1..75: mol_type = other DNA
gtgggctctattttgcgccgcagcggttgcatattggcgcagatgtgtgggggcaatactggcaacagcgtcagg

SEQ ID NO: 683370 - DNA, 75 bp, synthetic construct
  source 1..75: mol_type = other DNA
ttattgaaaaacagattgaatgtctggttaatcaactcaggcaatcagggttattaaaaaaccattcagagttaa

SEQ ID NO: 683371 - DNA, 75 bp, synthetic construct
  source 1..75: mol_type = other DNA
agggcgagccgcgcgtggtcattcttgatgaacctaccagttcgcttgccagtgcggaagttgaactggtgatca

SEQ ID NO: 683372 - DNA, 75 bp, synthetic construct
  source 1..75: mol_type = other DNA
gccagaaaaccgcaaagaagcggggatcattcccataagcgctaacttaagggttgtggtattacgcctgatatg

SEQ ID NO: 683373 - DNA, 75 bp, synthetic construct
  source 1..75: mol_type = other DNA
accggcattttgttggcggcacgcctcggttccggtaacgcaggtgccgcaaacggtctggagtttgacgtcatc

SEQ ID NO: 683374 - DNA, 75 bp, synthetic construct
  source 1..75: mol_type = other DNA
cacactggctgtctacgtcacaaccctagcaactccaccggctcagtgttgttcagggtatgctgaagcacattg

SEQ ID NO: 683375 - DNA, 75 bp, synthetic construct
  source 1..75: mol_type = other DNA
gcgaaagcgtcggaaaccagcgcagaatcctcaaaaacggctgccgcatcgtccgccagttcggcggcgtcatcg

SEQ ID NO: 683376 - DNA, 75 bp, synthetic construct
  source 1..75: mol_type = other DNA
acgaaatcgaccgccgcacgcattttgttgacgctggatatgcaaaagaatgcgcgctggaaggtatggcgagaa

SEQ ID NO: 683377 - DNA, 75 bp, synthetic construct
  source 1..75: mol_type = other DNA
aatccaggaacgctacggttatcagaaagatcaggcagaaaaagaggttgatagttgggaaaaacgccatgatta

SEQ ID NO: 683378 - DNA, 75 bp, synthetic construct
  source 1..75: mol_type = other DNA
gaaagagcaatggggcaaactgaccgatgatgatatgacggtcattgaaggtaaacgtgatcagttagtgggtaa

SEQ ID NO: 683379 - DNA, 75 bp, synthetic construct
  source 1..75: mol_type = other DNA
gtaaacgtgatcagttagtgggtaaaatccaggaacgttacggttaccagaaagatcaggcagagaaagaggtcg

SEQ ID NO: 683380 - DNA, 75 bp, synthetic construct
  source 1..75: mol_type = other DNA
accgggtggagtctgccggtctgttgttgcctgtgacggaaaaaatcctgaaccgtgcggtggcagggctttcgg

SEQ ID NO: 683381 - DNA, 75 bp, synthetic construct
  source 1..75: mol_type = other DNA
gtcgggctggcaggaaagctgggtattgatacggtggcagaaggtgtggaaacacaggcgcaggtgaactgtctg

SEQ ID NO: 683382 - DNA, 75 bp, synthetic construct
  source 1..75: mol_type = other DNA
gtattctgtggggcagcaataatattgacaaagcacaattcgccccgttgcttggtctaatatccgagacaccat

SEQ ID NO: 683383 - DNA, 75 bp, synthetic construct
  source 1..75: mol_type = other DNA
ttgtggctgattatcgtaacaatcgggaagctgttagcaaatccattgcaatgctggagctgctcgccgcaaata

SEQ ID NO: 683384 - DNA, 75 bp, synthetic construct
  source 1..75: mol_type = other DNA
ggcgcgagaaaaagcccaagcagaacatatgaccgcctttattgaagccattcagaattcagtgcagcagggaca

SEQ ID NO: 683385 - DNA, 75 bp, synthetic construct
  source 1..75: mol_type = other DNA
aaccggcagattcaggatatgcaagctggcgcggacaagatgcgtctggctgctgaacgttttgaacatgccggt

SEQ ID NO: 683386 - DNA, 75 bp, synthetic construct
  source 1..75: mol_type = other DNA
gctgaattcaggcatgcggtttgtgctgcctcttctggcaccgctgttgttggatcatggggttgagcatgtccg

SEQ ID NO: 683387 - DNA, 75 bp, synthetic construct
  source 1..75: mol_type = other DNA
aaagcctctactctgctcgcgggttctgtcgaacagatcggagaaagcgtcagcgagcttgatgatgtcctgtca

SEQ ID NO: 683388 - DNA, 75 bp, synthetic construct
  source 1..75: mol_type = other DNA
accgggaagcacaggcctttatggaaaatgtcagtgacgtgctcgggaaagggtttgaagacttctccgaaggtg

SEQ ID NO: 683389 - DNA, 75 bp, synthetic construct
  source 1..75: mol_type = other DNA
aatggctgcgttataacttaggcaagggaggttggttatcggtgaagcaacccccgagcgggcttaaacccttat

SEQ ID NO: 683390 - DNA, 75 bp, synthetic construct
  source 1..75: mol_type = other DNA
aactgagtttatctggtgtccgctacttacaatatgagcgaaatcgttggcagatgagcttaccagataaaatta

SEQ ID NO: 683391 - DNA, 75 bp, synthetic construct
  source 1..75: mol_type = other DNA
cagcctgccgcgcaatctgtcggaatgtcacatgtggagtttatcgcggcgtatgaccagctttcgcagtgggcg

SEQ ID NO: 683392 - DNA, 75 bp, synthetic construct
  source 1..75: mol_type = other DNA
ttatagcagcgtatgaccagctttcgcagtgggcgcagcaatcagggtatggccccggccatcgccagtacgacg

SEQ ID NO: 683393 - DNA, 75 bp, synthetic construct
  source 1..75: mol_type = other DNA
acgatatcgatattctcgacgtacaggacaatatgattaaacaggtaaaagtttttcctgtgaaaccgctgcgcg

SEQ ID NO: 683394 - DNA, 75 bp, synthetic construct
  source 1..75: mol_type = other DNA
gggtatggccccggccatcgccagtacgacgatcaataccgcgctctggttgcgcagcgctccgctggcaaacgc

SEQ ID NO: 683395 - DNA, 75 bp, synthetic construct
  source 1..75: mol_type = other DNA
cagcaaaccctgtaggttgtggatattatcctgatatttctcaacttaatacaagttgtcaatataaactcccac

SEQ ID NO: 683396 - DNA, 75 bp, synthetic construct
  source 1..75: mol_type = other DNA
aaatagcctttggcataaaggtcgctggctgggtcatgctgatggatttcaaatattacggcatgattcagccct

SEQ ID NO: 683397 - DNA, 75 bp, synthetic construct
  source 1..75: mol_type = other DNA
ttaccttacttaccgggtcggtaggctattacaaagatcaattctataaggttaaaaccaatgcattaggtgaag

SEQ ID NO: 683398 - DNA, 75 bp, synthetic construct
  source 1..75: mol_type = other DNA
caggtgattgttaatggcaagccgctgcccgccgatcgcaaaacctttcagataatccgctggatgcctggcgaa

SEQ ID NO: 683399 - DNA, 75 bp, synthetic construct
  source 1..75: mol_type = other DNA
gttcagtatctgcaagagcgtatggctggcggttccattaccggttacgtcccgaacggccagactgccgcgcaa

SEQ ID NO: 683400 - DNA, 75 bp, synthetic construct
  source 1..75: mol_type = other DNA
gcagtgggcacagcaatcagggtatggccccggccatcgtcagtacgacgagcaataccgcgctctggttgcgca

SEQ ID NO: 683401 - DNA, 75 bp, synthetic construct
  source 1..75: mol_type = other DNA
ttcaaagtgcgtacgctgaagaatttcaaaggcgaattgtaccgaaaatgtatgctaggtacgtcaaatgcagca

SEQ ID NO: 683402 - DNA, 75 bp, synthetic construct
  source 1..75: mol_type = other DNA
aaaaaatctttgccgacagcgaagcgcgtgaaaaagcgatggcggaacagatgcgcgcgtttattgaggctatcc

SEQ ID NO: 683403 - DNA, 75 bp, synthetic construct
  source 1..75: mol_type = other DNA
aacttttgcgcgcacagaaggatcgtgcgacccgtaattttgtttttggaaccggtggggacgttaccgcgtcac

SEQ ID NO: 683404 - DNA, 75 bp, synthetic construct
  source 1..75: mol_type = other DNA
cttaaaagccagctggagacgcagaaaaatatgtatgagtcgatggctaaaacaaccaacctgggcgatctgctg

SEQ ID NO: 683405 - DNA, 75 bp, synthetic construct
  source 1..75: mol_type = other DNA
ccggatgctgagtttatggcgcaggttgaggaacgtctgggtagctgtctcaccgaggaacagcgtcgctatttt

SEQ ID NO: 683406 - DNA, 75 bp, synthetic construct
  source 1..75: mol_type = other DNA
ctattgaaacagactactccacctcggatgtcgggcagctcagtacccgtgtcgcggcctttattgagatgctgt

SEQ ID NO: 683407 - DNA, 75 bp, synthetic construct
  source 1..75: mol_type = other DNA
tttggcaaagatgtttgtagccgcgttgtgactctggaagatagccgcaaagccctggtcgggaatttaaaataa

SEQ ID NO: 683408 - DNA, 75 bp, synthetic construct
  source 1..75: mol_type = other DNA
atgaacaggttgcaagtcctggccaaaacatcaggtggtggtgctggttttggtgctctggccggagaagaactg

SEQ ID NO: 683409 - DNA, 75 bp, synthetic construct
  source 1..75: mol_type = other DNA
tgccgcgttctcaccaccgctggacgaagaaggcaacagtgttcgcggtcaaaaaatggtggcatcggtcgctaa

SEQ ID NO: 683410 - DNA, 75 bp, synthetic construct
  source 1..75: mol_type = other DNA
tttattttcttctcctgggcatattgtggttgccggacaatccggtggcggaaaatctgctccggtgaaagaact

SEQ ID NO: 683411 - DNA, 75 bp, synthetic construct
  source 1..75: mol_type = other DNA
cccgctctgtgctggataaaaccgtatcagatgattttattcatgatgttctcagtaactgcaccacaagaataa

SEQ ID NO: 683412 - DNA, 75 bp, synthetic construct
  source 1..75: mol_type = other DNA
aactcgccaccgactcagatgaaaaagccgcgctaaaacaagccaaaaagctgtttgatgctgagggtgatgcca

SEQ ID NO: 683413 - DNA, 75 bp, synthetic construct
  source 1..75: mol_type = other DNA
atttcactcacttaacggcggtcaaaatgccgactacattccctttctggcgaatgtgcctggtcaactggcggc

SEQ ID NO: 683414 - DNA, 75 bp, synthetic construct
  source 1..75: mol_type = other DNA
aggcagtggatcaggcatacaccctgtatcacacgtttggcggcgggcaaaacgcagactacatccccttcctgg

SEQ ID NO: 683415 - DNA, 75 bp, synthetic construct
  source 1..75: mol_type = other DNA
cgatgccattgcgctgaaaaaccgcgaacgtcgcgcactggcaaacttttatcatttggggcagttaaatcctcc

SEQ ID NO: 683416 - DNA, 75 bp, synthetic construct
  source 1..75: mol_type = other DNA
aaaaggaaggtggttctcctaccagctggacaagatattcaaaatctaaactaacgaaatcagaatgcgaaaaaa

SEQ ID NO: 683417 - DNA, 75 bp, synthetic construct
  source 1..75: mol_type = other DNA
cagcaagcgagattgcaagcgcaaacgtgaatacttacgtttaagcgcattaatcggaaaacttcaaaattctat

SEQ ID NO: 683418 - DNA, 75 bp, synthetic construct
  source 1..75: mol_type = other DNA
ctggtagagtattaccactggcagccacaatcaatggaaataatccagtggatgagaagacaggagtgatgcaac

SEQ ID NO: 683419 - DNA, 75 bp, synthetic construct
  source 1..75: mol_type = other DNA
agagaataaaaattgcaatatgtggtggacccatacatctccttgccttccggcacgtaagaggctaacctacat

SEQ ID NO: 683420 - DNA, 75 bp, synthetic construct
  source 1..75: mol_type = other DNA
gtatcagccagataatcacagataacggaaaagagttcctgggaaacttcgacaaaacgctgcaggaagccgcta

SEQ ID NO: 683421 - DNA, 75 bp, synthetic construct
  source 1..75: mol_type = other DNA
ataaaattactgccactattgaaaaggaaggcggttcgcctaccaactggacaagatactcaaaaacaaaactaa

SEQ ID NO: 683422 - DNA, 75 bp, synthetic construct
  source 1..75: mol_type = other DNA
agggaagaaactggaatccctgacggtggaaattggcgattatggctttgttgatgttgaaagcacgactgccaa

SEQ ID NO: 683423 - DNA, 75 bp, synthetic construct
  source 1..75: mol_type = other DNA
atgactgaaattatatatggcggtatcggtgttatcgccttaatttgtggtggattatggagacttcaccgaaat

SEQ ID NO: 683424 - DNA, 75 bp, synthetic construct
  source 1..75: mol_type = other DNA
tgctaagatcgtttcttatgaaaatatagataaaataacaaatcattatgatttcatactttgcgcaaacgtgct

SEQ ID NO: 683425 - DNA, 75 bp, synthetic construct
  source 1..75: mol_type = other DNA
tgaagatccttcacaaaaattaggcttaggaatcgcggccggtgtattaggtggcgtaacaactcttggcggcgg

SEQ ID NO: 683426 - DNA, 75 bp, synthetic construct
  source 1..75: mol_type = other DNA
accactacggctctggcagctctaggtacaggtattgcagcggcatgctcggagacgagcagcacagaatactta

SEQ ID NO: 683427 - DNA, 75 bp, synthetic construct
  source 1..75: mol_type = other DNA
ttgatgttgaaagcacgactgccaacacagaaatcgtaaaacaggtcgtcaatgatgtaatgaaaaccacgctta

SEQ ID NO: 683428 - DNA, 75 bp, synthetic construct
  source 1..75: mol_type = other DNA
catgtgaaagaacaggatctggtgcagccatttgtggaaggcctggcggatatcgttgatatggccgcgattcag

SEQ ID NO: 683429 - DNA, 75 bp, synthetic construct
  source 1..75: mol_type = other DNA
gtatgagccggcgcggaaactgctgggataacagcccaatggaacgcttcttcaggagtctgaagaacgaatgga

SEQ ID NO: 683430 - DNA, 75 bp, synthetic construct
  source 1..75: mol_type = other DNA
cggttctggcttaggttccagcgcctgttcggtggtcgcggcgctggtggcgatgaatgaacactgcggtaagcc

SEQ ID NO: 683431 - DNA, 75 bp, synthetic construct
  source 1..75: mol_type = other DNA
tatcgttgatatggcggcaattcagaaagcgggcctgacgctgggcgttgatccgctgggcggttccggtatcga

SEQ ID NO: 683432 - DNA, 75 bp, synthetic construct
  source 1..75: mol_type = other DNA
cgccaaatggtggcccggctgataccaacgtcactaaagtggtggaagacaaggccaacgcactgatggctgatg

SEQ ID NO: 683433 - DNA, 75 bp, synthetic construct
  source 1..75: mol_type = other DNA
tgttgccgtcggtaaaacactggtttcttccgcgatgatcgaccgtgtggttaacgatttgggccgcaaactggt

SEQ ID NO: 683434 - DNA, 75 bp, synthetic construct
  source 1..75: mol_type = other DNA
atataaatacaaacgttagtaaagaggcgctcgatgaatatgttaataataaatatttctcagcgactaaatcta

SEQ ID NO: 683435 - DNA, 75 bp, synthetic construct
  source 1..75: mol_type = other DNA
aaaatgataataggaataatgttgttaacaagttttcaattaatgcgattgttaatcattggttaacaatctata

SEQ ID NO: 683436 - DNA, 75 bp, synthetic construct
  source 1..75: mol_type = other DNA
tggatgcggtaaatcagcttgatttcaaccgttacgccacggcgctggcgaagtatcgccaacaacgggaggcgg

SEQ ID NO: 683437 - DNA, 75 bp, synthetic construct
  source 1..75: mol_type = other DNA
gacattcagcctcaacaaccttggacggtttgccgacaagctaccgtcagaaccacgagaaaatatcgtttatca

SEQ ID NO: 683438 - DNA, 75 bp, synthetic construct
  source 1..75: mol_type = other DNA
atgtagtcacggttgaggcggcagagacattcagtctcaacaacctcggacgctttgccgataagctgccgtcag

SEQ ID NO: 683439 - DNA, 75 bp, synthetic construct
  source 1..75: mol_type = other DNA
gcactataagcttgttatcattggtgagggagacgttcgttcacagattgaacagataattaaagatcacaagtt

SEQ ID NO: 683440 - DNA, 75 bp, synthetic construct
  source 1..75: mol_type = other DNA
ggcatcactggcccttgctatgtgggtaaagatactcacgccctgtccgagcctgcgttcatttccgtactggaa

SEQ ID NO: 683441 - DNA, 75 bp, synthetic construct
  source 1..75: mol_type = other DNA
cgtcaaccgtgctgtcgatctcctcactcaggcaaagaaaatagcctttttcgggttgggttcttctgccgccgt

SEQ ID NO: 683442 - DNA, 75 bp, synthetic construct
  source 1..75: mol_type = other DNA
cgagctggcgcagctggcacgcgaaaacgacgctatggtgattgccctcacctctgcgggtaccccgctcgcccg

SEQ ID NO: 683443 - DNA, 75 bp, synthetic construct
  source 1..75: mol_type = other DNA
gtggaaacaagaacacggtacgcaatatgaagtggtatatggtgcatataaaggtaaagaatcccagcagattta

SEQ ID NO: 683444 - DNA, 75 bp, synthetic construct
  source 1..75: mol_type = other DNA
tggtgaggggcttcctctgccgcagacctatgatcgccctgactcccgtattaagcagctggcccgtcgcagcac

SEQ ID NO: 683445 - DNA, 75 bp, synthetic construct
  source 1..75: mol_type = other DNA
atgaatatgctggaaaaaatccagtctcaactggaacagttgagcaaatcagaacgcaaagttgccgaggtcatt

SEQ ID NO: 683446 - DNA, 75 bp, synthetic construct
  source 1..75: mol_type = other DNA
atgaatatgctggaaaaaatccagtctaaactggaacatctgagcaaatcagaacgcaaagttgccgaggtcatt

SEQ ID NO: 683447 - DNA, 75 bp, synthetic construct
  source 1..75: mol_type = other DNA
ggtgaaagatgtgatgcgctttaacgagccgatgtacaaggttggagagcagaacagcgtctgtatgtcctgtca

SEQ ID NO: 683448 - DNA, 75 bp, synthetic construct
  source 1..75: mol_type = other DNA
acacgcggcaatggatggtaatcaaaccttccggcgtcgagtacgacgtgatgaccgccgacgatatggtggtgg

SEQ ID NO: 683449 - DNA, 75 bp, synthetic construct
  source 1..75: mol_type = other DNA
ataccagactggcgaagtgatcattaaaaccttcgaagagcgcggcaggagtccagcacaaatcccggcgatact

SEQ ID NO: 683450 - DNA, 75 bp, synthetic construct
  source 1..75: mol_type = other DNA
gataccacctggtactggaaagaaattttccctcatgcgtatgaagctatttatggcaattatcaaaataatatt

SEQ ID NO: 683451 - DNA, 75 bp, synthetic construct
  source 1..75: mol_type = other DNA
atgaacgcaataatatcgcccgattattactatgttcttaccgttgctggtcagtctaatgccatggcgtatggc

SEQ ID NO: 683452 - DNA, 75 bp, synthetic construct
  source 1..75: mol_type = other DNA
agcgcggcagcccgtcggggaattatttctgacaggtttgtaaaagcaattttgcagttttggcgcgaaaggtga

SEQ ID NO: 683453 - DNA, 75 bp, synthetic construct
  source 1..75: mol_type = other DNA
gaaccgctgcgctattctgtgcgccaatcttggtggtgacactgacaccatcggcgctatggcgacggcgatttg

SEQ ID NO: 683454 - DNA, 75 bp, synthetic construct
  source 1..75: mol_type = other DNA
ggcgcgaaagcggtgctgaaaagcggcggtaacccattacagaacgtgctgggaagcctgggggggctgcaatcc

SEQ ID NO: 683455 - DNA, 75 bp, synthetic construct
  source 1..75: mol_type = other DNA
agagcctggtcgttcttttggcgataaggtaaaagtacaggattttctgtgtgtggcagttgagaacgaaaaagt

SEQ ID NO: 683456 - DNA, 75 bp, synthetic construct
  source 1..75: mol_type = other DNA
ccaaacgcgtcgaaaaattactgcgcaagccagaccgcctgataagcctggtgttaatcggcaataacctggtca

SEQ ID NO: 683457 - DNA, 75 bp, synthetic construct
  source 1..75: mol_type = other DNA
caggaaaaagcgttccagctgatcaacgagcagcatctggaacagctgccaatgcatgagtttctggtgcgcatt

SEQ ID NO: 683458 - DNA, 75 bp, synthetic construct
  source 1..75: mol_type = other DNA
gcccgttgacccaacgtgaatggcaggtcctggggctgatttactccggttacagcaatgagcaaattgcaggcg

SEQ ID NO: 683459 - DNA, 75 bp, synthetic construct
  source 1..75: mol_type = other DNA
gtgctgaacatgaaatcaaggacatcagagaaggcaccatgcacgcagaatttaacgctctgcgcgcccaggtgg

SEQ ID NO: 683460 - DNA, 75 bp, synthetic construct
  source 1..75: mol_type = other DNA
acgatatcgatattctcgacgttcaggacaatatgattaagcaggtaaaagtctttcctgtaaaaccgctgcgcg

SEQ ID NO: 683461 - DNA, 75 bp, synthetic construct
  source 1..75: mol_type = other DNA
ggcacccgcgtgcatattggcgagtacgatatcgatattctcgacgttcaggacaatatgattaagcaggtaaaa

SEQ ID NO: 683462 - DNA, 75 bp, synthetic construct
  source 1..75: mol_type = other DNA
tgcgcaccatcgtgcacgaatcgcgctcacaaatttcccgtcgcaatcaggatatgctgctgtcggtgctcgatc

SEQ ID NO: 683463 - DNA, 75 bp, synthetic construct
  source 1..75: mol_type = other DNA
agaagagttgcgcactatcgtgcacgaatcacgctcacaaatttcccgtcgcaatcaggatatgctgctgtcggt

SEQ ID NO: 683464 - DNA, 75 bp, synthetic construct
  source 1..75: mol_type = other DNA
gcactgttaatggcgtcattcttgaggcactggaagagatcccggtcgcgggcacccgtgtacgtattggcgagt

SEQ ID NO: 683465 - DNA, 75 bp, synthetic construct
  source 1..75: mol_type = other DNA
caaacctgaccgcctgataagcctggtgttaatcggcaataacctggtcaatattctcgcttccgcactgggcac

SEQ ID NO: 683466 - DNA, 75 bp, synthetic construct
  source 1..75: mol_type = other DNA
tgacatttacccatcaggaagcgaaacagttctttgattgccgtctgtcatcgccgattgaagccgcagaaagca

SEQ ID NO: 683467 - DNA, 75 bp, synthetic construct
  source 1..75: mol_type = other DNA
gatttttttgatgaggcgagaaaaggggtaattaatagatccggtggtaagaaaggtttgagaatagtaaatggt

SEQ ID NO: 683468 - DNA, 75 bp, synthetic construct
  source 1..75: mol_type = other DNA
tttacggttatagcgtcgatcctgagcaattaagttttgttgatagactattgaccaagtctaagaatgaacgac

SEQ ID NO: 683469 - DNA, 75 bp, synthetic construct
  source 1..75: mol_type = other DNA
atgcagaacagccgcgaggggcggctgttaagtgatgagtcgttactgattgtcgccgaactcgcttctgatttg

SEQ ID NO: 683470 - DNA, 75 bp, synthetic construct
  source 1..75: mol_type = other DNA
cccagaaaatcgcaaagaagcggggatcattccctggctgggcgttgacgaaaatacagtgctgaccaatcggca

SEQ ID NO: 683471 - DNA, 75 bp, synthetic construct
  source 1..75: mol_type = other DNA
gcggtgatttatgtcagccaccggatggaagaaatccgccgtatcgcttcctgtgccaccgtcatgcgcgatggt

SEQ ID NO: 683472 - DNA, 75 bp, synthetic construct
  source 1..75: mol_type = other DNA
cattgctggcctgctgggggcagggcgcagtgaattgttgaaagccatagttgggctggagacgtatgaacaggg

SEQ ID NO: 683473 - DNA, 75 bp, synthetic construct
  source 1..75: mol_type = other DNA
gcgcttctttattcgccatcaaccagaaaatctcaccctggtggtgctgtcacgcaatcttccgcaactgggcat

SEQ ID NO: 683474 - DNA, 75 bp, synthetic construct
  source 1..75: mol_type = other DNA
atgctcgctggctcgtggcgatctggataacgcccgcagccaacttaaccgcctggaaaacctgctggggaatgg

SEQ ID NO: 683475 - DNA, 75 bp, synthetic construct
  source 1..75: mol_type = other DNA
actcggcccataaatcagcgcgccgtctggcgggcatcaatgccagccatctttctgattatctggtcgatgaag

SEQ ID NO: 683476 - DNA, 75 bp, synthetic construct
  source 1..75: mol_type = other DNA
agctgaaatggaagcctgctgaatatgaatctctgatgcttttagatcaaactacgctctctggttttactccga

SEQ ID NO: 683477 - DNA, 75 bp, synthetic construct
  source 1..75: mol_type = other DNA
atgaccgctgacgatatggtcgtggtcagcatcgaaaccggtgaagtggttgaaggaacgaaaaagccctcctcc

SEQ ID NO: 683478 - DNA, 75 bp, synthetic construct
  source 1..75: mol_type = other DNA
cgggattgaagtcttgtcgtcttatcagccacagcaacagcttcagtgcctggcaatgttgattcaatgctcgct

SEQ ID NO: 683479 - DNA, 75 bp, synthetic construct
  source 1..75: mol_type = other DNA
gggcaacatacatgatcatagcatcctgccctcttttggagaggccggcgacagtggttctccattatttggctg

SEQ ID NO: 683480 - DNA, 75 bp, synthetic construct
  source 1..75: mol_type = other DNA
tccgcatcccgtatgccacggacccggcaggcaaccgcctgcccgacccggagctgcacccggacagcaccctca

SEQ ID NO: 683481 - DNA, 75 bp, synthetic construct
  source 1..75: mol_type = other DNA
aaatattttcaggcaaagatgagaaaatagttaaaagtaaagataacaatatcaagtcattttatttgggcacgc

SEQ ID NO: 683482 - DNA, 75 bp, synthetic construct
  source 1..75: mol_type = other DNA
aagttatggctattggtcaaattaatatttccggcaatgtcacaccagcgaactggtggaaacatattcggctac

SEQ ID NO: 683483 - DNA, 75 bp, synthetic construct
  source 1..75: mol_type = other DNA
caagctgcgctatcgcgaagtgtctgccagctttaactacaactatatcggtcgtttattactgccggcagcggt

SEQ ID NO: 683484 - DNA, 75 bp, synthetic construct
  source 1..75: mol_type = other DNA
ccaccattatggcgttgaccgctggcgtcagcatgaccgtttcattctccacgccatttgcgctgggaattttta

SEQ ID NO: 683485 - DNA, 75 bp, synthetic construct
  source 1..75: mol_type = other DNA
cagctcgactcctgttctctattacaacaaagatgctttcaagaaagcaggattagacccggaacagccgccgaa

SEQ ID NO: 683486 - DNA, 75 bp, synthetic construct
  source 1..75: mol_type = other DNA
ggtctgtatctctatagcgccgccgaaacactggctgcgccagagaagacatctaccaaaaaatgctcgacggac

SEQ ID NO: 683487 - DNA, 75 bp, synthetic construct
  source 1..75: mol_type = other DNA
aaatcactaaagcaaaaaaaattgtcggtaaaacaatagttttgcgtaacgcaaatcaagatgatgctgaattta

SEQ ID NO: 683488 - DNA, 75 bp, synthetic construct
  source 1..75: mol_type = other DNA
aatgtattatcactagatataacccaggtacgcatacttggtgatttactatcagcaactttatttcatgcacca

SEQ ID NO: 683489 - DNA, 75 bp, synthetic construct
  source 1..75: mol_type = other DNA
cgggcgagacggacattgcgctgcccggcccgctgccgttcatcctttcccgcgcctacagcagttaccggacca

SEQ ID NO: 683490 - DNA, 75 bp, synthetic construct
  source 1..75: mol_type = other DNA
aagaaagccggtttagacccggaacagccgccgaaaacctggcaggatctggcggactatgccgcgaaactgaaa

SEQ ID NO: 683491 - DNA, 75 bp, synthetic construct
  source 1..75: mol_type = other DNA
tgataaaccagattaaagcttctcttattcagcattatccttccggtcagatgactgtactgattgaaacctctg

SEQ ID NO: 683492 - DNA, 75 bp, synthetic construct
  source 1..75: mol_type = other DNA
aaggggctacagaatggtgcgcagaatacgatgagtggggcaacctgctgaatgaagagaacccgcatcagctgc

SEQ ID NO: 683493 - DNA, 75 bp, synthetic construct
  source 1..75: mol_type = other DNA
tgtacccccaggccccgacgaattggctaccagcctgaatgcgcctgagatagcaccggcagtctctgccatacc

SEQ ID NO: 683494 - DNA, 75 bp, synthetic construct
  source 1..75: mol_type = other DNA
cgggacttaaccgccgagtttatttcgattattttttaatgtacattttcagaaaatataaaattaatgataagt

SEQ ID NO: 683495 - DNA, 75 bp, synthetic construct
  source 1..75: mol_type = other DNA
tttaaaaactgccaagactggtctaatgattctttagaaacatgtaagatgaagtgctccggaaataacattgga

SEQ ID NO: 683496 - DNA, 75 bp, synthetic construct
  source 1..75: mol_type = other DNA
tcatcagggtcgaaactgccaccggtgagctggcgaaaacgcagcgccgcagcctggcggatgcccttcagcagt

SEQ ID NO: 683497 - DNA, 75 bp, synthetic construct
  source 1..75: mol_type = other DNA
aatctaatccccggagacatgttcagaatgtgctgctgaaatatgagcctcactttaaatttattaaagtggtga

SEQ ID NO: 683498 - DNA, 75 bp, synthetic construct
  source 1..75: mol_type = other DNA
gaaaagggaaaccgcggatgcgttgaagcgccttcgtgatgccgggtttatttccctggatttacgcactgtgga

SEQ ID NO: 683499 - DNA, 75 bp, synthetic construct
  source 1..75: mol_type = other DNA
tatcccaaacgtgctggtggtaattccaagtcggcagccttcaaagcctggaaagcccgtctcagggagggaata

SEQ ID NO: 683500 - DNA, 75 bp, synthetic construct
  source 1..75: mol_type = other DNA
gacggccaccgccgccacatcgtcgaaaatccgaaactcgaccaggtggaaaactacgaacaggtcaaagtcgat

SEQ ID NO: 683501 - DNA, 75 bp, synthetic construct
  source 1..75: mol_type = other DNA
atgcttcaggaaaacccaacaactatggcatcaaacccgtttccgtcgttgggcgaatacagctggctgccgggc

SEQ ID NO: 683502 - DNA, 75 bp, synthetic construct
  source 1..75: mol_type = other DNA
attgccggaaccactgataccaccgcgaaagagcgtgaacctgtcgatccgacgctgatggtcgatgtggaatat

SEQ ID NO: 683503 - DNA, 75 bp, synthetic construct
  source 1..75: mol_type = other DNA
aaacgaacccgatgctgcaggatgtcgcggtgggctggctgcagaaataccgcaatgaagctgccgcgcgcgtga

SEQ ID NO: 683504 - DNA, 75 bp, synthetic construct
  source 1..75: mol_type = other DNA
tattttcattgttaatgtcattgcttgtgtctttttttactttaataaccgtgtcaaacataatttcagtaaaac

SEQ ID NO: 683505 - DNA, 75 bp, synthetic construct
  source 1..75: mol_type = other DNA
caaccagattatgacagcgctgaaaaaactgtttattacgaacagtggttcagccggtgctattgccggattaac

SEQ ID NO: 683506 - DNA, 75 bp, synthetic construct
  source 1..75: mol_type = other DNA
ctggagtggcacaagtggtgcacatgccccggtttacatccgctcaagacgagacaatgacgaggcggaatggtc

SEQ ID NO: 683507 - DNA, 75 bp, synthetic construct
  source 1..75: mol_type = other DNA
catttgatggcaccggtgatatcaccatcaccgctactggcgtacaggatatgaggctgggaagccagagggtcg

SEQ ID NO: 683508 - DNA, 75 bp, synthetic construct
  source 1..75: mol_type = other DNA
ctcaacttaatcattcgctgatatgggatggttttcggcagcttatcccggtttcactctttgtcgctatttttg

SEQ ID NO: 683509 - DNA, 75 bp, synthetic construct
  source 1..75: mol_type = other DNA
gtgtgccggtaatgccacctgtcgcggctgaattaagcaaaacaacgctttatttcaccgaaggcgggaatggta

SEQ ID NO: 683510 - DNA, 75 bp, synthetic construct
  source 1..75: mol_type = other DNA
aaactgtttattacaaacagtggttcagccggagctattgccggattaaccggtgagaataatacgttcccgtat

SEQ ID NO: 683511 - DNA, 75 bp, synthetic construct
  source 1..75: mol_type = other DNA
atcttactcagaatcacttactctatccaggagacattctgtttgtccctcgtaacgatgatttaaaagtatttg

SEQ ID NO: 683512 - DNA, 75 bp, synthetic construct
  source 1..75: mol_type = other DNA
actgatggttacggtatgggatcacccggaattgacaacgcctgcaggtcaataccgtagcgccagcgacaccgg

SEQ ID NO: 683513 - DNA, 75 bp, synthetic construct
  source 1..75: mol_type = other DNA
aatcgtgtgatatcacaacttgtacctacaattactggagtacatgatatgacagaaacagcaaaatttattaag

SEQ ID NO: 683514 - DNA, 75 bp, synthetic construct
  source 1..75: mol_type = other DNA
acagtggcaattttgtccaataataactcagctgtcagtaatgtttatgaaaagatggacaaacagcaactggga

SEQ ID NO: 683515 - DNA, 75 bp, synthetic construct
  source 1..75: mol_type = other DNA
gctggtggattagctacagatgcagactggcgaaatgttgttctgactcacaatggtaaggatacaaagatttct

SEQ ID NO: 683516 - DNA, 75 bp, synthetic construct
  source 1..75: mol_type = other DNA
tacagccatatgatatcgtgtatgtgactagtgcgccgcttgttcgctggaatcgcgttatatcgcaacttgttc

SEQ ID NO: 683517 - DNA, 75 bp, synthetic construct
  source 1..75: mol_type = other DNA
ctcgctagattcctcgcatggagttcctggatctttttgtttacagatctatagcaatataaaaatttatggcga

SEQ ID NO: 683518 - DNA, 75 bp, synthetic construct
  source 1..75: mol_type = other DNA
caataaactatcttgaaacacagatacctgataataatgagtatatattagaattatctaaatatagtgaacact

SEQ ID NO: 683519 - DNA, 75 bp, synthetic construct
  source 1..75: mol_type = other DNA
tactcaatcaggtgtgggggccaaacgcggtcgaacacagtcactatttgcgtatttatatgggacatctgcgac

SEQ ID NO: 683520 - DNA, 75 bp, synthetic construct
  source 1..75: mol_type = other DNA
tgatcccactgggtaatttccaccggacgcgtcatcgacggtactggcggctgggctttacgttgcgcgacaaaa

SEQ ID NO: 683521 - DNA, 75 bp, synthetic construct
  source 1..75: mol_type = other DNA
atatgtcatttgtttttatgatactgaaagaggcgttgcaaaatattcaagaaaataaaaaaatgatgtatttgt

SEQ ID NO: 683522 - DNA, 75 bp, synthetic construct
  source 1..75: mol_type = other DNA
aggaaataaaaaagtagtttatgaatatagagcagggccttttttaagagctttaatacttgcgttaaactcaaa

SEQ ID NO: 683523 - DNA, 75 bp, synthetic construct
  source 1..75: mol_type = other DNA
ggtaaaagccatcggattaacgaaatattaggttcatcgaaatatataagaactgttttttatccagacatgctc

SEQ ID NO: 683524 - DNA, 75 bp, synthetic construct
  source 1..75: mol_type = other DNA
gcatcacgccttctacggcagccgtactcaatatggcagcaacattaccgttggtctttgatgctgagctaaaca

SEQ ID NO: 683525 - DNA, 75 bp, synthetic construct
  source 1..75: mol_type = other DNA
cgatgctttcacattgatgcgtcgtcgtttccaccatttcaccttctacggctttatgctctgtttcgccgcgac

SEQ ID NO: 683526 - DNA, 75 bp, synthetic construct
  source 1..75: mol_type = other DNA
cattcttcagtgtgccggtcatgcttggcacgttaggaggagtcggtttaatcgtaggcccggcaggcctgctgt

SEQ ID NO: 683527 - DNA, 75 bp, synthetic construct
  source 1..75: mol_type = other DNA
atgccctggaactctggactacatatctgaatagcatcgctggtgctgagtcaaaagtaacaatcctcaaacaaa

SEQ ID NO: 683528 - DNA, 75 bp, synthetic construct
  source 1..75: mol_type = other DNA
agccgatcaaactgtcccccagagtggcggcgttctcaactgcggaaatcaatcaatggctggaggggaaaaatg

SEQ ID NO: 683529 - DNA, 75 bp, synthetic construct
  source 1..75: mol_type = other DNA
ttattctctggggggctatgccagctgggaacatgaaagtggtttctatctggacggtatcgtgaagctgaaccg

SEQ ID NO: 683530 - DNA, 75 bp, synthetic construct
  source 1..75: mol_type = other DNA
gaagaatgccaaaaagaatgggccaggtactgtgatgaagggatgccatgctgcggtctgttcggcgcagctctg

SEQ ID NO: 683531 - DNA, 75 bp, synthetic construct
  source 1..75: mol_type = other DNA
aattacaccaacttgctatcaaaaatcgagttcctgcatggtcggtttacatgcatatcagccacgcatgtctga

SEQ ID NO: 683532 - DNA, 75 bp, synthetic construct
  source 1..75: mol_type = other DNA
tgagtttagccacctgacgggaatggatgatagccatggaacattgaccctgctggacaccccaggtcccaatga

SEQ ID NO: 683533 - DNA, 75 bp, synthetic construct
  source 1..75: mol_type = other DNA
taatgttgctgaacttacctttgtgcctattgatattatcaatatttaaagaagtcgaaatagtctatcttgttg

SEQ ID NO: 683534 - DNA, 75 bp, synthetic construct
  source 1..75: mol_type = other DNA
tgatatcgttttatacagtggcagacggtaccgcgtgacctttgtcgatccgtacacccgatacggtgccgggtt

SEQ ID NO: 683535 - DNA, 75 bp, synthetic construct
  source 1..75: mol_type = other DNA
aatataaattgttttaatgatagattattattacttaattcaatatggaaacatcaattagatctggtcaataaa

SEQ ID NO: 683536 - DNA, 75 bp, synthetic construct
  source 1..75: mol_type = other DNA
ttgcgtgcactaggctatgataaagaaaattcacttaagcgtgtcattaatagttttaattctgaactcatggga

SEQ ID NO: 683537 - DNA, 75 bp, synthetic construct
  source 1..75: mol_type = other DNA
cccgcccccatcattcagccgattcgtcacaatggtgaaaccattggcgaagtacgcttaaccgctcgcgacagt

SEQ ID NO: 683538 - DNA, 75 bp, synthetic construct
  source 1..75: mol_type = other DNA
agcggcatattgcctcgttctcgcatcatggtttgcctcaaggcagtgacgacgcgctacggtatattgcggaac

SEQ ID NO: 683539 - DNA, 75 bp, synthetic construct
  source 1..75: mol_type = other DNA
gcttatggtgccggattcgttcaggcgcattgtgaggtgatgccgtttgatgggggaactccggttgagcaataa

SEQ ID NO: 683540 - DNA, 75 bp, synthetic construct
  source 1..75: mol_type = other DNA
taaatatggcgatgcaggtaatgactccaacttactgatagtgttttatgttcagataatgcccgatgaccttgt

SEQ ID NO: 683541 - DNA, 75 bp, synthetic construct
  source 1..75: mol_type = other DNA
atgaaaaaaaataacacacaacaaataaaatgcatcatattcaattcattacgtgcactaggccatgaaaaagaa

SEQ ID NO: 683542 - DNA, 75 bp, synthetic construct
  source 1..75: mol_type = other DNA
ttaacacccttaacctggcacattctggcaatattcatcaccactgtggtggcgtttattctgcaaccgttgccg

SEQ ID NO: 683543 - DNA, 75 bp, synthetic construct
  source 1..75: mol_type = other DNA
ctcgagaagttcaatgtaaataaactgaaaatatttcatgaaaaaaactctggtgtagcaatagcaagacgaaaa

SEQ ID NO: 683544 - DNA, 75 bp, synthetic construct
  source 1..75: mol_type = other DNA
taaatacttgttgaagatggattttgagaattttttccctagcataacaccacgtctatttttctcaaagttacg

SEQ ID NO: 683545 - DNA, 75 bp, synthetic construct
  source 1..75: mol_type = other DNA
acatagagccatcgttttataaaagcatggttattaaatatgggcctgataatatccataaattacaaaaacaaa

SEQ ID NO: 683546 - DNA, 75 bp, synthetic construct
  source 1..75: mol_type = other DNA
cagactggataatccaatgtgctcttgaaacaggaacctcactgaaatggttaaccaccgggcaaggacttaagc

SEQ ID NO: 683547 - DNA, 75 bp, synthetic construct
  source 1..75: mol_type = other DNA
aatgagtttcaaagaaagtcaaaatatgatatagaaaatataaaacagcaatacgctgcatcagatactttcatc

SEQ ID NO: 683548 - DNA, 75 bp, synthetic construct
  source 1..75: mol_type = other DNA
atacatttactgcaaagaagtttgttgagccgcttttagataatgttaatgagcaacacaataaagaaaaaataa

SEQ ID NO: 683549 - DNA, 75 bp, synthetic construct
  source 1..75: mol_type = other DNA
aagccgatcagttatatgcactggtaagggcgggcggtggcgctccccataccatcgttaaacaggcgttagccg

SEQ ID NO: 683550 - DNA, 75 bp, synthetic construct
  source 1..75: mol_type = other DNA
agcaaaatcaccaacgtcaaagacggtgacctgacggctggcagcactgacgcggttaacggctctcagctcaaa

SEQ ID NO: 683551 - DNA, 75 bp, synthetic construct
  source 1..75: mol_type = other DNA
tatcgtcatgttgttgaacattgccatctggttcggactgggggcggtgtggtggaaaattcttggcctgtggta

SEQ ID NO: 683552 - DNA, 75 bp, synthetic construct
  source 1..75: mol_type = other DNA
gcatcgcagcactaaccgcgctggctgctctcatctcatttctacgcgaaccggcaggtgtgcaatggctaagta

SEQ ID NO: 683553 - DNA, 75 bp, synthetic construct
  source 1..75: mol_type = other DNA
tcagcaggactgccagaaagttaaggatgaggcaaaacgccttgaggccgtgctgaatgttgcgtgccggtcggt

SEQ ID NO: 683554 - DNA, 75 bp, synthetic construct
  source 1..75: mol_type = other DNA
actaacgataatgtggcaaccaacaccaccaacatcaccaacctgacggattccgttggcgaccttaaagacgat

SEQ ID NO: 683555 - DNA, 75 bp, synthetic construct
  source 1..75: mol_type = other DNA
agggcgatgccacaatgaaaggtggcccgatagtccaggggtcggcaggcgtgaggattggcgcgccaaccggcg

SEQ ID NO: 683556 - DNA, 75 bp, synthetic construct
  source 1..75: mol_type = other DNA
agaaactatcagacaaaagggctgattaataaagatcagttaactaaccaggtggcattatattatcagcaacaa

SEQ ID NO: 683557 - DNA, 75 bp, synthetic construct
  source 1..75: mol_type = other DNA
cgttagccattgccgttatcaaagaagagctgcgtgtactgggcgaagcacacaccatgaactccgatgaatttg

SEQ ID NO: 683558 - DNA, 75 bp, synthetic construct
  source 1..75: mol_type = other DNA
cagtcgtggattgatgatggcgatgccagccttcctccggaaaagattagtgtaccttttgtgctgactccaccg

SEQ ID NO: 683559 - DNA, 75 bp, synthetic construct
  source 1..75: mol_type = other DNA
gacgcatcgctgaggccgtgtgacgggtcattgctggcttgcagaatggaaggtgatatgaggataaagcggtat

SEQ ID NO: 683560 - DNA, 75 bp, synthetic construct
  source 1..75: mol_type = other DNA
catttatcagattgatgtcagccgcagcacccggagtggtgttgtcagtgacaatttaagaaaagatactgaaaa

SEQ ID NO: 683561 - DNA, 75 bp, synthetic construct
  source 1..75: mol_type = other DNA
gatagaattgaagggttacctttaaacgtgcttgaagcagcatctgtaggtttacctataatcttatccaagcaa

SEQ ID NO: 683562 - DNA, 75 bp, synthetic construct
  source 1..75: mol_type = other DNA
cggtaccattacgacagtcagcaccggctggtgcactacacgcggacacaatatgcagagccgctggtcgaaagc

SEQ ID NO: 683563 - DNA, 75 bp, synthetic construct
  source 1..75: mol_type = other DNA
tggatatccgcatcccgtatgccacagacccggcaggtaaccgcctgcccgacccggagctgcacccggacagca

SEQ ID NO: 683564 - DNA, 75 bp, synthetic construct
  source 1..75: mol_type = other DNA
gatggaacctgtatggatatcaattgaatccgatatcagacatcgaccccctgggtttatctatgtgggaggatg

SEQ ID NO: 683565 - DNA, 75 bp, synthetic construct
  source 1..75: mol_type = other DNA
atgattgaaagaggtgataacagcggtgttcaacagtatggtccagctgaacatttcactcacattatatctgac

SEQ ID NO: 683566 - DNA, 75 bp, synthetic construct
  source 1..75: mol_type = other DNA
atcgtcacttcgaagattactggcaacagccagccgctcacggaggtgggcgacagcgacaggtcgatgtcctgg

SEQ ID NO: 683567 - DNA, 75 bp, synthetic construct
  source 1..75: mol_type = other DNA
gattacctgccacagacaaattggccaacaactcaattaccaccaggatatacttgtgcagaaccctatttattc

SEQ ID NO: 683568 - DNA, 75 bp, synthetic construct
  source 1..75: mol_type = other DNA
acttcacagaaaggcgcatatcgctcgatgcgatgctcgtaagccatccatcagctacgtactacatgcgcgcag

SEQ ID NO: 683569 - DNA, 75 bp, synthetic construct
  source 1..75: mol_type = other DNA
cagtagcaaatggtaagtttactcatagtggaagaagcaaagaaataaaaccgatagagaatgcgattgtagaaa

SEQ ID NO: 683570 - DNA, 75 bp, synthetic construct
  source 1..75: mol_type = other DNA
atcatgaattttattctaagtgatttatattcggataatcgcaaaaaggttagtgagttagctcataatctagac

SEQ ID NO: 683571 - DNA, 75 bp, synthetic construct
  source 1..75: mol_type = other DNA
cgggcgcgaggtaacgtatatggacgctcccggaatgcaatgctttcttcagttatgtaataaaacgggtaggtg

SEQ ID NO: 683572 - DNA, 75 bp, synthetic construct
  source 1..75: mol_type = other DNA
cgccgtactgcccgcttggttaacgtcgccgcccaattggcaaaatattctggtaaatcaataaccatctcatca

SEQ ID NO: 683573 - DNA, 75 bp, synthetic construct
  source 1..75: mol_type = other DNA
tgtttctgttccggatacaggacttgtatttaacgtgattatatctgttgatcggaatgatatacagggagaaat

SEQ ID NO: 683574 - DNA, 75 bp, synthetic construct
  source 1..75: mol_type = other DNA
gtatttaacgtgattatatctgttgatcggaatgatatacagggagaaagaaaaaaatccctgttacagctggaa

SEQ ID NO: 683575 - DNA, 75 bp, synthetic construct
  source 1..75: mol_type = other DNA
tctagtagatagtagtggtatgggtgggcttaaattagctactctcgagttggaagataacgggaaattatctcc

SEQ ID NO: 683576 - DNA, 75 bp, synthetic construct
  source 1..75: mol_type = other DNA
gggttgaaatcagcggttcttgaactggaagataatggaaagctatctcctgagcttctggatacagcatttgag

SEQ ID NO: 683577 - DNA, 75 bp, synthetic construct
  source 1..75: mol_type = other DNA
gaacaaatcgtcgagggggtggcgaatgagacaacgattaacgacggcggaatacaaacagtttcagctaacgga

SEQ ID NO: 683578 - DNA, 75 bp, synthetic construct
  source 1..75: mol_type = other DNA
attttcttctactgatcagctaagtgaagcgctaacctgggtaaaacaattaatccgcaacaatgatggtcattt

SEQ ID NO: 683579 - DNA, 75 bp, synthetic construct
  source 1..75: mol_type = other DNA
ttggtacgccagcccaacggcggtactcgcaaacttccctgctaccaaattacccgcgacggcttcgccttcctt

SEQ ID NO: 683580 - DNA, 75 bp, synthetic construct
  source 1..75: mol_type = other DNA
aaagccgtctggatgatttcaggagtttattgcataaacaggcaattgcaaaacatgctgtacttgagcaggaga

SEQ ID NO: 683581 - DNA, 75 bp, synthetic construct
  source 1..75: mol_type = other DNA
cgaatgaaaaatggtttatcgttgtaacccgtcaggatagagattggggcgaagcattcagcagcgagcaggagc

SEQ ID NO: 683582 - DNA, 75 bp, synthetic construct
  source 1..75: mol_type = other DNA
ataaaaacgcacctacaacgagaaaccgcgagatagaacgtgaggtaacgggttacggcatcatcgatgaagatg

SEQ ID NO: 683583 - DNA, 75 bp, synthetic construct
  source 1..75: mol_type = other DNA
cttttctcttaaactcctttttcgcgaatgcaacgaatattgacttctcgataacggatgcaggccttaacgatg

SEQ ID NO: 683584 - DNA, 75 bp, synthetic construct
  source 1..75: mol_type = other DNA
tcttacaggcttgttaaaggttcttcgttgcaagatgttcagcaatactttaatcatgatatacaagatggtact

SEQ ID NO: 683585 - DNA, 75 bp, synthetic construct
  source 1..75: mol_type = other DNA
ttgatactgctacgattgaaacaactttgaccgaagcagtagaatatttcgttggtctaggatgtcgtattttta

SEQ ID NO: 683586 - DNA, 75 bp, synthetic construct
  source 1..75: mol_type = other DNA
acaagtttgcgtagtctttagtgacgagcaagggctggctacatttgcagaacatctgtcctccctcggtctagg

SEQ ID NO: 683587 - DNA, 75 bp, synthetic construct
  source 1..75: mol_type = other DNA
aatcaagaattctttaattctttacttgtagagtttgatgatggtctgtatcactacacctctgacctgacaggg

SEQ ID NO: 683588 - DNA, 75 bp, synthetic construct
  source 1..75: mol_type = other DNA
gtattcagaccgtagattataacgagcaggatgtatttaatgtgcgcgtaaaagcaggcgcacaaacaacaatta

SEQ ID NO: 683589 - DNA, 75 bp, synthetic construct
  source 1..75: mol_type = other DNA
attctttaaacgtaccagtactggtattagtgttactatccagttaaaagataatcgccgtgatgctggttatat

SEQ ID NO: 683590 - DNA, 75 bp, synthetic construct
  source 1..75: mol_type = other DNA
ggtttacgtcggttaaaggcaaccacgaagcgatggcgttggatgcattcgaaactggcgatggaaatatgtggc

SEQ ID NO: 683591 - DNA, 75 bp, synthetic construct
  source 1..75: mol_type = other DNA
caaaaggtcaaatttgggttttatgtattgggtgtaatttagtcggcatattattttttgcttcctttgttttgt

SEQ ID NO: 683592 - DNA, 75 bp, synthetic construct
  source 1..75: mol_type = other DNA
atctgatgctgttcctcgaagatggcacttatatcaatgcaaacattatgatgcgaatttaggccttcctaaggc

SEQ ID NO: 683593 - DNA, 75 bp, synthetic construct
  source 1..75: mol_type = other DNA
aatattttgtttgtcgggatcaacccacaggcaattgctgccatcaccacaccttcttctgtttcgccagaaagt

SEQ ID NO: 683594 - DNA, 75 bp, synthetic construct
  source 1..75: mol_type = other DNA
ataaaattttgtctaatcctagttttaaagttaacagagcagaccgtgatgcactggtgaacgcctggcgaagtc

SEQ ID NO: 683595 - DNA, 75 bp, synthetic construct
  source 1..75: mol_type = other DNA
atggcccaactgctggtgagtctatggggggaacagggggcgaatctgaatcagcaaggtggaaataataatagt

SEQ ID NO: 683596 - DNA, 75 bp, synthetic construct
  source 1..75: mol_type = other DNA
atggctaaagaactaagtggatatggcccaactgctggtgagtctatggggggaacaggggcgaatctgaatcag

SEQ ID NO: 683597 - DNA, 75 bp, synthetic construct
  source 1..75: mol_type = other DNA
tcgaaacccgagtgccattattggaccaccgtattatcgaatttgcttggcagttaccggtttctttaaagatta

SEQ ID NO: 683598 - DNA, 75 bp, synthetic construct
  source 1..75: mol_type = other DNA
tctattagaaagtaataatcatatttcctggcgtggccattctgatacggaaacgcttttggcatgctttggtat

SEQ ID NO: 683599 - DNA, 75 bp, synthetic construct
  source 1..75: mol_type = other DNA
actggggaatatcagtaaggctttcaaagctgccgatgtaattatgaagattgagaaggtcaaggagaaaagcat

SEQ ID NO: 683600 - DNA, 75 bp, synthetic construct
  source 1..75: mol_type = other DNA
actggataacgtcatggaatttgaagatatcgccgataacgcagcggacgcaccgactgaaacctgcttcatgca

SEQ ID NO: 683601 - DNA, 75 bp, synthetic construct
  source 1..75: mol_type = other DNA
tcaaatgttataaatggttatattgaaaatttaaacgcagaaaaaaaatatgactttatattctttggaagatta

SEQ ID NO: 683602 - DNA, 75 bp, synthetic construct
  source 1..75: mol_type = other DNA
cacctgttgatttatacgaaaaaattcactatcgcttaaaaaatataaatatcaaaccagggcttactgaatcac

SEQ ID NO: 683603 - DNA, 75 bp, synthetic construct
  source 1..75: mol_type = other DNA
cacatcaagttattgcctttgaagcattagttaaaaatgtcgaaaatagccatgttcgctctgagaactttgtat

SEQ ID NO: 683604 - DNA, 75 bp, synthetic construct
  source 1..75: mol_type = other DNA
tagatatataaaagaaccttttggtaagaaaacatccgaatggcaagaaaacggtgaattgctatccgataacga

SEQ ID NO: 683605 - DNA, 75 bp, synthetic construct
  source 1..75: mol_type = other DNA
gatcgccttgctgccgctgggcggttcgctgctgtatgggctgttcggcatcaaccgttaccagcggcgggcgcg

SEQ ID NO: 683606 - DNA, 75 bp, synthetic construct
  source 1..75: mol_type = other DNA
tttacggtcgtttttatctggtgaatttcgataacgtcaggacagtttctgtgtctgacgatgaagaatgtggcg

SEQ ID NO: 683607 - DNA, 75 bp, synthetic construct
  source 1..75: mol_type = other DNA
ggcagtactggctgcgctgtggtacttcttctcttcctccctcaccgaactggtgagtcagacggtcaagccggg

SEQ ID NO: 683608 - DNA, 75 bp, synthetic construct
  source 1..75: mol_type = other DNA
tatgacgctggctggtctctggtgtgtgctttcttctgtgctcgcagaccaggtggcacggcttaccgggcaggg

SEQ ID NO: 683609 - DNA, 75 bp, synthetic construct
  source 1..75: mol_type = other DNA
ttcttcaaacttctgactctcgggtatcactactggacgccttccggtggtctcattgagcccgcggagcgtacc

SEQ ID NO: 683610 - DNA, 75 bp, synthetic construct
  source 1..75: mol_type = other DNA
ttttaagcgaagcaatattcgcatggcagggaatgtctgtaatcagatgaaaaaagaagcgctgtttcgcctaag

SEQ ID NO: 683611 - DNA, 75 bp, synthetic construct
  source 1..75: mol_type = other DNA
gaacaagctatcaacagtagcgtgagtcttgtctccttcggtttatctgcatcggactggaaagtgcatcgtggc

SEQ ID NO: 683612 - DNA, 75 bp, synthetic construct
  source 1..75: mol_type = other DNA
tccatgaacaggtggcgttgagtcgcttgcatgatgaaaaactggtcctgctcagcgcggaatttgccaccagag

SEQ ID NO: 683613 - DNA, 75 bp, synthetic construct
  source 1..75: mol_type = other DNA
gacaaaatttcagaaactacgtcagtggatggtatcgagaaaacggaatgaacaggctcctcaggagctgacaaa

SEQ ID NO: 683614 - DNA, 75 bp, synthetic construct
  source 1..75: mol_type = other DNA
atatccaggatccgcaggaaatcccggccagttcaggagcagaactggatgttcagttggaacctgttgcccccg

SEQ ID NO: 683615 - DNA, 75 bp, synthetic construct
  source 1..75: mol_type = other DNA
ccactgacaaaatttcagaaactacgtcagtggatggtatcgagaaaacagaatgaacaggctcctctggagctg

SEQ ID NO: 683616 - DNA, 75 bp, synthetic construct
  source 1..75: mol_type = other DNA
tgataacgggcttacccgtggcgaacaaatggaactggcacgaattgcgctggcatcgctggaagccgaaccggt

SEQ ID NO: 683617 - DNA, 75 bp, synthetic construct
  source 1..75: mol_type = other DNA
aatggctcatcgataccggtgagcgactaaagaccgccgatggcaaggaggtcgaggtctgggagtttcgtcatg

SEQ ID NO: 683618 - DNA, 75 bp, synthetic construct
  source 1..75: mol_type = other DNA
agaaaggtttttctttttctgaaattgttaacttccttaatattaataccagaacattagtcaattatattggag

SEQ ID NO: 683619 - DNA, 75 bp, synthetic construct
  source 1..75: mol_type = other DNA
tcggaaattatcaaaaggggctatttatcgttatgaaaagcactttagcaaaaacgttatgattgattcttttct

SEQ ID NO: 683620 - DNA, 75 bp, synthetic construct
  source 1..75: mol_type = other DNA
gtgccgtgtggaaatccgcccaccttgccgggcgccggtgctgtgtggaaatcgcccatcttcatgacaaaaatt

SEQ ID NO: 683621 - DNA, 75 bp, synthetic construct
  source 1..75: mol_type = other DNA
cggtgctgtgtggaaatccgcccaccttaccgggcgccggtgctgtgtggaaatccgcccatcttgccgggcgcc

SEQ ID NO: 683622 - DNA, 75 bp, synthetic construct
  source 1..75: mol_type = other DNA
acgtatgagctttatatgtctggtttagcgaaagcatttaatgaggtatgtgaggataaacctgtaataggactt

SEQ ID NO: 683623 - DNA, 75 bp, synthetic construct
  source 1..75: mol_type = other DNA
accgcactggaagctgccggtggcaaagtggtcacaacgggtaaagatattctggttaccctgccggcttaccgg

SEQ ID NO: 683624 - DNA, 75 bp, synthetic construct
  source 1..75: mol_type = other DNA
taaattgtgtcgctttggggttaattgcttttactgtgaatgcagcaccttcagatgtaactgtttcaggcaagc

SEQ ID NO: 683625 - DNA, 75 bp, synthetic construct
  source 1..75: mol_type = other DNA
agccgtgtgggaatccgcccaccttgccgggcgccggtgctgtgtggaaattcgcccatcttcatgacaaaaatt

SEQ ID NO: 683626 - DNA, 75 bp, synthetic construct
  source 1..75: mol_type = other DNA
tgcacaccgacgacgcaacgggcttcatgcttgccggcggaatgggcgtgccgtttcaccatgtcgctataccgg

SEQ ID NO: 683627 - DNA, 75 bp, synthetic construct
  source 1..75: mol_type = other DNA
cgtgccgtgtatgtcgatacgaacagcgggaaggtagaggactggctggattacaccgtgtttacgctggctggc

SEQ ID NO: 683628 - DNA, 75 bp, synthetic construct
  source 1..75: mol_type = other DNA
ctcgttaataaggttgattttcaacatgttaaattaataaagaaaaaatataaaaataaattcattatcttttct

SEQ ID NO: 683629 - DNA, 75 bp, synthetic construct
  source 1..75: mol_type = other DNA
aacacgcattcaatacgagctggttgtaatgtcatctaagctgataaaaaaacagaccgatatgttcaaagtaat

SEQ ID NO: 683630 - DNA, 75 bp, synthetic construct
  source 1..75: mol_type = other DNA
taaaactggcaaggtttatgttcctgccactcatgatgagaacggagctatcaggcctcacgtttactacgaaga

SEQ ID NO: 683631 - DNA, 75 bp, synthetic construct
  source 1..75: mol_type = other DNA
ggccttgctcattcggtgttaaccaggctgaagagtgggagataaaagacgatcgcggccgctcaatcggtcaga

SEQ ID NO: 683632 - DNA, 75 bp, synthetic construct
  source 1..75: mol_type = other DNA
acaggacgttgcggcaaactttaccctcgaaaataacggcattgccatcacccaagccaatggggaagcgcatgt

SEQ ID NO: 683633 - DNA, 75 bp, synthetic construct
  source 1..75: mol_type = other DNA
gctcaacacatgcatcgccggactatagcggaggcgacggtaccgcacgttcagactacatgggaatgtatgcca

SEQ ID NO: 683634 - DNA, 75 bp, synthetic construct
  source 1..75: mol_type = other DNA
tatgcgtgctgatgttgttggcgagggtaatggcgttaataataaaggggatttattgaatatcagcggaagtag

SEQ ID NO: 683635 - DNA, 75 bp, synthetic construct
  source 1..75: mol_type = other DNA
taccgctcctattgttcgctggaatcgcgtgatatcacaacttgttccaacaatttctggtgttcatgacatgac

SEQ ID NO: 683636 - DNA, 75 bp, synthetic construct
  source 1..75: mol_type = other DNA
gtcgtaaccgcgataaagcggcgatcgcgaaggtgcagtttgatgtgttcgggttcagtcgcggcgcggcagcgg

SEQ ID NO: 683637 - DNA, 75 bp, synthetic construct
  source 1..75: mol_type = other DNA
tgacggcgacggtgaaagatccgtcgaatcatccggtggcgggaataacggtgaatttcaccatgccacaggacg

SEQ ID NO: 683638 - DNA, 75 bp, synthetic construct
  source 1..75: mol_type = other DNA
tgtaaaattacctacggcacaaggcctggaggttacatcactggcagttgaattaggacatgaattaggtcatgc

SEQ ID NO: 683639 - DNA, 75 bp, synthetic construct
  source 1..75: mol_type = other DNA
ttttaagcgaagcaatattcgcatggcagggaatgtctgtaatcagatgaaaaaagaagcgctgtttcgccctaa

SEQ ID NO: 683640 - DNA, 75 bp, synthetic construct
  source 1..75: mol_type = other DNA
tacgctggcgaaaatgcttttttggttatggactgctgcaactgctgtttatgctacgtctgatgccatggtatc

SEQ ID NO: 683641 - DNA, 75 bp, synthetic construct
  source 1..75: mol_type = other DNA
ggatattttgttgattacctcacaggactacagggatatagggatgaagatggaaacgaaatttatgatgaacct

SEQ ID NO: 683642 - DNA, 75 bp, synthetic construct
  source 1..75: mol_type = other DNA
tctgtatgatagtataaaaaatgataattttgataaaaagtttaaaaaatatatggagaatccaatatcccttgc

SEQ ID NO: 683643 - DNA, 75 bp, synthetic construct
  source 1..75: mol_type = other DNA
ataaaaatggtcgtaaattacgaaaaaatgacatatttgactttctaatagttatttctctaaatatgccagaca

SEQ ID NO: 683644 - DNA, 75 bp, synthetic construct
  source 1..75: mol_type = other DNA
ggtcagggattaaacagtctgcggaaaaacgtggttgagctaccggacagtgactacgatctggataaactggtt

SEQ ID NO: 683645 - DNA, 75 bp, synthetic construct
  source 1..75: mol_type = other DNA
tgcaggtagcgggcaaaacgcttagccaggtacgccaggatatcgccagccgtttgactacttatattgaaagtc

SEQ ID NO: 683646 - DNA, 75 bp, synthetic construct
  source 1..75: mol_type = other DNA
tagcgagtgcactctgcttcacgccgctatcggtgctggctgacggggagcaaacaaccattactatcaatgggt

SEQ ID NO: 683647 - DNA, 75 bp, synthetic construct
  source 1..75: mol_type = other DNA
atgacgtggtgtatgtcactaccgccccggtttcccgctggaaccgtctgatcaatcagttgctgccaactatta

SEQ ID NO: 683648 - DNA, 75 bp, synthetic construct
  source 1..75: mol_type = other DNA
atttatcgcagaatagactcctctaccctggcgatatattgtttgtgcctcgtaatgacgatcttaaagtgtttg

SEQ ID NO: 683649 - DNA, 75 bp, synthetic construct
  source 1..75: mol_type = other DNA
ctagataatttattgcgcagttacgaatatcgcattggtgtgggcgatgtattgatggttactgtttgggatcac

SEQ ID NO: 683650 - DNA, 75 bp, synthetic construct
  source 1..75: mol_type = other DNA
tacaacggccccggtagtacgttggaatcgtgtcatatcacagttagtaccgactattagtggcgtgcatgatat

SEQ ID NO: 683651 - DNA, 75 bp, synthetic construct
  source 1..75: mol_type = other DNA
ttcaggtggctggtaaaacaatcagtcaggtacgccaggatattgccagtcgcttgacaacatatatcgaaagcc

SEQ ID NO: 683652 - DNA, 75 bp, synthetic construct
  source 1..75: mol_type = other DNA
atgctgaaggtatttcacaggatatgagcgatgcaactggcgtatttgttatacgacagttaaaaaatgataaga

SEQ ID NO: 683653 - DNA, 75 bp, synthetic construct
  source 1..75: mol_type = other DNA
aatcgtgtaatttcccaacttgtacctaccattactggagtacatgatatgacagaaactgtaagatatattagg

SEQ ID NO: 683654 - DNA, 75 bp, synthetic construct
  source 1..75: mol_type = other DNA
gttcggcaactgaaagaggataaacaaggcaagatagcaaatgtttaccaactaaatgctcaagatgcttcagcg

SEQ ID NO: 683655 - DNA, 75 bp, synthetic construct
  source 1..75: mol_type = other DNA
tcaggtacgacaggatatagccagccgtttaaccacttatattgaaagcccacaggttgatgttagtgttgctgc

SEQ ID NO: 683656 - DNA, 75 bp, synthetic construct
  source 1..75: mol_type = other DNA
tgcaggtggcggggaaaacactgagccaggtacgccaggatatcgcaagccggttgaccacctatattgaaagtc

SEQ ID NO: 683657 - DNA, 75 bp, synthetic construct
  source 1..75: mol_type = other DNA
caaaagccactttaacttcatggctttattttttttcaaccattttaaaatcgaattataatttagacgatagcc

SEQ ID NO: 683658 - DNA, 75 bp, synthetic construct
  source 1..75: mol_type = other DNA
ggttgtgcaagggctgctgacccccctgaatctggaggcgaagcagaccgaacagtacacgccggcgtcgataaa

SEQ ID NO: 683659 - DNA, 75 bp, synthetic construct
  source 1..75: mol_type = other DNA
cgagaaagccagcgcggttgccgtgcaggccgcacgggcgacagcgatgccgggcattccggaaatgggtgaagt

SEQ ID NO: 683660 - DNA, 75 bp, synthetic construct
  source 1..75: mol_type = other DNA
cgaagcgcgtagcgagctgcttaatgacgattgtctggacttgcctctgacgttagctaatctggaagcttttat

SEQ ID NO: 683661 - DNA, 75 bp, synthetic construct
  source 1..75: mol_type = other DNA
aaatctggtaaaactggataatgcgttagatcgtctggaggcacttactggttatctttacgagatacagtactc

SEQ ID NO: 683662 - DNA, 75 bp, synthetic construct
  source 1..75: mol_type = other DNA
atacgggagccgcaggcccggctgggccacagggaccaaaaggggatacaggagccacaggcccggcggggccac

SEQ ID NO: 683663 - DNA, 75 bp, synthetic construct
  source 1..75: mol_type = other DNA
tgaaacgctacgcgggctgggtatctgcgatgggcaatagcggcacacaatttgtgaaacaggctgtcacgttct

SEQ ID NO: 683664 - DNA, 75 bp, synthetic construct
  source 1..75: mol_type = other DNA
taagttaggtcgtatattaaggctgcgaattgagaatgagttttctatggatactgtagccaataaatatttatc

SEQ ID NO: 683665 - DNA, 75 bp, synthetic construct
  source 1..75: mol_type = other DNA
gaaattcagctcggaagcatgattgattatcgaaaagctcttgatgctcgcttggtccaattaaccaaaaactat

SEQ ID NO: 683666 - DNA, 75 bp, synthetic construct
  source 1..75: mol_type = other DNA
aactcctgacgcagattgccgactgtcaactggcgtgggataccattgagaacctgaaagcgaccgttgatcgcg

SEQ ID NO: 683667 - DNA, 75 bp, synthetic construct
  source 1..75: mol_type = other DNA
ggtcgcgtaaaacctacggtctgaatctgattggtggtgttcgccgcgatattctcaaagagcaacgtctgcaaa

SEQ ID NO: 683668 - DNA, 75 bp, synthetic construct
  source 1..75: mol_type = other DNA
gatatgtgccttgttgatatacagcatcaccaggcttgtgggatgggcaattaaaggatttatgaaagacaacta

SEQ ID NO: 683669 - DNA, 75 bp, synthetic construct
  source 1..75: mol_type = other DNA
ttcaccgggtaggaattctgttagctattctggtgttcattttcggccttttatcaacagagactcggggatttt

SEQ ID NO: 683670 - DNA, 75 bp, synthetic construct
  source 1..75: mol_type = other DNA
accaaaaggggatacaggagccacaggtccggcaggaccgcagggaccgaaaggggatacgggagccgcaggccc

SEQ ID NO: 683671 - DNA, 75 bp, synthetic construct
  source 1..75: mol_type = other DNA
ttccggagatgactggcacagaatacctgtttcttaccggctcagtgtcagcgacagtgatgccttgctttacgc

SEQ ID NO: 683672 - DNA, 75 bp, synthetic construct
  source 1..75: mol_type = other DNA
acagggaaccggtgttaatgagggcggcctgaaagtcggggatgggaccgttgtcctcaatcagcaggctgacag

SEQ ID NO: 683673 - DNA, 75 bp, synthetic construct
  source 1..75: mol_type = other DNA
tgagcttgttctagccgtcggttctgttaactctataaaaatatacatgcaaacacctcaggagatgatggaaaa

SEQ ID NO: 683674 - DNA, 75 bp, synthetic construct
  source 1..75: mol_type = other DNA
gagagcccggtgaactattcaacagattgaatgaatctcttaaattaacttcagcagaaaagagaaatgcttatg

SEQ ID NO: 683675 - DNA, 75 bp, synthetic construct
  source 1..75: mol_type = other DNA
atgcagaggccatccaggctgtcgttctcaaagctcccaaacaggaacgctggaaagagatcagcgaaagcatcg

SEQ ID NO: 683676 - DNA, 75 bp, synthetic construct
  source 1..75: mol_type = other DNA
cgcagatgcaaagccagatggacccggtatacacgccggcgcgaaaaatttacctgtaccactgcgaccatcgcg

SEQ ID NO: 683677 - DNA, 75 bp, synthetic construct
  source 1..75: mol_type = other DNA
actgatgactacgcgaaatttgtagaagaacaacgagttaaagcggcggaaaagaaggttcaagatgcgttagta

SEQ ID NO: 683678 - DNA, 75 bp, synthetic construct
  source 1..75: mol_type = other DNA
gtgagtaaatatttaaaaataggaatttatggcatttggggagtgtttttattccttgcgtcaatggagaaattt

SEQ ID NO: 683679 - DNA, 75 bp, synthetic construct
  source 1..75: mol_type = other DNA
tatgaggctgatctcatcaaagatcaacgtaaggactatgaacccacagttaacagaggtaaacaccggttcgtt

SEQ ID NO: 683680 - DNA, 75 bp, synthetic construct
  source 1..75: mol_type = other DNA
gcgaaggcgaagaacagcgatttcccgggtaactggtggattatcgagacaaaacacaacgtggcggacgttctg

SEQ ID NO: 683681 - DNA, 75 bp, synthetic construct
  source 1..75: mol_type = other DNA
ggcatgatcaaaatcactgactcatacggcgttcagactacagagtcaggctatagcattgattttgttggtacc

SEQ ID NO: 683682 - DNA, 75 bp, synthetic construct
  source 1..75: mol_type = other DNA
ggaatttgaacaggcctggcaggaatatcccaaacgtgctggtggcaattcaaaatcagcagccttcaaagcctg

SEQ ID NO: 683683 - DNA, 75 bp, synthetic construct
  source 1..75: mol_type = other DNA
atggcgcgccatatgaatcgcgcaattgacgcaatcccgaccgaggcgctacgccagttgatgtcgtgggattgg

SEQ ID NO: 683684 - DNA, 75 bp, synthetic construct
  source 1..75: mol_type = other DNA
agcattcaaaatggtcacgggcaatggttgaaaggttgttccatacccgcgctttgattggtatcaaggaagtct

SEQ ID NO: 683685 - DNA, 75 bp, synthetic construct
  source 1..75: mol_type = other DNA
taacaaaacatgctttatcaaccctggctatagccatttcaacaatactatacacaccagtatctctggccgttg

SEQ ID NO: 683686 - DNA, 75 bp, synthetic construct
  source 1..75: mol_type = other DNA
ggtgttttcaggattcggtcagtttaatgattatttcacgaaaactaagcgaatcagaaaatgttgatgatgttt

SEQ ID NO: 683687 - DNA, 75 bp, synthetic construct
  source 1..75: mol_type = other DNA
atgccggaacgcataccgtgattaaagccggtgtctctgcggatacgcaatctgatttcggcgcgggtgtcggcg

SEQ ID NO: 683688 - DNA, 75 bp, synthetic construct
  source 1..75: mol_type = other DNA
tttaccctgcgccatgccggtgatgccgccagactgcgagaagttctgcagcccgaacggtcagtcgtgattgtc

SEQ ID NO: 683689 - DNA, 75 bp, synthetic construct
  source 1..75: mol_type = other DNA
ctctttagacctggctttggagttgatgaaccttcttatcttgaggcatttattaatttcaaaaataatgctgac

SEQ ID NO: 683690 - DNA, 75 bp, synthetic construct
  source 1..75: mol_type = other DNA
ataaactgatcgaagatattgtcagtcttaacgatgatatttgcatgaaattggctctgacggatgagacttacc

SEQ ID NO: 683691 - DNA, 75 bp, synthetic construct
  source 1..75: mol_type = other DNA
gcaactccctgtgctgaatttttagcagaggaaataagtgatgaaacccaaaatgctataaaaacagcttattca

SEQ ID NO: 683692 - DNA, 75 bp, synthetic construct
  source 1..75: mol_type = other DNA
tagtgaactccagtgggcggacagggcgctgacgccgctatccgccaaaaacaatcatcagaacttcattgagcc

SEQ ID NO: 683693 - DNA, 75 bp, synthetic construct
  source 1..75: mol_type = other DNA
tattggcttcttaaaacagcctatgttgtaacctataacagtaaaatcagaacactcaaacaaagcagaaaaaga

SEQ ID NO: 683694 - DNA, 75 bp, synthetic construct
  source 1..75: mol_type = other DNA
tataggttcctattgaattcaggtgtttttttctataatgaacatctctcattaactattatggctgaaagtcca

SEQ ID NO: 683695 - DNA, 75 bp, synthetic construct
  source 1..75: mol_type = other DNA
gggccatttgatttcaccctcgggatggcatggggctacgccggtaatgcgggcaatattaccaacccgttttgc

SEQ ID NO: 683696 - DNA, 75 bp, synthetic construct
  source 1..75: mol_type = other DNA
tcttgcaacaaggcgaatcactgggcaaatacgatttaaagaaaatcgattccatccctaaagaagtacagaacg

SEQ ID NO: 683697 - DNA, 75 bp, synthetic construct
  source 1..75: mol_type = other DNA
gaatattttaaatggcgcatcaggtctggcagcacaacaaaagacctgatgacgcttaagtctgatgcactacgg

SEQ ID NO: 683698 - DNA, 75 bp, synthetic construct
  source 1..75: mol_type = other DNA
gacgccacgacggcacgaaaagggatagtccagctcagcagtgcaaccaacagcacgtctgaaacgctggcagcg

SEQ ID NO: 683699 - DNA, 75 bp, synthetic construct
  source 1..75: mol_type = other DNA
tcgtggttcatatgcggcaggttatttttcgacgtatcagactaatgagcgcgcaatccattccattgtaacaag

SEQ ID NO: 683700 - DNA, 75 bp, synthetic construct
  source 1..75: mol_type = other DNA
gggcagccatggcactctcgtcgattaccgtggtgagcaacgccaaccggttgctgcggtttaaaccgaaagagt

SEQ ID NO: 683701 - DNA, 75 bp, synthetic construct
  source 1..75: mol_type = other DNA
tccaattctgccgataatatagctggcgtttattacagacccgttcaaaagtatataaatggcacctggtataat

SEQ ID NO: 683702 - DNA, 75 bp, synthetic construct
  source 1..75: mol_type = other DNA
atgtactatcaatggcgtctcgtttgatggttctaaaaacattgagctaacggcggaagatttaaatcttgagca

SEQ ID NO: 683703 - DNA, 75 bp, synthetic construct
  source 1..75: mol_type = other DNA
gataaaggacgcttcctgagtaacattaatgtttacagcaaaggtgaagtggataagaaaaagggaatgcgaaag

SEQ ID NO: 683704 - DNA, 75 bp, synthetic construct
  source 1..75: mol_type = other DNA
caggcgtggattgatgatggcgatacgtcgttaccaccagaaaaaattcaggttcctttcatgttaacgccacca

SEQ ID NO: 683705 - DNA, 75 bp, synthetic construct
  source 1..75: mol_type = other DNA
gcatggctggaaattgataatgaagttgttgcagaccaggataacctgaaaacaagacttacaccaataattaga

SEQ ID NO: 683706 - DNA, 75 bp, synthetic construct
  source 1..75: mol_type = other DNA
tcgcgtcaacacaatccgctagcggatggcgcaaaacagataccatgtggatgctggggctgtacggtacagcaa

SEQ ID NO: 683707 - DNA, 75 bp, synthetic construct
  source 1..75: mol_type = other DNA
attcgtcaagaccaactgttgcagagcttggtgatgattcaggctggcatttctatagtcagcgaaatacagata

SEQ ID NO: 683708 - DNA, 75 bp, synthetic construct
  source 1..75: mol_type = other DNA
ggtcaaacgacatataagtggggggcaactaatcccgctacagaaagcacgaacgcacaggctattctggatttt

SEQ ID NO: 683709 - DNA, 75 bp, synthetic construct
  source 1..75: mol_type = other DNA
aacctacatagatgatgtgaacaagcaatacactgaacaaaagatcaatttagatgagtacaaaaaaaccttacg

SEQ ID NO: 683710 - DNA, 75 bp, synthetic construct
  source 1..75: mol_type = other DNA
aaagaatcagaaaccccgatatatgaatttgaagttgttcgttcaaaattgtttgatactgccgaggaagcgttt

SEQ ID NO: 683711 - DNA, 75 bp, synthetic construct
  source 1..75: mol_type = other DNA
tcaacgctgcttaatagccagtatagggagttgataaacaacggcgttcgactgacagggcgtgtggggtatacg

SEQ ID NO: 683712 - DNA, 75 bp, synthetic construct
  source 1..75: mol_type = other DNA
agtcaaccagaatgtcagataactggcgacaggcccgttataaaaataaacaatacattatgggaaagtaataca

SEQ ID NO: 683713 - DNA, 75 bp, synthetic construct
  source 1..75: mol_type = other DNA
gcgtgaacgtgctgtccaaagatggttcaatgaaaattcaggtcggcgcaaatgatggtgaaaccatcacgattg

SEQ ID NO: 683714 - DNA, 75 bp, synthetic construct
  source 1..75: mol_type = other DNA
agcaaaaggatctgatattcttgcggcgcttaagactggcgataaaattaccgcaacaggtgcaaatagccttgc

SEQ ID NO: 683715 - DNA, 75 bp, synthetic construct
  source 1..75: mol_type = other DNA
catttcctgttatcacgatgcaaaaaactaactcaatagtcccacatcattataaaaatgtattgggtaatgact

SEQ ID NO: 683716 - DNA, 75 bp, synthetic construct
  source 1..75: mol_type = other DNA
ttgcctcccgcccggaagggtttgtggtgtatacgaccacccagtcgaatgaaccgcccgccggggtgttcagac

SEQ ID NO: 683717 - DNA, 75 bp, synthetic construct
  source 1..75: mol_type = other DNA
gtgcgctgccagcagattgacgacgccgcgcgccgggtcattaccgaggctggatttggcgactatttcggtcat

SEQ ID NO: 683718 - DNA, 75 bp, synthetic construct
  source 1..75: mol_type = other DNA
aattagatccagctaaacctagctatacaattatcgttggctcggatgctggtggtggaaaagggcatattcatc

SEQ ID NO: 683719 - DNA, 75 bp, synthetic construct
  source 1..75: mol_type = other DNA
tatcgtttctggcgtcgttgccggagtgacggactgggcaacagggtgtttctgttcaagggggatggacttcgc

SEQ ID NO: 683720 - DNA, 75 bp, synthetic construct
  source 1..75: mol_type = other DNA
gctgcggcgtttcagacctgggaacaactgatttttaaactgctggcggcagaagaagagtatgagcgaaccggc

SEQ ID NO: 683721 - DNA, 75 bp, synthetic construct
  source 1..75: mol_type = other DNA
ataacccggattttgtggctgccggtcaggctgcccgtctgatgtgtccgcattgtcgcgggctgattgcccctg

SEQ ID NO: 683722 - DNA, 75 bp, synthetic construct
  source 1..75: mol_type = other DNA
atactcaagctaaactgtctgacttaatggcaaacaatgctaatgccaaaacagtcattacaacagataaaggta

SEQ ID NO: 683723 - DNA, 75 bp, synthetic construct
  source 1..75: mol_type = other DNA
gattttatcaccctatgtaaagacgttatttctcaagttggtcatctaaacatcgaatttacttttgaatttgat

SEQ ID NO: 683724 - DNA, 75 bp, synthetic construct
  source 1..75: mol_type = other DNA
ctctgtaaccaacggttcaggtaaagcggtctatgtagaagcggatggtgatttcactaccgacgctgcaaccaa

SEQ ID NO: 683725 - DNA, 75 bp, synthetic construct
  source 1..75: mol_type = other DNA
tgggttaggcgtagcggcttctactgcatatacctacaacgcaaccagcaagtcttattcatttgacgcaaccgc

SEQ ID NO: 683726 - DNA, 75 bp, synthetic construct
  source 1..75: mol_type = other DNA
tatcagaatgtcctgacgcgggagccagctaacgccgacgccattcttggtctgacggaagtggatattgctgcc

SEQ ID NO: 683727 - DNA, 75 bp, synthetic construct
  source 1..75: mol_type = other DNA
caggactgtagtggcaaccgcagccagtcggattccggtgccagcgtggcggtcggctggcgaaatgacgtctgg

SEQ ID NO: 683728 - DNA, 75 bp, synthetic construct
  source 1..75: mol_type = other DNA
tttggggaaaagataattacaatccaaataaacctcttctacgctataccggggaaggatatgcatctatcaaag

SEQ ID NO: 683729 - DNA, 75 bp, synthetic construct
  source 1..75: mol_type = other DNA
gtaacttaactacaaacgatgctggtggtgcgactgcggctacgcttgatggtttattcaagaaagctggtgatg

SEQ ID NO: 683730 - DNA, 75 bp, synthetic construct
  source 1..75: mol_type = other DNA
agcaaatcagaaggtggtagcccgattctggtaaacgaagatgcagcaaaatcgttgcaatctaccaccaacccg

SEQ ID NO: 683731 - DNA, 75 bp, synthetic construct
  source 1..75: mol_type = other DNA
aagaggaaatgtattctgttgactctcaaggctgggagaagctcgcagaatttgatttagaagatgtttacaacg

SEQ ID NO: 683732 - DNA, 75 bp, synthetic construct
  source 1..75: mol_type = other DNA
tcaaggctgggagaagctcgcagaatttgatttagaagatgtttataacgaggaacgactaaaggtccggtttaa

SEQ ID NO: 683733 - DNA, 75 bp, synthetic construct
  source 1..75: mol_type = other DNA
aatggtaaaggtactgccgatggtatgacttctggtacaactccagtcgtagctacaggtgctaaagctgtatat

SEQ ID NO: 683734 - DNA, 75 bp, synthetic construct
  source 1..75: mol_type = other DNA
gcgtgaacgtattgtctaaagatggctccctgaaaattcaggttggcgcaaatgatggtcagactatctctatcg

SEQ ID NO: 683735 - DNA, 75 bp, synthetic construct
  source 1..75: mol_type = other DNA
ttaatcatttcaacaatgaaggacgcatagctttccttaaagacatctctgaaagtcatcgtgagaatgaattct

SEQ ID NO: 683736 - DNA, 75 bp, synthetic construct
  source 1..75: mol_type = other DNA
cgctgcaaacgctggaggagattcggggttacgtggttggatgggcgcatgagcaggttcacgacacccgcaatt

SEQ ID NO: 683737 - DNA, 75 bp, synthetic construct
  source 1..75: mol_type = other DNA
ggataataatgtggtgccggtgacggcggcagacatcatagccctgtcggatgcgacagagcaggcgatgtttgc

SEQ ID NO: 683738 - DNA, 75 bp, synthetic construct
  source 1..75: mol_type = other DNA
taaaaagcaaacaaatagtttacgatttaggttcaactggcggcgaatttgcagcacattgtctctactatgcgg

SEQ ID NO: 683739 - DNA, 75 bp, synthetic construct
  source 1..75: mol_type = other DNA
ttcctgagcaaaattaacgtgtttggcgttaaccagcagattggtcagaaagtgctgattggcagcaaaggtccg

SEQ ID NO: 683740 - DNA, 75 bp, synthetic construct
  source 1..75: mol_type = other DNA
tgggccattatacattcacactgccagaggatattttaaaaggagagctgatagctctaaatttaaatataaaca

SEQ ID NO: 683741 - DNA, 75 bp, synthetic construct
  source 1..75: mol_type = other DNA
acagtgacctgaaaggcggcgtgtttgcggcgtcatacggttacggtctggatggactgacgctgcgcaccgggg

SEQ ID NO: 683742 - DNA, 75 bp, synthetic construct
  source 1..75: mol_type = other DNA
ttttgagtttgcgcagtctcagtttgaacataataaaaacgttgatcagcggaactttgattacagagccaaagt

SEQ ID NO: 683743 - DNA, 75 bp, synthetic construct
  source 1..75: mol_type = other DNA
gcagaaactgacgcccctgcccctttcgactggcataacgccacggtttactttgtgctgacagatcgtttcgaa

SEQ ID NO: 683744 - DNA, 75 bp, synthetic construct
  source 1..75: mol_type = other DNA
tggcattgctggggttaatcgcgatgttcacccccaattggctgctccctgtttttatcgtcgtggcgggatggt

SEQ ID NO: 683745 - DNA, 75 bp, synthetic construct
  source 1..75: mol_type = other DNA
tggcattgctgggattactcgcgatattcacccccaattggctgctccctgtttttatcgttgcggtgggatggc

SEQ ID NO: 683746 - DNA, 75 bp, synthetic construct
  source 1..75: mol_type = other DNA
tggtcagcgtattcttcctgatattcttccgggacgatatttcaaaacgcaaagcagatctcccattgaaaaaaa

SEQ ID NO: 683747 - DNA, 75 bp, synthetic construct
  source 1..75: mol_type = other DNA
ttacagttcgtcaaatgatgcctatgttgttgaagattacggcttcggctgtctgatcgaaggcattaccgccgc

SEQ ID NO: 683748 - DNA, 75 bp, synthetic construct
  source 1..75: mol_type = other DNA
catcaaatttgttctaacaattttattatatagcgtcttatatattatatgctggagttttgttaatgatagcaa

SEQ ID NO: 683749 - DNA, 75 bp, synthetic construct
  source 1..75: mol_type = other DNA
cacctacaggagttattacttattcagaattcaaatctaaatcagagtctgaattagactatacacaggtttgca

SEQ ID NO: 683750 - DNA, 75 bp, synthetic construct
  source 1..75: mol_type = other DNA
tcagggcggcgtcgccgtcagaccttgctgatgctcttgcgcaaaaaattcgtgaaggatggcaaccatatggtg

SEQ ID NO: 683751 - DNA, 75 bp, synthetic construct
  source 1..75: mol_type = other DNA
gtgaagattaacgcctttgagcttttgcaatgtctgcctgtagaagaacacgagccgatgttacggtcattgttc

SEQ ID NO: 683752 - DNA, 75 bp, synthetic construct
  source 1..75: mol_type = other DNA
gcacaacaaacgccttattgcgaggcagcctttactgccctgagcgccgcgctggcgcaccgaattcaacttaat

SEQ ID NO: 683753 - DNA, 75 bp, synthetic construct
  source 1..75: mol_type = other DNA
ttggtattgatggcgtatttccaggttgtcattgattatggatttgcttacagtgccagtcgagctatatctcaa

SEQ ID NO: 683754 - DNA, 75 bp, synthetic construct
  source 1..75: mol_type = other DNA
ggcttgctatttcttgctgttctgtaaaggtttctttaagtaaaataaatatactattgatttttatttttcttt

SEQ ID NO: 683755 - DNA, 75 bp, synthetic construct
  source 1..75: mol_type = other DNA
ggcggcgctggattcgaataagtacacctgtaacaaggtgaacgccgatacctttacgccgtacacgcaacttga

SEQ ID NO: 683756 - DNA, 75 bp, synthetic construct
  source 1..75: mol_type = other DNA
tccagcgtatcgcgcttgatcgcatcatgatcggctttaacggaaccagctacgcggataagtcagaccgcaacg

SEQ ID NO: 683757 - DNA, 75 bp, synthetic construct
  source 1..75: mol_type = other DNA
tttgccagtgagcgcattgaccaggtgtatctggcggcggcgaaagtgggcggcattgttgccaacaatacttat

SEQ ID NO: 683758 - DNA, 75 bp, synthetic construct
  source 1..75: mol_type = other DNA
aatggcatagttgggcgcaacattatgcggttaatttgccgacatcttctggaattggctttgatcgttctgatt

SEQ ID NO: 683759 - DNA, 75 bp, synthetic construct
  source 1..75: mol_type = other DNA
atgtctggaaatataggggcaaatccacttaatgctgacggtgaaattgttagcaaagaagagattatcgataag

SEQ ID NO: 683760 - DNA, 75 bp, synthetic construct
  source 1..75: mol_type = other DNA
ctggagcaggcaagcgggctgattaccgttaccgatgccactacgcttgcaaaagaggtgtcctctttactcacc

SEQ ID NO: 683761 - DNA, 75 bp, synthetic construct
  source 1..75: mol_type = other DNA
gttccagaaattgaaataagcagttcacaagatgaaaatgatagaataatagcagtaaaagaaaaatatggaatt

SEQ ID NO: 683762 - DNA, 75 bp, synthetic construct
  source 1..75: mol_type = other DNA
cgtttttaaaattaagaatggattctctaactcactccgatattacacaattatttcgttttcgttatgataaat

SEQ ID NO: 683763 - DNA, 75 bp, synthetic construct
  source 1..75: mol_type = other DNA
ggcattcagatgttgatgccactcggctctacgctaaggtgaacatgaaggcattacgtagagtggcggatattg

SEQ ID NO: 683764 - DNA, 75 bp, synthetic construct
  source 1..75: mol_type = other DNA
gacggtaaagccgaagcgatcaaacgtctgcaaagtgaaggacgtcaggtggcaatggtgggcgacggcattaac

SEQ ID NO: 683765 - DNA, 75 bp, synthetic construct
  source 1..75: mol_type = other DNA
ctggccattgccagggcatggggtatcagtggtgaggcagagctggtcgtgatgcaggctatcgctgaaaagccc

SEQ ID NO: 683766 - DNA, 75 bp, synthetic construct
  source 1..75: mol_type = other DNA
tgaattagtgataaaggccattattacaggagatatacctgctaaagtcgtggcaactggggcatctaatgatta

SEQ ID NO: 683767 - DNA, 75 bp, synthetic construct
  source 1..75: mol_type = other DNA
acgatcagctcgcatgatgacagtaccgacatcacagtggtgatggaccataagcaatatgccattccctcaacc

SEQ ID NO: 683768 - DNA, 75 bp, synthetic construct
  source 1..75: mol_type = other DNA
tacgtcaatgaccagaaagttggatcgtttaaccttgatgttcggaatgcacaaaaggtcctgccaacattagcg

SEQ ID NO: 683769 - DNA, 75 bp, synthetic construct
  source 1..75: mol_type = other DNA
aacgtctgcataaagcgggatatcgtttggtgatgttaaccggggataatccaaccaccgccaatgctatcgcca

SEQ ID NO: 683770 - DNA, 75 bp, synthetic construct
  source 1..75: mol_type = other DNA
gtacgggtgtggcgtggctctattcgatgagcgtcaacctgtggccgcagtggttcccgatggaagcgcgacatc

SEQ ID NO: 683771 - DNA, 75 bp, synthetic construct
  source 1..75: mol_type = other DNA
cgcgccagcgcagtcggcagccataccactctggcacgcataattcgcatggtgcgccaggcccaaagtagtaaa

SEQ ID NO: 683772 - DNA, 75 bp, synthetic construct
  source 1..75: mol_type = other DNA
gactatgaagataacggtcgcagggttcgctacgatttcactctcccgggtggagtcatcgacaacggcggtctg

SEQ ID NO: 683773 - DNA, 75 bp, synthetic construct
  source 1..75: mol_type = other DNA
actcgatttaaccccgccgacggcgcgcctggttactgacgaaggtgaaaaaagcgtgcctctggcagaagtgca

SEQ ID NO: 683774 - DNA, 75 bp, synthetic construct
  source 1..75: mol_type = other DNA
ctagctcctatctttggcccgtggaaaggaaactccacaaatccagtcattccatttgtaacccgcgaggggcag

SEQ ID NO: 683775 - DNA, 75 bp, synthetic construct
  source 1..75: mol_type = other DNA
tcatcggttggtcgcgcactaacggctaactcgccgtggaagatcatcatgaagcaggaaaaggaaagtattgaa

SEQ ID NO: 683776 - DNA, 75 bp, synthetic construct
  source 1..75: mol_type = other DNA
aaccacaccgtgcacagaattcagaatgattgagatagcagagggcaatccaccttctgttcccagccttaaaaa

SEQ ID NO: 683777 - DNA, 75 bp, synthetic construct
  source 1..75: mol_type = other DNA
atctcgcctttgttggcggttcactggttgaacgtggtgggcataatccgctggaagctgccgcacacgctattc

SEQ ID NO: 683778 - DNA, 75 bp, synthetic construct
  source 1..75: mol_type = other DNA
gtgcaactttcaatttaaacggcctgtcaaccacgctaaaaccgcttcaagaagcctgtaactggaaacagtata

SEQ ID NO: 683779 - DNA, 75 bp, synthetic construct
  source 1..75: mol_type = other DNA
tttattgactttggagttgacgctaccttttctcttaaccctttcgctttcctagtgagaaaatatacaggagat

SEQ ID NO: 683780 - DNA, 75 bp, synthetic construct
  source 1..75: mol_type = other DNA
ctatctttttcgtccattaccgcaattaggctctaagttaaccctcggcgaaaccgatttcagttccaatatttt

SEQ ID NO: 683781 - DNA, 75 bp, synthetic construct
  source 1..75: mol_type = other DNA
tttactcctactcgcccggcaccaccgccaccgacaagtggacaggcatccgggtctgccgggctaccgcccatt

SEQ ID NO: 683782 - DNA, 75 bp, synthetic construct
  source 1..75: mol_type = other DNA
gaggacggttgtggcgcacgtcttcggggaacgcactctggcctgctgtcggcctttgaggtcgtggtatggatg

SEQ ID NO: 683783 - DNA, 75 bp, synthetic construct
  source 1..75: mol_type = other DNA
gaattatcgaagggaatctgaacagttcactgtcagtaaaagttcttgctgaacgttccgggtattcagaacgct

SEQ ID NO: 683784 - DNA, 75 bp, synthetic construct
  source 1..75: mol_type = other DNA
aagagaataccttgcgtattcttgatgcaacaaataaccaattgccacaggaccgggaaagtttattctggatga

SEQ ID NO: 683785 - DNA, 75 bp, synthetic construct
  source 1..75: mol_type = other DNA
ggcgattactttgttagtgttacggttaataataataaaatcagtaatgggcaacaaattcgctggcaaaaatct

SEQ ID NO: 683786 - DNA, 75 bp, synthetic construct
  source 1..75: mol_type = other DNA
attgttaccgccgcgcagttgggctatgccgcaggtctactgtttcttgttcccctcggtgatatgtttgaacgc

SEQ ID NO: 683787 - DNA, 75 bp, synthetic construct
  source 1..75: mol_type = other DNA
tggcgtaatggagaaagattttacgtctttatttcctgctcgatttaatattagttctgacaaagagagcagcaa

SEQ ID NO: 683788 - DNA, 75 bp, synthetic construct
  source 1..75: mol_type = other DNA
gcaacggaacgctatcacacagcaactaatcgataatcttattaaaggattactgcaaactatgccatatgccag

SEQ ID NO: 683789 - DNA, 75 bp, synthetic construct
  source 1..75: mol_type = other DNA
gatcgattcagatgccattttgcagtcagcaccggctggtgcactacacgcggacacaatatgaagagccgctgg

SEQ ID NO: 683790 - DNA, 75 bp, synthetic construct
  source 1..75: mol_type = other DNA
aaatattttcaggtaaagatgagaaaatagttaaaagtaaagataacaatatcaagtcattttatttaggtacgc

SEQ ID NO: 683791 - DNA, 75 bp, synthetic construct
  source 1..75: mol_type = other DNA
cagtatggttctgactataaattatcaggagaaattaaaaagtcagttgattaaatctgtaacatttccggctat

SEQ ID NO: 683792 - DNA, 75 bp, synthetic construct
  source 1..75: mol_type = other DNA
tgcatgagctttactcattgtcataccgaccagcaacagcagaccaggcacgccatcaccaacgaaaatacgaat

SEQ ID NO: 683793 - DNA, 75 bp, synthetic construct
  source 1..75: mol_type = other DNA
tactaacgcctgctgctactattcgacaagctttggagataattaatagaggctctttacagattgctttggttt

SEQ ID NO: 683794 - DNA, 75 bp, synthetic construct
  source 1..75: mol_type = other DNA
ccttacaaaaaattctcggacaccacgatataaaaatgactatgcgttacgcacatctggcaccggatcatctgg

SEQ ID NO: 683795 - DNA, 75 bp, synthetic construct
  source 1..75: mol_type = other DNA
agtctttattcaggaatgccttattttgatcaggtgctcggtactgtatcagaaaaagcaaaggaaaagatagaa

SEQ ID NO: 683796 - DNA, 75 bp, synthetic construct
  source 1..75: mol_type = other DNA
atagccggttatgctgtaaaagtatttcctgctttcgaaaaggttgttgctgtttcccgatggccaggagtaact

SEQ ID NO: 683797 - DNA, 75 bp, synthetic construct
  source 1..75: mol_type = other DNA
ttttcattgctttttatattgttaatgccagtaatgatccgcagctgagacatatcgataaaattcttgtaaaca

SEQ ID NO: 683798 - DNA, 75 bp, synthetic construct
  source 1..75: mol_type = other DNA
cgtgatgttgccctgaccacggcgacagaaagtgactatcactatctggaaacgaagaaaaaaagcggaggtttt

SEQ ID NO: 683799 - DNA, 75 bp, synthetic construct
  source 1..75: mol_type = other DNA
ggaataatctgtctgttgtcgcaaccggtaaaaacaggggtaagcgtcgtctcagcaccgtctggcagatcctga

SEQ ID NO: 683800 - DNA, 75 bp, synthetic construct
  source 1..75: mol_type = other DNA
ggttgggaggacaacttcacggaaaccccagccaccgatgctttcctggctgaagtacgggcggtggcgtttgac

SEQ ID NO: 683801 - DNA, 75 bp, synthetic construct
  source 1..75: mol_type = other DNA
atgtttgaaaattattatattggacgagcatacagaaaaagcaaatcacctttacatataaaagcgtggacaaaa

SEQ ID NO: 683802 - DNA, 75 bp, synthetic construct
  source 1..75: mol_type = other DNA
agtggcagcagaaatggcaacaggtgccatagagcgtgcggatgctgatgtcagtattgccattaccggctacgg

SEQ ID NO: 683803 - DNA, 75 bp, synthetic construct
  source 1..75: mol_type = other DNA
ctcagcgtaagccagcaatctcttgaacgatattctgcggtgagtgagaaagtggcagcagaaatggcaacaggt

SEQ ID NO: 683804 - DNA, 75 bp, synthetic construct
  source 1..75: mol_type = other DNA
agcagatgcaaacccagatggaccccgtgtccccgccggcgcgaaaaatccccctgtaccactgcgaccatcgcg

SEQ ID NO: 683805 - DNA, 75 bp, synthetic construct
  source 1..75: mol_type = other DNA
aaatttgattctatagatagcaccgcatatgacgccttaaataaaataaatagccaatctatttgcgaagataaa

SEQ ID NO: 683806 - DNA, 75 bp, synthetic construct
  source 1..75: mol_type = other DNA
atggatatcaattgaatccgatatcagacatcgaccccctgggtttatctatgtgggaggatgcaaaatcggggg

SEQ ID NO: 683807 - DNA, 75 bp, synthetic construct
  source 1..75: mol_type = other DNA
aagaagagctcgtacgaaagtacgggctttttttcgtatattgcacacaccggggggatgagaagccccgaccgg

SEQ ID NO: 683808 - DNA, 75 bp, synthetic construct
  source 1..75: mol_type = other DNA
gccacaagctggagctgcatgtgggagatttagcatctcgactggcgcagtgccgggagaggccttactctggaa

SEQ ID NO: 683809 - DNA, 75 bp, synthetic construct
  source 1..75: mol_type = other DNA
ctggggttgcagttacatgctgagtggggtacaggtgcttaccttacctgtggtgacctttggctctgtctttct

SEQ ID NO: 683810 - DNA, 75 bp, synthetic construct
  source 1..75: mol_type = other DNA
ttctttgccactcattatgatcaatggtgatgtgcttaccaatattgattttgagcggttactatcatttcataa

SEQ ID NO: 683811 - DNA, 75 bp, synthetic construct
  source 1..75: mol_type = other DNA
tgattgccgacagcatccgcatcacacatcgctatgccgacacagaagacaccgtgctggaaattcagcggctgg

SEQ ID NO: 683812 - DNA, 75 bp, synthetic construct
  source 1..75: mol_type = other DNA
aaagaatttgatgatattattatgaaatatgcaacattttatatggttgtagctaaaaatctaagagatgacttg

SEQ ID NO: 683813 - DNA, 75 bp, synthetic construct
  source 1..75: mol_type = other DNA
tctttctcagggagtttagtctccaggatttccggggcggttcagtccatacatttgttgcggacgtcgctcctg

SEQ ID NO: 683814 - DNA, 75 bp, synthetic construct
  source 1..75: mol_type = other DNA
tttttggctttttcgtgggtaccagaagagatcttattaagttgggtgtggcgagttccatttctgatttcggta

SEQ ID NO: 683815 - DNA, 75 bp, synthetic construct
  source 1..75: mol_type = other DNA
cggaacagcagctcccggacggccagattgttattgacgggcgctacatggttggtagctgccaggaggattaca

SEQ ID NO: 683816 - DNA, 75 bp, synthetic construct
  source 1..75: mol_type = other DNA
tatgacatgtatctgaaatccctgcctgtaccgcagctcactgacggaaagattgttattgatggccgctacatg

SEQ ID NO: 683817 - DNA, 75 bp, synthetic construct
  source 1..75: mol_type = other DNA
agattcgcctcggtggtcaggcggatttatctgctgcgggtgccttcttcccgccaaccttattgtactgtccgc

SEQ ID NO: 683818 - DNA, 75 bp, synthetic construct
  source 1..75: mol_type = other DNA
cggtaatgctaacgccttttacggcggataataaaattgattacctgggtcttaaacggctaattgactggtata

SEQ ID NO: 683819 - DNA, 75 bp, synthetic construct
  source 1..75: mol_type = other DNA
aaatacgatatggatctggtggtttgtggtcaccaccaggacttctggagcaagctgatgtcttccgcacgccag

SEQ ID NO: 683820 - DNA, 75 bp, synthetic construct
  source 1..75: mol_type = other DNA
aaggatgtattttacttgggtagtacgctggtgattgagcaaggaaggacagaatctgggcaccccttgttggat

SEQ ID NO: 683821 - DNA, 75 bp, synthetic construct
  source 1..75: mol_type = other DNA
agagtttttgagcaattatgtcaggcaggtgttgtcgtattgggtgataaaatgcttgttaagaaaggacctaat

SEQ ID NO: 683822 - DNA, 75 bp, synthetic construct
  source 1..75: mol_type = other DNA
caataatatccacaaacattaacaaactaattgctgttgaactattgagtagattttattctaaaactggagttc

SEQ ID NO: 683823 - DNA, 75 bp, synthetic construct
  source 1..75: mol_type = other DNA
ggtttgttaaccgtcactgtcccgccaaaagatgacgaagattgggaggaggtttgggatgaaggtatagaaccc

SEQ ID NO: 683824 - DNA, 75 bp, synthetic construct
  source 1..75: mol_type = other DNA
gcactctccgtaacaaaaaaaggcgttctacctcaattagataatgcggccaaaacaaaagatggcgataacaga

SEQ ID NO: 683825 - DNA, 75 bp, synthetic construct
  source 1..75: mol_type = other DNA
gttgcaaaaattacaccttgctttgaaaatgggaaatctgcttggcttaacaatcttcaaactgagtttggttac

SEQ ID NO: 683826 - DNA, 75 bp, synthetic construct
  source 1..75: mol_type = other DNA
aagattaactccatcacaggccgtcactacatgtgaccaaaaagcaaaagcaaaaactgatataaaaactaagat

SEQ ID NO: 683827 - DNA, 75 bp, synthetic construct
  source 1..75: mol_type = other DNA
attcatgagtattggcttgatatagggcgaatagatgattttaatcgggcacaggccgatattcattctttaggg

SEQ ID NO: 683828 - DNA, 75 bp, synthetic construct
  source 1..75: mol_type = other DNA
aattcgatttgaatttgctcgtcatatttgagtgtatttatcaacatctcagtattagtaaagcagcagaatcgc

SEQ ID NO: 683829 - DNA, 75 bp, synthetic construct
  source 1..75: mol_type = other DNA
aacatcagtattccatttggcagatcaaacaccgccacactgtatactcgccatgacgatcataaaacccactat

SEQ ID NO: 683830 - DNA, 75 bp, synthetic construct
  source 1..75: mol_type = other DNA
caaccgaaaattttaaaagaaaaggccaagaagctaaattaattaattttgatacagatggaaaaatattatgga

SEQ ID NO: 683831 - DNA, 75 bp, synthetic construct
  source 1..75: mol_type = other DNA
ggcacgccgttcttgcctgtggagagatggtgcagtcaggccgctcgttgaagcaggaacccaccgaaatgattc

SEQ ID NO: 683832 - DNA, 75 bp, synthetic construct
  source 1..75: mol_type = other DNA
aacgtggcgtagttgagcacatttgtccacattgtgctgccatagcattgtataccatacaaaccaattcacctg

SEQ ID NO: 683833 - DNA, 75 bp, synthetic construct
  source 1..75: mol_type = other DNA
ccggaggaagttaagtctttcattttaaagattatggaaaaaaatcctggtatcagtgcaacacacgcgttgcgt

SEQ ID NO: 683834 - DNA, 75 bp, synthetic construct
  source 1..75: mol_type = other DNA
gcatttatcaatctggtgactggttactgattccaatccatgatcagtacggaagtgtacagtccattcagtaca

SEQ ID NO: 683835 - DNA, 75 bp, synthetic construct
  source 1..75: mol_type = other DNA
ttccctgatggcgcgggctgtgcttttggtagctggaaaactggcataaccgcgtgtcactttctcgatggtgta

SEQ ID NO: 683836 - DNA, 75 bp, synthetic construct
  source 1..75: mol_type = other DNA
ctgttccggttggtagctggctggttgtggaaaacttggaccgtatctctcgccaatccatcattgaagcacaag

SEQ ID NO: 683837 - DNA, 75 bp, synthetic construct
  source 1..75: mol_type = other DNA
aattcgaacaggaggtcggagaactgatccctgcgtctgatgtcgcccgtgaatttgctgaaatggcaaaggcta

SEQ ID NO: 683838 - DNA, 75 bp, synthetic construct
  source 1..75: mol_type = other DNA
aatgctgacacgcatccgaatggaagaacagcgtagccccggtagtcgggtacagcagcggccaggcagctttac

SEQ ID NO: 683839 - DNA, 75 bp, synthetic construct
  source 1..75: mol_type = other DNA
ctggggggagatggttgagctgggtcaggtccgttcttctcgtctggctaaagcgggtgacctcagctccgccgt

SEQ ID NO: 683840 - DNA, 75 bp, synthetic construct
  source 1..75: mol_type = other DNA
tgttacattgccttatgaatatgaagatttatcatattcttactccgtaaggattcaatttgtagatattgaaat

SEQ ID NO: 683841 - DNA, 75 bp, synthetic construct
  source 1..75: mol_type = other DNA
tcagaagagagtaaccgtaacgttactattttttataatgataattgtttctttctttaaatataatattggatt

SEQ ID NO: 683842 - DNA, 75 bp, synthetic construct
  source 1..75: mol_type = other DNA
ttcaatagcccttgccctaatggtactgagaaagtatcagcttatcatactcatggtgcagatagtcatggagaa

SEQ ID NO: 683843 - DNA, 75 bp, synthetic construct
  source 1..75: mol_type = other DNA
cgacccgctgggccgcagggtggcaaaacgggtatggcgacgtgaacgggacctgacgggctggatgtcgctgtc

SEQ ID NO: 683844 - DNA, 75 bp, synthetic construct
  source 1..75: mol_type = other DNA
caaaagccctgcacagcagcaagcagatgataatgctgcaaaagcattgacaaaatggtggaacgatacagcatc

SEQ ID NO: 683845 - DNA, 75 bp, synthetic construct
  source 1..75: mol_type = other DNA
gctgtccgccgcgtgttcacgaaaacagcgcagctctggcataacgccactccgcatccgcactggtgcggcctg

SEQ ID NO: 683846 - DNA, 75 bp, synthetic construct
  source 1..75: mol_type = other DNA
aggagctaaaggaaagggctgcaagaactgatgtgattcagtctgaagctgatgcaaatcgtaacatctcttcag

SEQ ID NO: 683847 - DNA, 75 bp, synthetic construct
  source 1..75: mol_type = other DNA
gtgttacgcacattatcttttcgatagtgtttgctgtcggttattgtgtggtcgctgaagtatttccaaaaatta

SEQ ID NO: 683848 - DNA, 75 bp, synthetic construct
  source 1..75: mol_type = other DNA
ctggcgatggcggttgaccatgagatcaacatggtgtcgctggtgcgtaacctggaagagtttttcgcccgtgag

SEQ ID NO: 683849 - DNA, 75 bp, synthetic construct
  source 1..75: mol_type = other DNA
cgatggaaagacccagagagttgtaatagaaaattcaagaggaacgaggaaaggccggatattcattgatttgaa

SEQ ID NO: 683850 - DNA, 75 bp, synthetic construct
  source 1..75: mol_type = other DNA
ataatcgatatctttctgaatgcattaaccactccaatagcacaagagcttttaaacaaaaaaatggtgatggat

SEQ ID NO: 683851 - DNA, 75 bp, synthetic construct
  source 1..75: mol_type = other DNA
tcaggtcccgatgctcagacctgggctgataggtatgttcgcaactgtgcaattgctattctgcccctattacct

SEQ ID NO: 683852 - DNA, 75 bp, synthetic construct
  source 1..75: mol_type = other DNA
ttcccgcccctctgccggtcgtgctctgggtaaaggagaagtgaatacccagagtgggcgaacctacgtcggact

SEQ ID NO: 683853 - DNA, 75 bp, synthetic construct
  source 1..75: mol_type = other DNA
gcattcttaggacatgcagataattcaatcacatacagaagatatggtaagtcagtcgcggtatctcaactatat

SEQ ID NO: 683854 - DNA, 75 bp, synthetic construct
  source 1..75: mol_type = other DNA
cagcctactacgatactgagcgggatattgttcagttacaggccgatccccgcctgtttgaactgtaccagtttg

SEQ ID NO: 683855 - DNA, 75 bp, synthetic construct
  source 1..75: mol_type = other DNA
tggaacccctgctttatacatcgccatgagcaagggtaatgaagacgtcgtgttatcttatatatcgacgctggg

SEQ ID NO: 683856 - DNA, 75 bp, synthetic construct
  source 1..75: mol_type = other DNA
atgagtgaaaacgatatcattatcagaactcattataagtctcctcatagaatgcacatcgatagcgacatacca

SEQ ID NO: 683857 - DNA, 75 bp, synthetic construct
  source 1..75: mol_type = other DNA
ggacaagaattagtgtattagtgtcaaaaagggcgaaaataattaaatctctaattgatgagtcttatcagaaaa

SEQ ID NO: 683858 - DNA, 75 bp, synthetic construct
  source 1..75: mol_type = other DNA
tggccgctaaaaatcatgacaacatgtcagctgttcatatagccattcatcataatcattataaaactgtagaaa

SEQ ID NO: 683859 - DNA, 75 bp, synthetic construct
  source 1..75: mol_type = other DNA
atggcaaacaatgtcagtcatatgtccgcgattttatatatagacaatcatactttgtcagtaaggctacgaata

SEQ ID NO: 683860 - DNA, 75 bp, synthetic construct
  source 1..75: mol_type = other DNA
ttttaatatactttgcacacttatttttaatgcttctgactatgaggaaagaacaaattataatcaagatggtta

SEQ ID NO: 683861 - DNA, 75 bp, synthetic construct
  source 1..75: mol_type = other DNA
tccatgttaaagggaggcggtaaagaagtcgacctgaccctctttgaagagggagggcaactgcctggtagttat

SEQ ID NO: 683862 - DNA, 75 bp, synthetic construct
  source 1..75: mol_type = other DNA
cgcacctacagcagctaccggactaggactcctgccccggtgggcgtgttgggccccggctggaaagcgccttct

SEQ ID NO: 683863 - DNA, 75 bp, synthetic construct
  source 1..75: mol_type = other DNA
cgcacctacagcagctaccggactaggactcctgccccggtgggcgtcttcggccccggctggaaagcgccttct

SEQ ID NO: 683864 - DNA, 75 bp, synthetic construct
  source 1..75: mol_type = other DNA
cgcacctacagcagctaccggactaggactcctgccccggtgggcgtttttggccccggctggaaagcgccttct

SEQ ID NO: 683865 - DNA, 75 bp, synthetic construct
  source 1..75: mol_type = other DNA
gacggaccttatcccggcgggtgttatccggacggacgacgagcggacccaccactaccactacgacagccagca

SEQ ID NO: 683866 - DNA, 75 bp, synthetic construct
  source 1..75: mol_type = other DNA
ggcaaaccgcgtcacgccggacagcctgccgccggtggagtggctgacctacggcagcggttatctggcgggcat

SEQ ID NO: 683867 - DNA, 75 bp, synthetic construct
  source 1..75: mol_type = other DNA
atgccgctctgtttgagtggcggcatttgtgaaggcggaaaagtaagaattggcgttacgagttattcgatgttg

SEQ ID NO: 683868 - DNA, 75 bp, synthetic construct
  source 1..75: mol_type = other DNA
accgatgggattgtctgcggagatggcggccaaaccccgctcatgtcacccgcgactggcgtcattatcctcaaa

SEQ ID NO: 683869 - DNA, 75 bp, synthetic construct
  source 1..75: mol_type = other DNA
aatgctggtggatttggtggttgtcgatcccgggcagtcagtcacctaccaaagtccaaatgacccggcctttac

SEQ ID NO: 683870 - DNA, 75 bp, synthetic construct
  source 1..75: mol_type = other DNA
gtgaacattaatagagataaaattgtacaacttgtagataccgatactattgaaaacctgacatccgcgttgagt

SEQ ID NO: 683871 - DNA, 75 bp, synthetic construct
  source 1..75: mol_type = other DNA
cgcacctacagcagctaccggactaggactcctgccccggtgggcgtattaggccccggctggaaagcgccttct

SEQ ID NO: 683872 - DNA, 75 bp, synthetic construct
  source 1..75: mol_type = other DNA
cgcacctacagcagctaccggactacgactcctgccccggtgggcgtcttgggccccggctggaaagcgccttct

SEQ ID NO: 683873 - DNA, 75 bp, synthetic construct
  source 1..75: mol_type = other DNA
cgcacctacagcagctaccggactaagactcctgccccggtgggcgtattgggccccggctggaaagcgccttct

SEQ ID NO: 683874 - DNA, 75 bp, synthetic construct
  source 1..75: mol_type = other DNA
cagtgagcttgttgagagtgatgatttaggagaagagtacagcgagtatgtagaagaaacacaaagcaatacccc

SEQ ID NO: 683875 - DNA, 75 bp, synthetic construct
  source 1..75: mol_type = other DNA
ttttctcaaccagcgtccactgcttgatgcaaaacagcagcctttcgtgaccaatacggtggatgccgaaggtct

SEQ ID NO: 683876 - DNA, 75 bp, synthetic construct
  source 1..75: mol_type = other DNA
aggaaaagactactctctggaagaactgtttacccttgcacagtctttcgaatgtgtagcattggacctgtttaa

SEQ ID NO: 683877 - DNA, 75 bp, synthetic construct
  source 1..75: mol_type = other DNA
gtaggctgaatactgatgtatatggcgatgcgctgaaaaaggtcgtttacgattcaacaagtcgctatccgagag

SEQ ID NO: 683878 - DNA, 75 bp, synthetic construct
  source 1..75: mol_type = other DNA
gtacaggtaataacagtagccgtttaaatctgggatggcgtggtacttatggagaggtgactggtatgtacagct

SEQ ID NO: 683879 - DNA, 75 bp, synthetic construct
  source 1..75: mol_type = other DNA
aactggtcacgtaaccgaaatatgtggatgtctaaaggtagtaaaagtgagcgaacagaggatagtgttagttta

SEQ ID NO: 683880 - DNA, 75 bp, synthetic construct
  source 1..75: mol_type = other DNA
tccacaaggcatgcgcagattcgccgctggtgtgttattaccagaaagggctgaaactggacaaggagtttatcc

SEQ ID NO: 683881 - DNA, 75 bp, synthetic construct
  source 1..75: mol_type = other DNA
ctaccaagtgaagtcgtgcaaaagctgatgcagcttagtgcctgtgtgcaaagtgaagtaagtgagcaagaactt

SEQ ID NO: 683882 - DNA, 75 bp, synthetic construct
  source 1..75: mol_type = other DNA
accgaatcgaagcgcacgcaagaatacctagctcgtttcctcgaggcgaatggctttgctgataaattagtcacc

SEQ ID NO: 683883 - DNA, 75 bp, synthetic construct
  source 1..75: mol_type = other DNA
agcattatatcgagcaggctaaatccattaccaccgacagtaaaacccaagccttgctaacggcgcttaatcaag

SEQ ID NO: 683884 - DNA, 75 bp, synthetic construct
  source 1..75: mol_type = other DNA
ggattcggcaagctggcagatgaggtccgtatccgcgccggaaatttagataaagtattacaatctcatcattga

SEQ ID NO: 683885 - DNA, 75 bp, synthetic construct
  source 1..75: mol_type = other DNA
atgaatatttgctctaataaattgtgttttttaactaccgatgttacattgaacctgacctcttgcgccttgagg

SEQ ID NO: 683886 - DNA, 75 bp, synthetic construct
  source 1..75: mol_type = other DNA
gttgatgtttttttaaattccaactctggtgagtatcattattttgatgctattgttctggcattgggatctaat

SEQ ID NO: 683887 - DNA, 75 bp, synthetic construct
  source 1..75: mol_type = other DNA
gtaactactttaaaaaaacccagtgatttcgcatggtctcttaaaaaggggactcatagttttgcattctatact

SEQ ID NO: 683888 - DNA, 75 bp, synthetic construct
  source 1..75: mol_type = other DNA
ctattctgtagaaatctcatccataaatcttgtagaggtgcagtttgtgctgatactaccgttttcggcccaaga

SEQ ID NO: 683889 - DNA, 75 bp, synthetic construct
  source 1..75: mol_type = other DNA
gcggcggccggtaactggaacgtggctctgccagaagctcagcgtctcggcatgcgtcagggcatcttccagcag

SEQ ID NO: 683890 - DNA, 75 bp, synthetic construct
  source 1..75: mol_type = other DNA
agaaaggtgatgcggctgaatatgcagagcaccatatgaaagacaaccgctgggtgccaggctggatgtgtgcac

SEQ ID NO: 683891 - DNA, 75 bp, synthetic construct
  source 1..75: mol_type = other DNA
actctcttttgagcggttactaaaaatcggccaggggccagcagaagcatttcccaaagatttaaagatgatgct

SEQ ID NO: 683892 - DNA, 75 bp, synthetic construct
  source 1..75: mol_type = other DNA
tcttcaaatagaagatttgttattaaataaacaaaaaataaataatatttcagcagcagcaagagagtttatcct

SEQ ID NO: 683893 - DNA, 75 bp, synthetic construct
  source 1..75: mol_type = other DNA
gctgcgtgttgagcttgaaggcaaagacaagctgattgcagagcttggaaaacaatgcgccgaatgggagagaaa

SEQ ID NO: 683894 - DNA, 75 bp, synthetic construct
  source 1..75: mol_type = other DNA
gccgagcaacacaataacagcattaatcatatctacccgcgcatcgcccgtgtgcgtagcgtggaagagatcctt

SEQ ID NO: 683895 - DNA, 75 bp, synthetic construct
  source 1..75: mol_type = other DNA
tataacggcgaactgattaaatcacaactcattaccagctatagccatagcaaagattacaactacgatccccat

SEQ ID NO: 683896 - DNA, 75 bp, synthetic construct
  source 1..75: mol_type = other DNA
gttgttatccggtgggcgccggaaaaatgcaggaggtccgggcggatagcgagacggttgtcgcctggctatccg

SEQ ID NO: 683897 - DNA, 75 bp, synthetic construct
  source 1..75: mol_type = other DNA
ttcgcgtagggttacgcgcgatttctgccagcagtgtaaatcgcaataactggcgcttgcgcacaaacggatccc

SEQ ID NO: 683898 - DNA, 75 bp, synthetic construct
  source 1..75: mol_type = other DNA
ccgtaacgcaaccttatcaggcacagacttcaaccgaatgtggaaacaatggaaatctatccgcgctactggcat

SEQ ID NO: 683899 - DNA, 75 bp, synthetic construct
  source 1..75: mol_type = other DNA
atgttttacttattacaaaaatatttcatggcaatatatattaatttttagtatttcttttttttgttattttta

SEQ ID NO: 683900 - DNA, 75 bp, synthetic construct
  source 1..75: mol_type = other DNA
cggcgggcaagctggaaattgacgaacatgcgtcatacatcgtcgatctggcagcggcaatcgcctttaacactc

SEQ ID NO: 683901 - DNA, 75 bp, synthetic construct
  source 1..75: mol_type = other DNA
gtaagagaaactaatgaggtagccttagccgtaaggaaatatgcaaaggaaatcggaataccaattatcacagat

SEQ ID NO: 683902 - DNA, 75 bp, synthetic construct
  source 1..75: mol_type = other DNA
ggctcatgtcgagagtgggttccgttgggggaaaaatctgtggaatgtaagaccatatctggcatttaccggctt

SEQ ID NO: 683903 - DNA, 75 bp, synthetic construct
  source 1..75: mol_type = other DNA
tcacaactttaataataacggatttgataagaggaaactaataaaatttgaaatattacgtaactttgattataa

SEQ ID NO: 683904 - DNA, 75 bp, synthetic construct
  source 1..75: mol_type = other DNA
gcagaaaatggtgagaccaaggtgcgcagtcatacggggcgtgagaatggctacacgggctggactattgatgaa

SEQ ID NO: 683905 - DNA, 75 bp, synthetic construct
  source 1..75: mol_type = other DNA
cattccaaccctgaacatacccgcgcgaatgaggtgatggaacatcgcgagaaacaggttttcgatgcttgccgc

SEQ ID NO: 683906 - DNA, 75 bp, synthetic construct
  source 1..75: mol_type = other DNA
tcccttgaatttgcgcaggtgctggacaaaatggcctacctgacggtatggcagggcgatgacgtacagcgccgg

SEQ ID NO: 683907 - DNA, 75 bp, synthetic construct
  source 1..75: mol_type = other DNA
tgctggacggctccggcaatccaatgtctcattgttatataataataaaatcgaaaataaacacgcattcagtgt

SEQ ID NO: 683908 - DNA, 75 bp, synthetic construct
  source 1..75: mol_type = other DNA
taatgagtctggcagatactcaccagactggatcgaaatccaactggcccacgttccgaaaggcgtgcgcggtgt

SEQ ID NO: 683909 - DNA, 75 bp, synthetic construct
  source 1..75: mol_type = other DNA
aaaaggggttaattacgatacggcaatgtggagttcggcaattaatactcgcaataacgtaaccaccgatgctgg

SEQ ID NO: 683910 - DNA, 75 bp, synthetic construct
  source 1..75: mol_type = other DNA
agaaaggaaaccggacttccccctacacgcctgaatgccacatcgtggtcggtgcaacagaatctgaggaactta

SEQ ID NO: 683911 - DNA, 75 bp, synthetic construct
  source 1..75: mol_type = other DNA
ctccttcaatccctttgtctacgccacggagacactggtcaccgaaacgcttcagtcgatgctgccccagaacgt

SEQ ID NO: 683912 - DNA, 75 bp, synthetic construct
  source 1..75: mol_type = other DNA
ttgtcgcgggatgtgacagtttcaaatcaacagaaaatatagagtttgcaaaaggaagtccttatggctgctata

SEQ ID NO: 683913 - DNA, 75 bp, synthetic construct
  source 1..75: mol_type = other DNA
cccacagatcaacctgagcgccaaccttggttctcaggcgctgaccaccggtgccctgttcggtggtggctcggc

SEQ ID NO: 683914 - DNA, 75 bp, synthetic construct
  source 1..75: mol_type = other DNA
agctaggcgaaatgttttccttgatgttcccggtgctcgaatcaatcctgaatggaacctgagaacgggtaacaa

SEQ ID NO: 683915 - DNA, 75 bp, synthetic construct
  source 1..75: mol_type = other DNA
gtcattcaccgcagtggcgcagaagattgcagccaaaaacctgcgctttgatgaagttaaagccattgttggcgg

SEQ ID NO: 683916 - DNA, 75 bp, synthetic construct
  source 1..75: mol_type = other DNA
aagcagagggagttgatggatggatgtattataaattcatattatccatattcccattaaagggagtggaaacaa

SEQ ID NO: 683917 - DNA, 75 bp, synthetic construct
  source 1..75: mol_type = other DNA
cagcacgtaataacctagtagtatatggtaaagatcaaacattaaacaaagatgaagcagcaattgcagcaggat

SEQ ID NO: 683918 - DNA, 75 bp, synthetic construct
  source 1..75: mol_type = other DNA
atccagaagatatacatctcactgcaaaagacttcgaagcaagtaaagataacatctctaaggatgaatgggaaa

SEQ ID NO: 683919 - DNA, 75 bp, synthetic construct
  source 1..75: mol_type = other DNA
cagcaagcgttacactcagcgcattgagcgacataatctgaatctgagacaacacctggcaaggccgggacggaa

SEQ ID NO: 683920 - DNA, 75 bp, synthetic construct
  source 1..75: mol_type = other DNA
tgttttacgcgtatgacaggatacggaggacggttgtggcgcacgtcctcggtgaacgcactctggccacactgg

SEQ ID NO: 683921 - DNA, 75 bp, synthetic construct
  source 1..75: mol_type = other DNA
gttatttccgggtgcgatatatgttgttaccgaaccgacctcccgaaacagtgtctggtttataaggtttgggat

SEQ ID NO: 683922 - DNA, 75 bp, synthetic construct
  source 1..75: mol_type = other DNA
gtaaaatccacgacaggatggaagtgtacggcatcacgccggtcttccccggctttgccgggcaggtgccggaca

SEQ ID NO: 683923 - DNA, 75 bp, synthetic construct
  source 1..75: mol_type = other DNA
cggcaaagacagcttcaccgtgaaggcggctgacggcaaaatcagcatcagcggaccaaacggtatttcgctggc

SEQ ID NO: 683924 - DNA, 75 bp, synthetic construct
  source 1..75: mol_type = other DNA
cgtttacagcagcgaggatggcgtgacttaccgcaaaatcgcctccgcaaagactggcaaaccgaacgaccgact

SEQ ID NO: 683925 - DNA, 75 bp, synthetic construct
  source 1..75: mol_type = other DNA
ttttcttttcttaaagaaaataaaagatgcgggcctgttaggtgaacttatatgcgaggatgattttcatgactg

SEQ ID NO: 683926 - DNA, 75 bp, synthetic construct
  source 1..75: mol_type = other DNA
ttataaaactgtattcccctgtatcacttgatagcggggttgtgatcgatgaagtcaccatgcgtgaaccgttgg

SEQ ID NO: 683927 - DNA, 75 bp, synthetic construct
  source 1..75: mol_type = other DNA
gaagcccggatgattgcgctgttgtgcaacctcagtgaaaaggacatctggcaactgacggctgcagactatgcg

SEQ ID NO: 683928 - DNA, 75 bp, synthetic construct
  source 1..75: mol_type = other DNA
ttatccgattgttttcccctgtcattctggagggtggcgtgatccttgaggaagtgacgatgcgtgaaccgctgg

SEQ ID NO: 683929 - DNA, 75 bp, synthetic construct
  source 1..75: mol_type = other DNA
atttatattgagatcttccgtaatattcccccgctgctgcaaatcttcttctggtactttgccgtgttgcgcaat

SEQ ID NO: 683930 - DNA, 75 bp, synthetic construct
  source 1..75: mol_type = other DNA
aatgaaagtggtggaccattcgggcaggaaggttccggtagtggtgatggccgtagcctttccaaagaaaatggt

SEQ ID NO: 683931 - DNA, 75 bp, synthetic construct
  source 1..75: mol_type = other DNA
ctggcccgctggcagacgacccgattcaggaaaccatcacctttgacgactttgccaaagttgacctgcgcgtgg

SEQ ID NO: 683932 - DNA, 75 bp, synthetic construct
  source 1..75: mol_type = other DNA
gcgctgcgcattctgaacagtacgttctggatgtcgccgattggcctcattaccgcgttggcggcggggattgcc

SEQ ID NO: 683933 - DNA, 75 bp, synthetic construct
  source 1..75: mol_type = other DNA
gcgtacgcagctcaatcaagatcctcggttcgctggtggatgctctgcgcaaggttattagtggcgatttctccg

SEQ ID NO: 683934 - DNA, 75 bp, synthetic construct
  source 1..75: mol_type = other DNA
ggctctgccatcgtcgatctgggtaagcgattccttgaattcattaatatcgatacgtcgaaatttaatggcaaa

SEQ ID NO: 683935 - DNA, 75 bp, synthetic construct
  source 1..75: mol_type = other DNA
acgttctgttgcaggtcgcctttttgggcagtattccaactgaatcgctaagtggtggttgggcggagatcagta

SEQ ID NO: 683936 - DNA, 75 bp, synthetic construct
  source 1..75: mol_type = other DNA
atgaatatattacgcgaaaaattaatggagtgacgcagactaacgcaataacaaccgacgattgcgacgcgtttt

SEQ ID NO: 683937 - DNA, 75 bp, synthetic construct
  source 1..75: mol_type = other DNA
catactatccagccctaagaacacgatcagcggaaatgaccggactgaataatttatcatatgagaataagaaaa

SEQ ID NO: 683938 - DNA, 75 bp, synthetic construct
  source 1..75: mol_type = other DNA
caaataataactcattgagcgaaatgaaaaatgagttggaggcgctgaaaaaagcattaagtgagaaagattacc

SEQ ID NO: 683939 - DNA, 75 bp, synthetic construct
  source 1..75: mol_type = other DNA
tcgccatggatatttactgaaatattgctgagttctatgttgaggaaaaaacatcacgtcgaccgtccagaactg

SEQ ID NO: 683940 - DNA, 75 bp, synthetic construct
  source 1..75: mol_type = other DNA
ttgacgatagttcatttttaattactaatcctgagtataaccaaggcttagaccctaaactgaaattggatagtc

SEQ ID NO: 683941 - DNA, 75 bp, synthetic construct
  source 1..75: mol_type = other DNA
tgaatgtcaccactcagggccgacgggccattgaataccactaccccgacgaacacaccgtcatccgctgtatcc

SEQ ID NO: 683942 - DNA, 75 bp, synthetic construct
  source 1..75: mol_type = other DNA
ggcggtacggtgagccgtgtcgtggagtcgaatcatcctgattaccagcctggcgactgggtgctgggctacagt

SEQ ID NO: 683943 - DNA, 75 bp, synthetic construct
  source 1..75: mol_type = other DNA
tggcaatgcttagtaagttgttcttcaaatctgaggagaactctcaacggattgctgcacagttgaaaaagagtc

SEQ ID NO: 683944 - DNA, 75 bp, synthetic construct
  source 1..75: mol_type = other DNA
cggcccgctgccgttcattctctcccgcacctacagcagctaccggacgaagacgcctgcaccggtggggatttt

SEQ ID NO: 683945 - DNA, 75 bp, synthetic construct
  source 1..75: mol_type = other DNA
gccagccagcttgtcacccagcgcgccggatttttcccggaggaaaccacatggggcgggctgctcccctcactg

SEQ ID NO: 683946 - DNA, 75 bp, synthetic construct
  source 1..75: mol_type = other DNA
cggaggtcattctgccgggggatgagacgctgacgttcagccgtgatgaggcgggacgtgaagtgctccggcaca

SEQ ID NO: 683947 - DNA, 75 bp, synthetic construct
  source 1..75: mol_type = other DNA
aatattaaagaatagaaataatactttatctgaaagtgaaaatagctatatgtattgtccgaaaacaagctgggc

SEQ ID NO: 683948 - DNA, 75 bp, synthetic construct
  source 1..75: mol_type = other DNA
agctttagcgtctagcggcgctttgacgattttgaaccagtttttagaacacgcactaaatgattctaagcataa

SEQ ID NO: 683949 - DNA, 75 bp, synthetic construct
  source 1..75: mol_type = other DNA
ggcacaccctgcggcttttacaaccgcaaggtaaactgttgttcagtgaaatcaactggctcgctggtcattcgc

SEQ ID NO: 683950 - DNA, 75 bp, synthetic construct
  source 1..75: mol_type = other DNA
acagaccagcctgtgggggctggcactcagcctgcccgcagacaccggctacccggacccgcgcggggaactgga

SEQ ID NO: 683951 - DNA, 75 bp, synthetic construct
  source 1..75: mol_type = other DNA
gttcagggcacgcttgatgtcaaagtgacggaagaagatggtcgggtgaacaatttccaggtttcggcagcatcg

SEQ ID NO: 683952 - DNA, 75 bp, synthetic construct
  source 1..75: mol_type = other DNA
tgcttggtcaattaatgcttcagacaaatggtggaaaagaaacggtgcctatgatgctgcaaaatgaggcctgtg

SEQ ID NO: 683953 - DNA, 75 bp, synthetic construct
  source 1..75: mol_type = other DNA
attcaatgaaataaaggacattgttaatcagaatggacaaagaaacgtttctgcagcgccagtgaaaaatgtgaa

SEQ ID NO: 683954 - DNA, 75 bp, synthetic construct
  source 1..75: mol_type = other DNA
caatgctactcttccacaattgggcccctttcatccttatattccaaattgcgatctcgttctttgcactgacat

SEQ ID NO: 683955 - DNA, 75 bp, synthetic construct
  source 1..75: mol_type = other DNA
gctagcggtaaatttaaatcagtaaattccgcattaaaatctgacaacataagagttctaattcatcaacataaa

SEQ ID NO: 683956 - DNA, 75 bp, synthetic construct
  source 1..75: mol_type = other DNA
aactaaagaatacctttaaaaacattaataatttaaatgaagaaggtatatatatatcaacatttcaaaaactat

SEQ ID NO: 683957 - DNA, 75 bp, synthetic construct
  source 1..75: mol_type = other DNA
acatatttaagcatatgttttacaatccttttcttcggtttttggttttcattcgatgccacaccatcaattgat

SEQ ID NO: 683958 - DNA, 75 bp, synthetic construct
  source 1..75: mol_type = other DNA
agtgggtgacgcggacgaatcacgcggtgagcgacctgacgggccgcccgctgatgctctttaacagtgaaggta

SEQ ID NO: 683959 - DNA, 75 bp, synthetic construct
  source 1..75: mol_type = other DNA
ggagaactgacggaggttatcctgccgggggatgagacgctgacgttcagccgtgatgaggcgggacgtgaagtg

SEQ ID NO: 683960 - DNA, 75 bp, synthetic construct
  source 1..75: mol_type = other DNA
gatctgatgaatactggggctggtggtatggatacggggacagtgccggaaacaggatttgttgctttgtatgcg

SEQ ID NO: 683961 - DNA, 75 bp, synthetic construct
  source 1..75: mol_type = other DNA
caatcaattttttatgacgtgaatccagacggcacatcaatcacggagttttctgcatcattatttatcagtggg

SEQ ID NO: 683962 - DNA, 75 bp, synthetic construct
  source 1..75: mol_type = other DNA
ccaatgaatttagcagcagtgctgaattcacccccatgcgcggctttagcaattgtcatctacaaaccatgctgc

SEQ ID NO: 683963 - DNA, 75 bp, synthetic construct
  source 1..75: mol_type = other DNA
tgattcatgctaagcaatttgcgaaaattggacgagaagcatacgaagcactaggacgtttatctagggaggaac

SEQ ID NO: 683964 - DNA, 75 bp, synthetic construct
  source 1..75: mol_type = other DNA
ggaaggacgcgatgccgacctgcaggcaatttgctcgatgggcataaacctgttccgcgtgctgatgacttacct

SEQ ID NO: 683965 - DNA, 75 bp, synthetic construct
  source 1..75: mol_type = other DNA
taaaatgcaggagtggtttgaatctggcctgcaacagtgggatatctcccgcgacgccccttacttcggttttga

SEQ ID NO: 683966 - DNA, 75 bp, synthetic construct
  source 1..75: mol_type = other DNA
agacatattaaccttcattttcaccttcttatatcaggcatagaagaaaaggagtgttcagctttttacgaacta

SEQ ID NO: 683967 - DNA, 75 bp, synthetic construct
  source 1..75: mol_type = other DNA
actcttttagaaagtagaagattatggagtaacaatgttcactacttctctaatgttgcagattatgatcatttt

SEQ ID NO: 683968 - DNA, 75 bp, synthetic construct
  source 1..75: mol_type = other DNA
gttgatgtgctctctaacgtggagtcactacagactaaaggtgtgagagttgtttctttacgtgaaggtttcgac

SEQ ID NO: 683969 - DNA, 75 bp, synthetic construct
  source 1..75: mol_type = other DNA
tggcgaaaacgcagcgccgcagcctggcggatgcgcttcagcagtccggcggcgaagacggtggcagtgtggtgt

SEQ ID NO: 683970 - DNA, 75 bp, synthetic construct
  source 1..75: mol_type = other DNA
acccaggcgcggttcttcgtgaatatctgggagaaatgtcagtcacagacgctgccaccgcattaggcattactc

SEQ ID NO: 683971 - DNA, 75 bp, synthetic construct
  source 1..75: mol_type = other DNA
gtcacttttggtggcggcttccccctctggcgtgacggaaaattgcttggcgggcttggcatcagcggcggtagc

SEQ ID NO: 683972 - DNA, 75 bp, synthetic construct
  source 1..75: mol_type = other DNA
cgggcttggcatcagcggcggtagcgttgaacaagacatggatattgctcaaagcgcaatggcggcaattaacgt

SEQ ID NO: 683973 - DNA, 75 bp, synthetic construct
  source 1..75: mol_type = other DNA
gcctgcagatgaaacatgcctgaaagcggccagagctgcgattgatgttaacaatgtcgccttccgtaagttcgg

SEQ ID NO: 683974 - DNA, 75 bp, synthetic construct
  source 1..75: mol_type = other DNA
gccgttattgaacaattgaacacaggcgttgcctataatcttgcttattcacggacacctgtgggatgcaaataa

SEQ ID NO: 683975 - DNA, 75 bp, synthetic construct
  source 1..75: mol_type = other DNA
atggcgctccgcctggaatccgcactcggaactagcgccgaaatgtggactggtatgcaatctcagtatgagctt

SEQ ID NO: 683976 - DNA, 75 bp, synthetic construct
  source 1..75: mol_type = other DNA
ctatatgaatctcgtaagttattaaacgacagaacctattatcactcaaatgtagctgatttcaatcatttcaac

SEQ ID NO: 683977 - DNA, 75 bp, synthetic construct
  source 1..75: mol_type = other DNA
tccgggaataccgcgatgataaactgtacagcgtaaggcacctggtgtttaacggctttgagctgataagccagc

SEQ ID NO: 683978 - DNA, 75 bp, synthetic construct
  source 1..75: mol_type = other DNA
cgttgccgaacgtttcggtatttcggtggctgagttacgcaaactcaaccagtttcgtacgtttgctcgaggttt

SEQ ID NO: 683979 - DNA, 75 bp, synthetic construct
  source 1..75: mol_type = other DNA
actatcttgctaaaaaaggaggaaatgaacaagagaaccttttgaagtctttgtccgagtattattcggggaata

SEQ ID NO: 683980 - DNA, 75 bp, synthetic construct
  source 1..75: mol_type = other DNA
tgggtgacacggacgaatcatgcggtgagcgacctgacgggccgtccgctgatgctctttaacagtgaaggtaaa

SEQ ID NO: 683981 - DNA, 75 bp, synthetic construct
  source 1..75: mol_type = other DNA
agacacagactacccggacccgcgcggggaactggacccggaagccgcccccggcctgctgtatgcggggcagtg

SEQ ID NO: 683982 - DNA, 75 bp, synthetic construct
  source 1..75: mol_type = other DNA
acgcggacgaatcacgcggtgagcgacccgacgggccgcccgctgatgctctttaacagtgaaggtaaaaccgtc

SEQ ID NO: 683983 - DNA, 75 bp, synthetic construct
  source 1..75: mol_type = other DNA
tgccggtgctggtcagggtgggtaatgatgttgtcatgtccggtcgggtggatgtggttcagcgccgggtatccc

SEQ ID NO: 683984 - DNA, 75 bp, synthetic construct
  source 1..75: mol_type = other DNA
cgctatcagattgactccgattttcttatcccctccgatgcctggagtgtaacgcttgggctgcctgatggtatt

SEQ ID NO: 683985 - DNA, 75 bp, synthetic construct
  source 1..75: mol_type = other DNA
tgccaaaacataaaccatcacaggaggctttagataaacgcgcatttgatgaagagatgaatgaaaccgcggaac

SEQ ID NO: 683986 - DNA, 75 bp, synthetic construct
  source 1..75: mol_type = other DNA
atgaccgcgcagcagcgctatatcaacccgcggtttatccccgctggcgcggggaacacaccgaaaacggttgca

SEQ ID NO: 683987 - DNA, 75 bp, synthetic construct
  source 1..75: mol_type = other DNA
tctcagatatttttccaggggcaccttttcctttgttattcgaaattgaagtgagctcatgcatagggagtaata

SEQ ID NO: 683988 - DNA, 75 bp, synthetic construct
  source 1..75: mol_type = other DNA
catctttcaggagcgagaaggaagcggaatcctggctaaatgaactgttttttgctgtgattgcgccgctatacc

SEQ ID NO: 683989 - DNA, 75 bp, synthetic construct
  source 1..75: mol_type = other DNA
aaacataaagccaatagctggtcttagaaacgctcttttcagagaggtagacagcaactataaattttcatttaa

SEQ ID NO: 683990 - DNA, 75 bp, synthetic construct
  source 1..75: mol_type = other DNA
ccttttattcagctatttggatatataggtggaaatggatttgtaaaaaccgtgttctcatataactattttgat

SEQ ID NO: 683991 - DNA, 75 bp, synthetic construct
  source 1..75: mol_type = other DNA
caaaattcacaaacgaagaggccacaccatggcaaaccgcaagcaacagcgcgcccgcgctgagcgtcgtcacat

SEQ ID NO: 683992 - DNA, 75 bp, synthetic construct
  source 1..75: mol_type = other DNA
cctagttttatcgcaagccagatgggccacacaaacgcacaaatggtattcaatgtttacggagcatggatgaaa

SEQ ID NO: 683993 - DNA, 75 bp, synthetic construct
  source 1..75: mol_type = other DNA
gagccggggatgcgtttaacggctctctggcatcaggacttgcgaaaggaaaatcactggaatcagcactgtgtt

SEQ ID NO: 683994 - DNA, 75 bp, synthetic construct
  source 1..75: mol_type = other DNA
tgttgatatgtctgtatttttagtggcattctcttttgtgttgctatgccttagatttgcgagaactcaaagata

SEQ ID NO: 683995 - DNA, 75 bp, synthetic construct
  source 1..75: mol_type = other DNA
tggaaacgacattcgtgctggatgcactgaagcaggcgttgtgggcccgtcgtccatctggcaccatccattaca

SEQ ID NO: 683996 - DNA, 75 bp, synthetic construct
  source 1..75: mol_type = other DNA
catcatcctgataaacgcagtgcccgtgcgcagcgcgatgactggctgaagagagaaatacagcgcatatacgat

SEQ ID NO: 683997 - DNA, 75 bp, synthetic construct
  source 1..75: mol_type = other DNA
gctggtgagctggctgaaaggtcacaagattgaccatgcgcatatctgcatcgaagcgaccggcacctatcgtaa

SEQ ID NO: 683998 - DNA, 75 bp, synthetic construct
  source 1..75: mol_type = other DNA
cggctcaggcgaatattccggcgttatgtgaacaggctgaacagcggctgtttcagctgtcagaaaaagggctgt

SEQ ID NO: 683999 - DNA, 75 bp, synthetic construct
  source 1..75: mol_type = other DNA
gcttcgcaagccacaatgtccctggcgcagcaacatcaccttcctcccgccgtccaggtccaccaccacgagcac

SEQ ID NO: 684000 - DNA, 75 bp, synthetic construct
  source 1..75: mol_type = other DNA
tacgggaaggtatcagagtggcctggtgcactgtggcacgtctcatggcggttatggggctggccggtgttctcc

SEQ ID NO: 684001 - DNA, 75 bp, synthetic construct
  source 1..75: mol_type = other DNA
tgtcgggagtaacacgagacaattttcaacaattaaccaccgcctgcgaaaagcaacgtcgctggccgctgatgt

SEQ ID NO: 684002 - DNA, 75 bp, synthetic construct
  source 1..75: mol_type = other DNA
atccggacgaattactcagtaaatggcaaaaggaaatgtggttattcgcgcgtcaggattttgacgatcgtgtct

SEQ ID NO: 684003 - DNA, 75 bp, synthetic construct
  source 1..75: mol_type = other DNA
ccgatgaccattacggttaacgccgggaaaacacagttcattattcagaaccacagccagaaggcgctggagtga

SEQ ID NO: 684004 - DNA, 75 bp, synthetic construct
  source 1..75: mol_type = other DNA
ctgaattatgccgatgtccgggatttgcattcagaagaaggtgacacgcgaacactgacgctgggacaactgacg

SEQ ID NO: 684005 - DNA, 75 bp, synthetic construct
  source 1..75: mol_type = other DNA
ccgtttatcccgactgcttcctgaggtgtatatcaaaggttatgttaatgaagtgttcagcgaaatgtctcctca

SEQ ID NO: 684006 - DNA, 75 bp, synthetic construct
  source 1..75: mol_type = other DNA
acggtgtatgacgatcacagctttgaccggcagattataatcccgccgataatctatgtcgggtcaaaacaggaa

SEQ ID NO: 684007 - DNA, 75 bp, synthetic construct
  source 1..75: mol_type = other DNA
tgaggaaagccgccgctggctggcatcgtgcggcctgacagtggagcagatgcaaaaccagatggacccggtgta

SEQ ID NO: 684008 - DNA, 75 bp, synthetic construct
  source 1..75: mol_type = other DNA
gaatacgtggagttgagcgacggcactttatcctggttagggaacgccttgttctggatgctgctaccagaaccg

SEQ ID NO: 684009 - DNA, 75 bp, synthetic construct
  source 1..75: mol_type = other DNA
ctgctcgaacaaccaacctctctaagagaggggatgttgtttctgctcactcttgcaaaggtggaagccagacac

SEQ ID NO: 684010 - DNA, 75 bp, synthetic construct
  source 1..75: mol_type = other DNA
gggctgattagcgccgaacagctggcacaggcgctggcagagcaaaacggcgtggcgtgggagtcgatcgacgcc

SEQ ID NO: 684011 - DNA, 75 bp, synthetic construct
  source 1..75: mol_type = other DNA
cggcggaaaaatagctggcagacagccgccgcgaaggcatttttgaacatggcgttggaggaatgcgcggttgtt

SEQ ID NO: 684012 - DNA, 75 bp, synthetic construct
  source 1..75: mol_type = other DNA
atattatttttttatcaataattcaattcgccaattatcttgcacctttgatggtcttacctttcctcagtcgca

SEQ ID NO: 684013 - DNA, 75 bp, synthetic construct
  source 1..75: mol_type = other DNA
aagatgaaatggtcgggattgtccgattcggtaaagaggattgcgtacgttcggcactttgccaacgtacgctac

SEQ ID NO: 684014 - DNA, 75 bp, synthetic construct
  source 1..75: mol_type = other DNA
gacagtgaatggcagttatagtcagtcgagtgcttatcgacaggctggagccagtgtttcagggggcattgtcgc

SEQ ID NO: 684015 - DNA, 75 bp, synthetic construct
  source 1..75: mol_type = other DNA
tttcggaaaaatgaccgtaattatgagcgcggggacacgttgattttgcatgaatgggtgcagggtgtgtatacg

SEQ ID NO: 684016 - DNA, 75 bp, synthetic construct
  source 1..75: mol_type = other DNA
tgtaactgaccttagcgagtgggctcccggctatgtgatgctaagcatacagcgtagacaaatgggggaactatg

SEQ ID NO: 684017 - DNA, 75 bp, synthetic construct
  source 1..75: mol_type = other DNA
ccagtatccacaaagcgctcactgcgctgagacccggcgacagcacgtttccgctgtatcaggctggactggcgc

SEQ ID NO: 684018 - DNA, 75 bp, synthetic construct
  source 1..75: mol_type = other DNA
ctgatgaagcgctggcgtggctgcataaaagcggtgctgccacatccgtggtatgtcatgccatgcgtgtggggc

SEQ ID NO: 684019 - DNA, 75 bp, synthetic construct
  source 1..75: mol_type = other DNA
cgggtgatgggttatgacactaaggttgaagtttgcggccacggcttccgtacaatggcctgtagttcgttaatt

SEQ ID NO: 684020 - DNA, 75 bp, synthetic construct
  source 1..75: mol_type = other DNA
gcagtggttgctacggatgggatatggaactattcagatgaacaggtggagcgtgcaaagcaaaatgggtggctt

SEQ ID NO: 684021 - DNA, 75 bp, synthetic construct
  source 1..75: mol_type = other DNA
aattatccgccgtcttggcgttatcgccctgaacgtcggcctggagtttgatatctacgggcacgccaactccac

SEQ ID NO: 684022 - DNA, 75 bp, synthetic construct
  source 1..75: mol_type = other DNA
gcgccgatgaagcggcggaaattatccagcataacgatatggtggcattcagcggttttactcccgcaggttcac

SEQ ID NO: 684023 - DNA, 75 bp, synthetic construct
  source 1..75: mol_type = other DNA
ccggaaattcctccgttcatgatgtattcggaagtgctacaggaatcggtggtgcatttactggaaaccggcaaa

SEQ ID NO: 684024 - DNA, 75 bp, synthetic construct
  source 1..75: mol_type = other DNA
tgcccgtttgcatgcggagggttgttcctttctggcgcagtggcagccggatagtgcgtactgtgacgacgaaag

SEQ ID NO: 684025 - DNA, 75 bp, synthetic construct
  source 1..75: mol_type = other DNA
atcctgggagcgagaagtattctttcaatggctgggaaatatttaatagtaattttgaacggatgattaaagaaa

SEQ ID NO: 684026 - DNA, 75 bp, synthetic construct
  source 1..75: mol_type = other DNA
attgatgttgccgtcattgaagcatcggcactggcaccggatggtcgagtctggttaaccagcgggatcggtaat

SEQ ID NO: 684027 - DNA, 75 bp, synthetic construct
  source 1..75: mol_type = other DNA
tttgttatccgcttgatggataaacaagcaccatcggcaggccgcccttccggccctaatggtgcgtggaaccgc

SEQ ID NO: 684028 - DNA, 75 bp, synthetic construct
  source 1..75: mol_type = other DNA
ctggtacaatgcagatagaaaatatacatggaagaatttcaatggcactggagtttctttatggcattcaatatc

SEQ ID NO: 684029 - DNA, 75 bp, synthetic construct
  source 1..75: mol_type = other DNA
tgcgtgaaatcgcagcggcagcagttggcgcacatgagcgccttagtgttatgccgcctgatgacattttcgata

SEQ ID NO: 684030 - DNA, 75 bp, synthetic construct
  source 1..75: mol_type = other DNA
gagaaacatcacaaaaacatctaactttatgcatctttgatagagatgaaaaaaatatagtaaatgagatgagtg

SEQ ID NO: 684031 - DNA, 75 bp, synthetic construct
  source 1..75: mol_type = other DNA
aagagaaacgttttaatatttttatatcgattccctttgattggggtgatgacgttacgacgcctcgtcggcaaa

SEQ ID NO: 684032 - DNA, 75 bp, synthetic construct
  source 1..75: mol_type = other DNA
tggaaagccacctcaggccgtttcgcgatgtgttgtcgggcgtgttcttcgtgaccatcggcctgcaactggacg

SEQ ID NO: 684033 - DNA, 75 bp, synthetic construct
  source 1..75: mol_type = other DNA
atctgctgctggaggcggacgcgcagaaggtcgaggccgcgcgtgccgccggcgcgccggtgttccatgccgatg

SEQ ID NO: 684034 - DNA, 75 bp, synthetic construct
  source 1..75: mol_type = other DNA
gtggcacgttttcctgatttaaccgtatcacatatgcaaaaatccaaattttcgtatattgagaacgaatgcggg

SEQ ID NO: 684035 - DNA, 75 bp, synthetic construct
  source 1..75: mol_type = other DNA
agcgccctgcagcctgggaagcgcatcacccgcttgaacgcgcgttgcatgccctggtagtacgccaccaggcgc

SEQ ID NO: 684036 - DNA, 75 bp, synthetic construct
  source 1..75: mol_type = other DNA
acctgaggagttgagagttctcgatgaggtaagacagactgatgatcatgagttatataatattgccacagaggg

SEQ ID NO: 684037 - DNA, 75 bp, synthetic construct
  source 1..75: mol_type = other DNA
gttctcttgtgtatgatgataatgtgattaatatctcagagaggaaaaatgtagcattgcctaaaaacaaatttg

SEQ ID NO: 684038 - DNA, 75 bp, synthetic construct
  source 1..75: mol_type = other DNA
ggtattactactgctaagttaacttattacgcctattatttaagtgatgatgataagtatcactcattcaaaatt

SEQ ID NO: 684039 - DNA, 75 bp, synthetic construct
  source 1..75: mol_type = other DNA
atgcatgagaaaacccgaaggaaatataaaatattgttattaagtccattgaaatataatgtactgttctttaat

SEQ ID NO: 684040 - DNA, 75 bp, synthetic construct
  source 1..75: mol_type = other DNA
gatgatatagatatttgtatgttaagggatgattataataaatttattatggcatgtgacaaacaacttaataaa

SEQ ID NO: 684041 - DNA, 75 bp, synthetic construct
  source 1..75: mol_type = other DNA
aaatgaggatgctggcaattcttaacgaagttgatcgaatatgcagactgaataaaataaattattggctagatg

SEQ ID NO: 684042 - DNA, 75 bp, synthetic construct
  source 1..75: mol_type = other DNA
acaacatggggcatttcagtcaataaacccaacgccgcgaaacagcaggggcaattgctggaaaaagcgcgtaat

SEQ ID NO: 684043 - DNA, 75 bp, synthetic construct
  source 1..75: mol_type = other DNA
tgaggatacaatctttccattaagtgaaataaaatttgaaggaaggatgtacttatgcccaaataatgttgataa

SEQ ID NO: 684044 - DNA, 75 bp, synthetic construct
  source 1..75: mol_type = other DNA
taatacaccatgtaaaataagaatgaataatacggagattatagaaaagagtgaagtgaaatataaatactacga

SEQ ID NO: 684045 - DNA, 75 bp, synthetic construct
  source 1..75: mol_type = other DNA
aataaccaaacttacgccgccacggtgctggcaaacggcagctggagcgtcggcgttccggcggcggatgtcagc

SEQ ID NO: 684046 - DNA, 75 bp, synthetic construct
  source 1..75: mol_type = other DNA
gaacacgcccaggcgcaggtgattactggcagcagttccggttttgccgcaggtacggcgttgacggtggtgatt

SEQ ID NO: 684047 - DNA, 75 bp, synthetic construct
  source 1..75: mol_type = other DNA
cgtggatacggtggcgggcgatgatattgtcaacagcattgaacacgggcaggcgctggtaatcaccggcggcag

SEQ ID NO: 684048 - DNA, 75 bp, synthetic construct
  source 1..75: mol_type = other DNA
gcagctccgaaaacacgcagcgttttatcgaacgtttaggtctgcccgcggtgcgcatcccgctcaatgagcggg

SEQ ID NO: 684049 - DNA, 75 bp, synthetic construct
  source 1..75: mol_type = other DNA
ggattatggtatgtgctcacccggatgacattgatgatttttctgataaggttatccaaaaagccatgatgttga

SEQ ID NO: 684050 - DNA, 75 bp, synthetic construct
  source 1..75: mol_type = other DNA
gccgccgaagcgggtgcgggccagaccatcagtgggcaggtgacgggcgcggcggcaggcgatacggtcaccgtg

SEQ ID NO: 684051 - DNA, 75 bp, synthetic construct
  source 1..75: mol_type = other DNA
accacgcgggccatggaggtattcggaacaaaccgtctcggtcagttcgatatcaagaatggggtaatggtgcca

SEQ ID NO: 684052 - DNA, 75 bp, synthetic construct
  source 1..75: mol_type = other DNA
aggcggtgacggatgcgaagaacccggctgaagcagcggtgaatgccctgccggaaggtgacgtgaaggctgagc

SEQ ID NO: 684053 - DNA, 75 bp, synthetic construct
  source 1..75: mol_type = other DNA
tggccaagtaactgaagctgtcctgacccaggatggtcctgtactggagaattttactgcagggcaaagtggcac

SEQ ID NO: 684054 - DNA, 75 bp, synthetic construct
  source 1..75: mol_type = other DNA
aaggccgactggatgcggttgacgggatcagcgtaccggaagtgaacgatcagaacggcaacggcaagccggatg

SEQ ID NO: 684055 - DNA, 75 bp, synthetic construct
  source 1..75: mol_type = other DNA
taatggcgcagctgcaccacaacgggttttcgaagcgctcactgacggcgcatttaacgtcggttgtggtggtct

SEQ ID NO: 684056 - DNA, 75 bp, synthetic construct
  source 1..75: mol_type = other DNA
ggtgtgctgaccgtaggcatggggtcgaccagcaacgtgcagaaccgcgaatacgccgagcgcgagatcgccgag

SEQ ID NO: 684057 - DNA, 75 bp, synthetic construct
  source 1..75: mol_type = other DNA
ccgtagccaccatcgtggcgctgggcgtgactctggcaccgggcgccctgcgaacctctgaagaagcgcaggtaa

SEQ ID NO: 684058 - DNA, 75 bp, synthetic construct
  source 1..75: mol_type = other DNA
ataacggggataacctcagtgacaatgggtataactggattaaaggaagcactgagtctgaaggggatatcactt

SEQ ID NO: 684059 - DNA, 75 bp, synthetic construct
  source 1..75: mol_type = other DNA
gacctgcaccatcgatgcttatgcgctcgatgatgaaacgcagcgttcttccgtggccagcgacatcaaccaccg

SEQ ID NO: 684060 - DNA, 75 bp, synthetic construct
  source 1..75: mol_type = other DNA
ggcaccgtgacgggccgtaccggcacgccggatggtaaggccgttgccggtgttatcgccggtggcatcggtcag

SEQ ID NO: 684061 - DNA, 75 bp, synthetic construct
  source 1..75: mol_type = other DNA
tggtcatgagttacgaacgtccctacaagccatcatatccacgattgatgccatttcgcaaaagtataataaaaa

SEQ ID NO: 684062 - DNA, 75 bp, synthetic construct
  source 1..75: mol_type = other DNA
aaaccgtaaccatgacggtaaaacgaaccttgctcacccgtgcgcgtgaggctggaattaatctgagcgccaccc

SEQ ID NO: 684063 - DNA, 75 bp, synthetic construct
  source 1..75: mol_type = other DNA
agtcgtcataagcgtgcaactgaaggtgagcagaagccggttcagcctgaaggcggtcaggaggctggaaaaaca

SEQ ID NO: 684064 - DNA, 75 bp, synthetic construct
  source 1..75: mol_type = other DNA
tgacgccgatggcaacagcggttccgccagccataacgtgcaggttaataccgcgctgccgggcgtcaccattaa

SEQ ID NO: 684065 - DNA, 75 bp, synthetic construct
  source 1..75: mol_type = other DNA
catcgccagtaatcatctacctgttgatgaactacataatacatcacaatttattatagaaaatatccttcaaac

SEQ ID NO: 684066 - DNA, 75 bp, synthetic construct
  source 1..75: mol_type = other DNA
cacggaagatggaattcttactcaaggaaatgagcaagtttatattccacagaaagagttaggtgtattaatagt

SEQ ID NO: 684067 - DNA, 75 bp, synthetic construct
  source 1..75: mol_type = other DNA
tgcgcgtcgatagcggtaaaccactggtctttcatcagctgatacaggtggcggataaccgctggtactggtatc

SEQ ID NO: 684068 - DNA, 75 bp, synthetic construct
  source 1..75: mol_type = other DNA
atggttatcgaagcgcggagcatggtagatgcgcaaggtcaaccgctgaaatatgttcctggtgagagcgcccgg

SEQ ID NO: 684069 - DNA, 75 bp, synthetic construct
  source 1..75: mol_type = other DNA
aactggaactctgtgttgctctgcatacttgtcgttacgctggtacaagcctattttgcatggcacgccggtaag

SEQ ID NO: 684070 - DNA, 75 bp, synthetic construct
  source 1..75: mol_type = other DNA
aacatgaaactctactataaagaaacttcgagtgaaagccatcgagttataattgacaacattttgaaactaaag

SEQ ID NO: 684071 - DNA, 75 bp, synthetic construct
  source 1..75: mol_type = other DNA
caaaacctgaccatcggcagtcgcctctatggtgaatcttcaaagatacaaccaggagtactatctggttcagca

SEQ ID NO: 684072 - DNA, 75 bp, synthetic construct
  source 1..75: mol_type = other DNA
acatgtttgaatcaaatgaaatgcaacgtatttcgttaaaccttatcggtaggccatacaacatttgcctaggat

SEQ ID NO: 684073 - DNA, 75 bp, synthetic construct
  source 1..75: mol_type = other DNA
cgatctggcaatcagctggtatatgtttcacatcaaagcgctggtggcgatcctcaatggcgacatcaaccgtta

SEQ ID NO: 684074 - DNA, 75 bp, synthetic construct
  source 1..75: mol_type = other DNA
ggatgcgttttacggaagataacggcgaagtctggcagtgggtcgatgatgcgctgatattcgaactgccagaaa

SEQ ID NO: 684075 - DNA, 75 bp, synthetic construct
  source 1..75: mol_type = other DNA
ggactagcgcaagcagatacgctgcggatgcgttttacggaagataacggcgaagtctggcagtgggtcgatgat

SEQ ID NO: 684076 - DNA, 75 bp, synthetic construct
  source 1..75: mol_type = other DNA
cgtttacaggggcaaattttaaaacgcatcaccgatcgcgaactgttatctcacggtttgttaccgggcgtggtg

SEQ ID NO: 684077 - DNA, 75 bp, synthetic construct
  source 1..75: mol_type = other DNA
tgaatattaaatttaaccaaccggaacaagctgcgcggaccttatccggcggcaaccagcaaaaaatcctgattg

SEQ ID NO: 684078 - DNA, 75 bp, synthetic construct
  source 1..75: mol_type = other DNA
acgattaacggtacggcttattccgccacggtacaggcggacgggagctggagcgttggcattccggcggcaaac

SEQ ID NO: 684079 - DNA, 75 bp, synthetic construct
  source 1..75: mol_type = other DNA
aactatacgtcaaataaagaaaaaagagaagaggatgcccgatatatttctattatgattgataaggagttaaga

SEQ ID NO: 684080 - DNA, 75 bp, synthetic construct
  source 1..75: mol_type = other DNA
cgaaggctggcgaagccgctgaacaggccagcgaagcagcgaagtctgcttccgcagcgaagacatccgaaacaa

SEQ ID NO: 684081 - DNA, 75 bp, synthetic construct
  source 1..75: mol_type = other DNA
acggcacggtgaccattaacgccagcgtcaccgatgccgccggaaacagcggcagcgccacgcatcaggtgacgg

SEQ ID NO: 684082 - DNA, 75 bp, synthetic construct
  source 1..75: mol_type = other DNA
gggcgcgactacgggtaacacggtttccgtgacgattggcacgaccacctacaccaccgtgctggacgccaacgg

SEQ ID NO: 684083 - DNA, 75 bp, synthetic construct
  source 1..75: mol_type = other DNA
gagctgcgctgaccatcactggcagcagcacggcggaagcggggcagacggtgaccgtcaccctcaatggtgcaa

SEQ ID NO: 684084 - DNA, 75 bp, synthetic construct
  source 1..75: mol_type = other DNA
ctctcagggacgcacgacctgcctgcacaacgtagcacctggcatgattttttgccttcaggcaccgcatctgtt

SEQ ID NO: 684085 - DNA, 75 bp, synthetic construct
  source 1..75: mol_type = other DNA
atgatgccgttgcacagctggttgccgcgcgctcaccctgccgcaccatcgcacgcttcggcgttgatgtctggc

SEQ ID NO: 684086 - DNA, 75 bp, synthetic construct
  source 1..75: mol_type = other DNA
attagtcatgtaatgcacgctcaatcattgagaagctacttaggtcatgtttgctctaagattgtcatcattgat

SEQ ID NO: 684087 - DNA, 75 bp, synthetic construct
  source 1..75: mol_type = other DNA
atttaacccttatggctctcagaatagcagaaccttatctgatgaacagataaacaaagtactagcttaccttaa

SEQ ID NO: 684088 - DNA, 75 bp, synthetic construct
  source 1..75: mol_type = other DNA
tcaacagccgcaacaaccggttgcaccgcagccgcagtatcagcagccacaacagccagttgcgccacagccgca

SEQ ID NO: 684089 - DNA, 75 bp, synthetic construct
  source 1..75: mol_type = other DNA
gcttatctttttcctgcgcgtcggctggacccacgtcggttattcagtcggcgtgaaggcgatcgataaagtgcg

SEQ ID NO: 684090 - DNA, 75 bp, synthetic construct
  source 1..75: mol_type = other DNA
actcagatgaaatctgttggcgaagtgatggcgattggtcgcacgcaacaggaatccctgcaaaaagcattgcgc

SEQ ID NO: 684091 - DNA, 75 bp, synthetic construct
  source 1..75: mol_type = other DNA
tggcggcaaaactgctgaaacagggattcgagctggatgcgacccacggcacagcgattgtgctgggcgaagcag

SEQ ID NO: 684092 - DNA, 75 bp, synthetic construct
  source 1..75: mol_type = other DNA
gcgtcctgacgtcccggcccgctgcgtggtcagcgccaacgcctgctggtacttcaaatcggttgccgatgaagc

SEQ ID NO: 684093 - DNA, 75 bp, synthetic construct
  source 1..75: mol_type = other DNA
ctgattgctggggcaacacgtggagcggatcggggattgtctttcttcagctcgctgatgatatgctgacgctca

SEQ ID NO: 684094 - DNA, 75 bp, synthetic construct
  source 1..75: mol_type = other DNA
tgcttaaattgcagtttaaaatattggtgtgcgtgatgagatgtgagcggaaaattaagtttcttaaaaagaata

SEQ ID NO: 684095 - DNA, 75 bp, synthetic construct
  source 1..75: mol_type = other DNA
aagagttcggcgtcaccatgattggtgccaccgccgacgcgattgataaagcagaagaccgccgccgtttcgacg

SEQ ID NO: 684096 - DNA, 75 bp, synthetic construct
  source 1..75: mol_type = other DNA
tggtagcggagggaatcgaaaccagtaaacaagaagagtggttacgccagcattgcgtgcactacggtcagggct

SEQ ID NO: 684097 - DNA, 75 bp, synthetic construct
  source 1..75: mol_type = other DNA
ttcatcgactcgcaggtggtggccaatgcgccggtgcgtttcctgctctcgggtatcggtgatgccctggcaacc

SEQ ID NO: 684098 - DNA, 75 bp, synthetic construct
  source 1..75: mol_type = other DNA
tactaaaagataataacatttttaaaatcgtagaaaaactaccagaaaaacactcaaggccaccaaaaaaacaag

SEQ ID NO: 684099 - DNA, 75 bp, synthetic construct
  source 1..75: mol_type = other DNA
gaagctcatttgcctaaaattcgtcatatccaggataatagcactggtgaacttgttgaaagaaaaccacatatt

SEQ ID NO: 684100 - DNA, 75 bp, synthetic construct
  source 1..75: mol_type = other DNA
gagcagggcgtaaccaaagaagttatcccgccgtactattcggtgaaagaagtggtgctgccgttcaataaattc

SEQ ID NO: 684101 - DNA, 75 bp, synthetic construct
  source 1..75: mol_type = other DNA
agatttcatgtttgttgtccttactgctttagcgaagaacaacaacaagccttaagaggggtttcactgcgtgcc

SEQ ID NO: 684102 - DNA, 75 bp, synthetic construct
  source 1..75: mol_type = other DNA
aagggaaaaatattgcactggaaaaactggccagttttcctggttctgctgatatttaccacgcaattcaccttt

SEQ ID NO: 684103 - DNA, 75 bp, synthetic construct
  source 1..75: mol_type = other DNA
tgggtagacgactggataattgatgagtgtttatgcgcgatgtatgacgcatcatccgaatcaccaggaaaataa

SEQ ID NO: 684104 - DNA, 75 bp, synthetic construct
  source 1..75: mol_type = other DNA
aaaaaaagaggggttattgactatttttcgggtgttacttatcgattctcgatcgctggatcagtctatcgatat

SEQ ID NO: 684105 - DNA, 75 bp, synthetic construct
  source 1..75: mol_type = other DNA
aaggttctggtccatctggagttactcggcgggtttaaacccgatcaggctgggatcaatctactgaaaagttat

SEQ ID NO: 684106 - DNA, 75 bp, synthetic construct
  source 1..75: mol_type = other DNA
cggcttatgtatcgctgcatgttccactgaggcattacgtccgcaggctcgtttcgacaccggattgcgtcccgt

SEQ ID NO: 684107 - DNA, 75 bp, synthetic construct
  source 1..75: mol_type = other DNA
cataacagggaagagaatatccagaatagtagctttgagcaggatgatgacgataaagctattaccgcccaaatc

SEQ ID NO: 684108 - DNA, 75 bp, synthetic construct
  source 1..75: mol_type = other DNA
ctcccttattccttaatcaatgcctggaatagtagccctggccccgatccgcaaaacagcgatgaggtccgttat

SEQ ID NO: 684109 - DNA, 75 bp, synthetic construct
  source 1..75: mol_type = other DNA
cctcgctggcgctgcgcgaagacggttttgagaccattatggttaactgtaacccggaaaccgtctccaccgact

SEQ ID NO: 684110 - DNA, 75 bp, synthetic construct
  source 1..75: mol_type = other DNA
tagcgatgaagaaaattggtctggaaaccgcgcgttccggtatcgcacatacgatggaagaagcgctggcggttg

SEQ ID NO: 684111 - DNA, 75 bp, synthetic construct
  source 1..75: mol_type = other DNA
atggcgatcaaattctccagcggctttgtcgaagtgaacccaaactcgaagatcccggcattgcgcgaccatacc

SEQ ID NO: 684112 - DNA, 75 bp, synthetic construct
  source 1..75: mol_type = other DNA
tttgccctgcgtgtgccccgagcatttatcgatcgcatggagaaaggcaatccggacgatccgcttttgcgtcag

SEQ ID NO: 684113 - DNA, 75 bp, synthetic construct
  source 1..75: mol_type = other DNA
ccgcatggtcactgtatcaggaaggccggatcaccgaagccaccgcgacggaatacatcggctttcaggaattca

SEQ ID NO: 684114 - DNA, 75 bp, synthetic construct
  source 1..75: mol_type = other DNA
gtcgctacttccagacggcggtcagcgtgtctaacgatgcgccagtgttgctggatcacttccttgatgacgcag

SEQ ID NO: 684115 - DNA, 75 bp, synthetic construct
  source 1..75: mol_type = other DNA
tttataccgtgaacggaacaatgaagtaaaaaaggaagtcttctccagagttacaaatgaaaatattaactcgat

SEQ ID NO: 684116 - DNA, 75 bp, synthetic construct
  source 1..75: mol_type = other DNA
ctacttttgcaatactttgctatgaaaatgccgccttttgttttgaacgtgttccctccaccaacaataaagctt

SEQ ID NO: 684117 - DNA, 75 bp, synthetic construct
  source 1..75: mol_type = other DNA
ctatttgagcctaaaacaaaatgcaaatatcaagcaaaagctattaaagatgaaaaatcgatagaacaatggaga

SEQ ID NO: 684118 - DNA, 75 bp, synthetic construct
  source 1..75: mol_type = other DNA
tgaataattgccttgacgagatcgtgtattttttcaccaagctgaaatataaggtagtcatctttgaagatcttg

SEQ ID NO: 684119 - DNA, 75 bp, synthetic construct
  source 1..75: mol_type = other DNA
cagcaagctatcgcgagacgaacgccgccagctgatggaccgcgctatcgttctgaccgttatccagatagcccg

SEQ ID NO: 684120 - DNA, 75 bp, synthetic construct
  source 1..75: mol_type = other DNA
aatgctcatcttgatgtgcaccattctgaagaggaactgggttatatcttcagcctacaggcgaagcgcgttctg

SEQ ID NO: 684121 - DNA, 75 bp, synthetic construct
  source 1..75: mol_type = other DNA
atcaatcaggttgtctataacattgaagatgatcactccgggatggtgaatgtgttttaccgaacgcaatcaggg

SEQ ID NO: 684122 - DNA, 75 bp, synthetic construct
  source 1..75: mol_type = other DNA
tagacgccttgtatctgctgctgtccgatggtctggtgatgcaggacttcatggcctaccgctctattttccatg

SEQ ID NO: 684123 - DNA, 75 bp, synthetic construct
  source 1..75: mol_type = other DNA
atggcggcagcacaaccgctggtatttgatgcagaactggacaccgtgcgtgagcgtcttggtagcgtaaagggc

SEQ ID NO: 684124 - DNA, 75 bp, synthetic construct
  source 1..75: mol_type = other DNA
gggcaaccagcttaatgaggagaacccgcatcatgtgtatcagccgtaccgtctgccagggcagcagcatgatga

SEQ ID NO: 684125 - DNA, 75 bp, synthetic construct
  source 1..75: mol_type = other DNA
aaaaattgcggctcaatatgcggttcaagatgaaaatataagtgatgccttcgtctattggttcagccagtacaa

SEQ ID NO: 684126 - DNA, 75 bp, synthetic construct
  source 1..75: mol_type = other DNA
gctacgttctgactcgcacctccctaagcgacgattctaaaggtgatattgtcagaaacatgatcttctcgtttg

SEQ ID NO: 684127 - DNA, 75 bp, synthetic construct
  source 1..75: mol_type = other DNA
tctgattgataacgcggacgaacatctggcgggcatgttcgcttcgctattcagccagtctgatgaacatatcct

SEQ ID NO: 684128 - DNA, 75 bp, synthetic construct
  source 1..75: mol_type = other DNA
tactgggatctgtggatattcgtcgttttatcaaaaaacttattgaatctagttatcgagatctcgaagtacttt

SEQ ID NO: 684129 - DNA, 75 bp, synthetic construct
  source 1..75: mol_type = other DNA
atgcctcctttaacgccaaccgtaacagcaacgggaaaatagctggctggcaggcgttggtgggaccttactgga

SEQ ID NO: 684130 - DNA, 75 bp, synthetic construct
  source 1..75: mol_type = other DNA
gacgcaaggcgcgttggttcgtgccaattttggtaatgactccaacttattgatagtgttttatgttcagataat

SEQ ID NO: 684131 - DNA, 75 bp, synthetic construct
  source 1..75: mol_type = other DNA
acgatggggaattccatcgatgttgaaaaaatatcagcagcgttgtgccgacgcaaggcgcgttggttcgtgcca

SEQ ID NO: 684132 - DNA, 75 bp, synthetic construct
  source 1..75: mol_type = other DNA
attgagttccgtcaacctgctgctgaggcgaggagtgtcattgatgaacttaatcagcaggaaaagccagatatt

SEQ ID NO: 684133 - DNA, 75 bp, synthetic construct
  source 1..75: mol_type = other DNA
gatttgacggggaaagaagtagctgactacctagctacagtggcacagatgaaaccggattccggagcctaccca

SEQ ID NO: 684134 - DNA, 75 bp, synthetic construct
  source 1..75: mol_type = other DNA
aaagtacagggaggcgtttattcagtccatggaaaattttcatccgtcagaatttgaaaattgcagtcattggct

SEQ ID NO: 684135 - DNA, 75 bp, synthetic construct
  source 1..75: mol_type = other DNA
tgctgtctcaactggccggaggacaggtttatccttatgtggtcccgctgacggagggaaaacctgcggtatctc

SEQ ID NO: 684136 - DNA, 75 bp, synthetic construct
  source 1..75: mol_type = other DNA
cacggaccgtggaggccagtactgttcagcagattatcaggcgcaactgaagcggcataatctgcgtggaagtat

SEQ ID NO: 684137 - DNA, 75 bp, synthetic construct
  source 1..75: mol_type = other DNA
cctggcacgccgtggcggctgggccgttacaccacaactgggcagtgcctcacgcgacacgctggcacaagttgg

SEQ ID NO: 684138 - DNA, 75 bp, synthetic construct
  source 1..75: mol_type = other DNA
attcagggcaggctccagcacgccagctatatcggctactggctggatatcctgcgccaggacaagcgggcagtg

SEQ ID NO: 684139 - DNA, 75 bp, synthetic construct
  source 1..75: mol_type = other DNA
gaatttcggctgtttaacctgtcgcagtgcgacggcctgccgcagtcgctgtccgagccgtttacccggcccgca

SEQ ID NO: 684140 - DNA, 75 bp, synthetic construct
  source 1..75: mol_type = other DNA
tgcaggtgctgaagccggaaaacattgtgaaaacgccgggctatgagcctgatctgcgctatcaccgggcaacgc

SEQ ID NO: 684141 - DNA, 75 bp, synthetic construct
  source 1..75: mol_type = other DNA
gaaaatttcaacggagtggctatctttattcagaggtgaattaaagaagaaaaaacatttggaagctttgctagc

SEQ ID NO: 684142 - DNA, 75 bp, synthetic construct
  source 1..75: mol_type = other DNA
tgccgcgcagcaaggaaattcggtgtttcaaaatgatggtaatgactccaacttattgatagtgttttatgttca

SEQ ID NO: 684143 - DNA, 75 bp, synthetic construct
  source 1..75: mol_type = other DNA
gattatcaacaagttgttcactggctaaatttatcagcagaacagaaaaatagtaaagcagagtatacgttggga

SEQ ID NO: 684144 - DNA, 75 bp, synthetic construct
  source 1..75: mol_type = other DNA
atcctctgcgatgccgaagtcggggttctacccttgagctcttccttaagcatgcctattctggatagcattaca

SEQ ID NO: 684145 - DNA, 75 bp, synthetic construct
  source 1..75: mol_type = other DNA
cgcaggttaaaccagtcagcaagggggtaaaccatgcagcagcaccaggtggcaccgcatcacgggcagttcagg

SEQ ID NO: 684146 - DNA, 75 bp, synthetic construct
  source 1..75: mol_type = other DNA
aaaggaagctcttattatgtggtctaaataaaactggagctgcagagacagcagggatgggaatgattgaagctc

SEQ ID NO: 684147 - DNA, 75 bp, synthetic construct
  source 1..75: mol_type = other DNA
cggctgacaccttcagtaagccaaacgcgcagtccgccgatgcggggaaatatacctgcgtggtgaccgattcgg

SEQ ID NO: 684148 - DNA, 75 bp, synthetic construct
  source 1..75: mol_type = other DNA
aagattattgaaaaagagcgcccggacgcggtgctgccaacgatgggcggtcagacggcgctgaactgcgcgctg

SEQ ID NO: 684149 - DNA, 75 bp, synthetic construct
  source 1..75: mol_type = other DNA
tatgacgacgaagatcagtggcaagaagaggaagaagagcaaccgatcaatatgtccaggggtattgttcatcct

SEQ ID NO: 684150 - DNA, 75 bp, synthetic construct
  source 1..75: mol_type = other DNA
atcctgcagcctggcaacaattgcacgatgcttatgaacaggctttacgttatgacgacgaagatcagtggcaag

SEQ ID NO: 684151 - DNA, 75 bp, synthetic construct
  source 1..75: mol_type = other DNA
tttcgcagttcttctttgatgactataattaatagtatttctgttactgacttattaggcattgtgcccaccgaa

SEQ ID NO: 684152 - DNA, 75 bp, synthetic construct
  source 1..75: mol_type = other DNA
gacggaaatgtgcaaacgcgacttggggtgaaaacctacctgaacagccatcaccagcgtgacgatggtaaacag

SEQ ID NO: 684153 - DNA, 75 bp, synthetic construct
  source 1..75: mol_type = other DNA
acgccgacaaagcaaaacagggcgacacggtaaaaggttttgttgccggtgccgcctgtactgccgttatcgcat

SEQ ID NO: 684154 - DNA, 75 bp, synthetic construct
  source 1..75: mol_type = other DNA
ctcaccagcatggtccgggacaacccgtgggttaaggcgctgaactggctcagagtggtgttcagcaaaaagcag

SEQ ID NO: 684155 - DNA, 75 bp, synthetic construct
  source 1..75: mol_type = other DNA
cgttttacgagtatgtgaagtagttgcatggaaggttacgcctcatggcttaaggccagatctttatcctcaccc

SEQ ID NO: 684156 - DNA, 75 bp, synthetic construct
  source 1..75: mol_type = other DNA
tgaagatggaattcctgattcgttacgcaaaatttcaaatccaagcttagcgcgcacggaagatgggcagagtga

SEQ ID NO: 684157 - DNA, 75 bp, synthetic construct
  source 1..75: mol_type = other DNA
tgccgtctatcgccatgtggatgcagtgcgggttggttactgtcttcatcctgctggtttcgtttggtggcggta

SEQ ID NO: 684158 - DNA, 75 bp, synthetic construct
  source 1..75: mol_type = other DNA
gcaatggcaggttgtggatggtatgacagcattaatccggcgtaacctgagaccattatatctgtcgcttgacct

SEQ ID NO: 684159 - DNA, 75 bp, synthetic construct
  source 1..75: mol_type = other DNA
ttaatgacagcctccggcaccgccatctttcagatgaattggttgcagaaggtgaacagtctgcggttctggccg

SEQ ID NO: 684160 - DNA, 75 bp, synthetic construct
  source 1..75: mol_type = other DNA
gcggcccagaatgggcatttcgctctttgcgaaatgttgttgtgtgcgggtgtcgatgttgagcatcaaaacaac

SEQ ID NO: 684161 - DNA, 75 bp, synthetic construct
  source 1..75: mol_type = other DNA
aagttatggctattggtcaaattaatatttccggcaatgtcacccccgcgaactggtggaaacatattcggctac

SEQ ID NO: 684162 - DNA, 75 bp, synthetic construct
  source 1..75: mol_type = other DNA
acatcattatctgatgcaggtagtgaggttttgtgttgggatgtacgtaatgttcaaacgccctcaatatttgat

SEQ ID NO: 684163 - DNA, 75 bp, synthetic construct
  source 1..75: mol_type = other DNA
tgtggacattcgccaatgggatgtcgtcgataaaacaaaggaagagcgactcgggcagcgcatggatacggcgct

SEQ ID NO: 684164 - DNA, 75 bp, synthetic construct
  source 1..75: mol_type = other DNA
tgttcgtgacattcggtctgccggggaagatgatttcggcatgccgtggcctgaattccggctcagcgtagaggc

SEQ ID NO: 684165 - DNA, 75 bp, synthetic construct
  source 1..75: mol_type = other DNA
gttagctcgttatcggcaatctcctccgcctgacgggcagcaactagcaggggggctagatgatgaggcaaacgt

SEQ ID NO: 684166 - DNA, 75 bp, synthetic construct
  source 1..75: mol_type = other DNA
aagaatggcgctgtcgtttttatatcagacttctggatcgcagtgttattaccgacccgagagttgttttctgtg

SEQ ID NO: 684167 - DNA, 75 bp, synthetic construct
  source 1..75: mol_type = other DNA
cctcattatatggaatacaaccaggtgcagcggcaaaaactcaatcaacgattgtcgcggacaaaacgatatata

SEQ ID NO: 684168 - DNA, 75 bp, synthetic construct
  source 1..75: mol_type = other DNA
aacacgctgctggtgagggtgaccgatgcgttcggtaatacgcttgccgggcagacggtcagcgtgacggcaggc

SEQ ID NO: 684169 - DNA, 75 bp, synthetic construct
  source 1..75: mol_type = other DNA
atggagatatgtgggtgatggcatatatgaacgtacatatatggcctaccaagaaggagaaaatttaacttcatt

SEQ ID NO: 684170 - DNA, 75 bp, synthetic construct
  source 1..75: mol_type = other DNA
aaagagattctcgtacacgatgaatcagcggttgatctatccgttttaaacgagactaacgcaagtcttctgttt

SEQ ID NO: 684171 - DNA, 75 bp, synthetic construct
  source 1..75: mol_type = other DNA
acttccgcgtatgggctgaccttgattgggctgttatggaccatagcgcactgaccgtagttcagaaaaaaggtg

SEQ ID NO: 684172 - DNA, 75 bp, synthetic construct
  source 1..75: mol_type = other DNA
aggcaacggcgcaacgactgccccgacggtgaccactcagccggatggcacggtggaaatctctgtcaccagcca

SEQ ID NO: 684173 - DNA, 75 bp, synthetic construct
  source 1..75: mol_type = other DNA
ccgacggtgaccactcagccggatggcacggtggaaatctctgtcaccagccagaccgccggaaccagtgtggtc

SEQ ID NO: 684174 - DNA, 75 bp, synthetic construct
  source 1..75: mol_type = other DNA
agatcgagatatctttgtgaaaaaggcagaatctctcggcgcgaaagtatttgtacagtctgcaaatggcaatga

SEQ ID NO: 684175 - DNA, 75 bp, synthetic construct
  source 1..75: mol_type = other DNA
ccgaaggtcgatgctggccgctgtaacggctgtggtgagtgtctggtccagtgcgaccgttatgcagtgatgctg

SEQ ID NO: 684176 - DNA, 75 bp, synthetic construct
  source 1..75: mol_type = other DNA
ggcgcaacgactgccccgacggtcatcacagggccagacgggacggtggagatcagtgtcaccagccagacggcg

SEQ ID NO: 684177 - DNA, 75 bp, synthetic construct
  source 1..75: mol_type = other DNA
tttaacttcatttatggagattaaaggttggcgtatatacgggcaaccatcctataacatccttccttttgtgga

SEQ ID NO: 684178 - DNA, 75 bp, synthetic construct
  source 1..75: mol_type = other DNA
tcaccgccagcatcaacagcagcagccagagccgggatgtgacgtttatcgccgatgtcagaacggcgcagatcg

SEQ ID NO: 684179 - DNA, 75 bp, synthetic construct
  source 1..75: mol_type = other DNA
tgttcttggcggtcgggcgatggagatcgtctacgacgaagccgacctgcgtcgttacttccagaccgcggtgag

SEQ ID NO: 684180 - DNA, 75 bp, synthetic construct
  source 1..75: mol_type = other DNA
aggatgatagtgtaaaaaacattaaaggcatttgggaatacgtgttaggtggtcaatctgataaacgtttattaa

SEQ ID NO: 684181 - DNA, 75 bp, synthetic construct
  source 1..75: mol_type = other DNA
aactaaaagtactcaacatcaaaaccaagacggcagttggaatgaggaagtcaccgaaaaagcccgcagtggtgt

SEQ ID NO: 684182 - DNA, 75 bp, synthetic construct
  source 1..75: mol_type = other DNA
gagcaagctgaacttttgtttgacctagccactcaagctgtcaatacactggccgctgaaaacgacgacgatgtg

SEQ ID NO: 684183 - DNA, 75 bp, synthetic construct
  source 1..75: mol_type = other DNA
accagtagtattgctgaaggacgggtttggcattttaatccgggtgagtttattaagcattttaggaagtgtggg

SEQ ID NO: 684184 - DNA, 75 bp, synthetic construct
  source 1..75: mol_type = other DNA
ggtatcagtgaaggaaataaagtctaccggaaatcgtcactgggaatgccggggcatgtcgacggggatcgcggc

SEQ ID NO: 684185 - DNA, 75 bp, synthetic construct
  source 1..75: mol_type = other DNA
aatgtaaaggtacagaaagcgaaattaaagaatggtttaaaacgattaatatttctggcgtccctttaaatgaac

SEQ ID NO: 684186 - DNA, 75 bp, synthetic construct
  source 1..75: mol_type = other DNA
gatatgtatgaaatgttaggaaataaagatcttaacatcaccgataaagagtaccaaagcaaaaactctaaggta

SEQ ID NO: 684187 - DNA, 75 bp, synthetic construct
  source 1..75: mol_type = other DNA
attgtgatcggtggaactttatttacccataaggtgggtaaacgtattcgtccgcttaatgtggaaaaacaacgt

SEQ ID NO: 684188 - DNA, 75 bp, synthetic construct
  source 1..75: mol_type = other DNA
acgctcagtctttcatttggcttcatccagtcacttagcatgctgatcacctttaccgttattctttgggaaagc

SEQ ID NO: 684189 - DNA, 75 bp, synthetic construct
  source 1..75: mol_type = other DNA
aacccgaccaattacgtgccattaataatattattggccgtttaagcttacgccagccgcagcaagattcgctgc

SEQ ID NO: 684190 - DNA, 75 bp, synthetic construct
  source 1..75: mol_type = other DNA
cacttcacgagtagaagatgattatggattcccggttgaaggtgtcgacgttagttacagcttagacaccaaagg

SEQ ID NO: 684191 - DNA, 75 bp, synthetic construct
  source 1..75: mol_type = other DNA
aagctcatcttttattggtatgattggtattggtcactcaagtttaaccagaaaacgaattgatttgaaagaaca

SEQ ID NO: 684192 - DNA, 75 bp, synthetic construct
  source 1..75: mol_type = other DNA
acagtacaaaatacaagctccgctgattcaggaattgtcggtgaccagggggagctttatctctcgggccttcct

SEQ ID NO: 684193 - DNA, 75 bp, synthetic construct
  source 1..75: mol_type = other DNA
cggacaggatgacagaggtgctgattgaacatgtccacaaacatatctcagtcctcggagaaccagagtttaacc

SEQ ID NO: 684194 - DNA, 75 bp, synthetic construct
  source 1..75: mol_type = other DNA
cagggaagaggccgcgcggatccgtgaaaattacatggccctgcaggcaaagctccagtatgaaaaagacagcgg

SEQ ID NO: 684195 - DNA, 75 bp, synthetic construct
  source 1..75: mol_type = other DNA
attgctcttgttaaagcaccaggggctgccgggttagaaatagataatatgcgcggtgctgcgacggactggcgc

SEQ ID NO: 684196 - DNA, 75 bp, synthetic construct
  source 1..75: mol_type = other DNA
ggctcatcatggcagttcgacagcgataaactgcaactgaatatctccattccccaaatctatatggatgcgatg

SEQ ID NO: 684197 - DNA, 75 bp, synthetic construct
  source 1..75: mol_type = other DNA
gacgtagtcgcgtggagggaacgctaacgcagtcgttggggagagattatggcaatttatacctgacattaagcc

SEQ ID NO: 684198 - DNA, 75 bp, synthetic construct
  source 1..75: mol_type = other DNA
tgcagtacgcatcacgatcaagctgtgcacgtccatccgatgccattttctcatttgactttcgggggattactg

SEQ ID NO: 684199 - DNA, 75 bp, synthetic construct
  source 1..75: mol_type = other DNA
aggtgcttctcgccaggaagatgaaacagggaaatgcacaatttcatatctataataaggaggctaaacaggcaa

SEQ ID NO: 684200 - DNA, 75 bp, synthetic construct
  source 1..75: mol_type = other DNA
tggtatgcgcgccgacgcggtcacgatccgcgggcaatgttgtacaatgcggttcagcatcagtggctcacggaa

SEQ ID NO: 684201 - DNA, 75 bp, synthetic construct
  source 1..75: mol_type = other DNA
gatgtatccgtacttattgccgacaggctgcgacgtatcgatgcaatcacctcactgctggaaaataggaaatgt

SEQ ID NO: 684202 - DNA, 75 bp, synthetic construct
  source 1..75: mol_type = other DNA
atggataaaaatgaagtaatccttcttagccgccctgccatttgccggatgctgggcggaattagcagaggcacg

SEQ ID NO: 684203 - DNA, 75 bp, synthetic construct
  source 1..75: mol_type = other DNA
ttttttgagcaccggcggcacatttcagcgcccggatattactgccatccagcgcggtggcagaccagtcaataa

SEQ ID NO: 684204 - DNA, 75 bp, synthetic construct
  source 1..75: mol_type = other DNA
gttctcaggagacgaataccagctatctcaacctgcgcaacggactgaatattgggccgtggcgattacgcaatt

SEQ ID NO: 684205 - DNA, 75 bp, synthetic construct
  source 1..75: mol_type = other DNA
tcgatcaggaaatatacgatcagttatatactcctgaaatattttatgaagcctgcaaaaaagttcagtcatttt

SEQ ID NO: 684206 - DNA, 75 bp, synthetic construct
  source 1..75: mol_type = other DNA
cgacaccttactccccaaacttctctccggtgaaatccccttgccggaagccgaggaattagcaaaggaagcgga

SEQ ID NO: 684207 - DNA, 75 bp, synthetic construct
  source 1..75: mol_type = other DNA
ccgctgaaagaattaaataatccagagcatgacagttacgcaattagtgaaaagagtcacggcagagaagaaatc

SEQ ID NO: 684208 - DNA, 75 bp, synthetic construct
  source 1..75: mol_type = other DNA
atcacgcgggtattgatgacaatacagcggcaaaagccattgcccatgccattctcggtggtgtgacagcagccc

SEQ ID NO: 684209 - DNA, 75 bp, synthetic construct
  source 1..75: mol_type = other DNA
gcttatcaaggttggtcaacatatatatttgcacgaatttgcattcatgcttcgattatgatttctaatgttcct

SEQ ID NO: 684210 - DNA, 75 bp, synthetic construct
  source 1..75: mol_type = other DNA
ggatgtaaagagcttgttgtgttgcattgtgttagcggatatccagcaccagcggaagattataatttagtaaca

SEQ ID NO: 684211 - DNA, 75 bp, synthetic construct
  source 1..75: mol_type = other DNA
atggttacgaccagaatagcagttggtctgacggcagggacatgtctcgttttctcgcaaagtgtgatggccgag

SEQ ID NO: 684212 - DNA, 75 bp, synthetic construct
  source 1..75: mol_type = other DNA
gatcagcgacaactatttctctaagtcgaatgttgaactcgataataccgtcgttacgatggttcctacccgcgg

SEQ ID NO: 684213 - DNA, 75 bp, synthetic construct
  source 1..75: mol_type = other DNA
acgatttctggcaaaccggtaaccgccgcagtcgtgtggaaggaacgctaacgcagtcgctgggaagagattacg

SEQ ID NO: 684214 - DNA, 75 bp, synthetic construct
  source 1..75: mol_type = other DNA
tgaatggaaagggctgaagaaattatgcgtggcagtctcctttcggtcgataatagcagaacagcagaacagcag

SEQ ID NO: 684215 - DNA, 75 bp, synthetic construct
  source 1..75: mol_type = other DNA
gttacaggaagcaatacaattttgcgtggcaacatagataatggtgtaggatttgtgttggatctaaaagaacca

SEQ ID NO: 684216 - DNA, 75 bp, synthetic construct
  source 1..75: mol_type = other DNA
atgaaaaccagtgtgcgcataggcgcttttgaaatcgacgacggcgaattacacggtgaatcgccgggtgatcga

SEQ ID NO: 684217 - DNA, 75 bp, synthetic construct
  source 1..75: mol_type = other DNA
gtcacctggcttttttcagaagacggaaaaaactggtatgaagagctgaagaatttcgccaggacacaattaaaa

SEQ ID NO: 684218 - DNA, 75 bp, synthetic construct
  source 1..75: mol_type = other DNA
gcggtatcctgagtgtaagggcgtggtgaacacgcagaaaaaggccgggcggcgaaaaaaatcgggaaaaactaa

SEQ ID NO: 684219 - DNA, 75 bp, synthetic construct
  source 1..75: mol_type = other DNA
tgacaaaaaaattacggcacaccatgccatcattccgacccggcaggtctttgatatcagggcactgagtgaaga

SEQ ID NO: 684220 - DNA, 75 bp, synthetic construct
  source 1..75: mol_type = other DNA
ggaaggacccctgattgccgccatgaaaaacgccgccagtcaggtcagcgacccgaagctgaaaaaagtgctgag

SEQ ID NO: 684221 - DNA, 75 bp, synthetic construct
  source 1..75: mol_type = other DNA
accctgaaggcacgggaacgtggaatttctggggttttgtcagtgggccgggtgcagacacccacgctggcaatg

SEQ ID NO: 684222 - DNA, 75 bp, synthetic construct
  source 1..75: mol_type = other DNA
tgccggagcaggaagccgatgttactgaggcaacatttgtgattggggggcagttattccgttcccgcggaagag

SEQ ID NO: 684223 - DNA, 75 bp, synthetic construct
  source 1..75: mol_type = other DNA
ggttatctgcctgcctcgatgcatgaggagagttctgaagtgcttgaggctgtcgggcgttcagatccgtccgtg

SEQ ID NO: 684224 - DNA, 75 bp, synthetic construct
  source 1..75: mol_type = other DNA
cctgaccggaaaactcacgcagagtgaagatgaggggcttatcaccctctggcattacgatgcgtcggaccgtat

SEQ ID NO: 684225 - DNA, 75 bp, synthetic construct
  source 1..75: mol_type = other DNA
cccaacgaccccgatactcagcgtgatgttgacgaagtgtgcgctcgcttcccgaatgtgcataaggtagtctgc

SEQ ID NO: 684226 - DNA, 75 bp, synthetic construct
  source 1..75: mol_type = other DNA
ggacgcaacgttaccagtatgacctgaccggaaaactcacgcagagtgaagatgaggggcttatcaccctctggc

SEQ ID NO: 684227 - DNA, 75 bp, synthetic construct
  source 1..75: mol_type = other DNA
accctcaaagcccgtgactcaggggtgtcagaagtgctgtccgtcgggcgggtacagacgccgacgcttgccatg

SEQ ID NO: 684228 - DNA, 75 bp, synthetic construct
  source 1..75: mol_type = other DNA
gttcttatggataaatatatagaaaggggccggggtcttgctgctattatatcagcaaatcaacgcctttctgag

SEQ ID NO: 684229 - DNA, 75 bp, synthetic construct
  source 1..75: mol_type = other DNA
acgacagccagcaccgcctggtgttccacacgcggatacagcatggcgagccactggtcgagagccgctacctct

SEQ ID NO: 684230 - DNA, 75 bp, synthetic construct
  source 1..75: mol_type = other DNA
aaataacacaaaaaatgatctccgatctaaaagcaagtaatgcacatcaacgacatgcttttatatttaattttt

SEQ ID NO: 684231 - DNA, 75 bp, synthetic construct
  source 1..75: mol_type = other DNA
caccgcgcagtacgctggtttacttcgcaaccggaacacgccagcaatactgaaccgcaggttaccgtcagtgtt

SEQ ID NO: 684232 - DNA, 75 bp, synthetic construct
  source 1..75: mol_type = other DNA
aaaagcagtatttgtacccgatcttgaaatcgctatttcgctgataaaaagaaatactgcgataggataccttcc

SEQ ID NO: 684233 - DNA, 75 bp, synthetic construct
  source 1..75: mol_type = other DNA
tgtctttctttatttttatttctattctgtctttatttcgcgggtggtcgtttattgaacggttccatctgtcgg

SEQ ID NO: 684234 - DNA, 75 bp, synthetic construct
  source 1..75: mol_type = other DNA
ccgctggcagcaaaagcggcaaccatcgagggcacaaacccaagcctttccatcgtggacgaataccacctacac

SEQ ID NO: 684235 - DNA, 75 bp, synthetic construct
  source 1..75: mol_type = other DNA
atacacgagcgcctttatcgaagtgccgcgcaaaaatgcgaaatccacgaccgccgcgattctggctaactggtt

SEQ ID NO: 684236 - DNA, 75 bp, synthetic construct
  source 1..75: mol_type = other DNA
ttcaggccgtattatatatattattaaagtatgaacatgattcattattatttttaaaattaggatatatattac

SEQ ID NO: 684237 - DNA, 75 bp, synthetic construct
  source 1..75: mol_type = other DNA
aaatgatgagggaaaatttacaggagagatattaatgactcttgtttactctccgccattagatccgaactaccc

SEQ ID NO: 684238 - DNA, 75 bp, synthetic construct
  source 1..75: mol_type = other DNA
ccaaaagataatatttcagatatgttatcttgtaagaaaaatgaaataacatttctttttgaagttaatactctt

SEQ ID NO: 684239 - DNA, 75 bp, synthetic construct
  source 1..75: mol_type = other DNA
ggaagttgtatcccgatctgatcccggatggcgccattggcccccgaaccatcactgcgcttaagggatatcttt

SEQ ID NO: 684240 - DNA, 75 bp, synthetic construct
  source 1..75: mol_type = other DNA
gtgcatgatctgacagcggctgggtttaacatgatgaacagtctgcccgtgaccagtacgggaggttacgataaa

SEQ ID NO: 684241 - DNA, 75 bp, synthetic construct
  source 1..75: mol_type = other DNA
cgtggcgtgggaatccatcgatgcctggcagatcccttcctcgctgattgccgaaatgccggcctccgtggcgct

SEQ ID NO: 684242 - DNA, 75 bp, synthetic construct
  source 1..75: mol_type = other DNA
gttgattctatatatgcccgaagccagttgaagggaaaagataatgaaaccgggaacacctggcgtatccgttac

SEQ ID NO: 684243 - DNA, 75 bp, synthetic construct
  source 1..75: mol_type = other DNA
atgcaagcgaataaaacggcggacaattcgccttcagacactgagtctggagctgacaaaattgtcagggaggcg

SEQ ID NO: 684244 - DNA, 75 bp, synthetic construct
  source 1..75: mol_type = other DNA
agcactcagtcagattcaagcccgatcccaaaaaagttgacgcctatttcttggtggcatatttgaatagcaaaa

SEQ ID NO: 684245 - DNA, 75 bp, synthetic construct
  source 1..75: mol_type = other DNA
tttgtatcggctgagcaggctgccgcctttctgggcgtggtgccgatcgagaaacgctcaggcacatcggtccgg

SEQ ID NO: 684246 - DNA, 75 bp, synthetic construct
  source 1..75: mol_type = other DNA
ctggcgatcgataaagattacgataacgaagaaaatgaccctcaacttatggaaatcatgcgggcgttaggagga

SEQ ID NO: 684247 - DNA, 75 bp, synthetic construct
  source 1..75: mol_type = other DNA
gtactgaatggccgggtgtagcaatttcttgccgttttaagattcatgaactggcagtcgataaagatagcgaag

SEQ ID NO: 684248 - DNA, 75 bp, synthetic construct
  source 1..75: mol_type = other DNA
acagttgacttctcgcagagtcaacttactcagagtaattttcgcgaatgtcagattagaaattcaaacttcgat

SEQ ID NO: 684249 - DNA, 75 bp, synthetic construct
  source 1..75: mol_type = other DNA
tcgggagaaagttcaggagagccgcccacaacgtctaaacgacagtaaccatactgtcaggctgaataacgagca

SEQ ID NO: 684250 - DNA, 75 bp, synthetic construct
  source 1..75: mol_type = other DNA
cagccgtcgccaaccactgacccagcagcaaaaggacgccgctcgtcagcgttatcagtcggcctctcctgagca

SEQ ID NO: 684251 - DNA, 75 bp, synthetic construct
  source 1..75: mol_type = other DNA
tcaaagtcgataaagacgcgctggccatgttgctggaagaggccaaatctgaagagcgtaaaggtcgcgcactgg

SEQ ID NO: 684252 - DNA, 75 bp, synthetic construct
  source 1..75: mol_type = other DNA
aactcggaagtaatcgttattgctcccctatggataacaaatctaataatatggttgtaatagagaatctggctc

SEQ ID NO: 684253 - DNA, 75 bp, synthetic construct
  source 1..75: mol_type = other DNA
aaaaatattggcattaagatgtcttgaaaaagctcttttgcaaacttgtcataatgcacatgtatataatgtttc

SEQ ID NO: 684254 - DNA, 75 bp, synthetic construct
  source 1..75: mol_type = other DNA
ggcgttgaaaccggtggttccaacgttcagtttgcggtgaacccgaaaaacggtcgcctgattgttatcgaaatg

SEQ ID NO: 684255 - DNA, 75 bp, synthetic construct
  source 1..75: mol_type = other DNA
ccctcatgtcattgtggtttttgtcattttccttttcagtatctccctgaaaactacaccggtaacggtcggggc

SEQ ID NO: 684256 - DNA, 75 bp, synthetic construct
  source 1..75: mol_type = other DNA
agtgttgctggatcatttccttgatgacgcagtagaagttgacgtggatgccatctgcgacggcgaaatggtgct

SEQ ID NO: 684257 - DNA, 75 bp, synthetic construct
  source 1..75: mol_type = other DNA
ccggcgcgaaaagttcatttttaccactgcgaccaccggggcctgccgctggcgctcatcagcgaagacggcaat

SEQ ID NO: 684258 - DNA, 75 bp, synthetic construct
  source 1..75: mol_type = other DNA
tacgcaaagcagaagcaaaggcaaaggcactactcgcagccgccaagctgaatagtttaaaacattcgccatttg

SEQ ID NO: 684259 - DNA, 75 bp, synthetic construct
  source 1..75: mol_type = other DNA
caggtggagccggaatacacaccggcgcgaaaagctcatctttatcactgcgaccaccggggactgccgctggcg

SEQ ID NO: 684260 - DNA, 75 bp, synthetic construct
  source 1..75: mol_type = other DNA
cggggcagcagtatgataaggagtcggggctgtactacaaccggaaccggtactacgatccgttgcaggggcggt

SEQ ID NO: 684261 - DNA, 75 bp, synthetic construct
  source 1..75: mol_type = other DNA
acctctacgacccgctgggacggcgaatggcgaaacgggtatggcggcgggagcgtgacctgacggggtggatgt

SEQ ID NO: 684262 - DNA, 75 bp, synthetic construct
  source 1..75: mol_type = other DNA
acaaacatgatctcatatcagggacttgttcgcaccttccttagtcgactcgaagcatcggatgttaaactagtg

SEQ ID NO: 684263 - DNA, 75 bp, synthetic construct
  source 1..75: mol_type = other DNA
gggttatagagtcggtcgcagatttaacctttggggaatatatacgactttttgaaaatccagaattgtggaaaa

SEQ ID NO: 684264 - DNA, 75 bp, synthetic construct
  source 1..75: mol_type = other DNA
agttatcaagtgctttcatcaaaaaatgaaactgttaacgccatggataagtttcttatcagtttcagccgttaa

SEQ ID NO: 684265 - DNA, 75 bp, synthetic construct
  source 1..75: mol_type = other DNA
atagccagcatggagggatacccaccactagcaacgatcctacgctggcaaatcgagtttcccgacttcagggaa

SEQ ID NO: 684266 - DNA, 75 bp, synthetic construct
  source 1..75: mol_type = other DNA
atgatttagataattttgagagcgctacgcaggaaaaaaggcgcgtaggcagaccgtcaaaatatagtaacaaga

SEQ ID NO: 684267 - DNA, 75 bp, synthetic construct
  source 1..75: mol_type = other DNA
agatgttaaaggtgttattagttgggaaagcattgctccaatactagcgttgacccaatcagaatctgcggttgt

SEQ ID NO: 684268 - DNA, 75 bp, synthetic construct
  source 1..75: mol_type = other DNA
tagcaaaagcattaagtattgatcttgattattataacatcagcattctttctgttgatggtatccaatttgaag

SEQ ID NO: 684269 - DNA, 75 bp, synthetic construct
  source 1..75: mol_type = other DNA
ctaacaaaattttgggataaggaaaagaattcagaatggatgtgcagaatttatttatcggcaaaaatggtgatg

SEQ ID NO: 684270 - DNA, 75 bp, synthetic construct
  source 1..75: mol_type = other DNA
cattgtcagcaaggaaaaagtttgcaggccgtcaatggttctacgattttagagaactaactcagcgtattgatg

SEQ ID NO: 684271 - DNA, 75 bp, synthetic construct
  source 1..75: mol_type = other DNA
tagcaatgatagcaatgttagcaaaactgagacgactcaatcgccgccgcacacgcaatttgcacccaccgctgc

SEQ ID NO: 684272 - DNA, 75 bp, synthetic construct
  source 1..75: mol_type = other DNA
ggaattacctcccgccgggcgaattcatcgctggcgatggcaatcagcaaagggcgtctgattcgcgtgaatcag

SEQ ID NO: 684273 - DNA, 75 bp, synthetic construct
  source 1..75: mol_type = other DNA
ctaaacaattccccattcctggcgtatatctggctaacattcatcaatgtgatagattcctctcccgcatttatg

SEQ ID NO: 684274 - DNA, 75 bp, synthetic construct
  source 1..75: mol_type = other DNA
tggtcccggcgttattagttgctggcgcagcaaatgcggctgaagtctataataaagatggtaataaactggatt

SEQ ID NO: 684275 - DNA, 75 bp, synthetic construct
  source 1..75: mol_type = other DNA
gctgggcaagggcagccggattacagccacaggcgcacagggcggtggtgatgtttacgtgggcggcggctggca

SEQ ID NO: 684276 - DNA, 75 bp, synthetic construct
  source 1..75: mol_type = other DNA
cgccaggacggtaatattgttctgaatggtggtaacagcggggtagttcacctctccggtaagctgagtgcagat

SEQ ID NO: 684277 - DNA, 75 bp, synthetic construct
  source 1..75: mol_type = other DNA
aacggtattttcattggcaacgggactgcttcgaatggctctggtgcaaacctctctctgaatggttcttctgtc

SEQ ID NO: 684278 - DNA, 75 bp, synthetic construct
  source 1..75: mol_type = other DNA
cgcagattatgggtaacctgaaggcgaatggtcaggtgttcctggttaacccgaacggcgtgctgtttggtaagg

SEQ ID NO: 684279 - DNA, 75 bp, synthetic construct
  source 1..75: mol_type = other DNA
ggatataactgttgggacgacaaatacttcaaaccgtgtgaatatatctattaataacactaccctgaatgcgtc

SEQ ID NO: 684280 - DNA, 75 bp, synthetic construct
  source 1..75: mol_type = other DNA
aatacttcgttatcggcagagcatatttatgttaacggaactaacgttaatccaaaagcggacagcgccatcggt

SEQ ID NO: 684281 - DNA, 75 bp, synthetic construct
  source 1..75: mol_type = other DNA
ctaatacatcaactaattggatgtcctttttttatataaggatggagaagttcaaaatacatttgggtattcatt

SEQ ID NO: 684282 - DNA, 75 bp, synthetic construct
  source 1..75: mol_type = other DNA
aactgttagtatatattactgggttgcaggaatcataattggcaattttatttctttatgtatatgcgttgtata

SEQ ID NO: 684283 - DNA, 75 bp, synthetic construct
  source 1..75: mol_type = other DNA
tttagtgacacagatatttcaaccaacattatttaagcatatggataatgtcaaaaatagaaagcaacatctaga

SEQ ID NO: 684284 - DNA, 75 bp, synthetic construct
  source 1..75: mol_type = other DNA
agcatatatccgggcggcacggaaagaaaaatccgtgccgtttttgatgccccggcagataacaccgggatgaac

SEQ ID NO: 684285 - DNA, 75 bp, synthetic construct
  source 1..75: mol_type = other DNA
tgattgtattagctctgcatgggatggaatgggctaccggatgagtattattcctgctgaggcattttttgctaa

SEQ ID NO: 684286 - DNA, 75 bp, synthetic construct
  source 1..75: mol_type = other DNA
taaggtatataaattcgcaaagagatcttgaaaaatacattaaaattgaaaagaagcatcttttaagattggcgc

SEQ ID NO: 684287 - DNA, 75 bp, synthetic construct
  source 1..75: mol_type = other DNA
aaaccgcactcatgcggtgatggggatggaagacgcgggtaaatccgtctggcggaactatccaaagcagccggg

SEQ ID NO: 684288 - DNA, 75 bp, synthetic construct
  source 1..75: mol_type = other DNA
cacgtggccgcgccggtggccgaaaaccgaagctagatgagcagcaggtgcgcgagatcaaagccctgttgcgcg

SEQ ID NO: 684289 - DNA, 75 bp, synthetic construct
  source 1..75: mol_type = other DNA
aatatacctacatcatcaacaccacctcaggtcgccgcgcaattgaagattcccgcgtgattcgtcgtagtgcgc

SEQ ID NO: 684290 - DNA, 75 bp, synthetic construct
  source 1..75: mol_type = other DNA
agaactggtgcgtctggaagagaaagtggcagaagtgggcatcactggcctgaacgctgacttcctgcgccagtt

SEQ ID NO: 684291 - DNA, 75 bp, synthetic construct
  source 1..75: mol_type = other DNA
ggcacggcgagtgacgaaggcggggtatatcgccctggcacctgacggcttaagttccgttggaggggtaatgct

SEQ ID NO: 684292 - DNA, 75 bp, synthetic construct
  source 1..75: mol_type = other DNA
gagcttactgacatctccgggaccaacctgattaacgtacgtgaccgcaagtatgatgatgaactactggcatgg

SEQ ID NO: 684293 - DNA, 75 bp, synthetic construct
  source 1..75: mol_type = other DNA
gacgccagaagaaagccatctgctgttctttcctttcgtatttggctctaacaccattcgcgatgcctcagcagg

SEQ ID NO: 684294 - DNA, 75 bp, synthetic construct
  source 1..75: mol_type = other DNA
gccgctgctcaattcctcccccgatcctgagagctggcttgcgcggcgaaaaggtttactgcgcggagaaaaaat

SEQ ID NO: 684295 - DNA, 75 bp, synthetic construct
  source 1..75: mol_type = other DNA
gccatctgaaatagcaaaagatgacccgaatatgatgtcaaagattgtgacgtcattaccggcagaaacagtgac

SEQ ID NO: 684296 - DNA, 75 bp, synthetic construct
  source 1..75: mol_type = other DNA
cagagctgaatcaggcaaatgaagatgttgccagaaatcaggagcgacaggctaaagctgttcaggtttataatt

SEQ ID NO: 684297 - DNA, 75 bp, synthetic construct
  source 1..75: mol_type = other DNA
ggtagtggtgttcactggggaggtggctccggtaatggcaatggaggggggaatggtaattccagtggtggaggc

SEQ ID NO: 684298 - DNA, 75 bp, synthetic construct
  source 1..75: mol_type = other DNA
tgggatgagtggcagaacaagctctgcaaaagtgcattttttcgccattaatgattttggcggctctattgaagg

SEQ ID NO: 684299 - DNA, 75 bp, synthetic construct
  source 1..75: mol_type = other DNA
aacgccgaacaaccaagagttccccgcgtcagcgaggataaaccggacgcactggatgcgatgatggatatcact

SEQ ID NO: 684300 - DNA, 75 bp, synthetic construct
  source 1..75: mol_type = other DNA
cctgatcgcattgctgataagttgcgtgataaagaatttaaaagttttgacgatttccggaagaaattctgggaa

SEQ ID NO: 684301 - DNA, 75 bp, synthetic construct
  source 1..75: mol_type = other DNA
ctcaatgccaccgtcacagcaacttgttatccggtttatgcttcttactggctgccgcgccgcagagatcagaaa

SEQ ID NO: 684302 - DNA, 75 bp, synthetic construct
  source 1..75: mol_type = other DNA
caatcgcgaagatgcagaaaatgaatcgggcttaccccaagacgttctggataagctcagtaccaggatagatct

SEQ ID NO: 684303 - DNA, 75 bp, synthetic construct
  source 1..75: mol_type = other DNA
gcgagggaattgtattaattgatgaagtggacatgcacctgcatccaacatggcagcgtacaatcatccagcgtc

SEQ ID NO: 684304 - DNA, 75 bp, synthetic construct
  source 1..75: mol_type = other DNA
cggcggataaactgcatgtgacagacattaccagaggtgcgacttacccggtactgatagacagcattgcggtgg

SEQ ID NO: 684305 - DNA, 75 bp, synthetic construct
  source 1..75: mol_type = other DNA
atgacgttacgacgcctcgtcggcaaatatatgtctaactcaacgacgtttgatgatcaggggtttgcctcaaat

SEQ ID NO: 684306 - DNA, 75 bp, synthetic construct
  source 1..75: mol_type = other DNA
atgctggatgtgtcgcaaagcgatagcgaagcagaattgcgcggtaaccggaaaattgccgccccttttcgcggc

SEQ ID NO: 684307 - DNA, 75 bp, synthetic construct
  source 1..75: mol_type = other DNA
ctggctgctgacacggttgttcaggcaggagaaaccgtgaatggcggaacactggtaaaccatgacaaccagttt

SEQ ID NO: 684308 - DNA, 75 bp, synthetic construct
  source 1..75: mol_type = other DNA
cgggtaaaggcgctgcgctcaataaaaaacagataccagctcccgcggcattgtttagttatagtcaccttgagg

SEQ ID NO: 684309 - DNA, 75 bp, synthetic construct
  source 1..75: mol_type = other DNA
tggtgacggaagaacgtgaacgcgatttctatcatcagccgccggaaatgcgcatcgctgttgattatggattga

SEQ ID NO: 684310 - DNA, 75 bp, synthetic construct
  source 1..75: mol_type = other DNA
aagatgtcaacgtcggcaatatgcatttctcggaagggaaaaagcaaatcagcagtaaagtttatgtcgatgacc

SEQ ID NO: 684311 - DNA, 75 bp, synthetic construct
  source 1..75: mol_type = other DNA
actggacgacgtgcaggctatcgcccgtaagctggccgcagccaactgctctgcagacggtaaagcaagctgcag

SEQ ID NO: 684312 - DNA, 75 bp, synthetic construct
  source 1..75: mol_type = other DNA
tggcatcaactacactgcgtggctgtatctggcctggcttcctggttacctggttacctgcaaacagcctataac

SEQ ID NO: 684313 - DNA, 75 bp, synthetic construct
  source 1..75: mol_type = other DNA
tttgccgttcaacttcaatatgtttctattaatggaattcgtaaggacgggcaaggaattacatatatcattgct

SEQ ID NO: 684314 - DNA, 75 bp, synthetic construct
  source 1..75: mol_type = other DNA
aattcatatcacgtcgccttcattagaaaaaatatatttactgctatcgataaactttacaaatctgccgatggt

SEQ ID NO: 684315 - DNA, 75 bp, synthetic construct
  source 1..75: mol_type = other DNA
tccattcaaagaaagaagtgcaattgaaacaaatacactaagcccagcaacacaaaaagaactcaattgttttga

SEQ ID NO: 684316 - DNA, 75 bp, synthetic construct
  source 1..75: mol_type = other DNA
caggcttcttcaaggcgaattaaagtattttaatatgaagtcagctagggggtggacagagttgctatctgatta

SEQ ID NO: 684317 - DNA, 75 bp, synthetic construct
  source 1..75: mol_type = other DNA
actagattgtcccattcagaatcttttaaaaaataaagctattgatatagaatattttattacatgggctaatga

SEQ ID NO: 684318 - DNA, 75 bp, synthetic construct
  source 1..75: mol_type = other DNA
gagggggccaaatcctccatcgtttccgccattatccagccggaactggtaagcacaaatatttcccgggagcca

SEQ ID NO: 684319 - DNA, 75 bp, synthetic construct
  source 1..75: mol_type = other DNA
gctagataaacctatgcaaaatttatataatgataaaagtatcgatatagaatatttctttacatgggctaatga

SEQ ID NO: 684320 - DNA, 75 bp, synthetic construct
  source 1..75: mol_type = other DNA
tcactaatctggggcggtttgaagaacttgaagttcatctggctccagtggaggagttcaagagcaatgtgaccg

SEQ ID NO: 684321 - DNA, 75 bp, synthetic construct
  source 1..75: mol_type = other DNA
cgtgaaatctgatataaatttcaagaagggttggtttaatggctatcgtgaaattttcaacaaaattgagttgga

SEQ ID NO: 684322 - DNA, 75 bp, synthetic construct
  source 1..75: mol_type = other DNA
atgttcagcggttgcgggatacagcaaaaaaagctggtcagtgcttatgaagattctctggaattgcctgcttca

SEQ ID NO: 684323 - DNA, 75 bp, synthetic construct
  source 1..75: mol_type = other DNA
atgaagtgtgcgaatacattaaagacagcatacttatgtcaatgaatgaagtgacgtttggcaaaaaatcccttt

SEQ ID NO: 684324 - DNA, 75 bp, synthetic construct
  source 1..75: mol_type = other DNA
aagatcattcaggtgtctggttggtgtttaacgttgatcattctggacggcagagtttagtgcctcctgtaactt

SEQ ID NO: 684325 - DNA, 75 bp, synthetic construct
  source 1..75: mol_type = other DNA
aaaaaagctgtatttgcgcatgaaaaaatacggtatcgataaaatggattttcgcgatgaaagaaaagataaaaa

SEQ ID NO: 684326 - DNA, 75 bp, synthetic construct
  source 1..75: mol_type = other DNA
gaaaatattcgaagctatcagaaatgttgaaatgctgtgctcttggttagagtctgagtattggtcggctcttga

SEQ ID NO: 684327 - DNA, 75 bp, synthetic construct
  source 1..75: mol_type = other DNA
gcgtcagttactccttgcttcacttttcacctgcgcaggcacattagccagcttttccgcctgtgccgatattgt

SEQ ID NO: 684328 - DNA, 75 bp, synthetic construct
  source 1..75: mol_type = other DNA
cagggagaaccggctgaagcaccggcgaaaatcacctggaaattaaacaacgctcagttacaggcaaataaccca

SEQ ID NO: 684329 - DNA, 75 bp, synthetic construct
  source 1..75: mol_type = other DNA
tctgagcaacagtgtcagtaccggaaaaataacttatcaggcgatcagcgacttcggcggcatgatcgacggctc

SEQ ID NO: 684330 - DNA, 75 bp, synthetic construct
  source 1..75: mol_type = other DNA
ctgagtcttggttgtccactttaaaaacgtatcaatcttcatctgtcaggaattttctcgaaaatggcgatgaag

SEQ ID NO: 684331 - DNA, 75 bp, synthetic construct
  source 1..75: mol_type = other DNA
ctgaaatcgcagcggcgaatgttccatcatcaaattgaacgtggcaatccgcgacggatatttaccgggatggct

SEQ ID NO: 684332 - DNA, 75 bp, synthetic construct
  source 1..75: mol_type = other DNA
gcgtggctgctgtctgagctggtggcatgggcgcgcagctgggcgcaggtgaaccacgggccggatactggcgat

SEQ ID NO: 684333 - DNA, 75 bp, synthetic construct
  source 1..75: mol_type = other DNA
ccattcatcattactccgccattattcaaacttgagccaggaaaaacaacatcttacgtatcgtaaatgtgaatc

SEQ ID NO: 684334 - DNA, 75 bp, synthetic construct
  source 1..75: mol_type = other DNA
ttttgaaaagaaacccagcagatttgaatttgaaattaaaatcaatggcaagaactatgcatatggattctcagc

SEQ ID NO: 684335 - DNA, 75 bp, synthetic construct
  source 1..75: mol_type = other DNA
caagagtttgattctactaaagaaaacacatgctcttgggcgttctttagtgatttttaaaaatcccgtatcacg

SEQ ID NO: 684336 - DNA, 75 bp, synthetic construct
  source 1..75: mol_type = other DNA
cggagtggttttatccattgctggataaactgatcgccattaacccggaattggcttttacaaaaacgcttttta

SEQ ID NO: 684337 - DNA, 75 bp, synthetic construct
  source 1..75: mol_type = other DNA
aaaactaaccccggagttaccagatccaacaacagcgccaaagggttacgataatacagcatttggcccgcgagc

SEQ ID NO: 684338 - DNA, 75 bp, synthetic construct
  source 1..75: mol_type = other DNA
gatgttggcggctgtgaagaattaaaaaaatatattgatagagttactgatgaagatcttcaaattattattgca

SEQ ID NO: 684339 - DNA, 75 bp, synthetic construct
  source 1..75: mol_type = other DNA
ttgacatttcaaatgcttagtgaactgtacagagtatcgccagaaaacgttttcattttcgatgaactttttcga

SEQ ID NO: 684340 - DNA, 75 bp, synthetic construct
  source 1..75: mol_type = other DNA
aaaaagcacagggttgatggcggctatccctttcctgttttggggctgccgggatgctggtcaacggttacgtta

SEQ ID NO: 684341 - DNA, 75 bp, synthetic construct
  source 1..75: mol_type = other DNA
atgtcccactctgtggacggtacttacattaaggcacacctgggcaaaatggtcaattctctattatgtaaaaaa

SEQ ID NO: 684342 - DNA, 75 bp, synthetic construct
  source 1..75: mol_type = other DNA
tatcatctgtcaattcatgaagtggcacagcgttgcggttttccggatagcgactatttttgtcgcgttttccgg

SEQ ID NO: 684343 - DNA, 75 bp, synthetic construct
  source 1..75: mol_type = other DNA
acatcagaagctaaagagatgctttcttctgcagagtgtgaaatttacctcaacacggattttgacttacatttt

SEQ ID NO: 684344 - DNA, 75 bp, synthetic construct
  source 1..75: mol_type = other DNA
atatggtgaaagcatccctggcgaatggagcctcacttaagaaacaactggaggctattgatgaaaaactgacac

SEQ ID NO: 684345 - DNA, 75 bp, synthetic construct
  source 1..75: mol_type = other DNA
tttagataacgaacaagtgtataaattcctgagtgccaaaaatagaacgtccagccatgttttataccatgttat

SEQ ID NO: 684346 - DNA, 75 bp, synthetic construct
  source 1..75: mol_type = other DNA
ccattacctgctgtatcattcggagtatctggcgcgatctgatgaagcgctctaagatgttatcactaataaata

SEQ ID NO: 684347 - DNA, 75 bp, synthetic construct
  source 1..75: mol_type = other DNA
aacagatggcgaacgtggccgaccggccttattttgagcgcgtggcggtgatggaccttcacacacgcccgaaac

SEQ ID NO: 684348 - DNA, 75 bp, synthetic construct
  source 1..75: mol_type = other DNA
gtgcactgagtgcggacctggcggtcgggaaaacatccaccggggacagtctgctgggcagtacgggaacgtacg

SEQ ID NO: 684349 - DNA, 72 bp, synthetic construct
  source 1..72: mol_type = other DNA
tccgcgcaaagccgccgtcgaagccgctattgcccgtgccaaagcgcgcaagctggaacagcaacagactaa

SEQ ID NO: 684350 - DNA, 75 bp, synthetic construct
  source 1..75: mol_type = other DNA
gtcagcagcgagtgaaagaaaaagtagatgctcgtgtggcccaggcccaggatgaacgcggtattatcatcgtct

SEQ ID NO: 684351 - DNA, 75 bp, synthetic construct
  source 1..75: mol_type = other DNA
gctgctgaatcgcctcgaagagcgtggtgttaacggtgcgatcacattaagcattcacgaagaggatgtccggct

SEQ ID NO: 684352 - DNA, 75 bp, synthetic construct
  source 1..75: mol_type = other DNA
gtaatcacaccattaccgtcgatctcagcgctccggcgatgggcattaatatcgattccctgcaagccgacactg

SEQ ID NO: 684353 - DNA, 75 bp, synthetic construct
  source 1..75: mol_type = other DNA
agcccggtggcggtgggcgcaacggcaaccacctacgccagccagtttagcctggcggtggactggaaccacgac

SEQ ID NO: 684354 - DNA, 75 bp, synthetic construct
  source 1..75: mol_type = other DNA
ggcgtgctgaaactggatgtgctgaaggatatccgtgatggcctgacggccgcactggctgacggcgggacgttc

SEQ ID NO: 684355 - DNA, 75 bp, synthetic construct
  source 1..75: mol_type = other DNA
tattgctgatggcggcacgctccgggactttgaacggcagataaccccaacgttgatccgtaagggctggcttgc

SEQ ID NO: 684356 - DNA, 75 bp, synthetic construct
  source 1..75: mol_type = other DNA
gtcgctgatgaacgccggtgccaccgtcactcctggtgatgtgttatctgaacgcgcgacgcagctgctggagct

SEQ ID NO: 684357 - DNA, 75 bp, synthetic construct
  source 1..75: mol_type = other DNA
agtgtggtgccggtgacggcctgaaactggttgaaaaggtgtttggtgttccccgtccgacgcggccgcaaaggt

SEQ ID NO: 684358 - DNA, 75 bp, synthetic construct
  source 1..75: mol_type = other DNA
acgacgtgaagcgcggtttgcgaaacggcgttgctccttacatacccgcggccttttgccgggatgccaggagcg

SEQ ID NO: 684359 - DNA, 75 bp, synthetic construct
  source 1..75: mol_type = other DNA
acgacgtgaagcgcggtttgcgaaacggcgttgctccttacatacccgcggccttttgcagggatgcccggagcg

SEQ ID NO: 684360 - DNA, 75 bp, synthetic construct
  source 1..75: mol_type = other DNA
acgacgtgaagcgcggtttgcgaaacggcgttgctccttacatacctgcggccttttgctgggatgccaggagcg

SEQ ID NO: 684361 - DNA, 75 bp, synthetic construct
  source 1..75: mol_type = other DNA
gccttttgcagggatgccaggagcgcaggccacggcgcgacagaggcggcgcgaccggaacggtcgctgcaagcc

SEQ ID NO: 684362 - DNA, 75 bp, synthetic construct
  source 1..75: mol_type = other DNA
acgacgtgaagcgcggtttgcgaaacggcgttgctccttacataccggcggccttttgcggggatgccaggagcg

SEQ ID NO: 684363 - DNA, 75 bp, synthetic construct
  source 1..75: mol_type = other DNA
acgacgtgaagcgcggtttgcgaaacggcgttgctccttacataccggcggccttttgcagggatgccgggagcg

SEQ ID NO: 684364 - DNA, 75 bp, synthetic construct
  source 1..75: mol_type = other DNA
tgataataaaaccaaagataaagatctcgacgcccgttacgcctatctggggctttctcatgctaaatatggcga

SEQ ID NO: 684365 - DNA, 75 bp, synthetic construct
  source 1..75: mol_type = other DNA
ccatagaaagagacaataaatctgacaatgactatacgagtttcgattccgttgcctcctatcaattcaccaaag

SEQ ID NO: 684366 - DNA, 75 bp, synthetic construct
  source 1..75: mol_type = other DNA
tccttctgcacagtctctggaaataaatcatggtgatctgttggatttgcccctatatttccagacacctgttat

SEQ ID NO: 684367 - DNA, 75 bp, synthetic construct
  source 1..75: mol_type = other DNA
acgacgtgaagcgcggtttgcgaaacggcgttgctccttacataccagcggccttttgcagggatgccaggagcg

SEQ ID NO: 684368 - DNA, 75 bp, synthetic construct
  source 1..75: mol_type = other DNA
ttttgtgggctgttcatttaccctggacagtcagtgcggcaggttgtggctgtgtcagcccccggcgacagggtc

SEQ ID NO: 684369 - DNA, 75 bp, synthetic construct
  source 1..75: mol_type = other DNA
ttttgtgggctgttcatttaccctggacagtcagtgcggcaggttgtggctgtttcagcccccggcgacaggggc

SEQ ID NO: 684370 - DNA, 75 bp, synthetic construct
  source 1..75: mol_type = other DNA
aggcaatgacacgcaactccgttgtgaactctttcctcaaaaaccatgattcactgtttgccagctccactgccg

SEQ ID NO: 684371 - DNA, 75 bp, synthetic construct
  source 1..75: mol_type = other DNA
atcagacctggcatgaatggaagcgggacgaacagcacaggcaacaacaacgacaccccggacactaccggggca

SEQ ID NO: 684372 - DNA, 75 bp, synthetic construct
  source 1..75: mol_type = other DNA
cccgtaaaaacaaaactaaaaaatataacgtcgatattcaaattaagtaaatgtcaaccgacggggactctcccc

SEQ ID NO: 684373 - DNA, 75 bp, synthetic construct
  source 1..75: mol_type = other DNA
aagtggccgggactgggaaatgaggtgacagcccgcctgctgaccgtgacgcgcaaaggaaaagtctgccatctg

SEQ ID NO: 684374 - DNA, 75 bp, synthetic construct
  source 1..75: mol_type = other DNA
gatccgctcagttttgccgaatggcgcagcctgttccgtaaccgcacaatgtggggaatgatgctcggattcagt

SEQ ID NO: 684375 - DNA, 75 bp, synthetic construct
  source 1..75: mol_type = other DNA
tgcttaaagatgaacccttgttgtcgccgaacaggattgggacggacggggccaacaccttcccgtcaacgatca

SEQ ID NO: 684376 - DNA, 75 bp, synthetic construct
  source 1..75: mol_type = other DNA
acctgtcaaagttgacgctcaccattaacataattctgaccgtgatgacatggttctatctaatcggaactgaca

SEQ ID NO: 684377 - DNA, 75 bp, synthetic construct
  source 1..75: mol_type = other DNA
ccgtgacggcgcgctgaagtcgtcaattgctaaatgggtgcttggtatgatgtcggagggaataaccgccaggtc

SEQ ID NO: 684378 - DNA, 75 bp, synthetic construct
  source 1..75: mol_type = other DNA
tcaccaggtggtgatcgtctccggggaaaccggttccggtaaaacgactcagctaccgaaaatctgtatggagtt

SEQ ID NO: 684379 - DNA, 75 bp, synthetic construct
  source 1..75: mol_type = other DNA
atgtcatttctgttacccatccaattgttcaaaattcttgctgatgaaacccgtctgggcatcgttttactgctt

SEQ ID NO: 684380 - DNA, 75 bp, synthetic construct
  source 1..75: mol_type = other DNA
aattccgccactatgggcgctctgttatttggaggcgctacggctgctgctggcgtgatggctgttagtaaagcg

SEQ ID NO: 684381 - DNA, 75 bp, synthetic construct
  source 1..75: mol_type = other DNA
aagtaagtaaggctgccattgtttacagggctcatcaattaggacttttgactgatgagcagtacagaactgcat

SEQ ID NO: 684382 - DNA, 75 bp, synthetic construct
  source 1..75: mol_type = other DNA
gatatgtggttaaacgctatccccgcttttcagaaacatttattgtcaatgaaattctcgctcatgaacgagccg

SEQ ID NO: 684383 - DNA, 75 bp, synthetic construct
  source 1..75: mol_type = other DNA
catgttggggtcatggcgggatatggcaacagcgacagcaaaaccatttcctcgcgaaccggttatcgtgcaaaa

SEQ ID NO: 684384 - DNA, 75 bp, synthetic construct
  source 1..75: mol_type = other DNA
tcgctgttatgggcgctaccgctggcgctaatgctattgccgcactcaccaaaacgggcgcaatccgtaccagcg

SEQ ID NO: 684385 - DNA, 75 bp, synthetic construct
  source 1..75: mol_type = other DNA
tcgtgaccgggaaatggatatgcgtttttttatctggcgaaaagctggcagaaaagctgagcattaacgtatctg

SEQ ID NO: 684386 - DNA, 75 bp, synthetic construct
  source 1..75: mol_type = other DNA
ccggatgaatatgatgatctcatatcaggaacttgttcgcaccttccttatctcgaccgcagttcgctgtcggta

SEQ ID NO: 684387 - DNA, 75 bp, synthetic construct
  source 1..75: mol_type = other DNA
ggctgcattctggcttggtgatggtgcgataggtgcatacagcccttccggtaaagtcagaatactgggaaatcc

SEQ ID NO: 684388 - DNA, 75 bp, synthetic construct
  source 1..75: mol_type = other DNA
gtgtggctgacgcacgacccggcatacccggagagcctgcccgctgcgccactggtgcggtacacgtatacggaa

SEQ ID NO: 684389 - DNA, 75 bp, synthetic construct
  source 1..75: mol_type = other DNA
attcctaacaattgagttgagttcactcattgatatctatgcactttcatttaatctatggtcacccccgttttt

SEQ ID NO: 684390 - DNA, 75 bp, synthetic construct
  source 1..75: mol_type = other DNA
atcgacgacgagttagatgtttccggttgggagtggcgtaaggcgctgggattattgaaaggcgcgaatccgacg

SEQ ID NO: 684391 - DNA, 75 bp, synthetic construct
  source 1..75: mol_type = other DNA
agcgcgcaggagaagcggaatatggtccgcgccgtccattgttacatgcgtttattcgtgcggaactggcgcgtg

SEQ ID NO: 684392 - DNA, 75 bp, synthetic construct
  source 1..75: mol_type = other DNA
cacggtaataacggtcaactagtaatgaatacggtactgaatggcgatgactcagtaaccgataaattggttgtc

SEQ ID NO: 684393 - DNA, 75 bp, synthetic construct
  source 1..75: mol_type = other DNA
tcattactggttttattgttgataccacccactcattccgtctggcactaatcatctgcggttgcgtcaccgcag

SEQ ID NO: 684394 - DNA, 75 bp, synthetic construct
  source 1..75: mol_type = other DNA
attgaaaattgtgcgccaggctgtactttcgtgtttaatcaatctttacgtaaattatacttggacataaatgaa

SEQ ID NO: 684395 - DNA, 75 bp, synthetic construct
  source 1..75: mol_type = other DNA
gactcttttaaagaaaggcttgagtctaccatggcggcactcactttctttatatcaacgggtcaatgtgactgc

SEQ ID NO: 684396 - DNA, 75 bp, synthetic construct
  source 1..75: mol_type = other DNA
actgtctgcacatgctgtggacgctggcagtgtcgcgcagcgcaaaatttcagatacacaccccacgcagcaccg

SEQ ID NO: 684397 - DNA, 75 bp, synthetic construct
  source 1..75: mol_type = other DNA
aagagtttcagagaagcttacaggagtacatcgccaacctccgccagaccattgaggctgaatgtctggggtttg

SEQ ID NO: 684398 - DNA, 75 bp, synthetic construct
  source 1..75: mol_type = other DNA
atatagtgaaacggatggtcgctttctggcgagtgggggcaataacattgagcatgctaatatgatgattgaata

SEQ ID NO: 684399 - DNA, 75 bp, synthetic construct
  source 1..75: mol_type = other DNA
ggaagtgaaccgcaaatatggcgcgccggttgtcatttccaacagtgacaccgaaaccacccgcgagatttacca

SEQ ID NO: 684400 - DNA, 75 bp, synthetic construct
  source 1..75: mol_type = other DNA
gcaactgcccggactgcgggccgtgctgtggtgatgccacttacaacgcgatggttgcagcgggcgcttttgatg

SEQ ID NO: 684401 - DNA, 75 bp, synthetic construct
  source 1..75: mol_type = other DNA
gcctgatacggctgcacccttcccagaccacacttatcgaccagctccggcatttccccaaagctgaccatgatg

SEQ ID NO: 684402 - DNA, 75 bp, synthetic construct
  source 1..75: mol_type = other DNA
ctatgaatttaagccgaataaaaaagaagttgtttttattggtaatatgttatcggcacaaaactttgatgcagc

SEQ ID NO: 684403 - DNA, 75 bp, synthetic construct
  source 1..75: mol_type = other DNA
tctcgttgccgatttaccggaggactttgttcaagcgatccttcgattagaaaatgacgtgaattatgctgaaaa

SEQ ID NO: 684404 - DNA, 75 bp, synthetic construct
  source 1..75: mol_type = other DNA
gcgctgtgctggatcctgatgcctgaaacgttaagagggctgtggaagcagcgcctgcgctgggcgcaaggcggg

SEQ ID NO: 684405 - DNA, 75 bp, synthetic construct
  source 1..75: mol_type = other DNA
actgcctgaatctccccgctggttattacgcaaagggcgagtaaaagagtgcgaagagatgatgataaaactgtt

SEQ ID NO: 684406 - DNA, 75 bp, synthetic construct
  source 1..75: mol_type = other DNA
aggaatattaaagacgtaaagctttcttctttatttattaaccgccttattatatctagctgctatggagttaac

SEQ ID NO: 684407 - DNA, 75 bp, synthetic construct
  source 1..75: mol_type = other DNA
aataaaataaatttaagcgtagagtttcaaaaaaacttaattattgaaccaactagattatcgttgcttagacaa

SEQ ID NO: 684408 - DNA, 75 bp, synthetic construct
  source 1..75: mol_type = other DNA
atggaaaagacgggatcaatcaaaaaggtactgggtaaaagaatcagggctctacgccgtgagatggacctatcc

SEQ ID NO: 684409 - DNA, 75 bp, synthetic construct
  source 1..75: mol_type = other DNA
aatgaggttatttactctttaattaaacttattccagaaatgggtgatgtagacctagacacggaatcattacct

SEQ ID NO: 684410 - DNA, 75 bp, synthetic construct
  source 1..75: mol_type = other DNA
cagagttgaaaccgccaccggtgagctggcgaaaacgcagcgccgcagcctggcggatgcgcttcagcagtccgg

SEQ ID NO: 684411 - DNA, 75 bp, synthetic construct
  source 1..75: mol_type = other DNA
ttatatggcgctgctgaagtgggagccgcgcatcagcatcagctcgctgacggtagaacgtcagtttaacggtca

SEQ ID NO: 684412 - DNA, 75 bp, synthetic construct
  source 1..75: mol_type = other DNA
actctaagccagttatcggacgtttggaagtcagcgctggtaatgggaaagtcatagggcggcaatccagcgacg

SEQ ID NO: 684413 - DNA, 75 bp, synthetic construct
  source 1..75: mol_type = other DNA
ttattcctcttgagttatttcttcatacgttggaattcccggaaggaataaacgagttctggcaggtgttgagtg

SEQ ID NO: 684414 - DNA, 75 bp, synthetic construct
  source 1..75: mol_type = other DNA
gcgaaggatttcgtgacgaacagtggatttctgcactggcggccccgctgctgggcgatctgttgcgcgaagtgg

SEQ ID NO: 684415 - DNA, 75 bp, synthetic construct
  source 1..75: mol_type = other DNA
gaaggtcagcgtacagatacgcgacagtctgaccggggcgttccatgtggacagcctcgacatgtaccatgcccg

SEQ ID NO: 684416 - DNA, 75 bp, synthetic construct
  source 1..75: mol_type = other DNA
gcttgacgtaatgaaagaggcccacaccgatccgcagcgagaacatatagccagacggcgggaaatatgccttgc

SEQ ID NO: 684417 - DNA, 75 bp, synthetic construct
  source 1..75: mol_type = other DNA
ttagctgccgctctgctggatattaaccgccttactggttcgccggtgatcctgtccaatagcgacaccccagcc

SEQ ID NO: 684418 - DNA, 75 bp, synthetic construct
  source 1..75: mol_type = other DNA
gtgattggcggcaatatcgcgctccgggctggaaaacaacccatcaaaaacgttattgccagacattgcgaactc

SEQ ID NO: 684419 - DNA, 75 bp, synthetic construct
  source 1..75: mol_type = other DNA
atggttaaatttctaggtgaagttatgagttcatccgctactgtaaccgtcataactggtgttctcggtgtttct

SEQ ID NO: 684420 - DNA, 75 bp, synthetic construct
  source 1..75: mol_type = other DNA
gcgagctgctgttcaacgttgatgaagtagaaaaaacagactgtttgcggttcaatccggctatgccctactacg

SEQ ID NO: 684421 - DNA, 75 bp, synthetic construct
  source 1..75: mol_type = other DNA
tgccttttcacctgaaaagctgcatccgtcattgatggcaatcaagcattccgaattcatcgcaataacggagga

SEQ ID NO: 684422 - DNA, 75 bp, synthetic construct
  source 1..75: mol_type = other DNA
gggcaagcctgccagtggtcgggccgtattctctcaggaacaggacggcattaaatcgcaaacccacagcgccag

SEQ ID NO: 684423 - DNA, 75 bp, synthetic construct
  source 1..75: mol_type = other DNA
gggcaaccctgccagtggtcgggccgtattgtctcaggaacaggacggcattaaatcgcaaacccacagcgccag

SEQ ID NO: 684424 - DNA, 75 bp, synthetic construct
  source 1..75: mol_type = other DNA
gggcaatcctgccagtggtcgggccgtattatctcaggaacaggacggcattaaatcgcatacccacagcgccag

SEQ ID NO: 684425 - DNA, 75 bp, synthetic construct
  source 1..75: mol_type = other DNA
gtattttctcaggaacaggacggcattaaatcgcatacccacagcgccagcgcatccagtacggatttggggacg

SEQ ID NO: 684426 - DNA, 75 bp, synthetic construct
  source 1..75: mol_type = other DNA
gtattttctcaggaacaggacggcattaaatcgcaaacccacagcgccagcgcatccagtactgatttggggacg

SEQ ID NO: 684427 - DNA, 75 bp, synthetic construct
  source 1..75: mol_type = other DNA
gtattatctcaggaacaggacggcattaaatcgcacacccacagcgccagcgcatccagtacagatttggggacg

SEQ ID NO: 684428 - DNA, 75 bp, synthetic construct
  source 1..75: mol_type = other DNA
ataatggaactgtttatgcagattataaatcatttttaccttcgctattaactgcatatggcggatattgttctt

SEQ ID NO: 684429 - DNA, 75 bp, synthetic construct
  source 1..75: mol_type = other DNA
cctggctggtggaacgtcgcggcgctacggtaacgcagttccgcgctcgctcgaacggtggtgttgagccggtga

SEQ ID NO: 684430 - DNA, 75 bp, synthetic construct
  source 1..75: mol_type = other DNA
gaggcgccgaccatttctaacttatctgatcataaggaaagtcatgtttcgttaatgctaaaggaaatgtttgga

SEQ ID NO: 684431 - DNA, 75 bp, synthetic construct
  source 1..75: mol_type = other DNA
gggcaaacctgccagtggtcgggccgtattttctcaggaacaggacggcattaaatcgcatacccacagcgccag

SEQ ID NO: 684432 - DNA, 75 bp, synthetic construct
  source 1..75: mol_type = other DNA
ccaatcccgtggccatcagataccgttccgtctggttatgccctgatgcaggggcagacttttgacaaatctgca

SEQ ID NO: 684433 - DNA, 75 bp, synthetic construct
  source 1..75: mol_type = other DNA
agcattaattgtaattatctatagtagattggataacatctatttaaaactttacgatgagcaaagccttgctgt

SEQ ID NO: 684434 - DNA, 75 bp, synthetic construct
  source 1..75: mol_type = other DNA
gtattctctcaggaacaggacggcattaaatcgcagacccacagcgccagcgcatccagtaccgatttggggacg

SEQ ID NO: 684435 - DNA, 75 bp, synthetic construct
  source 1..75: mol_type = other DNA
caccgaatgcgccctgcaactggctgctgccgccctgcgggctgctggtgaacacaccctggcagaaaatctact

SEQ ID NO: 684436 - DNA, 75 bp, synthetic construct
  source 1..75: mol_type = other DNA
atgagcgctgattcatcaatagaaaaggaaaactcctctacccaaaatctgttagaagatgctgtaaaagataag

SEQ ID NO: 684437 - DNA, 75 bp, synthetic construct
  source 1..75: mol_type = other DNA
gacgccacacagactacagcattcgccaaccaggcttctaccgatgcagcgactaatgtcgctctacaaatgtat

SEQ ID NO: 684438 - DNA, 75 bp, synthetic construct
  source 1..75: mol_type = other DNA
tcttgggctttttctttctttcgtcctggcaggtaccaacccagtattactgagccctatattctttatattatt

SEQ ID NO: 684439 - DNA, 75 bp, synthetic construct
  source 1..75: mol_type = other DNA
tattgcgtgccagcttcagaaaatggggatgacgccggagcagattaagcaggctaccggactttccgatgacga

SEQ ID NO: 684440 - DNA, 75 bp, synthetic construct
  source 1..75: mol_type = other DNA
tacgctggcgtatgtgttgattaacgcttttatcatgctggtgatgacgctggttgaacgtaaagttcgcctgcc

SEQ ID NO: 684441 - DNA, 75 bp, synthetic construct
  source 1..75: mol_type = other DNA
atatgaaggtggccctgcaaatatccctgaggcaattgcatcaggcacgccaataatatcaacacctgttggaat

SEQ ID NO: 684442 - DNA, 75 bp, synthetic construct
  source 1..75: mol_type = other DNA
tgtcatctaatattacaagtggaatctttacggatcttctttcttattataaaaaatattgtgacaaagagatat

SEQ ID NO: 684443 - DNA, 75 bp, synthetic construct
  source 1..75: mol_type = other DNA
gatagaacaataacggcatataaagcatcacagtttggttttgaagtaaaatgttatgaaagacttccatattat

SEQ ID NO: 684444 - DNA, 75 bp, synthetic construct
  source 1..75: mol_type = other DNA
gatgacctcaacccggataagccccgcatacttgaactgggtgatggctggctgagccttgtgccggtaaaggag

SEQ ID NO: 684445 - DNA, 75 bp, synthetic construct
  source 1..75: mol_type = other DNA
attaccagatgctgctgcgccgggccgataccgtacttaaggacgacgtgctggcctcaaaagaactgctggtga

SEQ ID NO: 684446 - DNA, 75 bp, synthetic construct
  source 1..75: mol_type = other DNA
tcatcgtcagcctgattatcctgatgttctacgctcgcaaaatgcacgagcgccagagccactcaatggataacc

SEQ ID NO: 684447 - DNA, 75 bp, synthetic construct
  source 1..75: mol_type = other DNA
cgcagattcacaggcgaacagagtgcgtatcagcgagaaaacagaagtcacctccagcacagtcgttttcccctc

SEQ ID NO: 684448 - DNA, 75 bp, synthetic construct
  source 1..75: mol_type = other DNA
gcagcctgtgtcactgctgtcacttacggcttccttcaggttcatgatggcagccagtgggttacggtggaacat

SEQ ID NO: 684449 - DNA, 75 bp, synthetic construct
  source 1..75: mol_type = other DNA
gaggcgatgcaggtccggctggtccacagggcgttaccggccccagaggaccacagggggaaaaaggggataaag

SEQ ID NO: 684450 - DNA, 75 bp, synthetic construct
  source 1..75: mol_type = other DNA
gtattcctcaagcatacttgggagggggtgctaaattaatttcttctcctgagacatggaactacggagttcctg

SEQ ID NO: 684451 - DNA, 75 bp, synthetic construct
  source 1..75: mol_type = other DNA
tgattttgtgtcccggacggagcaggcccgttatgtgtgggaaaatcgtctgaaaaaccggatgagcctgagtct

SEQ ID NO: 684452 - DNA, 75 bp, synthetic construct
  source 1..75: mol_type = other DNA
cgttcgcccagcttagtttgtatctgtgtcacattctcacattaaggattaccctaccctgctaccgtctaatca

SEQ ID NO: 684453 - DNA, 75 bp, synthetic construct
  source 1..75: mol_type = other DNA
cccgtgaaatatgccgatctcatcatgctggcaaccgaacgccgcgatctcgggcttgatgatggctctttctgg

SEQ ID NO: 684454 - DNA, 75 bp, synthetic construct
  source 1..75: mol_type = other DNA
tctttgtgataattctgtttatatatcggatggaggggctgtttttggtcgaggggtaaagggattcacctttaa

SEQ ID NO: 684455 - DNA, 75 bp, synthetic construct
  source 1..75: mol_type = other DNA
ttcacggcggtgataattgcttattgcaaaaccaatgtttcgatgtggctcccggcgagatattaaccttgatgg

SEQ ID NO: 684456 - DNA, 75 bp, synthetic construct
  source 1..75: mol_type = other DNA
aaggacaatatataacagaagacttttttgaacctgtggcacaattgattcgtattgcgatagaccttgattatt

SEQ ID NO: 684457 - DNA, 75 bp, synthetic construct
  source 1..75: mol_type = other DNA
tgatatattttggtacggaggcatttataaaagaatataacttaaatgttatttatcgcgcaggcatgaatgttg

SEQ ID NO: 684458 - DNA, 75 bp, synthetic construct
  source 1..75: mol_type = other DNA
tggacttccggatgataccgtgttagctgaaacatcaaaagttgctgtgcctgcaaaaggagctgttgttgtatt

SEQ ID NO: 684459 - DNA, 75 bp, synthetic construct
  source 1..75: mol_type = other DNA
tgcaattagctttccgtacgcgtatcaaactgttttatcgcccggaaggtttaaacggactgccaactgatgcac

SEQ ID NO: 684460 - DNA, 75 bp, synthetic construct
  source 1..75: mol_type = other DNA
tttcccgcgttgatggtaaaaaaggccaaacggttaaaattgcgtggaacgccagccagacccttccagccgatc

SEQ ID NO: 684461 - DNA, 75 bp, synthetic construct
  source 1..75: mol_type = other DNA
agacgtcacattgcgcatggaaaacaaaggtgcccgtccactattagttcagacctggattgataccggcagcga

SEQ ID NO: 684462 - DNA, 75 bp, synthetic construct
  source 1..75: mol_type = other DNA
tgccgatcccagtcagataaaagtaccttttgcttctacgccgcccgtttcgcgtatagagccaaaacgcgggca

SEQ ID NO: 684463 - DNA, 75 bp, synthetic construct
  source 1..75: mol_type = other DNA
ttagcgcattatttatcagtgcacttttaaccagcgctccggtgttcgctgatattgtcatttccggtacacgta

SEQ ID NO: 684464 - DNA, 75 bp, synthetic construct
  source 1..75: mol_type = other DNA
aaggaaaatcgctggggcattcgcggcgctctggtttttggcggcgggacgctggctttccataccttgcttttt

SEQ ID NO: 684465 - DNA, 75 bp, synthetic construct
  source 1..75: mol_type = other DNA
cgctattttcagctcgaattatacgctctacgcttcaatgtcggcccggttcgcggcagtggttgagtcccttgc

SEQ ID NO: 684466 - DNA, 75 bp, synthetic construct
  source 1..75: mol_type = other DNA
ttgaggctgctctcaacgctgaactgactcaccatctgggacatgaaaaaaatcagcccaaatcgggaaccaatt

SEQ ID NO: 684467 - DNA, 75 bp, synthetic construct
  source 1..75: mol_type = other DNA
tggtgagcataaccaggttcgggaaaatatcgttattgccgataagtttacccggctggataaatttattcgggt

SEQ ID NO: 684468 - DNA, 75 bp, synthetic construct
  source 1..75: mol_type = other DNA
tacctcccctggcggcgctaaattacactattcagctattagtgattacggcagtgaaataaaaggcgaagcaaa

SEQ ID NO: 684469 - DNA, 75 bp, synthetic construct
  source 1..75: mol_type = other DNA
aaaggcgagatgacttataaacaggccggctgcagttatggcattcaggggcgctccaccgttcttgtctggttg

SEQ ID NO: 684470 - DNA, 75 bp, synthetic construct
  source 1..75: mol_type = other DNA
tcgactcggctacgccttcagctggcagcgaagcgttaatggccgttctcgatggcattaaccggcgcggcaaga

SEQ ID NO: 684471 - DNA, 75 bp, synthetic construct
  source 1..75: mol_type = other DNA
tcgctcacaaggctcggggcgatgttttctggtaaagagtaccagatactgcttcctggtgaaattcacattaaa

SEQ ID NO: 684472 - DNA, 75 bp, synthetic construct
  source 1..75: mol_type = other DNA
agtgattaaccgaccacctgatattccgagcagaccagatctaaacatagaaatacccatatcgtcgaatgatat

SEQ ID NO: 684473 - DNA, 75 bp, synthetic construct
  source 1..75: mol_type = other DNA
gttagctgaaagcactgataacgctacaataatgttaaacacgatggggataaaggctggaagcgcggcagcaaa

SEQ ID NO: 684474 - DNA, 75 bp, synthetic construct
  source 1..75: mol_type = other DNA
tgtaatcccgatgatgatacggtttgtactgccaactggaaaccagttgctgtagatcctgcattctccgatgat

SEQ ID NO: 684475 - DNA, 75 bp, synthetic construct
  source 1..75: mol_type = other DNA
caggcacccggatcagcactctggaaaatcaggtaagcgaactggttgcacttgtccggcagttaacaggaagcg

SEQ ID NO: 684476 - DNA, 75 bp, synthetic construct
  source 1..75: mol_type = other DNA
attgcacaacgctgaatcagtcatcagaccgcgaccttaaagacgatattctcgttatcagcgacgcgacgaaag

SEQ ID NO: 684477 - DNA, 75 bp, synthetic construct
  source 1..75: mol_type = other DNA
tgtatcaaatgcagatttgagagacacaattggattagatcaaaaaatgttagacaaaacatgcttttcacctaa

SEQ ID NO: 684478 - DNA, 75 bp, synthetic construct
  source 1..75: mol_type = other DNA
gccattttgcaaaagcttatgacgattatgttcgttctgttcttgaatatgctatttatatgataaccatgttac

SEQ ID NO: 684479 - DNA, 75 bp, synthetic construct
  source 1..75: mol_type = other DNA
agtatgaaggcaatggcatacatcatgggccacttcgcataacggcacaaacagggcagatcgtacagatctggg

SEQ ID NO: 684480 - DNA, 75 bp, synthetic construct
  source 1..75: mol_type = other DNA
acagtggtgattttgcgctgtatatcagcgcgcagggcggggcaaatgtcccgcgcgattgtcagactgtcaggg

SEQ ID NO: 684481 - DNA, 75 bp, synthetic construct
  source 1..75: mol_type = other DNA
gcctgttctggaatattttatttatgcacttactgtttttcgtctttattttgtttaccgtcgcgccctgatgcg

SEQ ID NO: 684482 - DNA, 75 bp, synthetic construct
  source 1..75: mol_type = other DNA
ccatgcccggtggtccgcatataaagtctgggatttagagaagcgagagtgggaaacctgcactcttgattttca

SEQ ID NO: 684483 - DNA, 75 bp, synthetic construct
  source 1..75: mol_type = other DNA
gctcatccggcgataacaatggctggcttgatggtgttttgggctggttacagcgtatttgggtttcagtgaatg

SEQ ID NO: 684484 - DNA, 75 bp, synthetic construct
  source 1..75: mol_type = other DNA
cggggagtgttattcgcagttcgattcccgaaaattccatatataaggatgggcgagttgttaatattatgaaaa

SEQ ID NO: 684485 - DNA, 75 bp, synthetic construct
  source 1..75: mol_type = other DNA
ttttcacgcagttcttcgcgtgggtagcagctctggcgtcagccattggttttaccactcaggatatggtgttca

SEQ ID NO: 684486 - DNA, 75 bp, synthetic construct
  source 1..75: mol_type = other DNA
tctgggcattgggcgttttaccgctgatgagcaggagcaatccgatgcgatccggtatgagacgctgcgttcgtc

SEQ ID NO: 684487 - DNA, 75 bp, synthetic construct
  source 1..75: mol_type = other DNA
acctgctgagcctggcaacgccacaccatcatttttagttaccgataatcagggcgatcagcgcggcattctcgc

SEQ ID NO: 684488 - DNA, 75 bp, synthetic construct
  source 1..75: mol_type = other DNA
atgatcttgctacaactctcctcagcgcaggggccggaagaatgttgtctcgcagtgaaaaaggcactggacagg

SEQ ID NO: 684489 - DNA, 75 bp, synthetic construct
  source 1..75: mol_type = other DNA
gtttttattatggttgtcatcattgcaattgctgcaatgcaagaagcgggtgggattgactatctggttggttta

SEQ ID NO: 684490 - DNA, 75 bp, synthetic construct
  source 1..75: mol_type = other DNA
attcacttggctcatgttccgtcaatgccggagagacaattgaagttgatttaggtgatgtcttcgctgccaatt

SEQ ID NO: 684491 - DNA, 75 bp, synthetic construct
  source 1..75: mol_type = other DNA
taaagcgaataaatatccttcagattttgtggaattatttcactctccttctgtactgctgcctgttttttacaa

SEQ ID NO: 684492 - DNA, 75 bp, synthetic construct
  source 1..75: mol_type = other DNA
tagcaaaacagaagcttaaaaacagtaaagatccggtagagcgcgaaaaggcacagcagaaatatgatgcattgc

SEQ ID NO: 684493 - DNA, 75 bp, synthetic construct
  source 1..75: mol_type = other DNA
tacttttgaaagtttttttgggtagtaaaattcaatttcctgagttttaccgatcatgtatcgattcaggttcta

SEQ ID NO: 684494 - DNA, 75 bp, synthetic construct
  source 1..75: mol_type = other DNA
agacagcaacggcaatactattgccagtgctcaggtagacagcaacgggcactggagcgtctctttacccacgca

SEQ ID NO: 684495 - DNA, 75 bp, synthetic construct
  source 1..75: mol_type = other DNA
ttcgaagctccaggagcatgcagcactggtctacaaaatcttctgctctccagaaaagagtaacgcccgcgagtg

SEQ ID NO: 684496 - DNA, 75 bp, synthetic construct
  source 1..75: mol_type = other DNA
tagctttacttggagtcggtttggttatatctctgtttttttcaaaaatgaggtgtttttatttccaatcaatca

SEQ ID NO: 684497 - DNA, 75 bp, synthetic construct
  source 1..75: mol_type = other DNA
gccgattccgccattcagcgggaagccgatcgggtagtcccggaaaacaccgggcagcctgtgagacgagtggat

SEQ ID NO: 684498 - DNA, 75 bp, synthetic construct
  source 1..75: mol_type = other DNA
ccgatatgccctttgcgctgctgcttctcgcgcccagcttattactgctgggcggtctggtggcgtggccgatgg

SEQ ID NO: 684499 - DNA, 75 bp, synthetic construct
  source 1..75: mol_type = other DNA
gggtattgagtttaacccgatggaatcgaatctctactataagagaagctgaagaagttttagactttatatgcc

SEQ ID NO: 684500 - DNA, 75 bp, synthetic construct
  source 1..75: mol_type = other DNA
gtttaaatactctgtaatggcattgacaagtatattaacagtgccattaacaaattttattcttcgcaattatat

SEQ ID NO: 684501 - DNA, 75 bp, synthetic construct
  source 1..75: mol_type = other DNA
tatgagttgcattttacggcgcaatacgcaaaagcagctgatgatgtgggtactggcgaagttagttctgcgata

SEQ ID NO: 684502 - DNA, 75 bp, synthetic construct
  source 1..75: mol_type = other DNA
ttttgatgaggagcaggaaaaacctatttatctggaaaaattgctggatggggttgaggttgagtggaaaaccct

SEQ ID NO: 684503 - DNA, 75 bp, synthetic construct
  source 1..75: mol_type = other DNA
acgcctgcctaccagccggtgttgaatgccaaagttggtggatattttaataacctgcgggcggcaaatcaggcg

SEQ ID NO: 684504 - DNA, 75 bp, synthetic construct
  source 1..75: mol_type = other DNA
gattattattatctgactggcaataaaccgaatgccaccgtaatggtcgatgttgatcgtcagggctttgttgat

SEQ ID NO: 684505 - DNA, 75 bp, synthetic construct
  source 1..75: mol_type = other DNA
caaaatcgcccgtatcgtgattatgggcggcgcaatggggcttggtaactggacgccagccgccgagtttaatat

SEQ ID NO: 684506 - DNA, 75 bp, synthetic construct
  source 1..75: mol_type = other DNA
tgcgccgcgctgcgggagctgaacaagcaccgggatattgtacgacagattactgattcttcccgccatgttgca

SEQ ID NO: 684507 - DNA, 75 bp, synthetic construct
  source 1..75: mol_type = other DNA
cgccaaccctcatacatcagtgaacatcgacgcaaccagtgctcagctgcttactggtgaaatcggcattcacac

SEQ ID NO: 684508 - DNA, 75 bp, synthetic construct
  source 1..75: mol_type = other DNA
gaacaactggcacaggcactggctgaacagccgggaatgaccgttgaccaggcaaaaacgttactggcggcggca

SEQ ID NO: 684509 - DNA, 75 bp, synthetic construct
  source 1..75: mol_type = other DNA
accaagaattaccttctccagcacccaatttgaaggaacgggttcaaatattactcgcaatactggtaatgctag

SEQ ID NO: 684510 - DNA, 75 bp, synthetic construct
  source 1..75: mol_type = other DNA
ggtttgtcgttccctccttcacgatcaatgtttgaccaaaagtgagcagctgacaaatatgttcctgagcttcga

SEQ ID NO: 684511 - DNA, 75 bp, synthetic construct
  source 1..75: mol_type = other DNA
atgcggcgtggcagcattcctgctctggtgaataacaaattacgaagtcttgaaaaacgcttctctacgcggctg

SEQ ID NO: 684512 - DNA, 75 bp, synthetic construct
  source 1..75: mol_type = other DNA
tcagggtcgaaaccgccaccggtgagctggcgaaaacgcagcgccgcagcctggcggatgcgcttcagcagtccg

SEQ ID NO: 684513 - DNA, 75 bp, synthetic construct
  source 1..75: mol_type = other DNA
ggacaacctatcatctcgaagagttgtctaatttttacaaaggaagagcatgcttctttattttaaagcctaatg

SEQ ID NO: 684514 - DNA, 75 bp, synthetic construct
  source 1..75: mol_type = other DNA
caccgggctggaggagctttatgtgagaagaaacttgctggacagcctgccggtcctgcccgccgggctgaagaa

SEQ ID NO: 684515 - DNA, 75 bp, synthetic construct
  source 1..75: mol_type = other DNA
gctgcccgccgggctggagaagcttgatgtgagtggaaaccagctgtgcagcctgccggtcctgcccgccgggct

SEQ ID NO: 684516 - DNA, 75 bp, synthetic construct
  source 1..75: mol_type = other DNA
cggccattgaccttcacgtaggtttcatccatgtgccacgggcaaagatcggaagggttacgccagtaccagcgc

SEQ ID NO: 684517 - DNA, 75 bp, synthetic construct
  source 1..75: mol_type = other DNA
ggtaaaacgtgaagtggagcgtcgtgtgaaggagcgcatgattctgtcacgtaaccgcaattacagccggctggc

SEQ ID NO: 684518 - DNA, 75 bp, synthetic construct
  source 1..75: mol_type = other DNA
tcaaatacaacatctttaccattaaaagttaaatgtgaagttggtgctgaaccaagaattactttctccagtacc

SEQ ID NO: 684519 - DNA, 75 bp, synthetic construct
  source 1..75: mol_type = other DNA
gtgaacaccagacggtgcatcacccgcagacgaaagaactgctctggcagcatgagaccagacatgcgtacaacg

SEQ ID NO: 684520 - DNA, 75 bp, synthetic construct
  source 1..75: mol_type = other DNA
acactgatactcagtgataacggcggcagaagcctgtattttgagcacctgtttcccggtgaggacggttactga

SEQ ID NO: 684521 - DNA, 75 bp, synthetic construct
  source 1..75: mol_type = other DNA
caaaaggggatgataagtttatcaccaccgactatttgcaacagtgcccaaatcggacgtacgcgttgtcatgaa

SEQ ID NO: 684522 - DNA, 75 bp, synthetic construct
  source 1..75: mol_type = other DNA
cgtatgctgaccttgcttaatcgcaccgatattccggtggcaggcggcgcggtaaaaccgttaatgcgtgagttg

SEQ ID NO: 684523 - DNA, 75 bp, synthetic construct
  source 1..75: mol_type = other DNA
gatcttctatgggatcattattttacatgatattccctacctgattgccaaaaacgtaatcatcctcatgccgac

SEQ ID NO: 684524 - DNA, 75 bp, synthetic construct
  source 1..75: mol_type = other DNA
agcccccgagtggcaacctgatgccaaagcgggatggctcggagcagaattaaaaggtactggctatgtttatcc

SEQ ID NO: 684525 - DNA, 75 bp, synthetic construct
  source 1..75: mol_type = other DNA
ttaatttttattgataagcagggtgtcacagggaaaaaagtagagtatcgttcgattccttataaatctgtgaca

SEQ ID NO: 684526 - DNA, 75 bp, synthetic construct
  source 1..75: mol_type = other DNA
accctcaaactggcgaatcaatcaccggtttttatggtttttcctggactacattcttgtttggtgcttttccag

SEQ ID NO: 684527 - DNA, 75 bp, synthetic construct
  source 1..75: mol_type = other DNA
atgagtaatcaatcggcaaaaatgaaaaaatacaaagttatattttcttcagaaaataatattttaaataatgag

SEQ ID NO: 684528 - DNA, 75 bp, synthetic construct
  source 1..75: mol_type = other DNA
gtggcagtgtcggcaaaaccattatttcgtcatacctgctgtatcctcgcatggctggcgctaaattctttgcca

SEQ ID NO: 684529 - DNA, 75 bp, synthetic construct
  source 1..75: mol_type = other DNA
acaacgaatacaccggtaacggtgttacaacgacattcccttataccttcagaattttccagaaatctgatttag

SEQ ID NO: 684530 - DNA, 75 bp, synthetic construct
  source 1..75: mol_type = other DNA
tatggtttttccaaggggtagaaaagatgaagcggattacactttttttaactatatcaaagttttcatatgtta

SEQ ID NO: 684531 - DNA, 75 bp, synthetic construct
  source 1..75: mol_type = other DNA
acattataacaaactattctgaaattccggtgggggttatttctagagtaaaatcatttgaggaagatattttat

SEQ ID NO: 684532 - DNA, 75 bp, synthetic construct
  source 1..75: mol_type = other DNA
cgccatacatttttgcgattggcagcctgctggacggaaacggaaagaaaattgccgcggataacgagacggcgc

SEQ ID NO: 684533 - DNA, 75 bp, synthetic construct
  source 1..75: mol_type = other DNA
gcagattggcgttaaacctgatgatctgggtagtgtagactttcgtgtcaaggaggataataaaaaagcaaatga

SEQ ID NO: 684534 - DNA, 75 bp, synthetic construct
  source 1..75: mol_type = other DNA
gttggttatgggtcacagacggttaaagcaacccttgatagcctgaatagcatgcgggaggagcttcttgataaa

SEQ ID NO: 684535 - DNA, 75 bp, synthetic construct
  source 1..75: mol_type = other DNA
ctgatactggcattcctcacagccggaattggcccgtggattgcctcatttatctgggcgttcatgtataataaa

SEQ ID NO: 684536 - DNA, 75 bp, synthetic construct
  source 1..75: mol_type = other DNA
ttgaatctaatcaatcaccttcagtgataaatatcgattttagctttaacgaaaaaacgtatgattttgactttt

SEQ ID NO: 684537 - DNA, 75 bp, synthetic construct
  source 1..75: mol_type = other DNA
catcaattattggaggattccttctgctgggagcagcactatcaggtaaactacttaagaagcggtctgcaccac

SEQ ID NO: 684538 - DNA, 75 bp, synthetic construct
  source 1..75: mol_type = other DNA
gccaaattactggaataaatacagccattagtggtattcaatctggaatttctaccagacttgctatttttggag

SEQ ID NO: 684539 - DNA, 75 bp, synthetic construct
  source 1..75: mol_type = other DNA
gtatctctattaccccaaaaacgcgggtaaaacgaaaagagtgaaggccctgattgattttctgatatccactac

SEQ ID NO: 684540 - DNA, 75 bp, synthetic construct
  source 1..75: mol_type = other DNA
ctgctcctgaacgatcgcggtgagcagttgaccgttgagatgccggggcagttaattagcaacgatattgacgtt

SEQ ID NO: 684541 - DNA, 75 bp, synthetic construct
  source 1..75: mol_type = other DNA
taaatacacccagggtatgacggttgttgattattactatctgacgggcaataaaccgaatgctaccgtaatggt

SEQ ID NO: 684542 - DNA, 75 bp, synthetic construct
  source 1..75: mol_type = other DNA
aatctgactgatgtctgcagactgaatacactgcgggggccggtctctctttttttcctgacgcttgccgagtcc

SEQ ID NO: 684543 - DNA, 75 bp, synthetic construct
  source 1..75: mol_type = other DNA
tggcgggataatgtccgtatacaataaacacgactggatagaggctcagcgcaaagcgtatgagcttcacgctga

SEQ ID NO: 684544 - DNA, 75 bp, synthetic construct
  source 1..75: mol_type = other DNA
ttcctgggttgatagttgtcttaggaatgtttttattatttgtttgcttcaataaaaatagtatcagtaaggtgc

SEQ ID NO: 684545 - DNA, 75 bp, synthetic construct
  source 1..75: mol_type = other DNA
ccggttgtatgctttccggtattaacgtgcaggaaacaggaaaaaactctgccgataacattggcggggtttatt

SEQ ID NO: 684546 - DNA, 75 bp, synthetic construct
  source 1..75: mol_type = other DNA
cgaactgctggatttcttcctcgaatatcataaagacgaaaaatggggctttgtcggcgcaccgttgcatgaccc

SEQ ID NO: 684547 - DNA, 75 bp, synthetic construct
  source 1..75: mol_type = other DNA
agagcgagatcgcattgcagccgagaagaaagctgaggctgacaagcaggccgctatcgaagcggagcgccgcaa

SEQ ID NO: 684548 - DNA, 75 bp, synthetic construct
  source 1..75: mol_type = other DNA
tgataattgacgataaatacagatacaaatttagcgaaaagttttccctctacaaacaaaataatttattaaatc

SEQ ID NO: 684549 - DNA, 75 bp, synthetic construct
  source 1..75: mol_type = other DNA
gttgaactctataatataaaggatgattcttatattattaatttatctctttcaaatggtacaatgtcacatact

SEQ ID NO: 684550 - DNA, 75 bp, synthetic construct
  source 1..75: mol_type = other DNA
ctctggttctggccttctccagcgcaactgcggcacttgctgcgattccgcaaaacatccgcatcggtaccgacc

SEQ ID NO: 684551 - DNA, 75 bp, synthetic construct
  source 1..75: mol_type = other DNA
atatcaagtgtccaagacactgattaaaggcaatatctattacgacgatgaagacacctcgacacctgaagaaaa

SEQ ID NO: 684552 - DNA, 75 bp, synthetic construct
  source 1..75: mol_type = other DNA
tccctgggactggttataaattctttatggacaacgcggagtgtgcacctaacgcgttggaaaaaatacaaagtc

SEQ ID NO: 684553 - DNA, 75 bp, synthetic construct
  source 1..75: mol_type = other DNA
gggcagagggaaataacggcaacgttaagctgccgctcatccgcccactcatggtgaaaggagtatacggagcac

SEQ ID NO: 684554 - DNA, 75 bp, synthetic construct
  source 1..75: mol_type = other DNA
tgcgtatcagacttgctaaatggtgtaaaaatggtgcgtattcctgggcaacagattcgccagagaacactttta

SEQ ID NO: 684555 - DNA, 75 bp, synthetic construct
  source 1..75: mol_type = other DNA
gtaatccctgccataacagctgtaactgtaatacacaagggaccatatgattcattaagaaatgcttacatttac

SEQ ID NO: 684556 - DNA, 75 bp, synthetic construct
  source 1..75: mol_type = other DNA
cagattgcgagtttacgtcagcttggatttacaataactgaaattgttactcttactcaggatgaaaattcctgc

SEQ ID NO: 684557 - DNA, 75 bp, synthetic construct
  source 1..75: mol_type = other DNA
cagcgtctgaagcaccttatgcatggttcagtcatctgccagcctcaaaactgcgcccccttgccacacaacgca

SEQ ID NO: 684558 - DNA, 75 bp, synthetic construct
  source 1..75: mol_type = other DNA
ttccgtaaaggacgctggtaagacgcaacacaccgaactccatatggcccaggaagctatcatcaaccaggaaac

SEQ ID NO: 684559 - DNA, 75 bp, synthetic construct
  source 1..75: mol_type = other DNA
aatttatttgcggagaaatatatttctttgttcaagggggatgatttctttaagtccacctggtacatcacgttc

SEQ ID NO: 684560 - DNA, 75 bp, synthetic construct
  source 1..75: mol_type = other DNA
gcagcagaattattttcagggatacggaagatcgctattaatattttaacgaaagataagatactcaaggcaggg

SEQ ID NO: 684561 - DNA, 75 bp, synthetic construct
  source 1..75: mol_type = other DNA
tatgcccagctttcgaagattcgccgccaactggtgaaagagtacggcgcatcccgtgcctatctggagcgattc

SEQ ID NO: 684562 - DNA, 75 bp, synthetic construct
  source 1..75: mol_type = other DNA
tttaaacaattgaagaaagatgtgcgcgccattgccagccagcaggttgatcgtctggagcaggctatgtgccag

SEQ ID NO: 684563 - DNA, 75 bp, synthetic construct
  source 1..75: mol_type = other DNA
acacttgatttcggcccacgccaattcaccgttggttttgacgaaaccttaaaacctgtagtgcgcgatgcaaac

SEQ ID NO: 684564 - DNA, 75 bp, synthetic construct
  source 1..75: mol_type = other DNA
tgtcaatctatggcgttcatgaacaggaagatcttgtagctccttcacaggatccacaagatgtaaaaaaatccg

SEQ ID NO: 684565 - DNA, 75 bp, synthetic construct
  source 1..75: mol_type = other DNA
tatatattagttgtaataatgaaattcaaaaaacaatatccgaaaataaatttatagcacttgaaatatcagaaa

SEQ ID NO: 684566 - DNA, 75 bp, synthetic construct
  source 1..75: mol_type = other DNA
cgctgattggcaaggtctgatcagcccggctaacccggatcaggttgcggctatttctgaagtgatcgcgtctaa

SEQ ID NO: 684567 - DNA, 75 bp, synthetic construct
  source 1..75: mol_type = other DNA
atgaagtatatattattccattatgcatcttcaaagtctcctgggactatatatcgtgtgcatcgtgcatggata

SEQ ID NO: 684568 - DNA, 75 bp, synthetic construct
  source 1..75: mol_type = other DNA
accgatggcgtgacgctgacaggcgagcttaataccaaccttgaaactgacagcctgacttatctttccgacgtg

SEQ ID NO: 684569 - DNA, 75 bp, synthetic construct
  source 1..75: mol_type = other DNA
gtgcgataccgcgcgcaaactgggcaaggtgctggcccgctgatcgacatcggcattcatatgctggatgctgcg

SEQ ID NO: 684570 - DNA, 75 bp, synthetic construct
  source 1..75: mol_type = other DNA
gtgaaattaaaccagcgagaaacgattgaagaaatcgcccggagatacaaccaacctgatgttttagctgcgctg

SEQ ID NO: 684571 - DNA, 75 bp, synthetic construct
  source 1..75: mol_type = other DNA
ccccttattctgcggcggcttgtgattgacgttccaccagtcggtcagggtggaccatgccccgcctgcggtggt

SEQ ID NO: 684572 - DNA, 75 bp, synthetic construct
  source 1..75: mol_type = other DNA
tcattcctcgccctaattcaaatgattggagtgtatatcaaaacatagataatatctttgaaccagttgaaaaga

SEQ ID NO: 684573 - DNA, 75 bp, synthetic construct
  source 1..75: mol_type = other DNA
cactatctgcaacataaaaaaaaggaaagaattatgttatatcaagctgttttgaaagagatcccggaatgtatt

SEQ ID NO: 684574 - DNA, 75 bp, synthetic construct
  source 1..75: mol_type = other DNA
gattggactgaaggggggatggaacctgtatggatatcaattgaatccgatatcagacatcgaccccctgggttt

SEQ ID NO: 684575 - DNA, 75 bp, synthetic construct
  source 1..75: mol_type = other DNA
acagactagcgaaggcggggaaaattgatggtttctcaggggccggggagctttacagggacaacctgcacatga

SEQ ID NO: 684576 - DNA, 75 bp, synthetic construct
  source 1..75: mol_type = other DNA
aacatggaggaagtcaagtatgccccgggaacttatctgccaggccaatcgccagaaagggatagattgatcccc

SEQ ID NO: 684577 - DNA, 75 bp, synthetic construct
  source 1..75: mol_type = other DNA
cacggtaatcagaagcagggggcctggctggatagctggctgcaatacgcgtggtttaacaatgatgtttccgaa

SEQ ID NO: 684578 - DNA, 75 bp, synthetic construct
  source 1..75: mol_type = other DNA
cgttgataatgacatgaaagttattaatggaaacagaggctatttcaccatggtttattcaaaattggacgtcgg

SEQ ID NO: 684579 - DNA, 75 bp, synthetic construct
  source 1..75: mol_type = other DNA
agctgatatcactgtttctggcgcggaacccgttcttgatatgaatccagcgaaggatatttactcctccctctg

SEQ ID NO: 684580 - DNA, 75 bp, synthetic construct
  source 1..75: mol_type = other DNA
acgatgtttgtggaaaagttatttgaaatcagagaatcttatcttcacaaatgcttatcttgctaataaagtatg

SEQ ID NO: 684581 - DNA, 75 bp, synthetic construct
  source 1..75: mol_type = other DNA
tttgccatggtgcgtattctaatcaggatttagagaaaaaactcaatgatattgctccggatgtaatgtggttcc

SEQ ID NO: 684582 - DNA, 75 bp, synthetic construct
  source 1..75: mol_type = other DNA
ccttggcgctatcagtcgtgaaaagggcgctttcatgctgaatgaggtggcgcatgcacttaaaagagaaaacat

SEQ ID NO: 684583 - DNA, 75 bp, synthetic construct
  source 1..75: mol_type = other DNA
acgtggtggccaaattctgaagtagggcataatcaagaagccaaaaaagaaattaatgcccttaatatggatagt

SEQ ID NO: 684584 - DNA, 75 bp, synthetic construct
  source 1..75: mol_type = other DNA
atagatgccattaaccgcaagcaaccggaaattatcaaggctctggttgcaaatgaaaaaatcaaatcagtatat

SEQ ID NO: 684585 - DNA, 75 bp, synthetic construct
  source 1..75: mol_type = other DNA
ttattatcgaagggaaggcgaaatcaccggtatggctgaagattaaagatgacaaagttagcctggaaaaagccg

SEQ ID NO: 684586 - DNA, 75 bp, synthetic construct
  source 1..75: mol_type = other DNA
ttcagtggcttcgccagccttcgttgtggctgttgaagcggatgatgcggcgctttctgccgattttccggcggc

SEQ ID NO: 684587 - DNA, 75 bp, synthetic construct
  source 1..75: mol_type = other DNA
tgtaaatttttctattacgacatgccccacaacaccctgatggcggaagagagtcagcgtaataaaaacgaactg

SEQ ID NO: 684588 - DNA, 75 bp, synthetic construct
  source 1..75: mol_type = other DNA
aactgcaagtgatgcatccggagcttttacctccggaggtttatgaaatttatctcaaactaacgaaaaataaat

SEQ ID NO: 684589 - DNA, 75 bp, synthetic construct
  source 1..75: mol_type = other DNA
aggaaattgaaaaaatccatcgcagccgctcctggagaatgaccaagggttatcgttatctgggattgcagatcc

SEQ ID NO: 684590 - DNA, 75 bp, synthetic construct
  source 1..75: mol_type = other DNA
ttgcgctacttgctgtacactttgcaaggcgtcccgctaatatcagacataccttcggctggctacgcttcacca

SEQ ID NO: 684591 - DNA, 75 bp, synthetic construct
  source 1..75: mol_type = other DNA
cggcaatcgccacgttccgctgcaaataatgcccggagagctgcgctaccatcacgatcacgtcctcgatgatat

SEQ ID NO: 684592 - DNA, 75 bp, synthetic construct
  source 1..75: mol_type = other DNA
cgctaatgcggcgcgcatctctcgcatttacggtgtttcggcgatcgcaatgctggttgataaccaggagccgtc

SEQ ID NO: 684593 - DNA, 75 bp, synthetic construct
  source 1..75: mol_type = other DNA
gcttcaaggcttggacaaggtgaatttaggaaaaaatgccttaaactgttccctgcctgtcctataactggtatt

SEQ ID NO: 684594 - DNA, 75 bp, synthetic construct
  source 1..75: mol_type = other DNA
cttcgcaagctgatttcatttggaagaacgcggaagacctgtgggggggatttcaagcataccgacttcggcaag

SEQ ID NO: 684595 - DNA, 75 bp, synthetic construct
  source 1..75: mol_type = other DNA
tctcggacgttttggccgccttcgcagaatttgctgtcgccgttgccgaggaagctgcgctgctggcgctcgagg

SEQ ID NO: 684596 - DNA, 75 bp, synthetic construct
  source 1..75: mol_type = other DNA
ttgagctggcggtgaaagaagaaccgctttactggggcgtttctcagccggacgacccgcgcgaactgattgagc

SEQ ID NO: 684597 - DNA, 75 bp, synthetic construct
  source 1..75: mol_type = other DNA
cctgcctcagccgtggtcaaactggctgtatgcggtctggcaggagccggttgacagctggaactttgcccttct

SEQ ID NO: 684598 - DNA, 75 bp, synthetic construct
  source 1..75: mol_type = other DNA
tttaacaatgatgtttctgaacaagacgatggcgtggatcattaccactcgtcggggattatcgcctcgctggaa

SEQ ID NO: 684599 - DNA, 75 bp, synthetic construct
  source 1..75: mol_type = other DNA
tcttatattgcaatggccttggtcgtatccctgtttgggttgagccgtggatgtggtatagccagtcatttattg

SEQ ID NO: 684600 - DNA, 75 bp, synthetic construct
  source 1..75: mol_type = other DNA
gctcagcctgacggatggaaaaagatcggtggcgtggataaatttgagccgataccaatcaccgttatgccatct

SEQ ID NO: 684601 - DNA, 75 bp, synthetic construct
  source 1..75: mol_type = other DNA
taacgctgctggttatccggtatataacggacagattgccaaattcgtaactgagcaaggccattctatggctgt

SEQ ID NO: 684602 - DNA, 75 bp, synthetic construct
  source 1..75: mol_type = other DNA
cccaaatcttattcttgctcatggtaattcacgttttaaccacctttttcaatcaataaaatcacgcgcatttac

SEQ ID NO: 684603 - DNA, 75 bp, synthetic construct
  source 1..75: mol_type = other DNA
caggcagtttatcaggatcagctggggctggttgatcatggactgacgacgtcgttatggaaagcgcctgggtta

SEQ ID NO: 684604 - DNA, 75 bp, synthetic construct
  source 1..75: mol_type = other DNA
attgccgggatcacctattcaggtcatgtgcatcacgataacggtgaaggcagcaaaacgggaggaccagagaat

SEQ ID NO: 684605 - DNA, 75 bp, synthetic construct
  source 1..75: mol_type = other DNA
agtgactatccatcatttaaggttatttatgatggctgccgtttatgtaatttttcgttgacacatgataatgat

SEQ ID NO: 684606 - DNA, 75 bp, synthetic construct
  source 1..75: mol_type = other DNA
taagtcaggtagtgactattcatcctttaaagttacttatgacggttgtcacttacatgatatattgttagctca

SEQ ID NO: 684607 - DNA, 75 bp, synthetic construct
  source 1..75: mol_type = other DNA
taaacaaagtgtttgtcaaagtaacaattgataacaaaataataaagggggattcaaaagtcaataactgtaatg

SEQ ID NO: 684608 - DNA, 75 bp, synthetic construct
  source 1..75: mol_type = other DNA
cggacaggaaaatacataaacattttatagatatagctttatatgcaaataataaatgtgacgatagaattacga

SEQ ID NO: 684609 - DNA, 75 bp, synthetic construct
  source 1..75: mol_type = other DNA
aaaccatcaaacgtaacccgcaggcactggtacagctttgcctcggtgcctttaaagccggaatgcgtgaattta

SEQ ID NO: 684610 - DNA, 75 bp, synthetic construct
  source 1..75: mol_type = other DNA
ggctatacaaaaggcattattgatgtgatggataattttatacccttgataagcttagctatgctcagaacttga

SEQ ID NO: 684611 - DNA, 75 bp, synthetic construct
  source 1..75: mol_type = other DNA
gatgctcttccagtagctcccgggctgacggtaatagaggcacctacaggctccggtaaaacggaaacagcgctg

SEQ ID NO: 684612 - DNA, 75 bp, synthetic construct
  source 1..75: mol_type = other DNA
tcgtgaagccatagactgggccgcaagcacgggaggttacgataaagcgacagtgcaggatgtgatgttaggagc

SEQ ID NO: 684613 - DNA, 75 bp, synthetic construct
  source 1..75: mol_type = other DNA
ctcagagtaatggaatggcagaacggttcgtgaaaacgatgaaggaagactacatcgcgttcatgccgaaaccga

SEQ ID NO: 684614 - DNA, 75 bp, synthetic construct
  source 1..75: mol_type = other DNA
taatgagcgaaaataacctgttattgttacatgacaaaccatcacgacagcagcgggaacataaaggccgaatat

SEQ ID NO: 684615 - DNA, 75 bp, synthetic construct
  source 1..75: mol_type = other DNA
caaccggcggcgtcccgggcatcgacttcaacaacacagactggatcaacgaggtgttcgatggaaagactatct

SEQ ID NO: 684616 - DNA, 75 bp, synthetic construct
  source 1..75: mol_type = other DNA
cgatgtgacgatgaggatgagcctgaaaaatatactctccagttccattttacagacgatgacgggataccgtat

SEQ ID NO: 684617 - DNA, 75 bp, synthetic construct
  source 1..75: mol_type = other DNA
aaaaatgcgaatccgatatgcgtagagccagaagatggtaagtggcatctatctttgtttgaaggattgctggat

SEQ ID NO: 684618 - DNA, 75 bp, synthetic construct
  source 1..75: mol_type = other DNA
acaggtagcttcgaaaccgaacctccggatacgcaggaaatgcttaaccgactgaggagcattcagtctcgagga

SEQ ID NO: 684619 - DNA, 75 bp, synthetic construct
  source 1..75: mol_type = other DNA
ttccgccccgcttttcgattcagccagagcctatttattcagctgacatgttacctgatcttacgatgttagagc

SEQ ID NO: 684620 - DNA, 75 bp, synthetic construct
  source 1..75: mol_type = other DNA
ttggttgacgttgcacaagtatgctaccaacggctaaaggagctaaataacacgcaagtagatatagatttgttt

SEQ ID NO: 684621 - DNA, 75 bp, synthetic construct
  source 1..75: mol_type = other DNA
tctccactgctttgtcatcactcaaagatggtaagcgcattgcacgtgccggatggaatgggaaaggcatgtatc

SEQ ID NO: 684622 - DNA, 75 bp, synthetic construct
  source 1..75: mol_type = other DNA
ttttgcttttattgttttcgctcccctcttttgccggagctgcggaacatcaggatgattttttatctgacatat

SEQ ID NO: 684623 - DNA, 75 bp, synthetic construct
  source 1..75: mol_type = other DNA
aacgtggggccgtacagtatgttgtcaggtaatatcaatgttcaggataaagggactgtcaccctcggaggggaa

SEQ ID NO: 684624 - DNA, 75 bp, synthetic construct
  source 1..75: mol_type = other DNA
gaggtagaaagttcgtattcatcatatacggttatttatgaagattgccgtgtgcacgatctgttgttggctcat

SEQ ID NO: 684625 - DNA, 75 bp, synthetic construct
  source 1..75: mol_type = other DNA
cactggctttgctggctacaccgatacccttcactaacacacttatgaataaattcttaggcaacgttgagcctg

SEQ ID NO: 684626 - DNA, 75 bp, synthetic construct
  source 1..75: mol_type = other DNA
ggatgagctacccaatctgatcgccaaaaaacaggcgttacagaaagcatattctaagttaacacaacttacaca

SEQ ID NO: 684627 - DNA, 75 bp, synthetic construct
  source 1..75: mol_type = other DNA
tgatgatccggcaatctgcaaacgatttcaggacaagggattacccgattattttcttggtatccgttatgttgg

SEQ ID NO: 684628 - DNA, 75 bp, synthetic construct
  source 1..75: mol_type = other DNA
gactgaagtcattctttttccaggtaatgaaaaaaggaaatattattcaaaatcagaccttagtctttaccttaa

SEQ ID NO: 684629 - DNA, 75 bp, synthetic construct
  source 1..75: mol_type = other DNA
gctattgcaactctgattattttgaaacgctggtactgtgcgctgattaaattaaccgggcagactcatcccatc

SEQ ID NO: 684630 - DNA, 75 bp, synthetic construct
  source 1..75: mol_type = other DNA
agcaactcgaggcaatacaagcacaatggcatcgtcgtgccaagactcaacaactggttgctgctgagagtgtgt

SEQ ID NO: 684631 - DNA, 75 bp, synthetic construct
  source 1..75: mol_type = other DNA
cttcgatgtgtacttgatgatctgaaaaaagaagatcagaaaattgatttggtgatcttaacccacatagatgat

SEQ ID NO: 684632 - DNA, 75 bp, synthetic construct
  source 1..75: mol_type = other DNA
ggcaagaacttgaggcattacttgatgaaatcggatgtgtgcgagcaccgctcattatggcagggcaaatctaca

SEQ ID NO: 684633 - DNA, 75 bp, synthetic construct
  source 1..75: mol_type = other DNA
caggtgatgaccgcaaggccggagcaatcacaccaactgcagcagcctgaagccgattccgccattcagcgggaa

SEQ ID NO: 684634 - DNA, 75 bp, synthetic construct
  source 1..75: mol_type = other DNA
atggaaggtaatgaactttatagtgccactggatttaataaagaaaactatggatactacaaacgttctggtgag

SEQ ID NO: 684635 - DNA, 75 bp, synthetic construct
  source 1..75: mol_type = other DNA
atgaagtatacatggaagggagaaaatgaaagaacgcactggcaattgtgtgaaaaattaaatgccccatttata

SEQ ID NO: 684636 - DNA, 75 bp, synthetic construct
  source 1..75: mol_type = other DNA
agctcatactcgatcttgtaaagatttctcaccatggtagccagcataatactagtcctgaatttttgtcgctca

SEQ ID NO: 684637 - DNA, 75 bp, synthetic construct
  source 1..75: mol_type = other DNA
gtaaacaagtttctcggtaacgttgacggctatgcttcagtcttcagtaaatacaggctactcgaagatgacggt

SEQ ID NO: 684638 - DNA, 75 bp, synthetic construct
  source 1..75: mol_type = other DNA
aggtgagatcgattttacctggagtgaacgctatcaactcagcaaagactccatgacatgggaactaaaatcgta

SEQ ID NO: 684639 - DNA, 75 bp, synthetic construct
  source 1..75: mol_type = other DNA
tgctttggatagtattgatgttaacaaaactacaacggatgtaagcatccttaatcgaagtattatcacgcctgg

SEQ ID NO: 684640 - DNA, 75 bp, synthetic construct
  source 1..75: mol_type = other DNA
atgtcaccgcggtatcagaacaagataaaggaatatcaattgatgcatcaaatatcgattctcaagccaaaatag

SEQ ID NO: 684641 - DNA, 75 bp, synthetic construct
  source 1..75: mol_type = other DNA
gggcatccggttatccatgcatacaatactcagtctgtggctgacaaactggctgccagtggagaccattcggtt

SEQ ID NO: 684642 - DNA, 75 bp, synthetic construct
  source 1..75: mol_type = other DNA
gtgagctgatttttacaggatttaatgtgattttctgtggtgatacagagaagctgcttttttatatacagctgt

SEQ ID NO: 684643 - DNA, 75 bp, synthetic construct
  source 1..75: mol_type = other DNA
tgttgccggagaaaataaaggcgttttctgttgaatcgtattgttatctggagtggcatcggaagaatttactga

SEQ ID NO: 684644 - DNA, 75 bp, synthetic construct
  source 1..75: mol_type = other DNA
cagatgatttaatgagtatggctacaaatgaactcataaaactggccaaaatagagaataatttagacctgaata

SEQ ID NO: 684645 - DNA, 75 bp, synthetic construct
  source 1..75: mol_type = other DNA
accagacataataaagaaaaaaacaaacgacattctacccttctcaaaatcccttttaatttcattgaaaaatgg

SEQ ID NO: 684646 - DNA, 75 bp, synthetic construct
  source 1..75: mol_type = other DNA
gaactcgttgagcttgatgatattgtaaaatacatggtccagtcctcatcagagcttcgggggcgtgcaggctta

SEQ ID NO: 684647 - DNA, 75 bp, synthetic construct
  source 1..75: mol_type = other DNA
aaagcttatttgtatttcaattttcattgaaagcgctatcgttgcattattttctctgcttatatcatttattgt

SEQ ID NO: 684648 - DNA, 75 bp, synthetic construct
  source 1..75: mol_type = other DNA
cacaaacacaacgcagaactcaccagaacactggtcacaattaaccgcaaagcggcaattgcccgctatgtgcat

SEQ ID NO: 684649 - DNA, 75 bp, synthetic construct
  source 1..75: mol_type = other DNA
gaacagcttgttctatactcatttttaaaaaaaataaaattagcgaatataaacattattgtgatacaaataatg

SEQ ID NO: 684650 - DNA, 75 bp, synthetic construct
  source 1..75: mol_type = other DNA
atgaataaaatcccagcaatagaaagtgaagataagcatgtctttttttcacgtgaacaaatgatacaaataaca

SEQ ID NO: 684651 - DNA, 75 bp, synthetic construct
  source 1..75: mol_type = other DNA
atgagtgacatttttcacagcattcaaacaattctatttcatcgttatcccttgtcctgtaaggtaattgcctta

SEQ ID NO: 684652 - DNA, 75 bp, synthetic construct
  source 1..75: mol_type = other DNA
gacgataaacacggcgaaccatcagatgatgaggataccgctgaagaagatgaccaggaagatgccccggagcct

SEQ ID NO: 684653 - DNA, 75 bp, synthetic construct
  source 1..75: mol_type = other DNA
cgactgcaaactaagaaggggaaatgcagcagaattattttcagggataaaaggcatatcgccattaatattttg

SEQ ID NO: 684654 - DNA, 75 bp, synthetic construct
  source 1..75: mol_type = other DNA
ttttatgaaagttaaaaataaatttatgaatatcgatgtcgtttatacgaatacatctgataactatatgggatt

SEQ ID NO: 684655 - DNA, 75 bp, synthetic construct
  source 1..75: mol_type = other DNA
aatccttgatgtagagtctaataatttagaatgtataaggaaaagggctttggttgactcacaaaaatatacatc

SEQ ID NO: 684656 - DNA, 75 bp, synthetic construct
  source 1..75: mol_type = other DNA
ccttttaaaggtgagcaggcaatccgatgcatggctgacggagaagtgattgcttaccgcatctgcagggattat

SEQ ID NO: 684657 - DNA, 75 bp, synthetic construct
  source 1..75: mol_type = other DNA
actgtatgttgtttcccaaacctagagcctggagtgatatctcgatttcgcaattctctaaatgctatattagat

SEQ ID NO: 684658 - DNA, 75 bp, synthetic construct
  source 1..75: mol_type = other DNA
ataatattgaaactaaatggctttatgattttctgaccctggaaaaatgccgcaatttttcccaggcggcagtca

SEQ ID NO: 684659 - DNA, 75 bp, synthetic construct
  source 1..75: mol_type = other DNA
atgcatccctctgcgcaacggtggtctgatatggcaaaacaacctaataccgggctggctgatgatctgaatgca

SEQ ID NO: 684660 - DNA, 75 bp, synthetic construct
  source 1..75: mol_type = other DNA
aatcagtaaataaacgtcctattacagttcgcccacgtttaaaatcggctaaattagagcgtaaagaattatcat

SEQ ID NO: 684661 - DNA, 75 bp, synthetic construct
  source 1..75: mol_type = other DNA
tctggtgaaacactatatccagccgggtgagaaagaaaccagtggactgcatttctatactctgtatatgcatct

SEQ ID NO: 684662 - DNA, 75 bp, synthetic construct
  source 1..75: mol_type = other DNA
caaaaatacttgacctcactgccgcggcatttttacttgtcgcctttctgacgggtattgcgggcgctcttcaga

SEQ ID NO: 684663 - DNA, 75 bp, synthetic construct
  source 1..75: mol_type = other DNA
cgcatttatgccaataacaacgaatggtattttacatgattatacatacgatataataataaatgataaaaaata

SEQ ID NO: 684664 - DNA, 75 bp, synthetic construct
  source 1..75: mol_type = other DNA
aactggcagaagcagaaacgcaaaatacagcgactgcattcccgtatcgcaaatatccgcagggactaccttcat

SEQ ID NO: 684665 - DNA, 75 bp, synthetic construct
  source 1..75: mol_type = other DNA
tatgaatgaatattttgatacacttcccagatgtgtcgatttgaatgaaataaattcatttattagtcaacaagg

SEQ ID NO: 684666 - DNA, 75 bp, synthetic construct
  source 1..75: mol_type = other DNA
atacgcatttcaaaaattttattgaattggctactgaaggcgatttttttatagatcttgcaaggtttacaggtc

SEQ ID NO: 684667 - DNA, 75 bp, synthetic construct
  source 1..75: mol_type = other DNA
aattaaagcttatttaacattattagctattacatggattgtactaacaataacagatgtggcgttaatacacgc

SEQ ID NO: 684668 - DNA, 75 bp, synthetic construct
  source 1..75: mol_type = other DNA
cgacgatagcctgcaacgtcagatgaaagaaaaacagcgccttgccgcaagctggtttgccaatggcggggagga

SEQ ID NO: 684669 - DNA, 75 bp, synthetic construct
  source 1..75: mol_type = other DNA
aatcagcgcttcaggaagccgtccggtgaatgcccctgcgcaatatgtttttcaggctgagggctcactcaaaga

SEQ ID NO: 684670 - DNA, 75 bp, synthetic construct
  source 1..75: mol_type = other DNA
tattttttagtgaaacgaaatcctttttttggtggtttttcgggggtgattttactacttactcagtcaagaata

SEQ ID NO: 684671 - DNA, 75 bp, synthetic construct
  source 1..75: mol_type = other DNA
ttctgccggtggtcgcatttgacacgctggaagatgctatctcaatggctaatgacagtgattacggcctgacct

SEQ ID NO: 684672 - DNA, 75 bp, synthetic construct
  source 1..75: mol_type = other DNA
cccccctcgcctgatcgcactggccgacgagctgggcattccgctgatcgaacagccctatctgctaaagatggt

SEQ ID NO: 684673 - DNA, 75 bp, synthetic construct
  source 1..75: mol_type = other DNA
gtgtattttcttttaaagatacattgcttatgagaatgaatgacttaaataacgatttagttaattattcgcatg

SEQ ID NO: 684674 - DNA, 75 bp, synthetic construct
  source 1..75: mol_type = other DNA
gccaatgagagaaccagagcagctaacggcaaaagaatatatccaaaccgtgttcgtcatgtttgggcacgggag

SEQ ID NO: 684675 - DNA, 75 bp, synthetic construct
  source 1..75: mol_type = other DNA
atatagacgtagtggcaaatggtaatgccggagagttttattttgcatactggatatcaagtaatttcatctggc

SEQ ID NO: 684676 - DNA, 75 bp, synthetic construct
  source 1..75: mol_type = other DNA
gtcttttactccaataggcttttggaaattgacggtgagatgcaacctgctgaactaataactgatgtttggact

SEQ ID NO: 684677 - DNA, 75 bp, synthetic construct
  source 1..75: mol_type = other DNA
gtccagtgaatatttctgatgccaccctgagtctgaacagccgtcctgatgaggtatctcacgctggcgcgattt

SEQ ID NO: 684678 - DNA, 75 bp, synthetic construct
  source 1..75: mol_type = other DNA
acaatggcgcggacacgcggcatatccaggcgatcctcggccatgagaagctggagacgacgcagatctacacga

SEQ ID NO: 684679 - DNA, 75 bp, synthetic construct
  source 1..75: mol_type = other DNA
agaaatcagcaagcaaaaaatttatggtgtgtttctgtttatactggagttcgccctggtgagctgtgtgcactt

SEQ ID NO: 684680 - DNA, 75 bp, synthetic construct
  source 1..75: mol_type = other DNA
attagcagttgctgttaaagtaaaccctcgactaaaatatctttcgaatgaagtaaaatcaactattgattctta

SEQ ID NO: 684681 - DNA, 75 bp, synthetic construct
  source 1..75: mol_type = other DNA
accatttcgttgaaaccaccaaaatggttgtattaagttgccgaccccgcaggtcagcatcaagcaattggaaaa

SEQ ID NO: 684682 - DNA, 75 bp, synthetic construct
  source 1..75: mol_type = other DNA
attaacaaagcaaggggtattattatccgatacgaataaggagtacagtactattcagattatctataagcgtaa

SEQ ID NO: 684683 - DNA, 75 bp, synthetic construct
  source 1..75: mol_type = other DNA
ggcggcgcggcgcgcccgctcggggcgcagatggtggttcgcgaagatggtcgttactgcggttttgtctctggc

SEQ ID NO: 684684 - DNA, 75 bp, synthetic construct
  source 1..75: mol_type = other DNA
gactacaaaggggcgtttgcagatgcccgagtgggctacaactacagcgataacggcagtcaacaacaactgaac

SEQ ID NO: 684685 - DNA, 75 bp, synthetic construct
  source 1..75: mol_type = other DNA
gttccattgcccaaagattggctgtacgccggagactctgcgtgtctgggttcgccagcatgagcgggataccgg

SEQ ID NO: 684686 - DNA, 75 bp, synthetic construct
  source 1..75: mol_type = other DNA
agccggtgctgccagtgttgcactgacgccgttcgccggtgtgccggtgtgccggtgtgccggtgtgccggtggg

SEQ ID NO: 684687 - DNA, 75 bp, synthetic construct
  source 1..75: mol_type = other DNA
cctcggtcgttggttgattgaatgctgtcacgcccatccattgatgtcacgcctgcgacggataatgctggtcac

SEQ ID NO: 684688 - DNA, 75 bp, synthetic construct
  source 1..75: mol_type = other DNA
gcgacagccgggtatttatcgacaaaaacgatggccagggaacagcctttacccttgaagaaggcacatctgttg

SEQ ID NO: 684689 - DNA, 75 bp, synthetic construct
  source 1..75: mol_type = other DNA
ctcttttgtatggctttgataccgcttatcgaggcgcaataacagcccccaaagctacagttagcatgaataatg

SEQ ID NO: 684690 - DNA, 75 bp, synthetic construct
  source 1..75: mol_type = other DNA
tgcaaaattaattctggatggtagtgtcaacacaaaaaatgatgttgaagtcagtaatgccagtcttaccatgca

SEQ ID NO: 684691 - DNA, 75 bp, synthetic construct
  source 1..75: mol_type = other DNA
tacaataaattactgaatcgtcttgactacctggctaaacttgatacaaaagtatacggagatggcgaccgtagc

SEQ ID NO: 684692 - DNA, 75 bp, synthetic construct
  source 1..75: mol_type = other DNA
cgtggtggtggtgcatttaaaaacgtgctcattcatgcgcccaacgggggcaaagagggggtgcaaattttgccg

SEQ ID NO: 684693 - DNA, 75 bp, synthetic construct
  source 1..75: mol_type = other DNA
caattaacgagctgatgcccgtcatggaggccatgaagcacatcaatgactggcttggcgaagaggtgatccgct

SEQ ID NO: 684694 - DNA, 75 bp, synthetic construct
  source 1..75: mol_type = other DNA
caagggcaacagtcgggtgaaacggatttgttgactgctatgctgggtgtcaaaaagctaaatgatatcccggca

SEQ ID NO: 684695 - DNA, 75 bp, synthetic construct
  source 1..75: mol_type = other DNA
aatatcaacatgcaaagaaaaatggtgatacgtttaacgcttttatttacttcattaaatttaaattaaataagt

SEQ ID NO: 684696 - DNA, 75 bp, synthetic construct
  source 1..75: mol_type = other DNA
atgaagaaattaatttcattgctaattacatccactctttcattttcagtatgcgctcaagaagaagacaataat

SEQ ID NO: 684697 - DNA, 75 bp, synthetic construct
  source 1..75: mol_type = other DNA
gatgtcacccccatccttagtgtcagaaaagaggacgggaaaaaagagtgggtcctcgatggttaccaggttgca

SEQ ID NO: 684698 - DNA, 75 bp, synthetic construct
  source 1..75: mol_type = other DNA
acggtctcgtctctggacagaacagcgctgactatccacaagggggcgaatgttacggccagcagttcccttttc

SEQ ID NO: 684699 - DNA, 75 bp, synthetic construct
  source 1..75: mol_type = other DNA
ggactttaatccgctgattgggcgtaccggtgttgatgtgggtaaatccttctccggtaaggactggaaagtcac

SEQ ID NO: 684700 - DNA, 75 bp, synthetic construct
  source 1..75: mol_type = other DNA
ggagttgctactgaagaagttgctactaaaaaagtactgctgaacaaattactgacaacgcaattattgaatgag

SEQ ID NO: 684701 - DNA, 75 bp, synthetic construct
  source 1..75: mol_type = other DNA
cagaaatgcttatgaattattcaggatgttcgaaaatcactcctaattcaacagactcttggactcagctcagca

SEQ ID NO: 684702 - DNA, 75 bp, synthetic construct
  source 1..75: mol_type = other DNA
gactctttttataaattatttagggcaaccggaggttgcactggaattcaagagagttatacctgatgcttttct

SEQ ID NO: 684703 - DNA, 75 bp, synthetic construct
  source 1..75: mol_type = other DNA
cctgataagccgcgtcagcggcgcatcaggcatcggttgtcggatgcgacgccatgcgtcttatccgacctacag

SEQ ID NO: 684704 - DNA, 75 bp, synthetic construct
  source 1..75: mol_type = other DNA
cgcctggctacgggcaaacaggtcgtcgagcttctcttcgtactggtagtagttgatgctttcgtacagctcgtt

SEQ ID NO: 684705 - DNA, 75 bp, synthetic construct
  source 1..75: mol_type = other DNA
ggtgctaccccggacggtgctatcctggacggtgctaccgtgaacggtgctacctccctatatgatgaggtaatt

SEQ ID NO: 684706 - DNA, 75 bp, synthetic construct
  source 1..75: mol_type = other DNA
atttattatgagttcagagcgagatctggttaattttcttggcgatttttcaatggatgtggccaaagcagttat

SEQ ID NO: 684707 - DNA, 75 bp, synthetic construct
  source 1..75: mol_type = other DNA
tttagaaaaacttggtaaatatattttctcttcacgagcacctcaagtgctggagctcgctgttggctggcgagg

SEQ ID NO: 684708 - DNA, 75 bp, synthetic construct
  source 1..75: mol_type = other DNA
attctcaggagaaccccgctgacccggcggcgtgtttgccgttgttccgtgtcagtggtggcgcattatagggag

SEQ ID NO: 684709 - DNA, 75 bp, synthetic construct
  source 1..75: mol_type = other DNA
cagtactgaaacttaggggcatcatacctgatagctttattactgaaatggttatgaactattctggatgttcag

SEQ ID NO: 684710 - DNA, 75 bp, synthetic construct
  source 1..75: mol_type = other DNA
acgaccgagcttgataaaaatgggaaaattatatttaactttaatgcgttaaagcatacaaaagcaagttatttt

SEQ ID NO: 684711 - DNA, 75 bp, synthetic construct
  source 1..75: mol_type = other DNA
ttagctttggctttccagtaattcttgtcggaggagcaattttactgacagggatagtgtgtacagttgttttaa

SEQ ID NO: 684712 - DNA, 75 bp, synthetic construct
  source 1..75: mol_type = other DNA
ttctgctgatgctgcatgtgttcattcgctccagtgaactgcgtttcgcccgctggtcagagattgatttcacaa

SEQ ID NO: 684713 - DNA, 75 bp, synthetic construct
  source 1..75: mol_type = other DNA
gtgcaggccagtgtcagcagcgcgagcggcaacagcgcttcagcgactcatgcgtacagcgttgacgccagcgtg

SEQ ID NO: 684714 - DNA, 75 bp, synthetic construct
  source 1..75: mol_type = other DNA
aagctggagtgtgagcgtaccagccgccgactggcaggcgctgggtaacggtgagttaacggttaatgcctcggt

SEQ ID NO: 684715 - DNA, 75 bp, synthetic construct
  source 1..75: mol_type = other DNA
ctaattagcgagaaaaacaataggcgcgatgaaatattttacaacgcagacaatgtgcctctatggcctatatct

SEQ ID NO: 684716 - DNA, 75 bp, synthetic construct
  source 1..75: mol_type = other DNA
atgatgtgattaacgccgccgaaaaaggcgcggcgctaatgctctccggcagcacgtccggcgtcgaagcggggc

SEQ ID NO: 684717 - DNA, 75 bp, synthetic construct
  source 1..75: mol_type = other DNA
gcaacagcgatgacgccagccgcaccgtcaccgtcagcctcagcgcgccagtgattagcatcaacaccatcgcgg

SEQ ID NO: 684718 - DNA, 75 bp, synthetic construct
  source 1..75: mol_type = other DNA
gttgggtagtggtgcacagaccatcaccgccagcgtcagcgatcgggcaggcaacagcgatgacgccagccgcac

SEQ ID NO: 684719 - DNA, 75 bp, synthetic construct
  source 1..75: mol_type = other DNA
atggcgctgacgtcggcacagatcacggcctttaaggtggcatccggtgatgtggatctgaatgtggtgcatctg

SEQ ID NO: 684720 - DNA, 75 bp, synthetic construct
  source 1..75: mol_type = other DNA
gtagtcattgttggtggcggtggacagatggggcgcttgttcgagaagatgctgacgctctctggctatcaggtg

SEQ ID NO: 684721 - DNA, 75 bp, synthetic construct
  source 1..75: mol_type = other DNA
atatccgtctcttaacccgaactacccgtagcgtggcccccacggaagcaggggagagaattattgcctgtcttg

SEQ ID NO: 684722 - DNA, 75 bp, synthetic construct
  source 1..75: mol_type = other DNA
aatgtttgccacatgagttggttgcagacatacagagggcggtcatcaagtcaatcaatgccatatcgctcataa

SEQ ID NO: 684723 - DNA, 75 bp, synthetic construct
  source 1..75: mol_type = other DNA
gaatattacaaatggtttgtacagtccgggaaactgggctgggatgtttatattcaggtgcaggatgaatccgcc

SEQ ID NO: 684724 - DNA, 75 bp, synthetic construct
  source 1..75: mol_type = other DNA
acgtcgtcagcaccatggcatgcttcagcattgggatgaataccgccaatgccaccacggattccctggatctta

SEQ ID NO: 684725 - DNA, 75 bp, synthetic construct
  source 1..75: mol_type = other DNA
ttggtaacgtcagagcaagttattgctatccttaccgcccccattgtgtcgcgaaaggtctttattgggatgaag

SEQ ID NO: 684726 - DNA, 75 bp, synthetic construct
  source 1..75: mol_type = other DNA
tcggcaaattaccgcgtttaccgcaagactgtattctggtcgatctggcatcagtgaaaaatgggccgttacagg

SEQ ID NO: 684727 - DNA, 75 bp, synthetic construct
  source 1..75: mol_type = other DNA
gaatatccttgcgcttaatggtagtacaaaaatggttcagcagacattgtatccactttatcgaatcagttggca

SEQ ID NO: 684728 - DNA, 75 bp, synthetic construct
  source 1..75: mol_type = other DNA
caggtaaggctccggagaaaaagaagaagattaaaatctttgttgatgagcagcctaccgatccagttttttccc

SEQ ID NO: 684729 - DNA, 75 bp, synthetic construct
  source 1..75: mol_type = other DNA
aggccattgggctatatctgtaaacggtaactggcgacttaccttccgatttgaaggtgaagacgcaattctggt

SEQ ID NO: 684730 - DNA, 75 bp, synthetic construct
  source 1..75: mol_type = other DNA
ttgaatctgaaacaaagaaaatggcaaagcaagcacttgaaaaaaaaggcatttcacttagcgatgcgttaagag

SEQ ID NO: 684731 - DNA, 75 bp, synthetic construct
  source 1..75: mol_type = other DNA
agtaatattatccctgtattacgtgagatgcgcaattattttttgctaattaaaagttttgtaaacattacagaa

SEQ ID NO: 684732 - DNA, 75 bp, synthetic construct
  source 1..75: mol_type = other DNA
tggcgtctggttcttcctgttccgccgcttcgccgagaaacagggcatgggcgggtttctcaacatcggtaagag

SEQ ID NO: 684733 - DNA, 75 bp, synthetic construct
  source 1..75: mol_type = other DNA
tttgttcgccatgatggcgaatgacacagcagcgctgtatatcgccacacggaacatactgacaagaatatccat

SEQ ID NO: 684734 - DNA, 75 bp, synthetic construct
  source 1..75: mol_type = other DNA
ccgttcatctgagaagttaaccaatgtaacgttatgggcgtcatcattgctgggccatctgggagcacctgccga

SEQ ID NO: 684735 - DNA, 75 bp, synthetic construct
  source 1..75: mol_type = other DNA
gcggttgatgggaaagtccaggcgtatgaatttcgtcctgatctaccggagcttttcccacacccaagcttagcg

SEQ ID NO: 684736 - DNA, 75 bp, synthetic construct
  source 1..75: mol_type = other DNA
gggattcccgctcatgagcttaggccagataagccaaaacttttcccacacccaagcctagcgcgcacggaagat

SEQ ID NO: 684737 - DNA, 75 bp, synthetic construct
  source 1..75: mol_type = other DNA
agaagagccgcgtgctcaatcccaaggagcgggaaaccgtggcccatcacgagatgggccatgcgctggtggcgc

SEQ ID NO: 684738 - DNA, 75 bp, synthetic construct
  source 1..75: mol_type = other DNA
atgacagcacagatatcagcctacgggcggctggtggcagatccccagaccagaacgacaaacagcggcggcagc

SEQ ID NO: 684739 - DNA, 75 bp, synthetic construct
  source 1..75: mol_type = other DNA
ttgagttttccccttgtgaagaaactgcgctggccgttgatgaacttagtcagatttgcgaggggctggcgcggc

SEQ ID NO: 684740 - DNA, 75 bp, synthetic construct
  source 1..75: mol_type = other DNA
ttattctaagcctgataagtactcagaagagcaacttatcatgcggccattccctcaacactcatcaaacgataa

SEQ ID NO: 684741 - DNA, 75 bp, synthetic construct
  source 1..75: mol_type = other DNA
cacacttgctcatagtggggcaatgaccaccgctgagattgcaattgctgtggggcgtgctgattgcgtcaggtc

SEQ ID NO: 684742 - DNA, 75 bp, synthetic construct
  source 1..75: mol_type = other DNA
catccatgataattacgcgttatgcctgcaattctggctcaatggcgtcaatcgccaggagttactgcgtttaat

SEQ ID NO: 684743 - DNA, 75 bp, synthetic construct
  source 1..75: mol_type = other DNA
acaggatttgacgagttaggatttgattatcctgaaacgaatttttccgtctcaacgcatggattattcataaga

SEQ ID NO: 684744 - DNA, 75 bp, synthetic construct
  source 1..75: mol_type = other DNA
tttgatcaatatttcaatgatatatttggggaagctggtcttgataaggctagcaaataccatctgaataaaaat

SEQ ID NO: 684745 - DNA, 75 bp, synthetic construct
  source 1..75: mol_type = other DNA
ggtttacacgtggtggtaacagtagttttgaggatgtaattaacggaattaaaaaattaagttcacaccaagacc

SEQ ID NO: 684746 - DNA, 75 bp, synthetic construct
  source 1..75: mol_type = other DNA
gtagtagaaagtgaagaatatataatttatacgaaatcatcttcacctttatcagcagaatgccagttgtgtgaa

SEQ ID NO: 684747 - DNA, 75 bp, synthetic construct
  source 1..75: mol_type = other DNA
cactgccttgccatgcagcagagggcggagaggttactttctggctgggcgtggtggcattcggcaaacaggccg

SEQ ID NO: 684748 - DNA, 75 bp, synthetic construct
  source 1..75: mol_type = other DNA
ccctcatccagcgtctttatgacgaacgtatcacgcaagcggaaaaagcagccttgtccgaagtcagcaccacca

SEQ ID NO: 684749 - DNA, 75 bp, synthetic construct
  source 1..75: mol_type = other DNA
ccaggcgttcgataagggcgaaatggcagacggtgaaggccgcctgattgactgcaaaaatatcgtcttcttcct

SEQ ID NO: 684750 - DNA, 75 bp, synthetic construct
  source 1..75: mol_type = other DNA
tcagagtcagagtcagagcaggataataccggtgccgaaccggctgatgaagctggcagcgaacagccggaagag

SEQ ID NO: 684751 - DNA, 75 bp, synthetic construct
  source 1..75: mol_type = other DNA
cagcgcatccaatacggatttgggtacgaaaaccacatcgtcgtttgattacggtactaaatcaacgaataacac

SEQ ID NO: 684752 - DNA, 75 bp, synthetic construct
  source 1..75: mol_type = other DNA
atggtgatagggcacacgggtgacaaaattttcgacagtattaccagcaacgcggtagcggaaccagacggtagc

SEQ ID NO: 684753 - DNA, 75 bp, synthetic construct
  source 1..75: mol_type = other DNA
ataataatatggctttattttctgtcaggagggtatattcaatggtttgtattaagtaagcgcattataaactaa

SEQ ID NO: 684754 - DNA, 75 bp, synthetic construct
  source 1..75: mol_type = other DNA
ttttcaggaattgatgagttgttgctggaggcgttcagcagttttactgagatcatgtcccggcaatatcagtaa

SEQ ID NO: 684755 - DNA, 75 bp, synthetic construct
  source 1..75: mol_type = other DNA
cttttttatatccattacgtcaggcgtatcaacagacatatttaagccaaaactgtcagtatggttttgactatg

SEQ ID NO: 684756 - DNA, 75 bp, synthetic construct
  source 1..75: mol_type = other DNA
caactctcactgcagtccaaagaatcgaggggaaagtaaaaacaagatcgaaggactcagtagatacagacataa

SEQ ID NO: 684757 - DNA, 75 bp, synthetic construct
  source 1..75: mol_type = other DNA
tttccgcaaggtggagcactggttcggcgattacgcacagcgttttcagcatgaaagccgtgtgttattgcgtca

SEQ ID NO: 684758 - DNA, 75 bp, synthetic construct
  source 1..75: mol_type = other DNA
ggcggtgttacctggaccaccttaaccgttatcggcaccagctggagctatgccgatggtcgcacactgaccgac

SEQ ID NO: 684759 - DNA, 75 bp, synthetic construct
  source 1..75: mol_type = other DNA
cacgctgggcgcggcgctttctgccggtgagttcgcgcaaatcagcattgatggcggcaccacctggcagaatct

SEQ ID NO: 684760 - DNA, 75 bp, synthetic construct
  source 1..75: mol_type = other DNA
tttagcgtggattatggcaggctcaggagagtctccaaatgcaaaattaagagcaaaaatttctgaggttagaaa

SEQ ID NO: 684761 - DNA, 75 bp, synthetic construct
  source 1..75: mol_type = other DNA
taaaaacatattaacatccttaaaagcgttccaaccgattgagccattaattactctttcaaatcaccttgaata

SEQ ID NO: 684762 - DNA, 75 bp, synthetic construct
  source 1..75: mol_type = other DNA
tcgccagccggaagcgtatcaatggtttctggagcaaatgcaggtttggggcgcgcggttacaccggattagtgc

SEQ ID NO: 684763 - DNA, 75 bp, synthetic construct
  source 1..75: mol_type = other DNA
caaactatttaggggcaattaatatagctagagaaggctatggttatttaaagaagacaaaagggatgttaatta

SEQ ID NO: 684764 - DNA, 75 bp, synthetic construct
  source 1..75: mol_type = other DNA
cgccgcgctcggtattgcccaatcaattttgcaacatttaggatacagtaatgaggataacagcatcgaatctgg

SEQ ID NO: 684765 - DNA, 75 bp, synthetic construct
  source 1..75: mol_type = other DNA
ttaccttgcagccttcggaatagcaaaatctatattagagcatttagggataaaagatgaatttgacagcaatga

SEQ ID NO: 684766 - DNA, 75 bp, synthetic construct
  source 1..75: mol_type = other DNA
acgttcttcatgaaaggttgataaactcgattgaatatggcgccccgcaagaccgtgaacgcattattctgttgg

SEQ ID NO: 684767 - DNA, 75 bp, synthetic construct
  source 1..75: mol_type = other DNA
gtttccatggttaaaagcatgcgtttctgacattagaatgctccgcatcgaagagaataacgatctgagcccagc

SEQ ID NO: 684768 - DNA, 75 bp, synthetic construct
  source 1..75: mol_type = other DNA
ttctccgcaagagattgaaccggaacagtggctggttgccgtgtggggtggggctgactatgtccgcgctgggcg

SEQ ID NO: 684769 - DNA, 75 bp, synthetic construct
  source 1..75: mol_type = other DNA
gtgagttggaatggctggacgatattctgaccaaatacaacactgaccacgccatccttgatgtggcggagctgg

SEQ ID NO: 684770 - DNA, 75 bp, synthetic construct
  source 1..75: mol_type = other DNA
gcatccatgctggcctcgcgtcgggcagaagcggaagctcttggcgtgccgccggatttgattgaagacattctg

SEQ ID NO: 684771 - DNA, 75 bp, synthetic construct
  source 1..75: mol_type = other DNA
gcgaaaaatccacctgtaccactgcgaccatcgcggcctgccgctggcgctcatcagcacggaaggggcaacagc

SEQ ID NO: 684772 - DNA, 75 bp, synthetic construct
  source 1..75: mol_type = other DNA
atcattaattgaaaaagcatatattgattttttaaaggaagaaaaaaaagttgcttctgatgattgtggtatttt

SEQ ID NO: 684773 - DNA, 75 bp, synthetic construct
  source 1..75: mol_type = other DNA
ttaaaggtctataccgtaccagtaaacatagggagttttttgaccatttaaaaactcaattagaatcggttggtt

SEQ ID NO: 684774 - DNA, 75 bp, synthetic construct
  source 1..75: mol_type = other DNA
tttcttttttctctggttcaggatttcttgatcttggatttgaaaaaaatggttatgaagtggttttcgtgaatg

SEQ ID NO: 684775 - DNA, 75 bp, synthetic construct
  source 1..75: mol_type = other DNA
gaagaagctatgttatccggtattaaggttttacaaggtattgaaaagttattagaaatggggcttgaaaatggc

SEQ ID NO: 684776 - DNA, 75 bp, synthetic construct
  source 1..75: mol_type = other DNA
agcagtatgtcaccagcaccgatgccagcggcaactggagcgttggcgtgcctgccagcgtgatttccggccttg

SEQ ID NO: 684777 - DNA, 75 bp, synthetic construct
  source 1..75: mol_type = other DNA
ctgccacggtgttagccgacggcacatggaacctcggcgttccggcggcagacgtcagcaactggccagcgggta

SEQ ID NO: 684778 - DNA, 75 bp, synthetic construct
  source 1..75: mol_type = other DNA
gatattcaggcgctgggcaacggttccctgacggtcaacgcctcggtcaccaatatcgtgggcaacagcggcagc

SEQ ID NO: 684779 - DNA, 75 bp, synthetic construct
  source 1..75: mol_type = other DNA
gcggcaaatgtaggcaactggcctgcgggcacggtgaatatcacggtttcaggtgctactagcgcaggaaacccg

SEQ ID NO: 684780 - DNA, 75 bp, synthetic construct
  source 1..75: mol_type = other DNA
gttttgcaggcgctgggtaacggtgaactgaccatcagcgcctcggtgaccaattccgcaaataataccggcacc

SEQ ID NO: 684781 - DNA, 75 bp, synthetic construct
  source 1..75: mol_type = other DNA
gagcgtgaatgttccggcagcggatttaagcggattaaccgccagcagttacaccgtgaccgccacggtgagcga

SEQ ID NO: 684782 - DNA, 75 bp, synthetic construct
  source 1..75: mol_type = other DNA
attacccatctggtcaccgtcgatctggcagcaatcgccatcaccattaacactctctctggtgatgatgtgatc

SEQ ID NO: 684783 - DNA, 75 bp, synthetic construct
  source 1..75: mol_type = other DNA
ctggttcagcacacctataacctgaacaactattacacgctatcttcgctcatcaaccaggggaatgggacgttt

SEQ ID NO: 684784 - DNA, 75 bp, synthetic construct
  source 1..75: mol_type = other DNA
gcaggggacgttaagcagttcgcaggccaccgacgacactacgccgctgctgaacggtgtactttccgcgccgct

SEQ ID NO: 684785 - DNA, 75 bp, synthetic construct
  source 1..75: mol_type = other DNA
gctacgtcaacggcgtagcaacgctggatgcgcaggccggaaacatcggtgattttgtcaaagtcacccagagcg

SEQ ID NO: 684786 - DNA, 75 bp, synthetic construct
  source 1..75: mol_type = other DNA
cgccatcagcatgaacagcatcaccagcgatgatgtgattaacgccgccgaaaaaggcgcggcgctaacgctctc

SEQ ID NO: 684787 - DNA, 75 bp, synthetic construct
  source 1..75: mol_type = other DNA
aactacaactaccaggtgcgggtgatcgacaccgccggaaatatcggcgcgaccgccagccagatagtcactgtg

SEQ ID NO: 684788 - DNA, 75 bp, synthetic construct
  source 1..75: mol_type = other DNA
ccgtatcgcccagaccggacaatcgtatctttacaccaacgttggtggtgccagcaactggacacaatcagccct

SEQ ID NO: 684789 - DNA, 75 bp, synthetic construct
  source 1..75: mol_type = other DNA
cctataccgttactgcgcaggtaaaaagctcggcgggaaacggcaataacgccaatattagtaacggcacggtga

SEQ ID NO: 684790 - DNA, 75 bp, synthetic construct
  source 1..75: mol_type = other DNA
ggtagcggcgcacagaccatcaccgccagcgtcagcgatcgggcgggtaacagcgatgacgccagccgcaccgtg

SEQ ID NO: 684791 - DNA, 75 bp, synthetic construct
  source 1..75: mol_type = other DNA
ccagcagcggcggggaagcgggcgatgtggtgagcgttgtgctcaacggcaaaacctacacctccaccctggatg

SEQ ID NO: 684792 - DNA, 75 bp, synthetic construct
  source 1..75: mol_type = other DNA
ccacgttaaccgttatcggcaccagctggagctatgccgatggtcgcacactgaccgacggcacctggaactaca

SEQ ID NO: 684793 - DNA, 75 bp, synthetic construct
  source 1..75: mol_type = other DNA
gtgactgtcgatctctcggcgattgccgtcagcatcaacgccattaccgccgatgatgtgattaacgctgctgaa

SEQ ID NO: 684794 - DNA, 75 bp, synthetic construct
  source 1..75: mol_type = other DNA
tgggacgtttgtctgggggcagaacaccattaacaccttcctcagcacggcgggcagcggtggtaactcgacgtc

SEQ ID NO: 684795 - DNA, 75 bp, synthetic construct
  source 1..75: mol_type = other DNA
tctattccgaccacgctggcgcaaattaccagccagaccacgcgcgataccacgccgattatcagcggggtgatc

SEQ ID NO: 684796 - DNA, 75 bp, synthetic construct
  source 1..75: mol_type = other DNA
tattcaggtcaccgtcggcaccctgacgtggtacggctcgattgtggcatttgataaagagggcgacggctatct

SEQ ID NO: 684797 - DNA, 75 bp, synthetic construct
  source 1..75: mol_type = other DNA
cgaagtggcgcagattagcctcgacggcggcgcgacctggatcacgctcaccaccaacggcacgcagtggaccta

SEQ ID NO: 684798 - DNA, 75 bp, synthetic construct
  source 1..75: mol_type = other DNA
ggcggcgtaacctggaccacgcttaccgttaccggcacgacctggcgctataacgacagccgcacgctgaccgat

SEQ ID NO: 684799 - DNA, 75 bp, synthetic construct
  source 1..75: mol_type = other DNA
acgccctgaccgtcgataccgttgcgcccacggtgaccatcgccacggtggcgggtgacgatattatcaacaacg

SEQ ID NO: 684800 - DNA, 75 bp, synthetic construct
  source 1..75: mol_type = other DNA
ccgccgaacaacagcagccgttaacccttaacggctcgaccagcgcggaagtagggcagacggtcaccgtcacct

SEQ ID NO: 684801 - DNA, 75 bp, synthetic construct
  source 1..75: mol_type = other DNA
ccagcgaagcggcggcgggcgtaacggtgtccggcaccagcacggcgcaaaccgggcagacgctcaccgtcacgc

SEQ ID NO: 684802 - DNA, 75 bp, synthetic construct
  source 1..75: mol_type = other DNA
tggcaatttgacagtcaaaggaaatatttccactttctctctttctaatccatgggttattctcggtaacgtgac

SEQ ID NO: 684803 - DNA, 75 bp, synthetic construct
  source 1..75: mol_type = other DNA
ttaccgatcagcacgacgggtaaagcaccgaaagccgggacatttgaaggcgtaacgaccatatatctggaaatg

SEQ ID NO: 684804 - DNA, 75 bp, synthetic construct
  source 1..75: mol_type = other DNA
atgaaagtggcaatagcattatctttattaggatgcgtattcggattttctggtaaggcatttgccggagatgcc

SEQ ID NO: 684805 - DNA, 75 bp, synthetic construct
  source 1..75: mol_type = other DNA
gaggggattgcgattgctaaagaggcgaagaagtacaagggtaagcaaaagaacaaggaattacacagtaaaatc

SEQ ID NO: 684806 - DNA, 75 bp, synthetic construct
  source 1..75: mol_type = other DNA
ggtttcggtaacgtggtggcgaagttttctcaaccactggctattcagacgccacgtgaaggctgggttgagcaa

SEQ ID NO: 684807 - DNA, 75 bp, synthetic construct
  source 1..75: mol_type = other DNA
ttgtgttttttctcctgatacatcgcgatatcggcagcatgcagggcactgtctgcatcggtcgtttcaggatcg

SEQ ID NO: 684808 - DNA, 75 bp, synthetic construct
  source 1..75: mol_type = other DNA
aaaggcggcgttagtcactggctggaaggtcgccgtgagccaaattttgagacactggctgaactttgcgacatg

SEQ ID NO: 684809 - DNA, 75 bp, synthetic construct
  source 1..75: mol_type = other DNA
tttgggggggttcgataaagacttctttttgtattttgaagatactgatttaagtttaagagccacaaaaatgac

SEQ ID NO: 684810 - DNA, 75 bp, synthetic construct
  source 1..75: mol_type = other DNA
aaaataatgttaatgcctgccatgttttcgtgctggctgataacatcaatctatcaacaaatcttcagaataaaa

SEQ ID NO: 684811 - DNA, 75 bp, synthetic construct
  source 1..75: mol_type = other DNA
tcctcggcgtttaaaaacaggcaagggcaaatgcctgaaggtgcgacagagcaagaaattaacctcggctttgat

SEQ ID NO: 684812 - DNA, 75 bp, synthetic construct
  source 1..75: mol_type = other DNA
atgttgtgtcaggtactggcggcgctgggtggcgaatacctgggcaataacgccggattgcaacagaaaatcacg

SEQ ID NO: 684813 - DNA, 75 bp, synthetic construct
  source 1..75: mol_type = other DNA
cagaagcgggagagatgggaggtgaaaaagtgaacgcagtagtagcagaacaagcgcccaacgacaaaaaagaga

SEQ ID NO: 684814 - DNA, 75 bp, synthetic construct
  source 1..75: mol_type = other DNA
tctacaccctaaagcccagcactatcaatatcgtgccttttagtgacgacctgcgcgactatggtgagctggcct

SEQ ID NO: 684815 - DNA, 75 bp, synthetic construct
  source 1..75: mol_type = other DNA
acaggatatattcactaggcttgcctgctgttaaagttcatcagtataaaaataatgctggttttgtaaagcagt

SEQ ID NO: 684816 - DNA, 75 bp, synthetic construct
  source 1..75: mol_type = other DNA
actgttttttgttcagtctctttaaaagggtctgaatattattttcaggaattggaaaacgggatgtcatcatac

SEQ ID NO: 684817 - DNA, 75 bp, synthetic construct
  source 1..75: mol_type = other DNA
actgttttttgttcagcctctttgaacgggtctgagtattattttcaggaactggaaaacgggatgtcatcatac

SEQ ID NO: 684818 - DNA, 75 bp, synthetic construct
  source 1..75: mol_type = other DNA
agcagacccagaacagcgcaaaaaaaattttaatgagctaatttttgaaatagataacaacccattgcaaaatta

SEQ ID NO: 684819 - DNA, 75 bp, synthetic construct
  source 1..75: mol_type = other DNA
gataaaggctttattactcacatgccaaaaagtaaggaggatgcagtcagcatcaccaatcagattgaggcgaaa

SEQ ID NO: 684820 - DNA, 75 bp, synthetic construct
  source 1..75: mol_type = other DNA
cttgctgatttatgttataaaatataatcgagataagttcccattgcttgtggcatatatattctctggcttttt

SEQ ID NO: 684821 - DNA, 75 bp, synthetic construct
  source 1..75: mol_type = other DNA
tggcgagcagcgtcagccgattacagaagcatttattcgctcagcgcgcaatcacgcctgcgatcatctgccgtt

SEQ ID NO: 684822 - DNA, 75 bp, synthetic construct
  source 1..75: mol_type = other DNA
ggccgacgaagtgatcgcacgattgttaatccctgtgaacgctaacattaccgccggtgggattcagtacaataa

SEQ ID NO: 684823 - DNA, 75 bp, synthetic construct
  source 1..75: mol_type = other DNA
tcgtgggcgttggctgatagatcgccgagcagtatttgttggacctggtgaaacaggaattgcgccggaaattca

SEQ ID NO: 684824 - DNA, 75 bp, synthetic construct
  source 1..75: mol_type = other DNA
tcaccggcactgatatcaaaggttaccgatgccgtgatggagcaggttgtagaatggcaaaaccgaccactggat

SEQ ID NO: 684825 - DNA, 75 bp, synthetic construct
  source 1..75: mol_type = other DNA
atcagaagctgattgttggtattctatctaatggatataaatacagcattgataaccatagaacttttgtttctt

SEQ ID NO: 684826 - DNA, 75 bp, synthetic construct
  source 1..75: mol_type = other DNA
agccaaaaagcctagtgttgatatatcaactactatagaaccagctctacaagttagacgatacggattcacagc

SEQ ID NO: 684827 - DNA, 75 bp, synthetic construct
  source 1..75: mol_type = other DNA
ccggtgaactcccccctccactgggagagatgaaaacagaaggtttatcgccgctgctggtgaaggtgaaccagg

SEQ ID NO: 684828 - DNA, 75 bp, synthetic construct
  source 1..75: mol_type = other DNA
gtaaaaggcgttagttacgatacggcgatgtggagttcggcaattaacacccgcaacaacgtgaccactgatgcg

SEQ ID NO: 684829 - DNA, 75 bp, synthetic construct
  source 1..75: mol_type = other DNA
atctttaagaacgcatggcgcagtggataccagtaaagcagatgtttctatcgaagagagtttttgggctattat

SEQ ID NO: 684830 - DNA, 75 bp, synthetic construct
  source 1..75: mol_type = other DNA
tgtgttacagacttatggcgcagcgaatgagaccactattaaaggggggcgcttaatcgttgaaaaagatggatt

SEQ ID NO: 684831 - DNA, 75 bp, synthetic construct
  source 1..75: mol_type = other DNA
tgaaaaaataatcagtatgggagaagaaagtcataagttagcaagagaaagattcgatgcaaatgtaaataatgt

SEQ ID NO: 684832 - DNA, 75 bp, synthetic construct
  source 1..75: mol_type = other DNA
ttgaccactaataccctgtcgggaaacggcaatttttatatgcgtaccgatatggccaatcatcagagcgatcag

SEQ ID NO: 684833 - DNA, 75 bp, synthetic construct
  source 1..75: mol_type = other DNA
ggctaatcatcagagcgatcagctcaacgtcaccggtcaggcaacaggtgatttcaaaatattcgtgacggacac

SEQ ID NO: 684834 - DNA, 75 bp, synthetic construct
  source 1..75: mol_type = other DNA
cgatgtctggcgcaaatgtgattatgatggatgagccagtgactcgttcatcagtgacggcaagtgcggaaaatt

SEQ ID NO: 684835 - DNA, 75 bp, synthetic construct
  source 1..75: mol_type = other DNA
aggcattggagcaggtatccagagaagattacacgctcccgatttttgtgccggaggggcagaagtgggttctcc

SEQ ID NO: 684836 - DNA, 75 bp, synthetic construct
  source 1..75: mol_type = other DNA
cagggcatccgttgcattggtttttattgcctcctgaagagggggagcaaatgttcacccctaacacgatgaaaa

SEQ ID NO: 684837 - DNA, 75 bp, synthetic construct
  source 1..75: mol_type = other DNA
ttgttatggagggcactcaggcaattgacactatccttgatgagcatgcaaccatgcaatcgttgggaagagata

SEQ ID NO: 684838 - DNA, 75 bp, synthetic construct
  source 1..75: mol_type = other DNA
ggaggattactggaggttaaagaggggggattagcgattgcggtagatcagaaagcaggcggtgctattaaagca

SEQ ID NO: 684839 - DNA, 75 bp, synthetic construct
  source 1..75: mol_type = other DNA
atgggattaccgtccttgccgctatcgaaaaagggaggattactggaggttaaagaggggggattagcgattgcg

SEQ ID NO: 684840 - DNA, 75 bp, synthetic construct
  source 1..75: mol_type = other DNA
aaggtgctgatgttgtcggcaacgccggtcaacaaccgcatgaacgatctgaaaaatcaggtcgccttcattact

SEQ ID NO: 684841 - DNA, 75 bp, synthetic construct
  source 1..75: mol_type = other DNA
ctgtcacccgcgcactccagcgtcacggagtgtctgctggagctggccgatgcgctggggattgattacacccgc

SEQ ID NO: 684842 - DNA, 75 bp, synthetic construct
  source 1..75: mol_type = other DNA
ttccgactgcaacaggtgaagaataaccagccccgcattaccggtatccccgtcaaccatcaggggcccctgcct

SEQ ID NO: 684843 - DNA, 75 bp, synthetic construct
  source 1..75: mol_type = other DNA
tttctatttatcgcaataaatatggtaaataccagcaatgcctgagactactaagctgtttaattgtggcgataa

SEQ ID NO: 684844 - DNA, 75 bp, synthetic construct
  source 1..75: mol_type = other DNA
aatgacaatgaccgttcagttattaaactgacatttccattgtccttgctaaaagaagctgatggtaaaaagcga

SEQ ID NO: 684845 - DNA, 75 bp, synthetic construct
  source 1..75: mol_type = other DNA
gatttacgtaataacccaggtgtagatacagcattaggcgttcctcctggccctaactcaggcataacaattaaa

SEQ ID NO: 684846 - DNA, 75 bp, synthetic construct
  source 1..75: mol_type = other DNA
cggtgtgttttgtcgcccgtcctgagcatccactggcgaaatacgccatcctcagctggaatgatcttgctaact

SEQ ID NO: 684847 - DNA, 75 bp, synthetic construct
  source 1..75: mol_type = other DNA
gtgtgattgcggtcgggctacagtgttccgcgtgaagaaagaaatgcttgccagtactggcagtattgagaactg

SEQ ID NO: 684848 - DNA, 75 bp, synthetic construct
  source 1..75: mol_type = other DNA
aatgaagccatcaccagatagcacctacctgatttcgtactcaggaggctgtcactttgccaagcgtagaggtga

SEQ ID NO: 684849 - DNA, 75 bp, synthetic construct
  source 1..75: mol_type = other DNA
ggctatatgaacgacaaggcccgcctcgcaacgctggagcaagcaccgctagggctgtatgccgccgtcagtatt

SEQ ID NO: 684850 - DNA, 75 bp, synthetic construct
  source 1..75: mol_type = other DNA
atgaaaattcactaccttgtcaccaccctcgaagcgggaggcgctgaatttgcgattcctgatattgtgactact

SEQ ID NO: 684851 - DNA, 75 bp, synthetic construct
  source 1..75: mol_type = other DNA
gcgcaattgattaacggctttaatttttacgctggctggaaagcgaaccgcaggattcccataacgagcatgtcg

SEQ ID NO: 684852 - DNA, 75 bp, synthetic construct
  source 1..75: mol_type = other DNA
gcaagattcccataacgagcatgtcgttattaatggggagcccgcagaattcggaaaaaatcgtacgctaaggtt

SEQ ID NO: 684853 - DNA, 75 bp, synthetic construct
  source 1..75: mol_type = other DNA
gggtttaaaattccatgttaacggtgatccaagtgattttaatcaggctgttgagtatttaaaacaagattcaca

SEQ ID NO: 684854 - DNA, 75 bp, synthetic construct
  source 1..75: mol_type = other DNA
caactggtcagtcagagggatgcgcaggggcgggagacccgttatgagtacagcgccgcaggcgacctgacagca

SEQ ID NO: 684855 - DNA, 75 bp, synthetic construct
  source 1..75: mol_type = other DNA
actttattatatcgaaaccgatcatcaacaaatattaaccaaagaacgggagttggtggaatttctttccaggaa

SEQ ID NO: 684856 - DNA, 75 bp, synthetic construct
  source 1..75: mol_type = other DNA
acatcggtacggaagaaattgccgcgctggaaaacgcgatcgatagcgcaatgaacgccgtccccccggttcaca

SEQ ID NO: 684857 - DNA, 75 bp, synthetic construct
  source 1..75: mol_type = other DNA
acggctgaacgtatgatccgtatcgccaccacagaaattcgtaaagttccggcgttaggaaactgtgacactatg

SEQ ID NO: 684858 - DNA, 75 bp, synthetic construct
  source 1..75: mol_type = other DNA
ccagcgagtgtcgaatcagtgttatttaccagtggtcggttattaacccaaatgttcgttgccgggatggggacc

SEQ ID NO: 684859 - DNA, 75 bp, synthetic construct
  source 1..75: mol_type = other DNA
tgattccagcacaaatgtactctccacgccaagcattactaccttggataaccaggaagccttcttcatggtggg

SEQ ID NO: 684860 - DNA, 75 bp, synthetic construct
  source 1..75: mol_type = other DNA
caattgtaaacaaaaaaatgaagacttagatacctggtatgtgggaatgaatgattttgcccgaattgccggagg

SEQ ID NO: 684861 - DNA, 75 bp, synthetic construct
  source 1..75: mol_type = other DNA
gccagacgcccctgaaaattcattttattcaccagatcagcaagacgtggcattgccatttcctgagctcctggc

SEQ ID NO: 684862 - DNA, 75 bp, synthetic construct
  source 1..75: mol_type = other DNA
gcagcgaatgtgatactggaaatctgccgccaggcggatgtggatccggggggtattcacggtcatccacacatg

SEQ ID NO: 684863 - DNA, 75 bp, synthetic construct
  source 1..75: mol_type = other DNA
ttttcagcacctgaatatcgccgtcacgacccggaacggtgtggattatttatatccggtgacaccggctgcgcc

SEQ ID NO: 684864 - DNA, 75 bp, synthetic construct
  source 1..75: mol_type = other DNA
aagcatgggggctttttttacttaatatctttgaggtgaaagaactctcacttgctcatttgcacctccaacagg

SEQ ID NO: 684865 - DNA, 75 bp, synthetic construct
  source 1..75: mol_type = other DNA
ctggcgaacgacgcatatcaaacatacaaaccgatgctggcagcacagctggagagtgtgaacgcgggagtatcc

SEQ ID NO: 684866 - DNA, 75 bp, synthetic construct
  source 1..75: mol_type = other DNA
agatattaaacgccatcgaagaaggtatgcgtaaggccaaagagatgctggatgaactgacacaagccattgaag

SEQ ID NO: 684867 - DNA, 75 bp, synthetic construct
  source 1..75: mol_type = other DNA
ggcacggtaaccacagaaaaataacatcagaaaaaaacattccggacacatcacaaacgggaagggtaacgggcg

SEQ ID NO: 684868 - DNA, 75 bp, synthetic construct
  source 1..75: mol_type = other DNA
acaaaatgtgctgcttggccagatcctggcgaacgacgcatatcaaacatacaaaccgatgctggcagcacagct

SEQ ID NO: 684869 - DNA, 75 bp, synthetic construct
  source 1..75: mol_type = other DNA
cactcaaacgcatgactctgcaaccgtcatctcttccagaactgtttgaattaaaaaatggtgaatggaattata

SEQ ID NO: 684870 - DNA, 75 bp, synthetic construct
  source 1..75: mol_type = other DNA
cgtggaatctccattgccgacgcactatatcgatgacatcacccagcgccgcgaagggtacgaagccaccagcga

SEQ ID NO: 684871 - DNA, 75 bp, synthetic construct
  source 1..75: mol_type = other DNA
aactgggcattatggtgtgcatcgtgttgttactctccgtggcggcggcgtggatcagtaataagacagttgatt

SEQ ID NO: 684872 - DNA, 75 bp, synthetic construct
  source 1..75: mol_type = other DNA
cattaaaactgagatcatccagcgactgaatattcaacgcgatgaagcgcaaattgatgatgatactgcgctgtt

SEQ ID NO: 684873 - DNA, 75 bp, synthetic construct
  source 1..75: mol_type = other DNA
aaaagctaaagtttattcaaagtcagcttgctgatttttgtccggatggtatgcctgatacagcatcgatgaaaa

SEQ ID NO: 684874 - DNA, 75 bp, synthetic construct
  source 1..75: mol_type = other DNA
tccaatcttctggctagttgctctacacgaaaaagaccgaagaaattttgttcggtgcggtgaatccagttatta

SEQ ID NO: 684875 - DNA, 75 bp, synthetic construct
  source 1..75: mol_type = other DNA
cggcagggcttgcgtgggtgttttttaagaagggtgaacaagttcaaggaaaaaaaatcaaccccaaacagaaat

SEQ ID NO: 684876 - DNA, 75 bp, synthetic construct
  source 1..75: mol_type = other DNA
tggcgtgtacaaatataaaagaacgggaattttgcctccgggaggggcactctctaatctcaccagacttaaccc

SEQ ID NO: 684877 - DNA, 75 bp, synthetic construct
  source 1..75: mol_type = other DNA
cctgtttgagaaccttcgccgcaaggggcatcactgccacggcctgacgcacctgtcctgggcagaacgcaaaat

SEQ ID NO: 684878 - DNA, 75 bp, synthetic construct
  source 1..75: mol_type = other DNA
gtttatcgatattttaatacaatattaataccattttctttatatttcttatttttgaaatataggggcttaaat

SEQ ID NO: 684879 - DNA, 75 bp, synthetic construct
  source 1..75: mol_type = other DNA
gttagaagatagggatgtttatgaacatgataaaattagttataaaacagaaggtgaaggcgctgatctctatag

SEQ ID NO: 684880 - DNA, 75 bp, synthetic construct
  source 1..75: mol_type = other DNA
gggcgccaccaactggcagccgaccagcaaactgaagaagccgggaatgcatattctctcctcgctgcaggcggt

SEQ ID NO: 684881 - DNA, 75 bp, synthetic construct
  source 1..75: mol_type = other DNA
taatggtcatcaaagttgccacggcgggcagctattttcactggctgatactgcctttgcctacgcctgcaatag

SEQ ID NO: 684882 - DNA, 75 bp, synthetic construct
  source 1..75: mol_type = other DNA
aaagtaacaacatcactctgattgatgtgttggaaggcgtacatgcatacctggaagggcatcttgatgactttg

SEQ ID NO: 684883 - DNA, 75 bp, synthetic construct
  source 1..75: mol_type = other DNA
atggattaatataacgctgtttaatatatcattggcatttttagcttcagaaatctctagttatttatatggaag

SEQ ID NO: 684884 - DNA, 75 bp, synthetic construct
  source 1..75: mol_type = other DNA
gcagggcgtggcggtcgatattatcaatgctgattgtgatcttacgggttatcagttagttattgccccaatgct

SEQ ID NO: 684885 - DNA, 75 bp, synthetic construct
  source 1..75: mol_type = other DNA
ctatatggttcgcgatggatttgctgatcgtgcccgtgcctatgtcgaagctggtggcaattttgtcaccactta

SEQ ID NO: 684886 - DNA, 75 bp, synthetic construct
  source 1..75: mol_type = other DNA
atgggcgtaatcgtcattggattttacataccaggacagcgcctacacactgacatcattaattattgttgggtg

SEQ ID NO: 684887 - DNA, 75 bp, synthetic construct
  source 1..75: mol_type = other DNA
gctttatatggtgcgggaaggcttcgccgaacgcgcagaagcgtttgtcgccgggggcggccatctggtgaccac

SEQ ID NO: 684888 - DNA, 75 bp, synthetic construct
  source 1..75: mol_type = other DNA
cggaaacaggcaaggcttgttcacaagcattagaactggcgccgtggggatgtgaggtactggaaagagaaataa

SEQ ID NO: 684889 - DNA, 75 bp, synthetic construct
  source 1..75: mol_type = other DNA
ccacagagggggaatatcgctttgactggctggatgaggtgttggataaacttcatgctggcgggatctctgtct

SEQ ID NO: 684890 - DNA, 75 bp, synthetic construct
  source 1..75: mol_type = other DNA
agttggcttttgaatttggtcaccgggttattgctgaattaatccttaatacattaaataagatggctgaaagct

SEQ ID NO: 684891 - DNA, 75 bp, synthetic construct
  source 1..75: mol_type = other DNA
acctggcgatgcaaaatggacatagcgatatcgtgaaagttattctcgaagcattaccctgtctggcccaggaaa

SEQ ID NO: 684892 - DNA, 75 bp, synthetic construct
  source 1..75: mol_type = other DNA
aaatccctttaagctttgaattaactgaattggtacatgaatacattagcacttttaggagaaagcaatctaaag

SEQ ID NO: 684893 - DNA, 75 bp, synthetic construct
  source 1..75: mol_type = other DNA
agaattactcaatctgaagatagctgattttaattataagaagaaaaatttatgcatagtaagaaggcctgacaa

SEQ ID NO: 684894 - DNA, 75 bp, synthetic construct
  source 1..75: mol_type = other DNA
gggtttcgcgtcagggatggaagcccgccagggcggagacagcttcgctggctccgttcacgacagcccgccccg

SEQ ID NO: 684895 - DNA, 75 bp, synthetic construct
  source 1..75: mol_type = other DNA
ttattgctgaattaatccttaatacgttaaataagatggctgaaagctttggctttacggataaccctcgataca

SEQ ID NO: 684896 - DNA, 75 bp, synthetic construct
  source 1..75: mol_type = other DNA
ctgagtgaattgttttataaagaactcgaggataaattttctggcaaggagctggcgacacctctattaaaaagc

SEQ ID NO: 684897 - DNA, 75 bp, synthetic construct
  source 1..75: mol_type = other DNA
atgaacaagcctctgcttatttttcatgcgactgaagatgatactgtgttaattgagcaggccgaaaaaatattc

SEQ ID NO: 684898 - DNA, 75 bp, synthetic construct
  source 1..75: mol_type = other DNA
gcactaatgacgataagccagcaatcaatccacataaagactcagtgatgctttttgcagaatcgcttattccag

SEQ ID NO: 684899 - DNA, 75 bp, synthetic construct
  source 1..75: mol_type = other DNA
aatgaagtaggtattgatgtcgcgactggtaaaactttggtccgcgtaaatccgaaattctaccgtcctgctgag

SEQ ID NO: 684900 - DNA, 75 bp, synthetic construct
  source 1..75: mol_type = other DNA
gaccaggaaaatactttgcttaacatagtgggtatagaatcagcgacgaatccttatgctccacatgtacggttt

SEQ ID NO: 684901 - DNA, 75 bp, synthetic construct
  source 1..75: mol_type = other DNA
ctttgactgatatggtaagtgttaaatctaagattaatccattttcggagcatgtaaggtttcgaaataatctaa

SEQ ID NO: 684902 - DNA, 75 bp, synthetic construct
  source 1..75: mol_type = other DNA
atgaacaaacctctgctgatttttcatgcgactgaagatgataccgtgttaattgagcaggccgagaaaatattc

SEQ ID NO: 684903 - DNA, 75 bp, synthetic construct
  source 1..75: mol_type = other DNA
ccgaagacgatgatgacatcgccgccatactgacaggctatttacataaggcaggaatgaaaactataagagcca

SEQ ID NO: 684904 - DNA, 75 bp, synthetic construct
  source 1..75: mol_type = other DNA
ggatgagtcaggttatctgccttcggccaatatgtatctgggcggtgtggaaggccaccacggctggggtaagga

SEQ ID NO: 684905 - DNA, 75 bp, synthetic construct
  source 1..75: mol_type = other DNA
cgaaaatcataggtggacgttttaccttcacgccgttccagtcattagaattaggtgcgtctcgcattatgcagt

SEQ ID NO: 684906 - DNA, 75 bp, synthetic construct
  source 1..75: mol_type = other DNA
tggtaaagttgagcttattaccgaagataaccaacgctggagcacgcgcctggtgtacgccaaagttaacccgga

SEQ ID NO: 684907 - DNA, 75 bp, synthetic construct
  source 1..75: mol_type = other DNA
gaacaggatatagttactggcatcatatctatacagatggttattatcagcagggttattcattgggcgatgcga

SEQ ID NO: 684908 - DNA, 75 bp, synthetic construct
  source 1..75: mol_type = other DNA
tccgcggggacgcgatgcggccgatgaccggcttcctgatgcagcgggcagagcaggcggcgccggaaacctggt

SEQ ID NO: 684909 - DNA, 75 bp, synthetic construct
  source 1..75: mol_type = other DNA
acgatcccaatgaaccagggaaccaattggccggttttgactttaagttcaaattggagccgaccctgggctggc

SEQ ID NO: 684910 - DNA, 75 bp, synthetic construct
  source 1..75: mol_type = other DNA
gaaccagtcgatcaacaaagcattccctcatgcggatactcttaaaggtgtacagcttggctggagcggggatgt

SEQ ID NO: 684911 - DNA, 75 bp, synthetic construct
  source 1..75: mol_type = other DNA
tcactgtggtacaccaacgctaacaacagcgacagcgatgacgttggggccagcgcagggatagaaataccgttt

SEQ ID NO: 684912 - DNA, 75 bp, synthetic construct
  source 1..75: mol_type = other DNA
catgatacgcgcacaaatatgagccggaccaattatagttatacccatcacatctataaagacggttactaccaa

SEQ ID NO: 684913 - DNA, 75 bp, synthetic construct
  source 1..75: mol_type = other DNA
agggtttgactttaagttcaaacttgaaccaacccttggctggccagtgagtttctatgggcagatggttggtga

SEQ ID NO: 684914 - DNA, 75 bp, synthetic construct
  source 1..75: mol_type = other DNA
catgatacacgtaccaatatgagccggaccaattacagttatacccatcatatctataaggatggctactatcag

SEQ ID NO: 684915 - DNA, 75 bp, synthetic construct
  source 1..75: mol_type = other DNA
gactgtctgctttaaaagccgatttccgggtcaccggctacacctcgaccgaccagccgggcaccccgcaggggt

SEQ ID NO: 684916 - DNA, 75 bp, synthetic construct
  source 1..75: mol_type = other DNA
tcgctgccaataacggcaaagatatgctgatcatgctgcaccaaatgggcaatcacgggcctgcgtattttaagc

SEQ ID NO: 684917 - DNA, 75 bp, synthetic construct
  source 1..75: mol_type = other DNA
ttggtgatatttgtcgtgaagtaaagctcactactaaagacccgatagcagaaggctatgagcgttatattggtt

SEQ ID NO: 684918 - DNA, 75 bp, synthetic construct
  source 1..75: mol_type = other DNA
tggcgggcgaagggatgttaatcctctggagtacctcgtatctcgacgaagccgagcagtgccgtgacgtgttac

SEQ ID NO: 684919 - DNA, 75 bp, synthetic construct
  source 1..75: mol_type = other DNA
aaaaagcttattatgcttccatcggaaacgatgatctggcagcctgagttcacagataaaacactctccaggaaa

SEQ ID NO: 684920 - DNA, 75 bp, synthetic construct
  source 1..75: mol_type = other DNA
cccaacccaaatccgaaaccggatccaaaaccagacccaaaaccggatccgaaaccagacccgactcccgctcca

SEQ ID NO: 684921 - DNA, 75 bp, synthetic construct
  source 1..75: mol_type = other DNA
aatatctaagttccttaaaatagaaataaacaagattaaggatcttcactttcccgccgaatactttataactaa

SEQ ID NO: 684922 - DNA, 75 bp, synthetic construct
  source 1..75: mol_type = other DNA
tttggaaaaacatcagtagagttacgagtgctattggtttacttcatgctcagggattactacatcgacatttgg

SEQ ID NO: 684923 - DNA, 75 bp, synthetic construct
  source 1..75: mol_type = other DNA
tttggaacggaaatgaatttgttaacccaagtggtatagatgccccatttaagaagttttatgataataacttca

SEQ ID NO: 684924 - DNA, 75 bp, synthetic construct
  source 1..75: mol_type = other DNA
gcgattggcctcgcgctgaacatttcattcattatcgtcctgaaaggattgtggttacgccgcaaagcgaaagcc

SEQ ID NO: 684925 - DNA, 75 bp, synthetic construct
  source 1..75: mol_type = other DNA
tgtctcagcaggctattgggctacttgaacaaatgagaggattacatgagacgctggtattcccttcccccagaa

SEQ ID NO: 684926 - DNA, 75 bp, synthetic construct
  source 1..75: mol_type = other DNA
ggcagcctgagttcacagataaaacactctccaggaaacccggggcggttcagacctgtaccaaccgtgagcttc

SEQ ID NO: 684927 - DNA, 75 bp, synthetic construct
  source 1..75: mol_type = other DNA
tatgacagttttgtgccggttgaatttggtcgcttcaatggcggggtaattgatgcaagatcaaacgcttcaacg

SEQ ID NO: 684928 - DNA, 75 bp, synthetic construct
  source 1..75: mol_type = other DNA
catatacaccacccagagaatgttacaatgcaatctcatcgctatacacaacaagaattactaacttcaatccaa

SEQ ID NO: 684929 - DNA, 75 bp, synthetic construct
  source 1..75: mol_type = other DNA
gcggatcagcaacggatcgcgtttcaacgccaacggtgcctacggtgcggtgaaattctggaaccagtggctctc

SEQ ID NO: 684930 - DNA, 75 bp, synthetic construct
  source 1..75: mol_type = other DNA
acccaaggcccgatacggcatgcggactgcaggcagagaaaactggccgattttctctgcactggagggataata

SEQ ID NO: 684931 - DNA, 75 bp, synthetic construct
  source 1..75: mol_type = other DNA
gaaagatctgccaagacgtgtttttgacgccacgctggatatgctttccgggcgctatccctctggcgatttttc

SEQ ID NO: 684932 - DNA, 75 bp, synthetic construct
  source 1..75: mol_type = other DNA
gcgctcagccagcgatgtggcagcatttcttggtggcgatcgcccggttacggtagtcaacccgcccgcaatgcg

SEQ ID NO: 684933 - DNA, 75 bp, synthetic construct
  source 1..75: mol_type = other DNA
caacgatttagtaatcaaatgtagcggtgaaaattcaccatttgttaaattaaatgagcttaattctcgaggcga

SEQ ID NO: 684934 - DNA, 75 bp, synthetic construct
  source 1..75: mol_type = other DNA
ggtgatgtttgcctggaccatgaccgccgtgatgatcatgaggagctttcttatggtggcgcggcggtggcggcg

SEQ ID NO: 684935 - DNA, 75 bp, synthetic construct
  source 1..75: mol_type = other DNA
actgcaggcagagaaaactggccgattttctctgcactggagggataatacaaggcctgataagacgcgccagcg

SEQ ID NO: 684936 - DNA, 75 bp, synthetic construct
  source 1..75: mol_type = other DNA
gttctacaaacagttcgcggtgaccatcgccatctcgacggtgatctcggccatcaactcgctgacgctctcccc

SEQ ID NO: 684937 - DNA, 75 bp, synthetic construct
  source 1..75: mol_type = other DNA
atggctcgctggtccgcctgcgcgacgtggcgcgcatcgagatgggttccggtagctatgcgctgcgctcccagc

SEQ ID NO: 684938 - DNA, 75 bp, synthetic construct
  source 1..75: mol_type = other DNA
cagatccagatttttggctccggtgaatatgcgatgcgcgtctggctggatcccaataaggtcgctgcccgcggt

SEQ ID NO: 684939 - DNA, 75 bp, synthetic construct
  source 1..75: mol_type = other DNA
tgtttgagccagggttccatgacatggatgaagctggattaaaatcgtattgtgtcgattgctttccttcatcat

SEQ ID NO: 684940 - DNA, 75 bp, synthetic construct
  source 1..75: mol_type = other DNA
gaaacacaaaaactggtcgaatggtttttaacgccgcaggggcagagtccggtagaagatgtgggatatgtgccg

SEQ ID NO: 684941 - DNA, 75 bp, synthetic construct
  source 1..75: mol_type = other DNA
cggtcttttttggcctgaaaccgttcgaccagcgcaaacacacggcggcggaaattaacgcggagatcaacgcca

SEQ ID NO: 684942 - DNA, 75 bp, synthetic construct
  source 1..75: mol_type = other DNA
tgaggcttgttgaaaataaatgttaccctttgagtagtggggaaatatcgtttattaagttttgtgtacaagtct

SEQ ID NO: 684943 - DNA, 75 bp, synthetic construct
  source 1..75: mol_type = other DNA
gtcgatgaccgctgagaatatgaaaaatatcggtatgacggcccaactcctcgaacaggccgcgaaagaagttgg

SEQ ID NO: 684944 - DNA, 75 bp, synthetic construct
  source 1..75: mol_type = other DNA
gggtcgaacttttcaaccttacccgcgaccgcttcctcaacgaaatctccgacattccgatcgccaataaagcct

SEQ ID NO: 684945 - DNA, 75 bp, synthetic construct
  source 1..75: mol_type = other DNA
caggtggactaatttatgccgtatctggtgtacctggattgattgctgcaaacagcattactaacagtgcttacc

SEQ ID NO: 684946 - DNA, 75 bp, synthetic construct
  source 1..75: mol_type = other DNA
ttagtagtaaatgataacgatctgcgaaacgaccttgcctggctttccgatcgcggggttatccgtctgagcctg

SEQ ID NO: 684947 - DNA, 75 bp, synthetic construct
  source 1..75: mol_type = other DNA
gagacgtttatcaatcggttcgcctgagtacctccctgtggtataccaatgctgacaacagcgatagcgacgacg

SEQ ID NO: 684948 - DNA, 75 bp, synthetic construct
  source 1..75: mol_type = other DNA
aaggacatcatggttggggtaagaatgcggtaaactggtacgttgaggctcacgatacaagatctaatatgagcc

SEQ ID NO: 684949 - DNA, 75 bp, synthetic construct
  source 1..75: mol_type = other DNA
gttaaagacttagaacgacttaaaaagcgctttgatacagaagtaatcaatgccgagttggcgagtcagttaggt

SEQ ID NO: 684950 - DNA, 75 bp, synthetic construct
  source 1..75: mol_type = other DNA
attttaagggggaagttgttgatgctgcatgtgctgtaaacactaattcagcaaatcaaacggttttgctggggc

SEQ ID NO: 684951 - DNA, 75 bp, synthetic construct
  source 1..75: mol_type = other DNA
aataaaagcatgcaatattttgatgattctgcaaagatagagcatgcatgctccgtaataaatcatattaatttt

SEQ ID NO: 684952 - DNA, 75 bp, synthetic construct
  source 1..75: mol_type = other DNA
atggattatgtttttttatgtgtattgattatatataacaaatcaaacaacataaagtgtgatttcattttcttt

SEQ ID NO: 684953 - DNA, 75 bp, synthetic construct
  source 1..75: mol_type = other DNA
gtgagttgtaaaggttcagttgattctacgattacggatttattagaaaaagcattgaataaagccttattagca

SEQ ID NO: 684954 - DNA, 75 bp, synthetic construct
  source 1..75: mol_type = other DNA
acgcgagcttgtttcagccatacagcgactatgacatggtggcgattatgcctcctccctctaggagaggaacag

SEQ ID NO: 684955 - DNA, 75 bp, synthetic construct
  source 1..75: mol_type = other DNA
cgaattattgcttcaagaagaacaacatttaccagttgatgttgaagatataggatttaaaatccactatataaa

SEQ ID NO: 684956 - DNA, 75 bp, synthetic construct
  source 1..75: mol_type = other DNA
gatggaattaccactttttgctgtcatcaccatcattttcgcttgttgtattgcttactctgaaggggtggatgc

SEQ ID NO: 684957 - DNA, 75 bp, synthetic construct
  source 1..75: mol_type = other DNA
atggactcaattgattgggatgggatcagatattccacctgagactccctcaaatcatttatgttctgccaaata

SEQ ID NO: 684958 - DNA, 75 bp, synthetic construct
  source 1..75: mol_type = other DNA
ttccgtattctcgtgggatggtgtgtccgcacttaatagaatttctttatacaaagagaaattacaaatcgcact

SEQ ID NO: 684959 - DNA, 75 bp, synthetic construct
  source 1..75: mol_type = other DNA
ttatgatgagcgtatcttggaaaaaacggcatcttttattagattgaatgagaataaacaacctgatcttattgg

SEQ ID NO: 684960 - DNA, 75 bp, synthetic construct
  source 1..75: mol_type = other DNA
atatgtcattggcaatggtataagaaatatttttaatttgaaattaaatagtgaaacggaaatttcctgggaaga

SEQ ID NO: 684961 - DNA, 75 bp, synthetic construct
  source 1..75: mol_type = other DNA
gaacgcaccatttggggcgtggatcttgaaagagccatcggtgaaagcgaagccaagtatggtgatgaggtcgtc

SEQ ID NO: 684962 - DNA, 75 bp, synthetic construct
  source 1..75: mol_type = other DNA
atggctacgaccccaaccccgttacaccctgaatttacctttcactttctggctgttcgccgttccgacctgaac

SEQ ID NO: 684963 - DNA, 75 bp, synthetic construct
  source 1..75: mol_type = other DNA
acgcacctgatgaagcaacagcccgtcgtatgctggcacgtgattttgtgttggtgtttgctgcctgcatccctt

SEQ ID NO: 684964 - DNA, 75 bp, synthetic construct
  source 1..75: mol_type = other DNA
caaatctactcttaaccctgaaaaacctaattttatagatactgtaacaggcgtaaattgtaattcagtaatttc

SEQ ID NO: 684965 - DNA, 75 bp, synthetic construct
  source 1..75: mol_type = other DNA
gggatggaatttttatcagtatccgttgaatccgatctcaaatatagatccattaggattagaaacactaaaatg

SEQ ID NO: 684966 - DNA, 75 bp, synthetic construct
  source 1..75: mol_type = other DNA
taaaagttcatggtaaacttagggaagaacttcaaacacttggcgatgagatgaattatgacattgtactgatcg

SEQ ID NO: 684967 - DNA, 75 bp, synthetic construct
  source 1..75: mol_type = other DNA
ggcttcgcgcgttcttattttatggtttacgcgccgctgcccgcagcgttggtcgagtggctacgggaaattctg

SEQ ID NO: 684968 - DNA, 75 bp, synthetic construct
  source 1..75: mol_type = other DNA
gaagagaatggagcgcgaacgcgcttacagtgctcgtctccgtgagaaaatcgagaaggtatggaacgagtgttt

SEQ ID NO: 684969 - DNA, 75 bp, synthetic construct
  source 1..75: mol_type = other DNA
ttaataaaaatgtcgtcgttctggctggaaatcatgaaatcaattttaatggtaactatactgcacgactagcaa

SEQ ID NO: 684970 - DNA, 75 bp, synthetic construct
  source 1..75: mol_type = other DNA
ctgcaaaaacacacaatcaaccttgcgggcttcatgcaactaattgagcatatatgttttattcttattatggtc

SEQ ID NO: 684971 - DNA, 75 bp, synthetic construct
  source 1..75: mol_type = other DNA
tgaaattcaccgcagcgctgagtcagaagctgatttgctgcaaaagcgtggtgctctgcaggtattaatgggatg

SEQ ID NO: 684972 - DNA, 75 bp, synthetic construct
  source 1..75: mol_type = other DNA
acagacacaaataacgacctggctgcgctgtatatgctgaaggtgcagaaaacgaaaaacggcattccgtatgtt

SEQ ID NO: 684973 - DNA, 75 bp, synthetic construct
  source 1..75: mol_type = other DNA
gcggaaatccgcatctgggtgcgcggtcagtccggtcgggaaatcacggcagcgtcacgacttcatgtgctgagt

SEQ ID NO: 684974 - DNA, 75 bp, synthetic construct
  source 1..75: mol_type = other DNA
tgccgtttggatcactggtacgggaaaacagtatcggaataaccagtatgtgggtgatgacgggcaagtttattt

SEQ ID NO: 684975 - DNA, 75 bp, synthetic construct
  source 1..75: mol_type = other DNA
cgcagccggcacatgttggcctggtactgaacaggcaggcgctgcactcgcgcggcgagaacggaagcgtacgca

SEQ ID NO: 684976 - DNA, 75 bp, synthetic construct
  source 1..75: mol_type = other DNA
gatggatagcaatacgctggcggcgttaaatccaaatcggttatgggtgcggaagttgttgaaagggaaagcggt

SEQ ID NO: 684977 - DNA, 75 bp, synthetic construct
  source 1..75: mol_type = other DNA
atcgaaagcggaaatcattgggaatggcgtggatgagacaacgctgacagcaacagtgaaagatccttttgataa

SEQ ID NO: 684978 - DNA, 75 bp, synthetic construct
  source 1..75: mol_type = other DNA
ctggaacgatgtcctgatgagtcagggaagcctcggtttcccgaatgctcgctacctgcgcgatttcattgcgag

SEQ ID NO: 684979 - DNA, 75 bp, synthetic construct
  source 1..75: mol_type = other DNA
ttaatggtaaagttattgctccagcttgtaccctggtagctgcgacgaaagattccgtggtgactttgccagatg

SEQ ID NO: 684980 - DNA, 75 bp, synthetic construct
  source 1..75: mol_type = other DNA
gcgcggtggtaaggcagcacagccggacggccatacgctggcgcggctgtggggggcgctgccgccggatatccg

SEQ ID NO: 684981 - DNA, 75 bp, synthetic construct
  source 1..75: mol_type = other DNA
ggggaacgccagtatcatcccgcgcaattaccgtaaatacctctatcacgcctatctggcctacatggaggcaaa

SEQ ID NO: 684982 - DNA, 75 bp, synthetic construct
  source 1..75: mol_type = other DNA
caaataatagttcatttagctacggagataaccgattcgagaagtctcaaggtagcaagtggacatttcaggaat

SEQ ID NO: 684983 - DNA, 75 bp, synthetic construct
  source 1..75: mol_type = other DNA
gcgtgcaattgcatttgtcgaaagcgaagtagatgaatggatcgcatctgcaattgaacgttcacgtaaaaatgc

SEQ ID NO: 684984 - DNA, 75 bp, synthetic construct
  source 1..75: mol_type = other DNA
gttatagatggtggtatggtcgcaccatttagccatcgccaacaatcatggtgtaaatcgcaaggggtttgtgaa

SEQ ID NO: 684985 - DNA, 75 bp, synthetic construct
  source 1..75: mol_type = other DNA
accagttcagccaagggccgcgttgaacgggcgcacctcacgttacaggatcgcctggtcaaggagttgcggctc

SEQ ID NO: 684986 - DNA, 75 bp, synthetic construct
  source 1..75: mol_type = other DNA
tcaaactagaaatcttttatggatatcaaggctaaattatgtaccaatatattggaaacttaaacagtttttact

SEQ ID NO: 684987 - DNA, 75 bp, synthetic construct
  source 1..75: mol_type = other DNA
aaagatgagtttcaggctctggcccgggcagaagatctccaggtcgctggcggtacggcaatcgtctacgcaggt

SEQ ID NO: 684988 - DNA, 75 bp, synthetic construct
  source 1..75: mol_type = other DNA
tcgtgaactgggcgcaacgctgagttacaacatgcgtctggggaacggtatggaagttgagccgtggctgaaggc

SEQ ID NO: 684989 - DNA, 75 bp, synthetic construct
  source 1..75: mol_type = other DNA
agttgggaacatgaaagtggtttctatctggacggtgtcgtgaagctgaaccgttttaaaagtaacgtagcaggt

SEQ ID NO: 684990 - DNA, 75 bp, synthetic construct
  source 1..75: mol_type = other DNA
gtagacaataatgatttcagtagagttgacgaagagattcttttagagttttatggctatgaaacagatcaagac

SEQ ID NO: 684991 - DNA, 75 bp, synthetic construct
  source 1..75: mol_type = other DNA
tcattcccaaatttgacgaaacaacggaggaactgtctaagtcgctaagtatcgactcaccatctgtcaggcttg

SEQ ID NO: 684992 - DNA, 75 bp, synthetic construct
  source 1..75: mol_type = other DNA
tatactcattacgaagccaggaaatttttgaatagtaatgataactcattaagcctactgtcttgggaaatgatt

SEQ ID NO: 684993 - DNA, 75 bp, synthetic construct
  source 1..75: mol_type = other DNA
cggatcagccatattcagtgatggctgaaacgtggatagcccaattctttcaacaaatagccaaccggggagtat

SEQ ID NO: 684994 - DNA, 75 bp, synthetic construct
  source 1..75: mol_type = other DNA
tcagggcgcttctggtgtggatatggggcgtaatattttccagtctgaccatccggtggcgatgatgaaagccgt

SEQ ID NO: 684995 - DNA, 75 bp, synthetic construct
  source 1..75: mol_type = other DNA
ttgaaagggtttctgatggaagatccgaagcaggtgttgggggagaaagtgccggtgaataatccgtggctgaag

SEQ ID NO: 684996 - DNA, 75 bp, synthetic construct
  source 1..75: mol_type = other DNA
gtgatgttacatcccgcctgagtgcggactacttaatccatgatttgcagacgggtcacttcgtgacagtactgc

SEQ ID NO: 684997 - DNA, 75 bp, synthetic construct
  source 1..75: mol_type = other DNA
ccagccgatcgctataacaatgcactggcgcagagttgttatctggtgactgcacctgagctcggtaaaggtgaa

SEQ ID NO: 684998 - DNA, 75 bp, synthetic construct
  source 1..75: mol_type = other DNA
agaactcagacgaggcgctgaacatcaaacgggatgccgacccgacgtttgattttatcggctatctggaaaccc

SEQ ID NO: 684999 - DNA, 75 bp, synthetic construct
  source 1..75: mol_type = other DNA
atgcataacatcaatcttaacttggcaatagctaagtttgattttctactacaggaattgagtgatattaaagag

SEQ ID NO: 685000 - DNA, 75 bp, synthetic construct
  source 1..75: mol_type = other DNA
gggactaatggtggagggaagtcgactatattaggtgctgtagctctcgcttataaaaatgttaagccaagcaag

SEQ ID NO: 685001 - DNA, 75 bp, synthetic construct
  source 1..75: mol_type = other DNA
aatgcacccctttagtcgaacaaaacctgatgccatggcttgccacaggcgctgctgcgttaatcacgaccttag

SEQ ID NO: 685002 - DNA, 75 bp, synthetic construct
  source 1..75: mol_type = other DNA
aacacaaaacgattgtattataggtaatgatgtgtggctcggtacaggagttactgtattacgaggggtaagaat

SEQ ID NO: 685003 - DNA, 75 bp, synthetic construct
  source 1..75: mol_type = other DNA
cctcattaactgagcaggaaacgtcggttttactggatattattcgcgatctacaacagcacggtatcgcctgta

SEQ ID NO: 685004 - DNA, 75 bp, synthetic construct
  source 1..75: mol_type = other DNA
gaagtgggttttagatgatattgactttttttctaaaaaattcaacattcaagccgggcttattctaactattac

SEQ ID NO: 685005 - DNA, 75 bp, synthetic construct
  source 1..75: mol_type = other DNA
cacggcaggtggttaccccagcgtggttaaagtaagtcaatatcataatgagaaccctactataaattatccatc

SEQ ID NO: 685006 - DNA, 75 bp, synthetic construct
  source 1..75: mol_type = other DNA
aacgcagacctataacatcggaaaaaatattcgtaatttcagacttggtgtccatgcatattgtgcatggacgta

SEQ ID NO: 685007 - DNA, 75 bp, synthetic construct
  source 1..75: mol_type = other DNA
agtagcaaaaggtgatggttcagaagcaacgttgatttacaaaaactcagatattaatcttgggaatggtatact

SEQ ID NO: 685008 - DNA, 75 bp, synthetic construct
  source 1..75: mol_type = other DNA
gccgcttcagccaaagtgattgtggacaatgcagatttatctgcgaactccatgtcgattggtgaaggcgataca

SEQ ID NO: 685009 - DNA, 75 bp, synthetic construct
  source 1..75: mol_type = other DNA
ctgaaccagatgcacaccgccatcaacatgggcggaaatgacatcaataacgccggtaacctcaatggtcagaaa

SEQ ID NO: 685010 - DNA, 75 bp, synthetic construct
  source 1..75: mol_type = other DNA
atactttcgtgccaatccggtgtctggaagaataatatcagcgatgcactggtttttgattattcggcctgttat

SEQ ID NO: 685011 - DNA, 75 bp, synthetic construct
  source 1..75: mol_type = other DNA
aatttggtgtatcaacgtcaacagagggtaacgccgagaacgctgttaaaaatgctctcgatttcactggcggtg

SEQ ID NO: 685012 - DNA, 75 bp, synthetic construct
  source 1..75: mol_type = other DNA
gcggtgacagcggggataactccaccacgataaacatgtttacggctatcagtcagggggtactggctgacggta

SEQ ID NO: 685013 - DNA, 75 bp, synthetic construct
  source 1..75: mol_type = other DNA
cgtttcccgctggctgacggcgtgtggtgggagcggatcgttgaccgcccacagcgtttcggcgatcgcaaagcc

SEQ ID NO: 685014 - DNA, 75 bp, synthetic construct
  source 1..75: mol_type = other DNA
gaaccacagctcaaccactcgcgcgatgaacagcttatcgccgttaaccttaaccactttattcaactggctacc

SEQ ID NO: 685015 - DNA, 75 bp, synthetic construct
  source 1..75: mol_type = other DNA
aagtattgctgtaggtattgggagtaaatctaatatttctttaagcgcggctagtggaagctctatatcctcaac

SEQ ID NO: 685016 - DNA, 75 bp, synthetic construct
  source 1..75: mol_type = other DNA
atataaagaaataatatggggagaacttccttcatgtgagcataactactattatggatattttcaaaattatga

SEQ ID NO: 685017 - DNA, 75 bp, synthetic construct
  source 1..75: mol_type = other DNA
ctgacaggtcgacagccggttaaacatcactaccgagtaaacgaagacaaaagtccgccattgccaaatatactg

SEQ ID NO: 685018 - DNA, 75 bp, synthetic construct
  source 1..75: mol_type = other DNA
ggattaaaatgccggctataaatagtgcagacattttgaataacccatacctgacattcggtgtaacctataatg

SEQ ID NO: 685019 - DNA, 75 bp, synthetic construct
  source 1..75: mol_type = other DNA
gagctttacttggctcgctgaagcaaaaagagggaattcgtataatggtgtctttgaaggcatgttacagttagt

SEQ ID NO: 685020 - DNA, 75 bp, synthetic construct
  source 1..75: mol_type = other DNA
atgtgacagacattaccaggagtgcgacttacccggtgctgattgacagcattgcggtggaagtgaacagcacag

SEQ ID NO: 685021 - DNA, 75 bp, synthetic construct
  source 1..75: mol_type = other DNA
tcgtgcagttgatactaagatggggaatgttattgatacgtcaactcggtttttggaagaattaaatagagatat

SEQ ID NO: 685022 - DNA, 75 bp, synthetic construct
  source 1..75: mol_type = other DNA
cgggaaatgaagttctgacagtggtaaaaaccactgacggcgcggcctcgttcagcgcgtcttctcaggttgagt

SEQ ID NO: 685023 - DNA, 75 bp, synthetic construct
  source 1..75: mol_type = other DNA
atggcatcccccctttttgaggttcacatgaaacgctttgcactgatagctgtgaaactcgttgcctttactggt

SEQ ID NO: 685024 - DNA, 75 bp, synthetic construct
  source 1..75: mol_type = other DNA
aacgtaaaatgcgtccgtcaaaaagaacagttcgcttcgaaactcagcctggataccagctccagcacgactggg

SEQ ID NO: 685025 - DNA, 75 bp, synthetic construct
  source 1..75: mol_type = other DNA
gcgtcacccgcgcggaaaacggcgcgaggatgctggaatcggtcatcgacggcaatatgctgccgccgctctccc

SEQ ID NO: 685026 - DNA, 75 bp, synthetic construct
  source 1..75: mol_type = other DNA
gacttcttcaaacctgccctgctggcgcgtatggaagtggtgccgtatctgccgctgtcgaaagagacgctcgcc

SEQ ID NO: 685027 - DNA, 75 bp, synthetic construct
  source 1..75: mol_type = other DNA
aaaaatacaacgcctggattgatcagtattgccggcttgtcgcgcaaagaccatttaagaagagagcaaaccatg

SEQ ID NO: 685028 - DNA, 75 bp, synthetic construct
  source 1..75: mol_type = other DNA
gcgtgctgcctggctttaaaagcacgatggtcgcaccgttcagttcggtcaccaccagcacgggcagctatagcg

SEQ ID NO: 685029 - DNA, 75 bp, synthetic construct
  source 1..75: mol_type = other DNA
atgaaaagggagagaaaagcgatgaatttctcgtcgccctgccgcctatccagcgactggagccaaaagcgactt

SEQ ID NO: 685030 - DNA, 75 bp, synthetic construct
  source 1..75: mol_type = other DNA
ggatggaaacgactattaacagtagacgatctcaattcatctaccgatcttgctgtcaggtcattaaccacatct

SEQ ID NO: 685031 - DNA, 75 bp, synthetic construct
  source 1..75: mol_type = other DNA
cctctactatcaggccaacaccattaccgacgaaagctggtattactttcgcattaacttcccggacgacacgcc

SEQ ID NO: 685032 - DNA, 75 bp, synthetic construct
  source 1..75: mol_type = other DNA
gagcaaggacaggctgttttcaccggctctaccactatcgcagcgacatatacactcacggcgaaagtggaacag

SEQ ID NO: 685033 - DNA, 75 bp, synthetic construct
  source 1..75: mol_type = other DNA
gcgtcaaaccgcttgcagacggtaatatcatggtgaacgccgacaaggagggtaaagcggaactgaaagtggtct

SEQ ID NO: 685034 - DNA, 75 bp, synthetic construct
  source 1..75: mol_type = other DNA
cagcggtgaaggcggaacatcgtactggggtggcggtggacgcgcaggcgctggcggtggcgttagcggtaaggc

SEQ ID NO: 685035 - DNA, 75 bp, synthetic construct
  source 1..75: mol_type = other DNA
gtttcaaaaataccctcaccttcggctccatcatctggtgtcgtaaacgcgacgattacaaaccgctgtggcgta

SEQ ID NO: 685036 - DNA, 75 bp, synthetic construct
  source 1..75: mol_type = other DNA
cggccatgtacatccgaaatacaacacgccggatgtctccatcatcctgcaaggggcgctggggatcttcttcat

SEQ ID NO: 685037 - DNA, 75 bp, synthetic construct
  source 1..75: mol_type = other DNA
atggcgggtacgaaatgacgcctgtgaaggtgacaattaacgccgttgctgcagagactgaaaatggcgaggagg

SEQ ID NO: 685038 - DNA, 75 bp, synthetic construct
  source 1..75: mol_type = other DNA
agctggggatcaactgggacacgctggcgtgtgcgttatcgtgtgtcagagacgctgagcagaatatgcccggca

SEQ ID NO: 685039 - DNA, 75 bp, synthetic construct
  source 1..75: mol_type = other DNA
taaagcagcacagcgtagcattacagcgccagacaggataggagaaggaaaaacatggggtttatcaacgagata

SEQ ID NO: 685040 - DNA, 75 bp, synthetic construct
  source 1..75: mol_type = other DNA
atgtgtttatccaggatgacccgggaatgcatttccgtcggattatccgcaacacggaaggtcagcgacgctggc

SEQ ID NO: 685041 - DNA, 75 bp, synthetic construct
  source 1..75: mol_type = other DNA
ggttttcacgtcatcaggtacgtacaccccgacgccaggaacaaaacggatcagggtcacaataacgggcggcgg

SEQ ID NO: 685042 - DNA, 75 bp, synthetic construct
  source 1..75: mol_type = other DNA
cgaacctaagccgctctgaacttcttcgcgccattatcaaaacaaaaacaaatggcggcggcgttgttattaacg

SEQ ID NO: 685043 - DNA, 75 bp, synthetic construct
  source 1..75: mol_type = other DNA
ggctcaaattggactttcaggctcatttcagtttgatatctccaaagtgaataaatgggattcggaacaacagga

SEQ ID NO: 685044 - DNA, 75 bp, synthetic construct
  source 1..75: mol_type = other DNA
ctggccctaacgtgctaagtagttatgattttaatactcaaacttgggatgatgtatcatcatctgacaaaaaag

SEQ ID NO: 685045 - DNA, 75 bp, synthetic construct
  source 1..75: mol_type = other DNA
tatatctatattgcgcggtatttacctgttcattcttctgagatttctaatgcgctagatcatttggcgatgagt

SEQ ID NO: 685046 - DNA, 75 bp, synthetic construct
  source 1..75: mol_type = other DNA
cgcatacaaccgggaaaaagcccgccaaaaatgtgcgccgtgcatacgcgcacatcgagaaggcatacaaagaac

SEQ ID NO: 685047 - DNA, 75 bp, synthetic construct
  source 1..75: mol_type = other DNA
gagcgctgccactgtaatacgcgtgaatgcgtcgttactgccgctaaaaaatcaatacgcaactggatatctaaa

SEQ ID NO: 685048 - DNA, 75 bp, synthetic construct
  source 1..75: mol_type = other DNA
aactatccggcgcaggcgttaagtcaactggccgcgctgttcgtggataaaaagcgccctttactggtctgggcg

SEQ ID NO: 685049 - DNA, 75 bp, synthetic construct
  source 1..75: mol_type = other DNA
acaacgtttcggcgatcgcaaagccaactttcacggcgcttacagcgggctatggtggcaattgccaacgctgaa

SEQ ID NO: 685050 - DNA, 75 bp, synthetic construct
  source 1..75: mol_type = other DNA
gcaagacaaccgttgtgtttagcctcagagtatcagaggaagatgctggtctttatgatgccatgtgtaaagatg

SEQ ID NO: 685051 - DNA, 75 bp, synthetic construct
  source 1..75: mol_type = other DNA
gtggtggcctatgccaaccaggatttggtctattccgatctggctgcaggacgtctggatgccgcactgcaggat

SEQ ID NO: 685052 - DNA, 75 bp, synthetic construct
  source 1..75: mol_type = other DNA
cttgaaagaggagtaaatatatctgtaagaatacagaagctaattttatcagaaaaaccatatgttgcattcaga

SEQ ID NO: 685053 - DNA, 75 bp, synthetic construct
  source 1..75: mol_type = other DNA
cggaatatcaaaagtagatgcttgtagttgtccgaattggtcaaaaggaataattgtagctgatgcagacgattc

SEQ ID NO: 685054 - DNA, 75 bp, synthetic construct
  source 1..75: mol_type = other DNA
ataaagaagaaaccgatattgccactactatggaggaacttgaaggatttcatattgttaaagctatagttcgcg

SEQ ID NO: 685055 - DNA, 75 bp, synthetic construct
  source 1..75: mol_type = other DNA
tcttcttgttgaggttaacggggactcatcaggtagtttttaccttaactcacttattaagaatggtaaagagta

SEQ ID NO: 685056 - DNA, 75 bp, synthetic construct
  source 1..75: mol_type = other DNA
tgccgttcatcctctcccgcacctacagcagttaccggacaaaaacgcccgcgccggtggggagcctcggccccg

SEQ ID NO: 685057 - DNA, 75 bp, synthetic construct
  source 1..75: mol_type = other DNA
atatctatttttatatggctaattgtagcgttatatcttttaaaaaaatactcatttaaagtagagaaattaagt

SEQ ID NO: 685058 - DNA, 75 bp, synthetic construct
  source 1..75: mol_type = other DNA
caaaatcagccgctgctgtcgccgttcctcaatgccgcgatgacgtaatcagcgacatccgcaagattggcgata

SEQ ID NO: 685059 - DNA, 75 bp, synthetic construct
  source 1..75: mol_type = other DNA
gcttgctgaccagccgcacgggtcagatgtacgaccatgaccattattattacgacaaagcgggcaacctgctga

SEQ ID NO: 685060 - DNA, 75 bp, synthetic construct
  source 1..75: mol_type = other DNA
accgccaccggtgagctggcgaaaacgcagcgccgcagcctggcggatacccttcagcagtccggcggcgaagac

SEQ ID NO: 685061 - DNA, 75 bp, synthetic construct
  source 1..75: mol_type = other DNA
gtgctggaaacagaaacgggccgctactctgacacgctgcgttcggcgctgatttctctggatggcgacaacgca

SEQ ID NO: 685062 - DNA, 75 bp, synthetic construct
  source 1..75: mol_type = other DNA
aaaatacgcacaactaccaggaacttatcaggttgatatctggctgaataaaaagaaggtttcacagaaaaaatt

SEQ ID NO: 685063 - DNA, 75 bp, synthetic construct
  source 1..75: mol_type = other DNA
cgtctgtcgagaagtttctgatcgaaaagttcgacagcgtctccgacctgatgcagctctcggagggcgaagaat

SEQ ID NO: 685064 - DNA, 75 bp, synthetic construct
  source 1..75: mol_type = other DNA
atggaaattccatattatcgatacgtaaggctatccgcccttcttccggattttttgaaaaaaatgatacttaaa

SEQ ID NO: 685065 - DNA, 75 bp, synthetic construct
  source 1..75: mol_type = other DNA
ctagcaactaaaaattcatcattgatggaacgaatttcgcaaatggaaattccatattatcgatatttaagactc

SEQ ID NO: 685066 - DNA, 75 bp, synthetic construct
  source 1..75: mol_type = other DNA
agaggtttcacaaagatatacatattatcgttctactgatttagcaaagcaaccaacagatattgaagcagagtt

SEQ ID NO: 685067 - DNA, 75 bp, synthetic construct
  source 1..75: mol_type = other DNA
caggctctcgatgagctgatgctttgggccgaggactgccccgaagtccggcacctcgtgcacgcggatttcggc

SEQ ID NO: 685068 - DNA, 75 bp, synthetic construct
  source 1..75: mol_type = other DNA
ccgccgtgcacagggtgtcacgttgcaagacctgcctgaaaccgaactgcccgctgttctgcagccggtcgcgga

SEQ ID NO: 685069 - DNA, 75 bp, synthetic construct
  source 1..75: mol_type = other DNA
ccttcagcagtccggcggcgaagacggtggcagtgtggtgttcccgccggtgctggtgcagatgctcgaccggct

SEQ ID NO: 685070 - DNA, 75 bp, synthetic construct
  source 1..75: mol_type = other DNA
acaaaaatggagaaactggcaaacagtcttcctgcgggaacaacctgggcctggagtggtttgtcattgcaggag

SEQ ID NO: 685071 - DNA, 75 bp, synthetic construct
  source 1..75: mol_type = other DNA
atgggctctaagcgaaagctggtgcggcactattcagtggatttgtccgagtccgtatcggcctcatcatgggcg

SEQ ID NO: 685072 - DNA, 75 bp, synthetic construct
  source 1..75: mol_type = other DNA
cgtagcgttatataaggcgaaccgcgatccccatgccggaacggcgctgaagatgatccacgggttatacagtct

SEQ ID NO: 685073 - DNA, 75 bp, synthetic construct
  source 1..75: mol_type = other DNA
atgttatcgactgggactcagtgcccttgctgagcagttatcgctgctcttccgccagtatccacagcccggtat

SEQ ID NO: 685074 - DNA, 75 bp, synthetic construct
  source 1..75: mol_type = other DNA
ccatggtaagggcgaagccagcacagcgtgcagagggtgtaagggtaaagggattgtgtcaacgacggatgaaaa

SEQ ID NO: 685075 - DNA, 75 bp, synthetic construct
  source 1..75: mol_type = other DNA
gatttccggggcggttcaggtagtgataacgccatgacaccattctctgcttttgcgaccacccgctggctgtat

SEQ ID NO: 685076 - DNA, 75 bp, synthetic construct
  source 1..75: mol_type = other DNA
gcgccgctcatccgcatcgaaacagacaacggcgagcgggagaaagcgcagcgccgcagcctggcggagaagctg

SEQ ID NO: 685077 - DNA, 75 bp, synthetic construct
  source 1..75: mol_type = other DNA
tagcattgttcagggttcagccggggtacgcattggtgcccccaccggcgtggcctgttcggtgtgccccggcgg

SEQ ID NO: 685078 - DNA, 75 bp, synthetic construct
  source 1..75: mol_type = other DNA
ggataaccgtatcgcccgtgacgcgcactatctttaccggtatgaccgtcacggcaggctgacagagaaaaccga

SEQ ID NO: 685079 - DNA, 75 bp, synthetic construct
  source 1..75: mol_type = other DNA
gccctgatgctggcccgccagcagcgttttggccgtcatgccgaatccttcagcggcttacagcgttccctgttc

SEQ ID NO: 685080 - DNA, 75 bp, synthetic construct
  source 1..75: mol_type = other DNA
cgcgccgctcatccgcatcgaaacagacaacggcgagcgggagaaagcgcagcgccgcagcctggcggagaagct

SEQ ID NO: 685081 - DNA, 75 bp, synthetic construct
  source 1..75: mol_type = other DNA
gtgaacggcgaaccggcagagcagtggcagtatgatgaccacggctggctgacagacatcagccacctgagcgaa

SEQ ID NO: 685082 - DNA, 75 bp, synthetic construct
  source 1..75: mol_type = other DNA
gcggtaaaaggaaaccaggggcggcttaataaagcctttgaggaaaaatttccgctgaaagaattaaataatcca

SEQ ID NO: 685083 - DNA, 75 bp, synthetic construct
  source 1..75: mol_type = other DNA
cacctgctcaattaatgatgcaggctcatatgtttccaccccacgcgtttctgccggaggtgccggggcattcag

SEQ ID NO: 685084 - DNA, 75 bp, synthetic construct
  source 1..75: mol_type = other DNA
gctgcgacgatggaaccccagagcgatatccgcgaccgcacacccggaaggctggcgcttcctggcatgttcggg

SEQ ID NO: 685085 - DNA, 75 bp, synthetic construct
  source 1..75: mol_type = other DNA
agtggaaacaactggaatgcgacagtaagccccattatttacgacggcgattcgctgacgttcctgctatcccgg

SEQ ID NO: 685086 - DNA, 75 bp, synthetic construct
  source 1..75: mol_type = other DNA
ccgaaggaggtccggttgtcgatcaaactgaactaagggccgctaacgcttctggtgaaattgttgtcagggaca

SEQ ID NO: 685087 - DNA, 75 bp, synthetic construct
  source 1..75: mol_type = other DNA
tgtccgcaaactgcttgccgcgctggttgactcatcaccggaaaccctggacacgctgaacgagctggcagcggc

SEQ ID NO: 685088 - DNA, 75 bp, synthetic construct
  source 1..75: mol_type = other DNA
ctttcccggtcgctatcaggcgctttctggattcagtaattcgtatggcgatgaaggccgcatttgtctgtttgt

SEQ ID NO: 685089 - DNA, 75 bp, synthetic construct
  source 1..75: mol_type = other DNA
ggtcaccagtcagtttatcctcaaccagttattacgcgcctggcagcaccttgatgccagacagccgcagcaggc

SEQ ID NO: 685090 - DNA, 75 bp, synthetic construct
  source 1..75: mol_type = other DNA
ggggaatgcccaccctggcggcagagatgctgaacgcactggactgccagcgcacgctgccgctttacctgcagg

SEQ ID NO: 685091 - DNA, 75 bp, synthetic construct
  source 1..75: mol_type = other DNA
cctggaagccgggcagaggttcaacctgaccccctactggttatgggttctatatagagccgcaaacccagctca

SEQ ID NO: 685092 - DNA, 75 bp, synthetic construct
  source 1..75: mol_type = other DNA
cgacagaactccgggccgtctggcgattcctggcatgttcggattcgggaaaatattttcacctgctgatgtggt

SEQ ID NO: 685093 - DNA, 75 bp, synthetic construct
  source 1..75: mol_type = other DNA
gccggaagcgcacaacagaccgcacaggatgtgacagcaaccgaaacggcccgtgatgatgcagagcgttttgca

SEQ ID NO: 685094 - DNA, 75 bp, synthetic construct
  source 1..75: mol_type = other DNA
cgacgatggaaccccagagcgatatccgcgaccgcacaccgggcaggctggcactgtccggtatgcatgggttcg

SEQ ID NO: 685095 - DNA, 75 bp, synthetic construct
  source 1..75: mol_type = other DNA
aactggttatccgcctggggcgttcgcccgcgcagcgttgcgtgaatcacatttctgaaccggacactgaaatac

SEQ ID NO: 685096 - DNA, 75 bp, synthetic construct
  source 1..75: mol_type = other DNA
ccatttatcatggtgacaatatagattacatatccacggctgtaaatagcatattgaagcagacatatccttgct

SEQ ID NO: 685097 - DNA, 75 bp, synthetic construct
  source 1..75: mol_type = other DNA
ctgaagaggtattctcagttctgttcgacaacccgttcctgcataccaccacctttggcggcaacccgctggcct

SEQ ID NO: 685098 - DNA, 75 bp, synthetic construct
  source 1..75: mol_type = other DNA
agccatgcagatacgcagtttaaaaatgttccatcaaattttcaggttggttatatcaatgattttggtggctta

SEQ ID NO: 685099 - DNA, 75 bp, synthetic construct
  source 1..75: mol_type = other DNA
ttcgtcgaatggaattagaggacaagaaatacgacagactcatcgcaaatgaaactaatgccttaaaacttgctg

SEQ ID NO: 685100 - DNA, 75 bp, synthetic construct
  source 1..75: mol_type = other DNA
cagcaggttacagaagttgatcgctgggcaaaatctcttaaaatgtccacccaggatttgttatcctggcaatat

SEQ ID NO: 685101 - DNA, 75 bp, synthetic construct
  source 1..75: mol_type = other DNA
ggaacactgaagcaggcgctgacggagattaacgaccagcgtaacgcgctgtcggtgatcgtccgggtggaagaa

SEQ ID NO: 685102 - DNA, 75 bp, synthetic construct
  source 1..75: mol_type = other DNA
caggtcgccatccagagtcgtatcaaggtgttctggagaccgtccgcgttacgcaagaaagcaggagaaaaagtc

SEQ ID NO: 685103 - DNA, 75 bp, synthetic construct
  source 1..75: mol_type = other DNA
atgacatttatgaaaggactaccccttttgttgttggttgccagtctgtgcagctacgctgcgctacaacccgat

SEQ ID NO: 685104 - DNA, 75 bp, synthetic construct
  source 1..75: mol_type = other DNA
aacaccaactcagccacaaaaaagatatttaacaaccttgataacttatcatatattcagaggacttcttttcgg

SEQ ID NO: 685105 - DNA, 75 bp, synthetic construct
  source 1..75: mol_type = other DNA
aactcatcagaaacgaacgcgttatcacgtgccagtagtgcagcttcctcggcaacggcggcaggaaattccgcg

SEQ ID NO: 685106 - DNA, 75 bp, synthetic construct
  source 1..75: mol_type = other DNA
cgtctgggatcacccagagctcaccatacctgccggttcctaccgcagtgctagcgaggcaggaaactgggtaca

SEQ ID NO: 685107 - DNA, 75 bp, synthetic construct
  source 1..75: mol_type = other DNA
atctattttgcaacaggagcaaaaatgaaagccacgtcggaagaactcgccatttttgtttcggtcgtcgaaagc

SEQ ID NO: 685108 - DNA, 75 bp, synthetic construct
  source 1..75: mol_type = other DNA
tggataaacgttggcggcattacagagagcccgcattattggcagcatccgctggagcaatagatactattagtt

SEQ ID NO: 685109 - DNA, 75 bp, synthetic construct
  source 1..75: mol_type = other DNA
tgattaaaaaaggtgaggtgctatttcgactggacccgacgcgttatcaggcgcgggtggatcggctgatggcgg

SEQ ID NO: 685110 - DNA, 75 bp, synthetic construct
  source 1..75: mol_type = other DNA
gtgatcatactcaccagcaattgcaagctttggggttattagaactcgcccaaaaaatggttactgcaagaatcc

SEQ ID NO: 685111 - DNA, 75 bp, synthetic construct
  source 1..75: mol_type = other DNA
ggtattgctggctctgctggtttagctgctggtggtatcggcttagttgcgaccgcagtggttgcagccgctaaa

SEQ ID NO: 685112 - DNA, 75 bp, synthetic construct
  source 1..75: mol_type = other DNA
ggaaactggctttgcggtgcgcaagttattcccggcaactatggcaattttgattccagatatgtgaaagatgtt

SEQ ID NO: 685113 - DNA, 75 bp, synthetic construct
  source 1..75: mol_type = other DNA
aggggagacactttcagaccgttttgctattaacagcagtaatggtatgtggattcagatgcgcgataacaacgc

SEQ ID NO: 685114 - DNA, 75 bp, synthetic construct
  source 1..75: mol_type = other DNA
atgagatcacctaatgagttatctgaaaaaggatttgaatcccttctgctggatgcagaaaataaatatagatcc

SEQ ID NO: 685115 - DNA, 75 bp, synthetic construct
  source 1..75: mol_type = other DNA
tgatactggtaataagcgagttattgacggcgaactctacgccatcaaccagggagatctgaagcgcatcaagca

SEQ ID NO: 685116 - DNA, 75 bp, synthetic construct
  source 1..75: mol_type = other DNA
gtagcctatctgagcaaagaatacagtaaagacttccatgacggttatcgcaactttggcacaagccagctaata

SEQ ID NO: 685117 - DNA, 75 bp, synthetic construct
  source 1..75: mol_type = other DNA
acattacggtagctgggacgctcaaagcggctatctggcgacattacagatgctacgtgaaacgccacaggcgac

SEQ ID NO: 685118 - DNA, 75 bp, synthetic construct
  source 1..75: mol_type = other DNA
taagtcacctgttttgtgttgtggtgagaatatcacctttcatcaggtggccaaatttagtgtgccactacaaca

SEQ ID NO: 685119 - DNA, 75 bp, synthetic construct
  source 1..75: mol_type = other DNA
atttcgttacttgggccgttggtcatctttctgctgtttcggatgatccgcaccagttatgtcaagcaggtcgct

SEQ ID NO: 685120 - DNA, 75 bp, synthetic construct
  source 1..75: mol_type = other DNA
cgcaagttattcccggcaattatggtaattttgactcacgttatgtgagagatgtccgacttggtacacgtgttg

SEQ ID NO: 685121 - DNA, 75 bp, synthetic construct
  source 1..75: mol_type = other DNA
aaaacagtaataataaagatcgtgaaaaaaataccgcgatggagacaaaataaatggaccgcaggcccattcatt

SEQ ID NO: 685122 - DNA, 75 bp, synthetic construct
  source 1..75: mol_type = other DNA
tcttcagcccgtaaaccgttaccagcctcacttccccgtgccccccgggtcatccggccggaagaggaatgctgt

SEQ ID NO: 685123 - DNA, 75 bp, synthetic construct
  source 1..75: mol_type = other DNA
ctgttaaagtcaccgaagaaaacgcaaagaaatttgataaattctctaagaatatcgatactttggaaaataacc

SEQ ID NO: 685124 - DNA, 75 bp, synthetic construct
  source 1..75: mol_type = other DNA
atgggtaaagctcttgtcatcgttgagtccccggcaaaagccaaaacgatcaacaagtatctgggtagtgactac

SEQ ID NO: 685125 - DNA, 75 bp, synthetic construct
  source 1..75: mol_type = other DNA
aaacgtacagaaaaactctgttgtcgatctcggaacaaacagttccattaaaaccagtggcgataatgcacacgg

SEQ ID NO: 685126 - DNA, 75 bp, synthetic construct
  source 1..75: mol_type = other DNA
ccagatggccatcgcaacgcaacatgacgatggttatgccgccagccgcatcaacgcctcgggtcgtatgcttat

SEQ ID NO: 685127 - DNA, 75 bp, synthetic construct
  source 1..75: mol_type = other DNA
taagagtggcattcattgccgccacattactgttgactgcatgcgcccaacctgaacaatcatcattagctggcg

SEQ ID NO: 685128 - DNA, 75 bp, synthetic construct
  source 1..75: mol_type = other DNA
catcaatactgatccgaaactacgcgccgagaaaaccgccgagtggcgtcagtggttctctgaaaacatcatgtc

SEQ ID NO: 685129 - DNA, 75 bp, synthetic construct
  source 1..75: mol_type = other DNA
gcgtcaacaagtgccgggcaggcctcagccagtgccaccgccgccggaaaatcggcagaaagcgccgcatcatcc

SEQ ID NO: 685130 - DNA, 75 bp, synthetic construct
  source 1..75: mol_type = other DNA
cacttctcaaaatagccagttgcaaaacagcttaaaagatgtgaacgacgcgttagctctgggcttaatctctca

SEQ ID NO: 685131 - DNA, 75 bp, synthetic construct
  source 1..75: mol_type = other DNA
gggcagatcgttctctgttcgatgccagcggtttcaaggaaggcgatatcgccattgcgctaaatcagcaggatt

SEQ ID NO: 685132 - DNA, 75 bp, synthetic construct
  source 1..75: mol_type = other DNA
agatggtcatggatgctatcaaacgtcacgctaagttagttgctcaggcggtagaagacgcacagcgccgtaaga

SEQ ID NO: 685133 - DNA, 75 bp, synthetic construct
  source 1..75: mol_type = other DNA
atgaaatcaccttatggtttaactgagaaagagtttgaattcctgcagaaggaagctgaaggtaaatatgattcg

SEQ ID NO: 685134 - DNA, 75 bp, synthetic construct
  source 1..75: mol_type = other DNA
tggtcgccgccgtggttgttctgatgacccgtgtggtagtcgtgcgctatttcccacatcttaaccctgaatcca

SEQ ID NO: 685135 - DNA, 75 bp, synthetic construct
  source 1..75: mol_type = other DNA
cggaacgcgcattgaaacggaaggcgacggaaatgtgcaaacgcgacttggggtgaaaattaccgacagattttc

SEQ ID NO: 685136 - DNA, 75 bp, synthetic construct
  source 1..75: mol_type = other DNA
ggtaattctgcaggtaacttcgcgctgacaaccggaactgtcgaagctggggcttacgtctacacgctggctaaa

SEQ ID NO: 685137 - DNA, 75 bp, synthetic construct
  source 1..75: mol_type = other DNA
aatttatttgatagggctgataaagggattagtcgagaggtatcagattcaataacgcgaatagtcaatcgttat

SEQ ID NO: 685138 - DNA, 75 bp, synthetic construct
  source 1..75: mol_type = other DNA
tatctgagctgggaagatgtgttgcacaataacagggcaggcgagctgacagcaggtttcccgctctcttacgaa

SEQ ID NO: 685139 - DNA, 75 bp, synthetic construct
  source 1..75: mol_type = other DNA
gttaccccgtaccgtcaaacaaaaatggccatgccttttcctccgtggaagcgttgttatcgatgctcggagggg

SEQ ID NO: 685140 - DNA, 75 bp, synthetic construct
  source 1..75: mol_type = other DNA
tgccgatgacgatcaggcggatagccgtagcttcgtcctttgcccaggtaaagcgtgggatcgttctccctgtgg

SEQ ID NO: 685141 - DNA, 75 bp, synthetic construct
  source 1..75: mol_type = other DNA
gccagctgaaaggattaattgaatcaatcggatctaatgttcgcgaacatgaattaattatgttaagaaaaaatg

SEQ ID NO: 685142 - DNA, 75 bp, synthetic construct
  source 1..75: mol_type = other DNA
ttgaaaatcaaaagccagctgaaaggattaattgaatcaatcggatctaatgttcgcgaacatgaattaattatg

SEQ ID NO: 685143 - DNA, 75 bp, synthetic construct
  source 1..75: mol_type = other DNA
gctgaacggatcgataacatctctgtatttggcggtctggatcaggttctgcatgggttggttaatatcaaaggg

SEQ ID NO: 685144 - DNA, 75 bp, synthetic construct
  source 1..75: mol_type = other DNA
tccctattaagcacctatggtaatcaaggcggctatgtcctggtgccgcaggaacatcatctgaaatcaggcaaa

SEQ ID NO: 685145 - DNA, 75 bp, synthetic construct
  source 1..75: mol_type = other DNA
aatctgcgcaggcgaatgtgattcgccgacgtgaagaaacggcagcgacgcgctcgttactgaacaccgccaaag

SEQ ID NO: 685146 - DNA, 75 bp, synthetic construct
  source 1..75: mol_type = other DNA
attttaatatggttactgcattgattaatggcggttttaatggatatacagatcgacttaagtattttagaacag

SEQ ID NO: 685147 - DNA, 75 bp, synthetic construct
  source 1..75: mol_type = other DNA
ccgtcccctctgtcacgttttccgataccggcattgccgttcctgatgagatagacattctcaacgggcgattaa

SEQ ID NO: 685148 - DNA, 75 bp, synthetic construct
  source 1..75: mol_type = other DNA
gatgtagcgaaggccgattatgagaaaagcaaaaaagcacacagcaacgaaaaacttggtgtgaactacaagact

SEQ ID NO: 685149 - DNA, 75 bp, synthetic construct
  source 1..75: mol_type = other DNA
aattaatggcgtgaaaccagagacgcaaaaaattactccaattggtactggtggcagcacaaaccgtgagccgga

SEQ ID NO: 685150 - DNA, 75 bp, synthetic construct
  source 1..75: mol_type = other DNA
tttttctttcagatatttctaaacactggaaattgagagatttagctgattatctttacatgagcgagagcttaa

SEQ ID NO: 685151 - DNA, 75 bp, synthetic construct
  source 1..75: mol_type = other DNA
ggtgatatgccgatgaaaaggcaacaactccggctctttagtgaactagttttcggaacctttcatgatctgctt

SEQ ID NO: 685152 - DNA, 75 bp, synthetic construct
  source 1..75: mol_type = other DNA
ggatgggccgcgttattacccgccaggtaaatgaaattcgtcatgccaatagtgatctgccattgaaacggcaac

SEQ ID NO: 685153 - DNA, 75 bp, synthetic construct
  source 1..75: mol_type = other DNA
ggtaattggtttttttactgggatgaggcttggcagcatttgtgaccttaagattcagactttggatcatgcaac

SEQ ID NO: 685154 - DNA, 75 bp, synthetic construct
  source 1..75: mol_type = other DNA
atacaggcactaccggtaaagcaagccctttctgaaggtttcatggctgcatttagcggcatcagcataagggac

SEQ ID NO: 685155 - DNA, 75 bp, synthetic construct
  source 1..75: mol_type = other DNA
tgactattggcctaataatcagataataactgatttttcattcgtcactctggttgttagcgaattttttcatac

SEQ ID NO: 685156 - DNA, 75 bp, synthetic construct
  source 1..75: mol_type = other DNA
cagtagctgagattgcagcggccatcaataaaaaactccccccgggcaccgttatgaacggtgacaccaccggga

SEQ ID NO: 685157 - DNA, 75 bp, synthetic construct
  source 1..75: mol_type = other DNA
gcgcgaatttatggcagccgctatatcggacccattcaggcgctcgatgcacagaacatgaacgttctttctgtc

SEQ ID NO: 685158 - DNA, 75 bp, synthetic construct
  source 1..75: mol_type = other DNA
ttggttctgcattcgggacggcgatgagcacgaacctcaagacgccacaggggcaactggctgtcactgatactg

SEQ ID NO: 685159 - DNA, 75 bp, synthetic construct
  source 1..75: mol_type = other DNA
gtacgcatcggtgcccccaccggcgtggcctgttcggtgtgccccggcggggggacgtccggccatccggtcaat

SEQ ID NO: 685160 - DNA, 75 bp, synthetic construct
  source 1..75: mol_type = other DNA
aatgccatcggtgattatgtaaaggaatacagcgaagtttcaaaagcaactggtttaaccgtcgaaacactccag

SEQ ID NO: 685161 - DNA, 75 bp, synthetic construct
  source 1..75: mol_type = other DNA
acaagtgctgcatcactcctaattgcggcgtgactccctttgcgcaagaggatgaagtttctgctttcatgcaag

SEQ ID NO: 685162 - DNA, 75 bp, synthetic construct
  source 1..75: mol_type = other DNA
tttgcaggtcctattcttcttgagtcagcaaaaagcaagctatcaaagatagtttttgctggtatgatttgtctt

SEQ ID NO: 685163 - DNA, 75 bp, synthetic construct
  source 1..75: mol_type = other DNA
gattacgattttctgtgccggatggcggcggaggaaggcatcttcttttatgaggagcatgcttacaaaagtacc

SEQ ID NO: 685164 - DNA, 75 bp, synthetic construct
  source 1..75: mol_type = other DNA
cctgataccctgccgggttacaccgaatatggccgggacaacggcatccgtctgtctgccgtgtggctgacgcac

SEQ ID NO: 685165 - DNA, 75 bp, synthetic construct
  source 1..75: mol_type = other DNA
agaaatttataaatgacgttgctttgccgacgttgatcaggatggctgcctggatgtggaatttcggaaaagtat

SEQ ID NO: 685166 - DNA, 75 bp, synthetic construct
  source 1..75: mol_type = other DNA
ttaagaccgggctggggctttcggttggttccgggcttacgctggcagcaggtgcaagtgcggtactgaaccgga

SEQ ID NO: 685167 - DNA, 75 bp, synthetic construct
  source 1..75: mol_type = other DNA
gtcgaaggactgaaaaaagggctttccggagcaacacgggaagtggcacgtctgacgcgccagcaggatgtactg

SEQ ID NO: 685168 - DNA, 75 bp, synthetic construct
  source 1..75: mol_type = other DNA
tgatattggttccgtctctgggattgtgattgcaggttatggcgataaagactattaccctaaagtattatcata

SEQ ID NO: 685169 - DNA, 75 bp, synthetic construct
  source 1..75: mol_type = other DNA
ccaggtatgcgtgaggctcatctttatcacttcctgagcgagattgtattcagcatgcttgttgatgctttttct

SEQ ID NO: 685170 - DNA, 75 bp, synthetic construct
  source 1..75: mol_type = other DNA
tatagttgtttgtgcagttgctaatgcagccactacttttgataagcatatcgtagtgttagataataatagtta

SEQ ID NO: 685171 - DNA, 75 bp, synthetic construct
  source 1..75: mol_type = other DNA
agctttgctaaatctcactgatgaagatttagctagagatttttcacccattgcgctctttttgcgcaatgtcag

SEQ ID NO: 685172 - DNA, 75 bp, synthetic construct
  source 1..75: mol_type = other DNA
ctcaatagcggcggtagtccgggaacgccggtgccgacgctgcaaccgacggtgctgaaagcgctggcagatgat

SEQ ID NO: 685173 - DNA, 75 bp, synthetic construct
  source 1..75: mol_type = other DNA
ggaagcgcagaaataccccttggcgtatattgctcaagtgaacaaaagctctcattttatctttcgggtgctacc

SEQ ID NO: 685174 - DNA, 75 bp, synthetic construct
  source 1..75: mol_type = other DNA
atgttcaaatcgatcatgaccgtatcactgctggccaccgctattgcctctaccagcgcagtggccgcagacaat

SEQ ID NO: 685175 - DNA, 75 bp, synthetic construct
  source 1..75: mol_type = other DNA
tcacgcggtgattactcatggcttgtacagcctgtcagtagcgaagaaatattgcattcgctggcgcatggggca

SEQ ID NO: 685176 - DNA, 75 bp, synthetic construct
  source 1..75: mol_type = other DNA
ctgttgcgaacgaaaaaacgctccactcgctggcgcatggggcagggcgtaaatgggggcgcaccgagtgtaaag

SEQ ID NO: 685177 - DNA, 75 bp, synthetic construct
  source 1..75: mol_type = other DNA
cgccgataagtttgaaaagcgattatcagctttggatgacgttgctgaagaaagctggctggaggaaaacctgcc

SEQ ID NO: 685178 - DNA, 75 bp, synthetic construct
  source 1..75: mol_type = other DNA
aaaaaatataaagaggaggggaaaaaagaattcttttattcatatatggacataccatatcgagcagcggtagtt

SEQ ID NO: 685179 - DNA, 75 bp, synthetic construct
  source 1..75: mol_type = other DNA
tgatttcagcgatgcgttataatccaagatacattttcttgggtgagattcgtagtccaaaaacagcaaaagaag

SEQ ID NO: 685180 - DNA, 75 bp, synthetic construct
  source 1..75: mol_type = other DNA
gtgctggttctggtgaatgccggtggtgagccgtttgcggtggttcaggtgcagcggcggtttgcaccggaagcc

SEQ ID NO: 685181 - DNA, 75 bp, synthetic construct
  source 1..75: mol_type = other DNA
cagtttagtggcggtcaaaactaccttgtctacgccattattatggccatcaccttcgccgcaggcgtatttatc

SEQ ID NO: 685182 - DNA, 75 bp, synthetic construct
  source 1..75: mol_type = other DNA
ccctgctcggtgcaaaggtccttcccggtgaaaccgacatcgccctgcccggcccgctgccgttcatcctctccc

SEQ ID NO: 685183 - DNA, 75 bp, synthetic construct
  source 1..75: mol_type = other DNA
tgattgctgcgatgcgctataatccaagatatatattccttggagaaatacgttcatctgaaactgctcgtgaag

SEQ ID NO: 685184 - DNA, 75 bp, synthetic construct
  source 1..75: mol_type = other DNA
tatcagatacgggcggaatttaacatcactcagaagcccggcgaggatgccggacaactggcagacagggtaacg

SEQ ID NO: 685185 - DNA, 75 bp, synthetic construct
  source 1..75: mol_type = other DNA
catttgaaatcaccgaccataccacaggctggatttacgtcgagtaccgcttcggtggtgaaagcgccgtcaact

SEQ ID NO: 685186 - DNA, 75 bp, synthetic construct
  source 1..75: mol_type = other DNA
atgagccgaccacgcaaacagcgctcagatgccggtaaaacgacgctgacccacgatgagatgctgacgatttcc

SEQ ID NO: 685187 - DNA, 75 bp, synthetic construct
  source 1..75: mol_type = other DNA
atcgcagagctgctggaccgtctgctgtatatgcgccgcaatcccccggtgggcggtgcactgcatgattacgtc

SEQ ID NO: 685188 - DNA, 75 bp, synthetic construct
  source 1..75: mol_type = other DNA
acaagatggttatggatgctatcaaacgtcacgctaagttagttgctcaggcggtagaagacgcacagcgtcgta

SEQ ID NO: 685189 - DNA, 75 bp, synthetic construct
  source 1..75: mol_type = other DNA
ggaggccagagtcgttatcatcaatgatgaaggctttgaaaccttccatgttattaacgcaatacagaaagatga

SEQ ID NO: 685190 - DNA, 75 bp, synthetic construct
  source 1..75: mol_type = other DNA
caccggttcggtggaaaaagcccgtgacattatcgaacgcaagtttgaaggggggctgcgttttctgagggtgga

SEQ ID NO: 685191 - DNA, 75 bp, synthetic construct
  source 1..75: mol_type = other DNA
gcggccagcccgccacggtgcgggtggaagccaatctcaatggtcgccacagcaccatgctgttgtgtgacgatc

SEQ ID NO: 685192 - DNA, 75 bp, synthetic construct
  source 1..75: mol_type = other DNA
ggcacgctctatgcctacagctttattaatgctcagtcgacttcccagtggaaaagctttgatttgcagttaacc

SEQ ID NO: 685193 - DNA, 75 bp, synthetic construct
  source 1..75: mol_type = other DNA
caacaagtatctgggtagtgactacgtggtgaaatccagcgtcggtcacatccgcgatttgccgaccagtggctc

SEQ ID NO: 685194 - DNA, 75 bp, synthetic construct
  source 1..75: mol_type = other DNA
aaagaaaatatattttgcttagcttttgatgaatttgagtaccttgttgcatcctgcaaaaatgcacatgtgcct

SEQ ID NO: 685195 - DNA, 75 bp, synthetic construct
  source 1..75: mol_type = other DNA
cgcgataactcaacgtggagttataacagtgggagtagcaattcatctgacagcaataaatggcagcatatcaat

SEQ ID NO: 685196 - DNA, 75 bp, synthetic construct
  source 1..75: mol_type = other DNA
ctaaaccctcgattagcagaggctgtaatgggagagcgtccacatactaggctcgacatgactgaggttcgggcg

SEQ ID NO: 685197 - DNA, 75 bp, synthetic construct
  source 1..75: mol_type = other DNA
tggtgtggcatggaatccgaaaatcgacaaccagatgcgggatgagttcctgcagattgtcacgcattatttacc

SEQ ID NO: 685198 - DNA, 75 bp, synthetic construct
  source 1..75: mol_type = other DNA
atagcgtcgacatccccatttaaaatcatatatagatataagaagaacggtggaaaacacacagccttaaatata

SEQ ID NO: 685199 - DNA, 75 bp, synthetic construct
  source 1..75: mol_type = other DNA
cgcgcatcaattgcgccccttcaaaggcgcaccagagacatttgacgttgtgaaactggcggaaaatctgcgcta

SEQ ID NO: 685200 - DNA, 75 bp, synthetic construct
  source 1..75: mol_type = other DNA
ggctgaacgtgcaagcgcagtaccatgatgaagagatagaacgcgtgcataaaccgctactgcgtatgctggcgg

SEQ ID NO: 685201 - DNA, 75 bp, synthetic construct
  source 1..75: mol_type = other DNA
tgtattttctattttttctccccccctccccaaatggggtatggctatatggaattcatcgggtgagcttgtttt

SEQ ID NO: 685202 - DNA, 75 bp, synthetic construct
  source 1..75: mol_type = other DNA
aaattagagaagcaattctccggtactggcttaaccgttgagaaatttggtgatattaacaaagacaccttagat

SEQ ID NO: 685203 - DNA, 75 bp, synthetic construct
  source 1..75: mol_type = other DNA
tatcaatggcactatggcttttgttatcaataacttgaatctaaaaggtcttggtattaatgtcattaaacaaac

SEQ ID NO: 685204 - DNA, 75 bp, synthetic construct
  source 1..75: mol_type = other DNA
taatcgaaaactggatgattgcgaatgcatagttcattcagtggctagtttattgccaaagaaagaaaaatatac

SEQ ID NO: 685205 - DNA, 75 bp, synthetic construct
  source 1..75: mol_type = other DNA
atgaaggaagaagttatttcctgggcgaaagaatgcgatcgaattgttgagcgtcacacaaaaaaccgcagcaat

SEQ ID NO: 685206 - DNA, 75 bp, synthetic construct
  source 1..75: mol_type = other DNA
ccggaggagcaggttcattcagagatacagctaacggaaaagcggtatcagcagttgggcctggaggtggcggtg

SEQ ID NO: 685207 - DNA, 75 bp, synthetic construct
  source 1..75: mol_type = other DNA
ctttcaatgctcataaggcattctccattggacaagcgacggtgaacatgtggacggctgctaccgaagcatgga

SEQ ID NO: 685208 - DNA, 75 bp, synthetic construct
  source 1..75: mol_type = other DNA
atgtgcgcttttgattgcagaaattgagcgtattgaccgccagtcggagggaaataacgatgagccgcgcatccc

SEQ ID NO: 685209 - DNA, 75 bp, synthetic construct
  source 1..75: mol_type = other DNA
gcgacacaccaagaatcgcacaaatctacatgtcctcgaagcaatgcgcgacttgaaagcaatttgccctaccag

SEQ ID NO: 685210 - DNA, 75 bp, synthetic construct
  source 1..75: mol_type = other DNA
acggaagttactgtcgttctcaaaatcggtggagttgcatgacaaggtgaaccgccccgggaatcctggagacta

SEQ ID NO: 685211 - DNA, 75 bp, synthetic construct
  source 1..75: mol_type = other DNA
gggaaagctgcacgtaatcagcaagcgttacactcagcgcattgagcgacataacctgaatctgagacaacatct

SEQ ID NO: 685212 - DNA, 75 bp, synthetic construct
  source 1..75: mol_type = other DNA
gaggacagttgtggcgcacgttttcggtgaacgcactctggccacactggagcgtcttctgagcctgctgtcacc

SEQ ID NO: 685213 - DNA, 75 bp, synthetic construct
  source 1..75: mol_type = other DNA
cggttgtggcgcacgtcttcggtgaacgcactctggccacactggagcgtcttctgagcctgatgtcggcctttg

SEQ ID NO: 685214 - DNA, 75 bp, synthetic construct
  source 1..75: mol_type = other DNA
tgagacaacatccggcaaggctgggacggaagttactgtcgttctcaaaatcggtggagttgcatgacaaggtca

SEQ ID NO: 685215 - DNA, 75 bp, synthetic construct
  source 1..75: mol_type = other DNA
gatacggaggacggttgtggcgcacgtcttcggtgaacgcactctggccacactggagtgtcttctgagcctgct

SEQ ID NO: 685216 - DNA, 75 bp, synthetic construct
  source 1..75: mol_type = other DNA
ggactggtataacaatcgacgattgctggaaaggctgggccatatcccaccggcagaagcagaaaaagcttatta

SEQ ID NO: 685217 - DNA, 75 bp, synthetic construct
  source 1..75: mol_type = other DNA
atcacgcctgaagggaaagctgcacgttatcagcaagcgttacactcagcgcattgagcgacataatctgaatct

SEQ ID NO: 685218 - DNA, 75 bp, synthetic construct
  source 1..75: mol_type = other DNA
ctgttttacgcgtatgacaggatacggaggacggttgtggcgcacgtcttcggtgaacgcactctggccacactg

SEQ ID NO: 685219 - DNA, 75 bp, synthetic construct
  source 1..75: mol_type = other DNA
aatagttacctgggcaccacgcaaatcgcttccggtacgctggtggtgagcgacaactcgcagcttggagatacc

SEQ ID NO: 685220 - DNA, 75 bp, synthetic construct
  source 1..75: mol_type = other DNA
aggcgaacaaaaatctgctctttaccgaggtttggcagctctgtcctgaggcgtcgaatctctttcagcacatcg

SEQ ID NO: 685221 - DNA, 75 bp, synthetic construct
  source 1..75: mol_type = other DNA
ttcggatatgaccaataatgccagcggtggggccgtatttttgcaacaaggagcggaatttacattatcaccaga

SEQ ID NO: 685222 - DNA, 75 bp, synthetic construct
  source 1..75: mol_type = other DNA
caaccgggcagtgatgtgattgtctgcgctgaaatggacgaacagtggggctacgtcggtgctaaatcacgtcag

SEQ ID NO: 685223 - DNA, 75 bp, synthetic construct
  source 1..75: mol_type = other DNA
ttactgtcagcactggcgttaaagtttacttctgcgatcctcagagtccttggcagcggggaacaaatgagaata

SEQ ID NO: 685224 - DNA, 75 bp, synthetic construct
  source 1..75: mol_type = other DNA
gattgcatctcttttctctgctaacggtgtcgcggcggccattgatttatgccagggatatgatatcaaagcgag

SEQ ID NO: 685225 - DNA, 75 bp, synthetic construct
  source 1..75: mol_type = other DNA
ttgtggcgcacgtttttcggtgaacgcactctggccacactggcgcgtcttctgagcctgctgtcggcctttgag

SEQ ID NO: 685226 - DNA, 75 bp, synthetic construct
  source 1..75: mol_type = other DNA
tcagccaaagcacgaaaaaacttggtattcacgataaagttctcatggctgccgctgaagaagtgatgcaaggca

SEQ ID NO: 685227 - DNA, 75 bp, synthetic construct
  source 1..75: mol_type = other DNA
gcgcaagattgacgaggggcgtaagttgctttcatggcagaaaggtacactggtcggcggtcatgacgataacga

SEQ ID NO: 685228 - DNA, 75 bp, synthetic construct
  source 1..75: mol_type = other DNA
ccgtggagtcagataacgggagtgcctgctgcctcgctgacggcaaaaggcaccgtacaattgagcagtgccatc

SEQ ID NO: 685229 - DNA, 75 bp, synthetic construct
  source 1..75: mol_type = other DNA
caggctatcccttggtcaaagcgcttttgggactcaaccagcaccgtcaacccgatgataaatcaccgctggttg

SEQ ID NO: 685230 - DNA, 75 bp, synthetic construct
  source 1..75: mol_type = other DNA
tgtgcatttaaatacagctgcaaaggttgtaccttccgggaaagtaccttatgccagtaactccgaactggcaga

SEQ ID NO: 685231 - DNA, 75 bp, synthetic construct
  source 1..75: mol_type = other DNA
ctgcattgacaagtgttggacgcgccattcttggtaagaccagtattcagagcgttcttgattaccttggtttgg

SEQ ID NO: 685232 - DNA, 75 bp, synthetic construct
  source 1..75: mol_type = other DNA
acaccgccaacggggtggctgaaatgcaatggtgcagcattttcttctgaaaagtacccaaatctggcaaaggtt

SEQ ID NO: 685233 - DNA, 75 bp, synthetic construct
  source 1..75: mol_type = other DNA
tcggggctgtactataaccgtcaccggcactacgatccgttgcaggggcggtatatcaccccggacccgattggg

SEQ ID NO: 685234 - DNA, 75 bp, synthetic construct
  source 1..75: mol_type = other DNA
agtggtggtgcaactggcggagcgcgttaacgacaaaaacacgccgcgccacatgctgggccgcgatcctcacgt

SEQ ID NO: 685235 - DNA, 75 bp, synthetic construct
  source 1..75: mol_type = other DNA
tgctgcgcccacccgtggagttttacagcaccgtcatcgctggctgtggcgcattaatctgcctgacgcaggccc

SEQ ID NO: 685236 - DNA, 75 bp, synthetic construct
  source 1..75: mol_type = other DNA
ttggtctgatccgcgaaaacaatgaactggctcgatcaggtgcaaataacgttggtctgaccgcgttacgtggtc

SEQ ID NO: 685237 - DNA, 75 bp, synthetic construct
  source 1..75: mol_type = other DNA
atccgcaggcgaacctgaaccgggaatggcaggtggtggcgagcgatcttcacggcgaacagccgcaggcggtac

SEQ ID NO: 685238 - DNA, 75 bp, synthetic construct
  source 1..75: mol_type = other DNA
atgatatggatgctattgttggcggagctcataatggggccgccgatgcaatgagacattgttacttgatgtgtc

SEQ ID NO: 685239 - DNA, 75 bp, synthetic construct
  source 1..75: mol_type = other DNA
ggatgatgggcgaggtgtggatgcgggaagggtcatcttaagcatacaggggtggttaacaggaagtcattatca

SEQ ID NO: 685240 - DNA, 75 bp, synthetic construct
  source 1..75: mol_type = other DNA
ggagtaccgttacagcggcacgggaaggctgacgggcgtccacactacggcagcgaacctggatatcgatatccc

SEQ ID NO: 685241 - DNA, 75 bp, synthetic construct
  source 1..75: mol_type = other DNA
atgcgtacagcgaacaggggctggcgacccgtcaggagccggacggtctgccgccggtggagtggctgacgtatg

SEQ ID NO: 685242 - DNA, 75 bp, synthetic construct
  source 1..75: mol_type = other DNA
ttgatcgtcgttctcaacgtggtgctggtgatccatatacaggtgaagtcgttggttgtgagacaaatgaatcag

SEQ ID NO: 685243 - DNA, 75 bp, synthetic construct
  source 1..75: mol_type = other DNA
aggctaaagtaagaacaaacttaagtaatactcttcataaatttaatcttaataatgtttttgaatttttttgta

SEQ ID NO: 685244 - DNA, 75 bp, synthetic construct
  source 1..75: mol_type = other DNA
ccggatgataaatcgccgttggttgaggttgttgtgatgtcacgtaacagccctgataccggtatccgtgttctg

SEQ ID NO: 685245 - DNA, 75 bp, synthetic construct
  source 1..75: mol_type = other DNA
ttgagctacagcttgacgatcatcgctactcggtggaagcgcccctgtttgtcctgacgccgccgtcagtactga

SEQ ID NO: 685246 - DNA, 75 bp, synthetic construct
  source 1..75: mol_type = other DNA
atagccttcccagagcgaaggccgaaaacttcaaggatacgattgaacttcaaagtcccaagctcaagagaatgg

SEQ ID NO: 685247 - DNA, 75 bp, synthetic construct
  source 1..75: mol_type = other DNA
ggcaatcctccgaaggggtatcgttgtccttggatgaggcgttgtcaaaatacgctaaagagctcgagtcaaatt

SEQ ID NO: 685248 - DNA, 75 bp, synthetic construct
  source 1..75: mol_type = other DNA
tttttccggacggatgctgataataatgatgtgccaatgacggcagcatcattgatggcactgagtgaagcggca

SEQ ID NO: 685249 - DNA, 75 bp, synthetic construct
  source 1..75: mol_type = other DNA
gagtatcagctaaatgccgctggtaagcctgaagcttattgtggcgaactcgacctactggaacaggctggcgat

SEQ ID NO: 685250 - DNA, 75 bp, synthetic construct
  source 1..75: mol_type = other DNA
tgtgcatttgaatactgctgcaaaggtggttccttccgggaaagtaccttacgccagcaattcagagctttttga

SEQ ID NO: 685251 - DNA, 75 bp, synthetic construct
  source 1..75: mol_type = other DNA
atttcaaatttcagttcagaacttccattgagcacttctatccacagcatcctgacaaagaacagtcgggcgcgg

SEQ ID NO: 685252 - DNA, 75 bp, synthetic construct
  source 1..75: mol_type = other DNA
cacgatctggatgatgcgcgcccgatcctcgactggcagcaggcgatccgccagaaagccgtggtgtatgtcggg

SEQ ID NO: 685253 - DNA, 75 bp, synthetic construct
  source 1..75: mol_type = other DNA
aagatggcttttgtggacaaagacggcgtcgaagtagagagctcaactcactggatgccactaccggaaccaccg

SEQ ID NO: 685254 - DNA, 75 bp, synthetic construct
  source 1..75: mol_type = other DNA
taaaaaactcaggccgcagttggtaacctcgcgcatacaaccgggcagtgatgtgattgtctgcgctgaaatgga

SEQ ID NO: 685255 - DNA, 75 bp, synthetic construct
  source 1..75: mol_type = other DNA
ctttgaggtcgtggtatggatgatggatggctggccgctgtatgaatcacgcctgaagggaaagctgcacgttat

SEQ ID NO: 685256 - DNA, 75 bp, synthetic construct
  source 1..75: mol_type = other DNA
tttttataccaataaaaatgaagactattcattctataataaaaaaaacgattacggcgtatctctgactcttcc

SEQ ID NO: 685257 - DNA, 75 bp, synthetic construct
  source 1..75: mol_type = other DNA
agaaaaaacattagatatagcttgcatcatacccctaaccctgcgggggtctactttgctaaaacgaccatagtt

SEQ ID NO: 685258 - DNA, 75 bp, synthetic construct
  source 1..75: mol_type = other DNA
tgcgccaagttggatatcagaaggcgcgacggcaacgaaccctaaaactggtcagaaactcatttataggaacgg

SEQ ID NO: 685259 - DNA, 75 bp, synthetic construct
  source 1..75: mol_type = other DNA
gaagacggttgttgcgcacgtcttcggtgaacgcactctggccacactggagcgtcttctgagcctgctgtcggc

SEQ ID NO: 685260 - DNA, 75 bp, synthetic construct
  source 1..75: mol_type = other DNA
ccagcgctgctgttttacgcgtatgacaggatacggaagacagttgtggcgcacgtattcggtgaacgcactatg

SEQ ID NO: 685261 - DNA, 75 bp, synthetic construct
  source 1..75: mol_type = other DNA
aagcgttacactcagcgcattgagcgacataatctgaatctgagacaacacctggcaaggccgggacggaagtca

SEQ ID NO: 685262 - DNA, 75 bp, synthetic construct
  source 1..75: mol_type = other DNA
cgccagtgcacgcattatgggcgttggcctctacacggttttacgtcacttaaaaaactcagccgagtcggtaac

SEQ ID NO: 685263 - DNA, 75 bp, synthetic construct
  source 1..75: mol_type = other DNA
aaaatcatatgtacaataataagaaaacatcaaaaaataccattgtaaacaccggagtaagtatccctttaaatt

SEQ ID NO: 685264 - DNA, 75 bp, synthetic construct
  source 1..75: mol_type = other DNA
cacgccagcatgtgccgtgtttatttgctggtgatttgccccctgctggctctcagccaactgtatcgccattaa

SEQ ID NO: 685265 - DNA, 75 bp, synthetic construct
  source 1..75: mol_type = other DNA
atgtgtttttggttacaaaacatgtccttcagtacaccggatcatgcgacaaatctccgggatgaaacaggggca

SEQ ID NO: 685266 - DNA, 75 bp, synthetic construct
  source 1..75: mol_type = other DNA
aaaaaccggattgcgctctatagcatttattgagagtgagattgatgaatggatttacaaaatcatttctgattc

SEQ ID NO: 685267 - DNA, 75 bp, synthetic construct
  source 1..75: mol_type = other DNA
gtttgccgatctggtgagcgtcgccgggcatctgtataaatttggcctcaatgatggactgcccggcaatagcga

SEQ ID NO: 685268 - DNA, 75 bp, synthetic construct
  source 1..75: mol_type = other DNA
gccagcctggacgaactgctgaacggcgaagggcctggcattctgcttgctggcagggagctggaagatcagttt

SEQ ID NO: 685269 - DNA, 75 bp, synthetic construct
  source 1..75: mol_type = other DNA
gtataaatgaaggaaaagtaaaaggtgtaaatgtcgaaggtcatcatgagttcaaagatggaactagggatacgt

SEQ ID NO: 685270 - DNA, 75 bp, synthetic construct
  source 1..75: mol_type = other DNA
tttcgacttttacgaagaacgaccagcgcgcggctgggatgtccgggctgaagggtggttgccagcatggccacg

SEQ ID NO: 685271 - DNA, 75 bp, synthetic construct
  source 1..75: mol_type = other DNA
agatgtcaaataatcagaatgcaaaaacattaggtgatgaaatcctgtcttttgcatgtgaatattcgaaagccg

SEQ ID NO: 685272 - DNA, 75 bp, synthetic construct
  source 1..75: mol_type = other DNA
aaatattcatctagcaatattaatgttagcggatcttctaaagataacaaaacattctggaacatatcacaagaa

SEQ ID NO: 685273 - DNA, 75 bp, synthetic construct
  source 1..75: mol_type = other DNA
gtggagattggcaacctgaccggcgaatttaatatctgtctgccattcagcatgatcgagccgctacgggaattg

SEQ ID NO: 685274 - DNA, 75 bp, synthetic construct
  source 1..75: mol_type = other DNA
gattccattgcccctttatctgatgcactgggtgacatttcagaaaaattaaccaaatatgctggtgagtatccg

SEQ ID NO: 685275 - DNA, 75 bp, synthetic construct
  source 1..75: mol_type = other DNA
gattaatccgtgttcctgaagttcttagaagagtcggatttagtcgaaccacaatgtatgagcttattaaggaag

SEQ ID NO: 685276 - DNA, 75 bp, synthetic construct
  source 1..75: mol_type = other DNA
ttacttaatacctatgagggtgaaaagatttattttgataagttggggtatgattttaataataaagagtctaat

SEQ ID NO: 685277 - DNA, 75 bp, synthetic construct
  source 1..75: mol_type = other DNA
atggctggagagctagctaagaaactcagtttattatgtaatctcgaagaatctgaagatttaatgtttgcagca

SEQ ID NO: 685278 - DNA, 75 bp, synthetic construct
  source 1..75: mol_type = other DNA
atgtatgatatggatgtaaaaaaattcttgttcgaaaatccagagttacaagaaaaaacttacttcgttgtaaga

SEQ ID NO: 685279 - DNA, 75 bp, synthetic construct
  source 1..75: mol_type = other DNA
aatacatgtggtattgaggttaaaaactataacattgctacaaatattaatggtttaataaataatgtttctaaa

SEQ ID NO: 685280 - DNA, 75 bp, synthetic construct
  source 1..75: mol_type = other DNA
gctggaaagtgaaatcctggctgaccgggtgagtgaggaaagccgccgctggctggcatcgtgcggcctgacggt

SEQ ID NO: 685281 - DNA, 75 bp, synthetic construct
  source 1..75: mol_type = other DNA
tctcaactgagaactggttatgcagaaagatatcaggctatagcgtctcagtatagctcaaggattggtgtggat

SEQ ID NO: 685282 - DNA, 75 bp, synthetic construct
  source 1..75: mol_type = other DNA
tgaagatgcaggtgagttgtttacagatgcaaggcgacgcactgccagaaagcagccgcgaactgttaagccaga

SEQ ID NO: 685283 - DNA, 75 bp, synthetic construct
  source 1..75: mol_type = other DNA
ctctttcgtgccagccacctgtttatgaaggcatataacgaaattctggaactggattactgcttcaaagattga

SEQ ID NO: 685284 - DNA, 75 bp, synthetic construct
  source 1..75: mol_type = other DNA
gaacatggggcgcattgtcgttgacgtagatggtgttactctcgctgaactgattaacgtggtctgcgataacgg

SEQ ID NO: 685285 - DNA, 75 bp, synthetic construct
  source 1..75: mol_type = other DNA
ttcccgaaaaaactttcacagacgtccaaggagatacccatgagtcatcaggaaccggctactatcctgctgatt

SEQ ID NO: 685286 - DNA, 75 bp, synthetic construct
  source 1..75: mol_type = other DNA
cggatgtatacacctaccggtacggtcacggcaggtgaattccatactgttgtgcagtttacgtttacttatcaa

SEQ ID NO: 685287 - DNA, 75 bp, synthetic construct
  source 1..75: mol_type = other DNA
tctggtaacttgtcagttggatgaagaacaaatgtcatcgctgctttatgaaagagatgatttaagcgccattga

SEQ ID NO: 685288 - DNA, 75 bp, synthetic construct
  source 1..75: mol_type = other DNA
atgccgggtttaagcctggtattaaaagtgctggcaaacgcaaaactgcctgatgcgctacgcttatcaggcctt

SEQ ID NO: 685289 - DNA, 75 bp, synthetic construct
  source 1..75: mol_type = other DNA
ctggcggatacccttcagcagtccggcggcgaagacggtggcagtgtggtgttcccgccggtgctggtgcagatg

SEQ ID NO: 685290 - DNA, 75 bp, synthetic construct
  source 1..75: mol_type = other DNA
attgttggtggtactggttccggcaaaacaacagtaggtaaagccattgcggatttgtttcctcctgaacggcgc

SEQ ID NO: 685291 - DNA, 75 bp, synthetic construct
  source 1..75: mol_type = other DNA
cactggaagctgccggtggcaaagtggtcacaacgggtaaagatattctagttaccctgccggcttaccggttca

SEQ ID NO: 685292 - DNA, 75 bp, synthetic construct
  source 1..75: mol_type = other DNA
atgcagggcgatgcgctgccagaaagcagccgcgaactgttaagtcagatccgtaacgaactgaatgcatcctga

SEQ ID NO: 685293 - DNA, 75 bp, synthetic construct
  source 1..75: mol_type = other DNA
gtccctgtagatgtttgtcgccaaattgccggatatgccagccatgataacaaatttgtgatccatcttaatggc

SEQ ID NO: 685294 - DNA, 75 bp, synthetic construct
  source 1..75: mol_type = other DNA
atgtccgaacagggcgttttgataatgtcaggattgcgacgaaacacgaagccatcctgactgaacggcaacgct

SEQ ID NO: 685295 - DNA, 75 bp, synthetic construct
  source 1..75: mol_type = other DNA
tttgaagggaaaaatggctgggaatctaaagatgcgccagacgcgacttttgataatttaatgacacttgccaaa

SEQ ID NO: 685296 - DNA, 75 bp, synthetic construct
  source 1..75: mol_type = other DNA
gtgggtctgttgctattatcacgtttacagataccggttcagtcaatggaagcttctgaacacgttatcgcgagg

SEQ ID NO: 685297 - DNA, 75 bp, synthetic construct
  source 1..75: mol_type = other DNA
ctaaagcgaattttatagttacagcagtacgcggtgagatcgcccgccgccaagcagaaggaagaggagaaaacc

SEQ ID NO: 685298 - DNA, 75 bp, synthetic construct
  source 1..75: mol_type = other DNA
ggtgttcactattatctggttgcgggcgcgattgctacaaccgtggcggcaactgctggcaatggcgagtgccgt

SEQ ID NO: 685299 - DNA, 75 bp, synthetic construct
  source 1..75: mol_type = other DNA
gcgaatatcagcgggcgcaacgaaatggcaatgctcggaacggcactgaacaatatgtctgcggaactggcggag

SEQ ID NO: 685300 - DNA, 75 bp, synthetic construct
  source 1..75: mol_type = other DNA
cgtctggctggttgcgcgactggacggtaagctctctcatattaatcaacaaaatgttgtgcagaacattgtaag

SEQ ID NO: 685301 - DNA, 75 bp, synthetic construct
  source 1..75: mol_type = other DNA
ctgcgcgccggagaaagcagcccgctgggatgggcgcgctgcaatcaaagactacaaggagagtttaatgttatc

SEQ ID NO: 685302 - DNA, 75 bp, synthetic construct
  source 1..75: mol_type = other DNA
aatgattgtaatcgcgcttcatacagagggttggcaattgctgctttacattacagaggtgactggaattgtgcc

SEQ ID NO: 685303 - DNA, 75 bp, synthetic construct
  source 1..75: mol_type = other DNA
ctgatgttcatgccgggggatgaagtacaggtgaaaggcaatgttgcgaaggtggattcactgaatgactggggc

SEQ ID NO: 685304 - DNA, 75 bp, synthetic construct
  source 1..75: mol_type = other DNA
cggaattgccgagggtatcgaaacggctctttcctgcaagcagctgtacaacgttaacacctgggccaccatgac

SEQ ID NO: 685305 - DNA, 75 bp, synthetic construct
  source 1..75: mol_type = other DNA
agcgttcccgcgcacttcagatgcagtaagcgcccgtgatcgggttctgtccaaattttcgaaactggtcaacct

SEQ ID NO: 685306 - DNA, 75 bp, synthetic construct
  source 1..75: mol_type = other DNA
taactaaaaagattgatattccattagatgatgaaataaaaaaatatattgaggattttgattttagtatttttt

SEQ ID NO: 685307 - DNA, 75 bp, synthetic construct
  source 1..75: mol_type = other DNA
aggataaaacatggcctcaataatcatatgccacatcaattattaatgaatatatcaggaactacaactggtgca

SEQ ID NO: 685308 - DNA, 75 bp, synthetic construct
  source 1..75: mol_type = other DNA
attctgtttataaagattacgacccgagaggcaaagacgatacaacaggaggagtttacccggatcaagatacag

SEQ ID NO: 685309 - DNA, 75 bp, synthetic construct
  source 1..75: mol_type = other DNA
ccccgatatggagccgcctttctgaacaattaacctgctgcgccttatgtgtatgtgatcccaaacataagcacg

SEQ ID NO: 685310 - DNA, 75 bp, synthetic construct
  source 1..75: mol_type = other DNA
gctgatttgttgtttgtgttaccgctagacattgatgcacctcacttaaatggactttatgggcgcacacaatac

SEQ ID NO: 685311 - DNA, 75 bp, synthetic construct
  source 1..75: mol_type = other DNA
atttgcgtccacaggcatctaagacccatgcggaaaaattagcactaggattagttaatttttcttgttcaacgc

SEQ ID NO: 685312 - DNA, 75 bp, synthetic construct
  source 1..75: mol_type = other DNA
atacctgggcaaccattaacagtggttttatgaaaaagttccgcgtaccggcgggagtcacccatctgattattt

SEQ ID NO: 685313 - DNA, 75 bp, synthetic construct
  source 1..75: mol_type = other DNA
cgctgaaggcatcgaaacggcgttgtctgctcaccaaatttacaaggtaaacacttgggcaacaatcaatagcgg

SEQ ID NO: 685314 - DNA, 75 bp, synthetic construct
  source 1..75: mol_type = other DNA
ggtgataaaaaagcagatatcggtagcagtgcaaagcgcctcaaatccctgcaggaagataactatttggatcac

SEQ ID NO: 685315 - DNA, 75 bp, synthetic construct
  source 1..75: mol_type = other DNA
tggtgattttattaaaatattggcttggatttttgcatatcctttgatttcacagggaaaagtaaagtggtatat

SEQ ID NO: 685316 - DNA, 75 bp, synthetic construct
  source 1..75: mol_type = other DNA
ttaatgacaactttttacgagcaaaagcggaaattgcttcgacaataattaaatttttagaggccaggataacca

SEQ ID NO: 685317 - DNA, 75 bp, synthetic construct
  source 1..75: mol_type = other DNA
agcggaaattgcttcgacaataattaaattcttagaggccaggataaccaatatttcatacaatgacatattaaa

SEQ ID NO: 685318 - DNA, 75 bp, synthetic construct
  source 1..75: mol_type = other DNA
acaataccttgacaaacaaatcgaaggtttattttcaacattattaaccattaatgacaactttttacgagcaaa

SEQ ID NO: 685319 - DNA, 75 bp, synthetic construct
  source 1..75: mol_type = other DNA
gattttacgagtggggcggtggaattgattttattaaatatattctgtcaatattagaaacgaaaccagaaatat

SEQ ID NO: 685320 - DNA, 75 bp, synthetic construct
  source 1..75: mol_type = other DNA
tatgtggaacaataactgagaaaaataccacattagattttatttcatacattggaaataagccaagtattctaa

SEQ ID NO: 685321 - DNA, 75 bp, synthetic construct
  source 1..75: mol_type = other DNA
ctgcccgccgggcgtgaccattatgaacgtacgtcagggcgaacctttaggtttaggtcactccattttgtgtgc

SEQ ID NO: 685322 - DNA, 75 bp, synthetic construct
  source 1..75: mol_type = other DNA
gatgggagcgggttggttggctgatcttatgctcccctggctgggcgttttgttagcctcattagtcggtggggt

SEQ ID NO: 685323 - DNA, 75 bp, synthetic construct
  source 1..75: mol_type = other DNA
tattaagagagaaagggatatttgagtttattgaagccgcaaagttcgttaagacaacttatccaagttctgaat

SEQ ID NO: 685324 - DNA, 75 bp, synthetic construct
  source 1..75: mol_type = other DNA
ctgtatggaaaatatctgaggcttacctaagcgtggtaactcttgcattatcaacatattttttaccaaaattat

SEQ ID NO: 685325 - DNA, 75 bp, synthetic construct
  source 1..75: mol_type = other DNA
tgggcaacaatgtctaaaaatgaattcatagcatttcattacgagacacttcaacccgaaaagatttcatacccc

SEQ ID NO: 685326 - DNA, 75 bp, synthetic construct
  source 1..75: mol_type = other DNA
aatatgatttagcgcggaaacacctcccacaaatttatgcgtgccgcacgaacaccacatatacaaatgcagact

SEQ ID NO: 685327 - DNA, 75 bp, synthetic construct
  source 1..75: mol_type = other DNA
tgtttcccacaaaaccagcctgctcgacccgctggaaattcgcgaactccacaatcgtagaagacatagagccag

SEQ ID NO: 685328 - DNA, 75 bp, synthetic construct
  source 1..75: mol_type = other DNA
agagaaaaaacatcccgaatgtctttgtcggaaacagacgacaatagggggaaaactgttggtgccctagttgag

SEQ ID NO: 685329 - DNA, 75 bp, synthetic construct
  source 1..75: mol_type = other DNA
tgttggtgttgggttggcaagatacctcagcggagttgtaaccagcgccagtagcgcaacaggtgcgctaatttc

SEQ ID NO: 685330 - DNA, 75 bp, synthetic construct
  source 1..75: mol_type = other DNA
cttatgaatgcggccattgtcaacggcattaagatggcggcaaacagtatgtccggtgcaggaggatttttcggc

SEQ ID NO: 685331 - DNA, 75 bp, synthetic construct
  source 1..75: mol_type = other DNA
aaggcgttactaatgcagaaaaggcattaaatgagtcagcgcaaaaacttgcggccggagatgatttattgccta

SEQ ID NO: 685332 - DNA, 75 bp, synthetic construct
  source 1..75: mol_type = other DNA
gacgtgatattgaatacacatggactgaaaattataacaccttgcatcttacctccaataaaataaataaattcg

SEQ ID NO: 685333 - DNA, 75 bp, synthetic construct
  source 1..75: mol_type = other DNA
gagttgtcacgcctgaagggtgaggccaaagagcgcctgcgtctgagttatgcagccgatgacctggggttaacc

SEQ ID NO: 685334 - DNA, 75 bp, synthetic construct
  source 1..75: mol_type = other DNA
cgaagaaaacaggtttatttctgtcgttaatattatcaatgatacaccccgtcatggcgggaatggatattgata

SEQ ID NO: 685335 - DNA, 75 bp, synthetic construct
  source 1..75: mol_type = other DNA
gaatttaaacctgtcagtggtgtaatggccactggtagccaacagatattcgccaataatcatgtcggcggtgca

SEQ ID NO: 685336 - DNA, 75 bp, synthetic construct
  source 1..75: mol_type = other DNA
agataaaaacaagtctgttcctggcattattgtttgccacatccagtcctgtatatgcagggctggatgtggata

SEQ ID NO: 685337 - DNA, 75 bp, synthetic construct
  source 1..75: mol_type = other DNA
tcatatcagggacttgttcgcaccttccttagcccgagtctgttaaagaaaaagctgaaaagcgaaaacaccagt

SEQ ID NO: 685338 - DNA, 75 bp, synthetic construct
  source 1..75: mol_type = other DNA
ctgctgaggagctcaagaatactattattctggctgcaaaaggcatgaagctgattgatgatgcctcattccagt

SEQ ID NO: 685339 - DNA, 75 bp, synthetic construct
  source 1..75: mol_type = other DNA
gtcgaaattcttcctgtcagcatggatggcagacctttacaaaatgggttgtttgatcctacccacgtaatatgg

SEQ ID NO: 685340 - DNA, 75 bp, synthetic construct
  source 1..75: mol_type = other DNA
taattttgagtgaaggggaacagagggctgtatcgttagcatcttttttagctgaattaaaacttgccaaccatt

SEQ ID NO: 685341 - DNA, 75 bp, synthetic construct
  source 1..75: mol_type = other DNA
tccctgcctcttatcagggcagatatttcaatgatagagcgtgtgataacaaatttactggataatgctgtacgc

SEQ ID NO: 685342 - DNA, 75 bp, synthetic construct
  source 1..75: mol_type = other DNA
gttgatcactgtttcagaaaatcctttcagtggcatgctggttaagcaggaaaaaagacggaagaaaacgctgac

SEQ ID NO: 685343 - DNA, 75 bp, synthetic construct
  source 1..75: mol_type = other DNA
attgttcgtcgtgatgttcaggaatggcgtcgttttgtgctgaaagatcagggattaacttcccatacctggaat

SEQ ID NO: 685344 - DNA, 75 bp, synthetic construct
  source 1..75: mol_type = other DNA
agcgggaaccttcaacggtgaatctgcggtgtctgtaggaacatcttttaatgccggaacgcataccgtgattaa

SEQ ID NO: 685345 - DNA, 75 bp, synthetic construct
  source 1..75: mol_type = other DNA
acaagccgaagcccaacaaacgcagattaccgagcaacaaaagcaaatcgaagccacacaaaaaacggtcgctgc

SEQ ID NO: 685346 - DNA, 75 bp, synthetic construct
  source 1..75: mol_type = other DNA
aaaaatttgagctcagcatagaaacccgtcgattgcaactaagaattatgatgtcacattccctgcctcttatca

SEQ ID NO: 685347 - DNA, 75 bp, synthetic construct
  source 1..75: mol_type = other DNA
caagggtggcttggtgatgatatcagcatccctgaatgcgatgtaatcaattggatgccactaccagaaccgccg

SEQ ID NO: 685348 - DNA, 75 bp, synthetic construct
  source 1..75: mol_type = other DNA
cgtaatgtgtcagtacgcgagctggcaccgattctgcgccagatgatcgacagcgcaggctcaggcaaacgttgt

SEQ ID NO: 685349 - DNA, 75 bp, synthetic construct
  source 1..75: mol_type = other DNA
aatacatcacctgcaatggactggggatttttcaggctgcgtttatgatggtttaccttgggacaaggtcagcta

SEQ ID NO: 685350 - DNA, 75 bp, synthetic construct
  source 1..75: mol_type = other DNA
gatttttcagacgtctgtcacgggagtgtggttttctggtttctgcccaccgtttcaggcacacgctggcgacga

SEQ ID NO: 685351 - DNA, 75 bp, synthetic construct
  source 1..75: mol_type = other DNA
aaatcctggctgaccgggtgagtgaggaaagccgccgctggctggcatcgtgcggcctgactgtggcgcagatgc

SEQ ID NO: 685352 - DNA, 75 bp, synthetic construct
  source 1..75: mol_type = other DNA
cagcaagtgattacctgccacagacaaattggccaacaactcaattaccaccaggatatacttgtgcagaaccct

SEQ ID NO: 685353 - DNA, 75 bp, synthetic construct
  source 1..75: mol_type = other DNA
cggatgacatgaatggttcgtcctggaaatttagcacccgaatgcaaaaaattgatcctgcattgagtgttacat

SEQ ID NO: 685354 - DNA, 75 bp, synthetic construct
  source 1..75: mol_type = other DNA
ctatggatgagattgatataaatatcaatgatccaagaaataatggtgattttcttattcttagccatactatag

SEQ ID NO: 685355 - DNA, 75 bp, synthetic construct
  source 1..75: mol_type = other DNA
taagtttagagattgttactaatcgtgtgaaaaaaataaactgtacactagctagcatacattctgaattaggtt

SEQ ID NO: 685356 - DNA, 75 bp, synthetic construct
  source 1..75: mol_type = other DNA
ttttcaggattttaacatccccaatgcacaaattattgatcaatttaaaattcgagaggtacctacaattttcct

SEQ ID NO: 685357 - DNA, 75 bp, synthetic construct
  source 1..75: mol_type = other DNA
aaaatggtgatggatattttagccatgaaaacacgtgatggtgaaccagggttatttgctgcaatggaaaataat

SEQ ID NO: 685358 - DNA, 75 bp, synthetic construct
  source 1..75: mol_type = other DNA
ctgcgcgatccccttgacgatgaatattacttacaggggcctggaaccacattagtggcagaactgattgaacaa

SEQ ID NO: 685359 - DNA, 75 bp, synthetic construct
  source 1..75: mol_type = other DNA
taagtttagagattgttaccaatcgtgtaaaaaaaataaactgtacactagctagcatacatgctgaattagatt

SEQ ID NO: 685360 - DNA, 75 bp, synthetic construct
  source 1..75: mol_type = other DNA
tttgttcaggagcggggacataaaatagccagttactaccgggagaacataagcggtacaaaactcgaccgcccg

SEQ ID NO: 685361 - DNA, 75 bp, synthetic construct
  source 1..75: mol_type = other DNA
ggcattcgccctggtatcgcatttcgctgccgcaggtggtgtatcagagcactgcatggccggatttgcgcgatg

SEQ ID NO: 685362 - DNA, 75 bp, synthetic construct
  source 1..75: mol_type = other DNA
gcgattttttcattgcccgttgaacaataccccgatctcgcgccaccgaatgtgcgagtgaccgctaactatccc

SEQ ID NO: 685363 - DNA, 75 bp, synthetic construct
  source 1..75: mol_type = other DNA
ggactggcagggatggcggtttctggctggctggtgcaaggcgttcagggcagcgcccatgcgatcaacaaagcg

SEQ ID NO: 685364 - DNA, 75 bp, synthetic construct
  source 1..75: mol_type = other DNA
acagtggtactggtccatcgggtaatggcggtatttatggcacttttactggtgttcactattatctggttgcgg

SEQ ID NO: 685365 - DNA, 75 bp, synthetic construct
  source 1..75: mol_type = other DNA
ctgatcctgttagatctcaatatgcccggcatgaacggtctggaaacgctggataaactgcgcgaaaagtccctc

SEQ ID NO: 685366 - DNA, 75 bp, synthetic construct
  source 1..75: mol_type = other DNA
attatacgccgcaatggaaaataatcaccctttgtgtgtcacacggttcctctctaaaattaatggcatcgcctt

SEQ ID NO: 685367 - DNA, 75 bp, synthetic construct
  source 1..75: mol_type = other DNA
catccaggaattcagtgagtatattgcgccactgcaggatgctgtagatctggaaatcgcaacggaggaagaaag

SEQ ID NO: 685368 - DNA, 75 bp, synthetic construct
  source 1..75: mol_type = other DNA
gactgacacacgtgatccggtactggctgtcgcgctcaaacgtgatgcggttgctggcggtgtcactcatcccgc

SEQ ID NO: 685369 - DNA, 75 bp, synthetic construct
  source 1..75: mol_type = other DNA
tcctgaatattaaggaaactaacaagagaacgggagaagaactcacgcttgtatccacaagtgagtccagcgttc

SEQ ID NO: 685370 - DNA, 75 bp, synthetic construct
  source 1..75: mol_type = other DNA
tattatacgggcggcaaaaacttctccattctgttatctggttgttccggtacagcattaaccggaacaaaacag

SEQ ID NO: 685371 - DNA, 75 bp, synthetic construct
  source 1..75: mol_type = other DNA
ccaacggcatcagagatcggggcgttaccgtcaggtggaacagtgatcttacccagcaatagtggacacgcggct

SEQ ID NO: 685372 - DNA, 75 bp, synthetic construct
  source 1..75: mol_type = other DNA
ttactgatactgactgcggtaatattcatctcgccggagctgtcattgaagtaatggggataaagtcagcgatga

SEQ ID NO: 685373 - DNA, 75 bp, synthetic construct
  source 1..75: mol_type = other DNA
ttagaaaaggtcgtaaaccccattttcaaaaccaatcaggttcactgccgtacaggcagcttagaaatgtggcgc

SEQ ID NO: 685374 - DNA, 75 bp, synthetic construct
  source 1..75: mol_type = other DNA
attggagttgagtggacttgtatcaaataagcgatgttatgaaggtgttcatgcactactggacaatggctatcg

SEQ ID NO: 685375 - DNA, 75 bp, synthetic construct
  source 1..75: mol_type = other DNA
ctgttgatttatcattgcctggatgttgcagctgttgcagattgctggtgggaacaatcagtcgtactacaaaat

SEQ ID NO: 685376 - DNA, 75 bp, synthetic construct
  source 1..75: mol_type = other DNA
ggaggcattcagtggatttacgatggaggctcagcttcggagattacaatcaacagtggttaccaggtcatctca

SEQ ID NO: 685377 - DNA, 75 bp, synthetic construct
  source 1..75: mol_type = other DNA
ctgaaattcagaacagagttgtcacgaacggtgcaatagtgatccacacccaacgcctgaaatcagatccagggg

SEQ ID NO: 685378 - DNA, 75 bp, synthetic construct
  source 1..75: mol_type = other DNA
agcaattaatgcaaaactaactataggtcaatacgatactgaatcctctattttcgactctttccatttttctgg

SEQ ID NO: 685379 - DNA, 75 bp, synthetic construct
  source 1..75: mol_type = other DNA
acacgcgctggttgctcgcggtattctcgaacatgctactgttcgttcaccgctattaccgctggagcatggtgc

SEQ ID NO: 685380 - DNA, 75 bp, synthetic construct
  source 1..75: mol_type = other DNA
ctcattttatctttcgggtgccaccactgacagtagccgacaagtgtttgctaacacagcacctgatgcaacaaa

SEQ ID NO: 685381 - DNA, 75 bp, synthetic construct
  source 1..75: mol_type = other DNA
tgtttaaaaatagagaaacctcactgtggaaacgcaaagtaccagaaagcgcagcgctggcaatgacgggaacag

SEQ ID NO: 685382 - DNA, 75 bp, synthetic construct
  source 1..75: mol_type = other DNA
tggtaccaggtacgcattgccgggcgtgatgcaggtgaaaccgaattgtctgcccgtcttaatgagccgctggaa

SEQ ID NO: 685383 - DNA, 75 bp, synthetic construct
  source 1..75: mol_type = other DNA
tgaccccggcaccggttacccctttcaatcgtgatggtagtattgattttgatgctatccagcgtctgggaagct

SEQ ID NO: 685384 - DNA, 75 bp, synthetic construct
  source 1..75: mol_type = other DNA
atcgacatctctcgttttgagaaaaaaggctatatcccccctggtagatacctcgttcgtgtgcaaataaataaa

SEQ ID NO: 685385 - DNA, 75 bp, synthetic construct
  source 1..75: mol_type = other DNA
cataaaagcgggggaagtcattgcccgtattcatatgtataaaattgccacgttaggaagcggaaatccgcgtaa

SEQ ID NO: 685386 - DNA, 75 bp, synthetic construct
  source 1..75: mol_type = other DNA
ggattctcgacatcaaccgcgcggtgctggagcgctgtgcgcgcgagctgctggcgcgggaaacgctcgacgaaa

SEQ ID NO: 685387 - DNA, 75 bp, synthetic construct
  source 1..75: mol_type = other DNA
aagttattgcccgtattcatatgtataaaattgccacgttaggaagcggaaatccgcgtaattttacgtggaata

SEQ ID NO: 685388 - DNA, 75 bp, synthetic construct
  source 1..75: mol_type = other DNA
gatatgctctttttctcgcagtgatatttttctttgggtttaaatataatcatgaccctgaaaagataaagcatc

SEQ ID NO: 685389 - DNA, 75 bp, synthetic construct
  source 1..75: mol_type = other DNA
gtatttgtcgaacaggaagttgattccagcattcgtgccagcgcgcaggggctctttatgaccatggtaaatggt

SEQ ID NO: 685390 - DNA, 75 bp, synthetic construct
  source 1..75: mol_type = other DNA
tattattctggctgctgtaatttcatgtgtgatatacaaaacatatttttcactgatttacgggatatatgatca

SEQ ID NO: 685391 - DNA, 75 bp, synthetic construct
  source 1..75: mol_type = other DNA
ccacctgttgaccgatcgcggcatgccgggcgacggcgtcatcaacctttctcatttatgccaaaccattgccga

SEQ ID NO: 685392 - DNA, 75 bp, synthetic construct
  source 1..75: mol_type = other DNA
aggatctggtagccctcgcaccggctctggtcattgtgctgggtgcagatgtcgggacggcgctaatggcgcgta

SEQ ID NO: 685393 - DNA, 75 bp, synthetic construct
  source 1..75: mol_type = other DNA
tgaatgtgagagactattagcaaaaaatgcaatgaattatgacgagtatcttgataaattatttcaaacaacagc

SEQ ID NO: 685394 - DNA, 75 bp, synthetic construct
  source 1..75: mol_type = other DNA
gttaacttacaagtgggcagccaaaagttggggaatgctatggctgcacccagagttaattcacaaattccctta

SEQ ID NO: 685395 - DNA, 75 bp, synthetic construct
  source 1..75: mol_type = other DNA
tgaaattatttctccgtctaattcaattacaagaattacccgcagaagcgccggacacactcaagttttcgcgat

SEQ ID NO: 685396 - DNA, 75 bp, synthetic construct
  source 1..75: mol_type = other DNA
tgaagccgtcggatggagaaggcacagtaatcagcgccaccagagacacggagtattactttgttgtggttctgg

SEQ ID NO: 685397 - DNA, 75 bp, synthetic construct
  source 1..75: mol_type = other DNA
ggggaacggaaagacgaaaacgggtcgtctgtgggtatacgtcagggatgatcgtaatgcgggttcatccctgcc

SEQ ID NO: 685398 - DNA, 75 bp, synthetic construct
  source 1..75: mol_type = other DNA
ttgaagccgaacgtattggtccaagagacaatatttctttatcacaacacaattttcatagcgattggttgggga

SEQ ID NO: 685399 - DNA, 75 bp, synthetic construct
  source 1..75: mol_type = other DNA
gattctttgaccagcaatcaattgatatgtacacaattatgacaggctcttttgatactcctgactcaatgaaat

SEQ ID NO: 685400 - DNA, 75 bp, synthetic construct
  source 1..75: mol_type = other DNA
atggaaccgtttgaaatatcagccgcggacctgtctgaaaaactgcatgtatcaccttccactctaagtagagtg

SEQ ID NO: 685401 - DNA, 75 bp, synthetic construct
  source 1..75: mol_type = other DNA
tactggtcgagcaaattgaccgcctgacccgtctgagtaacagtgactggattacgctgaaaaagcagatagaac

SEQ ID NO: 685402 - DNA, 75 bp, synthetic construct
  source 1..75: mol_type = other DNA
gtgcacgcagatgacactccggtgaaagtactggccccggggaacggaaagacgaaaacgggtcgtctgtgggta

SEQ ID NO: 685403 - DNA, 75 bp, synthetic construct
  source 1..75: mol_type = other DNA
tcttaccgcattgaagaaaccgctaagtatcaacgactggatggagatatcataatacctgataatgattcggga

SEQ ID NO: 685404 - DNA, 75 bp, synthetic construct
  source 1..75: mol_type = other DNA
aacctgttttttactggaaagattcgcccgctgtgagcggcatggccttctataacagcgataaattcccccagt

SEQ ID NO: 685405 - DNA, 75 bp, synthetic construct
  source 1..75: mol_type = other DNA
tagcgagcttcaataaggatccgctgattacccgaccaattgctgtgaatattctgcttgatctctacaaaacgg

SEQ ID NO: 685406 - DNA, 75 bp, synthetic construct
  source 1..75: mol_type = other DNA
agtgtgacatggcacaaacaggcgaagctgaaaatagccctgacgagcgtgaagaggctgaaggagaaagtccgc

SEQ ID NO: 685407 - DNA, 75 bp, synthetic construct
  source 1..75: mol_type = other DNA
aggtggtgcgctgggtaactggatcggcaacaaagatcctctgtctggtgcaatttcaaatggtatcggttctgc

SEQ ID NO: 685408 - DNA, 75 bp, synthetic construct
  source 1..75: mol_type = other DNA
cggggactgtgggctggaatgctgcaggtggtgcgctgggtaactggatcggcaacaaagatcctctgtctggtg

SEQ ID NO: 685409 - DNA, 75 bp, synthetic construct
  source 1..75: mol_type = other DNA
cagaccccgataaaatgcaactcccgaagggtaagacctgcggcgactgcgcccatatccgtcgctgtaaggcaa

SEQ ID NO: 685410 - DNA, 75 bp, synthetic construct
  source 1..75: mol_type = other DNA
gccgtgaccgatgacccggcaagcctcggcacggaatacctcgaattctgcagccgtgctgcgcagaacccgctc

SEQ ID NO: 685411 - DNA, 75 bp, synthetic construct
  source 1..75: mol_type = other DNA
gccgtcacggatgacccggcaagcctcggcaccgaatacctggaattctgcagccgcgccagccagaacccgctc

SEQ ID NO: 685412 - DNA, 75 bp, synthetic construct
  source 1..75: mol_type = other DNA
aaaacaccgaagacaaaacgcaaccgcgccgcaagttaagcgccggtggcgacggtgattcggcgggctccacgc

SEQ ID NO: 685413 - DNA, 75 bp, synthetic construct
  source 1..75: mol_type = other DNA
ctcaagttaaaactacgctagaaagtttcattgtacgcaaaaagaataatatatcctgtttaaacatacagctga

SEQ ID NO: 685414 - DNA, 75 bp, synthetic construct
  source 1..75: mol_type = other DNA
caagcaatagggtcgaactattcgctaaaaggtttggagaaattcaccccaactctagaaggaacaaatgatttc

SEQ ID NO: 685415 - DNA, 75 bp, synthetic construct
  source 1..75: mol_type = other DNA
gtgatattggttgtctggagattcagggggccagtctacaaagtttttgccttcagttgtaatgtcgatggcggg

SEQ ID NO: 685416 - DNA, 75 bp, synthetic construct
  source 1..75: mol_type = other DNA
tctccccctactacatcgcgttaatccgcctcctgattgtgttcggatgccggacggtagaactgaggttatcgg

SEQ ID NO: 685417 - DNA, 75 bp, synthetic construct
  source 1..75: mol_type = other DNA
aaggtcaaaatcgctgatgatgatttacaaaaagattctaaatcattcttggccattaaggctcatgaggcaaat

SEQ ID NO: 685418 - DNA, 75 bp, synthetic construct
  source 1..75: mol_type = other DNA
attcactgcaatattcggaaaagtctatcggatacggtatgtatcagggcggccaaatgagctctatacctggaa

SEQ ID NO: 685419 - DNA, 75 bp, synthetic construct
  source 1..75: mol_type = other DNA
gtggcggatattgcgcgtacacagggagaactgaatgcgttgaaggccgcgaaggaagcaaccggcgaaacactt

SEQ ID NO: 685420 - DNA, 75 bp, synthetic construct
  source 1..75: mol_type = other DNA
acaggtatcggtgatgatatcctgatagttggttttggtcgaggcggttatgatgtcgtatatgggaaggatggt

SEQ ID NO: 685421 - DNA, 75 bp, synthetic construct
  source 1..75: mol_type = other DNA
atcacccagcaggagcatgatgatcttgcggcgaagaacgatgcggtaacggcggcgaaagcagatgcggcgaaa

SEQ ID NO: 685422 - DNA, 75 bp, synthetic construct
  source 1..75: mol_type = other DNA
ggccattaaggctcatgaggcaaatgtagggacaaatgtttatgtaataagtaagaatggtgctaataacgtcgc

SEQ ID NO: 685423 - DNA, 75 bp, synthetic construct
  source 1..75: mol_type = other DNA
gcagatctcgggacaattgatgcagatgcgattgtctggttaccccatgccagagggatcgatgcccggactgta

SEQ ID NO: 685424 - DNA, 75 bp, synthetic construct
  source 1..75: mol_type = other DNA
aaatattctccccctactacatcgcgttaatccgcctcctgattgtgttcggatgccggacggtagaactgaggt

SEQ ID NO: 685425 - DNA, 75 bp, synthetic construct
  source 1..75: mol_type = other DNA
agcttacaggccaccagatgccaggaatgcagcgagtttataatcattcccgttatctggatgcgaaacgcaatg

SEQ ID NO: 685426 - DNA, 75 bp, synthetic construct
  source 1..75: mol_type = other DNA
acctcagccgtgatcctgcgcacgctaatgacagtatcagcccgatatttgacaaggagaaggagcagaggcgtc

SEQ ID NO: 685427 - DNA, 75 bp, synthetic construct
  source 1..75: mol_type = other DNA
aagtacccgacagggagcacggctggaaggcaagcagtcccattccttatgcagactggctgcatgatgcgtcaa

SEQ ID NO: 685428 - DNA, 75 bp, synthetic construct
  source 1..75: mol_type = other DNA
taacgagagcattccggcaaactggacgatgcccgggcggcaagacggtgtgacacgaaactctgtcgcaatggg

SEQ ID NO: 685429 - DNA, 75 bp, synthetic construct
  source 1..75: mol_type = other DNA
agtgatgcatagcgggtcattaaactttcaatttgatggcggaactcagcaagagaaatccgggatacttatggc

SEQ ID NO: 685430 - DNA, 75 bp, synthetic construct
  source 1..75: mol_type = other DNA
tggcggagggcggccaaaaataagatctgaggagtgggtctctctaggtattagtcgcgctacgtggtataggaa

SEQ ID NO: 685431 - DNA, 75 bp, synthetic construct
  source 1..75: mol_type = other DNA
ttgaataacgcagtactcgaacttttcaacgaccgcttaccgcacaagccgtacttttcggacgatctgcacttt

SEQ ID NO: 685432 - DNA, 75 bp, synthetic construct
  source 1..75: mol_type = other DNA
gcgtataaatgggcagaggcactggcttttcgcgtggcgctgatgcgccagcaggtcaatgatgctgtccggggt

SEQ ID NO: 685433 - DNA, 75 bp, synthetic construct
  source 1..75: mol_type = other DNA
tccaatccctcatatttatttaaaagagcaatataaaatagaaaatggtcagttcaagttgacatccagaatgga

SEQ ID NO: 685434 - DNA, 75 bp, synthetic construct
  source 1..75: mol_type = other DNA
acactattttatgtccagcatccaacaaaggaatttcactggaagtagcaggttcaggttctatttcagacatta

SEQ ID NO: 685435 - DNA, 75 bp, synthetic construct
  source 1..75: mol_type = other DNA
ggataaatatggctataatatctctaacaatacattggcacagtatgtatctttgcttagaaagaactttaaact

SEQ ID NO: 685436 - DNA, 75 bp, synthetic construct
  source 1..75: mol_type = other DNA
tggaagagtctgactacgggagaaattcacgttggagatggacgactcaactggttgataacagaagaaaatgag

SEQ ID NO: 685437 - DNA, 75 bp, synthetic construct
  source 1..75: mol_type = other DNA
gaacatcatcaattgatattactggcagtggagatctaatatcattaggtggtcatgcaggacttggcgttgcgt

SEQ ID NO: 685438 - DNA, 75 bp, synthetic construct
  source 1..75: mol_type = other DNA
acgcgcacctgctgtacgcgctggaaaccccggtacgcaccgctcctgatggaaaaatgaagccgctgcgctacg

SEQ ID NO: 685439 - DNA, 75 bp, synthetic construct
  source 1..75: mol_type = other DNA
cgaaccacggtcactggaaaattgccgtgtggcagccggaactctacacgctggactggctggccgactttctcg

SEQ ID NO: 685440 - DNA, 75 bp, synthetic construct
  source 1..75: mol_type = other DNA
ttcattcgctgaaagtggaatgtatccatggagaacactttatcagccgggaaataatgcgggcaacggtgtttt

SEQ ID NO: 685441 - DNA, 75 bp, synthetic construct
  source 1..75: mol_type = other DNA
agtccaaaggccgatattgaggcggctgacggaacggcgccacgctgtaaatcgattaacgtgacacgcagaggg

SEQ ID NO: 685442 - DNA, 75 bp, synthetic construct
  source 1..75: mol_type = other DNA
tattgcgcaacttcaatttagtggcactgtgccaatgattgacattgatgcctatggaaaatggttggctaattg

SEQ ID NO: 685443 - DNA, 75 bp, synthetic construct
  source 1..75: mol_type = other DNA
acagcgaaaagttgcaagtgttcgcagacttcatcgtaccagccttccaattccgcatgctggcgggacatatcc

SEQ ID NO: 685444 - DNA, 75 bp, synthetic construct
  source 1..75: mol_type = other DNA
ataatgaaactggaggtgtatttgaaaatgggaattatatagatctacaaaataaaatcctttcatgtattaatc

SEQ ID NO: 685445 - DNA, 75 bp, synthetic construct
  source 1..75: mol_type = other DNA
gtatacagtgagtctgatttcagctgctagctggtcagcactttatgttggtagttttagcttcgtgttgccttt

SEQ ID NO: 685446 - DNA, 75 bp, synthetic construct
  source 1..75: mol_type = other DNA
actattttgtacttcatccatatcgcctatgggggcttctttttataatagcgttcacaaaatccactttactca

SEQ ID NO: 685447 - DNA, 75 bp, synthetic construct
  source 1..75: mol_type = other DNA
aagaagcatgaacatccgggtgtttatgatttatttcaatcaaacaaattcattacaaaagatacgacatacttt

SEQ ID NO: 685448 - DNA, 75 bp, synthetic construct
  source 1..75: mol_type = other DNA
cagctgacggactatatcggctacgacatcctgctgcagtacattcaggaacttatccagcaggcccgggcgatg

SEQ ID NO: 685449 - DNA, 75 bp, synthetic construct
  source 1..75: mol_type = other DNA
cagaaaaacagtcgaaatagcaaaagttttgggcgttaacccggaatggctcgcatcgggtgttggcccaatgga

SEQ ID NO: 685450 - DNA, 75 bp, synthetic construct
  source 1..75: mol_type = other DNA
gcccgcactgccagtccatcaaccgcgtaccgactgcgaagctatcggaacatcccaactgtggccgctgccagc

SEQ ID NO: 685451 - DNA, 75 bp, synthetic construct
  source 1..75: mol_type = other DNA
ttcatcatctattcgctgacgatggacaaaatccgtgagatcgcggtgttgaagctcatcggcacacgcaaccga

SEQ ID NO: 685452 - DNA, 75 bp, synthetic construct
  source 1..75: mol_type = other DNA
ttagatattgaattggttaattgtgatatcacttcatttaaggggggggaggagtctcggcagcaaaaaaaggga

SEQ ID NO: 685453 - DNA, 75 bp, synthetic construct
  source 1..75: mol_type = other DNA
acgcaatggacgtcgctggatacacgcaggctaggctggcgaaagatgtaggcatggctcagtccagcgtaaata

SEQ ID NO: 685454 - DNA, 75 bp, synthetic construct
  source 1..75: mol_type = other DNA
taaaaatgtagttttttcaggagtgataaacagccctaaccttgaaggtccggtttttgaaaattgttatttcga

SEQ ID NO: 685455 - DNA, 75 bp, synthetic construct
  source 1..75: mol_type = other DNA
ctaccggtatgatgataccggtcgggtgacggagcaggtcaacccggaggggctggactatcgctttgagtacgg

SEQ ID NO: 685456 - DNA, 75 bp, synthetic construct
  source 1..75: mol_type = other DNA
tgtttgaactccgcaccctaccttatcagtcgatgcaacactcgaaagattaccgctgggtatctaatgaccggg

SEQ ID NO: 685457 - DNA, 75 bp, synthetic construct
  source 1..75: mol_type = other DNA
acagtaccctcacggcgtggccggataaccgcatcgcagaggatgcgcactatgtttaccactatgatgaatacg

SEQ ID NO: 685458 - DNA, 75 bp, synthetic construct
  source 1..75: mol_type = other DNA
aaaacaggaaaattaaaatgtatcaaccacgttataaaagcagaatgattgacgataatgaatataatcaggtgc

SEQ ID NO: 685459 - DNA, 75 bp, synthetic construct
  source 1..75: mol_type = other DNA
acacggagggcgagggcggcctgaagcgggtggtgaagaaggaacatgcggacgggagcattacccgcagcgagt

SEQ ID NO: 685460 - DNA, 75 bp, synthetic construct
  source 1..75: mol_type = other DNA
gccagcgagcttctcggctctgccggtaatctgactgataagctgcagggtgcgctcggagggctgaccgcatga

SEQ ID NO: 685461 - DNA, 75 bp, synthetic construct
  source 1..75: mol_type = other DNA
cgttgcgaaatccaaagcgccgaactctccggttgcaggtcgcgctaccgtgttcatcttcccggatctgaacac

SEQ ID NO: 685462 - DNA, 75 bp, synthetic construct
  source 1..75: mol_type = other DNA
aaccccgcagatcattttcaaataattttaaacttcaaatggttaaactgtcttcacaaccaagattctctgtta

SEQ ID NO: 685463 - DNA, 75 bp, synthetic construct
  source 1..75: mol_type = other DNA
tcgggggaaggaagtttatatctgtgttgatgtgaattcctgggcggtatcagctgaacgttccggcgtctggta

SEQ ID NO: 685464 - DNA, 75 bp, synthetic construct
  source 1..75: mol_type = other DNA
tccttttgatgttgtttatgagcgctattctctctggagttttgccgggatggaatatgcccggaatgcagggat

SEQ ID NO: 685465 - DNA, 75 bp, synthetic construct
  source 1..75: mol_type = other DNA
tagtcatgcttatttcgccattaagttgggcgggaaatatgaccttccagttccgtaatccaaactttggtggta

SEQ ID NO: 685466 - DNA, 75 bp, synthetic construct
  source 1..75: mol_type = other DNA
tataaagatccgagctataacgatgactttggtattgaaacaccctcagcgctgatgaatcccctaatgattttt

SEQ ID NO: 685467 - DNA, 75 bp, synthetic construct
  source 1..75: mol_type = other DNA
aacttaacccgtattggagtcacaaatttgggttttggacaatgggataatggtgaaaacaagattaatagtcac

SEQ ID NO: 685468 - DNA, 75 bp, synthetic construct
  source 1..75: mol_type = other DNA
tgcataaaaaatatgatttggaacttgttagtatcaagaaggttaaggttagtaatttgatagttaatgataact

SEQ ID NO: 685469 - DNA, 75 bp, synthetic construct
  source 1..75: mol_type = other DNA
gggagcaaaaacacgcaaaggattttgaggcggcaaaagagcaatgcaggatagacaatcatggtcagaacgtta

SEQ ID NO: 685470 - DNA, 75 bp, synthetic construct
  source 1..75: mol_type = other DNA
ctaatggccaaatattgcagcttaccgatacccttcaaaaaattggtcgaattggaggcacatctgccgaggaaa

SEQ ID NO: 685471 - DNA, 75 bp, synthetic construct
  source 1..75: mol_type = other DNA
aaagaaccggatagacttatgaagtgggacgccgcaaccaaaaagaaatttaatttagatgggaattatgatttt

SEQ ID NO: 685472 - DNA, 75 bp, synthetic construct
  source 1..75: mol_type = other DNA
tgcgggtgttgagtggcggtcacgtaatatctggctcgaggcagagtacgctgaacgcgttttcaatcatgagca

SEQ ID NO: 685473 - DNA, 75 bp, synthetic construct
  source 1..75: mol_type = other DNA
aacagaaacatctatcaatataaacactgagataaatctatcagagttattgagtaaaagctttaactttcaaaa

SEQ ID NO: 685474 - DNA, 75 bp, synthetic construct
  source 1..75: mol_type = other DNA
gaaaaagtactgactgagtatctctttcaggtaaaaacggcaatgagggcaatcccttctaaaacatatcttgaa

SEQ ID NO: 685475 - DNA, 75 bp, synthetic construct
  source 1..75: mol_type = other DNA
ctggatgatatgtatgctgcgggacgtagttttatcaaccagtatcataaagactggaatgaggataaaaatgct

SEQ ID NO: 685476 - DNA, 75 bp, synthetic construct
  source 1..75: mol_type = other DNA
aaacgcaaaatacagcgactgcattcccgtatcgcaaatatccgcagggactaccttcataaagtcacaacgacc

SEQ ID NO: 685477 - DNA, 75 bp, synthetic construct
  source 1..75: mol_type = other DNA
gcaaaatctgaaggccgcactgaacgctgggaaaatagatctcaaggagtataacgctgccacggagaaaatggc

SEQ ID NO: 685478 - DNA, 75 bp, synthetic construct
  source 1..75: mol_type = other DNA
aggcgacaggagcaagcacaggactggttgcggttatcgactcaatgactgcagcgctcgaccggctggtgggta

SEQ ID NO: 685479 - DNA, 75 bp, synthetic construct
  source 1..75: mol_type = other DNA
cggccatcatgtcctccgtggcttcattcggtggcgctgttgctattggtcttggcgcgatggctggcatcctgg

SEQ ID NO: 685480 - DNA, 75 bp, synthetic construct
  source 1..75: mol_type = other DNA
gacgggaagagatgcctgtatacacgcgttgggtaaaaacgcagaaatgcatgacgtgtggtaatcaggcagatg

SEQ ID NO: 685481 - DNA, 75 bp, synthetic construct
  source 1..75: mol_type = other DNA
agcaacttgctcatcaaaacctgtcagcatggatgattaacgtcatacgcaatgcaatgaatggtacgcaagagc

SEQ ID NO: 685482 - DNA, 75 bp, synthetic construct
  source 1..75: mol_type = other DNA
ggaaaaaattcgctccgtatacagtgagagcgacatcataccgggagagcagaccgccaccagcatcctgaagca

SEQ ID NO: 685483 - DNA, 75 bp, synthetic construct
  source 1..75: mol_type = other DNA
atattgcgctaccgcctcacatccaccagcaacagaacccaccacaggaagagacggtggtcagcattgccgttg

SEQ ID NO: 685484 - DNA, 75 bp, synthetic construct
  source 1..75: mol_type = other DNA
cgtaccgggagagcagaccgccaccagcatactgaagcagcgcacaaaaaatcttgcgccgctgcctcacgccca

SEQ ID NO: 685485 - DNA, 75 bp, synthetic construct
  source 1..75: mol_type = other DNA
ctggcactgcgacaaccagttgcgtgaccagacatccgaatcactcgggcaacttgctcatcaaaacctgtcagc

SEQ ID NO: 685486 - DNA, 75 bp, synthetic construct
  source 1..75: mol_type = other DNA
accagctgcgcgaccagacctccgaatcactcgggcaacttgctcaccaaaacctgtctgcatggatgattgacg

SEQ ID NO: 685487 - DNA, 75 bp, synthetic construct
  source 1..75: mol_type = other DNA
ccatttttcagcgacgaacgagtgattcgtgctgctggtggcgctggcgcattgtctgactggttactgcgccat

SEQ ID NO: 685488 - DNA, 75 bp, synthetic construct
  source 1..75: mol_type = other DNA
aagacaaatcgttactgccatttttcagcgatgagcgggtgatccgtgctgtaggtggtgcaggcgcactgtctg

SEQ ID NO: 685489 - DNA, 75 bp, synthetic construct
  source 1..75: mol_type = other DNA
cggtcagggtggaatgggaacaaaagcgcatgacctttttgtgttgcctttatgcagaaaacatcacgacgagct

SEQ ID NO: 685490 - DNA, 75 bp, synthetic construct
  source 1..75: mol_type = other DNA
caccacagaaaaaaacggttgccagtatcgccgttgatccggagtctcctgaatcgtttatgaagcggcctaaac

SEQ ID NO: 685491 - DNA, 75 bp, synthetic construct
  source 1..75: mol_type = other DNA
gttacggtactggcgcgatggtgttgtgctggcactgtgacaaccagctgcgtgaccagacatcagattcactgg

SEQ ID NO: 685492 - DNA, 75 bp, synthetic construct
  source 1..75: mol_type = other DNA
agatgatccgcatcacatcattggtcatggactgggagggatgggaacaaaggctgatgatttgtttgttattcc

SEQ ID NO: 685493 - DNA, 75 bp, synthetic construct
  source 1..75: mol_type = other DNA
cacagtgggcggcaataggtgtgctgggtagtctggtatttggcctgctgacgtacctgacaaacctttatttca

SEQ ID NO: 685494 - DNA, 75 bp, synthetic construct
  source 1..75: mol_type = other DNA
atccccaccatctgataggccacggtcaggggggaatgggtacaaaagcgcatgatctctttgtgttgcctttgt

SEQ ID NO: 685495 - DNA, 75 bp, synthetic construct
  source 1..75: mol_type = other DNA
gcgtaatctgccgtccggggtcgttcctgccgttcgccagccgctagtggaagacaaaacattgctgccgttttt

SEQ ID NO: 685496 - DNA, 75 bp, synthetic construct
  source 1..75: mol_type = other DNA
gtgggggctgaggatgcgatcatcctcggccaagtactaggcatttcccccgcagaattaatgttcggtgaacag

SEQ ID NO: 685497 - DNA, 75 bp, synthetic construct
  source 1..75: mol_type = other DNA
gaccagttcacggaacggctggaatcaatggcaacggataactgtgcccgctgggtgttgtctgttgtgcgccgt

SEQ ID NO: 685498 - DNA, 75 bp, synthetic construct
  source 1..75: mol_type = other DNA
gtgagagcactactgacccctgaaattgccccgcgtatggggatcgtcttgttcagacccggttcagagctgatg

SEQ ID NO: 685499 - DNA, 75 bp, synthetic construct
  source 1..75: mol_type = other DNA
aaaccgtcattcaccgttatggtaccggcgcaatggtgttgtgctggcactgcgacaaccaactgcgtgaccaga

SEQ ID NO: 685500 - DNA, 75 bp, synthetic construct
  source 1..75: mol_type = other DNA
gtgaattatcgctggctgaattatcctggtgggctgtctgcaatcaggtggcggacgcactaccggaggtagtat

SEQ ID NO: 685501 - DNA, 75 bp, synthetic construct
  source 1..75: mol_type = other DNA
gtggatgcactacctgaggcagtagcgcgtcgttcgctgggattaccagcggaaaaaatccgctccgtataccgt

SEQ ID NO: 685502 - DNA, 75 bp, synthetic construct
  source 1..75: mol_type = other DNA
gtgcgggtattacttcgacctgttctggtaccggaactcgggatggtgctccttaagccgggccgtgaatcaatg

SEQ ID NO: 685503 - DNA, 75 bp, synthetic construct
  source 1..75: mol_type = other DNA
agcatggatgattgacgtcatcggtcacgcaataagcggtacgcaggagcgtgaattatctttggctgaattatc

SEQ ID NO: 685504 - DNA, 75 bp, synthetic construct
  source 1..75: mol_type = other DNA
ttcagtaacgcacgggtgattcgtgctgctggtggtgctggtgcattgtctgactggctgttgcgccatattaaa

SEQ ID NO: 685505 - DNA, 75 bp, synthetic construct
  source 1..75: mol_type = other DNA
ggtgaagacacagccgtgtgcgtgttgtggtaagccagccgacgatccccatcacctgattggtcatggtcaggg

SEQ ID NO: 685506 - DNA, 75 bp, synthetic construct
  source 1..75: mol_type = other DNA
ccggtattttacaatacccgggtactggtggagccggaaccgaaaaacatgcgggcgctgccatcaggagaggtt

SEQ ID NO: 685507 - DNA, 75 bp, synthetic construct
  source 1..75: mol_type = other DNA
tctctgggattaccggcggaaaaaatccgctccgtataccgtgaaagcgacatcataccgggagaacagaccgcc

SEQ ID NO: 685508 - DNA, 75 bp, synthetic construct
  source 1..75: mol_type = other DNA
gaagcagcgcacaaaaaatattgcgctaccgcctcacacccaccagcaacagaacccaccacaggaaaagacggt

SEQ ID NO: 685509 - DNA, 75 bp, synthetic construct
  source 1..75: mol_type = other DNA
gcggagtttgctgtccggggttgttcctgctgttcgccagccgctggcggaggataaatcattactgccattttt

SEQ ID NO: 685510 - DNA, 75 bp, synthetic construct
  source 1..75: mol_type = other DNA
agacagccaccagcacactgaagctgcgcacaaaaaatattgcgctaccgcctcacgcccaccagcaacaaaact

SEQ ID NO: 685511 - DNA, 75 bp, synthetic construct
  source 1..75: mol_type = other DNA
agcaacttgctcatcaaaacctgtcagcatggatgattgacgtcatcggccacgcaataagcggtacgcaggagc

SEQ ID NO: 685512 - DNA, 75 bp, synthetic construct
  source 1..75: mol_type = other DNA
atccccatcacctgattggtcatggtcagggcggaatagggacaaaagcccacgatattttcacgctaccgttgt

SEQ ID NO: 685513 - DNA, 75 bp, synthetic construct
  source 1..75: mol_type = other DNA
gcggacgcgctaccggaagcggtattacgtcgttcgctggggttgcgtgcggaaaaaatccgctcaatgtaccgt

SEQ ID NO: 685514 - DNA, 75 bp, synthetic construct
  source 1..75: mol_type = other DNA
gagagcgacatcataccgggagaacagacagccaccagcatactgaagcagcgcacaaaaaatattgcgctaccg

SEQ ID NO: 685515 - DNA, 75 bp, synthetic construct
  source 1..75: mol_type = other DNA
tccggagtcgccggagtcttttatgttacgcccaaaacgtcgccgctgggttaatgaaaagtacacgcgctgggt

SEQ ID NO: 685516 - DNA, 75 bp, synthetic construct
  source 1..75: mol_type = other DNA
cgcgaccagacctccgaatcactcgggcaacttgctcaacaaaacctgacatcctggatgattgacgtcatccgc

SEQ ID NO: 685517 - DNA, 75 bp, synthetic construct
  source 1..75: mol_type = other DNA
gttgtggtaagccagccgacgatccccatcacctgattggtcatggtcagggcggaatgggaacaaaatcccacg

SEQ ID NO: 685518 - DNA, 75 bp, synthetic construct
  source 1..75: mol_type = other DNA
cacgcgctgggttaagacgcagccgtgtgcatgttgtggtaagccagccgacgatccgcatcacctgattggtca

SEQ ID NO: 685519 - DNA, 75 bp, synthetic construct
  source 1..75: mol_type = other DNA
gaaaagtatggctcccagctggagctgatatttcgttttatcgatcgtgcgctggcaattggcgtgctggcctga

SEQ ID NO: 685520 - DNA, 75 bp, synthetic construct
  source 1..75: mol_type = other DNA
tggcctcattccggatggcacagcgagaacatgaccacaatgcgacacgcgccgggcgcaatccgtctgtgctgg

SEQ ID NO: 685521 - DNA, 75 bp, synthetic construct
  source 1..75: mol_type = other DNA
ggaatgggaacaaaatcccacgatattttcacactaccgctgtgtcgggagcatcacaacgagcttcatgcggat

SEQ ID NO: 685522 - DNA, 75 bp, synthetic construct
  source 1..75: mol_type = other DNA
atgtcaggctcccttattccgaacgctcaccgcgcccatcccgcacataccagcaacggatctggaggtaacgtg

SEQ ID NO: 685523 - DNA, 75 bp, synthetic construct
  source 1..75: mol_type = other DNA
tggtcagggtggaatgggaacaaaatcccacgatattttcacgctaccgctgtgtcgggagcatcacaacgagct

SEQ ID NO: 685524 - DNA, 75 bp, synthetic construct
  source 1..75: mol_type = other DNA
gcatgcggataccgtggcatttgaagagaagtatggctcccagctggagctgatatttcgttttatcgatcgtgc

SEQ ID NO: 685525 - DNA, 75 bp, synthetic construct
  source 1..75: mol_type = other DNA
agaaaagcatggttcccaggttgatttaatttttcgttttcttgatcacgcctttgcaaccggcgtgctcgggta

SEQ ID NO: 685526 - DNA, 75 bp, synthetic construct
  source 1..75: mol_type = other DNA
cccgggtactggtggagccggaaccgaaaagcatgcgtaatctgccgtccggggtcgttcctgccgttcgccagc

SEQ ID NO: 685527 - DNA, 75 bp, synthetic construct
  source 1..75: mol_type = other DNA
gaaagcgacatcgtaccgggagagcagaccgccaccagcatactgaagcagcgcacaaaaaatattgcgctaccg

SEQ ID NO: 685528 - DNA, 75 bp, synthetic construct
  source 1..75: mol_type = other DNA
cacgcaatgaatggcacgcaggagcgagaattatcactggctgaactgtactgctgggctgttgtaaataatgtg

SEQ ID NO: 685529 - DNA, 75 bp, synthetic construct
  source 1..75: mol_type = other DNA
tgtgccgggagcatcacaatgaacttcatgctgatccgctggcatttgaagaaaagcatggttcccagattgatt

SEQ ID NO: 685530 - DNA, 75 bp, synthetic construct
  source 1..75: mol_type = other DNA
gcggtccgcaatcagctggcggacgcgctaccggaagcggtattacgtcgctcgctgggattaccagcggaaaaa

SEQ ID NO: 685531 - DNA, 75 bp, synthetic construct
  source 1..75: mol_type = other DNA
ggcgctggacaggtgctgttgctgaactgctggagccgttgtatgacgtcctgcgccagtatgtgctgattcccg

SEQ ID NO: 685532 - DNA, 75 bp, synthetic construct
  source 1..75: mol_type = other DNA
tgcactggcacgtgccgaagaaaagatcgaagaagatgaacgggaaatagaatatctgagggcccagatagaaaa

SEQ ID NO: 685533 - DNA, 75 bp, synthetic construct
  source 1..75: mol_type = other DNA
ccccgtgtcttcggctggatggaccgtctttgcgaaaactactgcggtggtatctggaatctgtacaccctgaac

SEQ ID NO: 685534 - DNA, 75 bp, synthetic construct
  source 1..75: mol_type = other DNA
tgcatcagggaataaccagtctcaactggttgccactcccgtccctgatgaacagcgcatcagcttctggccaca

SEQ ID NO: 685535 - DNA, 75 bp, synthetic construct
  source 1..75: mol_type = other DNA
tattcccggtgtgctggccgtgtttgctgaacgccgtaaggacagttttggcccgtatgtccgactgatgagcgt

SEQ ID NO: 685536 - DNA, 75 bp, synthetic construct
  source 1..75: mol_type = other DNA
agtggccgtaggccggaaaaactggatgttcgcgggttccgacagcggtggtgaacatgcggcggtgttgtactc

SEQ ID NO: 685537 - DNA, 75 bp, synthetic construct
  source 1..75: mol_type = other DNA
ataacacagcggaaagagcgcttcgtgcattctgtctcggaaagaaaaattacgtgttcttcggtagcgatcacg

SEQ ID NO: 685538 - DNA, 75 bp, synthetic construct
  source 1..75: mol_type = other DNA
aaagtgatccgcactgttcgggtaaaaaaagcctgtacaaaatgtgactgtatagttgaagcgccagcgccgtcc

SEQ ID NO: 685539 - DNA, 75 bp, synthetic construct
  source 1..75: mol_type = other DNA
gctggaactggtgagtagcgccctgaaagtgatccgcactgttcgggtaaaaaaagcctgtacaaaatgtgactg

SEQ ID NO: 685540 - DNA, 75 bp, synthetic construct
  source 1..75: mol_type = other DNA
aacagcgtctggcggcaagaaaaaccagagccgcgccactgatgcagtcactgtatgactggatacagcaacaga

SEQ ID NO: 685541 - DNA, 75 bp, synthetic construct
  source 1..75: mol_type = other DNA
cggggccagtttttcacgccctggagtgtggccagcatgatggcacagatgcaactggggaatgtgaaggtgttg

SEQ ID NO: 685542 - DNA, 75 bp, synthetic construct
  source 1..75: mol_type = other DNA
gctggcgcattgtactgatgcagaggcgttatgtattgatcgggtcataagtgaggtgttggcagagcatcctgg

SEQ ID NO: 685543 - DNA, 75 bp, synthetic construct
  source 1..75: mol_type = other DNA
aggagttcatttcgttgtttaaccggacagcctgttatcacaaacgtcataaggtgtttgaagactttgtcagct

SEQ ID NO: 685544 - DNA, 75 bp, synthetic construct
  source 1..75: mol_type = other DNA
tggaccgtctgtgcgaagactactgcggaggaatctggaatctgtacaccctgaacaacggaggagcatttatgg

SEQ ID NO: 685545 - DNA, 75 bp, synthetic construct
  source 1..75: mol_type = other DNA
cggcgccgggtgctgctgacacccgggcattacctcggaaactggtcatatcgtctgcgccattctcaggagcag

SEQ ID NO: 685546 - DNA, 75 bp, synthetic construct
  source 1..75: mol_type = other DNA
tgcggtggtatctggaatctgtacaccctgaacaacggcggggcatttatggcacccgaaccggatgacgatgat

SEQ ID NO: 685547 - DNA, 75 bp, synthetic construct
  source 1..75: mol_type = other DNA
tggaccgtctgtgcgaagactactgcggaggaatctggaatctgtacaccctgaacaacgggggggcatttatgg

SEQ ID NO: 685548 - DNA, 75 bp, synthetic construct
  source 1..75: mol_type = other DNA
tggaccgtctgtgcgaagactactgcggaggaatctggaatctgtacaccctgaacaacggcggcgcatttatgg

SEQ ID NO: 685549 - DNA, 75 bp, synthetic construct
  source 1..75: mol_type = other DNA
tggaccgtctgtgcgaagactactgcggaggaatctggaatctgtacaccctgaacaacggtggtgcatttatgg

SEQ ID NO: 685550 - DNA, 75 bp, synthetic construct
  source 1..75: mol_type = other DNA
cataccgcaggatgtgggtgtcggaaacggacattgacccgctggcagctggtatggcgtatatacaattgtcgc

SEQ ID NO: 685551 - DNA, 75 bp, synthetic construct
  source 1..75: mol_type = other DNA
atcagcttctggccgcagcattttggcctcattccacagtgggtgaccctggagccccgtgtcttcggctggatg

SEQ ID NO: 685552 - DNA, 75 bp, synthetic construct
  source 1..75: mol_type = other DNA
cagaagtatctgcgaatcgtcagtggttatgaaaagcaggatgttatcaacattgcgcatttgcttgctcatgtc

SEQ ID NO: 685553 - DNA, 75 bp, synthetic construct
  source 1..75: mol_type = other DNA
tggaatctgtacaccctgaacaacggtggcgcatttatggcacccgaaccggatgacgatgatgacgaaacatgg

SEQ ID NO: 685554 - DNA, 75 bp, synthetic construct
  source 1..75: mol_type = other DNA
atgaccacctttatcgaccatcagaaagcttttattttgctgtttaatcagactgcccgttatcacaaacgtcat

SEQ ID NO: 685555 - DNA, 75 bp, synthetic construct
  source 1..75: mol_type = other DNA
gccatgactgagcactattaccgcctgcgggattatgccctgcagcaccctgaatccaacgctatttttcgcatt

SEQ ID NO: 685556 - DNA, 75 bp, synthetic construct
  source 1..75: mol_type = other DNA
atgagaatcatcacccgtggtgaagccatgcgtattcaccgtcagcatccggcatcccgtctttttccgttctgt

SEQ ID NO: 685557 - DNA, 75 bp, synthetic construct
  source 1..75: mol_type = other DNA
taggtgtgctggggagtctgctgtttggcctgctgacgtatctgactaacctgtatttcaaaatcagagaggacc

SEQ ID NO: 685558 - DNA, 75 bp, synthetic construct
  source 1..75: mol_type = other DNA
caggcattgcctacggcacctccgcaggcagtgctggctactggtttttacagttgctcgatagagtaactccgt

SEQ ID NO: 685559 - DNA, 75 bp, synthetic construct
  source 1..75: mol_type = other DNA
aagtctctccgtcccagtgggtggcaataggtgtactggggagtctgctgtttggcctgctgacgtatctgacta

SEQ ID NO: 685560 - DNA, 75 bp, synthetic construct
  source 1..75: mol_type = other DNA
acgggctactggttcctgcagttgctggacagggtttccccgtctcagtgggcggcaataggcgtgctggggagt

SEQ ID NO: 685561 - DNA, 75 bp, synthetic construct
  source 1..75: mol_type = other DNA
gtgtgctgggaagtctgctgtttggcctgctgacgtatctgacaaatctttatttcaagattaaagaagataagc

SEQ ID NO: 685562 - DNA, 75 bp, synthetic construct
  source 1..75: mol_type = other DNA
ctccgtcccagtgggtggcgataggcgtgctggggagtctgctgtttgggctgctgacatatctgacgaacctgt

SEQ ID NO: 685563 - DNA, 75 bp, synthetic construct
  source 1..75: mol_type = other DNA
gctgtttggcctgctgacgtatctgactaacctgtatttcaaaatcagagaggaccggcgtaaggcggtgcgggg

SEQ ID NO: 685564 - DNA, 75 bp, synthetic construct
  source 1..75: mol_type = other DNA
ggttctgggcttcctgacttatctgacaaatctgtacttcaaaatcagagaagacaagcgtaaggctgcacgggg

SEQ ID NO: 685565 - DNA, 75 bp, synthetic construct
  source 1..75: mol_type = other DNA
atcccttgtacagaaagcagtttaccgatttggatctgggaaagattctagtcgtgtgccgattgatgttaaaaa

SEQ ID NO: 685566 - DNA, 75 bp, synthetic construct
  source 1..75: mol_type = other DNA
atgaaatccatggataagttaacaacgggtgtcgcctatggcacctcagcaggtagtgccggctactggtttttg

SEQ ID NO: 685567 - DNA, 75 bp, synthetic construct
  source 1..75: mol_type = other DNA
gggttgttagtggacggtgtcattgcttctgtactgatgaatgatgactaccgatctctctatagcgtgattgtc

SEQ ID NO: 685568 - DNA, 75 bp, synthetic construct
  source 1..75: mol_type = other DNA
gggaagtctggcactgggctttctgacttatctgacgaatctgtatttcaagattaaagaagacaggcgtaaggc

SEQ ID NO: 685569 - DNA, 75 bp, synthetic construct
  source 1..75: mol_type = other DNA
tgctggacagggtttccccgtctcagtgggcggcaataggcgtgctggggagtctgctgtttgggctgctgacat

SEQ ID NO: 685570 - DNA, 75 bp, synthetic construct
  source 1..75: mol_type = other DNA
cgggcattgcctacggcacctccgcaggcagtgctggctactggtttttacagctgctcgataaagtcacgccct

SEQ ID NO: 685571 - DNA, 75 bp, synthetic construct
  source 1..75: mol_type = other DNA
taacaacgggtgtcgcctatggcacctcagcaggtagtgccggttactggtttttacagctgctcgataaagtca

SEQ ID NO: 685572 - DNA, 75 bp, synthetic construct
  source 1..75: mol_type = other DNA
ggggagtctgctgtttggtctgctgacatacctgacgaacctgtatttcaaaattaaagaagaccgacgcaaggc

SEQ ID NO: 685573 - DNA, 75 bp, synthetic construct
  source 1..75: mol_type = other DNA
tggttcctgcagttgctggacagggtttccccgtctcagtgggcggcaataggcgtgctggggagtctgctgttt

SEQ ID NO: 685574 - DNA, 75 bp, synthetic construct
  source 1..75: mol_type = other DNA
gggaagtctggcgctgggctttctgacttatctgacgaatctgtatttcaaaataagagaagataagcgtaaggc

SEQ ID NO: 685575 - DNA, 75 bp, synthetic construct
  source 1..75: mol_type = other DNA
atgaaccagatggaaaaaatcacaacaggtgtgtcatacaccacgtcagcggtgggaacgggctactggttcctg

SEQ ID NO: 685576 - DNA, 75 bp, synthetic construct
  source 1..75: mol_type = other DNA
ggggagtctgctgtttggcctgctgacgtatctgacaaatctttatttcaagattaaagaagataagcgtaaggc

SEQ ID NO: 685577 - DNA, 75 bp, synthetic construct
  source 1..75: mol_type = other DNA
ggggagtctgctgtttgggctgctgacatatctgacgaacctgtatttcaaaataaaagaagaccggcgtaaggc

SEQ ID NO: 685578 - DNA, 75 bp, synthetic construct
  source 1..75: mol_type = other DNA
tgggaagtctgctgtttgggctgctgacatatctgactaacctgtatttcaaaatcagagaggaccggcgtaagg

SEQ ID NO: 685579 - DNA, 75 bp, synthetic construct
  source 1..75: mol_type = other DNA
tttggcctgctgacgtatcttactaacctgtatttcaaaatcagagaggaccgtcgtaaggcggcgcggggagag

SEQ ID NO: 685580 - DNA, 75 bp, synthetic construct
  source 1..75: mol_type = other DNA
ttggcctgctgacgtatctgactaacctttatttcaagattaaagaagataagcgtaaggtggcgcggggagagt

SEQ ID NO: 685581 - DNA, 75 bp, synthetic construct
  source 1..75: mol_type = other DNA
gtcagcggtggggacgggatactggttactgcagctgctggacaaagtctctccgtcccagtgggtggcaatagg

SEQ ID NO: 685582 - DNA, 75 bp, synthetic construct
  source 1..75: mol_type = other DNA
ggcacaaaatgaaatctcccaaatggtctgagggctatgcttcagacatcattgaggcgtttgagaaagacattt

SEQ ID NO: 685583 - DNA, 75 bp, synthetic construct
  source 1..75: mol_type = other DNA
ataactggacgccaacgaccagtatcagcgaccttcttgttgttgtgatgaagaaatctacagctggtatcagta

SEQ ID NO: 685584 - DNA, 75 bp, synthetic construct
  source 1..75: mol_type = other DNA
tgcgccgctgcctcacgcccaccagcaacagaacccaccacaggaaaagacggtggtcagcattgccgttgatcc

SEQ ID NO: 685585 - DNA, 75 bp, synthetic construct
  source 1..75: mol_type = other DNA
acgttgggcggttccggcgcgttaaaagtgggcgcagattttttgaaacgttacttccctgattctggcgtctgg

SEQ ID NO: 685586 - DNA, 75 bp, synthetic construct
  source 1..75: mol_type = other DNA
acacgccggggtaaaagattttgaagaaaaacacggcagccagctgttgttgctgattcgttttttaatgcacgc

SEQ ID NO: 685587 - DNA, 75 bp, synthetic construct
  source 1..75: mol_type = other DNA
agcaacttgctcaccaaaacttgtcagcatggatgattgacgtcattcgtcacgcaatgaatggcacacaggagc

SEQ ID NO: 685588 - DNA, 75 bp, synthetic construct
  source 1..75: mol_type = other DNA
gcggctggaatcaatggcaacggataactgtgcccattgggtgttgtctgtagtccgtcgggatctcgattttaa

SEQ ID NO: 685589 - DNA, 75 bp, synthetic construct
  source 1..75: mol_type = other DNA
cttgaagtactgaggttgatagaagcacgaggcgctatggagaaagcgaagaaagtccgtcagcgatgcggtgaa

SEQ ID NO: 685590 - DNA, 75 bp, synthetic construct
  source 1..75: mol_type = other DNA
aacgacgtgttcctgaagcgtctgacggccccgaccatcaccagcggcggcaatcctccggcattttccctgaca

SEQ ID NO: 685591 - DNA, 75 bp, synthetic construct
  source 1..75: mol_type = other DNA
attattatttttacgttcgcagtgtgaacaccgtcggcaaatcgacattcgtggaggctgtcggtcagccgagtg

SEQ ID NO: 685592 - DNA, 75 bp, synthetic construct
  source 1..75: mol_type = other DNA
atagcgaactacacgccggggtaaaagattttgaagaaaaacacggcagccagctgttgttgctgattcgttttt

SEQ ID NO: 685593 - DNA, 75 bp, synthetic construct
  source 1..75: mol_type = other DNA
gtacgcaggagcgggaattatctttggctgaattatcctggtgggcggtctgcaatcaggtggtggatgcactac

SEQ ID NO: 685594 - DNA, 75 bp, synthetic construct
  source 1..75: mol_type = other DNA
attctgataattcgcccgttcttgcctgcacgcacgggcggtattctcacgcattcaagtctgaatggttccagc

SEQ ID NO: 685595 - DNA, 75 bp, synthetic construct
  source 1..75: mol_type = other DNA
accgtggcatttgaagagaagtatggctcccagctggagctgatatttcgttttatcgatcgtgcgctggaaata

SEQ ID NO: 685596 - DNA, 75 bp, synthetic construct
  source 1..75: mol_type = other DNA
taatctgccgtccggggtcgttcctgccgttcgccagccgctgggggatgaaaaatcatttctgccgtttttcag

SEQ ID NO: 685597 - DNA, 75 bp, synthetic construct
  source 1..75: mol_type = other DNA
taatctgccgtccggggtcgttcctgccgttcgccagccgctgggggatgaaaaaacatttctgccttttttcag

SEQ ID NO: 685598 - DNA, 75 bp, synthetic construct
  source 1..75: mol_type = other DNA
gtgcgggtattacttagacctgttctggtgccagaactcgggctggtggtccttaagccaggccgtgaatccatg

SEQ ID NO: 685599 - DNA, 75 bp, synthetic construct
  source 1..75: mol_type = other DNA
ttttttagtaacgaacgggtgattcgtgctgctggcggtgttggcgcattgtctgactggctattacgtcatgtt

SEQ ID NO: 685600 - DNA, 75 bp, synthetic construct
  source 1..75: mol_type = other DNA
gggcactgtctgactggctgttgcgtcatgtcaaatcctgccagtggcctcatggtgactatcatcacagtgaaa

SEQ ID NO: 685601 - DNA, 75 bp, synthetic construct
  source 1..75: mol_type = other DNA
cgcgaccagacctccgaatcactcgggcaacttgctcaccaaaacctgtttgcatggatgattgacgtcatacgc

SEQ ID NO: 685602 - DNA, 75 bp, synthetic construct
  source 1..75: mol_type = other DNA
ttgccccgcgtatggggatcgtattgttcaggccaggttcagagttgatgcccctgtttatgcaggggcgtgtcc

SEQ ID NO: 685603 - DNA, 75 bp, synthetic construct
  source 1..75: mol_type = other DNA
ctggtgggcggtctgcaatcaggtagcggacgtattgccggaggcagtattacgtcgttctctgggattgcgtgc

SEQ ID NO: 685604 - DNA, 75 bp, synthetic construct
  source 1..75: mol_type = other DNA
tggtgggcggtccgcaatcaggtggcggacgcgctaccggaagcggtattacgtcgttcgctggggttgcgtgcg

SEQ ID NO: 685605 - DNA, 75 bp, synthetic construct
  source 1..75: mol_type = other DNA
aaccgtcttaatatttactgagagctcagatcaactttccagggcaacagatcgcgtacccgatttgccggccag

SEQ ID NO: 685606 - DNA, 75 bp, synthetic construct
  source 1..75: mol_type = other DNA
atgaggctggaattttctgtgtcagcctggctggtaaatggctggtatcccacagcaagtatcagcgatttactg

SEQ ID NO: 685607 - DNA, 75 bp, synthetic construct
  source 1..75: mol_type = other DNA
ctttacgtcttcactttgaagaacatttaccccgggttgtggccgggcgtcgcctgggtgtaccaaaatcaacag

SEQ ID NO: 685608 - DNA, 75 bp, synthetic construct
  source 1..75: mol_type = other DNA
gggttctgggaaaattgtccgcgaaccagattgaaggcgatctcgttaaaacagtgggcaaagctttcccccggg

SEQ ID NO: 685609 - DNA, 75 bp, synthetic construct
  source 1..75: mol_type = other DNA
gtgcgcttcagtctgcgcctgaccagtggtaagggaacggatgccagactggtgaccaccgccatcaccgcagac

SEQ ID NO: 685610 - DNA, 75 bp, synthetic construct
  source 1..75: mol_type = other DNA
gaggtgagcgcagctgacggtcagtatctggcacaggcgaaatgggacacgccgaaggtggtgaagggcgtgagc

SEQ ID NO: 685611 - DNA, 75 bp, synthetic construct
  source 1..75: mol_type = other DNA
gaggtgagcgcggctgacggtcagtatctggcacaggcgaaatgggacacgccgcgggtggtgaagggggtgcgc

SEQ ID NO: 685612 - DNA, 75 bp, synthetic construct
  source 1..75: mol_type = other DNA
gaaggcgacctggtgaagacggtggggaaagcctttccccggaataacagttatgccagcgggacggtaaccgtc

SEQ ID NO: 685613 - DNA, 75 bp, synthetic construct
  source 1..75: mol_type = other DNA
tcaaatcattattccgcccattatctttaacggtatagcgtatgacgatccgggaagtggtaataacccgggagg

SEQ ID NO: 685614 - DNA, 75 bp, synthetic construct
  source 1..75: mol_type = other DNA
tcaggggctgcggcacacacccggtgacattattgaaatctgtgataacgactatgccgggaccatgaccggcgg

SEQ ID NO: 685615 - DNA, 75 bp, synthetic construct
  source 1..75: mol_type = other DNA
acctgaacagcatgtgggcggtgaagctgcagaagatgcaggacggacgcctttatattgccggtattggtgcag

SEQ ID NO: 685616 - DNA, 75 bp, synthetic construct
  source 1..75: mol_type = other DNA
agtgattcgtgctgctggtggcgctggcgcattgtctgactggttactgcgccatgttaaatcctgccagtggcc

SEQ ID NO: 685617 - DNA, 75 bp, synthetic construct
  source 1..75: mol_type = other DNA
ttgccccacgcatgggcgttgttcttcttcgcccaggtgctgatctcatgccgatgttcaggagagggcgggtac

SEQ ID NO: 685618 - DNA, 75 bp, synthetic construct
  source 1..75: mol_type = other DNA
ttgtgttgcctttgtgcagaaagcatcacgacgagctgcatgcggataccgtggcatttgaagagaagtatggct

SEQ ID NO: 685619 - DNA, 75 bp, synthetic construct
  source 1..75: mol_type = other DNA
gctggttacttcgtgaaaaaggctgccagtggcctcattccgactggcacagcgagaacataaccacaatgcgac

SEQ ID NO: 685620 - DNA, 75 bp, synthetic construct
  source 1..75: mol_type = other DNA
taacagcagagcaatacagagactggcaattaattgccgccagtctcagaaaaaagataaatggagaaagaagtt

SEQ ID NO: 685621 - DNA, 75 bp, synthetic construct
  source 1..75: mol_type = other DNA
aaaaaatggcataccctatgttgccggtattggagcggggattgaggatactgatggccagcccctgagcaacat

SEQ ID NO: 685622 - DNA, 75 bp, synthetic construct
  source 1..75: mol_type = other DNA
gggaaggatttctggttttacgtgcgcagcgtcaacctggtggggaaatctgcttttgtggaagccagtggccgg

SEQ ID NO: 685623 - DNA, 75 bp, synthetic construct
  source 1..75: mol_type = other DNA
ttttcagaaaatgattttgctgaaagacaacatgccgtttgatcgcaagcttatgcttatggcgtattcattttc

SEQ ID NO: 685624 - DNA, 75 bp, synthetic construct
  source 1..75: mol_type = other DNA
ccgaagacggtaagcattatgtcgcggggcttggcctcagcatggaggatacagaggaaggcaaactgagccagt

SEQ ID NO: 685625 - DNA, 75 bp, synthetic construct
  source 1..75: mol_type = other DNA
ctggacaccaacaaccagtatcagcgatctgctggttgtggtgatgaaaaaatccacagcaggtatcagtatcag

SEQ ID NO: 685626 - DNA, 75 bp, synthetic construct
  source 1..75: mol_type = other DNA
aatctgcgtttgtggaagtcagcgggcagcccagcaatgatggtgaagggtatctggaatttttccgggaaaaaa

SEQ ID NO: 685627 - DNA, 75 bp, synthetic construct
  source 1..75: mol_type = other DNA
acgatcctcatcatctgattggtcatggtcaggggggaatgggaacaaaatcccacgatattttcacgctaccgc

SEQ ID NO: 685628 - DNA, 75 bp, synthetic construct
  source 1..75: mol_type = other DNA
cagcaacggatctggaggtaacgtgcggatattacttcgacctgttctggtaccggaactcgggcttgtggtcct

SEQ ID NO: 685629 - DNA, 75 bp, synthetic construct
  source 1..75: mol_type = other DNA
tggtggaaccggaaccaaaaagcatgcgtaatctgccatccggagtcgttcctgccgttcgccagccgctggcgg

SEQ ID NO: 685630 - DNA, 75 bp, synthetic construct
  source 1..75: mol_type = other DNA
taatctgccgtccggggtcgttcctgccgttcgccagccgctggaggaagataaagcattcctgccctttttcag

SEQ ID NO: 685631 - DNA, 75 bp, synthetic construct
  source 1..75: mol_type = other DNA
taatctgccgtccggggtcgttcctgccgttcgccagccgctggaggaagataaagcattactgccatttttcag

SEQ ID NO: 685632 - DNA, 75 bp, synthetic construct
  source 1..75: mol_type = other DNA
agtatctccagcgccagaaaccacaacgggaagagatgcctgtatacacgcgctgggtaaaaacgcagaaatgca

SEQ ID NO: 685633 - DNA, 75 bp, synthetic construct
  source 1..75: mol_type = other DNA
gtattgcccgtcaaaacctggtatcctggcttctgaaggtcgtaaacggtcaattaggcttcagtgaagaccatg

SEQ ID NO: 685634 - DNA, 75 bp, synthetic construct
  source 1..75: mol_type = other DNA
gcatcacgacgagctgcatgcggataccgtggcatttgaagagatgtatggctcccagctggagctgatatttcg

SEQ ID NO: 685635 - DNA, 75 bp, synthetic construct
  source 1..75: mol_type = other DNA
acgcgccgggcgcaatccgtctgtgctggcactgcgataacctgcttcgcgatcagttcacggaacgtctggaat

SEQ ID NO: 685636 - DNA, 75 bp, synthetic construct
  source 1..75: mol_type = other DNA
tggtaccggaactcggggtggttatcgttaagccaggccgtgaatccatgcgggtatttcatggcggcagggtgc

SEQ ID NO: 685637 - DNA, 75 bp, synthetic construct
  source 1..75: mol_type = other DNA
ttgagtttaatgaaacaccagaacccggctggaaactataccagcctgaatcatgggatatcagccaggcactcc

SEQ ID NO: 685638 - DNA, 75 bp, synthetic construct
  source 1..75: mol_type = other DNA
atgatccgcatcacatcattggtcatggactgggagggatgggaacaaaggctgacgatttgtttgttattccgt

SEQ ID NO: 685639 - DNA, 75 bp, synthetic construct
  source 1..75: mol_type = other DNA
taatctgccgtccggggtcgttcctgccgttcgccagccgctggaggaagataaagcattgctgccgtttttcag

SEQ ID NO: 685640 - DNA, 75 bp, synthetic construct
  source 1..75: mol_type = other DNA
ctgcatgcggataccgtggcatttgaagagaagtatggctcccagctggagctgatatttcgttttatcgatcgc

SEQ ID NO: 685641 - DNA, 75 bp, synthetic construct
  source 1..75: mol_type = other DNA
agacacagccgtgtgcatgttgtggaaagccagctgatgatccgcatcatctgataggccatggtcagggtggaa

SEQ ID NO: 685642 - DNA, 75 bp, synthetic construct
  source 1..75: mol_type = other DNA
agacacagccgtgtgcatgttgtggaaagcccgctgatgatccccaccacctgataggtcacggtcagggtggaa

SEQ ID NO: 685643 - DNA, 75 bp, synthetic construct
  source 1..75: mol_type = other DNA
cgttatggtaccggcgcaatggtgttgtgctggcactgcgacaaccagctgcgtgaccagacatccgaatcactc

SEQ ID NO: 685644 - DNA, 75 bp, synthetic construct
  source 1..75: mol_type = other DNA
aaacgtcgccgctgggttaatgaaaagtacacgcgctgggttaagacacagccgtgtgcatgttgtggaaagcct

SEQ ID NO: 685645 - DNA, 75 bp, synthetic construct
  source 1..75: mol_type = other DNA
gccttcggttcctgccaccagcatcatccaggataaagcgaaaaaggtgctggcgctgaaagtggatccggagtc

SEQ ID NO: 685646 - DNA, 75 bp, synthetic construct
  source 1..75: mol_type = other DNA
taatctgccgtccggggtcgttcctgccgttcgccagccgctggaggaggataaagcattactgccgtttttcag

SEQ ID NO: 685647 - DNA, 75 bp, synthetic construct
  source 1..75: mol_type = other DNA
taatctgccgtccggggtcgttcctgccgttcgccagccgctggaggacgataaagcattactgccctttttcag

SEQ ID NO: 685648 - DNA, 75 bp, synthetic construct
  source 1..75: mol_type = other DNA
taatctgccgtccggggtcgttcctgccgttcgccagccgctggaggatgataaagcatttctgccgtttttcag

SEQ ID NO: 685649 - DNA, 75 bp, synthetic construct
  source 1..75: mol_type = other DNA
gcggataccgtggcatttgaagagaagtatggctcccagctggagctgatatttcgttttatcgatcgtgcgctg

SEQ ID NO: 685650 - DNA, 75 bp, synthetic construct
  source 1..75: mol_type = other DNA
tggtgccggaacttggcctggtggtccttaagcctggacgcgaatcacggcctgtttttcattgcggcagggtgc

SEQ ID NO: 685651 - DNA, 75 bp, synthetic construct
  source 1..75: mol_type = other DNA
gggaattgtcgctggctgaattatcctggtgggcggtctgcaatcaggtggcggacgcgcttccggaggcagtat

SEQ ID NO: 685652 - DNA, 75 bp, synthetic construct
  source 1..75: mol_type = other DNA
gatgccttgccggaaagtgcagcccgtaaggccctgagattaccgaagcctgttttgccgtctgtcacccgggag

SEQ ID NO: 685653 - DNA, 75 bp, synthetic construct
  source 1..75: mol_type = other DNA
ataccccgcgtgaagcgaaggataacctgaaatcatcccagatgctgagtgtgattgatgccatcagcgaagggc

SEQ ID NO: 685654 - DNA, 75 bp, synthetic construct
  source 1..75: mol_type = other DNA
ggggtcgttcctgccgttcgccagccgctggcggaggataaatcattactgccatttttcagcgacgaacgagtg

SEQ ID NO: 685655 - DNA, 75 bp, synthetic construct
  source 1..75: mol_type = other DNA
ttatggttttgaagttcgcaaaaacggcgtattaatcgcatccagagaaactaaaggggccattcccggtagtta

SEQ ID NO: 685656 - DNA, 75 bp, synthetic construct
  source 1..75: mol_type = other DNA
acccttggcggctcaggggcattgaaagtgggtgcagatttcctgaaacgctacttcccggaatcaggcgtctgg

SEQ ID NO: 685657 - DNA, 75 bp, synthetic construct
  source 1..75: mol_type = other DNA
ctggcgacccgattcttacgcttatggagcgttttaaagaagatccccgcagcgacaaagtgaatttaagtatcg

SEQ ID NO: 685658 - DNA, 75 bp, synthetic construct
  source 1..75: mol_type = other DNA
taatctgccgtccggggtcgttcctgccgttcgccagccgctgggggatgataaaacatttctgccgtttttcag

SEQ ID NO: 685659 - DNA, 75 bp, synthetic construct
  source 1..75: mol_type = other DNA
gagagcgacatcgtaccgggagagcagaccgccatcagcatactgaagcagcgcacaaaaaatattgcgccgttg

SEQ ID NO: 685660 - DNA, 75 bp, synthetic construct
  source 1..75: mol_type = other DNA
gtggatgccatgaccgaaaatatggcgcgtcgaatcctgaagcgtccgggtgaaaaaatccgctcaatataccgc

SEQ ID NO: 685661 - DNA, 75 bp, synthetic construct
  source 1..75: mol_type = other DNA
cgcgtccgtcccgcacattccagcaacgcatctggaggtaacgtgcgagtattacttcgacctgttctggtaccg

SEQ ID NO: 685662 - DNA, 75 bp, synthetic construct
  source 1..75: mol_type = other DNA
tttgaccggcaggtcatgatacctccagtgttattccgcggtggtaagcatgagaatttcaacagtaataaccaa

SEQ ID NO: 685663 - DNA, 75 bp, synthetic construct
  source 1..75: mol_type = other DNA
atgagatggcccgtaaaggtgcgcaggatgagattcaggcgcagatgcgtgatggcggcgtattttccggaggca

SEQ ID NO: 685664 - DNA, 75 bp, synthetic construct
  source 1..75: mol_type = other DNA
aaagagcactatgcttttttaacccaggatgaattgcctgagtttcttcggactctgaacacctatgccggtagt

SEQ ID NO: 685665 - DNA, 75 bp, synthetic construct
  source 1..75: mol_type = other DNA
cagcgacgaacgagtgattcgtgctgctggtggtgctggtgcattgtctgactggctgttgcgccatattaaatc

SEQ ID NO: 685666 - DNA, 75 bp, synthetic construct
  source 1..75: mol_type = other DNA
ggttaatgaaaagtacacgcgctgggttaagacacagccgtgtgcatgttgtggaaagccagctgatgatcccca

SEQ ID NO: 685667 - DNA, 75 bp, synthetic construct
  source 1..75: mol_type = other DNA
ttcatcttttgccagtggtgccgttccggcggcatcacaaccgctggcggatgatcctgctgttcgggccgtgtt

SEQ ID NO: 685668 - DNA, 75 bp, synthetic construct
  source 1..75: mol_type = other DNA
gcgtcgggatctcggttttgatgacagtcacgttgtgacaatgccggaactgtgctggtggctgattcgtaatga

SEQ ID NO: 685669 - DNA, 75 bp, synthetic construct
  source 1..75: mol_type = other DNA
atcctgcaaatggcaacacaaaaccgatgtttgttggtcagggtgatcagatattcatgaacgacgtgttcctga

SEQ ID NO: 685670 - DNA, 75 bp, synthetic construct
  source 1..75: mol_type = other DNA
cacgcaatgaatggcacacaagagcgggaattatcgctggctgaattgtactgctgggctgctgtaaatgatgta

SEQ ID NO: 685671 - DNA, 75 bp, synthetic construct
  source 1..75: mol_type = other DNA
gcgctgggtaaagacacagccgtgtgcgtgttgtggtaagcctgctgacgatccgcatcacctgattggtcatgg

SEQ ID NO: 685672 - DNA, 75 bp, synthetic construct
  source 1..75: mol_type = other DNA
ccccccccccaccagcaaaccccgccacaggaaaagacggtggtcagcattgctgttgatccggagtctccggaa

SEQ ID NO: 685673 - DNA, 75 bp, synthetic construct
  source 1..75: mol_type = other DNA
tggaccgtctgtgcgaagactactgcggaggcatctggaatctgtacaccctgaacaacggcggagcatttatgg

SEQ ID NO: 685674 - DNA, 75 bp, synthetic construct
  source 1..75: mol_type = other DNA
ccccgtcccggtccaggagccgggcagcggtaaaacccggaccgcccggctgtgggtctacgtccgtgatgaccg

SEQ ID NO: 685675 - DNA, 75 bp, synthetic construct
  source 1..75: mol_type = other DNA
gctggatggaccgtctgtgtgaagactactgcgggggcatctggaatctgtacaccctgaacaacggtggcgcat

SEQ ID NO: 685676 - DNA, 75 bp, synthetic construct
  source 1..75: mol_type = other DNA
ccacatcttctgtttccgtaaccgctgcatcagggaatgaccagcctcagttggttgccagcctcgtccctgatg

SEQ ID NO: 685677 - DNA, 75 bp, synthetic construct
  source 1..75: mol_type = other DNA
aagagacggaagccttcctgcgctctgcactgactgaaccgccccgggaatcctggagactaaactccctgagaa

SEQ ID NO: 685678 - DNA, 75 bp, synthetic construct
  source 1..75: mol_type = other DNA
ggtgaactgtatgccatagaggcagaagtccggggatgtacagcagaacagcgtctggcggcaagaaaagccaga

SEQ ID NO: 685679 - DNA, 75 bp, synthetic construct
  source 1..75: mol_type = other DNA
accggaaaggtatccatccacaaaatcatctggccggttacagcggtgtgcttcaggccgatgcttacggtggtt

SEQ ID NO: 685680 - DNA, 75 bp, synthetic construct
  source 1..75: mol_type = other DNA
cattccacagtgggttaccctggagccccgtgtcttcggctggatggaccgtctgtgcgaaaactactgcggtgg

SEQ ID NO: 685681 - DNA, 75 bp, synthetic construct
  source 1..75: mol_type = other DNA
cattccacagtgggttaccctggacccccgtgtcttcggctggatggaccgtctctgcgaaaactactgcggtgg

SEQ ID NO: 685682 - DNA, 75 bp, synthetic construct
  source 1..75: mol_type = other DNA
cattccacagtgggttaccctggaaccccgtgtcttcggctggatggaccgtctatgcgaaaactactgcggtgg

SEQ ID NO: 685683 - DNA, 75 bp, synthetic construct
  source 1..75: mol_type = other DNA
gacatcccgtctttttccgttctgtaccggtaagtaccgctggcacggcagtgctgaaagcgtataccggtcgtg

SEQ ID NO: 685684 - DNA, 75 bp, synthetic construct
  source 1..75: mol_type = other DNA
gtctgaacaatgtggagccagaaaagtggctgcgttacgtcattgaacatatccaggactggccggcaaaccggg

SEQ ID NO: 685685 - DNA, 75 bp, synthetic construct
  source 1..75: mol_type = other DNA
cattccacagtgggtgaccctggaaccccgtgtcttcggctggatggaccgtctttgcgaaaactactgcggtgg

SEQ ID NO: 685686 - DNA, 75 bp, synthetic construct
  source 1..75: mol_type = other DNA
cagtgggatgccctgtgttactactgccgtgacggtctggcggaacccgacaataacgccgcggagcgggcgctt

SEQ ID NO: 685687 - DNA, 75 bp, synthetic construct
  source 1..75: mol_type = other DNA
agcggggaatatcaggtgctggcgcgctgggacacgccgaaggtggtgaagggtgtgagctttatgcttcgcctg

SEQ ID NO: 685688 - DNA, 75 bp, synthetic construct
  source 1..75: mol_type = other DNA
gtcacggtaaatgaaaactgtacgattaagggcatgctggaggcgacccaggtcagaggtgacttcgttaaagct

SEQ ID NO: 685689 - DNA, 75 bp, synthetic construct
  source 1..75: mol_type = other DNA
tgagcagaccgaagacggtaagcattatgtcgcggggcttggcctcagcatggaggatacagaggaaggcaaact

SEQ ID NO: 685690 - DNA, 75 bp, synthetic construct
  source 1..75: mol_type = other DNA
gagtttaagattttccagaaaggcaatcagggggcaggcaatatcaccgactgtacggtgattgtgaccaaaaaa

SEQ ID NO: 685691 - DNA, 75 bp, synthetic construct
  source 1..75: mol_type = other DNA
cccctgacggcatgcagagtcaggtgctgctggcggcagacaggattgcgatgattaatcctgcgaatggcaaca

SEQ ID NO: 685692 - DNA, 75 bp, synthetic construct
  source 1..75: mol_type = other DNA
atattcatgaacgacgtgttcctgaaacgcctgacggctcccaccattaccagcggcggtaatcctccggcattt

SEQ ID NO: 685693 - DNA, 75 bp, synthetic construct
  source 1..75: mol_type = other DNA
cagtgggcaggtaatatcaccgactgtacggtgattgtgaccaaaaaagccgcttccggcatcagtattcgttga

SEQ ID NO: 685694 - DNA, 75 bp, synthetic construct
  source 1..75: mol_type = other DNA
cgagaaacagcagttatgccagcggtacgataacggtcactgtgtatgatgatcaggcttttgaccgtcagatag

SEQ ID NO: 685695 - DNA, 75 bp, synthetic construct
  source 1..75: mol_type = other DNA
cattccacagtgggtaaccctggagccccgtgtcttcggctggatggaccgtctttgcgaaaactactgcggtgg

SEQ ID NO: 685696 - DNA, 75 bp, synthetic construct
  source 1..75: mol_type = other DNA
aaatgagtccggaagctgccggtattgctgcctgtctgatgacgtacagccatcatgcctgtcgtacggagtgtt

SEQ ID NO: 685697 - DNA, 75 bp, synthetic construct
  source 1..75: mol_type = other DNA
tcacgcctgccgtacggagtgttatgccatgacggttcattattaccgtctgcgggattacgccctgcagcatcc

SEQ ID NO: 685698 - DNA, 75 bp, synthetic construct
  source 1..75: mol_type = other DNA
cacatcccagagaactgagttcgccaccactggcaggacagcattcctcttccggccggataacccgggtttcac

SEQ ID NO: 685699 - DNA, 75 bp, synthetic construct
  source 1..75: mol_type = other DNA
tggaactggtgagcagcgccctgaaagtgatccgcacagaacgggtaaaaaagcctgtacaaaatgtgactgtat

SEQ ID NO: 685700 - DNA, 75 bp, synthetic construct
  source 1..75: mol_type = other DNA
cggtggtatctggaatctgtacacactgaacaacggtggcgcatttatggcgcccgaaccggatgacgatgatga

SEQ ID NO: 685701 - DNA, 75 bp, synthetic construct
  source 1..75: mol_type = other DNA
ccacaatttattcagctacaacaccagagaataatccgcctcagctggttgccagcctcgtccctgatgaacagc

SEQ ID NO: 685702 - DNA, 75 bp, synthetic construct
  source 1..75: mol_type = other DNA
gtactgttcaatgccatgaacggcaaccgcgctgaaatgagcccggaagccgccggcattgcagcctgtctgatg

SEQ ID NO: 685703 - DNA, 75 bp, synthetic construct
  source 1..75: mol_type = other DNA
taaagtccatgccgatgatatccccgttccggtccaggagccgggcagtggtaaaacaaggactgcccggctgtg

SEQ ID NO: 685704 - DNA, 75 bp, synthetic construct
  source 1..75: mol_type = other DNA
atgtatatatcagtaccaaaagcgcgacagcggaagaagccctgaaactaatcggtgaactgtacgtcatcgagc

SEQ ID NO: 685705 - DNA, 75 bp, synthetic construct
  source 1..75: mol_type = other DNA
gtaacgggagaagcgctccgtcgtatcggggaactgtacgctatcgaggctgagatccgcggcagtccggcagaa

SEQ ID NO: 685706 - DNA, 75 bp, synthetic construct
  source 1..75: mol_type = other DNA
cggtggtatctggaatctgtacacactgaacaacggtggggcatttatggcacccgaaccggatgaaggtgatgg

SEQ ID NO: 685707 - DNA, 75 bp, synthetic construct
  source 1..75: mol_type = other DNA
gaagactactgcgggggtatctggaatctgtacaccctgaacaacggtggggcttatggcacccgaaccggatga

SEQ ID NO: 685708 - DNA, 75 bp, synthetic construct
  source 1..75: mol_type = other DNA
cgcctggagccagaagaaagctgttgcccggagtgtggcggtgagctggattatctgggggaagtcagcgctgaa

SEQ ID NO: 685709 - DNA, 75 bp, synthetic construct
  source 1..75: mol_type = other DNA
tgcgttacgtcattgaacatatccaggactggccggcaaaccgggtacgtgatctgttgccctggaaagttgaac

SEQ ID NO: 685710 - DNA, 75 bp, synthetic construct
  source 1..75: mol_type = other DNA
tgaggcccaactgaaacaacgcgaacaggaaagcgatcgttacagtgggcgtgaggatgacccgcaggttccccg

SEQ ID NO: 685711 - DNA, 75 bp, synthetic construct
  source 1..75: mol_type = other DNA
acggtccattattaccggctgcgggattacgccctgcagcatccggaatgcagcgccattatgcgcatcatcgac

SEQ ID NO: 685712 - DNA, 75 bp, synthetic construct
  source 1..75: mol_type = other DNA
catcatgcctgtcgtacggaggattatgccatgacggtccattattaccggttgcgggattacgccctgcagcat

SEQ ID NO: 685713 - DNA, 75 bp, synthetic construct
  source 1..75: mol_type = other DNA
aacggtggcgcatttatggcacctgaaccggatgacgataatgacgagacatgggtactgttcaatgccatgaac

SEQ ID NO: 685714 - DNA, 75 bp, synthetic construct
  source 1..75: mol_type = other DNA
atcatgcctgtcgtacggagaattatgccatgacggtccattattaccggttgcgggattacgccctgcagcatc

SEQ ID NO: 685715 - DNA, 75 bp, synthetic construct
  source 1..75: mol_type = other DNA
aaaatggctgcattacgttattgagcatatccaggactggccgacaaatcgggtacgcgatctgttgccctggaa

SEQ ID NO: 685716 - DNA, 75 bp, synthetic construct
  source 1..75: mol_type = other DNA
gacggtccattattaccggctgcgggattacgccctgcagcatccggaatgcagcgccattatgcgcatcatcga

SEQ ID NO: 685717 - DNA, 75 bp, synthetic construct
  source 1..75: mol_type = other DNA
gcttctggccgcaacactttggcctcattccacagtgggtggccctggagccccgtatcttcggctggatggacc

SEQ ID NO: 685718 - DNA, 75 bp, synthetic construct
  source 1..75: mol_type = other DNA
actgtatcgtcagagtgaaatctttgcccgacagggtgtcgaactgagccgtgcattactctccaaaactgggtt

SEQ ID NO: 685719 - DNA, 75 bp, synthetic construct
  source 1..75: mol_type = other DNA
cggattataaaaacggccatgagtcagaaatacctcattcgcatcgctgagctggaaaggctgctctctgagcag

SEQ ID NO: 685720 - DNA, 75 bp, synthetic construct
  source 1..75: mol_type = other DNA
ggtaaaacaaggactgcccggctgtgggtctacgtccgtgatgaccgtaatgccggttcacagatgcccccggcg

SEQ ID NO: 685721 - DNA, 75 bp, synthetic construct
  source 1..75: mol_type = other DNA
gtgataacagatgtctggaaatataggggcaaatccaataccattaataatgacgtttatttaagtgatgttatt

SEQ ID NO: 685722 - DNA, 75 bp, synthetic construct
  source 1..75: mol_type = other DNA
ccgcaagcttcacactgacgacacaccggtaaaggtactggcaccgggcctgagaaagacgaaaacagggcgcat

SEQ ID NO: 685723 - DNA, 75 bp, synthetic construct
  source 1..75: mol_type = other DNA
cgccctgcagcatccggaatgcagcgccattacccgacctaatatgcggtttgtcagcatcaagacgcctgagca

SEQ ID NO: 685724 - DNA, 75 bp, synthetic construct
  source 1..75: mol_type = other DNA
acccgaaccggatgatgatgacgaaacatgggtactgttcaatgccatgaacggtaaccgcgctgaaatgagtcc

SEQ ID NO: 685725 - DNA, 75 bp, synthetic construct
  source 1..75: mol_type = other DNA
actgcgccggatgttgttcggtacccgttctgaaaaactgcagcgtgaggttgaacaggctgaggcccaactgaa

SEQ ID NO: 685726 - DNA, 75 bp, synthetic construct
  source 1..75: mol_type = other DNA
gccgctgaatgatgctctgtaccgttacgtgatgaataccttcaagcttcacactgacgacacaccggtaaaggt

SEQ ID NO: 685727 - DNA, 75 bp, synthetic construct
  source 1..75: mol_type = other DNA
attaccattcgtcggggattatcgcctcgctggaagcggggtatcagtggttaccggggcgtggtgtggtgattg

SEQ ID NO: 685728 - DNA, 75 bp, synthetic construct
  source 1..75: mol_type = other DNA
gatgatgtttttaataataaccaggcatatacatcaacaagttacagtgatggcgatggcggtgcaatcgatgtc

SEQ ID NO: 685729 - DNA, 75 bp, synthetic construct
  source 1..75: mol_type = other DNA
atgcggattatctttctacgcaaggagtatttatctctactcccgtcaatgattgcatctcttttctctgctaac

SEQ ID NO: 685730 - DNA, 75 bp, synthetic construct
  source 1..75: mol_type = other DNA
tttcgcaataacatcgctaatgatggcaaaggtggcgcaatttataccattaataatgacgtttatttaagtgat

SEQ ID NO: 685731 - DNA, 75 bp, synthetic construct
  source 1..75: mol_type = other DNA
atggtccttcctctgcggcgggtggctttatgtatctcggcttaagtgaagttacctttgatattgccgacggaa

SEQ ID NO: 685732 - DNA, 75 bp, synthetic construct
  source 1..75: mol_type = other DNA
ggcaaatcaggcgtttatgatggagcgacgcgatcacgctggtggcgatggtcagacgctgaatttacgtgttat

SEQ ID NO: 685733 - DNA, 75 bp, synthetic construct
  source 1..75: mol_type = other DNA
gcactgaaacgtataccggtcatgaagtgcaggatattcccggtgtgctggccgtgtttgctgaacgccgtaagg

SEQ ID NO: 685734 - DNA, 75 bp, synthetic construct
  source 1..75: mol_type = other DNA
gttacgacaggttgttcagtgcagaacgtgaaggtggtgcactgacagaagttgcgtgctgggcccatgcccggc

SEQ ID NO: 685735 - DNA, 75 bp, synthetic construct
  source 1..75: mol_type = other DNA
ctgccagttaatgacaccggtgaatgatgccctgtaccgttatgtaatgaacacccgcaaggttcacactgatga

SEQ ID NO: 685736 - DNA, 75 bp, synthetic construct
  source 1..75: mol_type = other DNA
cgcaaaaaccgaacgacagatacaggaagcacaggagcgaatcagcgcacttcaggaagaaatggcggaaacgct

SEQ ID NO: 685737 - DNA, 75 bp, synthetic construct
  source 1..75: mol_type = other DNA
ccgctgctggcgtcactggaggggtggctgcgggagaaacagaaaaccctctcaaggcactcagaactggcgaag

SEQ ID NO: 685738 - DNA, 75 bp, synthetic construct
  source 1..75: mol_type = other DNA
tacagcccggacagaaaaggtatccacccgcggacccatcttgcggggttcagtggtgttctgcaggcggatgcg

SEQ ID NO: 685739 - DNA, 75 bp, synthetic construct
  source 1..75: mol_type = other DNA
gatgatggctgggctgagacggacaataacatcgctgaaaatgcgttgcggatggtcagtctgggccgcaaaaac

SEQ ID NO: 685740 - DNA, 75 bp, synthetic construct
  source 1..75: mol_type = other DNA
ccggatacaggtcagtaccctgcctgatggtgtggagacatacggggtgtggggactctccctgccgtcactgcg

SEQ ID NO: 685741 - DNA, 75 bp, synthetic construct
  source 1..75: mol_type = other DNA
gccttacggggagtgaccgtaggccggaaaaactggctcttcgcgggttccgacagcggtggcgaacatgcggcg

SEQ ID NO: 685742 - DNA, 75 bp, synthetic construct
  source 1..75: mol_type = other DNA
aacagcgcatcagcttctggccgcagcattttggcctcattccacagtgggtgcccctggagccccgtgtcttcg

SEQ ID NO: 685743 - DNA, 75 bp, synthetic construct
  source 1..75: mol_type = other DNA
atataccggctcaggtatttaccatgaatctggtgatgctgggtagtgctgaacacctgtactttaacggtaacg

SEQ ID NO: 685744 - DNA, 75 bp, synthetic construct
  source 1..75: mol_type = other DNA
ccactccttctgtttccgtaaccgctgcatcagggaatgaccagcctcagttggttgccaccatagtccctgatg

SEQ ID NO: 685745 - DNA, 75 bp, synthetic construct
  source 1..75: mol_type = other DNA
aaagaccagcaactgagtctggttgaagaaacggaggccttcctgcgctctgcactggcacgtgccgaagaaaag

SEQ ID NO: 685746 - DNA, 75 bp, synthetic construct
  source 1..75: mol_type = other DNA
aggttccccgccagttgcgacagttacgtcatcgtcgtccgttaccagcacatcttccccgtgaaatacaccgct

SEQ ID NO: 685747 - DNA, 75 bp, synthetic construct
  source 1..75: mol_type = other DNA
gacctacgttcgtgacgaccgtaacgccgggtcaacgctggcgccggcggtgttgttcgcttacagcccggacag

SEQ ID NO: 685748 - DNA, 75 bp, synthetic construct
  source 1..75: mol_type = other DNA
aaccagtggccggcactgacgtactatgcgaacgatggctgggtggaaatcgacaacaacatcgctgaaaatgcc

SEQ ID NO: 685749 - DNA, 75 bp, synthetic construct
  source 1..75: mol_type = other DNA
aatgcgccggatgttgttcggtacccgttctgaaaaactgaagcgtgaggttgaacaggctgaggcccaactgaa

SEQ ID NO: 685750 - DNA, 75 bp, synthetic construct
  source 1..75: mol_type = other DNA
atctggaagcactgggttgcgttgtgcaacttctgtgatgacggtctggcggaggcggacaataacacagcggaa

SEQ ID NO: 685751 - DNA, 75 bp, synthetic construct
  source 1..75: mol_type = other DNA
tgtgcttcaggcagatgcttacggtggttaccgggcgttatacgaatccggcagaataacggaagccgcgtgtat

SEQ ID NO: 685752 - DNA, 75 bp, synthetic construct
  source 1..75: mol_type = other DNA
tcgaaacacaacgtccgaaacaggcctgttgccggtgcgaccatatcgtgcaggcaccggtgccttcaaaaccca

SEQ ID NO: 685753 - DNA, 75 bp, synthetic construct
  source 1..75: mol_type = other DNA
agaaaagtggctgcgttacgtcattgaacatatccaggactggccggcaaaccgggtacgcgatctgttgccctg

SEQ ID NO: 685754 - DNA, 75 bp, synthetic construct
  source 1..75: mol_type = other DNA
tgtatggtctgatcggaacgtgcaggctgaacggtatcgatccagagggttaccttcgccatatcctgagcgtat

SEQ ID NO: 685755 - DNA, 75 bp, synthetic construct
  source 1..75: mol_type = other DNA
aaatgagtccggaagccgccggcattgctgcctgcctgatgacgtacagccatcatgcctgtcgtacggagaatt

SEQ ID NO: 685756 - DNA, 75 bp, synthetic construct
  source 1..75: mol_type = other DNA
tgacctgcaaaaactggtagccactcccgtccctgatgaacggcgcatcagcttctggccgcagcactttggcct

SEQ ID NO: 685757 - DNA, 75 bp, synthetic construct
  source 1..75: mol_type = other DNA
atgaaaatcgcttctcagaacacaacttctgtttccgtaaccgctgcatcagggaatgaccagtctcaactggtt

SEQ ID NO: 685758 - DNA, 75 bp, synthetic construct
  source 1..75: mol_type = other DNA
ttgaacaggctgaggccctgctgaagcaacgcgaacaggacagcgatcgttacggtgggcgagaggatgacccgc

SEQ ID NO: 685759 - DNA, 75 bp, synthetic construct
  source 1..75: mol_type = other DNA
ccatcccccctgcgccagtcttcagcccgtaagccgttaccggcctcacttccccgtgaaacccgggtcatccgg

SEQ ID NO: 685760 - DNA, 75 bp, synthetic construct
  source 1..75: mol_type = other DNA
ttcgtacccttatggatcaatatggtttaaccctttccgatctgccggaaattggcagtaaatctatggtgtcac

SEQ ID NO: 685761 - DNA, 75 bp, synthetic construct
  source 1..75: mol_type = other DNA
tcgatgttacacaaccagctgacgtggtgaaaaagcagcttggagaaattcgcagccaatattctgtactgcaaa

SEQ ID NO: 685762 - DNA, 75 bp, synthetic construct
  source 1..75: mol_type = other DNA
gaacgccaccacgcgacaggggcagcagctctcatatggcgctcagatggctcgtctgaatcacgataaatacgt

SEQ ID NO: 685763 - DNA, 75 bp, synthetic construct
  source 1..75: mol_type = other DNA
atgggcactgtttaacaccatgaacggcaaccgcgcggaaatgagccctgaagccgccggcattgccgcctgcct

SEQ ID NO: 685764 - DNA, 75 bp, synthetic construct
  source 1..75: mol_type = other DNA
catcgaggatgaaatccggggattaccggagtcagagcgtcttgccgtcaggcagcagcgaagcaaagtgttact

SEQ ID NO: 685765 - DNA, 75 bp, synthetic construct
  source 1..75: mol_type = other DNA
ttacagacagccctgatgccgtcagggcgtcaattgaaaacatgcttcaggagctgagcaatgagatcgaacatc

SEQ ID NO: 685766 - DNA, 75 bp, synthetic construct
  source 1..75: mol_type = other DNA
acttactggtggcacagcgtaaaccgggttcactacgaaacggcgcccccttccaaaccttgccagagagcttta

SEQ ID NO: 685767 - DNA, 75 bp, synthetic construct
  source 1..75: mol_type = other DNA
cttatcagcagcgcctttaaggttatcgaaacgcaacgtccgaaactggcctgttgccgttgtgaccatatcgtg

SEQ ID NO: 685768 - DNA, 75 bp, synthetic construct
  source 1..75: mol_type = other DNA
gcaatggtgcgccatttgctgaattgccacccgcgttcaagaagcttcaatccatcttgctgcaacgccccggcg

SEQ ID NO: 685769 - DNA, 75 bp, synthetic construct
  source 1..75: mol_type = other DNA
acgggctgatcggcacctgccgtctgaacggtatcgatccggaagcgtatctgcgccatatcctgagcgtactgc

SEQ ID NO: 685770 - DNA, 75 bp, synthetic construct
  source 1..75: mol_type = other DNA
gtatctggaatctgtacaccctgaacaacggcggggcatttatggcccccgaaccggatgacgatgatgccgaaa

SEQ ID NO: 685771 - DNA, 75 bp, synthetic construct
  source 1..75: mol_type = other DNA
gtatctggaatctgtacactctgaacaacggcggggcatttatggctcccgaaccggatgacgatgatgccgaaa

SEQ ID NO: 685772 - DNA, 75 bp, synthetic construct
  source 1..75: mol_type = other DNA
gtatctggaatctgtacacactgaacaacggcggggcatttatggcccccgaaccggatgacgatgatgacgaaa

SEQ ID NO: 685773 - DNA, 75 bp, synthetic construct
  source 1..75: mol_type = other DNA
ggcgctcaataacctctcggtggcctatgcatcaggtaacccgcagatgatgcagcaagccattcattccggcgc

SEQ ID NO: 685774 - DNA, 75 bp, synthetic construct
  source 1..75: mol_type = other DNA
gtatctggaatctgtacacgctgaacaacggcggggcatttatggcgcccgaaccggatgacgatgatgccgaaa

SEQ ID NO: 685775 - DNA, 75 bp, synthetic construct
  source 1..75: mol_type = other DNA
gtatctggaatctgtacacgctgaacaacggcggggcatttatggcccccgaaccggatgacgatgatggcgaaa

SEQ ID NO: 685776 - DNA, 75 bp, synthetic construct
  source 1..75: mol_type = other DNA
acgccatgacggttcattattaccgtctgcgggattacgccctgcagcatccggaatgcagcgccattatgcgta

SEQ ID NO: 685777 - DNA, 75 bp, synthetic construct
  source 1..75: mol_type = other DNA
ttggttgccactcccgtccctgatgaacaacggatcagcttctggccgcagcattttggcctcattccacagtgg

SEQ ID NO: 685778 - DNA, 75 bp, synthetic construct
  source 1..75: mol_type = other DNA
gagccaccggcggtctggttcgcctactcaccagacaggcagggaaaacatccggtacaacactttcgtcccttc

SEQ ID NO: 685779 - DNA, 75 bp, synthetic construct
  source 1..75: mol_type = other DNA
gtatctggaatctgtacacactgaacaacggcggggcatttatggcacccgaaccggatgacgatgatgccgaaa

SEQ ID NO: 685780 - DNA, 75 bp, synthetic construct
  source 1..75: mol_type = other DNA
tgggtggaaatcgacaacaacatcgcagagaacgccttacggggagtggccgtaggccggaaaaactggatgttc

SEQ ID NO: 685781 - DNA, 75 bp, synthetic construct
  source 1..75: mol_type = other DNA
tgacggtccattattaccggttgcgggattacgccctgcagcatccggaaggcagcgccattatgcgcatcattg

SEQ ID NO: 685782 - DNA, 75 bp, synthetic construct
  source 1..75: mol_type = other DNA
gatttcagactgttaacatcaataaaatctgttggttacctgctgggattaaatatgctggcaatactcaaaagc

SEQ ID NO: 685783 - DNA, 75 bp, synthetic construct
  source 1..75: mol_type = other DNA
cggattaaagaacctgaaacagtcagactgtatcttggattttacaaactcttatgacctttgtcaaatattaag

SEQ ID NO: 685784 - DNA, 75 bp, synthetic construct
  source 1..75: mol_type = other DNA
ttcgcgtactcaccgaacaggcaggggaaacacccggagcaacacctccgccccttccggggtatcctgcaggcg

SEQ ID NO: 685785 - DNA, 75 bp, synthetic construct
  source 1..75: mol_type = other DNA
gaaactaatcggcgaactgtacgccattgagcacgaaatacgcgggttgccggtgtctgaacgcctggcggtcag

SEQ ID NO: 685786 - DNA, 75 bp, synthetic construct
  source 1..75: mol_type = other DNA
ttgaacaggctgaggcccagctgaagcaacgcgaacaggctgaggcccagctgaagcaacgcgaacaggacagcg

SEQ ID NO: 685787 - DNA, 75 bp, synthetic construct
  source 1..75: mol_type = other DNA
aagcgtatactggtcgtgaagtgcaggatattcccggcgttcttgccgtgtttgcagaacgccgtaaggacagtt

SEQ ID NO: 685788 - DNA, 75 bp, synthetic construct
  source 1..75: mol_type = other DNA
cttggattttacaaactcttatgacctttgtcaaatattaagcccaaaaagaccttacgcagctccgggagcttc

SEQ ID NO: 685789 - DNA, 75 bp, synthetic construct
  source 1..75: mol_type = other DNA
gcatcagcttctggccgcagcactttggcctcattccacagtgggtcaccctggagccccgtgtcttcggctgga

SEQ ID NO: 685790 - DNA, 75 bp, synthetic construct
  source 1..75: mol_type = other DNA
gcatcagcttctggccgcagcaatttggcctcattccacagtgggtaaccctggacccccgtgtcttcggctgga

SEQ ID NO: 685791 - DNA, 75 bp, synthetic construct
  source 1..75: mol_type = other DNA
tggaccgtctgtgcgaagactactgcggagggatctggaatctgtacaccctgaacaacgggggagcatttatgg

SEQ ID NO: 685792 - DNA, 75 bp, synthetic construct
  source 1..75: mol_type = other DNA
tcgtgcagtctgtctcggaaagaaaaattcttatggcctttgtcaaatattaagcccaaaaagaccttacgcagc

SEQ ID NO: 685793 - DNA, 75 bp, synthetic construct
  source 1..75: mol_type = other DNA
atcagaaagcttttatttcgctgtttaatcagactgcccgttatcacaaacgccataaggtgtttgaagactttg

SEQ ID NO: 685794 - DNA, 75 bp, synthetic construct
  source 1..75: mol_type = other DNA
atgccatgacggtccactattaccggctgcgggattacgccctgcagcatccggaatgcagcgccattatgtaca

SEQ ID NO: 685795 - DNA, 75 bp, synthetic construct
  source 1..75: mol_type = other DNA
atggccacctttattgaccatcagaaagcatttatttcgctgtttaaccggacagccccttatcacaaacgccat

SEQ ID NO: 685796 - DNA, 75 bp, synthetic construct
  source 1..75: mol_type = other DNA
ttatcggcacttgccttctgaacgacattgatccggaagcgtatctgcgccatatcctgagcgtactgccggaat

SEQ ID NO: 685797 - DNA, 75 bp, synthetic construct
  source 1..75: mol_type = other DNA
atcggcacttgccttctgaacgacattgatccggaagcgtatctgcgccatatcctgagcgtactgccggaataa

SEQ ID NO: 685798 - DNA, 75 bp, synthetic construct
  source 1..75: mol_type = other DNA
cggcgccgggtgctgctgacgcccggacattacctggggaactggtcatatcgtctgcgccatgttcaggaacag

SEQ ID NO: 685799 - DNA, 75 bp, synthetic construct
  source 1..75: mol_type = other DNA
aagagacggaagccttcctgcgctctgcactgacacgtgccaaagaaaagatcgaagaagatgaacgggaaatag

SEQ ID NO: 685800 - DNA, 75 bp, synthetic construct
  source 1..75: mol_type = other DNA
tgttcaatgccatgaacggtaaccgcgctgaaatgagtccggaagctgccggcattgctgcctgtctgatgacgt

SEQ ID NO: 685801 - DNA, 75 bp, synthetic construct
  source 1..75: mol_type = other DNA
aaaactttatcttgccgctttatgtggactgagattcaaccctgcaatgaatgaaccgccccgggtttcctggag

SEQ ID NO: 685802 - DNA, 75 bp, synthetic construct
  source 1..75: mol_type = other DNA
gggtgagcaatatgacccggcactgccatccgccctgcgccagtcttcagcccgtaaaccgttaccggcctcact

SEQ ID NO: 685803 - DNA, 75 bp, synthetic construct
  source 1..75: mol_type = other DNA
tacaccctgaacaacggcggggcatttatggcccctgaaccggatgacgatgatgaaacctggatactgttcagt

SEQ ID NO: 685804 - DNA, 75 bp, synthetic construct
  source 1..75: mol_type = other DNA
tgccgtctgtctcggaaagaaaaattcttatggcctttgtcaaatattaagcccaaaaagaccttacgcagctcc

SEQ ID NO: 685805 - DNA, 75 bp, synthetic construct
  source 1..75: mol_type = other DNA
ggcatcccgtctttttcctttctgtaccggcaaataccgctggcacggcagtgctgaggcgtataccggtcgtga

SEQ ID NO: 685806 - DNA, 75 bp, synthetic construct
  source 1..75: mol_type = other DNA
ccccgggtcttcggctggatggaccgtctgtgcgaagactactgcggtggtatctggaatctgtacaccctgaac

SEQ ID NO: 685807 - DNA, 75 bp, synthetic construct
  source 1..75: mol_type = other DNA
aagaccgagcggttgtgggcgtatgttcgtgatgaccgcaatgccgggtcagcgttggcacctgcagtgtggttc

SEQ ID NO: 685808 - DNA, 75 bp, synthetic construct
  source 1..75: mol_type = other DNA
agcgtactgccagaatggccttccaaccgagttgatgaactcctgccatggaacgtagtactcaccaataaataa

SEQ ID NO: 685809 - DNA, 75 bp, synthetic construct
  source 1..75: mol_type = other DNA
gttgcgtcagacccgctcccgtaagccgttccctgaatcactaccccgtgacgaaaagcgactgttgcccgcggc

SEQ ID NO: 685810 - DNA, 75 bp, synthetic construct
  source 1..75: mol_type = other DNA
atcgcggattaaagaacctgaaacagtcagactgtatcttggattttacaaactctcttatgacctttgtcaaat

SEQ ID NO: 685811 - DNA, 75 bp, synthetic construct
  source 1..75: mol_type = other DNA
gcccggaagccgccggtattgccgcctgtctgatgacgtacagccatcatgcctgtcgtacggagaattatgcca

SEQ ID NO: 685812 - DNA, 75 bp, synthetic construct
  source 1..75: mol_type = other DNA
agagtgccaaccgacatcaccacggaagccctgcagcgtatcggtgaactgtatgtcatcgaggcagaagtccgg

SEQ ID NO: 685813 - DNA, 75 bp, synthetic construct
  source 1..75: mol_type = other DNA
aactgtacgccatcgaggatgaaatacggggattaccagagtcagagcgtcttgaagtcaggcagcagcgaagca

SEQ ID NO: 685814 - DNA, 75 bp, synthetic construct
  source 1..75: mol_type = other DNA
atgaaaatcatcacccgtggtgaagccatgcgtattcaccaacagcatccggcatcccgtctttttccgttctgc

SEQ ID NO: 685815 - DNA, 75 bp, synthetic construct
  source 1..75: mol_type = other DNA
tcagaaaagccagaacggtaccgctaatgcagtcgttgtatgagtggctccaggggcagatgagcacgctgtcgc

SEQ ID NO: 685816 - DNA, 75 bp, synthetic construct
  source 1..75: mol_type = other DNA
agttatgccggagcggggcttctggcccatgttgtcgctggaaaatatgcagaccatctgccgttataccgccag

SEQ ID NO: 685817 - DNA, 75 bp, synthetic construct
  source 1..75: mol_type = other DNA
gtgttactgacgtcgctgcatgaatggatggtggagaagaatggtacgctgtcgaaaaaatccagactgggcgaa

SEQ ID NO: 685818 - DNA, 75 bp, synthetic construct
  source 1..75: mol_type = other DNA
tgttcttcggtagcgatcacggcggcgagcgtggagcactgctgtacgggctgatcggcacctgccgtctgaacg

SEQ ID NO: 685819 - DNA, 75 bp, synthetic construct
  source 1..75: mol_type = other DNA
gtacagccatcatgcctgtcgtacggagaattatgccatgacggtccattattaccggttgcgggattacgccct

SEQ ID NO: 685820 - DNA, 75 bp, synthetic construct
  source 1..75: mol_type = other DNA
atgtcagggatatgatatcaaagcgagttgtcacgccagcaggcaaagcctttcaggcattacgcaggactggag

SEQ ID NO: 685821 - DNA, 75 bp, synthetic construct
  source 1..75: mol_type = other DNA
ttgcgacagtcgcgccatcgtcgtccgttaccggcacaccttccccgtgaaatacagcgtctggaatctgaagaa

SEQ ID NO: 685822 - DNA, 75 bp, synthetic construct
  source 1..75: mol_type = other DNA
ggttgacgcgtgctgccagttaatgacaccggtgaatgatgccctgtaccgttatgtaatgaacacccgcaaggt

SEQ ID NO: 685823 - DNA, 75 bp, synthetic construct
  source 1..75: mol_type = other DNA
cggaaagagcgcttcgtgcagtctgtctcggaaagaaaaattacgtgttcttcggtagcgatcacggcggcgagc

SEQ ID NO: 685824 - DNA, 75 bp, synthetic construct
  source 1..75: mol_type = other DNA
atgaaaattatcacccgtggtgaagccatgcgtattcaccaacagcatcctgcaccccgtctatttccgttctgc

SEQ ID NO: 685825 - DNA, 75 bp, synthetic construct
  source 1..75: mol_type = other DNA
cactgatgcagtcactgtatgactggatacaggaacagatgaaaacactgtcgcgtcactcggatacggcaaaag

SEQ ID NO: 685826 - DNA, 75 bp, synthetic construct
  source 1..75: mol_type = other DNA
gaactcagttctctgggatgtgatgtgtcagagcaactggagcttatcagcagcgcctttaaggttatcgaaaca

SEQ ID NO: 685827 - DNA, 75 bp, synthetic construct
  source 1..75: mol_type = other DNA
aacaactgtcgcgtcactcagatacggcaaaagacgttcgcatacctgctgaaacagtgggatgcactgaacgtg

SEQ ID NO: 685828 - DNA, 75 bp, synthetic construct
  source 1..75: mol_type = other DNA
cttcggtagcgatcacggcggcgagcgtggtgcactgttgtacgggctgatcggcacctgccggttgaatggtat

SEQ ID NO: 685829 - DNA, 75 bp, synthetic construct
  source 1..75: mol_type = other DNA
gcggctcgccagaaccgttgaatgatgccctgtaccgttacgtgatgaacacccgcaaggttcacactgacgaca

SEQ ID NO: 685830 - DNA, 75 bp, synthetic construct
  source 1..75: mol_type = other DNA
cgcaaggttcacactgatgacacaccggtaaaggtactggcaccgggtcagaaaaaggcgaaaacagggcgtatc

SEQ ID NO: 685831 - DNA, 75 bp, synthetic construct
  source 1..75: mol_type = other DNA
gtcgaaaaaatccagactgggcgaagcgttcagctatgtactgaatcagtgggacgccctctgttattacagtga

SEQ ID NO: 685832 - DNA, 75 bp, synthetic construct
  source 1..75: mol_type = other DNA
gcgccactgatgcagtcactgtatgactggatacagactcagatgaaaacactgtctcgtcactcggatacggca

SEQ ID NO: 685833 - DNA, 75 bp, synthetic construct
  source 1..75: mol_type = other DNA
atatccccgtccggtccaggagccgggcagcggtaaaaacccggccgcccggctgtgggtctacgtccgtgatga

SEQ ID NO: 685834 - DNA, 75 bp, synthetic construct
  source 1..75: mol_type = other DNA
ctgggggaagtcagtgctgagctgctggaactggtgagtagcgccctgaaagtgatccgcactgttcgggtaaaa

SEQ ID NO: 685835 - DNA, 72 bp, synthetic construct
  source 1..72: mol_type = other DNA
atgaaaatcatcacccgtggtgaagccatgcgtattcaccaacaacatccgacatcccgtctttttccgttc

SEQ ID NO: 685836 - DNA, 75 bp, synthetic construct
  source 1..75: mol_type = other DNA
agaaaacaaagaccgggcggttatggacctacgttcgtgacgaccgtaacgccgggtcaacgctggcgccggcgg

SEQ ID NO: 685837 - DNA, 75 bp, synthetic construct
  source 1..75: mol_type = other DNA
accggtaagtaccgctggcacggcagtgctgagacgtataccggtcgtgacgtgcaggatattcccggtgtgctg

SEQ ID NO: 685838 - DNA, 75 bp, synthetic construct
  source 1..75: mol_type = other DNA
tgcatcccgtcttttcccgttctgtaccggcaaataccgctggcacggcagcactgaagcgtataccggtcgtga

SEQ ID NO: 685839 - DNA, 75 bp, synthetic construct
  source 1..75: mol_type = other DNA
gcaccgggtcagaaaaaggcgaaaacagggcgtatctggacgtatgtccgggatgatcgcaatgtgggttcgtca

SEQ ID NO: 685840 - DNA, 75 bp, synthetic construct
  source 1..75: mol_type = other DNA
ccacggaagccctgcagcgtatcggtgaactgtatgccatcgaggcagaggtccggggctgttcagcagaacagc

SEQ ID NO: 685841 - DNA, 75 bp, synthetic construct
  source 1..75: mol_type = other DNA
acaacgcgaacaggaaagcgatcgttacagtgggcgtgaggatgacctgcaggttccccgccagttgcgacagtc

SEQ ID NO: 685842 - DNA, 75 bp, synthetic construct
  source 1..75: mol_type = other DNA
aaatatgcagaccatctgccgttataccgccagtcagaaatataccgtcgtcagggagtggatctgagccgtgcc

SEQ ID NO: 685843 - DNA, 75 bp, synthetic construct
  source 1..75: mol_type = other DNA
gccatatcctgagcgtactgccggaatggccctccaaccgtgttgacgaactgctgccatggaacgtagtttatc

SEQ ID NO: 685844 - DNA, 75 bp, synthetic construct
  source 1..75: mol_type = other DNA
gtattgttgaagcaccggcgccgtcccgcccgatagagcgtggtatcgcgggccccggattacttgcccgcgtgt

SEQ ID NO: 685845 - DNA, 75 bp, synthetic construct
  source 1..75: mol_type = other DNA
gatgaaaacactgtcgcgtcactcagatacggcaaaagcgttcgcatacctgctgaaacagtgggatgcactgaa

SEQ ID NO: 685846 - DNA, 75 bp, synthetic construct
  source 1..75: mol_type = other DNA
aatggctgggtggaaatcgacaacaacatcgcagagaacgccttacggggagtggccgtaggccggaaaaactgg

SEQ ID NO: 685847 - DNA, 75 bp, synthetic construct
  source 1..75: mol_type = other DNA
ccccgtgtcttcggctggatggaccgtttgtgcgaagactactgcgggggcatctggaatctgtacaccctgaac

SEQ ID NO: 685848 - DNA, 75 bp, synthetic construct
  source 1..75: mol_type = other DNA
gtgaaatacaccgcctggagccagaagaaagctgttgcccggagtgtggcggtgagctggattatctgggggaag

SEQ ID NO: 685849 - DNA, 75 bp, synthetic construct
  source 1..75: mol_type = other DNA
tgcactggcacgtgtcgaagaaaagatcgaagaggaggagcgggaaacagaacatctgagggcccagatagaaaa

SEQ ID NO: 685850 - DNA, 75 bp, synthetic construct
  source 1..75: mol_type = other DNA
gtctgtctcgggaaaaagaattacatgttcttcggcaacgatcatggaggcgagcgtggagctctgctgtacgga

SEQ ID NO: 685851 - DNA, 75 bp, synthetic construct
  source 1..75: mol_type = other DNA
cgaaaaaatccagactgggcgaagcgttcagctatgtcctgaatcagtgggacgccctctgttattacagtgatg

SEQ ID NO: 685852 - DNA, 75 bp, synthetic construct
  source 1..75: mol_type = other DNA
ggtatcgatccggaagcgtatctgcgccatatcctgagcgtactgccggaatggccttccaaccgagttgacgaa

SEQ ID NO: 685853 - DNA, 75 bp, synthetic construct
  source 1..75: mol_type = other DNA
aagcgttactgacgtcgctgcatgaatggatggtggagaagaatggcacgctgtcgaaaaaatccagactgggcg

SEQ ID NO: 685854 - DNA, 75 bp, synthetic construct
  source 1..75: mol_type = other DNA
ttcgtgccgtctgtctcgggaaaaagaattacatgttcttcggcaacgatcatggaggcgagcgcggagctctgc

SEQ ID NO: 685855 - DNA, 75 bp, synthetic construct
  source 1..75: mol_type = other DNA
tgaaacaacgcgaacaggaaagcgatcgttacagtgggcgagaggatgacccgcaggttccccgccagttgcgac

SEQ ID NO: 685856 - DNA, 75 bp, synthetic construct
  source 1..75: mol_type = other DNA
cattccacagtgggtcaccctggagccccgggtcttcggctggatggaccgtctgtacgaagactactgcggtgg

SEQ ID NO: 685857 - DNA, 75 bp, synthetic construct
  source 1..75: mol_type = other DNA
gcactgaagcatataccggtcgtgaggtgcaggatattcccggtgtgctggccgtgtttgctgaacgccgtaagg

SEQ ID NO: 685858 - DNA, 75 bp, synthetic construct
  source 1..75: mol_type = other DNA
agtgatccgcacagaacgggtgaaaaaagcctgtacaaaatgtgactgcatcgttgaagcaccggcgccgtcccg

SEQ ID NO: 685859 - DNA, 75 bp, synthetic construct
  source 1..75: mol_type = other DNA
atgccggaacgcataccgtgattaaagccggtgtctctgcagatacacaatctgatttcggcgcgggtgtcggcg

SEQ ID NO: 685860 - DNA, 75 bp, synthetic construct
  source 1..75: mol_type = other DNA
gactacggccgcaccaggcggtcatagctggtacatttaccccatttacgactggaaagtggctgatatctggac

SEQ ID NO: 685861 - DNA, 75 bp, synthetic construct
  source 1..75: mol_type = other DNA
acgccggacatgacaaccatttttatggccatcgtaaaatcctcaagccggaacatttagactggcaggagtatg

SEQ ID NO: 685862 - DNA, 75 bp, synthetic construct
  source 1..75: mol_type = other DNA
ttgtggctggattatctggacacactggaactggtcgatacttccggtgcgccagatattgaatggcctacgcct

SEQ ID NO: 685863 - DNA, 75 bp, synthetic construct
  source 1..75: mol_type = other DNA
catttacgccggacatgacaatcatttctatgggcatcggaaaatcctcaagccagaacatttagactggcaaga

SEQ ID NO: 685864 - DNA, 75 bp, synthetic construct
  source 1..75: mol_type = other DNA
gctcatcatcattaaaattacgcttaaaaggttatttgccggtgacctgtctggaaggtacgcgtaatcaacgca

SEQ ID NO: 685865 - DNA, 75 bp, synthetic construct
  source 1..75: mol_type = other DNA
tccgcagacccaacaaggggataccggctcaaaagatatcccctcctggcgacggatatgcaaggtgttgctcaa

SEQ ID NO: 685866 - DNA, 75 bp, synthetic construct
  source 1..75: mol_type = other DNA
atgggagagccgttcttcaagcaaaaagagcttttccggcgcgctggtgttgtttgcttcagcagcaactacgag

SEQ ID NO: 685867 - DNA, 75 bp, synthetic construct
  source 1..75: mol_type = other DNA
ggcaaagacgatacaacaggaggagtttacccggatcaagatacaggtataacataccctctgaaccgccccggg

SEQ ID NO: 685868 - DNA, 75 bp, synthetic construct
  source 1..75: mol_type = other DNA
tccagatgctctgctttatgcacatatgccgcccgcacgctgttgcgctcctggtggctcatttgccgctccacc

SEQ ID NO: 685869 - DNA, 75 bp, synthetic construct
  source 1..75: mol_type = other DNA
acaagtaatgactctttagttctaattgatgaaccagaaatatcattccatccagaatggcaagaaaaatttatt

SEQ ID NO: 685870 - DNA, 75 bp, synthetic construct
  source 1..75: mol_type = other DNA
ttaaggaaaaaataggtggggccataagagatcaatttgaggaaggcagaaagaaggaaacaaacttcccaacaa

SEQ ID NO: 685871 - DNA, 75 bp, synthetic construct
  source 1..75: mol_type = other DNA
gcgccaatcaacgcccggactgggccagtcttgagatcagactcattcccggaactgacttcaggcgacatatat

SEQ ID NO: 685872 - DNA, 75 bp, synthetic construct
  source 1..75: mol_type = other DNA
catgaacagtaaacaatggcccggtaaagccgctattggtcgtctgaaaggcgaggaactggcacaatataattc

SEQ ID NO: 685873 - DNA, 75 bp, synthetic construct
  source 1..75: mol_type = other DNA
gctctgcaccatgtaaataatactggcgcactgaatctggtcgaagtgaataacccgagcaaccagatcactgaa

SEQ ID NO: 685874 - DNA, 75 bp, synthetic construct
  source 1..75: mol_type = other DNA
acaaacacagcctggataatcctgacgctaaaaccagaaaatttctggttagtggattcacctgaaatggatgtt

SEQ ID NO: 685875 - DNA, 75 bp, synthetic construct
  source 1..75: mol_type = other DNA
gtgctgcccggagtatatagtgttcgtctgacacacagttcacagcgccttgcagaaatcggggtcattcgggtc

SEQ ID NO: 685876 - DNA, 75 bp, synthetic construct
  source 1..75: mol_type = other DNA
actgattgccgcgtctgaacaatccggtgaccgcgcatggcgcttaccgctgggtgacgagtatcaggaacaact

SEQ ID NO: 685877 - DNA, 75 bp, synthetic construct
  source 1..75: mol_type = other DNA
tgccgccgggattaaagcagcaaaggatcttggcaatatgccgccgaatatctgtaacgccgcttacctcgcttc

SEQ ID NO: 685878 - DNA, 75 bp, synthetic construct
  source 1..75: mol_type = other DNA
aacatcaccctgaaaaccgcgaaaccaagtgatattgcagcgctgaatgacaaagcgctgggtgcatacccggca

SEQ ID NO: 685879 - DNA, 75 bp, synthetic construct
  source 1..75: mol_type = other DNA
agagagggtttaccgtgaatggctggcaagttcggcaagaaaagcaagggttatccgcaaaccagcacaaaaaca

SEQ ID NO: 685880 - DNA, 75 bp, synthetic construct
  source 1..75: mol_type = other DNA
agtcaataatgaacataaccaggatggctgaagatgtatggataacagaaagtaaaacgacccaactcattgata

SEQ ID NO: 685881 - DNA, 75 bp, synthetic construct
  source 1..75: mol_type = other DNA
gaagcagaggctgatctggatatgattgccggtctgtgtgggatggacgcggcagacatgatgaacatggaagcg

SEQ ID NO: 685882 - DNA, 75 bp, synthetic construct
  source 1..75: mol_type = other DNA
tgacaaattcacccatgggaacatcaaaggtcgcgccgggcgcatgggcgttcacttcgtcggcaaaatcttttg

SEQ ID NO: 685883 - DNA, 75 bp, synthetic construct
  source 1..75: mol_type = other DNA
agccaagctcaaagcgctgggggaaatcgcgcacgcatgtgtcgacgcaacgatcatttattgcaagtcaccaac

SEQ ID NO: 685884 - DNA, 75 bp, synthetic construct
  source 1..75: mol_type = other DNA
ttatccgcaaaccagcacaaaaacagggtaaggcaggagcacaaccctacgaccggcaccagaacataatttgcc

SEQ ID NO: 685885 - DNA, 75 bp, synthetic construct
  source 1..75: mol_type = other DNA
ccggcacgcgcggctaatttaccggtcaacaacaaaccggtgatgctgttaagcctggtgttcgcaccgacctag

SEQ ID NO: 685886 - DNA, 75 bp, synthetic construct
  source 1..75: mol_type = other DNA
ttgtcacagggaactcattaaatccgccaggagatctgacaaatctcaaaactcagactcgacttgactctgttc

SEQ ID NO: 685887 - DNA, 75 bp, synthetic construct
  source 1..75: mol_type = other DNA
gtgcgcgaactgcgcggcgaaccctgtcttgaactggaggaatttgcaccagtaaagcaggcaattgtctgttcc

SEQ ID NO: 685888 - DNA, 75 bp, synthetic construct
  source 1..75: mol_type = other DNA
atgatttgcgataatagtaattattttttatacagtcttcttttttcagggggcctgttaaatgcatatgtgctg

SEQ ID NO: 685889 - DNA, 75 bp, synthetic construct
  source 1..75: mol_type = other DNA
gtcgtcacgaacgccgccgcgccggaatgcgcagcggtcggcaatggccatcaggatgaccaattccgcagccgc

SEQ ID NO: 685890 - DNA, 75 bp, synthetic construct
  source 1..75: mol_type = other DNA
atgaacatccgattcaccgatgaaacccacaaggcgcttgttgagcgtgccaaccgtgaagataagtccgccgcc

SEQ ID NO: 685891 - DNA, 75 bp, synthetic construct
  source 1..75: mol_type = other DNA
atgcggatgccagttgagacgacggccatacgtgtggatggcgcagaagataccgggttccagcccccgttttcg

SEQ ID NO: 685892 - DNA, 75 bp, synthetic construct
  source 1..75: mol_type = other DNA
gtacttggagtgcagacttttggtgtaagtttttttctttgtttaaagatgaaaatcagtatgtaacttggcttt

SEQ ID NO: 685893 - DNA, 75 bp, synthetic construct
  source 1..75: mol_type = other DNA
attatgacgttatgcggcaggccatctgcagctatgcgtcgcgcgctacagaaaagttacgtggagagcatcagt

SEQ ID NO: 685894 - DNA, 75 bp, synthetic construct
  source 1..75: mol_type = other DNA
atgaaaacgcccctggttacccgggaagggtatgaaaaactcaaacaagagcttaattatctctggcgtgaagaa

SEQ ID NO: 685895 - DNA, 75 bp, synthetic construct
  source 1..75: mol_type = other DNA
acgtaaaacaaaaatgccagcgcccacctcttaccccgaatgggtttttgttgataatgttttaatgaagatcac

SEQ ID NO: 685896 - DNA, 75 bp, synthetic construct
  source 1..75: mol_type = other DNA
gacggcctgtatgcgcaagctgttgaccctgctgaattgcattgcccgtgacggtgttccgtttgattcttcccg

SEQ ID NO: 685897 - DNA, 75 bp, synthetic construct
  source 1..75: mol_type = other DNA
tacactagcgttagcaaaaatgagtagggaggttaagagtttaactactatcgctaaagaaattgaaagggccgg

SEQ ID NO: 685898 - DNA, 75 bp, synthetic construct
  source 1..75: mol_type = other DNA
aaagttgacgctctttcaattaacaggaaataccccattatcattcgtaatactgcgaaagaaagcgtttgtaga

SEQ ID NO: 685899 - DNA, 75 bp, synthetic construct
  source 1..75: mol_type = other DNA
accacctcctgatacagaaattgatggtgttgtcgctgccattgcttatggcgatgataaaacctcgcttttgga

SEQ ID NO: 685900 - DNA, 75 bp, synthetic construct
  source 1..75: mol_type = other DNA
gagtcaattgaggaactcaccacagaagacttcgacgcaacattcaaaaccaatgtttacgctatgttttggatc

SEQ ID NO: 685901 - DNA, 75 bp, synthetic construct
  source 1..75: mol_type = other DNA
tgattgtaaacgtttatatttcgttcaggattttgaagcttacttcaacccggtgggcgatgcttacctgatggc

SEQ ID NO: 685902 - DNA, 75 bp, synthetic construct
  source 1..75: mol_type = other DNA
atcaacaatttttcgccgatctgttcagcggcctggtgcttaacccgcaactactggggcgcgtctggtttgcca

SEQ ID NO: 685903 - DNA, 75 bp, synthetic construct
  source 1..75: mol_type = other DNA
tcagaaatggctgacggatatcacagagttccagcttcctgcaggcaaagtctggctatcaccggtggtggactg

SEQ ID NO: 685904 - DNA, 75 bp, synthetic construct
  source 1..75: mol_type = other DNA
cattttatgcatcgtgcgagaccgtatttcgtcctgacctgaaagggcgtccggtggtcgttctgtcaaacaacg

SEQ ID NO: 685905 - DNA, 75 bp, synthetic construct
  source 1..75: mol_type = other DNA
gattaaaatcaaaccagaattattggcagatatatcaggtgttaaatacgtacctgacatagatgatggctatga

SEQ ID NO: 685906 - DNA, 75 bp, synthetic construct
  source 1..75: mol_type = other DNA
gccgatatatcaggtgtaaaatacgtacctgatatagatgatggttatgacgatattgttgttccttttaaattt

SEQ ID NO: 685907 - DNA, 75 bp, synthetic construct
  source 1..75: mol_type = other DNA
ttgagccgctttaagctggtgcttgcgatcgcctgcgtcggacggatggcgctgaccaactatctattgcaaacg

SEQ ID NO: 685908 - DNA, 75 bp, synthetic construct
  source 1..75: mol_type = other DNA
tgccgacccgtatatgtttatgaattactggtttgagtcagacaaaaaaggtctgccaggcaaccgctcgttcta

SEQ ID NO: 685909 - DNA, 75 bp, synthetic construct
  source 1..75: mol_type = other DNA
ggaaaaaagtgtatgctttaaaagctcgatggaaagttagtgctaaagcaattatttatagagcacatttcttgg

SEQ ID NO: 685910 - DNA, 75 bp, synthetic construct
  source 1..75: mol_type = other DNA
ttttaatttgattgataatagtaagattgtagaattaacacctccattgatagaaaagattgctgagggggctcg

SEQ ID NO: 685911 - DNA, 75 bp, synthetic construct
  source 1..75: mol_type = other DNA
taccgaagatctgggaaaagtcactttccgcccgtccatcacagcttatgtggtgggagatgactgctttgacca

SEQ ID NO: 685912 - DNA, 75 bp, synthetic construct
  source 1..75: mol_type = other DNA
gtgagttttgacaacgtggtggagggcagcaacctgaccgatgcggatgccattagctcaacgtccgtggtatgg

SEQ ID NO: 685913 - DNA, 75 bp, synthetic construct
  source 1..75: mol_type = other DNA
cctgaacggtaacaacggcaataacacggaagtgcattatggcgactatacgttgccggatgtgccgagttccaa

SEQ ID NO: 685914 - DNA, 75 bp, synthetic construct
  source 1..75: mol_type = other DNA
ttagttttgataacgtggtggagggcagcaacctgaccgacgcggatgctatcacctcaacgaccgtggtatgga

SEQ ID NO: 685915 - DNA, 75 bp, synthetic construct
  source 1..75: mol_type = other DNA
acgatgtcaacatatgcgctgaatgttatcggtgaacagtcagcgggggttattgtatctggcgataataacaat

SEQ ID NO: 685916 - DNA, 75 bp, synthetic construct
  source 1..75: mol_type = other DNA
atattttcggcggtaaacgtaaatcctcagggttccgtaacctaagcactcaattcaatactgatttcaacggtt

SEQ ID NO: 685917 - DNA, 75 bp, synthetic construct
  source 1..75: mol_type = other DNA
ttatcaacgttggagatttaaatgccgacgacagggcgaccggggtgaaaattaacggtgacgccagcgacattg

SEQ ID NO: 685918 - DNA, 75 bp, synthetic construct
  source 1..75: mol_type = other DNA
gaatactgctattgataaagaactatcccgtacgacagatgaccgtttgtttctggctttgcgccgggcgaaatc

SEQ ID NO: 685919 - DNA, 75 bp, synthetic construct
  source 1..75: mol_type = other DNA
acagtgcagggcgcatagcggttgatttgagtgattatgccatccggtatatcggaagcacctcagtaacattcg

SEQ ID NO: 685920 - DNA, 75 bp, synthetic construct
  source 1..75: mol_type = other DNA
ttactaatggcggaaccggtagtgtgataaatggcaatgatgctcaagtagataataaaggtagcatggttgttg

SEQ ID NO: 685921 - DNA, 75 bp, synthetic construct
  source 1..75: mol_type = other DNA
aaacattaatgtgacgtccagtatgggggaccaaccgtccacctcaccccagtcgttaaccggcgttaccatcga

SEQ ID NO: 685922 - DNA, 75 bp, synthetic construct
  source 1..75: mol_type = other DNA
agggcaaactgaccgtaaaagatcaagactcaatcggtatcgttatcaccggagatgacgcgcaatttactaccg

SEQ ID NO: 685923 - DNA, 75 bp, synthetic construct
  source 1..75: mol_type = other DNA
cgcctcgatggcgacggtgcgcagaaagcgggtgataatggcgttacaggcggttatagccagttctttggcctg

SEQ ID NO: 685924 - DNA, 75 bp, synthetic construct
  source 1..75: mol_type = other DNA
atgaaggccaaaaattggcaggagtggacacagcaggcagcgaaacaagcactgaccatcaactggtactatgct

SEQ ID NO: 685925 - DNA, 75 bp, synthetic construct
  source 1..75: mol_type = other DNA
ccaatggtctggcggggtatccaacgaccagcaatatgtgggtgatcggcaaaagcaaagcccaggatgcgaaag

SEQ ID NO: 685926 - DNA, 75 bp, synthetic construct
  source 1..75: mol_type = other DNA
cgtggtacaccaatcaatattaatttatatgatcacgcccgaggaactgtaacagggaataccagatataatgat

SEQ ID NO: 685927 - DNA, 75 bp, synthetic construct
  source 1..75: mol_type = other DNA
ggcagatcaaaaacataccggctgaatgaacaatttggttggaaaggcaccgtaaccaaccacaaaaaggcactc

SEQ ID NO: 685928 - DNA, 75 bp, synthetic construct
  source 1..75: mol_type = other DNA
tcaatcaggccatgatccgcgattacccgttcctggtacgggaaaatgggactggaaagggctattgccttttga

SEQ ID NO: 685929 - DNA, 75 bp, synthetic construct
  source 1..75: mol_type = other DNA
attgctaactggaacaattctccccaaaaagattatcccgcttcggatctgtttgcctttttgtggggggggccc

SEQ ID NO: 685930 - DNA, 75 bp, synthetic construct
  source 1..75: mol_type = other DNA
cgggaagtttaaaccatatctccagccgttggtttcttcaccagactttaccgtatctggtgttgaactgctaat

SEQ ID NO: 685931 - DNA, 75 bp, synthetic construct
  source 1..75: mol_type = other DNA
ccttaccgcgaaaaccgggtagatctggatatcgactccatggaagacaacgttgagttgaaaagtaccagcgct

SEQ ID NO: 685932 - DNA, 75 bp, synthetic construct
  source 1..75: mol_type = other DNA
attaatctggtatcaacaacagtaccaacgggttcctccggttcgtatgagttccctgttgtatggtatcacggc

SEQ ID NO: 685933 - DNA, 75 bp, synthetic construct
  source 1..75: mol_type = other DNA
gtaaaccggtaccgcgacaacgccatcacctacaaagaccagcgcgacaaagccaccaagagtctccgcctggcg

SEQ ID NO: 685934 - DNA, 75 bp, synthetic construct
  source 1..75: mol_type = other DNA
caacaacacccgcgcagagctccggctggcctgccgtcacgcatccggtgctgaacaatgcaccggcggtgaaaa

SEQ ID NO: 685935 - DNA, 75 bp, synthetic construct
  source 1..75: mol_type = other DNA
ttccgcccgtccatcacggcttatgtggtgggagatgactgctttgaccagcgtgatctcctgattgaagcgctg

SEQ ID NO: 685936 - DNA, 75 bp, synthetic construct
  source 1..75: mol_type = other DNA
tttggtcagaaacgctatggcgcagacatttacgatatttacggtcaggttattgaaggtcaggggcgtctggca

SEQ ID NO: 685937 - DNA, 75 bp, synthetic construct
  source 1..75: mol_type = other DNA
aacagcattcaggtgacacctgtactggatgagaaacggggagcggcgttcacactggtgaagtcaccggcatcg

SEQ ID NO: 685938 - DNA, 75 bp, synthetic construct
  source 1..75: mol_type = other DNA
aaccgacaaccttccgatggcaacgtacccggcagcgatcaagtcggccgcacggctcatcgacagcggcaagat

SEQ ID NO: 685939 - DNA, 75 bp, synthetic construct
  source 1..75: mol_type = other DNA
gtggcggcgctgcaacgcctgcataaagcgggatatcgtctggtgatgttgaccggggataacccaaccaccgcc

SEQ ID NO: 685940 - DNA, 75 bp, synthetic construct
  source 1..75: mol_type = other DNA
cagtaaatcaagcagaacggggcggtgaaaacgcgttgagaggcttttcatatcaagcctcttgggggataaatt

SEQ ID NO: 685941 - DNA, 75 bp, synthetic construct
  source 1..75: mol_type = other DNA
gtatgagcgcaaagggctgctgttacgataatgcctgcctggaaagcttctttcattcgctgaaagtggaatgtc

SEQ ID NO: 685942 - DNA, 75 bp, synthetic construct
  source 1..75: mol_type = other DNA
ccgatatatcaaaatcggcgacgtatacgctgctgattgacagcattgcggtggaagtgaacagcacagacactg

SEQ ID NO: 685943 - DNA, 75 bp, synthetic construct
  source 1..75: mol_type = other DNA
atccatttgcctttgcggcagcggggccacaggcagagcagatcatctctgatccattgcccctgccacctcact

SEQ ID NO: 685944 - DNA, 75 bp, synthetic construct
  source 1..75: mol_type = other DNA
gagttaggcttatcctcgtccgccattagccatagtattaaaacactggaacaacgtcttaaaattcgcttattc

SEQ ID NO: 685945 - DNA, 75 bp, synthetic construct
  source 1..75: mol_type = other DNA
actatatcaatgctgggtttgatgcaattaagtcaaaattaattcctggtggtgtattctcagatattaagagta

SEQ ID NO: 685946 - DNA, 75 bp, synthetic construct
  source 1..75: mol_type = other DNA
gcctttatctacaacagcatcggtattccggtcgccgccggtattttgtggccgtttactggaacactgcttaac

SEQ ID NO: 685947 - DNA, 75 bp, synthetic construct
  source 1..75: mol_type = other DNA
tctggcggcctttacttttttgtttgtaactcatagaccacttgatataagaactctgttgtctaatattaccat

SEQ ID NO: 685948 - DNA, 75 bp, synthetic construct
  source 1..75: mol_type = other DNA
gatcgcactagcaactatttcttataaggtaattgaaaaaccatctataaatataggtcacaggcttaggaagat

SEQ ID NO: 685949 - DNA, 75 bp, synthetic construct
  source 1..75: mol_type = other DNA
tgttgcttggtactttctcagatccttatgaggggattaaattacaatcagtttttacacgcatatcaataaaag

SEQ ID NO: 685950 - DNA, 75 bp, synthetic construct
  source 1..75: mol_type = other DNA
cttgctgttggtgatgctgtatttacccagaaatgcatgcgctttatccgtaagtttaaagagaatggcacctta

SEQ ID NO: 685951 - DNA, 75 bp, synthetic construct
  source 1..75: mol_type = other DNA
cttttgctgatatcggcgactacatcgatcaaccggtaaaaacttattccagtggtatgtatgtccgactggcat

SEQ ID NO: 685952 - DNA, 75 bp, synthetic construct
  source 1..75: mol_type = other DNA
atccgtccgtaccatgacggacaaggctatattccttgagcatggcgtcgtgaaattcactggaacttctgcgga

SEQ ID NO: 685953 - DNA, 75 bp, synthetic construct
  source 1..75: mol_type = other DNA
tgaaaattaaagccagcactaaaaatggcgagaagcctaaacaggtgaatgtgctggtgtctgccgttgatagtg

SEQ ID NO: 685954 - DNA, 75 bp, synthetic construct
  source 1..75: mol_type = other DNA
ctgaactgaacatgccgcgctttatggcgagtggcgatacctcgcgtctgacgctggatatcactaatcttaccg

SEQ ID NO: 685955 - DNA, 75 bp, synthetic construct
  source 1..75: mol_type = other DNA
tcccgtacgcggataatctcaaagccagtaaattcgccgtacagtcttacgctgcgctggtgctggcccgtcagc

SEQ ID NO: 685956 - DNA, 75 bp, synthetic construct
  source 1..75: mol_type = other DNA
gatgtgaaaaaggcaaaagccagactttctgaaataaaaaaagatcaaagtaaattatcaaaagatactaatatt

SEQ ID NO: 685957 - DNA, 75 bp, synthetic construct
  source 1..75: mol_type = other DNA
tagctgcggaatatactcgtgctgaaaaagaggttgcggagcaagctaaaaatgttttgcattcagttatgagta

SEQ ID NO: 685958 - DNA, 75 bp, synthetic construct
  source 1..75: mol_type = other DNA
gcattatcgattggtcgccggacgggggaatatccgtggtagtgaaggcccgcgcaatgcggtagctaccgggct

SEQ ID NO: 685959 - DNA, 75 bp, synthetic construct
  source 1..75: mol_type = other DNA
tgtaaaaactcaaggtcgtgttgcggctctgttggaactgggttcgggtttcaaccctgaattttctggccgcga

SEQ ID NO: 685960 - DNA, 75 bp, synthetic construct
  source 1..75: mol_type = other DNA
gcaaataatgttaattctcctgcattatcagagcggctcaaagcgttttcttttggcgatctggatgcagaggtt

SEQ ID NO: 685961 - DNA, 75 bp, synthetic construct
  source 1..75: mol_type = other DNA
atagatgatgtcaccccaaaccaggaacaaaaaacagacacaccggaagaccaacagaagttaaagtcaaaagaa

SEQ ID NO: 685962 - DNA, 75 bp, synthetic construct
  source 1..75: mol_type = other DNA
ggggcagggaagtctgccacgctgtgtgcctctctgtcacaggtgatggccgtgcatcgtccccggttgtttatt

SEQ ID NO: 685963 - DNA, 75 bp, synthetic construct
  source 1..75: mol_type = other DNA
agggcgtacggaggaacgtcttgaacagatcagggacatggtggaggacgcactgcaggacagctttgatgagta

SEQ ID NO: 685964 - DNA, 75 bp, synthetic construct
  source 1..75: mol_type = other DNA
gtcttaacgtgctgcgcctgctaaaccaaccctggtttacgtcggttaaaggcaaccacgaagcgatggcgcttg

SEQ ID NO: 685965 - DNA, 75 bp, synthetic construct
  source 1..75: mol_type = other DNA
cggtgaccgggcgggaaacgggcaccggtcaccccggattcagtttctttaaccggggtggggatgtgctgacct

SEQ ID NO: 685966 - DNA, 75 bp, synthetic construct
  source 1..75: mol_type = other DNA
cgcccagcatctggcgaggcctatcgtcaatatcaccgatgaggcgcatatcatcactgttaatcccttattggc

SEQ ID NO: 685967 - DNA, 75 bp, synthetic construct
  source 1..75: mol_type = other DNA
cagatgtggccggaggcggatatcaccctagtggatctcgccacctttgcccgcgaaggctatgaagcgcagctt

SEQ ID NO: 685968 - DNA, 75 bp, synthetic construct
  source 1..75: mol_type = other DNA
tagaaatcgcggaacgtggtccagtcgggtttcctttattggcctggtcatatccgctctgttcattgattgcga

SEQ ID NO: 685969 - DNA, 75 bp, synthetic construct
  source 1..75: mol_type = other DNA
gcaccgccgatgatgcagggcttcttctccatcggtatcgcctttatggccgtcatcattgtaattgcactggct

SEQ ID NO: 685970 - DNA, 75 bp, synthetic construct
  source 1..75: mol_type = other DNA
gaaggggcaacagaatggtgcgcagaatacgatgaatggggcaacctgctgaatgaagagaacccgcaccagctg

SEQ ID NO: 685971 - DNA, 75 bp, synthetic construct
  source 1..75: mol_type = other DNA
gtcatattatcattattaaaggccacagctttaagtctaatgagaatggtatgtggaaccttacagaaatatgga

SEQ ID NO: 685972 - DNA, 75 bp, synthetic construct
  source 1..75: mol_type = other DNA
ataaaacactatcagtaagttggagtcattaccaaaatgagttagtaaaagtattttgcgagtataaaacagagt

SEQ ID NO: 685973 - DNA, 75 bp, synthetic construct
  source 1..75: mol_type = other DNA
atgatcatcaggagacgtcacaaaacgctaaatacagtgcaatagtcaagaaaaaagttattttaataaggaaat

SEQ ID NO: 685974 - DNA, 75 bp, synthetic construct
  source 1..75: mol_type = other DNA
cctgcaggctcacagcgggcgggtttcctttgactgggaaggcgatgctctggagctcctgagcgagctggcccg

SEQ ID NO: 685975 - DNA, 75 bp, synthetic construct
  source 1..75: mol_type = other DNA
agacggtgggcagtaaccagatcattaaagtgggctctgttcaggtggaaacgattggacttgttcgtgcgctga

SEQ ID NO: 685976 - DNA, 75 bp, synthetic construct
  source 1..75: mol_type = other DNA
gtaactattcgtgaggcactaaatgctgtaaaactctttatgaaaataaaaaaggagaacgaaaaagttccagca

SEQ ID NO: 685977 - DNA, 75 bp, synthetic construct
  source 1..75: mol_type = other DNA
tacgtacagatatcttgacatggatgtaactattcgtgaggcactaaatgctgtaaaactctttatgaaaataaa

SEQ ID NO: 685978 - DNA, 75 bp, synthetic construct
  source 1..75: mol_type = other DNA
tgcagctactgggttggttgagatggattgtcttgagaaaaacattataaagagaacagataagtctgttccaga

SEQ ID NO: 685979 - DNA, 75 bp, synthetic construct
  source 1..75: mol_type = other DNA
cagcaagaaaaaaatcccgtacactgtcttccctgtgcatcatgcttgctgctcttagtacggggtttgctacaa

SEQ ID NO: 685980 - DNA, 75 bp, synthetic construct
  source 1..75: mol_type = other DNA
aagttgtagtcgagcacacggcagatcctaggactcctggccctcacgcacatgcaggacaacctaaaccgggcg

SEQ ID NO: 685981 - DNA, 75 bp, synthetic construct
  source 1..75: mol_type = other DNA
ttttcctcttttaatgttgtttttccaggagcattatttgttgtcatggaaaatgcattttatttattttttatg

SEQ ID NO: 685982 - DNA, 75 bp, synthetic construct
  source 1..75: mol_type = other DNA
gtaccaacggcgtggtggctgcaacgttttcacttcgcctgaagggtaaaccggtgtcctatgtggtaccgctgg

SEQ ID NO: 685983 - DNA, 75 bp, synthetic construct
  source 1..75: mol_type = other DNA
caccagacaaaaacagattgtgggggaaacccgggcaaagctgattcgggatggcggtatgtcgccagatgaatt

SEQ ID NO: 685984 - DNA, 75 bp, synthetic construct
  source 1..75: mol_type = other DNA
ccgcggcttgttaacccagatacacccggctcaggagcgcgttctcggcgcgactggatcatccagcagtacttg

SEQ ID NO: 685985 - DNA, 75 bp, synthetic construct
  source 1..75: mol_type = other DNA
accttttctttgcctttagccaccatattcctggtttatgcttattcaggctttgaagaaagcatttatttattc

SEQ ID NO: 685986 - DNA, 75 bp, synthetic construct
  source 1..75: mol_type = other DNA
acttcaaagatcttcttaatattattccttgtatatattgttggaataaatagttatgtaagcaaaaagaaattg

SEQ ID NO: 685987 - DNA, 75 bp, synthetic construct
  source 1..75: mol_type = other DNA
gaacaaattaatcaacaacaacgtcaactggagcaggaaatatgcgatcgaatagcgactgaaaaaaaccttcgt

SEQ ID NO: 685988 - DNA, 75 bp, synthetic construct
  source 1..75: mol_type = other DNA
gcctctcgctgatcactcagaacaacatcaacaaaaaccagtctgcactgtccagctccatcgagcgtctgtctt

SEQ ID NO: 685989 - DNA, 75 bp, synthetic construct
  source 1..75: mol_type = other DNA
aagttactgatacccctactggtgatccgctgaaagcattggataaagctatcgctcaggtcgacaatttccgtt

SEQ ID NO: 685990 - DNA, 75 bp, synthetic construct
  source 1..75: mol_type = other DNA
atgccgggaagcactcggcgctgattgttgcacatcgtctgaccaccgcgcaacgctgcgatctgattgccgtta

SEQ ID NO: 685991 - DNA, 75 bp, synthetic construct
  source 1..75: mol_type = other DNA
agggtaaacataaaaacagttaaggaaggtgcgaataagcaggtcatttcttcccaagctgactcgctgattaaa

SEQ ID NO: 685992 - DNA, 75 bp, synthetic construct
  source 1..75: mol_type = other DNA
aaggtgcgaataagcaggtcatttcttcccaagctgactcgctgattaaaatttcgcggatctgggccgattttt

SEQ ID NO: 685993 - DNA, 75 bp, synthetic construct
  source 1..75: mol_type = other DNA
accaacggggagaatcaaaaggagatggtctatgggggccaggtaaagcaagtaatgatacaaaagaagctgctg

SEQ ID NO: 685994 - DNA, 75 bp, synthetic construct
  source 1..75: mol_type = other DNA
cagctgtgcagaaatttccattgtgatggatacggagcatcttctgcctacactcttcagcaattccataggaac

SEQ ID NO: 685995 - DNA, 75 bp, synthetic construct
  source 1..75: mol_type = other DNA
atcaatgcgtgtgagtgatatcacaacgcataatgttgcaaatttttttgaaattaagcagaagacatattttac

SEQ ID NO: 685996 - DNA, 75 bp, synthetic construct
  source 1..75: mol_type = other DNA
ttcctgttttgcaaccaatcatcattaacgctgctggatatccggtatataacgggcagattgccaaattcgtaa

SEQ ID NO: 685997 - DNA, 75 bp, synthetic construct
  source 1..75: mol_type = other DNA
atctgatgcttttggcatgaaggccagaaatctggacggatggttacgggctgcgcgggcaaataatgttgatga

SEQ ID NO: 685998 - DNA, 75 bp, synthetic construct
  source 1..75: mol_type = other DNA
gtagcgagattctggctcttgcgggtgtcagtctgacgctgggggggctgaagaacctggtaacaggttttgccc

SEQ ID NO: 685999 - DNA, 75 bp, synthetic construct
  source 1..75: mol_type = other DNA
ggaaaaattaagttttctatagatgagatttatgtcgctatggcgggtgcaaaagaaaacttaattctcgttagt

SEQ ID NO: 686000 - DNA, 75 bp, synthetic construct
  source 1..75: mol_type = other DNA
atacccggaaagacggaacgcgcattgaaacggaaggcgacggaaatgtgcaaacgcgacttggggtgaaaacct

SEQ ID NO: 686001 - DNA, 75 bp, synthetic construct
  source 1..75: mol_type = other DNA
tgcgatcgctggtcgaacgcatggataacatcgttaaacgactgcgcaacttcgcccgccgtcgtgatagtgaat

SEQ ID NO: 686002 - DNA, 75 bp, synthetic construct
  source 1..75: mol_type = other DNA
atgaacaaaattctcaggttcgctacgcgcttgatgattatttcccgaggattcaggcttcatttctttttgaag

SEQ ID NO: 686003 - DNA, 75 bp, synthetic construct
  source 1..75: mol_type = other DNA
acccgcaccagctgcagcagctcatccgcctgccgggtcagcagtatgatgaggagtccggcctgtattacaacc

SEQ ID NO: 686004 - DNA, 75 bp, synthetic construct
  source 1..75: mol_type = other DNA
taatttccctgccgtttatggtgatgatgtcttgattcaacaagttttagttaatttgtttacgaatgccctgga

SEQ ID NO: 686005 - DNA, 75 bp, synthetic construct
  source 1..75: mol_type = other DNA
atttaatgagctacaacagacaaccaataccgctagtcgtcttcaggtaagggagcagattgaacaacggctaca

SEQ ID NO: 686006 - DNA, 75 bp, synthetic construct
  source 1..75: mol_type = other DNA
tttaataatgaactcaactcacttacccaggatttaagttggcaacaatcgtcgttgctaaatcaactcagccaa

SEQ ID NO: 686007 - DNA, 75 bp, synthetic construct
  source 1..75: mol_type = other DNA
caacgcacagtggttgcaagccagcatggatgcgccgcgtcagtatgcaacatacgactgcgtgaaggtgaaatg

SEQ ID NO: 686008 - DNA, 75 bp, synthetic construct
  source 1..75: mol_type = other DNA
agtccgggctggcggatggatgaccacggcagggaagcactaatattcgggagcagccactgcccggatgtaaac

SEQ ID NO: 686009 - DNA, 75 bp, synthetic construct
  source 1..75: mol_type = other DNA
tacgccaatcagcacagtaatactcagagtaatcgtgtgggttataaatcggatgggcgcatcagcggttacagc

SEQ ID NO: 686010 - DNA, 75 bp, synthetic construct
  source 1..75: mol_type = other DNA
actcgatggctaatgttgataaatatgaaaacccatttcgtaaagagttgggcttgccagcaagaatgaaatatt

SEQ ID NO: 686011 - DNA, 75 bp, synthetic construct
  source 1..75: mol_type = other DNA
tgaaacccactctgttgagtgtggttcttgcgcatgaaatggggcatgcaaagggaatgaaagacgatggaactg

SEQ ID NO: 686012 - DNA, 75 bp, synthetic construct
  source 1..75: mol_type = other DNA
gccgctggcgcttatcagtgaagacggcaatacggcgtggagcgcggaatatgatgaatggggcaaccagcttaa

SEQ ID NO: 686013 - DNA, 75 bp, synthetic construct
  source 1..75: mol_type = other DNA
cgccgccaaagagttaacaggaagcgacttactggtcgtgctggattatcttgtcggcgatgattgtgtcagtta

SEQ ID NO: 686014 - DNA, 75 bp, synthetic construct
  source 1..75: mol_type = other DNA
gcctataacggcggcgcaggcagcgtgctgcgagtcttttcgaatgataagattcaggctgccaatattattaac

SEQ ID NO: 686015 - DNA, 75 bp, synthetic construct
  source 1..75: mol_type = other DNA
ctttgacgacccgccatccttctgcggaatctcgccgctatctctataaagtgaacatggcgcagaaatcttacc

SEQ ID NO: 686016 - DNA, 75 bp, synthetic construct
  source 1..75: mol_type = other DNA
gttgagttattgcgtagccatattctctggatatttagcaaagaggggcaggaatattttcttgccgaacagcca

SEQ ID NO: 686017 - DNA, 75 bp, synthetic construct
  source 1..75: mol_type = other DNA
gtcgccgcaatcatgcacggtatatttcaggcaacaaatacagaacgcctgactttaatccgacacaggaagatc

SEQ ID NO: 686018 - DNA, 75 bp, synthetic construct
  source 1..75: mol_type = other DNA
atgcgtatatcagaacaacaacggcagatcctcgactatctggcaaaaaacgaatcaatcaccgcacgacaagcc

SEQ ID NO: 686019 - DNA, 75 bp, synthetic construct
  source 1..75: mol_type = other DNA
gcatcagtacagcttcagtggtctggatgacatcctttcacagtttgcagaacagattagtggcgctgttggtat

SEQ ID NO: 686020 - DNA, 75 bp, synthetic construct
  source 1..75: mol_type = other DNA
gtaaccggcataggggcatccattaccaacgaggacatcgagaatgccgaagatgaagcgccgcccggcatcggc

SEQ ID NO: 686021 - DNA, 75 bp, synthetic construct
  source 1..75: mol_type = other DNA
ttacatcgaaatgttttatagcagtaagcgtcggcatggttctagcgaacagatgtcaccgacagaatatgaaaa

SEQ ID NO: 686022 - DNA, 75 bp, synthetic construct
  source 1..75: mol_type = other DNA
accgccagtaatgctgctcgttttgccggattatgggaaagaaataatctcataaacgaaaaattaaaaagagaa

SEQ ID NO: 686023 - DNA, 75 bp, synthetic construct
  source 1..75: mol_type = other DNA
atgttgatgcaaatattcatcgttatagagataatgggttattaaaattctggtttcgtggcattgaaaaaaatg

SEQ ID NO: 686024 - DNA, 75 bp, synthetic construct
  source 1..75: mol_type = other DNA
atgttgtggacgccctacaagggaatttcccgtatgcaacagacccggcgggaaaccggctgccggacccggaac

SEQ ID NO: 686025 - DNA, 75 bp, synthetic construct
  source 1..75: mol_type = other DNA
tccaggcaacagatacaggacgccagaatttaatccgacacaggaagatcgggaccgtgccgaaatgatgtgccg

SEQ ID NO: 686026 - DNA, 75 bp, synthetic construct
  source 1..75: mol_type = other DNA
gcaattgttgttgtttttttattgagccttaaaaatagaaggaaatataaatttgcttggcggatgaaatatata

SEQ ID NO: 686027 - DNA, 75 bp, synthetic construct
  source 1..75: mol_type = other DNA
tattaatattttatatctgcttttattatgtcatgagattgctccaaggtaacataaaaaacattttatgcataa

SEQ ID NO: 686028 - DNA, 75 bp, synthetic construct
  source 1..75: mol_type = other DNA
ctaaggctaatgggaaacaaggtgttcttgatgagttagatgctatcagggatgacctgctttttaatagactaa

SEQ ID NO: 686029 - DNA, 75 bp, synthetic construct
  source 1..75: mol_type = other DNA
acgccttatccgacctacaaaaaccacgctacatcaggctattacgctgtctggcgtaggcctgataagacgcgg

SEQ ID NO: 686030 - DNA, 75 bp, synthetic construct
  source 1..75: mol_type = other DNA
atgtcgaaagtctgcataattgcctgggtttacgggcgagttcagggcgtaggatttcgctacaccacgcagtac

SEQ ID NO: 686031 - DNA, 75 bp, synthetic construct
  source 1..75: mol_type = other DNA
ttatttttcacgtaacgctgataatattatagttggaaaagtttttgggcaatatgttttaggtaattatgcatt

SEQ ID NO: 686032 - DNA, 75 bp, synthetic construct
  source 1..75: mol_type = other DNA
ctgaggcatttacagcatctaatggtaataaatataggttagtttctcaaggtggtcagagattcactctgaagg

SEQ ID NO: 686033 - DNA, 75 bp, synthetic construct
  source 1..75: mol_type = other DNA
atttaataagcaagattaagctaaatggcatgacaccagatggtaatagtatgccaattaacaaatgttttcttg

SEQ ID NO: 686034 - DNA, 75 bp, synthetic construct
  source 1..75: mol_type = other DNA
agatcctcgactacctggcagaaaacgaatcaatcaccgcacgacaagtcgcaaatctcgtttatggtggcaatg

SEQ ID NO: 686035 - DNA, 75 bp, synthetic construct
  source 1..75: mol_type = other DNA
gcactcagcctgcccgcagacaccggctacccggacccgcgcggggaactggacccggaagccgaccccggcctg

SEQ ID NO: 686036 - DNA, 75 bp, synthetic construct
  source 1..75: mol_type = other DNA
cgcgctaaaagcgattctgacgcatttttttatgtttaccctgtgtttccttgtctttttgcgttttttgcgtca

SEQ ID NO: 686037 - DNA, 75 bp, synthetic construct
  source 1..75: mol_type = other DNA
atgcgacgccaggcgtcttatccgacctacagttcagtacatcccgtaggcctgataagtcgcgtcagcggcgca

SEQ ID NO: 686038 - DNA, 75 bp, synthetic construct
  source 1..75: mol_type = other DNA
acatcgaaatgttttataacagtaagcgtcggcatggttccagcgatcagatgtcaccgacagaatatgaaaacc

SEQ ID NO: 686039 - DNA, 75 bp, synthetic construct
  source 1..75: mol_type = other DNA
cgggcagtccaccgtggcggcgctgagcctggcgcgcctgtgctatgataccctgctggcggaaggcgaaaaggc

SEQ ID NO: 686040 - DNA, 75 bp, synthetic construct
  source 1..75: mol_type = other DNA
ccggtaacgcctgaaagcgtacatgccgctattttgacggcagacctgctgggacagcagtggctggcgcgttaa

SEQ ID NO: 686041 - DNA, 75 bp, synthetic construct
  source 1..75: mol_type = other DNA
gcaggggcgcatgcgatccacaacggctttacgattctggaagagtgccaccatttgtaccacggtgaaaaagtc

SEQ ID NO: 686042 - DNA, 75 bp, synthetic construct
  source 1..75: mol_type = other DNA
ctgcgtcccatgaccccttccacggacagactggtatcagtccgcagattgatttcggtaacgctattaataccg

SEQ ID NO: 686043 - DNA, 75 bp, synthetic construct
  source 1..75: mol_type = other DNA
cttaacatgcgtaaaaaacagtacaactactatcgtgaccagttgttgagttttaaagagggtgaggttgagtgg

SEQ ID NO: 686044 - DNA, 75 bp, synthetic construct
  source 1..75: mol_type = other DNA
ccagggtattcagcaacagtggcaaatgaaacgggagatgctctcacctcgatacaccacacgctatgctgatct

SEQ ID NO: 686045 - DNA, 75 bp, synthetic construct
  source 1..75: mol_type = other DNA
ggtctgcaaaatattcgtggacgttaccatcaatggatgaacgagctgcctgagcgcgttagccataaaacatag

SEQ ID NO: 686046 - DNA, 75 bp, synthetic construct
  source 1..75: mol_type = other DNA
gaagttatcccgccgtattactcggtgaaagaagtggtgctgccgttcaataaattccccggcgttgacccgctg

SEQ ID NO: 686047 - DNA, 75 bp, synthetic construct
  source 1..75: mol_type = other DNA
ggcaacctggcgataccgcgagtgggtcaggaggtgattgtggacttcctcaacggcgacccggaccagccgatt

SEQ ID NO: 686048 - DNA, 75 bp, synthetic construct
  source 1..75: mol_type = other DNA
gcatcggggatatcgtggatattggcggtgtggcaggccaagtcgaagagatgacgttgcgctatgtgcgcctgc

SEQ ID NO: 686049 - DNA, 75 bp, synthetic construct
  source 1..75: mol_type = other DNA
cacacaacggtttttacagcgatctcgttgtaaaagcatcgcgccagaaaaatagttttcacgtactggacagtc

SEQ ID NO: 686050 - DNA, 75 bp, synthetic construct
  source 1..75: mol_type = other DNA
gtggggataaacgtctctctgatgtaatgccgttgtatgtcggtctgtatattggctcaacacatgcatcgccgg

SEQ ID NO: 686051 - DNA, 75 bp, synthetic construct
  source 1..75: mol_type = other DNA
tccgatgtgaaaattggcactctaaccactatcttaacttctggagctgaagcgtctgtggcagctggaaatgtc

SEQ ID NO: 686052 - DNA, 75 bp, synthetic construct
  source 1..75: mol_type = other DNA
gggtttacgggcgagttcagggcgtaggattccgctacaccacgcagtacgaagcgaaaaaacagggactaaccg

SEQ ID NO: 686053 - DNA, 75 bp, synthetic construct
  source 1..75: mol_type = other DNA
cgtgtttgtgaaaacatcgccgttcgccgtaaatgagccctactacggtaatctggccagtgaaaaactgctcat

SEQ ID NO: 686054 - DNA, 75 bp, synthetic construct
  source 1..75: mol_type = other DNA
acccctcaagataagaaactaagaatcaatgagattgagaagcaaataactgcctttgcgaagagccgaatactt

SEQ ID NO: 686055 - DNA, 75 bp, synthetic construct
  source 1..75: mol_type = other DNA
aagcctcggacgcatcgctggcagtttactgggagccattgcggcactgcttcttgccgggcatacgctcaatga

SEQ ID NO: 686056 - DNA, 75 bp, synthetic construct
  source 1..75: mol_type = other DNA
cacgatccttataactcccgggtatttggaatggataacgcccacggaataaagccaccaaagaaagggaaattt

SEQ ID NO: 686057 - DNA, 75 bp, synthetic construct
  source 1..75: mol_type = other DNA
gaaaatggtgaaacaaaaaaagaagtccaaatattaacgaaagcgcagtgggtgatctattttattctacctctc

SEQ ID NO: 686058 - DNA, 75 bp, synthetic construct
  source 1..75: mol_type = other DNA
tctttctctgatgctctttcacgcctgaatgcactggattcgactcttgcagcgaatttcgaggaacagggggct

SEQ ID NO: 686059 - DNA, 75 bp, synthetic construct
  source 1..75: mol_type = other DNA
gtaggcaatggggtaaataacctgaatattcagatcaacccaggagagagtaaagccacgatccctttgacggct

SEQ ID NO: 686060 - DNA, 75 bp, synthetic construct
  source 1..75: mol_type = other DNA
ccactatcttaacttctggagctgaagcgtctgtggcagctggaaatgtccgttcaaagtttaatctctttgctg

SEQ ID NO: 686061 - DNA, 75 bp, synthetic construct
  source 1..75: mol_type = other DNA
ctttctatgcctcttgtgaaaccgtatttcgcccggacctgaaaggccgacctgtagtcgttttgtcaaataacg

SEQ ID NO: 686062 - DNA, 75 bp, synthetic construct
  source 1..75: mol_type = other DNA
aatcttttgccggagcggatcgaactggttacacggttacatcaacatataacagacgatcttgctggcggtgga

SEQ ID NO: 686063 - DNA, 75 bp, synthetic construct
  source 1..75: mol_type = other DNA
aaatcttgttaaccaaagatattctggaacgatataaaatttcacgaagcactctgtatttctggagtactccag

SEQ ID NO: 686064 - DNA, 75 bp, synthetic construct
  source 1..75: mol_type = other DNA
ttttttatcaagggctgctgtaggtgtttatactagtgcaagtacctttattgttggcagttttgcagggttaaa

SEQ ID NO: 686065 - DNA, 75 bp, synthetic construct
  source 1..75: mol_type = other DNA
gaactggtgcggctgctggacaggctggaggaagaaatccgggcagaccgcgtgagcagtgaaagccgggcgtgg

SEQ ID NO: 686066 - DNA, 75 bp, synthetic construct
  source 1..75: mol_type = other DNA
tacgacccgctgggacggcgaatggcgaaacgggtatggcggcgggagcgtgacctgacggggtggatgtcgctg

SEQ ID NO: 686067 - DNA, 75 bp, synthetic construct
  source 1..75: mol_type = other DNA
actggcacccgatggtatgttactggatatcaaacctgaaggtggcgatcccgcactttgtcaggctgcgttggc

SEQ ID NO: 686068 - DNA, 75 bp, synthetic construct
  source 1..75: mol_type = other DNA
caacggcaacttaggcatgggttacgaactggatgccattgcagcggtgatcctcggcggcaccagttttgtcgg

SEQ ID NO: 686069 - DNA, 75 bp, synthetic construct
  source 1..75: mol_type = other DNA
agaatcatcgacagaatctgttggtatcggtgcaggtgttgacgcttcagttatgactctggcttgtagaacgtg

SEQ ID NO: 686070 - DNA, 75 bp, synthetic construct
  source 1..75: mol_type = other DNA
ttaatgaagagaacccgtattacctgcaccagccataccgtctgccggggcagcagcatgatgaggaatcagggc

SEQ ID NO: 686071 - DNA, 75 bp, synthetic construct
  source 1..75: mol_type = other DNA
tgaagctgcagcgcgcgccgctgatgtagagcatcgtcgcgctattaatgcctctgctgttcaggctctgatcga

SEQ ID NO: 686072 - DNA, 75 bp, synthetic construct
  source 1..75: mol_type = other DNA
gtggtacgcagaatacgatgaatggggtaaccagctgaatgaagagaacccgcaccagctgcagcagctcatccg

SEQ ID NO: 686073 - DNA, 75 bp, synthetic construct
  source 1..75: mol_type = other DNA
atggcggtcactgatgtggatttcgagctaaagatagagtctggagctaacttggttgatatggagtatggcttg

SEQ ID NO: 686074 - DNA, 75 bp, synthetic construct
  source 1..75: mol_type = other DNA
actaaaaacaatggcgcatcaggggccgatatcaataactatgccgggcagattaaatctgctatcgaaagtaag

SEQ ID NO: 686075 - DNA, 75 bp, synthetic construct
  source 1..75: mol_type = other DNA
gatgtgcgtttcatcatgatcgacccgaaaatgctggagctttcggtttatgaaggcattccgcatctgttaacg

SEQ ID NO: 686076 - DNA, 75 bp, synthetic construct
  source 1..75: mol_type = other DNA
tgaccgggtgagtgaggaaagccgccgctggctggcatcgtgcggcctgaccgtggagcagatgcaaaaccagat

SEQ ID NO: 686077 - DNA, 75 bp, synthetic construct
  source 1..75: mol_type = other DNA
gaatctactgattggtctattcggcgctgtgcgcaatccactagcccatgcgcctaagaagaattggcccatgtc

SEQ ID NO: 686078 - DNA, 75 bp, synthetic construct
  source 1..75: mol_type = other DNA
gagtgttttaaaagatctttgggcgcagatatacttattttcaatcggctcagcatttatagttataccattaat

SEQ ID NO: 686079 - DNA, 75 bp, synthetic construct
  source 1..75: mol_type = other DNA
atgcgttctttatatttatttatttcttctgtttctaacttgttatttattgttctcattcagttaataacacta

SEQ ID NO: 686080 - DNA, 75 bp, synthetic construct
  source 1..75: mol_type = other DNA
atgcgttctttatatttatttattttttctgtttctaacttattatttattgttcttattcagttaataacactg

SEQ ID NO: 686081 - DNA, 75 bp, synthetic construct
  source 1..75: mol_type = other DNA
acaataccgtcgctgtgacggtcagggatgtgcatcaaaatttattgcagggacaaaatgttaccttcacggtcg

SEQ ID NO: 686082 - DNA, 75 bp, synthetic construct
  source 1..75: mol_type = other DNA
cagtgcaacggtcgcttcgactgtcatcacaaggccggacggcacggtggagatcagtgtcaccagccagacggc

SEQ ID NO: 686083 - DNA, 75 bp, synthetic construct
  source 1..75: mol_type = other DNA
ggcggtttgttcctcgccattcttggtgtgattggctttctcaccggtgtttactcgattggctacatgcgtcat

SEQ ID NO: 686084 - DNA, 75 bp, synthetic construct
  source 1..75: mol_type = other DNA
aagagctgatagcacgtctggcgcaaaaagcccgtgccgcgggtatccacctcgtactggcaactcagcgtccat

SEQ ID NO: 686085 - DNA, 75 bp, synthetic construct
  source 1..75: mol_type = other DNA
tgcgcaattgtcagactgaagacaaatggggtgatcagggatttctcggtagcatcataaaaccagccctatggc

SEQ ID NO: 686086 - DNA, 75 bp, synthetic construct
  source 1..75: mol_type = other DNA
tgaactggatgcgctggacatccttacgttggtttctcttattcatcgcaagctggatggcacacacaaaaaata

SEQ ID NO: 686087 - DNA, 75 bp, synthetic construct
  source 1..75: mol_type = other DNA
gcttttttcggcctgttgccggctgaccctgaagccgctgaggctgttgttcgtgagcacatgcagtcccctgaa

SEQ ID NO: 686088 - DNA, 75 bp, synthetic construct
  source 1..75: mol_type = other DNA
tatgtgattcaatttttggagaagagaattatagaaactcaatctattggcatagaacctacgcagggaaaactg

SEQ ID NO: 686089 - DNA, 75 bp, synthetic construct
  source 1..75: mol_type = other DNA
gtaattatggtgatttaaatattaaaactctggcttttgactcttttaaagaaaggcttgagtctaccatggcgg

SEQ ID NO: 686090 - DNA, 75 bp, synthetic construct
  source 1..75: mol_type = other DNA
attaaaaccattgccgccagcctgcgtcgtcaggggctgcgggcgaaagccagccggaagttcagcccggtcagc

SEQ ID NO: 686091 - DNA, 75 bp, synthetic construct
  source 1..75: mol_type = other DNA
tgcgcgattacgttgtgacgttctgcaaattccagacaaagcggctctggagcgttacggatgacacgatcagaa

SEQ ID NO: 686092 - DNA, 75 bp, synthetic construct
  source 1..75: mol_type = other DNA
ttgctgggtaagatcaaactgcgtctctaccctaatattatggtggaggacaccgcgcatacgattaataaaaaa

SEQ ID NO: 686093 - DNA, 75 bp, synthetic construct
  source 1..75: mol_type = other DNA
caaatatgacattcctgaaaaaatgattaggaaccaaataaaatacacattaaaccaacgattatctgaaagtaa

SEQ ID NO: 686094 - DNA, 75 bp, synthetic construct
  source 1..75: mol_type = other DNA
catcttgagaaaaacctcagaggccttgaacaaacaattaatatagtcaataagtccgaactaaagaaaaacttt

SEQ ID NO: 686095 - DNA, 75 bp, synthetic construct
  source 1..75: mol_type = other DNA
ccgtaaacaccgactggagtttgacgctggatggacggatctggcgcaggcatttatggcgatccgcaaaaccct

SEQ ID NO: 686096 - DNA, 75 bp, synthetic construct
  source 1..75: mol_type = other DNA
cctacttctccacgccgtccagcatcacccatgaagcctataagttctggacagggcaactgttcaacaagggca

SEQ ID NO: 686097 - DNA, 75 bp, synthetic construct
  source 1..75: mol_type = other DNA
gagcgagcgaacggcagttataaggttatgctggaacgagaaggtaaaacactagctggaatcaaacgcttaaaa

SEQ ID NO: 686098 - DNA, 75 bp, synthetic construct
  source 1..75: mol_type = other DNA
tcattgtgcctggctccagcgtccggatttagtcagcctcggcggacagaagaactttgccgcattaatgacgat

SEQ ID NO: 686099 - DNA, 75 bp, synthetic construct
  source 1..75: mol_type = other DNA
atttatgttctgaccgatggtcaggtgaaaacccgctggtatcagtcccgcgatgtggccggtaaaaccattaaa

SEQ ID NO: 686100 - DNA, 75 bp, synthetic construct
  source 1..75: mol_type = other DNA
ggtacggcgggcggtaccagcaccttcacggtgaatatcgcaccaaccggcgcaaccaacaaagacttcactgta

SEQ ID NO: 686101 - DNA, 75 bp, synthetic construct
  source 1..75: mol_type = other DNA
gacggtgaaccgcgtcgccgccggcagcgcgcagatcgtcattaacaccgaagacggtaattttgttgcaaccca

SEQ ID NO: 686102 - DNA, 75 bp, synthetic construct
  source 1..75: mol_type = other DNA
tcggtaacctcagatgctgatgacggcggcggctatgtcgaaaccatcatcaccaacagtgacttcaccctgagc

SEQ ID NO: 686103 - DNA, 75 bp, synthetic construct
  source 1..75: mol_type = other DNA
gcacgattgccggttcggtgcatgttgacgctgtaaacaatggtggcgaaggcgacggtatacaggcttatacgg

SEQ ID NO: 686104 - DNA, 75 bp, synthetic construct
  source 1..75: mol_type = other DNA
ggatcaggctagaactaaaatcgcccagattgccgaaagccgccagctcaccgtcgcagagatggaagaccggtt

SEQ ID NO: 686105 - DNA, 75 bp, synthetic construct
  source 1..75: mol_type = other DNA
aaagttgggagctggggctttactacatgggtgaagaaggctggctggaaggggttgaatccagcgttaccgttt

SEQ ID NO: 686106 - DNA, 75 bp, synthetic construct
  source 1..75: mol_type = other DNA
ccagcatttttttcagcgtcggcccggacaatatgggccgccatctctggcgactggtgaagccacagtttttgt

SEQ ID NO: 686107 - DNA, 75 bp, synthetic construct
  source 1..75: mol_type = other DNA
ccaaaaggccgcgacatacttcgcgaagcgcctgaaatgaagtatgtctttattgaaaaacatcaggctgagttc

SEQ ID NO: 686108 - DNA, 75 bp, synthetic construct
  source 1..75: mol_type = other DNA
ccgccttgctgacgaactgccggagttcaatattaaaaccattgccgccagcctgcgtcgtcaggagctgcgggc

SEQ ID NO: 686109 - DNA, 75 bp, synthetic construct
  source 1..75: mol_type = other DNA
caaaaaacagcaaaggctggatgaacagtacctatggtggcggctggtatatgtccgattcgtcctggttgcgca

SEQ ID NO: 686110 - DNA, 75 bp, synthetic construct
  source 1..75: mol_type = other DNA
accctaacgtcgccaatcgcaacaaaggcccacgccgtcagcctgaaaagaatgttttcaccgatgaccagattg

SEQ ID NO: 686111 - DNA, 75 bp, synthetic construct
  source 1..75: mol_type = other DNA
cggagaaattacgcactgaagcactgcaacaacgcctgacaaatttgcgagcactagctgacgtgatcgatctct

SEQ ID NO: 686112 - DNA, 75 bp, synthetic construct
  source 1..75: mol_type = other DNA
gagaagagaatatccgccgggaagctgctgaacaggccaggctcgaagctgaacaaaaagcgaaagctgaaattg

SEQ ID NO: 686113 - DNA, 75 bp, synthetic construct
  source 1..75: mol_type = other DNA
gcagagtaatcgcagatctgatagcccaaggcattcccgaagaattcgcgcagaaagcaatgttggctatcgctg

SEQ ID NO: 686114 - DNA, 75 bp, synthetic construct
  source 1..75: mol_type = other DNA
aggcctacgacattatcagccaccaccgtctggagtttgacgccgggcacaccgacattgcgcagtcattcatgg

SEQ ID NO: 686115 - DNA, 75 bp, synthetic construct
  source 1..75: mol_type = other DNA
ccgtggaagatgcggtgcgctgcggctgtaacctgttcgacctcgaccagctacgcatggagtacagcccggacg

SEQ ID NO: 686116 - DNA, 75 bp, synthetic construct
  source 1..75: mol_type = other DNA
caataccgcagcgccccttatcggcattaacagcattgcgggcgatgatgtgattaacgccagcgaaaaaggggc

SEQ ID NO: 686117 - DNA, 75 bp, synthetic construct
  source 1..75: mol_type = other DNA
tccggcaactggagcgtcggcgttccggcggtggatgtcacggcgctgggcagcggctcgcaaactgttaccgcc

SEQ ID NO: 686118 - DNA, 75 bp, synthetic construct
  source 1..75: mol_type = other DNA
ggtggatctcaccgttccggtacttaccatcaacaccattgcgggcgatgacattattaacgctgccgaacacgg

SEQ ID NO: 686119 - DNA, 75 bp, synthetic construct
  source 1..75: mol_type = other DNA
catgcgatttcgataatgttaactattgtcacgaacggtgcaatagtgatccacacccaacgcctgaaatcagat

SEQ ID NO: 686120 - DNA, 75 bp, synthetic construct
  source 1..75: mol_type = other DNA
agaacgcgttgcgtagtgcctatgacaatgacaccacgtatggctttaaagttatttttccgtcaggcaacggat

SEQ ID NO: 686121 - DNA, 75 bp, synthetic construct
  source 1..75: mol_type = other DNA
aaggtatggtactgaattacaacggcaaattgctgctggttaaggatattgatattcagtctcccaccgcccgtg

SEQ ID NO: 686122 - DNA, 75 bp, synthetic construct
  source 1..75: mol_type = other DNA
tgaacgcaaaaggatgctgctacgataatacctgcgtggaaagcttctttcatccgctgaaagtggaatatctcc

SEQ ID NO: 686123 - DNA, 75 bp, synthetic construct
  source 1..75: mol_type = other DNA
ggtcaaaacagcgttacggtgcaccacgcctgacggatgaactgcgtgctcagggttacccctttaacgtaaaaa

SEQ ID NO: 686124 - DNA, 75 bp, synthetic construct
  source 1..75: mol_type = other DNA
acgggcaggcgctggtgatcaccggcggcagtagcggcctgaatgcaggtgctgtgctgacggttaccatcaaca

SEQ ID NO: 686125 - DNA, 75 bp, synthetic construct
  source 1..75: mol_type = other DNA
tcaccgccagcctgagcgatcgcgcgggcaacagcgacagcactacccataatgtgaccgttgatctcagcggcc

SEQ ID NO: 686126 - DNA, 75 bp, synthetic construct
  source 1..75: mol_type = other DNA
taagcggcagcaccagcggtgtcgaagccgggcagacggtgaccgtcacctttggcggcaaaaattacaccacta

SEQ ID NO: 686127 - DNA, 75 bp, synthetic construct
  source 1..75: mol_type = other DNA
ggctatcctccaaaaggccgcgacatacttcgcgaagcgcctgaaatgaagtatgtctttattgaaaaacatcag

SEQ ID NO: 686128 - DNA, 75 bp, synthetic construct
  source 1..75: mol_type = other DNA
atggccacggagttatttaatacagtcgtaacctacagccaaaatgaaaaagttaaagagatggctactgcttat

SEQ ID NO: 686129 - DNA, 75 bp, synthetic construct
  source 1..75: mol_type = other DNA
cgtgcttaagcaggccaaagcctttatggacgtgccgcctccgcagggggaagatgactttggcaacctgcaact

SEQ ID NO: 686130 - DNA, 75 bp, synthetic construct
  source 1..75: mol_type = other DNA
tcttacttctttgtagtcatgcttgtacagcagatataccgacagaaataagtgaaaatttaacagtaagagtca

SEQ ID NO: 686131 - DNA, 75 bp, synthetic construct
  source 1..75: mol_type = other DNA
tgtacagatgtttttgacctgacgcgtgcagaaatagaaggtcgcaagcaagccatgcaggcgattgaagcgttg

SEQ ID NO: 686132 - DNA, 75 bp, synthetic construct
  source 1..75: mol_type = other DNA
atcggcggcagcggtgattttgaacgcaacgcgtatctgtcgatctttatggccccgtcgattgctaaagaaggc

SEQ ID NO: 686133 - DNA, 75 bp, synthetic construct
  source 1..75: mol_type = other DNA
gccaaaaagccgtatcaaattcgcctgctgacgggggcgtcaatcagcgccgccgctgacgatgtactttctgac

SEQ ID NO: 686134 - DNA, 75 bp, synthetic construct
  source 1..75: mol_type = other DNA
aaactaacagaaaagcaagtgcgcaggcttttggcttcaaaaacagcaaacctaatcggtcacggcttaacgttc

SEQ ID NO: 686135 - DNA, 75 bp, synthetic construct
  source 1..75: mol_type = other DNA
agtacagagcgccgcactgagcggtgtcgatagcctctactctatcgtacaaatgccgcgcggcattccggtggg

SEQ ID NO: 686136 - DNA, 75 bp, synthetic construct
  source 1..75: mol_type = other DNA
aaaccttctccggtgccggcggcggcgcgggggcgaccattatcgtatgggttgacctgtctgctgccagttctt

SEQ ID NO: 686137 - DNA, 75 bp, synthetic construct
  source 1..75: mol_type = other DNA
ttagtatttgcagtgacgttctttgttgtatttgttgagcgtggtcaacgccgcattgtggtaaactacgcgaaa

SEQ ID NO: 686138 - DNA, 75 bp, synthetic construct
  source 1..75: mol_type = other DNA
tagccgacttgaacaattcttcaacgccttctgcagggtggttctgtctatgtacatggtcaagccctccgccaa

SEQ ID NO: 686139 - DNA, 75 bp, synthetic construct
  source 1..75: mol_type = other DNA
tacgacccgctgggccgcagggtggcaaaacgggtatggcgacgtgaacgggacctgacgggctggatgtcgctg

SEQ ID NO: 686140 - DNA, 75 bp, synthetic construct
  source 1..75: mol_type = other DNA
aagcgactgggccaccatgcagttcgccgccgaaatcttcgaaatcctgaatgtcccgcaccacgttgaagtggt

SEQ ID NO: 686141 - DNA, 75 bp, synthetic construct
  source 1..75: mol_type = other DNA
acggggtatctttcgctcaacgaaggttctggcgtcgatctgaacaatgacggcaggatcgacctggttcagcac

SEQ ID NO: 686142 - DNA, 75 bp, synthetic construct
  source 1..75: mol_type = other DNA
gacggcgcagatagcgagtctggaggttacccgggataactcagtggctgacggcgcaatggcgaacacgctgcg

SEQ ID NO: 686143 - DNA, 75 bp, synthetic construct
  source 1..75: mol_type = other DNA
gatacgctatcaaccaggctatccagctgccaaatacaaaagcggaaagcatcgcctggaatgaagatcaaaaag

SEQ ID NO: 686144 - DNA, 75 bp, synthetic construct
  source 1..75: mol_type = other DNA
aacacgctgcgggcgagggtcaccgatgcgttcgggaatgcacttgccgggcagacggttagcgtgttggcaggc

SEQ ID NO: 686145 - DNA, 75 bp, synthetic construct
  source 1..75: mol_type = other DNA
aatacgcttggcggacagacggtcagcgtgacggcagacaacagtgcaacggtcactccgacggttatcaccgag

SEQ ID NO: 686146 - DNA, 75 bp, synthetic construct
  source 1..75: mol_type = other DNA
gcacggtggaaatcagtgtcaccagtcagaccgccggaaccagtacagtcactgccagcatcaacaacagcagcc

SEQ ID NO: 686147 - DNA, 75 bp, synthetic construct
  source 1..75: mol_type = other DNA
aacggtgcaactgtcgctccgacggtgattacagagccggacggcacggtggagatcagtgtcaccagccagacc

SEQ ID NO: 686148 - DNA, 75 bp, synthetic construct
  source 1..75: mol_type = other DNA
ctctataaaataatatctggtgtggcggcatatattaattcgaacattgtcacggatgcgactgtttataccgct

SEQ ID NO: 686149 - DNA, 75 bp, synthetic construct
  source 1..75: mol_type = other DNA
cctgaaaggctataacgtcgaagccaccgctctggaagctgtcggtggtaaagtggtcacaacgggtaaagatat

SEQ ID NO: 686150 - DNA, 75 bp, synthetic construct
  source 1..75: mol_type = other DNA
ccagccctggtttatctccgtcaaaggcaaccacgaagcgatggcgcttgatgcattcgaaactggcgatggaaa

SEQ ID NO: 686151 - DNA, 75 bp, synthetic construct
  source 1..75: mol_type = other DNA
atgggccgttggtgatattcatggtgactatcaattattacaatcccgcttacatcaactctctttttgccctga

SEQ ID NO: 686152 - DNA, 75 bp, synthetic construct
  source 1..75: mol_type = other DNA
ccgttaccgctgaagatacaaaaggcaactactcgcggcgcgaagaaagtatggtggtggtggccaggccacaac

SEQ ID NO: 686153 - DNA, 75 bp, synthetic construct
  source 1..75: mol_type = other DNA
cggcagggggaagtataaaagctgagctgaaaatgtcgggctggagtgaatcacaatattccaacaattatacca

SEQ ID NO: 686154 - DNA, 75 bp, synthetic construct
  source 1..75: mol_type = other DNA
tatggcgcgtggctgggtggcttcttctgcctctgcgcaggcaacggactggctcagccgttggggaactgcccg

SEQ ID NO: 686155 - DNA, 75 bp, synthetic construct
  source 1..75: mol_type = other DNA
gcgatttaggctctaccgcgggaaagtggttaggggcactggtcggatttttatttatggctctggtcggggcat

SEQ ID NO: 686156 - DNA, 75 bp, synthetic construct
  source 1..75: mol_type = other DNA
atgatgtttatgatagtctaaatttttcaagcaaagatttaacgaattcttatatgaatggaatgggaaaaaaag

SEQ ID NO: 686157 - DNA, 75 bp, synthetic construct
  source 1..75: mol_type = other DNA
gaaagtagaagagcgtttcaaaggtgatgatatcgttgacaccgtgacgctgacccgccgttacgttgacttctc

SEQ ID NO: 686158 - DNA, 75 bp, synthetic construct
  source 1..75: mol_type = other DNA
ctatatcaacggctttaccaataacggcgacggcaccttttccagcgctattcaggtcaccgtcggcaccctgac

SEQ ID NO: 686159 - DNA, 75 bp, synthetic construct
  source 1..75: mol_type = other DNA
attacacaccgacctggactaccgccagcaaaaccaccgcctgggggctgacctacggcctcgactcgcacggga

SEQ ID NO: 686160 - DNA, 75 bp, synthetic construct
  source 1..75: mol_type = other DNA
aacagtgccggaacgcaaaccagcattacccatccgctgactgttgatctcaccgccgtcgccatcagcatgaac

SEQ ID NO: 686161 - DNA, 75 bp, synthetic construct
  source 1..75: mol_type = other DNA
ggcgagggtgaccgatgcattcggtaatacgttgggcgggcagacggtcagcgtgttggcggataacggcgcaac

SEQ ID NO: 686162 - DNA, 75 bp, synthetic construct
  source 1..75: mol_type = other DNA
acggttcgacggagaacacgctgcgggtgagggtcacggatgcattcggtaatacgcttggcggacagacggtca

SEQ ID NO: 686163 - DNA, 75 bp, synthetic construct
  source 1..75: mol_type = other DNA
gcgttcgggaatgcacttgccggacagacggtcagcgtgatggcaggcaacggcgcaacggttgccccgacggtg

SEQ ID NO: 686164 - DNA, 75 bp, synthetic construct
  source 1..75: mol_type = other DNA
aacacgctgcgggtgaaggtcaccgatgcgttcgggaatgcacttgccgggcagacggtcagcgtgttggcaggc

SEQ ID NO: 686165 - DNA, 75 bp, synthetic construct
  source 1..75: mol_type = other DNA
ccgacggtaatcacagagccggacggcacggtggagatcagtgtcaccagccagaccgccggaatcagtgcggtc

SEQ ID NO: 686166 - DNA, 75 bp, synthetic construct
  source 1..75: mol_type = other DNA
ggaatgcgctgaatgggcagacggtcagcgtgttggcggataacggtgcaacggtcactccgacggtcactacag

SEQ ID NO: 686167 - DNA, 75 bp, synthetic construct
  source 1..75: mol_type = other DNA
caaaggtgctggatgtgctcccgcgccgtaattactggataactcgtgttgaggttctgggcgaggggggttaca

SEQ ID NO: 686168 - DNA, 75 bp, synthetic construct
  source 1..75: mol_type = other DNA
aaatttccttagccttgagtaagtatcctaaggtaagggatgttattaagttcttttatttatatatcgcatcat

SEQ ID NO: 686169 - DNA, 75 bp, synthetic construct
  source 1..75: mol_type = other DNA
gtcacccgctctggcgacagctatattctggttaacttctataccggagtcggaagttgccggaccctgcagatg

SEQ ID NO: 686170 - DNA, 75 bp, synthetic construct
  source 1..75: mol_type = other DNA
aagcactgactgcggatatcactttaaccgccgcgcatgtggctgcttttgccagaagggcaacggatacgtatg

SEQ ID NO: 686171 - DNA, 75 bp, synthetic construct
  source 1..75: mol_type = other DNA
gttgatttccagccgtcctgaggggcgttgcgttgctgcctgcggtgatttcgggctagttatgaaagcatattt

SEQ ID NO: 686172 - DNA, 75 bp, synthetic construct
  source 1..75: mol_type = other DNA
aagccgccatcaaactcgaatacctgaaagccagcatcagggcaaaggtggagcacccgtttagggttattaaac

SEQ ID NO: 686173 - DNA, 75 bp, synthetic construct
  source 1..75: mol_type = other DNA
cgcaccagtaacaccaggtgagatccaccgggaccttaaacgccgtattgaaaacgccattgattacaccctgaa

SEQ ID NO: 686174 - DNA, 75 bp, synthetic construct
  source 1..75: mol_type = other DNA
attttacgacatttaattcaaattgttgggatggggtatactgggtaaaaaaaaggaggcaaacaaatatccgct

SEQ ID NO: 686175 - DNA, 75 bp, synthetic construct
  source 1..75: mol_type = other DNA
gcggaatccgcggcaacgcgcgccgagacagcggcaaaacgggcagaggatattgcatccgccgtggtgcttgag

SEQ ID NO: 686176 - DNA, 75 bp, synthetic construct
  source 1..75: mol_type = other DNA
ggttttgaggaagactgggcagaagtttatacctcgaaaaatcttccaccagaaagctacccagtcggcgcacca

SEQ ID NO: 686177 - DNA, 75 bp, synthetic construct
  source 1..75: mol_type = other DNA
atggccctgaagtgtcctgaatgtgggacggttgctcacgccagaaccagtgcctatgaagctccatcggttaaa

SEQ ID NO: 686178 - DNA, 75 bp, synthetic construct
  source 1..75: mol_type = other DNA
agtaaggatgacagtgatgagctggaagatctattgctggaagtgccacgccctaggaacaataactgggctcgc

SEQ ID NO: 686179 - DNA, 75 bp, synthetic construct
  source 1..75: mol_type = other DNA
atgagctggtgagctggctgaaaggtcacaagattgaccatgcgcatatctgcatcgaagcgaccggcacctata

SEQ ID NO: 686180 - DNA, 75 bp, synthetic construct
  source 1..75: mol_type = other DNA
ttgcatcatcggcggtgccctcggtggttattgcagtaaccgcttcggccgtcgtgattcacttaagattgctgc

SEQ ID NO: 686181 - DNA, 75 bp, synthetic construct
  source 1..75: mol_type = other DNA
atttgaatttgtctcaaacttaatacctctgccatgtgatcaacgttactcatctatccagatgaagaaaataat

SEQ ID NO: 686182 - DNA, 75 bp, synthetic construct
  source 1..75: mol_type = other DNA
acgccgctgtggccattttcctgggcttccttgccagcaaggatgactgccaccgttacgagctgcaccgcctga

SEQ ID NO: 686183 - DNA, 75 bp, synthetic construct
  source 1..75: mol_type = other DNA
actgcgagccgaagaacggcggaggtacttatctggctcgttccatttgtgaacgagcggcgcgaggttccgggc

SEQ ID NO: 686184 - DNA, 75 bp, synthetic construct
  source 1..75: mol_type = other DNA
ccgactggaaactgtcaaagagattcatgacgggatggggttacatggcccgcgtatacacgaactggcgacggc

SEQ ID NO: 686185 - DNA, 75 bp, synthetic construct
  source 1..75: mol_type = other DNA
tgggcccgcaaagagacttacaacggcatcatggatatcgtgcgtgaacattccggtgcctatggtatgggcgtc

SEQ ID NO: 686186 - DNA, 75 bp, synthetic construct
  source 1..75: mol_type = other DNA
aaaaaaaagtaataaaagtggtcctgaaagcatgaatagtagcaattactgctgtgaattgtgttgtaatcctgc

SEQ ID NO: 686187 - DNA, 75 bp, synthetic construct
  source 1..75: mol_type = other DNA
tggtattggaaaaattgctacagaacaactgaagccggttattaaagaaggtagtgctgaggtaattggggcagt

SEQ ID NO: 686188 - DNA, 75 bp, synthetic construct
  source 1..75: mol_type = other DNA
ccctgtaccgtgccaccgggaacagtaccggctggcaacgttttgtgcgccgtaacggtattgttgatccgctgt

SEQ ID NO: 686189 - DNA, 75 bp, synthetic construct
  source 1..75: mol_type = other DNA
caaaattcaccaaagacccttcacagatgaccagtacagaacgtgctgaactggcagcttacttgcgtgtatatg

SEQ ID NO: 686190 - DNA, 75 bp, synthetic construct
  source 1..75: mol_type = other DNA
tcacccgcttttactggcaattgtactataatttcttaggttgcatcaccctgatgcgtggggaaacatgtatgg

SEQ ID NO: 686191 - DNA, 75 bp, synthetic construct
  source 1..75: mol_type = other DNA
atatttatcactatgatgctgatctggttgctgctttccgtgacctcggtgctgaccctgaaacagtacgcgcaa

SEQ ID NO: 686192 - DNA, 75 bp, synthetic construct
  source 1..75: mol_type = other DNA
aatcatcgcaaaaagcgaagcagacgccattgaaataaaaaaagctattgaacgtcagataatacagttgacaag

SEQ ID NO: 686193 - DNA, 75 bp, synthetic construct
  source 1..75: mol_type = other DNA
ggaagcctcacaagaacgcgtaagaaaagcttcggatggtatgcagaagtgatcaaaacgcgggggctgtcatta

SEQ ID NO: 686194 - DNA, 75 bp, synthetic construct
  source 1..75: mol_type = other DNA
aaacataatggggctcgtttaatttatattccgcttaaagccaatggatggcagagcattgcgtatgacataatt

SEQ ID NO: 686195 - DNA, 75 bp, synthetic construct
  source 1..75: mol_type = other DNA
ttggcattaattattcatgatattaatgcgcaaaacgcactgccggaggaacgcattgccaaatatttaacgtgg

SEQ ID NO: 686196 - DNA, 75 bp, synthetic construct
  source 1..75: mol_type = other DNA
tgtttgctggtaaaaaaacacaatattccagattgctgtttactctgtctcatgtgatttttctcgctggagttt

SEQ ID NO: 686197 - DNA, 75 bp, synthetic construct
  source 1..75: mol_type = other DNA
ctctggatccacaaattcgtactcatattctgcaacgtatcagcgaaattgcagtcagtcaggcagaaagttttg

SEQ ID NO: 686198 - DNA, 75 bp, synthetic construct
  source 1..75: mol_type = other DNA
gcagactatcatctcgcgtaatatcccccccttccagccagccgttatcactgttggcagtattcagtcgggcag

SEQ ID NO: 686199 - DNA, 75 bp, synthetic construct
  source 1..75: mol_type = other DNA
atgatgttctcttctggcctgagtggaatcatcagccattgtgccaggcgtgtcataaccagaaaacgaaatggc

SEQ ID NO: 686200 - DNA, 75 bp, synthetic construct
  source 1..75: mol_type = other DNA
aatcagacaaagcaaaaatgccggaaaaacaacagcaaactctcaatcgctatggctccgcgtcaaagctgtcaa

SEQ ID NO: 686201 - DNA, 75 bp, synthetic construct
  source 1..75: mol_type = other DNA
atggcacttaaatgtcctgaatgcggtacgacggcacacgccagaacctccgcctatgaagctccatcggttaaa

SEQ ID NO: 686202 - DNA, 75 bp, synthetic construct
  source 1..75: mol_type = other DNA
tgcgctgcccggcccgctgccgttcatcctttcccgcgcctacagcagttaccggaccaggacgcccgcgccggt

SEQ ID NO: 686203 - DNA, 75 bp, synthetic construct
  source 1..75: mol_type = other DNA
cgctgaaaatgccctgcgggcggtcagtctgggtcgtaaaaacttcctgttcttcggctctgaccatggtgggga

SEQ ID NO: 686204 - DNA, 75 bp, synthetic construct
  source 1..75: mol_type = other DNA
ttgaaggcaaatgcgaaaattagtgatcttgaagttcatacagtattggtaaaaacaggcggtaatgactccaac

SEQ ID NO: 686205 - DNA, 75 bp, synthetic construct
  source 1..75: mol_type = other DNA
ttgctggggaaaacaggtaagtcgttaaaaagtattgccaataaagtcatcagatgggtaacagatcctgtcgat

SEQ ID NO: 686206 - DNA, 75 bp, synthetic construct
  source 1..75: mol_type = other DNA
aacatcaccgaccctgccgggcagacgtggacacagctgtgcgatgaacgcggcctgccggtaagcctggtgtcg

SEQ ID NO: 686207 - DNA, 75 bp, synthetic construct
  source 1..75: mol_type = other DNA
gctgttatcaccctgacggacagcaatgccggttttatggatcgcttatgtgcaggcacatcgcttctgtttccc

SEQ ID NO: 686208 - DNA, 75 bp, synthetic construct
  source 1..75: mol_type = other DNA
ggtgacgcggacgaatcatgcggtgagcgacctgacgggccgcccgctgatgctctttaacagtgaaggtaaaac

SEQ ID NO: 686209 - DNA, 75 bp, synthetic construct
  source 1..75: mol_type = other DNA
aacaagctatcattaatgctaaaagaggaaacggcttcacaaatatccagaatagtatagatcctgctaaagatc

SEQ ID NO: 686210 - DNA, 75 bp, synthetic construct
  source 1..75: mol_type = other DNA
gtggtctggcgttaccgctatgacgccgatggcctctgtaccgccagggtcaacggcctggaggaaaccatcctc

SEQ ID NO: 686211 - DNA, 75 bp, synthetic construct
  source 1..75: mol_type = other DNA
gaaagaggctcagttttggtttaaatatggagtaagccctaaagtaagagaatatatagaaagcaaaggtgggaa

SEQ ID NO: 686212 - DNA, 75 bp, synthetic construct
  source 1..75: mol_type = other DNA
tccggcaggctgacgggtatcttcagcccggacggcacatcacagcgcaccggctacgacgaacgcgggcgggtg

SEQ ID NO: 686213 - DNA, 75 bp, synthetic construct
  source 1..75: mol_type = other DNA
caggccggaaacacgcagtatgactatgacgccgcaggccggatggtcatccggacaaaacaccgtgacggctac

SEQ ID NO: 686214 - DNA, 75 bp, synthetic construct
  source 1..75: mol_type = other DNA
gctgcatctaattttggtaagaaaaatatctatgattttatcaaggcaactcaatctgctatccctggcacctct

SEQ ID NO: 686215 - DNA, 75 bp, synthetic construct
  source 1..75: mol_type = other DNA
ggaagaaaatccgcttcacgtacctgtgggacggcgacagtattgcggaaatccgggaataccgcgatgataaac

SEQ ID NO: 686216 - DNA, 75 bp, synthetic construct
  source 1..75: mol_type = other DNA
aggctctggaggtgacggcgggaatacaagctttggtgatttgcttgtatgcccgggaggaaggggatcaactca

SEQ ID NO: 686217 - DNA, 75 bp, synthetic construct
  source 1..75: mol_type = other DNA
cgactcaagttggtagagcttgccaatttgcacctggattagcagccatgatttcaactaaagaaaacgaaacac

SEQ ID NO: 686218 - DNA, 75 bp, synthetic construct
  source 1..75: mol_type = other DNA
gtattgcatttagttactacgattataaagcttataatttcaatattgaaaaaacagactttgttgtcatccata

SEQ ID NO: 686219 - DNA, 75 bp, synthetic construct
  source 1..75: mol_type = other DNA
gcagtaatgtgtctgaatttagtattgctgttagtaagcattactattttgttattaaatggtgggcatttcggg

SEQ ID NO: 686220 - DNA, 75 bp, synthetic construct
  source 1..75: mol_type = other DNA
atgagtccactccggtatcagaaatggctacgtctcaatgaagtcaggcgacatcagaaatggctacgtctcaat

SEQ ID NO: 686221 - DNA, 75 bp, synthetic construct
  source 1..75: mol_type = other DNA
aaggcttttgggggttcaggtatttggatcatctgggacttatatcaaatcacctggtgtaacgaaaattatagt

SEQ ID NO: 686222 - DNA, 75 bp, synthetic construct
  source 1..75: mol_type = other DNA
aacaaactaaaccatttggaatcaatggacagaggggggagattttaccaacaactccgtcaggtgataatacag

SEQ ID NO: 686223 - DNA, 75 bp, synthetic construct
  source 1..75: mol_type = other DNA
ggtaaggaatttattgctaatttgctggcactggataatgacgatgatgaaccgcagtcctgggatgaaatgtgc

SEQ ID NO: 686224 - DNA, 75 bp, synthetic construct
  source 1..75: mol_type = other DNA
cagaatggacaagaatctggatatacgtgagctttatacatgggaaatgttaattctctccgcaggtgaaatgtc

SEQ ID NO: 686225 - DNA, 75 bp, synthetic construct
  source 1..75: mol_type = other DNA
atatctttggagagattttccagcagatcaaaaacgctggctatctagaaacttagacgtcaacacagataatgg

SEQ ID NO: 686226 - DNA, 75 bp, synthetic construct
  source 1..75: mol_type = other DNA
tattgaccgtctaaatgagagttttttatatataactacagacagctactataactttcatctatttattcacag

SEQ ID NO: 686227 - DNA, 75 bp, synthetic construct
  source 1..75: mol_type = other DNA
ttatccaaaatacgctcttatagtttcagatgatggcagcgctttgtatttgaacactgtcgatggaaatactaa

SEQ ID NO: 686228 - DNA, 75 bp, synthetic construct
  source 1..75: mol_type = other DNA
cgttctcaacattcctctatggtagcgacatgacccagcactggcgtattgccggactggagcctacgcaggtgg

SEQ ID NO: 686229 - DNA, 75 bp, synthetic construct
  source 1..75: mol_type = other DNA
atctcaacattggaacactatatacatattcttttcttggtttaaaggaagttaatatttcaacaagtggatatt

SEQ ID NO: 686230 - DNA, 75 bp, synthetic construct
  source 1..75: mol_type = other DNA
ttttattttttttagcgttgctgctatagtgataaataactgcagtgctgataaaataataaaattttattataa

SEQ ID NO: 686231 - DNA, 75 bp, synthetic construct
  source 1..75: mol_type = other DNA
gatcgagtggtgcatcttatccagcccgcaatcagtatcctgaaaaatcaggctgaaatgacaaggctgggcagg

SEQ ID NO: 686232 - DNA, 75 bp, synthetic construct
  source 1..75: mol_type = other DNA
aaccaaacggacctggcagagatctggaatcaacaaggcattgagaaaacgatggggaactgccttgtcagctta

SEQ ID NO: 686233 - DNA, 75 bp, synthetic construct
  source 1..75: mol_type = other DNA
tttgaagaatgatgatctagtcgtgtataacacgatttcatcattagcatctcgtgtttcaaatatatttggttt

SEQ ID NO: 686234 - DNA, 75 bp, synthetic construct
  source 1..75: mol_type = other DNA
ggcgccttttgtggtgacaccaccgttgttccgtcttgatggtcagcagtcgagtcgtctgcgtattgtcaggac

SEQ ID NO: 686235 - DNA, 75 bp, synthetic construct
  source 1..75: mol_type = other DNA
ggctgacgcgctgatgctgccgcttaatgcgttcaacaaactgcgcagcggtattgactgggtactggaaaagct

SEQ ID NO: 686236 - DNA, 75 bp, synthetic construct
  source 1..75: mol_type = other DNA
gtggaagggctgaaagcggcatttgcgccggtgggggaactgttcacgccacttaaaccggtgtttgactggctg

SEQ ID NO: 686237 - DNA, 75 bp, synthetic construct
  source 1..75: mol_type = other DNA
gtgatcaagcaagggttgacctgattaactcagtggggccgctaaaggctaacctcgccatgctagagcttctcg

SEQ ID NO: 686238 - DNA, 75 bp, synthetic construct
  source 1..75: mol_type = other DNA
agtgaagacggcaatacggcgtggagcgcggaatatgatgaatggggcaaccagcttaatgaggagaacccgcat

SEQ ID NO: 686239 - DNA, 75 bp, synthetic construct
  source 1..75: mol_type = other DNA
ggattgattgctgcaaacagtattactaacagtgcttaccagttcggttatgatatggatgctattgttggcgga

SEQ ID NO: 686240 - DNA, 75 bp, synthetic construct
  source 1..75: mol_type = other DNA
tggttatattccggcgaccagctcttatgcaggctatcaggcttatcagccggttacggcaccggctggccgctc

SEQ ID NO: 686241 - DNA, 75 bp, synthetic construct
  source 1..75: mol_type = other DNA
ttttgaaattacagatttgcacccgacatcttcaaatggcgatctggatgtcaccatcgacgagcgcgatggcaa

SEQ ID NO: 686242 - DNA, 75 bp, synthetic construct
  source 1..75: mol_type = other DNA
ttggcattatagtaagatatttagctgatagcgtatctcctatcaattatcagagtatagctgttaaatacttta

SEQ ID NO: 686243 - DNA, 75 bp, synthetic construct
  source 1..75: mol_type = other DNA
aagatatacgtaacatgcgccaatggttcttagatttaagagaaaaaggcacttttacatttaatttaagccctc

SEQ ID NO: 686244 - DNA, 75 bp, synthetic construct
  source 1..75: mol_type = other DNA
ttatgaaataaaaaaagcagtaaaagagaatcctattatttccatttttgattcgagattcgatcgaattgtatt

SEQ ID NO: 686245 - DNA, 75 bp, synthetic construct
  source 1..75: mol_type = other DNA
tctatccatctgaagatagagaagatagtccccaagggattgttgatgagttaaaacgatggcgagcatcgcagg

SEQ ID NO: 686246 - DNA, 75 bp, synthetic construct
  source 1..75: mol_type = other DNA
cacccagatggtagtgatttgatattctatccatctgaagatagagaagatagtccccaagggattgttgatgag

SEQ ID NO: 686247 - DNA, 75 bp, synthetic construct
  source 1..75: mol_type = other DNA
atcgcttgttattttcggaaagtattttttctggtgctcatatgttatctcaggcgttgtttttagatttcttga

SEQ ID NO: 686248 - DNA, 75 bp, synthetic construct
  source 1..75: mol_type = other DNA
ctggttattctggcgactatcccggttgcgattaaattcttcagggtaatgatgaagcgcgagcaggacggagtt

SEQ ID NO: 686249 - DNA, 75 bp, synthetic construct
  source 1..75: mol_type = other DNA
gtgccaaagagttgagacaggtaaaatcggtgatgaaggatattcatgggagaaaggaaatcccaaatacaggcc

SEQ ID NO: 686250 - DNA, 75 bp, synthetic construct
  source 1..75: mol_type = other DNA
tggatgtttttgatgacagaacaagcgaatgtctttctgaagagattaagatataccaagaatgccatgaaaaat

SEQ ID NO: 686251 - DNA, 75 bp, synthetic construct
  source 1..75: mol_type = other DNA
agtaattggtcttgatgagttatcctcaggggaaaaacaattactgattattcttggcgaaacactattgcagca

SEQ ID NO: 686252 - DNA, 75 bp, synthetic construct
  source 1..75: mol_type = other DNA
gagtcagtccaaagcggcgttagcattgaatttaagtctcccgactatcaaacgaaactggaacatcaaagaggc

SEQ ID NO: 686253 - DNA, 75 bp, synthetic construct
  source 1..75: mol_type = other DNA
actaaaggagttgctactgaagaagttgctactaaaaaagtactgctgaacaaattactgacaacgcaattattg

SEQ ID NO: 686254 - DNA, 75 bp, synthetic construct
  source 1..75: mol_type = other DNA
caaagctgtggtaataagtattaatcccataaaactagccaccaaagatgcgttgcaacagtttaaagatgtact

SEQ ID NO: 686255 - DNA, 75 bp, synthetic construct
  source 1..75: mol_type = other DNA
aaaatattgtaaagctttcaacaatcacaacaaatcaaaatgatgaggttgtaatcgaaggcattgcagtagtca

SEQ ID NO: 686256 - DNA, 75 bp, synthetic construct
  source 1..75: mol_type = other DNA
ggccacggcgcgacagaggcggcgcgacagaggcggcgcgaccggaacggtcgctgcaagccgggggttttgcgt

SEQ ID NO: 686257 - DNA, 75 bp, synthetic construct
  source 1..75: mol_type = other DNA
tcgacgttctgccgagcaaagagcaaggctgagtgctgcatctgaaattctggcacttaaattagctgagaaacg

SEQ ID NO: 686258 - DNA, 75 bp, synthetic construct
  source 1..75: mol_type = other DNA
agcaggcggctaactcagatattcgcacgtctgatattacgcctgctaccagtaccgttcaagagccaaagcgca

SEQ ID NO: 686259 - DNA, 75 bp, synthetic construct
  source 1..75: mol_type = other DNA
cgcgctgttcagtacgccagattacatctggggacggatgatggcggcctcactggtgaccgcattgccggtggt

SEQ ID NO: 686260 - DNA, 75 bp, synthetic construct
  source 1..75: mol_type = other DNA
gctgcactgttagtttgtgcaggtcttacagcaaatggtttaagtgataaaggcaaagtgtccgctggctatgct

SEQ ID NO: 686261 - DNA, 75 bp, synthetic construct
  source 1..75: mol_type = other DNA
tttcgatgaatgaggaatgtgagcttgatttgaaactaaagctgcaacgcaaatatttcaaaaaccttcgagact

SEQ ID NO: 686262 - DNA, 75 bp, synthetic construct
  source 1..75: mol_type = other DNA
tgaaaacgctattagaagtgttacctgaagaggtagtaacagaagtaacgtcaaatctgaacattactacacacg

SEQ ID NO: 686263 - DNA, 75 bp, synthetic construct
  source 1..75: mol_type = other DNA
actcgcaaacgcaggttggaaaaagtactaccagggtttcgttataacgtcgtgggcataaccttggatcaccag

SEQ ID NO: 686264 - DNA, 75 bp, synthetic construct
  source 1..75: mol_type = other DNA
aggctcgtagagagcggcctgttgttcgacgttctgccgagcaaagagcaaggctgagtgctgcatctgaaattc

SEQ ID NO: 686265 - DNA, 75 bp, synthetic construct
  source 1..75: mol_type = other DNA
aaaaatacaagcaagaattatcgcagattgtaagttttaatgacttcctgagcgttcctaagaattacagtaagg

SEQ ID NO: 686266 - DNA, 75 bp, synthetic construct
  source 1..75: mol_type = other DNA
cgaaaaacttcagtccaaacttgaaaatgaaattgacgaaatggctattttgatggagcttcagacaaataccta

SEQ ID NO: 686267 - DNA, 75 bp, synthetic construct
  source 1..75: mol_type = other DNA
atcaggaacttgttcgcaccttccctagctcatagtattttaaaattaatttgtaaggaagctgcatcagagacg

SEQ ID NO: 686268 - DNA, 75 bp, synthetic construct
  source 1..75: mol_type = other DNA
gaacgccttttaagctatggagctcgcggtacagagaccgcatttgcgctggaggaacttgttactgagttggag

SEQ ID NO: 686269 - DNA, 75 bp, synthetic construct
  source 1..75: mol_type = other DNA
gaaaaggccgcatgggatagcgtccgctccacgatgcctgacgcaaaggccagaatgtcaaatctgaacgctaca

SEQ ID NO: 686270 - DNA, 75 bp, synthetic construct
  source 1..75: mol_type = other DNA
aaccattcacttaaagaactttgatttttcaaaaaccttaacaaatattttattaatgcaaagttggataccaaa

SEQ ID NO: 686271 - DNA, 75 bp, synthetic construct
  source 1..75: mol_type = other DNA
gatttatagctgcattaatggtttatttatgccatttaaatacagactattttggtgtttttgtaaaagaaatgt

SEQ ID NO: 686272 - DNA, 75 bp, synthetic construct
  source 1..75: mol_type = other DNA
atgttagttagtaaaagcaacgaaattaacactagcgcagttttggctagcaggaattataatgaaaacaattct

SEQ ID NO: 686273 - DNA, 75 bp, synthetic construct
  source 1..75: mol_type = other DNA
atatgcgcacaatggcggaaaacggcggatttcttgatgactggcaaaaagctaatgatctgtctaaagcgaggt

SEQ ID NO: 686274 - DNA, 75 bp, synthetic construct
  source 1..75: mol_type = other DNA
aatgatgtttctaggatggcaaagtcaggtgctgggcgtcagtcaattgccagtcaggccgctaatgtgtccgaa

SEQ ID NO: 686275 - DNA, 75 bp, synthetic construct
  source 1..75: mol_type = other DNA
atggcaaagcatatgcaagacaaagaaagcatggccggaatcacctggctggctctgctgatcattgctggctgg

SEQ ID NO: 686276 - DNA, 75 bp, synthetic construct
  source 1..75: mol_type = other DNA
gtggtcaaagcgcagggcaaattgcagaacaggctggtcgtggtctggtaaacataccatttgacgtattgcagg

SEQ ID NO: 686277 - DNA, 75 bp, synthetic construct
  source 1..75: mol_type = other DNA
acgcgatgcagttggaaacgaagagttcaatcgcttagcgagggctggcattgtagcgtcgctaagcggaatggc

SEQ ID NO: 686278 - DNA, 75 bp, synthetic construct
  source 1..75: mol_type = other DNA
ttggcacagcggcaaaagctgctggagcgccagcaaagctcgcaggagacatcggttccgcaggaaacatgattg

SEQ ID NO: 686279 - DNA, 75 bp, synthetic construct
  source 1..75: mol_type = other DNA
ccttgcggtgatgaatacaacgccttgcaagaaatacttagcactacacctggcgtattctggaaacctcgaaaa

SEQ ID NO: 686280 - DNA, 75 bp, synthetic construct
  source 1..75: mol_type = other DNA
agatcagtggcgtgacgggggcagacggcacggcaaactttactgttcgccaggacaatacgccgggttataaaa

SEQ ID NO: 686281 - DNA, 75 bp, synthetic construct
  source 1..75: mol_type = other DNA
tctggcaggaagtaccgggcagcaccacgcggctgatgtgtctaaccgcagcgaagcgcaaaaaccagacagtac

SEQ ID NO: 686282 - DNA, 75 bp, synthetic construct
  source 1..75: mol_type = other DNA
agacctggggtatttaacctgtcagactaccgcgaatccgccggtgaactcgattgagctgacatcaacgcaaac

SEQ ID NO: 686283 - DNA, 75 bp, synthetic construct
  source 1..75: mol_type = other DNA
tgcgggcatgccgcaggtcactgccgctcaggttctccaccgtcacacccggtgggattgttgggtttctcatcg

SEQ ID NO: 686284 - DNA, 75 bp, synthetic construct
  source 1..75: mol_type = other DNA
acgaagcaggctattggcataacacagatccggctgcgtattcctatagagattaccagaatggtaaggctgtga

SEQ ID NO: 686285 - DNA, 75 bp, synthetic construct
  source 1..75: mol_type = other DNA
gaactctataaaacctggactatatgcgcgtggtctggtggcttagggccaaagcacaaacagggggatggtaaa

SEQ ID NO: 686286 - DNA, 75 bp, synthetic construct
  source 1..75: mol_type = other DNA
tcactattcacctgcaagactgcatgttgagccagggtggaaccacttattcaaaagcgaaggttactttcacca

SEQ ID NO: 686287 - DNA, 75 bp, synthetic construct
  source 1..75: mol_type = other DNA
actgactcaccatctgggacatgaaaaaaatcagcccaaatcgggaaccaactcccgtaatggctattccacgaa

SEQ ID NO: 686288 - DNA, 75 bp, synthetic construct
  source 1..75: mol_type = other DNA
ataagccttctgtaattaatcaaactttacaacggcctgatgtatttgaagattataaacagcataaagaaaaaa

SEQ ID NO: 686289 - DNA, 75 bp, synthetic construct
  source 1..75: mol_type = other DNA
ttttcaccgtacccaccagcccggatactgacaaggcgaagatgtggggtcacatgccggaaacactgactgcgg

SEQ ID NO: 686290 - DNA, 75 bp, synthetic construct
  source 1..75: mol_type = other DNA
atgagcaacgatttcactcaggcgcaggcccccccctggcgttacggttttctgaacctgatgcgccgcgtggat

SEQ ID NO: 686291 - DNA, 75 bp, synthetic construct
  source 1..75: mol_type = other DNA
taccccgggcaacgtttacgctcaggctgactataagattgaaccgccccgggtttcctggagagtgttttatct

SEQ ID NO: 686292 - DNA, 75 bp, synthetic construct
  source 1..75: mol_type = other DNA
acagggtatctgcggcacaagtgccaaacacaaggccgcaaagacgaatttccggaagtcggagtcagccatagt

SEQ ID NO: 686293 - DNA, 75 bp, synthetic construct
  source 1..75: mol_type = other DNA
aacccggcactgccgcaggcgtggcacacgcttgcgggaacgttgccctgttgcgccatctcgccagagatctcc

SEQ ID NO: 686294 - DNA, 75 bp, synthetic construct
  source 1..75: mol_type = other DNA
gcgacaagcaggtcaaagtcggaggatatcgcatcgagctgggcgaaatcgaaagcgcgctcagccagctggcgg

SEQ ID NO: 686295 - DNA, 75 bp, synthetic construct
  source 1..75: mol_type = other DNA
tgattcggtattcggtgaacaccaaatccgtccctgtctgcgaggtcgttccagccgctggcgagtttacagccc

SEQ ID NO: 686296 - DNA, 75 bp, synthetic construct
  source 1..75: mol_type = other DNA
gggtcatattgctactggataatacgggaaatttggtatcggaggcgcagcctcactttgatataatcatcaaag

SEQ ID NO: 686297 - DNA, 75 bp, synthetic construct
  source 1..75: mol_type = other DNA
taagtcttatgggatagtttatattccatgggccttggttttatcaaatgtcttctgtatttttcttttgtattt

SEQ ID NO: 686298 - DNA, 75 bp, synthetic construct
  source 1..75: mol_type = other DNA
cctcctgtttttttcgtggcattattaggagagaaatatgagttcattggcacatatgtaacaatatttacattc

SEQ ID NO: 686299 - DNA, 75 bp, synthetic construct
  source 1..75: mol_type = other DNA
cagaagcagcgaaaccaaacgccagttataaagactatgttctgggtaacggcgatgacggcgtcgaaaaaacac

SEQ ID NO: 686300 - DNA, 75 bp, synthetic construct
  source 1..75: mol_type = other DNA
actcggatgtccggtggtgggcaagttgaagaactgcgccgtgcgctggaaatatcaggcgcccgggtgattatt

SEQ ID NO: 686301 - DNA, 75 bp, synthetic construct
  source 1..75: mol_type = other DNA
atatggaaatgaagcaatctattttaattatcaatctggcgcgtattatcataatcaaggaacccccgcatggaa

SEQ ID NO: 686302 - DNA, 75 bp, synthetic construct
  source 1..75: mol_type = other DNA
ttgaacctgaatggcggttttctgcagtattacaataattactcaaacgctcaaaactttaccgccacatcttac

SEQ ID NO: 686303 - DNA, 75 bp, synthetic construct
  source 1..75: mol_type = other DNA
gcatcttggtttgcgcgagcaattcactgaaggaaaaactcaggcgcaatgggcagagctgcactatcagcaaat

SEQ ID NO: 686304 - DNA, 75 bp, synthetic construct
  source 1..75: mol_type = other DNA
aaaaaatttcctgggatgaagcgacagcattaatcgctgctgaattaaaacgtatcactgaaaaatatggccgag

SEQ ID NO: 686305 - DNA, 75 bp, synthetic construct
  source 1..75: mol_type = other DNA
gagggcgctaacccctgcacgccatctgttgatgttgtcatttcaaaggcgatcattgaactactcagcacgggt

SEQ ID NO: 686306 - DNA, 75 bp, synthetic construct
  source 1..75: mol_type = other DNA
gtatgattctgttataaaaacaaatgcaagcgatgaggttttgaataatattcagaaaaaatatgatgagtcaat

SEQ ID NO: 686307 - DNA, 75 bp, synthetic construct
  source 1..75: mol_type = other DNA
cgttgtgtttgagcagtggctagacgagttggttagctggcgtttgtccggcctgcggtctggcactgacgaaca

SEQ ID NO: 686308 - DNA, 75 bp, synthetic construct
  source 1..75: mol_type = other DNA
accggatgccgccaggcagccgggagccgaagcgtgtccccgcctccgggcgtcagaacaacagaaacaacaaaa

SEQ ID NO: 686309 - DNA, 75 bp, synthetic construct
  source 1..75: mol_type = other DNA
cacgccggccccaaccctaaatacttcaaggaaggacgtggagttacatggtacaacctgatatctgaccagtat

SEQ ID NO: 686310 - DNA, 75 bp, synthetic construct
  source 1..75: mol_type = other DNA
gcttttatattattcgaggcaacttcgaggaagttgatcttaaaccaataggcttgattgttagtttactgttag

SEQ ID NO: 686311 - DNA, 75 bp, synthetic construct
  source 1..75: mol_type = other DNA
atgcttgacaacttaataggggcaccccccgccgaggcggcacttagcgctcagcgcgtacccggcgcaaaattt

SEQ ID NO: 686312 - DNA, 75 bp, synthetic construct
  source 1..75: mol_type = other DNA
ttcaacgtcttcttcgtttacgcggtttactgtggcctgacattcttcattccattcctgaaaaacatctatcta

SEQ ID NO: 686313 - DNA, 75 bp, synthetic construct
  source 1..75: mol_type = other DNA
cactcactggtttcagagaatatgtcatctgtctgggtgaaatggcctgttaaaaacctgcaatcgaggaaagaa

SEQ ID NO: 686314 - DNA, 75 bp, synthetic construct
  source 1..75: mol_type = other DNA
gtcagagactttgtacgtcaaaatcctcgaatgcgaagtgtggagcatcagattaccagtgcaatgcctggttag

SEQ ID NO: 686315 - DNA, 75 bp, synthetic construct
  source 1..75: mol_type = other DNA
gcaactgccgccagctggtgcacgtggaaaacggcaaacactttattatacgtaatgtgaaagccagcaatatca

SEQ ID NO: 686316 - DNA, 75 bp, synthetic construct
  source 1..75: mol_type = other DNA
atgagcgtaaaaataaaaaaattaagtatagagagcctcttcgatgaacataatgttgaatggattttggacgat

SEQ ID NO: 686317 - DNA, 75 bp, synthetic construct
  source 1..75: mol_type = other DNA
taacattgagatgaagcgtgcgtcgctggagttacacaacaaaccgcaacatctttttatgcgtaatatcaatgt

SEQ ID NO: 686318 - DNA, 75 bp, synthetic construct
  source 1..75: mol_type = other DNA
tcgatccatttgggcaggaaagattatacaatagatttattcagaagataaaagatggtaagattgacgaactta

SEQ ID NO: 686319 - DNA, 75 bp, synthetic construct
  source 1..75: mol_type = other DNA
cataaggattactctcttgcaaatctggtattaagaggggtggggtatcattatggtaaaatgcctagcttatta

SEQ ID NO: 686320 - DNA, 75 bp, synthetic construct
  source 1..75: mol_type = other DNA
aaaacatagagctttcacgtatttatcaggaaatatcttggatgacgtaactcactggatgccgctaccagagcc

SEQ ID NO: 686321 - DNA, 75 bp, synthetic construct
  source 1..75: mol_type = other DNA
cgcgatgatgccgggcgtgctggcgcgtcttaagccatttaatctgccctgtattgtggtggatgacggcagcga

SEQ ID NO: 686322 - DNA, 75 bp, synthetic construct
  source 1..75: mol_type = other DNA
cgtggcttacaggcagcggcagacgcagggttcagccatgcggtgcaggtggatgctgacggtcagcacgcgatt

SEQ ID NO: 686323 - DNA, 75 bp, synthetic construct
  source 1..75: mol_type = other DNA
agatgttgagctgtatctgcaggaaagtttcactttcagtgcactcacgtcagaagccacagtaacattacttcc

SEQ ID NO: 686324 - DNA, 75 bp, synthetic construct
  source 1..75: mol_type = other DNA
ttagcttgcagcaaggcgaagaattatcacaagaatatcaggtcatcaaatacgaagaagcgccggaacaggtgc

SEQ ID NO: 686325 - DNA, 75 bp, synthetic construct
  source 1..75: mol_type = other DNA
ggctcacgcaatggttctggaagctaaccaaaataatgttattccagaatttttgcctttttttatgcagtctga

SEQ ID NO: 686326 - DNA, 75 bp, synthetic construct
  source 1..75: mol_type = other DNA
caaaagagcaaatggacatggggtaggtctgtatctatgtcgagaaaaccttgctgttgcacatcataaaatatg

SEQ ID NO: 686327 - DNA, 75 bp, synthetic construct
  source 1..75: mol_type = other DNA
atcaaagtgacgcgcggcaagaaacgcaaggacgggcaaggcaacttgccgaaccgcatcaaactgagctttaag

SEQ ID NO: 686328 - DNA, 75 bp, synthetic construct
  source 1..75: mol_type = other DNA
aaaaaatggtttctcaatccggtaacaaatgccattcacgtatatcaaatcattacgccagcaagtaacagcgcg

SEQ ID NO: 686329 - DNA, 75 bp, synthetic construct
  source 1..75: mol_type = other DNA
aactggtgacggaaccactaccacctccgccaccagtacaagaaagcgacgtaaaaccggacgccatcgatctga

SEQ ID NO: 686330 - DNA, 75 bp, synthetic construct
  source 1..75: mol_type = other DNA
accacgcttatagaatatggcgatgaattgtttgattttggtaagccatttaacaaactcaccatgcgtgaatca

SEQ ID NO: 686331 - DNA, 75 bp, synthetic construct
  source 1..75: mol_type = other DNA
ttggcggctgggaactagtatttagtcaagctaaatctgactcggctttatcagttattaaacatgctctttata

SEQ ID NO: 686332 - DNA, 75 bp, synthetic construct
  source 1..75: mol_type = other DNA
accggataagtgaagagactgaccagtatgccggaggccaccggctgaaacaggccggaaacacgcagtatgact

SEQ ID NO: 686333 - DNA, 75 bp, synthetic construct
  source 1..75: mol_type = other DNA
tgatataattaaagctgcaagtaataatcctcgtgtagctagcgatcttgaaggttgggttacttatttgcccgg

SEQ ID NO: 686334 - DNA, 75 bp, synthetic construct
  source 1..75: mol_type = other DNA
cagttagaaaatgctctctcactcaaagatagtgaatatagcgaggtttatgcagataaacaaaaatattggaaa

SEQ ID NO: 686335 - DNA, 75 bp, synthetic construct
  source 1..75: mol_type = other DNA
accggattgcaccaccagacgagcacgccgccagtgccggtggccttgccgttggcatactgggggcactgaaag

SEQ ID NO: 686336 - DNA, 75 bp, synthetic construct
  source 1..75: mol_type = other DNA
atgtttatatcatttcgaatattggttcgtttggtgaggatgtctttaaaattggcatgacccgacggctggaac

SEQ ID NO: 686337 - DNA, 75 bp, synthetic construct
  source 1..75: mol_type = other DNA
gactgacgataccagcgatgaccgcctggcacacagccccgcagaccggatgtacatgctgggcgggatgagcga

SEQ ID NO: 686338 - DNA, 75 bp, synthetic construct
  source 1..75: mol_type = other DNA
atgaaaattaaaactctggcaattgttgttctgtcggctctgtccctcagttccgcagcggctctggccgatact

SEQ ID NO: 686339 - DNA, 75 bp, synthetic construct
  source 1..75: mol_type = other DNA
gtgtcgccacagggcgaagagacccggctggcgtataccgctcaggggctgctgtcggggatattccgccaggat

SEQ ID NO: 686340 - DNA, 75 bp, synthetic construct
  source 1..75: mol_type = other DNA
gtcagccactctacagtggcagaaacaccataaactgagcggtcttgagcgggcgggaaccggggcggaaggatt

SEQ ID NO: 686341 - DNA, 75 bp, synthetic construct
  source 1..75: mol_type = other DNA
tccccgtatcccctcgcctgaaatcctggctgccggatattcaggccgtggtgcagctgcaaccggcggtggaac

SEQ ID NO: 686342 - DNA, 75 bp, synthetic construct
  source 1..75: mol_type = other DNA
agcctgtgggggctggcactcagcctgcccgcagacaccggctacccggacccgcgcggggaactggacccggaa

SEQ ID NO: 686343 - DNA, 75 bp, synthetic construct
  source 1..75: mol_type = other DNA
tcatatcagtcgagacatacttatgcctgctggtcgctgacagctggtgctaacccggcatttatagcaaaccag

SEQ ID NO: 686344 - DNA, 75 bp, synthetic construct
  source 1..75: mol_type = other DNA
caagggaatgaaaatcttgaggtcaggcataaccgtgaaatttatggcggggaacagaggagttcgttatcactg

SEQ ID NO: 686345 - DNA, 75 bp, synthetic construct
  source 1..75: mol_type = other DNA
tggtcgccagtttatttccggtggctgttctggcctggaacaccccgggagatgatttcagtggagagcttaagc

SEQ ID NO: 686346 - DNA, 75 bp, synthetic construct
  source 1..75: mol_type = other DNA
ggttgaaggtgcgtatggtgcacagactgtggcaggcagtggtgaattacgtctgaacggcacgatgccggagcg

SEQ ID NO: 686347 - DNA, 75 bp, synthetic construct
  source 1..75: mol_type = other DNA
gccattttacgtttcgtattcaggcggcagggcttatgcgacatgtaagtaacggcaaggctacttataccagta

SEQ ID NO: 686348 - DNA, 75 bp, synthetic construct
  source 1..75: mol_type = other DNA
agaaaaatgtgaagaattctattttgttatttctgattgtttgtttttttccattcagtgtttttgcatggaata

SEQ ID NO: 686349 - DNA, 75 bp, synthetic construct
  source 1..75: mol_type = other DNA
gcgtgagggactttctcctcgggtaatttacggcaagggcgaggctaatttttctcttgtatggacagccccaag

SEQ ID NO: 686350 - DNA, 75 bp, synthetic construct
  source 1..75: mol_type = other DNA
taaaggcactggataaaaaaacagcatggttaaaaaataatcctagagctttccacttttatctcttccgggcgt

SEQ ID NO: 686351 - DNA, 75 bp, synthetic construct
  source 1..75: mol_type = other DNA
ttaatggaaaacaggctgcacatgatggtgataaaacaacctgcggagcaacgttgatagccagtcattttattg

SEQ ID NO: 686352 - DNA, 75 bp, synthetic construct
  source 1..75: mol_type = other DNA
acaacaaaacctcagttccagtcactcgcattgattttgaaaccaaatctggcaatgctgctgtaagccctggta

SEQ ID NO: 686353 - DNA, 75 bp, synthetic construct
  source 1..75: mol_type = other DNA
cgagtttgttttattggctctccattatttgacaaaaatgttctcacatttgatttctatgtaaagtgcttggct

SEQ ID NO: 686354 - DNA, 75 bp, synthetic construct
  source 1..75: mol_type = other DNA
tccgtaccgcatgacaccgaagaccgcgccttcctgcttgaacaggcaaaacaacaggccgccagcatgagagca

SEQ ID NO: 686355 - DNA, 75 bp, synthetic construct
  source 1..75: mol_type = other DNA
gataataaagagaaatattattttatctttgctatttttgataactggaaaggatggactaccgagcaggaatct

SEQ ID NO: 686356 - DNA, 75 bp, synthetic construct
  source 1..75: mol_type = other DNA
cagtgaacagcatattgccccgtcaacgtattaccactgtcagcaacagcgacatcatcctgataaacgcagtgc

SEQ ID NO: 686357 - DNA, 75 bp, synthetic construct
  source 1..75: mol_type = other DNA
agcaatgatatttcggcatttctggcagaaaacccggatacagaactgtccatggacgaatggttctgtgcagtg

SEQ ID NO: 686358 - DNA, 75 bp, synthetic construct
  source 1..75: mol_type = other DNA
gtggattacaactatctgaacacaaatacagctgtcgatcgcgtttataccggtggccaggcgttctacattact

SEQ ID NO: 686359 - DNA, 75 bp, synthetic construct
  source 1..75: mol_type = other DNA
gattacaactacctgaacaataatacttccgtcgatcgcgtttataccggtggtcactcgttctacatttctgtc

SEQ ID NO: 686360 - DNA, 75 bp, synthetic construct
  source 1..75: mol_type = other DNA
atcggtacagagctggaaagcgttaatggtatcctgaccgggcgcattacagggcacaattgtcgttgcatacag

SEQ ID NO: 686361 - DNA, 75 bp, synthetic construct
  source 1..75: mol_type = other DNA
ttgtcgtcttactggttcattgctcaggctccaggacggtgctggaaatgtggtcgggaaactgtaatgacatct

SEQ ID NO: 686362 - DNA, 75 bp, synthetic construct
  source 1..75: mol_type = other DNA
gagttcagcggcaggctctgcccaaaatgtcggtatccaaattttggaccgtacgggggaggtattaatacttga

SEQ ID NO: 686363 - DNA, 75 bp, synthetic construct
  source 1..75: mol_type = other DNA
atggatttcgataaaatcgcccaatcgttgcttcctttattaggtggtaaggagaacatcgccagtgcagcacat

SEQ ID NO: 686364 - DNA, 75 bp, synthetic construct
  source 1..75: mol_type = other DNA
gcgcaaggtggcaaaaaaatgctggtctggcaggaaaaagaggaattactcgccccagaggttttccacgcgctg

SEQ ID NO: 686365 - DNA, 75 bp, synthetic construct
  source 1..75: mol_type = other DNA
ctcagatgatggtgtcatttggcgagcagcttatggggaaagactatacgctcacgggcaacttgagaatgtcgt

SEQ ID NO: 686366 - DNA, 75 bp, synthetic construct
  source 1..75: mol_type = other DNA
gtgaaggcaaaatcgccctccacaccggagccatggggcagaccacgcgctaccgtcacggggcgttcgacctgc

SEQ ID NO: 686367 - DNA, 75 bp, synthetic construct
  source 1..75: mol_type = other DNA
ttgttacaccgcaccacccgccgtgtcaccattaccgaagaaggagagcggatttatgaatgggcgcagcggatt

SEQ ID NO: 686368 - DNA, 75 bp, synthetic construct
  source 1..75: mol_type = other DNA
cagttaagattcagtgcgaaacactttttccgcaagtatctgtgtatcacgaattatattaatcagagacttatg

SEQ ID NO: 686369 - DNA, 75 bp, synthetic construct
  source 1..75: mol_type = other DNA
atggcattaatcggagtgtatgcggattgggaaggcctggatggtcctgcgcgtattggttatttacacagtcgt

SEQ ID NO: 686370 - DNA, 75 bp, synthetic construct
  source 1..75: mol_type = other DNA
gttgttgagaaaaccggtccgtataacctgctgttcctgttcagcatcggtatcgataagaccaaagcactgagc

SEQ ID NO: 686371 - DNA, 75 bp, synthetic construct
  source 1..75: mol_type = other DNA
agcacatgtatcttgacccgatcaaagtcaccctgctgactccggggatggaaaaagacggcaccatgagcaact

SEQ ID NO: 686372 - DNA, 75 bp, synthetic construct
  source 1..75: mol_type = other DNA
tgaacaccctgcaacacctgccggacgggttcgcggtcatgaccgggctgggtgtggcccggatggcgttcagca

SEQ ID NO: 686373 - DNA, 75 bp, synthetic construct
  source 1..75: mol_type = other DNA
cgtgacggctaccgcccggaaacagagcggttccggtgggacagccgggaccagctgaccgggtattgcagcgca

SEQ ID NO: 686374 - DNA, 75 bp, synthetic construct
  source 1..75: mol_type = other DNA
gtatgttgatcctttgggattagcaacatgtcccataatcagacaacgggtgctggctaaccttgaagctagtcg

SEQ ID NO: 686375 - DNA, 75 bp, synthetic construct
  source 1..75: mol_type = other DNA
tctgtcaccttcagagataagccagaaacttcagtttaccagaactaatattacccgcattacagattttttaga

SEQ ID NO: 686376 - DNA, 75 bp, synthetic construct
  source 1..75: mol_type = other DNA
cccgctcgttgcgcccgttaggccaaattctgctggaaaatcaggtcatcactgaagaacaactcgatacagcac

SEQ ID NO: 686377 - DNA, 75 bp, synthetic construct
  source 1..75: mol_type = other DNA
aagcagtaaaggctgcgggaaagtctttatctgaagtagcccgtcgctttggttttaagtccactcaatccgtcg

SEQ ID NO: 686378 - DNA, 75 bp, synthetic construct
  source 1..75: mol_type = other DNA
tgctaataggcaataccgatatgcataatggcaacctatcgtttattagtagccacggacgcccatatcatattg

SEQ ID NO: 686379 - DNA, 75 bp, synthetic construct
  source 1..75: mol_type = other DNA
ttactgctatcggtaagcggaacattgcggaactgaagacgcgggatcttcttgtacccattaaagcagtcgagt

SEQ ID NO: 686380 - DNA, 75 bp, synthetic construct
  source 1..75: mol_type = other DNA
ctacattgagcctaaaactgggcgtctctactttaagaagctgaacaagaagcactacatcgacgaagagtctgt

SEQ ID NO: 686381 - DNA, 75 bp, synthetic construct
  source 1..75: mol_type = other DNA
agttccgggagtggccacacgtcagcgtgatgctcgatgaaattaaatatctgctgtcgaagtatgtactgaacg

SEQ ID NO: 686382 - DNA, 75 bp, synthetic construct
  source 1..75: mol_type = other DNA
tagcaacaaattggttagcaagttatttaccaagcttcgtggtgagttcacagcaaaggcatggaatggtcagcg

SEQ ID NO: 686383 - DNA, 75 bp, synthetic construct
  source 1..75: mol_type = other DNA
ctgtcattatgtcagtttatgatggagatgagccgtactattttgaaaaagctattcagagtatccaaaaacaaa

SEQ ID NO: 686384 - DNA, 75 bp, synthetic construct
  source 1..75: mol_type = other DNA
tatacttaaagttatgaaaatagaaagttacgaagatgtattaaatagccttcgatttgaacaacaaaaagaaat

SEQ ID NO: 686385 - DNA, 75 bp, synthetic construct
  source 1..75: mol_type = other DNA
ctggataaatatcgcaaagtaccgcccgagcctgttcatgctgatattccggtcggtgcagtgagtgatgtgaaa

SEQ ID NO: 686386 - DNA, 75 bp, synthetic construct
  source 1..75: mol_type = other DNA
aaggtcactgataatatggaggcgatgaaagaaattcatcttaacagtgacgagcaacatttatttggcagagct

SEQ ID NO: 686387 - DNA, 75 bp, synthetic construct
  source 1..75: mol_type = other DNA
gttcatatagatgactttgaatcaaaacatttgggcttaaccgatgctaatggtagtaggtttccagaagctgca

SEQ ID NO: 686388 - DNA, 75 bp, synthetic construct
  source 1..75: mol_type = other DNA
atataaccatcgaggacgagttaaaagtaatttcgctattacccatgaatatgctttatggaccttaccagaaaa

SEQ ID NO: 686389 - DNA, 75 bp, synthetic construct
  source 1..75: mol_type = other DNA
gaaaagtctgcttttgggactttagttagcatactacatccatactcagtgatgcgacttttggccgaaaatcca

SEQ ID NO: 686390 - DNA, 75 bp, synthetic construct
  source 1..75: mol_type = other DNA
tattctttcccgcgcctacagcagctaaccgcatcgcggaagatgcgcactatgtctaccgctacgatgaatacg

SEQ ID NO: 686391 - DNA, 75 bp, synthetic construct
  source 1..75: mol_type = other DNA
ataaaaatggatataaggattcttcatgggctacattaatggctgatagaatcattttatctaaaaaactattaa

SEQ ID NO: 686392 - DNA, 75 bp, synthetic construct
  source 1..75: mol_type = other DNA
agaagaagtttgttgtttctacggaatactgtattactttagatagaattccagatgctctttatcaaactatat

SEQ ID NO: 686393 - DNA, 75 bp, synthetic construct
  source 1..75: mol_type = other DNA
atgctttatggaccttaccagaaaataaagatgtaatatcgagacaagttgaaatatcagaagaaattaggcgta

SEQ ID NO: 686394 - DNA, 75 bp, synthetic construct
  source 1..75: mol_type = other DNA
ctggggcaacctgattaactttatggctaactggcgcgcgctgaaacaggttcttcagcacggcgatccgcgtcg

SEQ ID NO: 686395 - DNA, 75 bp, synthetic construct
  source 1..75: mol_type = other DNA
tgataaagcgaagcgggacccggcagcactgaatcaggcccgcgcagagcttgaggcagcaggaaagccgtttac

SEQ ID NO: 686396 - DNA, 75 bp, synthetic construct
  source 1..75: mol_type = other DNA
gagtaaaactcaggcaccatcgtcaaagattagcgtgtttaatttaactttgagtaagggagttatgaaagtcac

SEQ ID NO: 686397 - DNA, 75 bp, synthetic construct
  source 1..75: mol_type = other DNA
ctacttcacctattctcaagcgcgggaaatctcaacattttcaactgtaagaaacttgtcccatagtccacataa

SEQ ID NO: 686398 - DNA, 75 bp, synthetic construct
  source 1..75: mol_type = other DNA
gtggcgcaggtcttcggtgaacgcactctggccacactggcgcgtcttctgagcctgctgtcggcctttgaggtc

SEQ ID NO: 686399 - DNA, 75 bp, synthetic construct
  source 1..75: mol_type = other DNA
tcagcgattaatgtgctgctactgcgtcatgaacgcagctctctgccgctcggcaaatttttggttactgaaggt

SEQ ID NO: 686400 - DNA, 75 bp, synthetic construct
  source 1..75: mol_type = other DNA
aacaaatggacgatcagcagaaacaaatcgacgcgacgcaaaaaacggtttccgcacttggcgatggccagacca

SEQ ID NO: 686401 - DNA, 75 bp, synthetic construct
  source 1..75: mol_type = other DNA
gcaatacggtgaacaaattcgaaaccttgcgcaagactcggcccaggcacatgagcaaatcgaaagtctgacaca

SEQ ID NO: 686402 - DNA, 75 bp, synthetic construct
  source 1..75: mol_type = other DNA
caaaagatgattaatgccaaactgacggcgcaaaatgaagccaatgaacgttcaaccgctgatcaggagcagaga

SEQ ID NO: 686403 - DNA, 75 bp, synthetic construct
  source 1..75: mol_type = other DNA
acgcgttctgacacatacgcttaaccaggcgtggctcaccgccagcggtgaaggtgcggcgctgacagaaaaaca

SEQ ID NO: 686404 - DNA, 75 bp, synthetic construct
  source 1..75: mol_type = other DNA
ttaacgaggcgataaaacgctttccaccttacgaaggtgcacttattgatttattaaatcttcttgagaaaacag

SEQ ID NO: 686405 - DNA, 75 bp, synthetic construct
  source 1..75: mol_type = other DNA
tcttttaatgccggaacgcatacggtacttaaagcaggtatttctgcggatacacaatctgatttcggtgcgggt

SEQ ID NO: 686406 - DNA, 75 bp, synthetic construct
  source 1..75: mol_type = other DNA
gctgtaatgtttgtgttcgcagcgataacatccaacggtttgaatgaaagaggcctgattaccgcgggatgctct

SEQ ID NO: 686407 - DNA, 75 bp, synthetic construct
  source 1..75: mol_type = other DNA
tattgtcggtggagattttaaattccaagattattattcaaccacaactcagcctgaaaataaacctgttgtttt

SEQ ID NO: 686408 - DNA, 75 bp, synthetic construct
  source 1..75: mol_type = other DNA
tcttgttgcagacagcaccagagaaaaaaacagacttgaaaaatctgtttttactgaaccgccccgggtttcctg

SEQ ID NO: 686409 - DNA, 75 bp, synthetic construct
  source 1..75: mol_type = other DNA
atcacccagtttgagcgaagcgccaatttcgcctttgcgggttttattctgcatgacgccgaagatgtgatttcg

SEQ ID NO: 686410 - DNA, 75 bp, synthetic construct
  source 1..75: mol_type = other DNA
gcatcagcctttaccgccgctatgacaaccgtggccggttaatctcggtgaaagacgcacagggccatgaaacgc

SEQ ID NO: 686411 - DNA, 75 bp, synthetic construct
  source 1..75: mol_type = other DNA
catgcctacaatcgactggtaaaaaaagatcctgatacgggagagttatcgctgcgtatgcatatctcccgtcat

SEQ ID NO: 686412 - DNA, 75 bp, synthetic construct
  source 1..75: mol_type = other DNA
catatactgaagtgtatgccgccggatgaagcgtactggtgtacgccggaacggctgcataagctggcagttcgt

SEQ ID NO: 686413 - DNA, 75 bp, synthetic construct
  source 1..75: mol_type = other DNA
tgaatcccttacggtgcgaagcagtttaccagaggtaaacacctccggtgctgaaacccccgatttgtcacgttt

SEQ ID NO: 686414 - DNA, 75 bp, synthetic construct
  source 1..75: mol_type = other DNA
ttaagcgcagctatttaggcggagatttggcgcagtggagtagcaacgcgcaggatcgctggcatcttggcgtga

SEQ ID NO: 686415 - DNA, 75 bp, synthetic construct
  source 1..75: mol_type = other DNA
aggcctgattaccgcgggatgctcttttcttggtaatgactccaacttattgatagtgttttatgttcagataat

SEQ ID NO: 686416 - DNA, 75 bp, synthetic construct
  source 1..75: mol_type = other DNA
gctacggcggatcaccattcgtgatcgtccaaaacgagctacgcggtcaactacatctcatgatcgctccagacg

SEQ ID NO: 686417 - DNA, 75 bp, synthetic construct
  source 1..75: mol_type = other DNA
gaatatacagatggttaatttaattgataaagccagtattgacaaagtgtataaaattaattttttagtaaatga

SEQ ID NO: 686418 - DNA, 75 bp, synthetic construct
  source 1..75: mol_type = other DNA
gtggtgcgcctgtgtctggtatttctgtaaacggtaaaaatggtggctcgagcagtttcgggacttacatgtcag

SEQ ID NO: 686419 - DNA, 75 bp, synthetic construct
  source 1..75: mol_type = other DNA
aaatgaactgatacaggaagccagtgtgccgcatccggcgtttatgccgacgacgatgaaggtgttgagacaatg

SEQ ID NO: 686420 - DNA, 75 bp, synthetic construct
  source 1..75: mol_type = other DNA
cgggcgaccgggcggatgacgatctctatagcgcgctgatgacagtgagaagcgccttcctggacaccatgtccc

SEQ ID NO: 686421 - DNA, 75 bp, synthetic construct
  source 1..75: mol_type = other DNA
ttcctttatcccggcaggctatttacattctggaaaatatacgtggcctgcatgatgaactggtgttcccttcac

SEQ ID NO: 686422 - DNA, 75 bp, synthetic construct
  source 1..75: mol_type = other DNA
tgaagcggcagaaaagaacgcaaacaactatacagacaataaaattactgatgccaaaaatgaactcaatacgaa

SEQ ID NO: 686423 - DNA, 75 bp, synthetic construct
  source 1..75: mol_type = other DNA
tgtaaacggtaaaaatggtggctcgagcagtttcgggacttacatgtcagcttccggaggctatagcggaggcca

SEQ ID NO: 686424 - DNA, 75 bp, synthetic construct
  source 1..75: mol_type = other DNA
gccgttaccgacagtgccgccgcgggggataccgttggcaccaactatctgaagctggttagtacgacggttgcc

SEQ ID NO: 686425 - DNA, 75 bp, synthetic construct
  source 1..75: mol_type = other DNA
ctttccggttccgccgacaacggccgttcgtttgaatttaccctgatggtcattgagtcggggttaaaggtcttt

SEQ ID NO: 686426 - DNA, 75 bp, synthetic construct
  source 1..75: mol_type = other DNA
tggctggagaccgcgcggacgatgatatgtataacgcgcttctcgccgtcagatcggcattcctttctacgatga

SEQ ID NO: 686427 - DNA, 75 bp, synthetic construct
  source 1..75: mol_type = other DNA
gttcgtttgagtttaccctgatggtgattgagtcggggttaaaggtcttcgccattacagacagcaccgccgcgg

SEQ ID NO: 686428 - DNA, 75 bp, synthetic construct
  source 1..75: mol_type = other DNA
cttccctgatgggcggaggcggtagtgaggactggctgggtcaattacggccaggctccttccgtggcgtgccct

SEQ ID NO: 686429 - DNA, 75 bp, synthetic construct
  source 1..75: mol_type = other DNA
gctaaggggagtggtacgctcattcaccccacgctgggggagatgaccgtttccatacctgagaacgggttaagg

SEQ ID NO: 686430 - DNA, 75 bp, synthetic construct
  source 1..75: mol_type = other DNA
agtctggcgatggggggggcctggcggcgattcaatccttggtgcgggggctgggtcacaagccattgtaggcga

SEQ ID NO: 686431 - DNA, 75 bp, synthetic construct
  source 1..75: mol_type = other DNA
aaacattcttcagagcattaagcccttacgactacacactgtattgcaggaagtgggtaaaaccaaatctgactt

SEQ ID NO: 686432 - DNA, 75 bp, synthetic construct
  source 1..75: mol_type = other DNA
atggtgccggggcagcagtatgatgaggagtccggcctgtattacaaccgccaccgctattatgacccgctgcag

SEQ ID NO: 686433 - DNA, 75 bp, synthetic construct
  source 1..75: mol_type = other DNA
agccaggttttaaatacgctacgcgagaaagaacattttaaattcacgactttcgatgatgtcgacgatgcaacc

SEQ ID NO: 686434 - DNA, 75 bp, synthetic construct
  source 1..75: mol_type = other DNA
cgaaaaaatcgatagagatcgtcagtaccgaagatgagattaaaatcaccgcgaagaaaaaaataacgattaatg

SEQ ID NO: 686435 - DNA, 75 bp, synthetic construct
  source 1..75: mol_type = other DNA
gaggatcatttactcaatctgaggaaaagatataaagcctcaattggtaagggggcatcgcgggagattgaaact

SEQ ID NO: 686436 - DNA, 75 bp, synthetic construct
  source 1..75: mol_type = other DNA
accaaatcgcctaccttaaccgcgctatgtcagacggtaatggcctcatcgaaatcggtgagttggctcggggtc

SEQ ID NO: 686437 - DNA, 75 bp, synthetic construct
  source 1..75: mol_type = other DNA
gcccagtcggctgaaaacgccacgctgaaggatgttgagggcaacgagtacatcgatttcgccgcaggcattgcg

SEQ ID NO: 686438 - DNA, 75 bp, synthetic construct
  source 1..75: mol_type = other DNA
tgatgattgccgatgaagtgcaaagcggctttgcgcgtaccggtaaactgtttgccatggatcactacgccgata

SEQ ID NO: 686439 - DNA, 75 bp, synthetic construct
  source 1..75: mol_type = other DNA
agccggatttgatgactatggcgaaaagccttgcgggtgggatgccactttcgggcgtggtcggcaacgcaaaca

SEQ ID NO: 686440 - DNA, 75 bp, synthetic construct
  source 1..75: mol_type = other DNA
ggcaggaattaaaaattaaaatgagcaatgggtccagtgcgaatatcagaataatgccattgccaaatggaaaga

SEQ ID NO: 686441 - DNA, 75 bp, synthetic construct
  source 1..75: mol_type = other DNA
aggtacaaaaaaatcgaaaagagttttatacactgtagagtgcaattcagagagtgcggcattaaaatttataaa

SEQ ID NO: 686442 - DNA, 75 bp, synthetic construct
  source 1..75: mol_type = other DNA
tcagtggaataattaactttaaggagcttctgacacccggtgtgattcgtttacctccggtaacttattttgtag

SEQ ID NO: 686443 - DNA, 75 bp, synthetic construct
  source 1..75: mol_type = other DNA
aacgtcattaaacacaaacgtgcgccttaacgtttcatgggattcatctcataacactgttcttggcgcaggttt

SEQ ID NO: 686444 - DNA, 75 bp, synthetic construct
  source 1..75: mol_type = other DNA
ctggggcaacctgattaacttcatggccaactggcgcgcgttaaaacaggtacttcaacacggcgatccacgtcg

SEQ ID NO: 686445 - DNA, 75 bp, synthetic construct
  source 1..75: mol_type = other DNA
ctggtggaaatggaggcgacggtcagtccggaaatatcggcgtcagcggtgaaggcggaacatcgcactggggcg

SEQ ID NO: 686446 - DNA, 75 bp, synthetic construct
  source 1..75: mol_type = other DNA
cagcaatccggaaagaatcgttcgccgtaaacatgttcccgaaccggtcagacttgcgggtcacgatgaggcaac

SEQ ID NO: 686447 - DNA, 75 bp, synthetic construct
  source 1..75: mol_type = other DNA
cggtgatgcagaatgccgcagtggggcagtcaacaacacccgcgcagagctccggctggccttccgtcacgcatc

SEQ ID NO: 686448 - DNA, 75 bp, synthetic construct
  source 1..75: mol_type = other DNA
tccggcactgtttgttcagaatctgggattgaaaacgactgttgataaagctgcatcagcgattcagccaggaga

SEQ ID NO: 686449 - DNA, 75 bp, synthetic construct
  source 1..75: mol_type = other DNA
gttggtggatacgtgaagtgggcctgtttgatgagtcaggggaattgattgccgtggggaactgcccggaaagct

SEQ ID NO: 686450 - DNA, 75 bp, synthetic construct
  source 1..75: mol_type = other DNA
catgaagagtcgttatcgtgttgatgtttttaatggttctaaactttataaatcaaataagattacaagttatca

SEQ ID NO: 686451 - DNA, 75 bp, synthetic construct
  source 1..75: mol_type = other DNA
gtcctgaagatacattttgtcagtatggagatttgattgttattgatgaatcttggcgcatttgggatagtgata

SEQ ID NO: 686452 - DNA, 75 bp, synthetic construct
  source 1..75: mol_type = other DNA
cgggtaaaaaaccggtaaatcagtggcaggcaagtgatattgactggagccagagcgcgccacttgctgaactgg

SEQ ID NO: 686453 - DNA, 75 bp, synthetic construct
  source 1..75: mol_type = other DNA
ggattggtaaacaggtgccggtattcttcgattatgcaaaaagagaataccccaatgctgaaattaatgttgagt

SEQ ID NO: 686454 - DNA, 75 bp, synthetic construct
  source 1..75: mol_type = other DNA
atatggagttctgcgctaaaaaacaacgggtgtattttagtgataaaaacaagaaggctagttataaaataatta

SEQ ID NO: 686455 - DNA, 75 bp, synthetic construct
  source 1..75: mol_type = other DNA
gggatggcaaagaacttactgttgataatcgggctagcattttaggcaagaaaagtttgtattttgttgttcttg

SEQ ID NO: 686456 - DNA, 75 bp, synthetic construct
  source 1..75: mol_type = other DNA
aatgaccccgacacagaatagttatccagtcactatcggcgcaggtggggccggtggtgttagtgcgacgtacgg

SEQ ID NO: 686457 - DNA, 75 bp, synthetic construct
  source 1..75: mol_type = other DNA
ccttggggatgcgcagaagcaggccttccgcttccaccacatctccaccgatgaggtgtacggcgacctgcacgg

SEQ ID NO: 686458 - DNA, 75 bp, synthetic construct
  source 1..75: mol_type = other DNA
ccatctggttcgcgcctggaatcgcacctatggtctgccggtggtggtgactaactgctccaacaactatggtcc

SEQ ID NO: 686459 - DNA, 75 bp, synthetic construct
  source 1..75: mol_type = other DNA
acttggggaagtgcagaagcaagccttccgcttccaccacatctccaccgatgaggtgtacggcgacctgcacgg

SEQ ID NO: 686460 - DNA, 75 bp, synthetic construct
  source 1..75: mol_type = other DNA
ccagttcagcgagttccgtccggatatcgtgatgcacctcgctgcagaaagtcatgtggaccgttccattgatgg

SEQ ID NO: 686461 - DNA, 75 bp, synthetic construct
  source 1..75: mol_type = other DNA
caccgatgacctgttcaccgaagaaacgccgtacgccccgagcagcccgtactctgcctccaaagcgggcagcga

SEQ ID NO: 686462 - DNA, 75 bp, synthetic construct
  source 1..75: mol_type = other DNA
ctgtatgtcgaggaccatgcccgtgcgctgtataaagtggcgaccgaaggcaaaagcggcgagacctacaatatc

SEQ ID NO: 686463 - DNA, 75 bp, synthetic construct
  source 1..75: mol_type = other DNA
aaacgtgcgccttaatgtttcatgggattcagctcataacactgtacttggcgcaggttttgcgggtggctggta

SEQ ID NO: 686464 - DNA, 75 bp, synthetic construct
  source 1..75: mol_type = other DNA
gtgaatccgaaatactggccgcaacaccgaaggcagtgaaggctgtatatgaccttgcagcaggtaaggcacctg

SEQ ID NO: 686465 - DNA, 75 bp, synthetic construct
  source 1..75: mol_type = other DNA
atgattgtcgtttctgtgttggcgatgtcgtctgctgcggtaagcgcagccgagggtgatgaatcagtaacgacc

SEQ ID NO: 686466 - DNA, 75 bp, synthetic construct
  source 1..75: mol_type = other DNA
cgctactcgttttcccagactgatatcaccgatgtcgctgctgtggcgacccagttcagcgagttccgcccggat

SEQ ID NO: 686467 - DNA, 75 bp, synthetic construct
  source 1..75: mol_type = other DNA
caccgatgacctgttcaccgaagaaaccccgtacgcgccgagcagcccgtactctgcctccaaagcgggcagcga

SEQ ID NO: 686468 - DNA, 75 bp, synthetic construct
  source 1..75: mol_type = other DNA
ggatctactgactgagaaaagacgctctagtggcggcggattcatggaaattctcttggtgaagagacagaacat

SEQ ID NO: 686469 - DNA, 75 bp, synthetic construct
  source 1..75: mol_type = other DNA
gcaacaaaactcgcgctgcatcgcgcctatctttcacaacagcagacgccgccgtttgcaacgccggtctggcac

SEQ ID NO: 686470 - DNA, 75 bp, synthetic construct
  source 1..75: mol_type = other DNA
tgaaggagatgatgaatctgcttttgtccgtattcacgacaacgcgtatatcaacggtcgcaaacggctatatat

SEQ ID NO: 686471 - DNA, 75 bp, synthetic construct
  source 1..75: mol_type = other DNA
gggtaaaactgtcctgttccttgtgccaagcctagcattattgagtcagacactggatgaatggacgcaggatac

SEQ ID NO: 686472 - DNA, 75 bp, synthetic construct
  source 1..75: mol_type = other DNA
gccctgtatgcaaaaatcgttaaaaaatgcggtaaccgacatcactgggaggactgggctaacgatattgccaaa

SEQ ID NO: 686473 - DNA, 75 bp, synthetic construct
  source 1..75: mol_type = other DNA
aaagcatttctaaagtaattatccctataacaattttattatcatcagttatatattttagtagtggtttaattg

SEQ ID NO: 686474 - DNA, 75 bp, synthetic construct
  source 1..75: mol_type = other DNA
gctgaatgtaaatggtcagcaggttgaaacggtgggtattccaatccactggggctttgagggtgtcgcgcgtaa

SEQ ID NO: 686475 - DNA, 75 bp, synthetic construct
  source 1..75: mol_type = other DNA
ctacgaaacggtagataaatacccgctggagattgtcactaaagggagattgactgacgctgactaccgcgtgga

SEQ ID NO: 686476 - DNA, 75 bp, synthetic construct
  source 1..75: mol_type = other DNA
accagcaagttcataaccaccatgttgggggctgttggtgaactggagcgttctttcattcgtcaaagacaggca

SEQ ID NO: 686477 - DNA, 75 bp, synthetic construct
  source 1..75: mol_type = other DNA
cgggtgagcacactaacgaaaagattgctgagcttgccgggtgcggagtcgctactgtttaccgcatcaagaagg

SEQ ID NO: 686478 - DNA, 75 bp, synthetic construct
  source 1..75: mol_type = other DNA
ccaaagaggctgggaagttcaaagggcgacgagccaaagtttctcttcatgataaggttaaaactttgattgctg

SEQ ID NO: 686479 - DNA, 75 bp, synthetic construct
  source 1..75: mol_type = other DNA
gcgttagaggcattaaacctctgtttacaagcggtaaccgaacctggtgattgggtaatagtcgaaaatccttgt

SEQ ID NO: 686480 - DNA, 75 bp, synthetic construct
  source 1..75: mol_type = other DNA
tgattctcgttcttgctgttttgtgtctgactgcttgccaagctaactatgtaagagatgttcagggtggaacaa

SEQ ID NO: 686481 - DNA, 75 bp, synthetic construct
  source 1..75: mol_type = other DNA
gatctctgccaccagttggtcgtataccggcatggcctctatctgttatatgaccggcgaaattaaaaaccccgg

SEQ ID NO: 686482 - DNA, 75 bp, synthetic construct
  source 1..75: mol_type = other DNA
cgcgtcgggaaatgtcgcgtctggtactggaaaacgttgaggcatggttcgccggtttgccgctggtgacgccgg

SEQ ID NO: 686483 - DNA, 75 bp, synthetic construct
  source 1..75: mol_type = other DNA
ttgattctggcttaaaactaacatctaaaactgatgggaaatatcttttaaaagatacaatttttattgaaaata

SEQ ID NO: 686484 - DNA, 75 bp, synthetic construct
  source 1..75: mol_type = other DNA
acatatgcagaattaaaaacacttcaaccagaagaaggtgacttttatattatctatgaacctaatcatcctaac

SEQ ID NO: 686485 - DNA, 75 bp, synthetic construct
  source 1..75: mol_type = other DNA
ccatggaccatcgtgcctaaagattcagctggtgcagtatctttaaccaatactcgtcgtatttctgttgcagaa

SEQ ID NO: 686486 - DNA, 75 bp, synthetic construct
  source 1..75: mol_type = other DNA
atcaatggtagtgggtatattgttgctggaattattggtttacatatagtatctagaagaaattggattgtatgg

SEQ ID NO: 686487 - DNA, 75 bp, synthetic construct
  source 1..75: mol_type = other DNA
cagaagcggtactccacggattacgcccaattggtatggcttttttagggggtatgttctgcgccccccccgggc

SEQ ID NO: 686488 - DNA, 75 bp, synthetic construct
  source 1..75: mol_type = other DNA
gaatatttccacaaataataattttatagatggcaattacgaaaataaaatctcaattaagattgtatcatctaa

SEQ ID NO: 686489 - DNA, 75 bp, synthetic construct
  source 1..75: mol_type = other DNA
aggtacgacattcagttatgtcgatcttaatgatctggcgtcagtagaggggtttgagggccaatggaacgaaaa

SEQ ID NO: 686490 - DNA, 75 bp, synthetic construct
  source 1..75: mol_type = other DNA
aggtgtttggcatcatgcagtcttttaaccggcatattccggcagaagagcggttacgtcgctatggtgaagtcc

SEQ ID NO: 686491 - DNA, 75 bp, synthetic construct
  source 1..75: mol_type = other DNA
tacgccaggcgtattaaccgacgatgttgccgatctggcgatggggctcatgcttgccgtctcacgcaaaattgt

SEQ ID NO: 686492 - DNA, 75 bp, synthetic construct
  source 1..75: mol_type = other DNA
tttggtactcaggctgttgatcaacttaccgatgcatcgaacaacctaccgatgatcaaagaaagtcagcttaaa

SEQ ID NO: 686493 - DNA, 75 bp, synthetic construct
  source 1..75: mol_type = other DNA
ccgcccggtgtgggaaaccgccaaagatgccctgcaatttggtcaggatggtcacggcagcggcttcttctttac

SEQ ID NO: 686494 - DNA, 75 bp, synthetic construct
  source 1..75: mol_type = other DNA
tattaggggcgaaagatgatggcagcgataagcgcctcggtgatggacaaaccgcccgcccggtgtgggaaaccg

SEQ ID NO: 686495 - DNA, 75 bp, synthetic construct
  source 1..75: mol_type = other DNA
gatggcctacatcatgttgaatgcggcggatcagtttgagcgtatcaccggagagctacccgtaatcgtacatta

SEQ ID NO: 686496 - DNA, 75 bp, synthetic construct
  source 1..75: mol_type = other DNA
tttaagaaaatggcatagtagaataaaactacatcatatgttaatgatttttggtattcttatattcattaagtt

SEQ ID NO: 686497 - DNA, 75 bp, synthetic construct
  source 1..75: mol_type = other DNA
gggagacggaaaacagtgtcgtttctccatggcaggactgaaggccaacacgaataaagttcaggaggttcgttg

SEQ ID NO: 686498 - DNA, 75 bp, synthetic construct
  source 1..75: mol_type = other DNA
gagaaagtttcagtgccaaatatgccaagagtttctctgccagaactgatctacagttactgacataccgttatc

SEQ ID NO: 686499 - DNA, 75 bp, synthetic construct
  source 1..75: mol_type = other DNA
aattagttaatagtattgttatgaagaatacgggttttaattacgaaattcctgcaggaattttaagtaatatat

SEQ ID NO: 686500 - DNA, 75 bp, synthetic construct
  source 1..75: mol_type = other DNA
gtatcttaatgaaatggatttcactatgaatgggtttagtcagaagatatatttgatggcggttaataaaattga

SEQ ID NO: 686501 - DNA, 75 bp, synthetic construct
  source 1..75: mol_type = other DNA
gtggtgctgccatactacatgacagatataaggcagggggactcagtttgacgcagatgatgggggaactggggg

SEQ ID NO: 686502 - DNA, 75 bp, synthetic construct
  source 1..75: mol_type = other DNA
ggtggccaactccagttcccggatcaccattacccagagtggatacactatttattcgaaggttgtgccacctgg

SEQ ID NO: 686503 - DNA, 75 bp, synthetic construct
  source 1..75: mol_type = other DNA
tcaatttcgggcgctgggtgctggatagtaacatgagtgcgtcccggtattctgacggctcaggtgagttcactg

SEQ ID NO: 686504 - DNA, 75 bp, synthetic construct
  source 1..75: mol_type = other DNA
agtcaacaagacggatcccagtcgctgggattacggcgtaccggcagttcgcctgaagtactcagctaatgcctc

SEQ ID NO: 686505 - DNA, 75 bp, synthetic construct
  source 1..75: mol_type = other DNA
ggagaaagcggtggtctaccgtgagttcggagcgaaccatgtgaaacgttacttcctgcaggtcagggatgcgca

SEQ ID NO: 686506 - DNA, 75 bp, synthetic construct
  source 1..75: mol_type = other DNA
gacaaaggagaccagtaatacgctgggagtggtacgcattccgaatgtaaaaggtgtgcaggtgaatggttcggc

SEQ ID NO: 686507 - DNA, 75 bp, synthetic construct
  source 1..75: mol_type = other DNA
aatttatcttatggttttgatgctattcagaccaatatggcggtaacaaaagatcgagacgctacaacgttatca

SEQ ID NO: 686508 - DNA, 75 bp, synthetic construct
  source 1..75: mol_type = other DNA
tacttgttgcggtgttgagttaagtaaagatattcttaaaatattagcagataaaactaaaaaatatgagaccgc

SEQ ID NO: 686509 - DNA, 75 bp, synthetic construct
  source 1..75: mol_type = other DNA
gaaatcttcatgatgacgcccggcgaagtggttagctggcgcgagcgggcggcacttcgcagcgggaatgcagat

SEQ ID NO: 686510 - DNA, 75 bp, synthetic construct
  source 1..75: mol_type = other DNA
ttgtgcgcagtggctgtaaattttatgagcgagccagactctggcgcgaagagcgtgcaggagacggcagcgtaa

SEQ ID NO: 686511 - DNA, 75 bp, synthetic construct
  source 1..75: mol_type = other DNA
gatacttaatgataagggcttagatccttactgtgaaaaccctagcactgcgtggcttacacattggcgtctagc

SEQ ID NO: 686512 - DNA, 75 bp, synthetic construct
  source 1..75: mol_type = other DNA
aaaagtaaaaataatatattggcagaaaaagcatataatatttataaaacatatttacaacataaggatgttaaa

SEQ ID NO: 686513 - DNA, 75 bp, synthetic construct
  source 1..75: mol_type = other DNA
ctctggctggaacttcccgaaccgttagatgcgggagaattaagtgttcaggcactggcacatcacatcagtatt

SEQ ID NO: 686514 - DNA, 75 bp, synthetic construct
  source 1..75: mol_type = other DNA
ggagctggaacgttatgtccgacaacactctgcgggtatccgcagcaacggcattgagaaagtgctcgccggaga

SEQ ID NO: 686515 - DNA, 75 bp, synthetic construct
  source 1..75: mol_type = other DNA
acccgcacaacctgaataaatacatctggcgttttatcgccctgagcacggctaagccgcgcgtaatccacatcg

SEQ ID NO: 686516 - DNA, 75 bp, synthetic construct
  source 1..75: mol_type = other DNA
acattacacacaatcaacacaaaaagcaaagcccgctggcgctatgaacaccaacgggcttctaaccaaaccatt

SEQ ID NO: 686517 - DNA, 75 bp, synthetic construct
  source 1..75: mol_type = other DNA
cgttattttactaccggtaggatcgacgaacaaaactccaaaatcgataaagtcgcttttacatttttcggtgcc

SEQ ID NO: 686518 - DNA, 75 bp, synthetic construct
  source 1..75: mol_type = other DNA
acgctcatcaacatgtctgaggagttctggcgtatggcctgtaacacaacgaatgaaacttacaaccggcacaaa

SEQ ID NO: 686519 - DNA, 75 bp, synthetic construct
  source 1..75: mol_type = other DNA
tgaacgatattgctcgagtggcaggggtatcgcaggcaacggtatcactggtaattaatcagtcccgcaacatca

SEQ ID NO: 686520 - DNA, 75 bp, synthetic construct
  source 1..75: mol_type = other DNA
aatttttctggtggcactaagcgcggcgctggtggtggtatttttgttctggttagttcttcctcaagtctggcg

SEQ ID NO: 686521 - DNA, 75 bp, synthetic construct
  source 1..75: mol_type = other DNA
ctgtcggggcgaaacattgtttagagaatccgggaaaaattatgttggagcttatagaagttcgctccggctcct

SEQ ID NO: 686522 - DNA, 75 bp, synthetic construct
  source 1..75: mol_type = other DNA
gtaaatgatccaattttaatttgtaatgaaaagcacagatttattgcggcagagcagttacgtgcttctaaaatt

SEQ ID NO: 686523 - DNA, 75 bp, synthetic construct
  source 1..75: mol_type = other DNA
gatacatctaatagctatttacatactgaaagctgtctccttacaacgataggtataaatgatctcatcattgtg

SEQ ID NO: 686524 - DNA, 75 bp, synthetic construct
  source 1..75: mol_type = other DNA
tcgtcgttccattaaatgcacaatggagtgatgttgggtcatggtctgcattgtgggaaataagttcaaaagatc

SEQ ID NO: 686525 - DNA, 75 bp, synthetic construct
  source 1..75: mol_type = other DNA
agcagggtaagcttgttacgtttggtattattccaacatccccagagactggctatggttacattaagtcaggtg

SEQ ID NO: 686526 - DNA, 75 bp, synthetic construct
  source 1..75: mol_type = other DNA
gcggcttgataaggtcgaacataaacctgctttggtcatttgtaacgaatcacatcgctttatcgttgctgaaca

SEQ ID NO: 686527 - DNA, 75 bp, synthetic construct
  source 1..75: mol_type = other DNA
gtggttctggtactcgcttatggcctctttcgcgttcgttatacccgaaacaatttttatcattgattaatgaaa

SEQ ID NO: 686528 - DNA, 75 bp, synthetic construct
  source 1..75: mol_type = other DNA
tatctcggcgttgatctgccggcgaagttcaccgacttcggtggtcatcttatcgacgggctgataaatggcatc

SEQ ID NO: 686529 - DNA, 75 bp, synthetic construct
  source 1..75: mol_type = other DNA
ggctattacgttgggcgatcaattagctccatcttttatttccctggcgcaggagcttctccctctgattcaggg

SEQ ID NO: 686530 - DNA, 75 bp, synthetic construct
  source 1..75: mol_type = other DNA
tattccgctggaagtgttggagatccagtcggggtcgtacctcggcgaggacgacattattcgtattaaagacca

SEQ ID NO: 686531 - DNA, 75 bp, synthetic construct
  source 1..75: mol_type = other DNA
ggtttaaacagcgctgggctgacattcaggaagcctttaacggcggcatcgcgggaactggtaaactgctggtta

SEQ ID NO: 686532 - DNA, 75 bp, synthetic construct
  source 1..75: mol_type = other DNA
cctcctgtcattgttagcaataatgagcatagatttattgttgctgaacaattgcgacagttcggtgtggatgac

SEQ ID NO: 686533 - DNA, 75 bp, synthetic construct
  source 1..75: mol_type = other DNA
attgttgtctcggggacagctaaagttcatcttgaagataagacttaccttgtttctgaaaatgaatcaacatat

SEQ ID NO: 686534 - DNA, 75 bp, synthetic construct
  source 1..75: mol_type = other DNA
aaaccgactgtatgaattgctgaatggcacccgctttcgtgaggatttacagcgaacggcttttatggcgcccgc

SEQ ID NO: 686535 - DNA, 75 bp, synthetic construct
  source 1..75: mol_type = other DNA
tttgttgcatcactgtagtgactcgggttgtcgctggtgtttcattgtttaagaacaactacggaaaggtcaaac

SEQ ID NO: 686536 - DNA, 75 bp, synthetic construct
  source 1..75: mol_type = other DNA
ccaagcgggggatggagagtaccgcgtatccaagcaaagggttctactatttaggcggcctgactgaagggagcg

SEQ ID NO: 686537 - DNA, 75 bp, synthetic construct
  source 1..75: mol_type = other DNA
accagatggtagtggtgttcctgttctgggagtattcagggtaaaaagtggcacgcttgcgagaatactcaaatt

SEQ ID NO: 686538 - DNA, 75 bp, synthetic construct
  source 1..75: mol_type = other DNA
acgccgactatgcgaccgaagtgtccaacatgtcgaaagcgcagattatccagcaggcgggcaactccgtgctgt

SEQ ID NO: 686539 - DNA, 75 bp, synthetic construct
  source 1..75: mol_type = other DNA
gggttctattgcgagttataaagctgcggggatctctccgattgaagggatgttgagtgtgatagaacgttacct

SEQ ID NO: 686540 - DNA, 75 bp, synthetic construct
  source 1..75: mol_type = other DNA
gtgcgtaccagctccagtctgtcgtttatcagctatgaccaggcgctctccagcgagccggttgcgcctggcgcg

SEQ ID NO: 686541 - DNA, 75 bp, synthetic construct
  source 1..75: mol_type = other DNA
atagagtaaaaaaaataatagttaaaccaggagaagggttagatttaaggatgcatcatcatagggcagagcatt

SEQ ID NO: 686542 - DNA, 75 bp, synthetic construct
  source 1..75: mol_type = other DNA
tcgtcgttccattaaatgcgcaatggagtgatgtcgggtcatggtctgcattgtgggaaataagttcaaaagacc

SEQ ID NO: 686543 - DNA, 75 bp, synthetic construct
  source 1..75: mol_type = other DNA
cagcaaaaattcgatttagacgtagtgaccgcagcaaaagctgtggtggacgactatgaagaccatggtattgat

SEQ ID NO: 686544 - DNA, 75 bp, synthetic construct
  source 1..75: mol_type = other DNA
ctggcgctgattggcaccgatacgctggtgggtgataactgccagctactgatttccggggccgacgaacaggaa

SEQ ID NO: 686545 - DNA, 75 bp, synthetic construct
  source 1..75: mol_type = other DNA
catacggtgatccttgcccgttcgttcaacattccgacgctggttggtgtggatattgatgccctcactccgtgg

SEQ ID NO: 686546 - DNA, 75 bp, synthetic construct
  source 1..75: mol_type = other DNA
ccacataatcttcctaaacttgatattaattccgaagggcagatagaatgggggataagggatggtaatttagta

SEQ ID NO: 686547 - DNA, 75 bp, synthetic construct
  source 1..75: mol_type = other DNA
cgctatcggcctgcagcgcaccacaccacttgctgcactggccgggcagcgtctggccactgaaatgacaccgga

SEQ ID NO: 686548 - DNA, 75 bp, synthetic construct
  source 1..75: mol_type = other DNA
cgggaagtctggtttacttctttgtcaccacaacgatcgcgacctatgaagcgtggacagcgacgaaaaacaaaa

SEQ ID NO: 686549 - DNA, 75 bp, synthetic construct
  source 1..75: mol_type = other DNA
gatttggttagctgatgatgatgttgtttttgagcaaacatgtctgactcaattgatgctttattcttcagatgc

SEQ ID NO: 686550 - DNA, 75 bp, synthetic construct
  source 1..75: mol_type = other DNA
tcgctgggcaaagcggtgacgtcaacggaagtgatgacccggaccatcaaaatcaccgggattgggcgtccacac

SEQ ID NO: 686551 - DNA, 75 bp, synthetic construct
  source 1..75: mol_type = other DNA
tctggattttcttaataatgatttatataaaaatgatggagagattctctcttataaagaatcaataatgttgtt

SEQ ID NO: 686552 - DNA, 75 bp, synthetic construct
  source 1..75: mol_type = other DNA
tataacgtttattgcatgtttattttcacatgcaaacatgaaatgttcgacatttcatgatattaattttgatat

SEQ ID NO: 686553 - DNA, 75 bp, synthetic construct
  source 1..75: mol_type = other DNA
gtgattacctgccacagacaaattggccaacaactcaattaccaccaggatatacttgtgcagaaccctatttat

SEQ ID NO: 686554 - DNA, 75 bp, synthetic construct
  source 1..75: mol_type = other DNA
cgaaagaggccacatggagaatactgctccccctcactggtacgggagtaccgttacgacagcgcgggtaatgtg

SEQ ID NO: 686555 - DNA, 75 bp, synthetic construct
  source 1..75: mol_type = other DNA
ccctatgcttgctaacatggataaatacagggcaatccgctctggtgcacttaaagcggctgataatgacctgct

SEQ ID NO: 686556 - DNA, 75 bp, synthetic construct
  source 1..75: mol_type = other DNA
caggccgaagggattgcgatggatgcctctggtaatatttatatcgttagcgaaccaaatcgtttttatcgcttt

SEQ ID NO: 686557 - DNA, 75 bp, synthetic construct
  source 1..75: mol_type = other DNA
cgtttaacttcaacgacggcaaagagcaaaagcatttcccggttggcttccacgacgtcgatgacacggttgctg

SEQ ID NO: 686558 - DNA, 75 bp, synthetic construct
  source 1..75: mol_type = other DNA
tgagcaggcgaaaacgcagcgccgcagcctggcggatacccttcagcagtccggcggcgaagacggtggcagtgt

SEQ ID NO: 686559 - DNA, 75 bp, synthetic construct
  source 1..75: mol_type = other DNA
tgcggtcgccgcgtatctgctgtaccgctactgggggccgatctccgccttttttaaacgcttatgggcgcaggt

SEQ ID NO: 686560 - DNA, 75 bp, synthetic construct
  source 1..75: mol_type = other DNA
gctgaaagagcaggccattctcgaaaaggagatgaccggactcaaaaaagcacgccctgtcgcgtcccttctgtc

SEQ ID NO: 686561 - DNA, 75 bp, synthetic construct
  source 1..75: mol_type = other DNA
aaacacctgatcaggtggaaaaccgcgccttatatccccgccctgaaggacggggttttacggcgcaccggataa

SEQ ID NO: 686562 - DNA, 75 bp, synthetic construct
  source 1..75: mol_type = other DNA
atttgctacaggatatccgtcgctcggcttacgtttatcgcgtcgattgcggcggctgcaacgcctgtgaaatcg

SEQ ID NO: 686563 - DNA, 75 bp, synthetic construct
  source 1..75: mol_type = other DNA
catattgccgtactgttatcgacagatgaacttagtggtgcagcagaggacactgatcgtctttacagattccag

SEQ ID NO: 686564 - DNA, 75 bp, synthetic construct
  source 1..75: mol_type = other DNA
ttataaggatgaaaatactggtgatttcttagtcatgttatggaaatctgatactgatagtacgggctctttatt

SEQ ID NO: 686565 - DNA, 75 bp, synthetic construct
  source 1..75: mol_type = other DNA
cgatggaaaaacggggaatggaaacagaacgcggtgagcagaaccgtctgattaacagccttaacctggaaatac

SEQ ID NO: 686566 - DNA, 75 bp, synthetic construct
  source 1..75: mol_type = other DNA
gagggtaaatgcgtcagtgatatcaaactgatccacgatcaaatgctcaatgccaccctgtattactccggctct

SEQ ID NO: 686567 - DNA, 75 bp, synthetic construct
  source 1..75: mol_type = other DNA
cagaacttgctattgaactcgatgatatgacaattatcacagagaaattacgcgacatgaagaatgcgctttcaa

SEQ ID NO: 686568 - DNA, 75 bp, synthetic construct
  source 1..75: mol_type = other DNA
gtgaaattattgtgcgtaagtatttgcttttttttaatgagcggatggtatggtgaaaaattatattcgtttggt

SEQ ID NO: 686569 - DNA, 75 bp, synthetic construct
  source 1..75: mol_type = other DNA
cggcgatgcactgaaagccaaccgtatggccctttatggtcagggcgttgaaacctatgccatggcacaaacggt

SEQ ID NO: 686570 - DNA, 75 bp, synthetic construct
  source 1..75: mol_type = other DNA
cttggcgtcgttgcggggccacgtatcgcttttttgatgctggagcggatctcgcgtgattctaatgcctgggaa

SEQ ID NO: 686571 - DNA, 75 bp, synthetic construct
  source 1..75: mol_type = other DNA
atttgccagaaatcaacgaagatgaatcaattagacaaatactaaattattccacacagaataatctattgttcg

SEQ ID NO: 686572 - DNA, 75 bp, synthetic construct
  source 1..75: mol_type = other DNA
aaaataataatgcgcaggtaacgctgttaaatacacagttaagcgagtttgccccaaccatgccccataacgaag

SEQ ID NO: 686573 - DNA, 75 bp, synthetic construct
  source 1..75: mol_type = other DNA
agctaagaagctattagaatcacttgtacaagagtctggtagcttctctagtgtagaggaactgctttctacact

SEQ ID NO: 686574 - DNA, 75 bp, synthetic construct
  source 1..75: mol_type = other DNA
aggtcgggtaaccgcgctgacagacaatacgcagggggcagcaggtcttgagttatacgaggtgtataacaacgg

SEQ ID NO: 686575 - DNA, 75 bp, synthetic construct
  source 1..75: mol_type = other DNA
acaatctgtgaaggttatttttgcgggcgcttcgctgtccaatcatgatgatattttggctactcaaagttctgc

SEQ ID NO: 686576 - DNA, 75 bp, synthetic construct
  source 1..75: mol_type = other DNA
gcggatcagacagtccagcttggtcaggttcgcgcagctaagctagcaacagctggtgctacaagtggtgctgtt

SEQ ID NO: 686577 - DNA, 75 bp, synthetic construct
  source 1..75: mol_type = other DNA
ccggactccgccatcgaaaatcatatcagtcgagacatacttatgcctgctggtcgctgacagctggtgctaacc

SEQ ID NO: 686578 - DNA, 75 bp, synthetic construct
  source 1..75: mol_type = other DNA
agccaaaagatatatttaaaataactttaaatgcaactcctgaaactttaggaagagattttcaagaaagagacc

SEQ ID NO: 686579 - DNA, 75 bp, synthetic construct
  source 1..75: mol_type = other DNA
accaagcaaagttcctagctcatttggtgacgtaggtggttctgctttctccgaaataacaggcaaaggaatcga

SEQ ID NO: 686580 - DNA, 75 bp, synthetic construct
  source 1..75: mol_type = other DNA
gtagaagaaaatcagccaaaacatcatgtgatcgaaacacttagttatgcacaatacaaacctgatactgatagt

SEQ ID NO: 686581 - DNA, 75 bp, synthetic construct
  source 1..75: mol_type = other DNA
tagttgctttgaaagaatatttgccaggtgaatatagcacttcaatgttagccaaaaatataaagttttatacaa

SEQ ID NO: 686582 - DNA, 75 bp, synthetic construct
  source 1..75: mol_type = other DNA
cgagattgattgtaatgaggtggcggtgttggagattattctgcaggaactgaaccgccggtcaccctcaccctg

SEQ ID NO: 686583 - DNA, 75 bp, synthetic construct
  source 1..75: mol_type = other DNA
ctcaaagcggcaaaatatataataaaagaaaaattatatcggttggtactatagagataattgcagatgcaacct

SEQ ID NO: 686584 - DNA, 75 bp, synthetic construct
  source 1..75: mol_type = other DNA
gggttgtaacattaaattcggatactgcggcagagtatacgttaacaactggcactaacaaaattccgttccagg

SEQ ID NO: 686585 - DNA, 75 bp, synthetic construct
  source 1..75: mol_type = other DNA
aaacgcgtaacgttcgaaggtattccaccaaaagatgacaagagcagcagagttactgtttcaattcgtcaggat

SEQ ID NO: 686586 - DNA, 75 bp, synthetic construct
  source 1..75: mol_type = other DNA
cgctgcgcaacgtctggggctgaaacgcacgaccctgctgtcacggatgaagcggctgggaattgataaatcggc

SEQ ID NO: 686587 - DNA, 75 bp, synthetic construct
  source 1..75: mol_type = other DNA
aagatattccgctgctggcgaaagcctttaccttcaaaattgcccgtcgtctggggcgcaatatcgacagcattc

SEQ ID NO: 686588 - DNA, 75 bp, synthetic construct
  source 1..75: mol_type = other DNA
ggtgaacagcaaacgcgtaaaacagacaggctgggtgattgtggtgctggtcgtggcgctgaatatctggttgtt

SEQ ID NO: 686589 - DNA, 75 bp, synthetic construct
  source 1..75: mol_type = other DNA
cgggtgttatcaaacgacggattctatcttgtccccaactcccgtctgacttatggcgtaagcgtggctgggaat

SEQ ID NO: 686590 - DNA, 75 bp, synthetic construct
  source 1..75: mol_type = other DNA
aactactgcattaacaaacgctacggatacaaaagtcgagttttacccagccagccgatatggttatcgcggtaa

SEQ ID NO: 686591 - DNA, 75 bp, synthetic construct
  source 1..75: mol_type = other DNA
tattcattttttgcattttttcggtccttattggtatgtttttaaagtttgctaatgaacaggcaaaaaggaata

SEQ ID NO: 686592 - DNA, 75 bp, synthetic construct
  source 1..75: mol_type = other DNA
cactgttctgcctgtatcaaccgctgcaaaatgcctttatcagccgcgataatgtgaacaaagttgcaaaaaatg

SEQ ID NO: 686593 - DNA, 75 bp, synthetic construct
  source 1..75: mol_type = other DNA
ttgccataacgattacccggaaaccattacagactatgtcacactgcaacgaggttcggcttatggcggcgtgtt

SEQ ID NO: 686594 - DNA, 75 bp, synthetic construct
  source 1..75: mol_type = other DNA
agtggttgatgatattggcagtatatttggtcaaaatattgaagtaagctatatgaaatcagagttgcttgcatt

SEQ ID NO: 686595 - DNA, 75 bp, synthetic construct
  source 1..75: mol_type = other DNA
ggtgtcagaaacctgcatggaatcaggaaatatatgttcatttgagttgaagttaaaaatttacacgatagacag

SEQ ID NO: 686596 - DNA, 75 bp, synthetic construct
  source 1..75: mol_type = other DNA
atgataaaattcaacacttcacttattgtgtaaaaaaaatgtataatgcgacgactgctataaccgatgcagctc

SEQ ID NO: 686597 - DNA, 75 bp, synthetic construct
  source 1..75: mol_type = other DNA
ctgtggatttcaatttttgtgaaaacgatcaaaaaacaggcactcacaccacgcgctattctcgcctgatgccac

SEQ ID NO: 686598 - DNA, 75 bp, synthetic construct
  source 1..75: mol_type = other DNA
aatccctgctgaaaaccacgtaccgttataacgccgccggagaactgacggaggtcattctgccgggggatgaga

SEQ ID NO: 686599 - DNA, 75 bp, synthetic construct
  source 1..75: mol_type = other DNA
cctggcacctctatcccaaaatcttttgagattataactgctaatggtactttctgggtacacccaaatgctaca

SEQ ID NO: 686600 - DNA, 75 bp, synthetic construct
  source 1..75: mol_type = other DNA
atgagtgaaggaccaggcgggccacagggagcgaccgcaggcggtacgctggcaatgcgaatgcagtcgcagcgg

SEQ ID NO: 686601 - DNA, 75 bp, synthetic construct
  source 1..75: mol_type = other DNA
tataataaagatgtgttttttgatgttggactttttaatgaagtattagatagaaatcaagatattgattttcat

SEQ ID NO: 686602 - DNA, 75 bp, synthetic construct
  source 1..75: mol_type = other DNA
gtatttcttccttttatatttttgtcttatcatatttcttatggatgtggatcgttattatcttttttgaaaagg

SEQ ID NO: 686603 - DNA, 75 bp, synthetic construct
  source 1..75: mol_type = other DNA
cgttaccgctatgacgccgatggcctgtgtaccgccagggtcaacggcctggaggaaaccatcctctacagccgg

SEQ ID NO: 686604 - DNA, 75 bp, synthetic construct
  source 1..75: mol_type = other DNA
ctggggggaataacgatagccagctatcttctgccgccagcaggactgctgggaaaactggggaatctggcgaaa

SEQ ID NO: 686605 - DNA, 75 bp, synthetic construct
  source 1..75: mol_type = other DNA
tattcaatgaagcggaaatagctcatgccataaaatatgttgagggattgagagaaaaattcatgatgggactaa

SEQ ID NO: 686606 - DNA, 75 bp, synthetic construct
  source 1..75: mol_type = other DNA
gcgaaagcgtttcacgataaatgcgaaaactttagctttcgcgcttcaaatgaaacagcagtattaattactgct

SEQ ID NO: 686607 - DNA, 75 bp, synthetic construct
  source 1..75: mol_type = other DNA
taaaatgatgaatagctccagtgatctcatggggttgagaaggcagccccagaacttctggcggctatatcgcgg

SEQ ID NO: 686608 - DNA, 75 bp, synthetic construct
  source 1..75: mol_type = other DNA
aacatcaccgaccctgccggacagacgtggacacagcagtgcgatgaacgcggcctgccggtgagtctggtatcg

SEQ ID NO: 686609 - DNA, 75 bp, synthetic construct
  source 1..75: mol_type = other DNA
gcgggagtaccggctggaccggaacggtcaggtcacggcggtgacagcctcaggcaccgggctgggctatggcga

SEQ ID NO: 686610 - DNA, 75 bp, synthetic construct
  source 1..75: mol_type = other DNA
tggaaatcatgaaatcaattttaatggtaactatactgcacgactagcaaatcataaactctctgccggtgatac

SEQ ID NO: 686611 - DNA, 75 bp, synthetic construct
  source 1..75: mol_type = other DNA
aaactaaagtcgagttggttagtggcaagcatcaaggtctgttacggcgtttacagaaccgtgaaattgatttgc

SEQ ID NO: 686612 - DNA, 75 bp, synthetic construct
  source 1..75: mol_type = other DNA
gcagcctacagctacaatagatgaaccttccattttcacacgtaccggtccaggtgtattaggaatatgtaaacc

SEQ ID NO: 686613 - DNA, 75 bp, synthetic construct
  source 1..75: mol_type = other DNA
gcttatatcaggagtaagcgaagaccaggcaacattgatccctcactaatcatgaaggtaaagtatgagggttca

SEQ ID NO: 686614 - DNA, 75 bp, synthetic construct
  source 1..75: mol_type = other DNA
ctggcgccgccctctttgcccggttatggccaaccgtatttgcagcagaaaacggtcaccctaccttagggtgcc

SEQ ID NO: 686615 - DNA, 75 bp, synthetic construct
  source 1..75: mol_type = other DNA
ggattcgccacaatgggtatcgcccacgaaccgtggctattgtggttttcatgcctgctctcgggactcggcggc

SEQ ID NO: 686616 - DNA, 75 bp, synthetic construct
  source 1..75: mol_type = other DNA
tgaaggcttaagtaaattattaagctccggcttgactcgtacatatggccttggtgttgagcatcgaatggcttt

SEQ ID NO: 686617 - DNA, 75 bp, synthetic construct
  source 1..75: mol_type = other DNA
ttcgttccgacgaccagcttcctggacagtattgaaccccagtcagctcccggtcaacagggagatgatgtgata

SEQ ID NO: 686618 - DNA, 75 bp, synthetic construct
  source 1..75: mol_type = other DNA
ccttcatgcacgtcattccgttactgattgtcaacatggcatttcggatgactgggatgacgatcatggaaccag

SEQ ID NO: 686619 - DNA, 75 bp, synthetic construct
  source 1..75: mol_type = other DNA
cgtttttacctgccgaccagatcccagcattcaataaagcactggcaacattttcaggaagcatcgtatcgctca

SEQ ID NO: 686620 - DNA, 75 bp, synthetic construct
  source 1..75: mol_type = other DNA
atcggcttcggtcagttatgataatgccatagagaattatggaaatacgtaccatcttgttgtacgttgccaagc

SEQ ID NO: 686621 - DNA, 75 bp, synthetic construct
  source 1..75: mol_type = other DNA
actgccgacgatgtattcaactttttcaaagtaaaagaggaaggtgatgctatctctgaaatgcctaaaaaatat

SEQ ID NO: 686622 - DNA, 75 bp, synthetic construct
  source 1..75: mol_type = other DNA
tcagtggctggtttaaacagcgctgggcagacattcaggaagcctttaacggcggcattgtgggaattggtaagt

SEQ ID NO: 686623 - DNA, 75 bp, synthetic construct
  source 1..75: mol_type = other DNA
ttttcgtattggttgggtcgccgccggaaaacatgcacgtaaaattcaacgcttgcagttgatgagtacgctttc

SEQ ID NO: 686624 - DNA, 75 bp, synthetic construct
  source 1..75: mol_type = other DNA
ctggcccgctcacggggaaaaggcgccggtgtggcggttgctctgtctcttgctgctgtcacgtcagtcccggcc

SEQ ID NO: 686625 - DNA, 75 bp, synthetic construct
  source 1..75: mol_type = other DNA
gcggcactggctgatgatgcgccgggaaacacccgtacggtagcggccggtgaggtagtcaatggtgcggtgatc

SEQ ID NO: 686626 - DNA, 75 bp, synthetic construct
  source 1..75: mol_type = other DNA
gctctctcaccggtaacggcagggtggaaaaatcaggaagtggcacactcactgtcagcaacaccacactcaccc

SEQ ID NO: 686627 - DNA, 75 bp, synthetic construct
  source 1..75: mol_type = other DNA
gatgtgctgaccggacacacagccactaatacccgcgtggatgatggcggaacgctggatgtccgcaacggtggt

SEQ ID NO: 686628 - DNA, 75 bp, synthetic construct
  source 1..75: mol_type = other DNA
tcaggggcaggcagtgaacaccacgctgaatggtggcgaacagtggatgcatgagggggcgatagccacaggaac

SEQ ID NO: 686629 - DNA, 75 bp, synthetic construct
  source 1..75: mol_type = other DNA
caacaggaaccatcatcaacaccggcgcagaaggcggccctgattctgacaactcgtatacgggtcagaaggtcc

SEQ ID NO: 686630 - DNA, 75 bp, synthetic construct
  source 1..75: mol_type = other DNA
cttaccgccaggaaacgcagaactgcgtcaggctattgctcgtcgctatgccttacagggcatcactatttctcc

SEQ ID NO: 686631 - DNA, 75 bp, synthetic construct
  source 1..75: mol_type = other DNA
tagatgcgggcgaattaagcctggcggcactggcgcatcatatcagtattgcgccgggtaaaatgttttctaccg

SEQ ID NO: 686632 - DNA, 75 bp, synthetic construct
  source 1..75: mol_type = other DNA
caacggcgatgagcgtgattgaaaacttacctccagggaatgctgagcttcgtcaggctattgctcgtcgctatg

SEQ ID NO: 686633 - DNA, 75 bp, synthetic construct
  source 1..75: mol_type = other DNA
cgtgatccgtcggtcgttccgtttgcctcggcctttcccgacccgcgacttttccccctccaacaactaaaccgc

SEQ ID NO: 686634 - DNA, 75 bp, synthetic construct
  source 1..75: mol_type = other DNA
attaataaagacggggctcagctggtaaaagctggagcgcaggctaccggtagtgtggtgaataccggagcacag

SEQ ID NO: 686635 - DNA, 75 bp, synthetic construct
  source 1..75: mol_type = other DNA
gacgaacagcgacggtaacacggtggtgtggctgtctgaatattcagaaaacagcatcaatatcaacatggataa

SEQ ID NO: 686636 - DNA, 75 bp, synthetic construct
  source 1..75: mol_type = other DNA
cactacgttgttgatgtgctcgtcaacaacgagcgaacagggcgtgcgaatattgtcattacggaagaggatgaa

SEQ ID NO: 686637 - DNA, 75 bp, synthetic construct
  source 1..75: mol_type = other DNA
agtaacagtgtgggatatacccgaactggtggtacgacattcaataccagtgtatcggccatgccaaccggacgg

SEQ ID NO: 686638 - DNA, 75 bp, synthetic construct
  source 1..75: mol_type = other DNA
gttcggttttgaaaatatattgcgctatatcctgcggatcaaagggccggatggcagctacctgacgggaggtaa

SEQ ID NO: 686639 - DNA, 75 bp, synthetic construct
  source 1..75: mol_type = other DNA
gtgtggttgtctgagtattcagagaacagcatcaacatcaacatggataacgtgccggatgacatggaatttgag

SEQ ID NO: 686640 - DNA, 75 bp, synthetic construct
  source 1..75: mol_type = other DNA
gccaagagcttcacggacaggactgacctgcagctgctgacgtaccgctaccagagtaaagggtatgtggagttt

SEQ ID NO: 686641 - DNA, 75 bp, synthetic construct
  source 1..75: mol_type = other DNA
gagaaataaatctatcttcttaagagaaaactatacgtgggaaaaaacagcacttaaaacttgggaatatcttga

SEQ ID NO: 686642 - DNA, 75 bp, synthetic construct
  source 1..75: mol_type = other DNA
caaaacggacggtgataaaggctcaaccgacgttgaaggcgatctggcgcgtctgacgatcaaaaagagtggacg

SEQ ID NO: 686643 - DNA, 75 bp, synthetic construct
  source 1..75: mol_type = other DNA
ggtggatggtggacgtgcggaaaataccaccatcaataatggcggggtacagtcggtttttgccggtggtacagc

SEQ ID NO: 686644 - DNA, 75 bp, synthetic construct
  source 1..75: mol_type = other DNA
acggttcaccggaaactaatagcaaaggatacaccgtggtggggctgtcagattacagccagaaccgtattgata

SEQ ID NO: 686645 - DNA, 75 bp, synthetic construct
  source 1..75: mol_type = other DNA
tatctcttttagcactgagtatatactctcactttagtgttgcgactgaattaaacctagattttattcagggga

SEQ ID NO: 686646 - DNA, 75 bp, synthetic construct
  source 1..75: mol_type = other DNA
aagtagcatatgaggatcttccgtctgtgtataaatctgctgcattatttgtctacccttcctcttgtgagaatt

SEQ ID NO: 686647 - DNA, 75 bp, synthetic construct
  source 1..75: mol_type = other DNA
caacgcgcctggcaggcgctgctgcgttacctgcctgcggaggtgaaaatacaccataacgacagtggttatttt

SEQ ID NO: 686648 - DNA, 75 bp, synthetic construct
  source 1..75: mol_type = other DNA
gtgacactctggtgtttgtgggaatggtatcaacatccgggacaaagccgtttcacccgcagaccagtagatatt

SEQ ID NO: 686649 - DNA, 75 bp, synthetic construct
  source 1..75: mol_type = other DNA
ggcaaaacactgggtagcgactcacccgcaatttgtcagtggggcttttaagctcatcagtgcgctccttgcgat

SEQ ID NO: 686650 - DNA, 75 bp, synthetic construct
  source 1..75: mol_type = other DNA
gcagggaaaccacagcgcctgcaggactgactggtgccctgaatatgagtctgcatgagctggaaaaaatgctgg

SEQ ID NO: 686651 - DNA, 75 bp, synthetic construct
  source 1..75: mol_type = other DNA
ccacggcaatgagcgtgatcgaaaacctaccgccagggaatgccgagcttcgccaggctattgctcgccgctatg

SEQ ID NO: 686652 - DNA, 75 bp, synthetic construct
  source 1..75: mol_type = other DNA
caatgtctggtgcaggccggtttaattattcctgtcgcgcggctgcgtccggtgctgacgctcaaaaacagtgga

SEQ ID NO: 686653 - DNA, 75 bp, synthetic construct
  source 1..75: mol_type = other DNA
acgttgctgaagaaagctggctggaggaaaacctgccgtcagcgtttgcacagcattcgtggcgcagcgcgcttg

SEQ ID NO: 686654 - DNA, 75 bp, synthetic construct
  source 1..75: mol_type = other DNA
gctccggcactcttatgacaagagtcgccgcaggggagcgattcatgtcattagtgcgttctcaacaatgcacag

SEQ ID NO: 686655 - DNA, 75 bp, synthetic construct
  source 1..75: mol_type = other DNA
tagatactttgaaagaatatttgccaggtgaatataaaacttcaatgttagccaaaaacataaagttttatacaa

SEQ ID NO: 686656 - DNA, 75 bp, synthetic construct
  source 1..75: mol_type = other DNA
caacaataactaactcagatacaaagaaagaagccgttctggcaatcaataacgaagactcctacatatatcatg

SEQ ID NO: 686657 - DNA, 75 bp, synthetic construct
  source 1..75: mol_type = other DNA
atggtaaatctccctcctgaactggggtcacctgatgtatggactggtggaggtattgggctgattgcaggcctg

SEQ ID NO: 686658 - DNA, 75 bp, synthetic construct
  source 1..75: mol_type = other DNA
atggtaaatctccctcctgaactggggtcacctgatgtatgggctggtggaggtgttggactgcttgcaggcctg

SEQ ID NO: 686659 - DNA, 75 bp, synthetic construct
  source 1..75: mol_type = other DNA
tgggaaaaagatacacaacataatgcggaattaagaagagaatatagaaaaactatgagttctagcacaaaaagc

SEQ ID NO: 686660 - DNA, 75 bp, synthetic construct
  source 1..75: mol_type = other DNA
gaagcccgaaactcagccagagatcaactgcgtgaagcgtatatgcgcaagacgctacgtcaggcgaaaaaagag

SEQ ID NO: 686661 - DNA, 75 bp, synthetic construct
  source 1..75: mol_type = other DNA
aaaattaagttcgggtaaatcaggttatactttggtaggagggggtaagtatgttaatgaaatatattttaccaa

SEQ ID NO: 686662 - DNA, 75 bp, synthetic construct
  source 1..75: mol_type = other DNA
aatgcaaaaaactcagaaatatgttcattatatgaccacaatgcactcactgaacttatccgacgcaacgctcca

SEQ ID NO: 686663 - DNA, 75 bp, synthetic construct
  source 1..75: mol_type = other DNA
aagacgaagttatatggcagtacagcgtggataaagaaggcgtaccgggtagcgttgcaggaggtaagcagtgag

SEQ ID NO: 686664 - DNA, 75 bp, synthetic construct
  source 1..75: mol_type = other DNA
tctggagtccggcggtcgcctggatgtactggagggccattcagcgcagaaaacacgggtggatgacggcggtac

SEQ ID NO: 686665 - DNA, 75 bp, synthetic construct
  source 1..75: mol_type = other DNA
gaagcagaatggttttttgactcatggtatgcaaaatcagcagcaattgtttataaagaatcaagaaaagaagag

SEQ ID NO: 686666 - DNA, 75 bp, synthetic construct
  source 1..75: mol_type = other DNA
aactggctcccgccacctcttccctctcattaagtcagattatcgccgacaatacctcactgaccacggcgatga

SEQ ID NO: 686667 - DNA, 75 bp, synthetic construct
  source 1..75: mol_type = other DNA
gatcgtatatggtggagtacgctggcgaaaagcaatcttacatttttcaagttcggcgcacttaacaatcgccat

SEQ ID NO: 686668 - DNA, 75 bp, synthetic construct
  source 1..75: mol_type = other DNA
ttttgttgactcaatacgaatttgaaggtccattttgtcagccgccagaactcctgccaaatcgctatcgcgatc

SEQ ID NO: 686669 - DNA, 75 bp, synthetic construct
  source 1..75: mol_type = other DNA
tggtcgctgggccaatgggatatgaccttctcgctaatgatgggcgtgccgggaaggctctgagcgatgggcagt

SEQ ID NO: 686670 - DNA, 75 bp, synthetic construct
  source 1..75: mol_type = other DNA
acgaatggggaaacctgctgggcgaaaccagtgcgcagcaccttcaacagtcactccgtctgccggggcagcagt

SEQ ID NO: 686671 - DNA, 75 bp, synthetic construct
  source 1..75: mol_type = other DNA
ttccatacttactaggcgaaggtggtatacttgaagaaataaatgatctgaaaacgttacatgataccagaattg

SEQ ID NO: 686672 - DNA, 75 bp, synthetic construct
  source 1..75: mol_type = other DNA
gcctgcggctggcgggaatgccggaggccgatattcgccgcctgatcgccacgcaaaaaatccagactcgcttta

SEQ ID NO: 686673 - DNA, 75 bp, synthetic construct
  source 1..75: mol_type = other DNA
atgaagccaatttttagccgtggcccgtcgctacagattcgccttattctggcggtgctggtggcgctcggcatt

SEQ ID NO: 686674 - DNA, 75 bp, synthetic construct
  source 1..75: mol_type = other DNA
atactattcagatgctgcacgacgtgctggatgcgttcgcgcgcatggacattgacgaagccgtacgaatctatc

SEQ ID NO: 686675 - DNA, 75 bp, synthetic construct
  source 1..75: mol_type = other DNA
catgcacaatcaggatagcgatctggcgaagcgtgtgatcgaaggcgacaaaaacgtcaacatgatggaagtggc

SEQ ID NO: 686676 - DNA, 75 bp, synthetic construct
  source 1..75: mol_type = other DNA
ggcaagtgaaacgcgtttacgcgagatggaacgttatgtcacttccgacactttcacgttacgtagccgtttccg

SEQ ID NO: 686677 - DNA, 75 bp, synthetic construct
  source 1..75: mol_type = other DNA
acagcctgctgctaatcgctctccacaaagggctacgccgccgcaaagtggtgctcaaccgcctgcgcgtgcgcc

SEQ ID NO: 686678 - DNA, 75 bp, synthetic construct
  source 1..75: mol_type = other DNA
gaccagtcgcgtgctgctgatttgtgatgcgacccacgcgctgccaatccaggtgctgcgcaacgatatccgcgt

SEQ ID NO: 686679 - DNA, 75 bp, synthetic construct
  source 1..75: mol_type = other DNA
cccgtcgcgatgcggtaaaccgttacctctgggatgatgaaaacggcatctaccgcgattacgactggcgacgcg

SEQ ID NO: 686680 - DNA, 75 bp, synthetic construct
  source 1..75: mol_type = other DNA
cccccgcgagggcggcgggggcgaatatccgttgcaggatgggtttggctggaccaacggtgtggtacgtcgttt

SEQ ID NO: 686681 - DNA, 75 bp, synthetic construct
  source 1..75: mol_type = other DNA
tcgctatcgaaaagtgcgccgtcatcgggattttgacttacgccagttcgttgaaaatcatttctggctgccgaa

SEQ ID NO: 686682 - DNA, 75 bp, synthetic construct
  source 1..75: mol_type = other DNA
ctggctgaagacggtgaatcagttctatctggaacagcacaaactgatcgagaaataccatattgccgatggtgt

SEQ ID NO: 686683 - DNA, 75 bp, synthetic construct
  source 1..75: mol_type = other DNA
attactgacgccgggcgggattctggcaagcgagtatgaaaccggtgaacagtgggataaacccaacggctgggc

SEQ ID NO: 686684 - DNA, 75 bp, synthetic construct
  source 1..75: mol_type = other DNA
tggcggaaagcgggcgtgaagatttgctgaaatgcatggccgataacttcgcctggatgatcgaaaactatgggc

SEQ ID NO: 686685 - DNA, 75 bp, synthetic construct
  source 1..75: mol_type = other DNA
acccgatttgggataaccagttcatgactttgctggagcagggacgcatacaggaactggatgccgtcagtaacg

SEQ ID NO: 686686 - DNA, 75 bp, synthetic construct
  source 1..75: mol_type = other DNA
gatatttatgttcagaccgcttctgaaatcgcaaacactgatcctgatgttattcgtatgccgctgctggcaagt

SEQ ID NO: 686687 - DNA, 75 bp, synthetic construct
  source 1..75: mol_type = other DNA
aatgttaattacagacctgaatactttggaaagattaaggaattaagaaaacagattaactataactgtaaagtt

SEQ ID NO: 686688 - DNA, 75 bp, synthetic construct
  source 1..75: mol_type = other DNA
acgttaacggcagtaatattgacagagttaacaattaccgtagttatgggcgtgtttttgtacaagataattaaa

SEQ ID NO: 686689 - DNA, 75 bp, synthetic construct
  source 1..75: mol_type = other DNA
gatatcctagtatggtcaaacctgcataaggtacgtatatcagaaaaccgcctctcgcgtctgctgtataccgat

SEQ ID NO: 686690 - DNA, 75 bp, synthetic construct
  source 1..75: mol_type = other DNA
gccgcaacagccggttgcgccgcagccgcagtatcagcagccacaacagcaggttgcgccgcagccacaatatca

SEQ ID NO: 686691 - DNA, 75 bp, synthetic construct
  source 1..75: mol_type = other DNA
gacctcgacggatatgaacactcaggacgagagcgggagtataacagcagccaagccaaacaaagccgtgtgctt

SEQ ID NO: 686692 - DNA, 75 bp, synthetic construct
  source 1..75: mol_type = other DNA
gcgctgccggatgtggtgacctgtattgactgtcagcatattcgggaacgcaggaggaaaacgtgtcctgggaaa

SEQ ID NO: 686693 - DNA, 75 bp, synthetic construct
  source 1..75: mol_type = other DNA
ctgtttaccctggttgcttacatcattttgtcatttgcgcttgatccaatgcctgacaacatggcgtttggtgaa

SEQ ID NO: 686694 - DNA, 75 bp, synthetic construct
  source 1..75: mol_type = other DNA
gactttgctggagcagggacgcatacaggaactggatgccgtcagtaacgaagagctttccgccattgccggaaa

SEQ ID NO: 686695 - DNA, 75 bp, synthetic construct
  source 1..75: mol_type = other DNA
attgtattatcataactgattacggttttaatttaagtgcaactaaaaaaatcacattagcgaatgggaaggata

SEQ ID NO: 686696 - DNA, 75 bp, synthetic construct
  source 1..75: mol_type = other DNA
aaagcgatacaggagatacgcgaagagttgtcgcccgcgcaggaagacgcgcatggcagcgggtcgcggcagctg

SEQ ID NO: 686697 - DNA, 75 bp, synthetic construct
  source 1..75: mol_type = other DNA
gacccgcaaaattccctgaaagagcatatcgaccagctgtggccggtgctaacccgcgaaccacaggatcacatt

SEQ ID NO: 686698 - DNA, 75 bp, synthetic construct
  source 1..75: mol_type = other DNA
acctgacacaatccatcctggcaaaagcgttccgtggtgaacttaccgcccagtggcgggccgaaaacccggaat

SEQ ID NO: 686699 - DNA, 75 bp, synthetic construct
  source 1..75: mol_type = other DNA
tgaaacatcccctgcacttaataagcaatttgcttattatgcattattgaatattacagaggcacttaaagcatc

SEQ ID NO: 686700 - DNA, 75 bp, synthetic construct
  source 1..75: mol_type = other DNA
ccccctttaaaagaacaacacgaaatcgttcgccgcgtcgagcaactcttcgcctacgccgacgccatagaaaaa

SEQ ID NO: 686701 - DNA, 75 bp, synthetic construct
  source 1..75: mol_type = other DNA
atgttattctgttctttttgtgggtgtttttttactttttgtttcgtgcttacgaatatatcttacaaagagaac

SEQ ID NO: 686702 - DNA, 75 bp, synthetic construct
  source 1..75: mol_type = other DNA
atgagtgtttataaaaagtgtttgattatatttggcattgtggctgttttgctgacctcatgggcttttatgtgt

SEQ ID NO: 686703 - DNA, 75 bp, synthetic construct
  source 1..75: mol_type = other DNA
ctgcatgggaagaacaaaaaatcatcgctgaaaaactcgatacgctgctggcgcaggtagagagcaccaaagcac

SEQ ID NO: 686704 - DNA, 75 bp, synthetic construct
  source 1..75: mol_type = other DNA
acaaccttactacgctcctgcggcggaacaacctgttcagcagccgtattacacaactgcggcggaacagtctgc

SEQ ID NO: 686705 - DNA, 75 bp, synthetic construct
  source 1..75: mol_type = other DNA
tataacgatgatgaaatcgatgcgatgcagcaggatgaactggcacgtcagttcgcccagacacagcagcaacgc

SEQ ID NO: 686706 - DNA, 75 bp, synthetic construct
  source 1..75: mol_type = other DNA
ctatccataatttaggtgggatgcccggtgcgtggttggcagatacgctgttctttatttttggcgtgatggctt

SEQ ID NO: 686707 - DNA, 75 bp, synthetic construct
  source 1..75: mol_type = other DNA
ggattggtcgctggtcgatgctcgatctgtttgtcatttctttaactatgtcgctgatcaatcgcgatcagctcc

SEQ ID NO: 686708 - DNA, 75 bp, synthetic construct
  source 1..75: mol_type = other DNA
cagccagaagatgtgcgtttcatcatgatcgacccgaaaatgctggagctttcggtgtatgaaggcattccgcac

SEQ ID NO: 686709 - DNA, 75 bp, synthetic construct
  source 1..75: mol_type = other DNA
caccttctgttgcagcagtacctccagtggaagccgctgccgctgtttcccctctggcatctggcgtgaaaaaag

SEQ ID NO: 686710 - DNA, 75 bp, synthetic construct
  source 1..75: mol_type = other DNA
gcagtgacatcatgttgtatgccttctgcgccctgctggacgagagtgtgctgaaccgcgaaaaaacagacgatg

SEQ ID NO: 686711 - DNA, 75 bp, synthetic construct
  source 1..75: mol_type = other DNA
gaaggggcaggatttccgtcatgtaggcggtgatgagctggataaactgctggcgggaaaagatagcgacaaata

SEQ ID NO: 686712 - DNA, 75 bp, synthetic construct
  source 1..75: mol_type = other DNA
gtgcttaccacctttgcaataaaggagttgaagaaagcaaaagcattaaaagaccacttcatttcatgcgtggag

SEQ ID NO: 686713 - DNA, 75 bp, synthetic construct
  source 1..75: mol_type = other DNA
ctgagaaaggccggaatgccggtggtgaccacgaccgtggaggtgcacgataacctgacaggaacaacccgcaaa

SEQ ID NO: 686714 - DNA, 75 bp, synthetic construct
  source 1..75: mol_type = other DNA
ctggctgaaaacggtgaatcagttctatctggaacagcacaaactgatcgaaaaataccatattgccgatggtgt

SEQ ID NO: 686715 - DNA, 75 bp, synthetic construct
  source 1..75: mol_type = other DNA
atgtcaaactggccgtcgatttgattgtgctactggaagaaaatcagatcccagcccgcaccgtgctgcgcgcgc

SEQ ID NO: 686716 - DNA, 75 bp, synthetic construct
  source 1..75: mol_type = other DNA
ctgcgcgcgctggatattgtaaagcgtgattatgaaaagaagttacagagcgatgaggcttcacaaagcgagtaa

SEQ ID NO: 686717 - DNA, 75 bp, synthetic construct
  source 1..75: mol_type = other DNA
aatataattagagatataggtacaaatgcagcaataataagtagagatacaattagtcatcaattgaaaagtact

SEQ ID NO: 686718 - DNA, 75 bp, synthetic construct
  source 1..75: mol_type = other DNA
cccacgcctgggagtcgtttaccgccattacgctggcgtatgtattgattaacgcttttatcatgctggtgatga

SEQ ID NO: 686719 - DNA, 75 bp, synthetic construct
  source 1..75: mol_type = other DNA
ggttgccccaccggggccggaccggcgtgcgtcactgaaacggttgtatctgcagcagaactggttgtcactgct

SEQ ID NO: 686720 - DNA, 75 bp, synthetic construct
  source 1..75: mol_type = other DNA
gtggatcactattgcaccgttcgtgacacgatggaaaaagacgggtttgaagtacgaactcacgtcatgaatgat

SEQ ID NO: 686721 - DNA, 75 bp, synthetic construct
  source 1..75: mol_type = other DNA
tattacgaaaattttagtcggagcagttgtttacataacatgcttgttcatttgggaaagagatattatttttaa

SEQ ID NO: 686722 - DNA, 75 bp, synthetic construct
  source 1..75: mol_type = other DNA
tacgttattctaaatggagtccggtttttgtttttgatttcaatgaattgaaaagcatttttaatttcagttcaa

SEQ ID NO: 686723 - DNA, 75 bp, synthetic construct
  source 1..75: mol_type = other DNA
gtatgcgttaaaaagccctgtattgaaaacggatgcagcaaaaataaaaccattgaaatttgctgcatatgttca

SEQ ID NO: 686724 - DNA, 75 bp, synthetic construct
  source 1..75: mol_type = other DNA
tgctttaaaagctcctgtatgtaaaacagataatgcaagagtgaagccgctaaaacttgcaagccttatccagac

SEQ ID NO: 686725 - DNA, 75 bp, synthetic construct
  source 1..75: mol_type = other DNA
aaccggttgcaccgcagccgcaatatcagcagccgcaacagccagttgcgccgcagccgcaatatcagcagccgc

SEQ ID NO: 686726 - DNA, 75 bp, synthetic construct
  source 1..75: mol_type = other DNA
aaaggcctctgtcatggcacaaaggtgggtcgctctggaacctctggttctcgataccgagacgaccggacttgg

SEQ ID NO: 686727 - DNA, 75 bp, synthetic construct
  source 1..75: mol_type = other DNA
accaaccggactcgcgacacattgctccgcgaagcagcaaaacttgatcccgccaactatatggtgcatagggcc

SEQ ID NO: 686728 - DNA, 75 bp, synthetic construct
  source 1..75: mol_type = other DNA
gctacgttcaactctggatggaaaaagcacaacaactcagtaagcagctataccccgtcatgagagaactgaact

SEQ ID NO: 686729 - DNA, 75 bp, synthetic construct
  source 1..75: mol_type = other DNA
tctaaaaataccagtattaaaaacaaactctgcaaaaataaaaccactaagattagcttctgttgtgcagtgtgg

SEQ ID NO: 686730 - DNA, 75 bp, synthetic construct
  source 1..75: mol_type = other DNA
tcaggactggtcgccggaacaaattggcggttggctaaaacgctgttatcccgataatcaggaaatgcatgtgtc

SEQ ID NO: 686731 - DNA, 75 bp, synthetic construct
  source 1..75: mol_type = other DNA
gctatccagaaggaggctatgtttgaaggcgtaaatccagaggttgcacgtcagatcgctggtgggtgggctatg

SEQ ID NO: 686732 - DNA, 75 bp, synthetic construct
  source 1..75: mol_type = other DNA
cttttgttcgcgatcaggaagttcatgccgtggtgcaggactggaaagcgcgtggtcgcccacagtatgttgatg

SEQ ID NO: 686733 - DNA, 75 bp, synthetic construct
  source 1..75: mol_type = other DNA
tgccgtggtgcaagactggaaagcacgtggtcgtccacagtatgttgatggcatcacctccgatagtgacagcga

SEQ ID NO: 686734 - DNA, 75 bp, synthetic construct
  source 1..75: mol_type = other DNA
ctaaacgagggatgaataatgttggaaaaataaaaaatactgataccaaagaaaaattagaaaaagcattgagga

SEQ ID NO: 686735 - DNA, 75 bp, synthetic construct
  source 1..75: mol_type = other DNA
cggcttttgtcgggccgtcatctggtgatatttaactccagtttcgacagtaggatgttgaggcaaacagccagt

SEQ ID NO: 686736 - DNA, 75 bp, synthetic construct
  source 1..75: mol_type = other DNA
aactcctgaaagaaacactggaagaggaaaaagctactgatgtcaaattaacagacctggcatttaataacgtta

SEQ ID NO: 686737 - DNA, 75 bp, synthetic construct
  source 1..75: mol_type = other DNA
aggcgaatgaggtaattgaaagcactgataaaaatgaagtacgtgatgctgcattgattgctgcagcacaaaaag

SEQ ID NO: 686738 - DNA, 75 bp, synthetic construct
  source 1..75: mol_type = other DNA
acaactttcaatgatggatttgcgattagtgtgctgcagagtgatccggatgaagttgtcaaaatgctgggaatg

SEQ ID NO: 686739 - DNA, 75 bp, synthetic construct
  source 1..75: mol_type = other DNA
accttaaaaaagtctatcaaattgattcgaaagaaagcccaagcgtgcaattgtgtgatgttcttataggtgcat

SEQ ID NO: 686740 - DNA, 75 bp, synthetic construct
  source 1..75: mol_type = other DNA
atcctgagaagcattatcttttccctaatgatattttattacgtctgcggggacctgtgttttctgctgggatta

SEQ ID NO: 686741 - DNA, 72 bp, synthetic construct
  source 1..72: mol_type = other DNA
atgccaagaccaaaccttctcgcaccgctcatagttgccggtaccaccctgtgggtttataacggtcagggt

SEQ ID NO: 686742 - DNA, 75 bp, synthetic construct
  source 1..75: mol_type = other DNA
cgacagaggtgagaacgtattttgccttgcagaatgatggctctttcaccagtgatatcatcatggtagaagcac

SEQ ID NO: 686743 - DNA, 75 bp, synthetic construct
  source 1..75: mol_type = other DNA
atgacaacacaatcccaccatgaccacgtagaaaagcagtttagctctcaagccagcgaatatctgactagtacc

SEQ ID NO: 686744 - DNA, 75 bp, synthetic construct
  source 1..75: mol_type = other DNA
ggcgcgtggcggcggggatggaagctgatgctgcagctatatgtgaggcaatcagtagtcgctggagtaatggtg

SEQ ID NO: 686745 - DNA, 75 bp, synthetic construct
  source 1..75: mol_type = other DNA
ggggaagtgtttcacggtcacattgaaagcctttccccagcgacaggagccagtttcagcttgattccgatagaa

SEQ ID NO: 686746 - DNA, 75 bp, synthetic construct
  source 1..75: mol_type = other DNA
gatttattagtctgatgtgtgaaaaagaaccggagttgaaaatagcgcagcaactggtactcgagttctaccgta

SEQ ID NO: 686747 - DNA, 75 bp, synthetic construct
  source 1..75: mol_type = other DNA
tccagtggcgaatggttggcgttagtcaatgaagccagtctggttgttgataacttgatcaccgataaattgccg

SEQ ID NO: 686748 - DNA, 75 bp, synthetic construct
  source 1..75: mol_type = other DNA
taatcaaccaggctatgcgtaagtatgaagttcgaccgtctcagtacgtaattgcttccgaacacaccgtaatgt

SEQ ID NO: 686749 - DNA, 75 bp, synthetic construct
  source 1..75: mol_type = other DNA
tctcctgatctgtgggaagaaggaataaatgccgggctactaaactatagttttaatggtaattctattaataac

SEQ ID NO: 686750 - DNA, 75 bp, synthetic construct
  source 1..75: mol_type = other DNA
caggccttcaaccttggtattggtaaagatttaggactttttggtgccttttctttcgatattacgcaggccaat

SEQ ID NO: 686751 - DNA, 75 bp, synthetic construct
  source 1..75: mol_type = other DNA
agtttcagaaggaagtcgataatactaccgttctattggacgatattttaagcattctcgcgctgcttgaggctg

SEQ ID NO: 686752 - DNA, 75 bp, synthetic construct
  source 1..75: mol_type = other DNA
cggaagaccagcgaattgagtccggtatttcttccgccgcggcgatggagattatcagcaacagcacgatttccg

SEQ ID NO: 686753 - DNA, 75 bp, synthetic construct
  source 1..75: mol_type = other DNA
ttgttgttaccagctaacctgttgcctatctcgatcatttatctgaacggtggacgacaagaagatacgattctt

SEQ ID NO: 686754 - DNA, 75 bp, synthetic construct
  source 1..75: mol_type = other DNA
gttataacagtgggagtagcaattcatctgacagcaataaatggcagcatatcaatacgtcggctgaacgcgaca

SEQ ID NO: 686755 - DNA, 75 bp, synthetic construct
  source 1..75: mol_type = other DNA
cacccaatattggtggacaggagttgcagacactggagcagatgttggccctcaaaggattgagacactctgttt

SEQ ID NO: 686756 - DNA, 75 bp, synthetic construct
  source 1..75: mol_type = other DNA
gtttcttattacagaacaacatcttggatacctcacaagagaagataccctttaccagccacctcacttctatct

SEQ ID NO: 686757 - DNA, 75 bp, synthetic construct
  source 1..75: mol_type = other DNA
cagaccacttgctttgaaagctgcgagtataccgttcatccgacagtttcatctgtttatcaacaagaacagcca

SEQ ID NO: 686758 - DNA, 75 bp, synthetic construct
  source 1..75: mol_type = other DNA
gattggtggaatccctgaggttattcagaacaaccagaccgggacattgttaccagcaggtaataagcacgcatg

SEQ ID NO: 686759 - DNA, 75 bp, synthetic construct
  source 1..75: mol_type = other DNA
tcgctgattaatcgcgatcagatcctcgcttttactatgggaccggctgcattttatttcggcgcagcggtaatt

SEQ ID NO: 686760 - DNA, 75 bp, synthetic construct
  source 1..75: mol_type = other DNA
gaattgccagtgtggttgtcatgccttctgaaaacgaaacttttggcatggttctggcagaagctgcagcgtctg

SEQ ID NO: 686761 - DNA, 75 bp, synthetic construct
  source 1..75: mol_type = other DNA
acacaacatatagagggtgaaccacctctccacctcaaaatatgggatttgattctcgttgcggtggggctcagg

SEQ ID NO: 686762 - DNA, 75 bp, synthetic construct
  source 1..75: mol_type = other DNA
gttgcggcacgcagaacagtaaaatctgctgacatcgtgctgtatcacaaaccaggcattcccttagccgtgatt

SEQ ID NO: 686763 - DNA, 75 bp, synthetic construct
  source 1..75: mol_type = other DNA
cgcctgctgcgcccacacagcccgcagctaatcgctctccacaaagggctacgccgccgcaaagtggtgctcaac

SEQ ID NO: 686764 - DNA, 75 bp, synthetic construct
  source 1..75: mol_type = other DNA
tttatttctaatgctcctcgagaattgctggatggcgtatcgcagacgctggcctcgcgcgatcaactagaactt

SEQ ID NO: 686765 - DNA, 75 bp, synthetic construct
  source 1..75: mol_type = other DNA
ctttactgttgagcattcattttaaatgccagcaaggtttacgcacacgcattctgttactgcggatggtgacct

SEQ ID NO: 686766 - DNA, 75 bp, synthetic construct
  source 1..75: mol_type = other DNA
gatcgcaaagaagcgatcattcacgagctggaacaacaggggatcatctgggaagtactggcagaagaagtcggt

SEQ ID NO: 686767 - DNA, 75 bp, synthetic construct
  source 1..75: mol_type = other DNA
cgtttcgatggcattcccgaaaaagtcatggataccacaccagaggatatcgccgatccagaatctgattttgaa

SEQ ID NO: 686768 - DNA, 75 bp, synthetic construct
  source 1..75: mol_type = other DNA
aaataaaaaacgcattctgttccttgccgatcgcaacattctggtcgaccaaaccaaaaataatgatttccagcc

SEQ ID NO: 686769 - DNA, 75 bp, synthetic construct
  source 1..75: mol_type = other DNA
atggataaccgtaccgcgtttttaaacaccatcgcccaggcgctgggtcgcccgctgcgcttcgaaccgcaagcg

SEQ ID NO: 686770 - DNA, 75 bp, synthetic construct
  source 1..75: mol_type = other DNA
ataccccagtggtgtcaacaaaggcctatatcgatcccaccgcggtaatttgtggacgtgtcattattcatgatt

SEQ ID NO: 686771 - DNA, 75 bp, synthetic construct
  source 1..75: mol_type = other DNA
ttcagcaggaatactaacggcacttatgatattggcccaatgcagatcaactcatccaatctacctgaaataaaa

SEQ ID NO: 686772 - DNA, 75 bp, synthetic construct
  source 1..75: mol_type = other DNA
tcgatatggtagtggctatgtaccacgatcaggggcatatccctttaaaactgcttggattttatgatggggtga

SEQ ID NO: 686773 - DNA, 75 bp, synthetic construct
  source 1..75: mol_type = other DNA
aaactggtcgtactggatcagaacatccagtcaatgaccagattcaggcagattatcgggcgtggtacacgcata

SEQ ID NO: 686774 - DNA, 75 bp, synthetic construct
  source 1..75: mol_type = other DNA
tattcttttttattatagtagcagtttattttttaatgtttatactttctcttgatggcggtggacgacttagta

SEQ ID NO: 686775 - DNA, 75 bp, synthetic construct
  source 1..75: mol_type = other DNA
ccggacttaactctgtgctggattacattgacgcggtgacggcaacagataccagcaccgcgccggatgtcatct

SEQ ID NO: 686776 - DNA, 75 bp, synthetic construct
  source 1..75: mol_type = other DNA
cctgacttaacactgtgctggattacattgacgcggtgacggcaacagataccagcaccgcgccggatgtcatct

SEQ ID NO: 686777 - DNA, 75 bp, synthetic construct
  source 1..75: mol_type = other DNA
gtctacagcgccacgcgtgatatcacgctgcatccgctggcgttgccggacgtgtcattgcaatatgaaccggac

SEQ ID NO: 686778 - DNA, 75 bp, synthetic construct
  source 1..75: mol_type = other DNA
tgcgaaccatcccgtcactttccgtggttgaactgtcgacagatcaccggcagatgaagcagagcgaaacgctga

SEQ ID NO: 686779 - DNA, 75 bp, synthetic construct
  source 1..75: mol_type = other DNA
tcggtaacctcgcacatacaaccgggcagtgatgtgattgtctgcgctgaaatggacgaacagtggggctacgtc

SEQ ID NO: 686780 - DNA, 75 bp, synthetic construct
  source 1..75: mol_type = other DNA
cagcagaagcacagcgccagtcgctgattgatcctgcaatggcttccattagtctgattcaactgaaattacagg

SEQ ID NO: 686781 - DNA, 75 bp, synthetic construct
  source 1..75: mol_type = other DNA
tgagaaatgggtgacggatacggatgcacagcatagcgccgcagtagaagctgcagaagcacagcgccagtcact

SEQ ID NO: 686782 - DNA, 75 bp, synthetic construct
  source 1..75: mol_type = other DNA
tgagaaatgggtgacggataccgatgcacagcatagcggcgcagtagaagctgcagaagcacagcgccagtcact

SEQ ID NO: 686783 - DNA, 75 bp, synthetic construct
  source 1..75: mol_type = other DNA
cggcagaagcacagcgccagtcgctgattgattctgcaatggcttccattagtctgattcaactgaaatttcagg

SEQ ID NO: 686784 - DNA, 75 bp, synthetic construct
  source 1..75: mol_type = other DNA
ccgcagaagcacagcgccagtcgctgattgatgctgcaatggcttccattagtctgattcaactgaaattccagg

SEQ ID NO: 686785 - DNA, 75 bp, synthetic construct
  source 1..75: mol_type = other DNA
ctgcagaagcacagcgccagtcgctgattgatactgcaatggcttccattagtctgattcaactgaaatttcagg

SEQ ID NO: 686786 - DNA, 75 bp, synthetic construct
  source 1..75: mol_type = other DNA
gctattaccacacgcgggtaaagcgcggcccttccggcctgcatgatacctggctgattctgggcggcgatgcgt

SEQ ID NO: 686787 - DNA, 75 bp, synthetic construct
  source 1..75: mol_type = other DNA
acccgcatgctcggtgaagtgattggccgtttcgccagctcgctgaataagcgcgtgctgtttttaggctccggc

SEQ ID NO: 686788 - DNA, 75 bp, synthetic construct
  source 1..75: mol_type = other DNA
tcgctttgcgcataatgcaacaagttaaggccaccggaagtccggttctggatgtggcgcataactttgttagcg

SEQ ID NO: 686789 - DNA, 75 bp, synthetic construct
  source 1..75: mol_type = other DNA
caggggccggaagaatgttgtctcgcagtgaaaaaggcgctggagcgattaattaaagaagctgcccgacaagac

SEQ ID NO: 686790 - DNA, 75 bp, synthetic construct
  source 1..75: mol_type = other DNA
gctgggttaattattcctgtcgcgcgactgcgtccggtgctgacgctcaaaaacagtggagggaaaaaaggatga

SEQ ID NO: 686791 - DNA, 75 bp, synthetic construct
  source 1..75: mol_type = other DNA
tccgcactggtggaagcgtcaaccgcttattcccacccttctgtcacaggaactgaaaaactatctgaagcttaa

SEQ ID NO: 686792 - DNA, 75 bp, synthetic construct
  source 1..75: mol_type = other DNA
caagacggaatgggctatatgctggcggaaattgagcgtggcgctgatgccgtaggcggcattccctctactgcg

SEQ ID NO: 686793 - DNA, 75 bp, synthetic construct
  source 1..75: mol_type = other DNA
taccgacgccaacagccagttgctgctgaaactgtataccgaagatgccgcagaagcacgtggctggctgcccga

SEQ ID NO: 686794 - DNA, 75 bp, synthetic construct
  source 1..75: mol_type = other DNA
ataatgttactgcgaatagtgacctggattggccgctggtcgatgctggatctgtttgtcatttctttaaccatg

SEQ ID NO: 686795 - DNA, 75 bp, synthetic construct
  source 1..75: mol_type = other DNA
ctggtttaatgaattcatcaccaccgggccacatggtgttggcaatgttcccgcttatctgggtcggcgtagttt

SEQ ID NO: 686796 - DNA, 75 bp, synthetic construct
  source 1..75: mol_type = other DNA
ctggtttaatgaattcatcaccaccgggccgcatggtgtggtgttggcaatgtttccgcttatctgggtcggcgt

SEQ ID NO: 686797 - DNA, 75 bp, synthetic construct
  source 1..75: mol_type = other DNA
tgagaaatgggtgacggataccgatgcacagcatagcgtcgcagtagaagcagcagaagcacagcgccagtcact

SEQ ID NO: 686798 - DNA, 75 bp, synthetic construct
  source 1..75: mol_type = other DNA
ccggtgggattgagtttaactggccgcaacaccatcgcccgaccacctttatgcccgttgatttcaccctcgaag

SEQ ID NO: 686799 - DNA, 75 bp, synthetic construct
  source 1..75: mol_type = other DNA
cgcgtctataacggcaacgccacgccgcgtcatttcttgtggtgggccaacccggcagtgaaagggggggaaggg

SEQ ID NO: 686800 - DNA, 75 bp, synthetic construct
  source 1..75: mol_type = other DNA
gagccgatgcacggtttacaggtgatgaccggtttcacgctgcgccctgaccgtgccgcactggaaatcgccagc

SEQ ID NO: 686801 - DNA, 75 bp, synthetic construct
  source 1..75: mol_type = other DNA
tgaacaaaaatccgcagtgcggacaggcgagtttgattcgcgccagtgcttacgaacgtcaggggcaatatcaac

SEQ ID NO: 686802 - DNA, 75 bp, synthetic construct
  source 1..75: mol_type = other DNA
ggggctgtatgccatctctccgttgaacggataccgcctggcgatccgcgaaatcggcaaatgcaacgcgttact

SEQ ID NO: 686803 - DNA, 75 bp, synthetic construct
  source 1..75: mol_type = other DNA
tatcaaagtgatgatcctgccggagttgggcggtcgggtgcatcgcgcttgggataaagtgaaacagcgcgattt

SEQ ID NO: 686804 - DNA, 75 bp, synthetic construct
  source 1..75: mol_type = other DNA
catcagagcgttttcccgccggatgtaacggcggtgtttgatcacggcaaacgggcagtgtctgcttttcccatc

SEQ ID NO: 686805 - DNA, 75 bp, synthetic construct
  source 1..75: mol_type = other DNA
gccggcgtatcaccagaaaagcgacttacacgtctggaagcgcatcttgatgttgccctgaaacgtgatgacatg

SEQ ID NO: 686806 - DNA, 75 bp, synthetic construct
  source 1..75: mol_type = other DNA
acctggcaccgggcgtaaaagcagcgcgcatttctaacttgtcacgtgaccttgcccgttcactttcgacggtgg

SEQ ID NO: 686807 - DNA, 75 bp, synthetic construct
  source 1..75: mol_type = other DNA
gctgcattacccggagaatttgagcgaaggccgtttaccggggcagactgataacgacatctggttctggcaggc

SEQ ID NO: 686808 - DNA, 75 bp, synthetic construct
  source 1..75: mol_type = other DNA
ctgattaactggggcatgcccgccctggcggcagagatgctgaacgcactggactgtcagcgcacgctaccgctt

SEQ ID NO: 686809 - DNA, 75 bp, synthetic construct
  source 1..75: mol_type = other DNA
cgcgtcatttcttgtggtgggccaacccggcagtgaaagggggtgaagggcatcagagcgttttcccgccggatg

SEQ ID NO: 686810 - DNA, 75 bp, synthetic construct
  source 1..75: mol_type = other DNA
ccggcgctggtggggctgctgggaccgtggatctccggcgggattgagtttaactggccgcaacaccatcgcccg

SEQ ID NO: 686811 - DNA, 75 bp, synthetic construct
  source 1..75: mol_type = other DNA
tgaaacgaggcgttaggtggacggccattttgataagtgatcgtccgctttttgttctgagttcaagcgatggat

SEQ ID NO: 686812 - DNA, 75 bp, synthetic construct
  source 1..75: mol_type = other DNA
caggctggtgatcctgattctctgctggggcttccggttgaatatctggaatttatgccagacggtgtgattgca

SEQ ID NO: 686813 - DNA, 75 bp, synthetic construct
  source 1..75: mol_type = other DNA
cgacggtgataaaaaatccaaaggcttcctgtcttaccctcgcgcggccactgccgacaaaacccgtccgttcgg

SEQ ID NO: 686814 - DNA, 75 bp, synthetic construct
  source 1..75: mol_type = other DNA
tgagaaatgggtgacggatactgatgcacagcatagcgacgcagtagaagcggcagaagcacagcgccagtcact

SEQ ID NO: 686815 - DNA, 75 bp, synthetic construct
  source 1..75: mol_type = other DNA
atgcgtcccgcgactatcgcccccttatcgccatacgataaatgggatggtgagaaatgggtgacggatactgaa

SEQ ID NO: 686816 - DNA, 75 bp, synthetic construct
  source 1..75: mol_type = other DNA
atgcgtcccgcgactatcgcccctttaccgccatacgataaatgggatggtgagaaatgggtgacggatactgaa

SEQ ID NO: 686817 - DNA, 75 bp, synthetic construct
  source 1..75: mol_type = other DNA
atggcgggacaacagctgtttcggtgtccgaaatcgtacaattctgtacatctacgcaagggaatgtacggaagt

SEQ ID NO: 686818 - DNA, 75 bp, synthetic construct
  source 1..75: mol_type = other DNA
gaaaatgagagcaaaaaaaaagaacaagtaataaataatgtgaaaatgagcagtaaaatcgtggatacgataaac

SEQ ID NO: 686819 - DNA, 75 bp, synthetic construct
  source 1..75: mol_type = other DNA
catcagagcgttttcccaccggatgtgactgcggtgtttgatcacggcaaacgggccgtctctgctttccccatc

SEQ ID NO: 686820 - DNA, 75 bp, synthetic construct
  source 1..75: mol_type = other DNA
atctacgcctacccgaaaaccactcaggagattctcgacttctccgaggtggatattttgggctggctgtcttct

SEQ ID NO: 686821 - DNA, 75 bp, synthetic construct
  source 1..75: mol_type = other DNA
atcacggactgtattttgcggttttagggccgttaattggtgttctgtttcttgtcctctacatattcttcgcaa

SEQ ID NO: 686822 - DNA, 75 bp, synthetic construct
  source 1..75: mol_type = other DNA
agcaaaaaaccgccctgaaaaaccagatgcgatccctgctggaaaaagccgacagtgaaaaccgcagtctgaacg

SEQ ID NO: 686823 - DNA, 75 bp, synthetic construct
  source 1..75: mol_type = other DNA
gtggcagccagtatgccgtgctggccgcattttatcaggtgctgaaagccagcccgaagaaccaactaccgcgtg

SEQ ID NO: 686824 - DNA, 75 bp, synthetic construct
  source 1..75: mol_type = other DNA
cggcaccgcccacgtggataatgcaaccggcccccaactggcagacaccgctgaacgggattatttcatcctcag
